United States Patent Application Publication US 2023/0192864 A1 - sequence listing, part 2

SEQ ID NO: 21081 - RNA, 19 nt, synthetic construct
  misc_feature 1..19: note = siRNA antisense sequence
  source 1..19: mol_type = other RNA
cattttggattcccattcc

SEQ ID NO: 21082 - RNA, 19 nt, synthetic construct
  misc_feature 1..19: note = siRNA sense sequence
  source 1..19: mol_type = other RNA
ggaatccaaaatgaatcaa

SEQ ID NO: 21083 - RNA, 19 nt, synthetic construct
  misc_feature 1..19: note = siRNA antisense sequence
  source 1..19: mol_type = other RNA
ttgattcattttggattcc

SEQ ID NO: 21084 - RNA, 19 nt, synthetic construct
  misc_feature 1..19: note = siRNA sense sequence
  source 1..19: mol_type = other RNA
aactacaggcttaaattac

SEQ ID NO: 21085 - RNA, 19 nt, synthetic construct
  misc_feature 1..19: note = siRNA antisense sequence
  source 1..19: mol_type = other RNA
gtaatttaagcctgtagtt

SEQ ID NO: 21086 - RNA, 19 nt, synthetic construct
  misc_feature 1..19: note = siRNA sense sequence
  source 1..19: mol_type = other RNA
actacaggcttaaattact

SEQ ID NO: 21087 - RNA, 19 nt, synthetic construct
  misc_feature 1..19: note = siRNA antisense sequence
  source 1..19: mol_type = other RNA
agtaatttaagcctgtagt

SEQ ID NO: 21088 - RNA, 19 nt, synthetic construct
  misc_feature 1..19: note = siRNA sense sequence
  source 1..19: mol_type = other RNA
ctacaggcttaaattacta

SEQ ID NO: 21089 - RNA, 19 nt, synthetic construct
  misc_feature 1..19: note = siRNA antisense sequence
  source 1..19: mol_type = other RNA
tagtaatttaagcctgtag

SEQ ID NO: 21090 - RNA, 19 nt, synthetic construct
  misc_feature 1..19: note = siRNA sense sequence
  source 1..19: mol_type = other RNA
ctattgcagttgtttcaca

SEQ ID NO: 21091 - RNA, 19 nt, synthetic construct
  misc_feature 1..19: note = siRNA antisense sequence
  source 1..19: mol_type = other RNA
tgtgaaacaactgcaatag

SEQ ID NO: 21092 - RNA, 19 nt, synthetic construct
  misc_feature 1..19: note = siRNA sense sequence
  source 1..19: mol_type = other RNA
tattgcagttgtttcacat

SEQ ID NO: 21093 - RNA, 19 nt, synthetic construct
  misc_feature 1..19: note = siRNA antisense sequence
  source 1..19: mol_type = other RNA
atgtgaaacaactgcaata

SEQ ID NO: 21094 - RNA, 19 nt, synthetic construct
  misc_feature 1..19: note = siRNA sense sequence
  source 1..19: mol_type = other RNA
attgcagttgtttcacata

SEQ ID NO: 21095 - RNA, 19 nt, synthetic construct
  misc_feature 1..19: note = siRNA antisense sequence
  source 1..19: mol_type = other RNA
tatgtgaaacaactgcaat

SEQ ID NO: 21096 - RNA, 19 nt, synthetic construct
  misc_feature 1..19: note = siRNA sense sequence
  source 1..19: mol_type = other RNA
tactgaattatggaggcac

SEQ ID NO: 21097 - RNA, 19 nt, synthetic construct
  misc_feature 1..19: note = siRNA antisense sequence
  source 1..19: mol_type = other RNA
gtgcctccataattcagta

SEQ ID NO: 21098 - RNA, 19 nt, synthetic construct
  misc_feature 1..19: note = siRNA sense sequence
  source 1..19: mol_type = other RNA
actgaattatggaggcaca

SEQ ID NO: 21099 - RNA, 19 nt, synthetic construct
  misc_feature 1..19: note = siRNA antisense sequence
  source 1..19: mol_type = other RNA
tgtgcctccataattcagt

SEQ ID NO: 21100 - RNA, 19 nt, synthetic construct
  misc_feature 1..19: note = siRNA sense sequence
  source 1..19: mol_type = other RNA
ctgaattatggaggcacac

SEQ ID NO: 21101 - RNA, 19 nt, synthetic construct
  misc_feature 1..19: note = siRNA antisense sequence
  source 1..19: mol_type = other RNA
gtgtgcctccataattcag

SEQ ID NO: 21102 - RNA, 19 nt, synthetic construct
  misc_feature 1..19: note = siRNA sense sequence
  source 1..19: mol_type = other RNA
tgaattatggaggcacact

SEQ ID NO: 21103 - RNA, 19 nt, synthetic construct
  misc_feature 1..19: note = siRNA antisense sequence
  source 1..19: mol_type = other RNA
agtgtgcctccataattca

SEQ ID NO: 21104 - RNA, 19 nt, synthetic construct
  misc_feature 1..19: note = siRNA sense sequence
  source 1..19: mol_type = other RNA
gaattatggaggcacactg

SEQ ID NO: 21105 - RNA, 19 nt, synthetic construct
  misc_feature 1..19: note = siRNA antisense sequence
  source 1..19: mol_type = other RNA
cagtgtgcctccataattc

SEQ ID NO: 21106 - RNA, 19 nt, synthetic construct
  misc_feature 1..19: note = siRNA sense sequence
  source 1..19: mol_type = other RNA
aattatggaggcacactga

SEQ ID NO: 21107 - RNA, 19 nt, synthetic construct
  misc_feature 1..19: note = siRNA antisense sequence
  source 1..19: mol_type = other RNA
tcagtgtgcctccataatt

SEQ ID NO: 21108 - RNA, 19 nt, synthetic construct
  misc_feature 1..19: note = siRNA sense sequence
  source 1..19: mol_type = other RNA
attatggaggcacactgat

SEQ ID NO: 21109 - RNA, 19 nt, synthetic construct
  misc_feature 1..19: note = siRNA antisense sequence
  source 1..19: mol_type = other RNA
atcagtgtgcctccataat

SEQ ID NO: 21110 - RNA, 19 nt, synthetic construct
  misc_feature 1..19: note = siRNA sense sequence
  source 1..19: mol_type = other RNA
ggaggcacactgatatttt

SEQ ID NO: 21111 - RNA, 19 nt, synthetic construct
  misc_feature 1..19: note = siRNA antisense sequence
  source 1..19: mol_type = other RNA
aaaatatcagtgtgcctcc

SEQ ID NO: 21112 - RNA, 19 nt, synthetic construct
  misc_feature 1..19: note = siRNA sense sequence
  source 1..19: mol_type = other RNA
ttaaaatggcccaaagtgg

SEQ ID NO: 21113 - RNA, 19 nt, synthetic construct
  misc_feature 1..19: note = siRNA antisense sequence
  source 1..19: mol_type = other RNA
ccactttgggccattttaa

SEQ ID NO: 21114 - RNA, 19 nt, synthetic construct
  misc_feature 1..19: note = siRNA sense sequence
  source 1..19: mol_type = other RNA
taaaatggcccaaagtggt

SEQ ID NO: 21115 - RNA, 19 nt, synthetic construct
  misc_feature 1..19: note = siRNA antisense sequence
  source 1..19: mol_type = other RNA
accactttgggccatttta

SEQ ID NO: 21116 - RNA, 19 nt, synthetic construct
  misc_feature 1..19: note = siRNA sense sequence
  source 1..19: mol_type = other RNA
aaatggcccaaagtggttt

SEQ ID NO: 21117 - RNA, 19 nt, synthetic construct
  misc_feature 1..19: note = siRNA antisense sequence
  source 1..19: mol_type = other RNA
aaaccactttgggccattt

SEQ ID NO: 21118 - RNA, 19 nt, synthetic construct
  misc_feature 1..19: note = siRNA sense sequence
  source 1..19: mol_type = other RNA
aagtggtttgcctcataac

SEQ ID NO: 21119 - RNA, 19 nt, synthetic construct
  misc_feature 1..19: note = siRNA antisense sequence
  source 1..19: mol_type = other RNA
gttatgaggcaaaccactt

SEQ ID NO: 21120 - RNA, 19 nt, synthetic construct
  misc_feature 1..19: note = siRNA sense sequence
  source 1..19: mol_type = other RNA
agtggtttgcctcataact

SEQ ID NO: 21121 - RNA, 19 nt, synthetic construct
  misc_feature 1..19: note = siRNA antisense sequence
  source 1..19: mol_type = other RNA
agttatgaggcaaaccact

SEQ ID NO: 21122 - RNA, 19 nt, synthetic construct
  misc_feature 1..19: note = siRNA sense sequence
  source 1..19: mol_type = other RNA
gtggtttgcctcataactt

SEQ ID NO: 21123 - RNA, 19 nt, synthetic construct
  misc_feature 1..19: note = siRNA antisense sequence
  source 1..19: mol_type = other RNA
aagttatgaggcaaaccac

SEQ ID NO: 21124 - RNA, 19 nt, synthetic construct
  misc_feature 1..19: note = siRNA sense sequence
  source 1..19: mol_type = other RNA
tggtttgcctcataactta

SEQ ID NO: 21125 - RNA, 19 nt, synthetic construct
  misc_feature 1..19: note = siRNA antisense sequence
  source 1..19: mol_type = other RNA
taagttatgaggcaaacca

SEQ ID NO: 21126 - RNA, 19 nt, synthetic construct
  misc_feature 1..19: note = siRNA sense sequence
  source 1..19: mol_type = other RNA
ggtttgcctcataacttaa

SEQ ID NO: 21127 - RNA, 19 nt, synthetic construct
  misc_feature 1..19: note = siRNA antisense sequence
  source 1..19: mol_type = other RNA
ttaagttatgaggcaaacc

SEQ ID NO: 21128 - RNA, 19 nt, synthetic construct
  misc_feature 1..19: note = siRNA sense sequence
  source 1..19: mol_type = other RNA
gtttgcctcataacttaaa

SEQ ID NO: 21129 - RNA, 19 nt, synthetic construct
  misc_feature 1..19: note = siRNA antisense sequence
  source 1..19: mol_type = other RNA
tttaagttatgaggcaaac

SEQ ID NO: 21130 - RNA, 19 nt, synthetic construct
  misc_feature 1..19: note = siRNA sense sequence
  source 1..19: mol_type = other RNA
taaccatggatttaagagt

SEQ ID NO: 21131 - RNA, 19 nt, synthetic construct
  misc_feature 1..19: note = siRNA antisense sequence
  source 1..19: mol_type = other RNA
actcttaaatccatggtta

SEQ ID NO: 21132 - RNA, 19 nt, synthetic construct
  misc_feature 1..19: note = siRNA sense sequence
  source 1..19: mol_type = other RNA
aaccatggatttaagagtc

SEQ ID NO: 21133 - RNA, 19 nt, synthetic construct
  misc_feature 1..19: note = siRNA antisense sequence
  source 1..19: mol_type = other RNA
gactcttaaatccatggtt

SEQ ID NO: 21134 - RNA, 19 nt, synthetic construct
  misc_feature 1..19: note = siRNA sense sequence
  source 1..19: mol_type = other RNA
accatggatttaagagtca

SEQ ID NO: 21135 - RNA, 19 nt, synthetic construct
  misc_feature 1..19: note = siRNA antisense sequence
  source 1..19: mol_type = other RNA
tgactcttaaatccatggt

SEQ ID NO: 21136 - RNA, 19 nt, synthetic construct
  misc_feature 1..19: note = siRNA sense sequence
  source 1..19: mol_type = other RNA
ccatggatttaagagtcaa

SEQ ID NO: 21137 - RNA, 19 nt, synthetic construct
  misc_feature 1..19: note = siRNA antisense sequence
  source 1..19: mol_type = other RNA
ttgactcttaaatccatgg

SEQ ID NO: 21138 - RNA, 19 nt, synthetic construct
  misc_feature 1..19: note = siRNA sense sequence
  source 1..19: mol_type = other RNA
ggatttaagagtcaataag

SEQ ID NO: 21139 - RNA, 19 nt, synthetic construct
  misc_feature 1..19: note = siRNA antisense sequence
  source 1..19: mol_type = other RNA
cttattgactcttaaatcc

SEQ ID NO: 21140 - RNA, 19 nt, synthetic construct
  misc_feature 1..19: note = siRNA sense sequence
  source 1..19: mol_type = other RNA
gatttaagagtcaataagg

SEQ ID NO: 21141 - RNA, 19 nt, synthetic construct
  misc_feature 1..19: note = siRNA antisense sequence
  source 1..19: mol_type = other RNA
ccttattgactcttaaatc

SEQ ID NO: 21142 - RNA, 19 nt, synthetic construct
  misc_feature 1..19: note = siRNA sense sequence
  source 1..19: mol_type = other RNA
atttaagagtcaataaggg

SEQ ID NO: 21143 - RNA, 19 nt, synthetic construct
  misc_feature 1..19: note = siRNA antisense sequence
  source 1..19: mol_type = other RNA
cccttattgactcttaaat

SEQ ID NO: 21144 - RNA, 19 nt, synthetic construct
  misc_feature 1..19: note = siRNA sense sequence
  source 1..19: mol_type = other RNA
tttaagagtcaataagggt

SEQ ID NO: 21145 - RNA, 19 nt, synthetic construct
  misc_feature 1..19: note = siRNA antisense sequence
  source 1..19: mol_type = other RNA
acccttattgactcttaaa

SEQ ID NO: 21146 - RNA, 19 nt, synthetic construct
  misc_feature 1..19: note = siRNA sense sequence
  source 1..19: mol_type = other RNA
ttaagagtcaataagggtt

SEQ ID NO: 21147 - RNA, 19 nt, synthetic construct
  misc_feature 1..19: note = siRNA antisense sequence
  source 1..19: mol_type = other RNA
aacccttattgactcttaa

SEQ ID NO: 21148 - RNA, 19 nt, synthetic construct
  misc_feature 1..19: note = siRNA sense sequence
  source 1..19: mol_type = other RNA
taagagtcaataagggttt

SEQ ID NO: 21149 - RNA, 19 nt, synthetic construct
  misc_feature 1..19: note = siRNA antisense sequence
  source 1..19: mol_type = other RNA
aaacccttattgactctta

SEQ ID NO: 21150 - RNA, 19 nt, synthetic construct
  misc_feature 1..19: note = siRNA sense sequence
  source 1..19: mol_type = other RNA
aagagtcaataagggtttt

SEQ ID NO: 21151 - RNA, 19 nt, synthetic construct
  misc_feature 1..19: note = siRNA antisense sequence
  source 1..19: mol_type = other RNA
aaaacccttattgactctt

SEQ ID NO: 21152 - RNA, 19 nt, synthetic construct
  misc_feature 1..19: note = siRNA sense sequence
  source 1..19: mol_type = other RNA
ttttcacaggtttctaatg

SEQ ID NO: 21153 - RNA, 19 nt, synthetic construct
  misc_feature 1..19: note = siRNA antisense sequence
  source 1..19: mol_type = other RNA
cattagaaacctgtgaaaa

SEQ ID NO: 21154 - RNA, 19 nt, synthetic construct
  misc_feature 1..19: note = siRNA sense sequence
  source 1..19: mol_type = other RNA
aggtttctaatgtacagat

SEQ ID NO: 21155 - RNA, 19 nt, synthetic construct
  misc_feature 1..19: note = siRNA antisense sequence
  source 1..19: mol_type = other RNA
atctgtacattagaaacct

SEQ ID NO: 21156 - RNA, 19 nt, synthetic construct
  misc_feature 1..19: note = siRNA sense sequence
  source 1..19: mol_type = other RNA
tctctaagagtatgatgat

SEQ ID NO: 21157 - RNA, 19 nt, synthetic construct
  misc_feature 1..19: note = siRNA antisense sequence
  source 1..19: mol_type = other RNA
atcatcatactcttagaga

SEQ ID NO: 21158 - RNA, 19 nt, synthetic construct
  misc_feature 1..19: note = siRNA sense sequence
  source 1..19: mol_type = other RNA
ctctaagagtatgatgatg

SEQ ID NO: 21159 - RNA, 19 nt, synthetic construct
  misc_feature 1..19: note = siRNA antisense sequence
  source 1..19: mol_type = other RNA
catcatcatactcttagag

SEQ ID NO: 21160 - RNA, 19 nt, synthetic construct
  misc_feature 1..19: note = siRNA sense sequence
  source 1..19: mol_type = other RNA
taagagtatgatgatgacc

SEQ ID NO: 21161 - RNA, 19 nt, synthetic construct
  misc_feature 1..19: note = siRNA antisense sequence
  source 1..19: mol_type = other RNA
ggtcatcatcatactctta

SEQ ID NO: 21162 - RNA, 19 nt, synthetic construct
  misc_feature 1..19: note = siRNA sense sequence
  source 1..19: mol_type = other RNA
agtatgatgatgacctagg

SEQ ID NO: 21163 - RNA, 19 nt, synthetic construct
  misc_feature 1..19: note = siRNA antisense sequence
  source 1..19: mol_type = other RNA
cctaggtcatcatcatact

SEQ ID NO: 21164 - RNA, 19 nt, synthetic construct
  misc_feature 1..19: note = siRNA sense sequence
  source 1..19: mol_type = other RNA
gtatgatgatgacctaggc

SEQ ID NO: 21165 - RNA, 19 nt, synthetic construct
  misc_feature 1..19: note = siRNA antisense sequence
  source 1..19: mol_type = other RNA
gcctaggtcatcatcatac

SEQ ID NO: 21166 - RNA, 19 nt, synthetic construct
  misc_feature 1..19: note = siRNA sense sequence
  source 1..19: mol_type = other RNA
tatgatgatgacctaggct

SEQ ID NO: 21167 - RNA, 19 nt, synthetic construct
  misc_feature 1..19: note = siRNA antisense sequence
  source 1..19: mol_type = other RNA
agcctaggtcatcatcata

SEQ ID NO: 21168 - RNA, 19 nt, synthetic construct
  misc_feature 1..19: note = siRNA sense sequence
  source 1..19: mol_type = other RNA
atgatgatgacctaggctg

SEQ ID NO: 21169 - RNA, 19 nt, synthetic construct
  misc_feature 1..19: note = siRNA antisense sequence
  source 1..19: mol_type = other RNA
cagcctaggtcatcatcat

SEQ ID NO: 21170 - RNA, 19 nt, synthetic construct
  misc_feature 1..19: note = siRNA sense sequence
  source 1..19: mol_type = other RNA
atgacctaggctggacaga

SEQ ID NO: 21171 - RNA, 19 nt, synthetic construct
  misc_feature 1..19: note = siRNA antisense sequence
  source 1..19: mol_type = other RNA
tctgtccagcctaggtcat

SEQ ID NO: 21172 - RNA, 19 nt, synthetic construct
  misc_feature 1..19: note = siRNA sense sequence
  source 1..19: mol_type = other RNA
tgacctaggctggacagaa

SEQ ID NO: 21173 - RNA, 19 nt, synthetic construct
  misc_feature 1..19: note = siRNA antisense sequence
  source 1..19: mol_type = other RNA
ttctgtccagcctaggtca

SEQ ID NO: 21174 - RNA, 19 nt, synthetic construct
  misc_feature 1..19: note = siRNA sense sequence
  source 1..19: mol_type = other RNA
agaggtgataaaagagcag

SEQ ID NO: 21175 - RNA, 19 nt, synthetic construct
  misc_feature 1..19: note = siRNA antisense sequence
  source 1..19: mol_type = other RNA
ctgctcttttatcacctct

SEQ ID NO: 21176 - RNA, 19 nt, synthetic construct
  misc_feature 1..19: note = siRNA sense sequence
  source 1..19: mol_type = other RNA
ggactagtgcctttcaaat

SEQ ID NO: 21177 - RNA, 19 nt, synthetic construct
  misc_feature 1..19: note = siRNA antisense sequence
  source 1..19: mol_type = other RNA
atttgaaaggcactagtcc

SEQ ID NO: 21178 - RNA, 19 nt, synthetic construct
  misc_feature 1..19: note = siRNA sense sequence
  source 1..19: mol_type = other RNA
gactagtgcctttcaaatc

SEQ ID NO: 21179 - RNA, 19 nt, synthetic construct
  misc_feature 1..19: note = siRNA antisense sequence
  source 1..19: mol_type = other RNA
gatttgaaaggcactagtc

SEQ ID NO: 21180 - RNA, 19 nt, synthetic construct
  misc_feature 1..19: note = siRNA sense sequence
  source 1..19: mol_type = other RNA
cctttcaaatcctctaggt

SEQ ID NO: 21181 - RNA, 19 nt, synthetic construct
  misc_feature 1..19: note = siRNA antisense sequence
  source 1..19: mol_type = other RNA
acctagaggatttgaaagg

SEQ ID NO: 21182 - RNA, 19 nt, synthetic construct
  misc_feature 1..19: note = siRNA sense sequence
  source 1..19: mol_type = other RNA
ctttcaaatcctctaggtt

SEQ ID NO: 21183 - RNA, 19 nt, synthetic construct
  misc_feature 1..19: note = siRNA antisense sequence
  source 1..19: mol_type = other RNA
aacctagaggatttgaaag

SEQ ID NO: 21184 - RNA, 19 nt, synthetic construct
  misc_feature 1..19: note = siRNA sense sequence
  source 1..19: mol_type = other RNA
tttcaaatcctctaggttg

SEQ ID NO: 21185 - RNA, 19 nt, synthetic construct
  misc_feature 1..19: note = siRNA antisense sequence
  source 1..19: mol_type = other RNA
caacctagaggatttgaaa

SEQ ID NO: 21186 - RNA, 19 nt, synthetic construct
  misc_feature 1..19: note = siRNA sense sequence
  source 1..19: mol_type = other RNA
ttcaaatcctctaggttgg

SEQ ID NO: 21187 - RNA, 19 nt, synthetic construct
  misc_feature 1..19: note = siRNA antisense sequence
  source 1..19: mol_type = other RNA
ccaacctagaggatttgaa

SEQ ID NO: 21188 - RNA, 19 nt, synthetic construct
  misc_feature 1..19: note = siRNA sense sequence
  source 1..19: mol_type = other RNA
tcaaatcctctaggttggt

SEQ ID NO: 21189 - RNA, 19 nt, synthetic construct
  misc_feature 1..19: note = siRNA antisense sequence
  source 1..19: mol_type = other RNA
accaacctagaggatttga

SEQ ID NO: 21190 - RNA, 19 nt, synthetic construct
  misc_feature 1..19: note = siRNA sense sequence
  source 1..19: mol_type = other RNA
caaatcctctaggttggtt

SEQ ID NO: 21191 - RNA, 19 nt, synthetic construct
  misc_feature 1..19: note = siRNA antisense sequence
  source 1..19: mol_type = other RNA
aaccaacctagaggatttg

SEQ ID NO: 21192 - RNA, 19 nt, synthetic construct
  misc_feature 1..19: note = siRNA sense sequence
  source 1..19: mol_type = other RNA
aaatcctctaggttggttc

SEQ ID NO: 21193 - RNA, 19 nt, synthetic construct
  misc_feature 1..19: note = siRNA antisense sequence
  source 1..19: mol_type = other RNA
gaaccaacctagaggattt

SEQ ID NO: 21194 - RNA, 19 nt, synthetic construct
  misc_feature 1..19: note = siRNA sense sequence
  source 1..19: mol_type = other RNA
aatcctctaggttggttcc

SEQ ID NO: 21195 - RNA, 19 nt, synthetic construct
  misc_feature 1..19: note = siRNA antisense sequence
  source 1..19: mol_type = other RNA
ggaaccaacctagaggatt

SEQ ID NO: 21196 - RNA, 19 nt, synthetic construct
  misc_feature 1..19: note = siRNA sense sequence
  source 1..19: mol_type = other RNA
ttcccaagctgtgagtttt

SEQ ID NO: 21197 - RNA, 19 nt, synthetic construct
  misc_feature 1..19: note = siRNA antisense sequence
  source 1..19: mol_type = other RNA
aaaactcacagcttgggaa

SEQ ID NO: 21198 - RNA, 19 nt, synthetic construct
  misc_feature 1..19: note = siRNA sense sequence
  source 1..19: mol_type = other RNA
ttagctggtaaaggtgaca

SEQ ID NO: 21199 - RNA, 19 nt, synthetic construct
  misc_feature 1..19: note = siRNA antisense sequence
  source 1..19: mol_type = other RNA
tgtcacctttaccagctaa

SEQ ID NO: 21200 - RNA, 19 nt, synthetic construct
  misc_feature 1..19: note = siRNA sense sequence
  source 1..19: mol_type = other RNA
tagctggtaaaggtgacag

SEQ ID NO: 21201 - RNA, 19 nt, synthetic construct
  misc_feature 1..19: note = siRNA antisense sequence
  source 1..19: mol_type = other RNA
ctgtcacctttaccagcta

SEQ ID NO: 21202 - RNA, 19 nt, synthetic construct
  misc_feature 1..19: note = siRNA sense sequence
  source 1..19: mol_type = other RNA
agctggtaaaggtgacagt

SEQ ID NO: 21203 - RNA, 19 nt, synthetic construct
  misc_feature 1..19: note = siRNA antisense sequence
  source 1..19: mol_type = other RNA
actgtcacctttaccagct

SEQ ID NO: 21204 - RNA, 19 nt, synthetic construct
  misc_feature 1..19: note = siRNA sense sequence
  source 1..19: mol_type = other RNA
gctggtaaaggtgacagtt

SEQ ID NO: 21205 - RNA, 19 nt, synthetic construct
  misc_feature 1..19: note = siRNA antisense sequence
  source 1..19: mol_type = other RNA
aactgtcacctttaccagc

SEQ ID NO: 21206 - RNA, 19 nt, synthetic construct
  misc_feature 1..19: note = siRNA sense sequence
  source 1..19: mol_type = other RNA
ctggtaaaggtgacagttg

SEQ ID NO: 21207 - RNA, 19 nt, synthetic construct
  misc_feature 1..19: note = siRNA antisense sequence
  source 1..19: mol_type = other RNA
caactgtcacctttaccag

SEQ ID NO: 21208 - RNA, 19 nt, synthetic construct
  misc_feature 1..19: note = siRNA sense sequence
  source 1..19: mol_type = other RNA
tggtaaaggtgacagttga

SEQ ID NO: 21209 - RNA, 19 nt, synthetic construct
  misc_feature 1..19: note = siRNA antisense sequence
  source 1..19: mol_type = other RNA
tcaactgtcacctttacca

SEQ ID NO: 21210 - RNA, 19 nt, synthetic construct
  misc_feature 1..19: note = siRNA sense sequence
  source 1..19: mol_type = other RNA
ggtaaaggtgacagttgag

SEQ ID NO: 21211 - RNA, 19 nt, synthetic construct
  misc_feature 1..19: note = siRNA antisense sequence
  source 1..19: mol_type = other RNA
ctcaactgtcacctttacc

SEQ ID NO: 21212 - RNA, 19 nt, synthetic construct
  misc_feature 1..19: note = siRNA sense sequence
  source 1..19: mol_type = other RNA
gtaaaggtgacagttgagg

SEQ ID NO: 21213 - RNA, 19 nt, synthetic construct
  misc_feature 1..19: note = siRNA antisense sequence
  source 1..19: mol_type = other RNA
cctcaactgtcacctttac

SEQ ID NO: 21214 - RNA, 19 nt, synthetic construct
  misc_feature 1..19: note = siRNA sense sequence
  source 1..19: mol_type = other RNA
taaaggtgacagttgaggg

SEQ ID NO: 21215 - RNA, 19 nt, synthetic construct
  misc_feature 1..19: note = siRNA antisense sequence
  source 1..19: mol_type = other RNA
ccctcaactgtcaccttta

SEQ ID NO: 21216 - RNA, 19 nt, synthetic construct
  misc_feature 1..19: note = siRNA sense sequence
  source 1..19: mol_type = other RNA
ggaagtgacagtggataat

SEQ ID NO: 21217 - RNA, 19 nt, synthetic construct
  misc_feature 1..19: note = siRNA antisense sequence
  source 1..19: mol_type = other RNA
attatccactgtcacttcc

SEQ ID NO: 21218 - RNA, 19 nt, synthetic construct
  misc_feature 1..19: note = siRNA sense sequence
  source 1..19: mol_type = other RNA
gaagtgacagtggataata

SEQ ID NO: 21219 - RNA, 19 nt, synthetic construct
  misc_feature 1..19: note = siRNA antisense sequence
  source 1..19: mol_type = other RNA
tattatccactgtcacttc

SEQ ID NO: 21220 - RNA, 19 nt, synthetic construct
  misc_feature 1..19: note = siRNA sense sequence
  source 1..19: mol_type = other RNA
aagtgacagtggataatag

SEQ ID NO: 21221 - RNA, 19 nt, synthetic construct
  misc_feature 1..19: note = siRNA antisense sequence
  source 1..19: mol_type = other RNA
ctattatccactgtcactt

SEQ ID NO: 21222 - RNA, 19 nt, synthetic construct
  misc_feature 1..19: note = siRNA sense sequence
  source 1..19: mol_type = other RNA
agtgacagtggataatagc

SEQ ID NO: 21223 - RNA, 19 nt, synthetic construct
  misc_feature 1..19: note = siRNA antisense sequence
  source 1..19: mol_type = other RNA
gctattatccactgtcact

SEQ ID NO: 21224 - RNA, 19 nt, synthetic construct
  misc_feature 1..19: note = siRNA sense sequence
  source 1..19: mol_type = other RNA
gtgacagtggataatagca

SEQ ID NO: 21225 - RNA, 19 nt, synthetic construct
  misc_feature 1..19: note = siRNA antisense sequence
  source 1..19: mol_type = other RNA
tgctattatccactgtcac

SEQ ID NO: 21226 - RNA, 19 nt, synthetic construct
  misc_feature 1..19: note = siRNA sense sequence
  source 1..19: mol_type = other RNA
tgacagtggataatagcac

SEQ ID NO: 21227 - RNA, 19 nt, synthetic construct
  misc_feature 1..19: note = siRNA antisense sequence
  source 1..19: mol_type = other RNA
gtgctattatccactgtca

SEQ ID NO: 21228 - RNA, 19 nt, synthetic construct
  misc_feature 1..19: note = siRNA sense sequence
  source 1..19: mol_type = other RNA
gtggataatagcacataat

SEQ ID NO: 21229 - RNA, 19 nt, synthetic construct
  misc_feature 1..19: note = siRNA antisense sequence
  source 1..19: mol_type = other RNA
attatgtgctattatccac

SEQ ID NO: 21230 - RNA, 19 nt, synthetic construct
  misc_feature 1..19: note = siRNA sense sequence
  source 1..19: mol_type = other RNA
cattcataatataggatgg

SEQ ID NO: 21231 - RNA, 19 nt, synthetic construct
  misc_feature 1..19: note = siRNA antisense sequence
  source 1..19: mol_type = other RNA
ccatcctatattatgaatg

SEQ ID NO: 21232 - RNA, 19 nt, synthetic construct
  misc_feature 1..19: note = siRNA sense sequence
  source 1..19: mol_type = other RNA
ttcataatataggatggtg

SEQ ID NO: 21233 - RNA, 19 nt, synthetic construct
  misc_feature 1..19: note = siRNA antisense sequence
  source 1..19: mol_type = other RNA
caccatcctatattatgaa

SEQ ID NO: 21234 - RNA, 19 nt, synthetic construct
  misc_feature 1..19: note = siRNA sense sequence
  source 1..19: mol_type = other RNA
tcataatataggatggtgg

SEQ ID NO: 21235 - RNA, 19 nt, synthetic construct
  misc_feature 1..19: note = siRNA antisense sequence
  source 1..19: mol_type = other RNA
ccaccatcctatattatga

SEQ ID NO: 21236 - RNA, 19 nt, synthetic construct
  misc_feature 1..19: note = siRNA sense sequence
  source 1..19: mol_type = other RNA
cataatataggatggtggt

SEQ ID NO: 21237 - RNA, 19 nt, synthetic construct
  misc_feature 1..19: note = siRNA antisense sequence
  source 1..19: mol_type = other RNA
accaccatcctatattatg

SEQ ID NO: 21238 - RNA, 19 nt, synthetic construct
  misc_feature 1..19: note = siRNA sense sequence
  source 1..19: mol_type = other RNA
ataatataggatggtggta

SEQ ID NO: 21239 - RNA, 19 nt, synthetic construct
  misc_feature 1..19: note = siRNA antisense sequence
  source 1..19: mol_type = other RNA
taccaccatcctatattat

SEQ ID NO: 21240 - RNA, 19 nt, synthetic construct
  misc_feature 1..19: note = siRNA sense sequence
  source 1..19: mol_type = other RNA
taatataggatggtggtag

SEQ ID NO: 21241 - RNA, 19 nt, synthetic construct
  misc_feature 1..19: note = siRNA antisense sequence
  source 1..19: mol_type = other RNA
ctaccaccatcctatatta

SEQ ID NO: 21242 - RNA, 19 nt, synthetic construct
  misc_feature 1..19: note = siRNA sense sequence
  source 1..19: mol_type = other RNA
aatataggatggtggtagt

SEQ ID NO: 21243 - RNA, 19 nt, synthetic construct
  misc_feature 1..19: note = siRNA antisense sequence
  source 1..19: mol_type = other RNA
actaccaccatcctatatt

SEQ ID NO: 21244 - RNA, 19 nt, synthetic construct
  misc_feature 1..19: note = siRNA sense sequence
  source 1..19: mol_type = other RNA
atataggatggtggtagta

SEQ ID NO: 21245 - RNA, 19 nt, synthetic construct
  misc_feature 1..19: note = siRNA antisense sequence
  source 1..19: mol_type = other RNA
tactaccaccatcctatat

SEQ ID NO: 21246 - RNA, 19 nt, synthetic construct
  misc_feature 1..19: note = siRNA sense sequence
  source 1..19: mol_type = other RNA
tataggatggtggtagtag

SEQ ID NO: 21247 - RNA, 19 nt, synthetic construct
  misc_feature 1..19: note = siRNA antisense sequence
  source 1..19: mol_type = other RNA
ctactaccaccatcctata

SEQ ID NO: 21248 - RNA, 19 nt, synthetic construct
  misc_feature 1..19: note = siRNA sense sequence
  source 1..19: mol_type = other RNA
taggatggtggtagtagaa

SEQ ID NO: 21249 - RNA, 19 nt, synthetic construct
  misc_feature 1..19: note = siRNA antisense sequence
  source 1..19: mol_type = other RNA
ttctactaccaccatccta

SEQ ID NO: 21250 - RNA, 19 nt, synthetic construct
  misc_feature 1..19: note = siRNA sense sequence
  source 1..19: mol_type = other RNA
agagggtatggagttatgc

SEQ ID NO: 21251 - RNA, 19 nt, synthetic construct
  misc_feature 1..19: note = siRNA antisense sequence
  source 1..19: mol_type = other RNA
gcataactccataccctct

SEQ ID NO: 21252 - RNA, 19 nt, synthetic construct
  misc_feature 1..19: note = siRNA sense sequence
  source 1..19: mol_type = other RNA
gtatggagttatgcaggcc

SEQ ID NO: 21253 - RNA, 19 nt, synthetic construct
  misc_feature 1..19: note = siRNA antisense sequence
  source 1..19: mol_type = other RNA
ggcctgcataactccatac

SEQ ID NO: 21254 - RNA, 19 nt, synthetic construct
  misc_feature 1..19: note = siRNA sense sequence
  source 1..19: mol_type = other RNA
tatggagttatgcaggcct

SEQ ID NO: 21255 - RNA, 19 nt, synthetic construct
  misc_feature 1..19: note = siRNA antisense sequence
  source 1..19: mol_type = other RNA
aggcctgcataactccata

SEQ ID NO: 21256 - RNA, 19 nt, synthetic construct
  misc_feature 1..19: note = siRNA sense sequence
  source 1..19: mol_type = other RNA
atggagttatgcaggcctg

SEQ ID NO: 21257 - RNA, 19 nt, synthetic construct
  misc_feature 1..19: note = siRNA antisense sequence
  source 1..19: mol_type = other RNA
caggcctgcataactccat

SEQ ID NO: 21258 - RNA, 19 nt, synthetic construct
  misc_feature 1..19: note = siRNA sense sequence
  source 1..19: mol_type = other RNA
tggagttatgcaggcctga

SEQ ID NO: 21259 - RNA, 19 nt, synthetic construct
  misc_feature 1..19: note = siRNA antisense sequence
  source 1..19: mol_type = other RNA
tcaggcctgcataactcca

SEQ ID NO: 21260 - RNA, 19 nt, synthetic construct
  misc_feature 1..19: note = siRNA sense sequence
  source 1..19: mol_type = other RNA
ggagttatgcaggcctgaa

SEQ ID NO: 21261 - RNA, 19 nt, synthetic construct
  misc_feature 1..19: note = siRNA antisense sequence
  source 1..19: mol_type = other RNA
ttcaggcctgcataactcc

SEQ ID NO: 21262 - RNA, 19 nt, synthetic construct
  misc_feature 1..19: note = siRNA sense sequence
  source 1..19: mol_type = other RNA
gcaggcctgaatttcaatg

SEQ ID NO: 21263 - RNA, 19 nt, synthetic construct
  misc_feature 1..19: note = siRNA antisense sequence
  source 1..19: mol_type = other RNA
cattgaaattcaggcctgc

SEQ ID NO: 21264 - RNA, 19 nt, synthetic construct
  misc_feature 1..19: note = siRNA sense sequence
  source 1..19: mol_type = other RNA
gcctgaatttcaatgctag

SEQ ID NO: 21265 - RNA, 19 nt, synthetic construct
  misc_feature 1..19: note = siRNA antisense sequence
  source 1..19: mol_type = other RNA
ctagcattgaaattcaggc

SEQ ID NO: 21266 - RNA, 19 nt, synthetic construct
  misc_feature 1..19: note = siRNA sense sequence
  source 1..19: mol_type = other RNA
ctgaatttcaatgctagtc

SEQ ID NO: 21267 - RNA, 19 nt, synthetic construct
  misc_feature 1..19: note = siRNA antisense sequence
  source 1..19: mol_type = other RNA
gactagcattgaaattcag

SEQ ID NO: 21268 - RNA, 19 nt, synthetic construct
  misc_feature 1..19: note = siRNA sense sequence
  source 1..19: mol_type = other RNA
tgaatttcaatgctagtca

SEQ ID NO: 21269 - RNA, 19 nt, synthetic construct
  misc_feature 1..19: note = siRNA antisense sequence
  source 1..19: mol_type = other RNA
tgactagcattgaaattca

SEQ ID NO: 21270 - RNA, 19 nt, synthetic construct
  misc_feature 1..19: note = siRNA sense sequence
  source 1..19: mol_type = other RNA
gaatttcaatgctagtcat

SEQ ID NO: 21271 - RNA, 19 nt, synthetic construct
  misc_feature 1..19: note = siRNA antisense sequence
  source 1..19: mol_type = other RNA
atgactagcattgaaattc

SEQ ID NO: 21272 - RNA, 19 nt, synthetic construct
  misc_feature 1..19: note = siRNA sense sequence
  source 1..19: mol_type = other RNA
aatttcaatgctagtcatg

SEQ ID NO: 21273 - RNA, 19 nt, synthetic construct
  misc_feature 1..19: note = siRNA antisense sequence
  source 1..19: mol_type = other RNA
catgactagcattgaaatt

SEQ ID NO: 21274 - RNA, 19 nt, synthetic construct
  misc_feature 1..19: note = siRNA sense sequence
  source 1..19: mol_type = other RNA
gctagtcatgtgatcttga

SEQ ID NO: 21275 - RNA, 19 nt, synthetic construct
  misc_feature 1..19: note = siRNA antisense sequence
  source 1..19: mol_type = other RNA
tcaagatcacatgactagc

SEQ ID NO: 21276 - RNA, 19 nt, synthetic construct
  misc_feature 1..19: note = siRNA sense sequence
  source 1..19: mol_type = other RNA
ctagtcatgtgatcttgaa

SEQ ID NO: 21277 - RNA, 19 nt, synthetic construct
  misc_feature 1..19: note = siRNA antisense sequence
  source 1..19: mol_type = other RNA
ttcaagatcacatgactag

SEQ ID NO: 21278 - RNA, 19 nt, synthetic construct
  misc_feature 1..19: note = siRNA sense sequence
  source 1..19: mol_type = other RNA
cccatagttgattttcttc

SEQ ID NO: 21279 - RNA, 19 nt, synthetic construct
  misc_feature 1..19: note = siRNA antisense sequence
  source 1..19: mol_type = other RNA
gaagaaaatcaactatggg

SEQ ID NO: 21280 - RNA, 19 nt, synthetic construct
  misc_feature 1..19: note = siRNA sense sequence
  source 1..19: mol_type = other RNA
ccatagttgattttcttct

SEQ ID NO: 21281 - RNA, 19 nt, synthetic construct
  misc_feature 1..19: note = siRNA antisense sequence
  source 1..19: mol_type = other RNA
agaagaaaatcaactatgg

SEQ ID NO: 21282 - RNA, 19 nt, synthetic construct
  misc_feature 1..19: note = siRNA sense sequence
  source 1..19: mol_type = other RNA
acattcaatacgtgatagc

SEQ ID NO: 21283 - RNA, 19 nt, synthetic construct
  misc_feature 1..19: note = siRNA antisense sequence
  source 1..19: mol_type = other RNA
gctatcacgtattgaatgt

SEQ ID NO: 21284 - RNA, 19 nt, synthetic construct
  misc_feature 1..19: note = siRNA sense sequence
  source 1..19: mol_type = other RNA
cattcaatacgtgatagct

SEQ ID NO: 21285 - RNA, 19 nt, synthetic construct
  misc_feature 1..19: note = siRNA antisense sequence
  source 1..19: mol_type = other RNA
agctatcacgtattgaatg

SEQ ID NO: 21286 - RNA, 19 nt, synthetic construct
  misc_feature 1..19: note = siRNA sense sequence
  source 1..19: mol_type = other RNA
attcaatacgtgatagctc

SEQ ID NO: 21287 - RNA, 19 nt, synthetic construct
  misc_feature 1..19: note = siRNA antisense sequence
  source 1..19: mol_type = other RNA
gagctatcacgtattgaat

SEQ ID NO: 21288 - RNA, 19 nt, synthetic construct
  misc_feature 1..19: note = siRNA sense sequence
  source 1..19: mol_type = other RNA
ttcaatacgtgatagctct

SEQ ID NO: 21289 - RNA, 19 nt, synthetic construct
  misc_feature 1..19: note = siRNA antisense sequence
  source 1..19: mol_type = other RNA
agagctatcacgtattgaa

SEQ ID NO: 21290 - RNA, 19 nt, synthetic construct
  misc_feature 1..19: note = siRNA sense sequence
  source 1..19: mol_type = other RNA
tcaatacgtgatagctctt

SEQ ID NO: 21291 - RNA, 19 nt, synthetic construct
  misc_feature 1..19: note = siRNA antisense sequence
  source 1..19: mol_type = other RNA
aagagctatcacgtattga

SEQ ID NO: 21292 - RNA, 19 nt, synthetic construct
  misc_feature 1..19: note = siRNA sense sequence
  source 1..19: mol_type = other RNA
caatacgtgatagctcttc

SEQ ID NO: 21293 - RNA, 19 nt, synthetic construct
  misc_feature 1..19: note = siRNA antisense sequence
  source 1..19: mol_type = other RNA
gaagagctatcacgtattg

SEQ ID NO: 21294 - RNA, 19 nt, synthetic construct
  misc_feature 1..19: note = siRNA sense sequence
  source 1..19: mol_type = other RNA
acgtgatagctcttcaata

SEQ ID NO: 21295 - RNA, 19 nt, synthetic construct
  misc_feature 1..19: note = siRNA antisense sequence
  source 1..19: mol_type = other RNA
tattgaagagctatcacgt

SEQ ID NO: 21296 - RNA, 19 nt, synthetic construct
  misc_feature 1..19: note = siRNA sense sequence
  source 1..19: mol_type = other RNA
aaccttttgttaagatccc

SEQ ID NO: 21297 - RNA, 19 nt, synthetic construct
  misc_feature 1..19: note = siRNA antisense sequence
  source 1..19: mol_type = other RNA
gggatcttaacaaaaggtt

SEQ ID NO: 21298 - RNA, 19 nt, synthetic construct
  misc_feature 1..19: note = siRNA sense sequence
  source 1..19: mol_type = other RNA
ttaagatcccactgtgtgc

SEQ ID NO: 21299 - RNA, 19 nt, synthetic construct
  misc_feature 1..19: note = siRNA antisense sequence
  source 1..19: mol_type = other RNA
gcacacagtgggatcttaa

SEQ ID NO: 21300 - RNA, 19 nt, synthetic construct
  misc_feature 1..19: note = siRNA sense sequence
  source 1..19: mol_type = other RNA
agatcccactgtgtgctta

SEQ ID NO: 21301 - RNA, 19 nt, synthetic construct
  misc_feature 1..19: note = siRNA antisense sequence
  source 1..19: mol_type = other RNA
taagcacacagtgggatct

SEQ ID NO: 21302 - RNA, 19 nt, synthetic construct
  misc_feature 1..19: note = siRNA sense sequence
  source 1..19: mol_type = other RNA
gatcccactgtgtgcttac

SEQ ID NO: 21303 - RNA, 19 nt, synthetic construct
  misc_feature 1..19: note = siRNA antisense sequence
  source 1..19: mol_type = other RNA
gtaagcacacagtgggatc

SEQ ID NO: 21304 - RNA, 19 nt, synthetic construct
  misc_feature 1..19: note = siRNA sense sequence
  source 1..19: mol_type = other RNA
atcccactgtgtgcttacc

SEQ ID NO: 21305 - RNA, 19 nt, synthetic construct
  misc_feature 1..19: note = siRNA antisense sequence
  source 1..19: mol_type = other RNA
ggtaagcacacagtgggat

SEQ ID NO: 21306 - RNA, 19 nt, synthetic construct
  misc_feature 1..19: note = siRNA sense sequence
  source 1..19: mol_type = other RNA
tcccactgtgtgcttacca

SEQ ID NO: 21307 - RNA, 19 nt, synthetic construct
  misc_feature 1..19: note = siRNA antisense sequence
  source 1..19: mol_type = other RNA
tggtaagcacacagtggga

SEQ ID NO: 21308 - RNA, 19 nt, synthetic construct
  misc_feature 1..19: note = siRNA sense sequence
  source 1..19: mol_type = other RNA
cccactgtgtgcttaccac

SEQ ID NO: 21309 - RNA, 19 nt, synthetic construct
  misc_feature 1..19: note = siRNA antisense sequence
  source 1..19: mol_type = other RNA
gtggtaagcacacagtggg

SEQ ID NO: 21310 - RNA, 19 nt, synthetic construct
  misc_feature 1..19: note = siRNA sense sequence
  source 1..19: mol_type = other RNA
cactgtgattctgtggctt

SEQ ID NO: 21311 - RNA, 19 nt, synthetic construct
  misc_feature 1..19: note = siRNA antisense sequence
  source 1..19: mol_type = other RNA
aagccacagaatcacagtg

SEQ ID NO: 21312 - RNA, 19 nt, synthetic construct
  misc_feature 1..19: note = siRNA sense sequence
  source 1..19: mol_type = other RNA
actgtgattctgtggcttt

SEQ ID NO: 21313 - RNA, 19 nt, synthetic construct
  misc_feature 1..19: note = siRNA antisense sequence
  source 1..19: mol_type = other RNA
aaagccacagaatcacagt

SEQ ID NO: 21314 - RNA, 19 nt, synthetic construct
  misc_feature 1..19: note = siRNA sense sequence
  source 1..19: mol_type = other RNA
ctgtgattctgtggctttt

SEQ ID NO: 21315 - RNA, 19 nt, synthetic construct
  misc_feature 1..19: note = siRNA antisense sequence
  source 1..19: mol_type = other RNA
aaaagccacagaatcacag

SEQ ID NO: 21316 - RNA, 19 nt, synthetic construct
  misc_feature 1..19: note = siRNA sense sequence
  source 1..19: mol_type = other RNA
tgtgattctgtggctttta

SEQ ID NO: 21317 - RNA, 19 nt, synthetic construct
  misc_feature 1..19: note = siRNA antisense sequence
  source 1..19: mol_type = other RNA
taaaagccacagaatcaca

SEQ ID NO: 21318 - RNA, 19 nt, synthetic construct
  misc_feature 1..19: note = siRNA sense sequence
  source 1..19: mol_type = other RNA
gtgattctgtggcttttaa

SEQ ID NO: 21319 - RNA, 19 nt, synthetic construct
  misc_feature 1..19: note = siRNA antisense sequence
  source 1..19: mol_type = other RNA
ttaaaagccacagaatcac

SEQ ID NO: 21320 - RNA, 19 nt, synthetic construct
  misc_feature 1..19: note = siRNA sense sequence
  source 1..19: mol_type = other RNA
tctgtggcttttaatcttt

SEQ ID NO: 21321 - RNA, 19 nt, synthetic construct
  misc_feature 1..19: note = siRNA antisense sequence
  source 1..19: mol_type = other RNA
aaagattaaaagccacaga

SEQ ID NO: 21322 - RNA, 19 nt, synthetic construct
  misc_feature 1..19: note = siRNA sense sequence
  source 1..19: mol_type = other RNA
tgtggcttttaatctttgg

SEQ ID NO: 21323 - RNA, 19 nt, synthetic construct
  misc_feature 1..19: note = siRNA antisense sequence
  source 1..19: mol_type = other RNA
ccaaagattaaaagccaca

SEQ ID NO: 21324 - RNA, 19 nt, synthetic construct
  misc_feature 1..19: note = siRNA sense sequence
  source 1..19: mol_type = other RNA
gtggcttttaatctttggc

SEQ ID NO: 21325 - RNA, 19 nt, synthetic construct
  misc_feature 1..19: note = siRNA antisense sequence
  source 1..19: mol_type = other RNA
gccaaagattaaaagccac

SEQ ID NO: 21326 - RNA, 19 nt, synthetic construct
  misc_feature 1..19: note = siRNA sense sequence
  source 1..19: mol_type = other RNA
tggcttttaatctttggca

SEQ ID NO: 21327 - RNA, 19 nt, synthetic construct
  misc_feature 1..19: note = siRNA antisense sequence
  source 1..19: mol_type = other RNA
tgccaaagattaaaagcca

SEQ ID NO: 21328 - RNA, 19 nt, synthetic construct
  misc_feature 1..19: note = siRNA sense sequence
  source 1..19: mol_type = other RNA
ggcttttaatctttggcag

SEQ ID NO: 21329 - RNA, 19 nt, synthetic construct
  misc_feature 1..19: note = siRNA antisense sequence
  source 1..19: mol_type = other RNA
ctgccaaagattaaaagcc

SEQ ID NO: 21330 - RNA, 19 nt, synthetic construct
  misc_feature 1..19: note = siRNA sense sequence
  source 1..19: mol_type = other RNA
ttaatctttggcagactat

SEQ ID NO: 21331 - RNA, 19 nt, synthetic construct
  misc_feature 1..19: note = siRNA antisense sequence
  source 1..19: mol_type = other RNA
atagtctgccaaagattaa

SEQ ID NO: 21332 - RNA, 19 nt, synthetic construct
  misc_feature 1..19: note = siRNA sense sequence
  source 1..19: mol_type = other RNA
taatctttggcagactatg

SEQ ID NO: 21333 - RNA, 19 nt, synthetic construct
  misc_feature 1..19: note = siRNA antisense sequence
  source 1..19: mol_type = other RNA
catagtctgccaaagatta

SEQ ID NO: 21334 - RNA, 19 nt, synthetic construct
  misc_feature 1..19: note = siRNA sense sequence
  source 1..19: mol_type = other RNA
aatctttggcagactatgg

SEQ ID NO: 21335 - RNA, 19 nt, synthetic construct
  misc_feature 1..19: note = siRNA antisense sequence
  source 1..19: mol_type = other RNA
ccatagtctgccaaagatt

SEQ ID NO: 21336 - RNA, 19 nt, synthetic construct
  misc_feature 1..19: note = siRNA sense sequence
  source 1..19: mol_type = other RNA
atctttggcagactatggg

SEQ ID NO: 21337 - RNA, 19 nt, synthetic construct
  misc_feature 1..19: note = siRNA antisense sequence
  source 1..19: mol_type = other RNA
cccatagtctgccaaagat

SEQ ID NO: 21338 - RNA, 19 nt, synthetic construct
  misc_feature 1..19: note = siRNA sense sequence
  source 1..19: mol_type = other RNA
tctttggcagactatggga

SEQ ID NO: 21339 - RNA, 19 nt, synthetic construct
  misc_feature 1..19: note = siRNA antisense sequence
  source 1..19: mol_type = other RNA
tcccatagtctgccaaaga

SEQ ID NO: 21340 - RNA, 19 nt, synthetic construct
  misc_feature 1..19: note = siRNA sense sequence
  source 1..19: mol_type = other RNA
ctttggcagactatgggaa

SEQ ID NO: 21341 - RNA, 19 nt, synthetic construct
  misc_feature 1..19: note = siRNA antisense sequence
  source 1..19: mol_type = other RNA
ttcccatagtctgccaaag

SEQ ID NO: 21342 - RNA, 19 nt, synthetic construct
  misc_feature 1..19: note = siRNA sense sequence
  source 1..19: mol_type = other RNA
aaagatgatcaaggagcac

SEQ ID NO: 21343 - RNA, 19 nt, synthetic construct
  misc_feature 1..19: note = siRNA antisense sequence
  source 1..19: mol_type = other RNA
gtgctccttgatcatcttt

SEQ ID NO: 21344 - RNA, 19 nt, synthetic construct
  misc_feature 1..19: note = siRNA sense sequence
  source 1..19: mol_type = other RNA
tgatcaaggagcacttcaa

SEQ ID NO: 21345 - RNA, 19 nt, synthetic construct
  misc_feature 1..19: note = siRNA antisense sequence
  source 1..19: mol_type = other RNA
ttgaagtgctccttgatca

SEQ ID NO: 21346 - RNA, 19 nt, synthetic construct
  misc_feature 1..19: note = siRNA sense sequence
  source 1..19: mol_type = other RNA
gatcaaggagcacttcaaa

SEQ ID NO: 21347 - RNA, 19 nt, synthetic construct
  misc_feature 1..19: note = siRNA antisense sequence
  source 1..19: mol_type = other RNA
tttgaagtgctccttgatc

SEQ ID NO: 21348 - RNA, 19 nt, synthetic construct
  misc_feature 1..19: note = siRNA sense sequence
  source 1..19: mol_type = other RNA
atcaaggagcacttcaaag

SEQ ID NO: 21349 - RNA, 19 nt, synthetic construct
  misc_feature 1..19: note = siRNA antisense sequence
  source 1..19: mol_type = other RNA
ctttgaagtgctccttgat

SEQ ID NO: 21350 - RNA, 19 nt, synthetic construct
  misc_feature 1..19: note = siRNA sense sequence
  source 1..19: mol_type = other RNA
tcaaggagcacttcaaagc

SEQ ID NO: 21351 - RNA, 19 nt, synthetic construct
  misc_feature 1..19: note = siRNA antisense sequence
  source 1..19: mol_type = other RNA
gctttgaagtgctccttga

SEQ ID NO: 21352 - RNA, 19 nt, synthetic construct
  misc_feature 1..19: note = siRNA sense sequence
  source 1..19: mol_type = other RNA
cccagttcaaaattatctc

SEQ ID NO: 21353 - RNA, 19 nt, synthetic construct
  misc_feature 1..19: note = siRNA antisense sequence
  source 1..19: mol_type = other RNA
gagataattttgaactggg

SEQ ID NO: 21354 - RNA, 19 nt, synthetic construct
  misc_feature 1..19: note = siRNA sense sequence
  source 1..19: mol_type = other RNA
cagttcaaaattatctcct

SEQ ID NO: 21355 - RNA, 19 nt, synthetic construct
  misc_feature 1..19: note = siRNA antisense sequence
  source 1..19: mol_type = other RNA
aggagataattttgaactg

SEQ ID NO: 21356 - RNA, 19 nt, synthetic construct
  misc_feature 1..19: note = siRNA sense sequence
  source 1..19: mol_type = other RNA
agttcaaaattatctcctc

SEQ ID NO: 21357 - RNA, 19 nt, synthetic construct
  misc_feature 1..19: note = siRNA antisense sequence
  source 1..19: mol_type = other RNA
gaggagataattttgaact

SEQ ID NO: 21358 - RNA, 19 nt, synthetic construct
  misc_feature 1..19: note = siRNA sense sequence
  source 1..19: mol_type = other RNA
caaaattatctcctcattc

SEQ ID NO: 21359 - RNA, 19 nt, synthetic construct
  misc_feature 1..19: note = siRNA antisense sequence
  source 1..19: mol_type = other RNA
gaatgaggagataattttg

SEQ ID NO: 21360 - RNA, 19 nt, synthetic construct
  misc_feature 1..19: note = siRNA sense sequence
  source 1..19: mol_type = other RNA
aaattatctcctcattctc

SEQ ID NO: 21361 - RNA, 19 nt, synthetic construct
  misc_feature 1..19: note = siRNA antisense sequence
  source 1..19: mol_type = other RNA
gagaatgaggagataattt

SEQ ID NO: 21362 - RNA, 19 nt, synthetic construct
  misc_feature 1..19: note = siRNA sense sequence
  source 1..19: mol_type = other RNA
aattatctcctcattctct

SEQ ID NO: 21363 - RNA, 19 nt, synthetic construct
  misc_feature 1..19: note = siRNA antisense sequence
  source 1..19: mol_type = other RNA
agagaatgaggagataatt

SEQ ID NO: 21364 - RNA, 19 nt, synthetic construct
  misc_feature 1..19: note = siRNA sense sequence
  source 1..19: mol_type = other RNA
attatctcctcattctctc

SEQ ID NO: 21365 - RNA, 19 nt, synthetic construct
  misc_feature 1..19: note = siRNA antisense sequence
  source 1..19: mol_type = other RNA
gagagaatgaggagataat

SEQ ID NO: 21366 - RNA, 19 nt, synthetic construct
  misc_feature 1..19: note = siRNA sense sequence
  source 1..19: mol_type = other RNA
cctcattctctctctcttt

SEQ ID NO: 21367 - RNA, 19 nt, synthetic construct
  misc_feature 1..19: note = siRNA antisense sequence
  source 1..19: mol_type = other RNA
aaagagagagagaatgagg

SEQ ID NO: 21368 - RNA, 19 nt, synthetic construct
  misc_feature 1..19: note = siRNA sense sequence
  source 1..19: mol_type = other RNA
ctcattctctctctctttc

SEQ ID NO: 21369 - RNA, 19 nt, synthetic construct
  misc_feature 1..19: note = siRNA antisense sequence
  source 1..19: mol_type = other RNA
gaaagagagagagaatgag

SEQ ID NO: 21370 - RNA, 19 nt, synthetic construct
  misc_feature 1..19: note = siRNA sense sequence
  source 1..19: mol_type = other RNA
tcattctctctctctttct

SEQ ID NO: 21371 - RNA, 19 nt, synthetic construct
  misc_feature 1..19: note = siRNA antisense sequence
  source 1..19: mol_type = other RNA
agaaagagagagagaatga

SEQ ID NO: 21372 - RNA, 19 nt, synthetic construct
  misc_feature 1..19: note = siRNA sense sequence
  source 1..19: mol_type = other RNA
tctctctctctttctctct

SEQ ID NO: 21373 - RNA, 19 nt, synthetic construct
  misc_feature 1..19: note = siRNA antisense sequence
  source 1..19: mol_type = other RNA
agagagaaagagagagaga

SEQ ID NO: 21374 - RNA, 19 nt, synthetic construct
  misc_feature 1..19: note = siRNA sense sequence
  source 1..19: mol_type = other RNA
ctctctctctttctctctc

SEQ ID NO: 21375 - RNA, 19 nt, synthetic construct
  misc_feature 1..19: note = siRNA antisense sequence
  source 1..19: mol_type = other RNA
gagagagaaagagagagag

SEQ ID NO: 21376 - RNA, 19 nt, synthetic construct
  misc_feature 1..19: note = siRNA sense sequence
  source 1..19: mol_type = other RNA
tctctctctttctctctca

SEQ ID NO: 21377 - RNA, 19 nt, synthetic construct
  misc_feature 1..19: note = siRNA antisense sequence
  source 1..19: mol_type = other RNA
tgagagagaaagagagaga

SEQ ID NO: 21378 - RNA, 19 nt, synthetic construct
  misc_feature 1..19: note = siRNA sense sequence
  source 1..19: mol_type = other RNA
ctctctctttctctctcac

SEQ ID NO: 21379 - RNA, 19 nt, synthetic construct
  misc_feature 1..19: note = siRNA antisense sequence
  source 1..19: mol_type = other RNA
gtgagagagaaagagagag

SEQ ID NO: 21380 - RNA, 19 nt, synthetic construct
  misc_feature 1..19: note = siRNA sense sequence
  source 1..19: mol_type = other RNA
tctctctttctctctcaca

SEQ ID NO: 21381 - RNA, 19 nt, synthetic construct
  misc_feature 1..19: note = siRNA antisense sequence
  source 1..19: mol_type = other RNA
tgtgagagagaaagagaga

SEQ ID NO: 21382 - RNA, 19 nt, synthetic construct
  misc_feature 1..19: note = siRNA sense sequence
  source 1..19: mol_type = other RNA
caagcacactttcacccta

SEQ ID NO: 21383 - RNA, 19 nt, synthetic construct
  misc_feature 1..19: note = siRNA antisense sequence
  source 1..19: mol_type = other RNA
tagggtgaaagtgtgcttg

SEQ ID NO: 21384 - RNA, 19 nt, synthetic construct
  misc_feature 1..19: note = siRNA sense sequence
  source 1..19: mol_type = other RNA
aagcacactttcaccctac

SEQ ID NO: 21385 - RNA, 19 nt, synthetic construct
  misc_feature 1..19: note = siRNA antisense sequence
  source 1..19: mol_type = other RNA
gtagggtgaaagtgtgctt

SEQ ID NO: 21386 - RNA, 19 nt, synthetic construct
  misc_feature 1..19: note = siRNA sense sequence
  source 1..19: mol_type = other RNA
agcacactttcaccctacc

SEQ ID NO: 21387 - RNA, 19 nt, synthetic construct
  misc_feature 1..19: note = siRNA antisense sequence
  source 1..19: mol_type = other RNA
ggtagggtgaaagtgtgct

SEQ ID NO: 21388 - RNA, 19 nt, synthetic construct
  misc_feature 1..19: note = siRNA sense sequence
  source 1..19: mol_type = other RNA
gcacactttcaccctacca

SEQ ID NO: 21389 - RNA, 19 nt, synthetic construct
  misc_feature 1..19: note = siRNA antisense sequence
  source 1..19: mol_type = other RNA
tggtagggtgaaagtgtgc

SEQ ID NO: 21390 - RNA, 19 nt, synthetic construct
  misc_feature 1..19: note = siRNA sense sequence
  source 1..19: mol_type = other RNA
cacactttcaccctaccaa

SEQ ID NO: 21391 - RNA, 19 nt, synthetic construct
  misc_feature 1..19: note = siRNA antisense sequence
  source 1..19: mol_type = other RNA
ttggtagggtgaaagtgtg

SEQ ID NO: 21392 - RNA, 19 nt, synthetic construct
  misc_feature 1..19: note = siRNA sense sequence
  source 1..19: mol_type = other RNA
acactttcaccctaccaat

SEQ ID NO: 21393 - RNA, 19 nt, synthetic construct
  misc_feature 1..19: note = siRNA antisense sequence
  source 1..19: mol_type = other RNA
attggtagggtgaaagtgt

SEQ ID NO: 21394 - RNA, 19 nt, synthetic construct
  misc_feature 1..19: note = siRNA sense sequence
  source 1..19: mol_type = other RNA
cactttcaccctaccaatt

SEQ ID NO: 21395 - RNA, 19 nt, synthetic construct
  misc_feature 1..19: note = siRNA antisense sequence
  source 1..19: mol_type = other RNA
aattggtagggtgaaagtg

SEQ ID NO: 21396 - RNA, 19 nt, synthetic construct
  misc_feature 1..19: note = siRNA sense sequence
  source 1..19: mol_type = other RNA
actttcaccctaccaatta

SEQ ID NO: 21397 - RNA, 19 nt, synthetic construct
  misc_feature 1..19: note = siRNA antisense sequence
  source 1..19: mol_type = other RNA
taattggtagggtgaaagt

SEQ ID NO: 21398 - RNA, 19 nt, synthetic construct
  misc_feature 1..19: note = siRNA sense sequence
  source 1..19: mol_type = other RNA
ctttcaccctaccaattag

SEQ ID NO: 21399 - RNA, 19 nt, synthetic construct
  misc_feature 1..19: note = siRNA antisense sequence
  source 1..19: mol_type = other RNA
ctaattggtagggtgaaag

SEQ ID NO: 21400 - RNA, 19 nt, synthetic construct
  misc_feature 1..19: note = siRNA sense sequence
  source 1..19: mol_type = other RNA
aaatacagtgtcctttgga

SEQ ID NO: 21401 - RNA, 19 nt, synthetic construct
  misc_feature 1..19: note = siRNA antisense sequence
  source 1..19: mol_type = other RNA
tccaaaggacactgtattt

SEQ ID NO: 21402 - RNA, 19 nt, synthetic construct
  misc_feature 1..19: note = siRNA sense sequence
  source 1..19: mol_type = other RNA
aatacagtgtcctttggat

SEQ ID NO: 21403 - RNA, 19 nt, synthetic construct
  misc_feature 1..19: note = siRNA antisense sequence
  source 1..19: mol_type = other RNA
atccaaaggacactgtatt

SEQ ID NO: 21404 - RNA, 19 nt, synthetic construct
  misc_feature 1..19: note = siRNA sense sequence
  source 1..19: mol_type = other RNA
acagtgtcctttggatagg

SEQ ID NO: 21405 - RNA, 19 nt, synthetic construct
  misc_feature 1..19: note = siRNA antisense sequence
  source 1..19: mol_type = other RNA
cctatccaaaggacactgt

SEQ ID NO: 21406 - RNA, 19 nt, synthetic construct
  misc_feature 1..19: note = siRNA sense sequence
  source 1..19: mol_type = other RNA
cagtgtcctttggataggc

SEQ ID NO: 21407 - RNA, 19 nt, synthetic construct
  misc_feature 1..19: note = siRNA antisense sequence
  source 1..19: mol_type = other RNA
gcctatccaaaggacactg

SEQ ID NO: 21408 - RNA, 19 nt, synthetic construct
  misc_feature 1..19: note = siRNA sense sequence
  source 1..19: mol_type = other RNA
agtgtcctttggataggca

SEQ ID NO: 21409 - RNA, 19 nt, synthetic construct
  misc_feature 1..19: note = siRNA antisense sequence
  source 1..19: mol_type = other RNA
tgcctatccaaaggacact

SEQ ID NO: 21410 - RNA, 19 nt, synthetic construct
  misc_feature 1..19: note = siRNA sense sequence
  source 1..19: mol_type = other RNA
gtgtcctttggataggcaa

SEQ ID NO: 21411 - RNA, 19 nt, synthetic construct
  misc_feature 1..19: note = siRNA antisense sequence
  source 1..19: mol_type = other RNA
ttgcctatccaaaggacac

SEQ ID NO: 21412 - RNA, 19 nt, synthetic construct
  misc_feature 1..19: note = siRNA sense sequence
  source 1..19: mol_type = other RNA
ttggataggcaaatcacct

SEQ ID NO: 21413 - RNA, 19 nt, synthetic construct
  misc_feature 1..19: note = siRNA antisense sequence
  source 1..19: mol_type = other RNA
aggtgatttgcctatccaa

SEQ ID NO: 21414 - RNA, 19 nt, synthetic construct
  misc_feature 1..19: note = siRNA sense sequence
  source 1..19: mol_type = other RNA
taggcaaatcaccttcaca

SEQ ID NO: 21415 - RNA, 19 nt, synthetic construct
  misc_feature 1..19: note = siRNA antisense sequence
  source 1..19: mol_type = other RNA
tgtgaaggtgatttgccta

SEQ ID NO: 21416 - RNA, 19 nt, synthetic construct
  misc_feature 1..19: note = siRNA sense sequence
  source 1..19: mol_type = other RNA
aggcaaatcaccttcacac

SEQ ID NO: 21417 - RNA, 19 nt, synthetic construct
  misc_feature 1..19: note = siRNA antisense sequence
  source 1..19: mol_type = other RNA
gtgtgaaggtgatttgcct

SEQ ID NO: 21418 - RNA, 19 nt, synthetic construct
  misc_feature 1..19: note = siRNA sense sequence
  source 1..19: mol_type = other RNA
ggcaaatcaccttcacact

SEQ ID NO: 21419 - RNA, 19 nt, synthetic construct
  misc_feature 1..19: note = siRNA antisense sequence
  source 1..19: mol_type = other RNA
agtgtgaaggtgatttgcc

SEQ ID NO: 21420 - RNA, 19 nt, synthetic construct
  misc_feature 1..19: note = siRNA sense sequence
  source 1..19: mol_type = other RNA
gcaaatcaccttcacactt

SEQ ID NO: 21421 - RNA, 19 nt, synthetic construct
  misc_feature 1..19: note = siRNA antisense sequence
  source 1..19: mol_type = other RNA
aagtgtgaaggtgatttgc

SEQ ID NO: 21422 - RNA, 19 nt, synthetic construct
  misc_feature 1..19: note = siRNA sense sequence
  source 1..19: mol_type = other RNA
caaatcaccttcacacttg

SEQ ID NO: 21423 - RNA, 19 nt, synthetic construct
  misc_feature 1..19: note = siRNA antisense sequence
  source 1..19: mol_type = other RNA
caagtgtgaaggtgatttg

SEQ ID NO: 21424 - RNA, 19 nt, synthetic construct
  misc_feature 1..19: note = siRNA sense sequence
  source 1..19: mol_type = other RNA
cacttgagtgtgattagtt

SEQ ID NO: 21425 - RNA, 19 nt, synthetic construct
  misc_feature 1..19: note = siRNA antisense sequence
  source 1..19: mol_type = other RNA
aactaatcacactcaagtg

SEQ ID NO: 21426 - RNA, 19 nt, synthetic construct
  misc_feature 1..19: note = siRNA sense sequence
  source 1..19: mol_type = other RNA
acttgagtgtgattagttc

SEQ ID NO: 21427 - RNA, 19 nt, synthetic construct
  misc_feature 1..19: note = siRNA antisense sequence
  source 1..19: mol_type = other RNA
gaactaatcacactcaagt

SEQ ID NO: 21428 - RNA, 19 nt, synthetic construct
  misc_feature 1..19: note = siRNA sense sequence
  source 1..19: mol_type = other RNA
cttgagtgtgattagttct

SEQ ID NO: 21429 - RNA, 19 nt, synthetic construct
  misc_feature 1..19: note = siRNA antisense sequence
  source 1..19: mol_type = other RNA
agaactaatcacactcaag

SEQ ID NO: 21430 - RNA, 19 nt, synthetic construct
  misc_feature 1..19: note = siRNA sense sequence
  source 1..19: mol_type = other RNA
ttgagtgtgattagttctt

SEQ ID NO: 21431 - RNA, 19 nt, synthetic construct
  misc_feature 1..19: note = siRNA antisense sequence
  source 1..19: mol_type = other RNA
aagaactaatcacactcaa

SEQ ID NO: 21432 - RNA, 19 nt, synthetic construct
  misc_feature 1..19: note = siRNA sense sequence
  source 1..19: mol_type = other RNA
gtgtgattagttctttgct

SEQ ID NO: 21433 - RNA, 19 nt, synthetic construct
  misc_feature 1..19: note = siRNA antisense sequence
  source 1..19: mol_type = other RNA
agcaaagaactaatcacac

SEQ ID NO: 21434 - RNA, 19 nt, synthetic construct
  misc_feature 1..19: note = siRNA sense sequence
  source 1..19: mol_type = other RNA
gtgattagttctttgctta

SEQ ID NO: 21435 - RNA, 19 nt, synthetic construct
  misc_feature 1..19: note = siRNA antisense sequence
  source 1..19: mol_type = other RNA
taagcaaagaactaatcac

SEQ ID NO: 21436 - RNA, 19 nt, synthetic construct
  misc_feature 1..19: note = siRNA sense sequence
  source 1..19: mol_type = other RNA
tgattagttctttgcttag

SEQ ID NO: 21437 - RNA, 19 nt, synthetic construct
  misc_feature 1..19: note = siRNA antisense sequence
  source 1..19: mol_type = other RNA
ctaagcaaagaactaatca

SEQ ID NO: 21438 - RNA, 19 nt, synthetic construct
  misc_feature 1..19: note = siRNA sense sequence
  source 1..19: mol_type = other RNA
gattagttctttgcttagt

SEQ ID NO: 21439 - RNA, 19 nt, synthetic construct
  misc_feature 1..19: note = siRNA antisense sequence
  source 1..19: mol_type = other RNA
actaagcaaagaactaatc

SEQ ID NO: 21440 - RNA, 19 nt, synthetic construct
  misc_feature 1..19: note = siRNA sense sequence
  source 1..19: mol_type = other RNA
attagttctttgcttagtg

SEQ ID NO: 21441 - RNA, 19 nt, synthetic construct
  misc_feature 1..19: note = siRNA antisense sequence
  source 1..19: mol_type = other RNA
cactaagcaaagaactaat

SEQ ID NO: 21442 - RNA, 19 nt, synthetic construct
  misc_feature 1..19: note = siRNA sense sequence
  source 1..19: mol_type = other RNA
ttagttctttgcttagtga

SEQ ID NO: 21443 - RNA, 19 nt, synthetic construct
  misc_feature 1..19: note = siRNA antisense sequence
  source 1..19: mol_type = other RNA
tcactaagcaaagaactaa

SEQ ID NO: 21444 - RNA, 19 nt, synthetic construct
  misc_feature 1..19: note = siRNA sense sequence
  source 1..19: mol_type = other RNA
tagttctttgcttagtgaa

SEQ ID NO: 21445 - RNA, 19 nt, synthetic construct
  misc_feature 1..19: note = siRNA antisense sequence
  source 1..19: mol_type = other RNA
ttcactaagcaaagaacta

SEQ ID NO: 21446 - RNA, 19 nt, synthetic construct
  misc_feature 1..19: note = siRNA sense sequence
  source 1..19: mol_type = other RNA
aagttgctgggttctcctg

SEQ ID NO: 21447 - RNA, 19 nt, synthetic construct
  misc_feature 1..19: note = siRNA antisense sequence
  source 1..19: mol_type = other RNA
caggagaacccagcaactt

SEQ ID NO: 21448 - RNA, 19 nt, synthetic construct
  misc_feature 1..19: note = siRNA sense sequence
  source 1..19: mol_type = other RNA
tgctgggttctcctggaat

SEQ ID NO: 21449 - RNA, 19 nt, synthetic construct
  misc_feature 1..19: note = siRNA antisense sequence
  source 1..19: mol_type = other RNA
attccaggagaacccagca

SEQ ID NO: 21450 - RNA, 19 nt, synthetic construct
  misc_feature 1..19: note = siRNA sense sequence
  source 1..19: mol_type = other RNA
gctgggttctcctggaatt

SEQ ID NO: 21451 - RNA, 19 nt, synthetic construct
  misc_feature 1..19: note = siRNA antisense sequence
  source 1..19: mol_type = other RNA
aattccaggagaacccagc

SEQ ID NO: 21452 - RNA, 19 nt, synthetic construct
  misc_feature 1..19: note = siRNA sense sequence
  source 1..19: mol_type = other RNA
ctgggttctcctggaattg

SEQ ID NO: 21453 - RNA, 19 nt, synthetic construct
  misc_feature 1..19: note = siRNA antisense sequence
  source 1..19: mol_type = other RNA
caattccaggagaacccag

SEQ ID NO: 21454 - RNA, 19 nt, synthetic construct
  misc_feature 1..19: note = siRNA sense sequence
  source 1..19: mol_type = other RNA
tgggttctcctggaattgg

SEQ ID NO: 21455 - RNA, 19 nt, synthetic construct
  misc_feature 1..19: note = siRNA antisense sequence
  source 1..19: mol_type = other RNA
ccaattccaggagaaccca

SEQ ID NO: 21456 - RNA, 19 nt, synthetic construct
  misc_feature 1..19: note = siRNA sense sequence
  source 1..19: mol_type = other RNA
gggttctcctggaattgga

SEQ ID NO: 21457 - RNA, 19 nt, synthetic construct
  misc_feature 1..19: note = siRNA antisense sequence
  source 1..19: mol_type = other RNA
tccaattccaggagaaccc

SEQ ID NO: 21458 - RNA, 19 nt, synthetic construct
  misc_feature 1..19: note = siRNA sense sequence
  source 1..19: mol_type = other RNA
ggttctcctggaattggaa

SEQ ID NO: 21459 - RNA, 19 nt, synthetic construct
  misc_feature 1..19: note = siRNA antisense sequence
  source 1..19: mol_type = other RNA
ttccaattccaggagaacc

SEQ ID NO: 21460 - RNA, 19 nt, synthetic construct
  misc_feature 1..19: note = siRNA sense sequence
  source 1..19: mol_type = other RNA
gttctcctggaattggaag

SEQ ID NO: 21461 - RNA, 19 nt, synthetic construct
  misc_feature 1..19: note = siRNA antisense sequence
  source 1..19: mol_type = other RNA
cttccaattccaggagaac

SEQ ID NO: 21462 - RNA, 19 nt, synthetic construct
  misc_feature 1..19: note = siRNA sense sequence
  source 1..19: mol_type = other RNA
tctcctggaattggaagaa

SEQ ID NO: 21463 - RNA, 19 nt, synthetic construct
  misc_feature 1..19: note = siRNA antisense sequence
  source 1..19: mol_type = other RNA
ttcttccaattccaggaga

SEQ ID NO: 21464 - RNA, 19 nt, synthetic construct
  misc_feature 1..19: note = siRNA sense sequence
  source 1..19: mol_type = other RNA
ctcctggaattggaagaag

SEQ ID NO: 21465 - RNA, 19 nt, synthetic construct
  misc_feature 1..19: note = siRNA antisense sequence
  source 1..19: mol_type = other RNA
cttcttccaattccaggag

SEQ ID NO: 21466 - RNA, 19 nt, synthetic construct
  misc_feature 1..19: note = siRNA sense sequence
  source 1..19: mol_type = other RNA
tggaattggaagaaggcaa

SEQ ID NO: 21467 - RNA, 19 nt, synthetic construct
  misc_feature 1..19: note = siRNA antisense sequence
  source 1..19: mol_type = other RNA
ttgccttcttccaattcca

SEQ ID NO: 21468 - RNA, 19 nt, synthetic construct
  misc_feature 1..19: note = siRNA sense sequence
  source 1..19: mol_type = other RNA
gaagaaggcaatgtgaatt

SEQ ID NO: 21469 - RNA, 19 nt, synthetic construct
  misc_feature 1..19: note = siRNA antisense sequence
  source 1..19: mol_type = other RNA
aattcacattgccttcttc

SEQ ID NO: 21470 - RNA, 19 nt, synthetic construct
  misc_feature 1..19: note = siRNA sense sequence
  source 1..19: mol_type = other RNA
aagaaggcaatgtgaatta

SEQ ID NO: 21471 - RNA, 19 nt, synthetic construct
  misc_feature 1..19: note = siRNA antisense sequence
  source 1..19: mol_type = other RNA
taattcacattgccttctt

SEQ ID NO: 21472 - RNA, 19 nt, synthetic construct
  misc_feature 1..19: note = siRNA sense sequence
  source 1..19: mol_type = other RNA
agaaggcaatgtgaattag

SEQ ID NO: 21473 - RNA, 19 nt, synthetic construct
  misc_feature 1..19: note = siRNA antisense sequence
  source 1..19: mol_type = other RNA
ctaattcacattgccttct

SEQ ID NO: 21474 - RNA, 19 nt, synthetic construct
  misc_feature 1..19: note = siRNA sense sequence
  source 1..19: mol_type = other RNA
aaggcaatgtgaattagga

SEQ ID NO: 21475 - RNA, 19 nt, synthetic construct
  misc_feature 1..19: note = siRNA antisense sequence
  source 1..19: mol_type = other RNA
tcctaattcacattgcctt

SEQ ID NO: 21476 - RNA, 19 nt, synthetic construct
  misc_feature 1..19: note = siRNA sense sequence
  source 1..19: mol_type = other RNA
gggtactcagtatgatagg

SEQ ID NO: 21477 - RNA, 19 nt, synthetic construct
  misc_feature 1..19: note = siRNA antisense sequence
  source 1..19: mol_type = other RNA
cctatcatactgagtaccc

SEQ ID NO: 21478 - RNA, 19 nt, synthetic construct
  misc_feature 1..19: note = siRNA sense sequence
  source 1..19: mol_type = other RNA
ctcagtatgataggaaggt

SEQ ID NO: 21479 - RNA, 19 nt, synthetic construct
  misc_feature 1..19: note = siRNA antisense sequence
  source 1..19: mol_type = other RNA
accttcctatcatactgag

SEQ ID NO: 21480 - RNA, 19 nt, synthetic construct
  misc_feature 1..19: note = siRNA sense sequence
  source 1..19: mol_type = other RNA
tcagtatgataggaaggtg

SEQ ID NO: 21481 - RNA, 19 nt, synthetic construct
  misc_feature 1..19: note = siRNA antisense sequence
  source 1..19: mol_type = other RNA
caccttcctatcatactga

SEQ ID NO: 21482 - RNA, 19 nt, synthetic construct
  misc_feature 1..19: note = siRNA sense sequence
  source 1..19: mol_type = other RNA
cagtatgataggaaggtgg

SEQ ID NO: 21483 - RNA, 19 nt, synthetic construct
  misc_feature 1..19: note = siRNA antisense sequence
  source 1..19: mol_type = other RNA
ccaccttcctatcatactg

SEQ ID NO: 21484 - RNA, 19 nt, synthetic construct
  misc_feature 1..19: note = siRNA sense sequence
  source 1..19: mol_type = other RNA
agtatgataggaaggtggg

SEQ ID NO: 21485 - RNA, 19 nt, synthetic construct
  misc_feature 1..19: note = siRNA antisense sequence
  source 1..19: mol_type = other RNA
cccaccttcctatcatact

SEQ ID NO: 21486 - RNA, 19 nt, synthetic construct
  misc_feature 1..19: note = siRNA sense sequence
  source 1..19: mol_type = other RNA
gaaggtgggaagaaggagg

SEQ ID NO: 21487 - RNA, 19 nt, synthetic construct
  misc_feature 1..19: note = siRNA antisense sequence
  source 1..19: mol_type = other RNA
cctccttcttcccaccttc

SEQ ID NO: 21488 - RNA, 19 nt, synthetic construct
  misc_feature 1..19: note = siRNA sense sequence
  source 1..19: mol_type = other RNA
aagtagtggttcttatttg

SEQ ID NO: 21489 - RNA, 19 nt, synthetic construct
  misc_feature 1..19: note = siRNA antisense sequence
  source 1..19: mol_type = other RNA
caaataagaaccactactt

SEQ ID NO: 21490 - RNA, 19 nt, synthetic construct
  misc_feature 1..19: note = siRNA sense sequence
  source 1..19: mol_type = other RNA
agtagtggttcttatttgg

SEQ ID NO: 21491 - RNA, 19 nt, synthetic construct
  misc_feature 1..19: note = siRNA antisense sequence
  source 1..19: mol_type = other RNA
ccaaataagaaccactact

SEQ ID NO: 21492 - RNA, 19 nt, synthetic construct
  misc_feature 1..19: note = siRNA sense sequence
  source 1..19: mol_type = other RNA
gtagtggttcttatttgga

SEQ ID NO: 21493 - RNA, 19 nt, synthetic construct
  misc_feature 1..19: note = siRNA antisense sequence
  source 1..19: mol_type = other RNA
tccaaataagaaccactac

SEQ ID NO: 21494 - RNA, 19 nt, synthetic construct
  misc_feature 1..19: note = siRNA sense sequence
  source 1..19: mol_type = other RNA
tagtggttcttatttggac

SEQ ID NO: 21495 - RNA, 19 nt, synthetic construct
  misc_feature 1..19: note = siRNA antisense sequence
  source 1..19: mol_type = other RNA
gtccaaataagaaccacta

SEQ ID NO: 21496 - RNA, 19 nt, synthetic construct
  misc_feature 1..19: note = siRNA sense sequence
  source 1..19: mol_type = other RNA
agtggttcttatttggact

SEQ ID NO: 21497 - RNA, 19 nt, synthetic construct
  misc_feature 1..19: note = siRNA antisense sequence
  source 1..19: mol_type = other RNA
agtccaaataagaaccact

SEQ ID NO: 21498 - RNA, 19 nt, synthetic construct
  misc_feature 1..19: note = siRNA sense sequence
  source 1..19: mol_type = other RNA
gtggttcttatttggactt

SEQ ID NO: 21499 - RNA, 19 nt, synthetic construct
  misc_feature 1..19: note = siRNA antisense sequence
  source 1..19: mol_type = other RNA
aagtccaaataagaaccac

SEQ ID NO: 21500 - RNA, 19 nt, synthetic construct
  misc_feature 1..19: note = siRNA sense sequence
  source 1..19: mol_type = other RNA
ggttcttatttggactttc

SEQ ID NO: 21501 - RNA, 19 nt, synthetic construct
  misc_feature 1..19: note = siRNA antisense sequence
  source 1..19: mol_type = other RNA
gaaagtccaaataagaacc

SEQ ID NO: 21502 - RNA, 19 nt, synthetic construct
  misc_feature 1..19: note = siRNA sense sequence
  source 1..19: mol_type = other RNA
gttcttatttggactttcc

SEQ ID NO: 21503 - RNA, 19 nt, synthetic construct
  misc_feature 1..19: note = siRNA antisense sequence
  source 1..19: mol_type = other RNA
ggaaagtccaaataagaac

SEQ ID NO: 21504 - RNA, 19 nt, synthetic construct
  misc_feature 1..19: note = siRNA sense sequence
  source 1..19: mol_type = other RNA
ccctgataatctcttagga

SEQ ID NO: 21505 - RNA, 19 nt, synthetic construct
  misc_feature 1..19: note = siRNA antisense sequence
  source 1..19: mol_type = other RNA
tcctaagagattatcaggg

SEQ ID NO: 21506 - RNA, 19 nt, synthetic construct
  misc_feature 1..19: note = siRNA sense sequence
  source 1..19: mol_type = other RNA
cttaggaagataatgacac

SEQ ID NO: 21507 - RNA, 19 nt, synthetic construct
  misc_feature 1..19: note = siRNA antisense sequence
  source 1..19: mol_type = other RNA
gtgtcattatcttcctaag

SEQ ID NO: 21508 - RNA, 19 nt, synthetic construct
  misc_feature 1..19: note = siRNA sense sequence
  source 1..19: mol_type = other RNA
ttaggaagataatgacact

SEQ ID NO: 21509 - RNA, 19 nt, synthetic construct
  misc_feature 1..19: note = siRNA antisense sequence
  source 1..19: mol_type = other RNA
agtgtcattatcttcctaa

SEQ ID NO: 21510 - RNA, 19 nt, synthetic construct
  misc_feature 1..19: note = siRNA sense sequence
  source 1..19: mol_type = other RNA
taggaagataatgacactt

SEQ ID NO: 21511 - RNA, 19 nt, synthetic construct
  misc_feature 1..19: note = siRNA antisense sequence
  source 1..19: mol_type = other RNA
aagtgtcattatcttccta

SEQ ID NO: 21512 - RNA, 19 nt, synthetic construct
  misc_feature 1..19: note = siRNA sense sequence
  source 1..19: mol_type = other RNA
aggaagataatgacactta

SEQ ID NO: 21513 - RNA, 19 nt, synthetic construct
  misc_feature 1..19: note = siRNA antisense sequence
  source 1..19: mol_type = other RNA
taagtgtcattatcttcct

SEQ ID NO: 21514 - RNA, 19 nt, synthetic construct
  misc_feature 1..19: note = siRNA sense sequence
  source 1..19: mol_type = other RNA
ggaagataatgacacttaa

SEQ ID NO: 21515 - RNA, 19 nt, synthetic construct
  misc_feature 1..19: note = siRNA antisense sequence
  source 1..19: mol_type = other RNA
ttaagtgtcattatcttcc

SEQ ID NO: 21516 - RNA, 19 nt, synthetic construct
  misc_feature 1..19: note = siRNA sense sequence
  source 1..19: mol_type = other RNA
gaagataatgacacttaag

SEQ ID NO: 21517 - RNA, 19 nt, synthetic construct
  misc_feature 1..19: note = siRNA antisense sequence
  source 1..19: mol_type = other RNA
cttaagtgtcattatcttc

SEQ ID NO: 21518 - RNA, 19 nt, synthetic construct
  misc_feature 1..19: note = siRNA sense sequence
  source 1..19: mol_type = other RNA
aagtttaaattgtgaagcc

SEQ ID NO: 21519 - RNA, 19 nt, synthetic construct
  misc_feature 1..19: note = siRNA antisense sequence
  source 1..19: mol_type = other RNA
ggcttcacaatttaaactt

SEQ ID NO: 21520 - RNA, 19 nt, synthetic construct
  misc_feature 1..19: note = siRNA sense sequence
  source 1..19: mol_type = other RNA
agtttaaattgtgaagcct

SEQ ID NO: 21521 - RNA, 19 nt, synthetic construct
  misc_feature 1..19: note = siRNA antisense sequence
  source 1..19: mol_type = other RNA
aggcttcacaatttaaact

SEQ ID NO: 21522 - RNA, 19 nt, synthetic construct
  misc_feature 1..19: note = siRNA sense sequence
  source 1..19: mol_type = other RNA
taaattgtgaagcctgtca

SEQ ID NO: 21523 - RNA, 19 nt, synthetic construct
  misc_feature 1..19: note = siRNA antisense sequence
  source 1..19: mol_type = other RNA
tgacaggcttcacaattta

SEQ ID NO: 21524 - RNA, 19 nt, synthetic construct
  misc_feature 1..19: note = siRNA sense sequence
  source 1..19: mol_type = other RNA
aaattgtgaagcctgtcag

SEQ ID NO: 21525 - RNA, 19 nt, synthetic construct
  misc_feature 1..19: note = siRNA antisense sequence
  source 1..19: mol_type = other RNA
ctgacaggcttcacaattt

SEQ ID NO: 21526 - RNA, 19 nt, synthetic construct
  misc_feature 1..19: note = siRNA sense sequence
  source 1..19: mol_type = other RNA
aattgtgaagcctgtcagt

SEQ ID NO: 21527 - RNA, 19 nt, synthetic construct
  misc_feature 1..19: note = siRNA antisense sequence
  source 1..19: mol_type = other RNA
actgacaggcttcacaatt

SEQ ID NO: 21528 - RNA, 19 nt, synthetic construct
  misc_feature 1..19: note = siRNA sense sequence
  source 1..19: mol_type = other RNA
attgtgaagcctgtcagtt

SEQ ID NO: 21529 - RNA, 19 nt, synthetic construct
  misc_feature 1..19: note = siRNA antisense sequence
  source 1..19: mol_type = other RNA
aactgacaggcttcacaat

SEQ ID NO: 21530 - RNA, 19 nt, synthetic construct
  misc_feature 1..19: note = siRNA sense sequence
  source 1..19: mol_type = other RNA
ttgtgaagcctgtcagttg

SEQ ID NO: 21531 - RNA, 19 nt, synthetic construct
  misc_feature 1..19: note = siRNA antisense sequence
  source 1..19: mol_type = other RNA
caactgacaggcttcacaa

SEQ ID NO: 21532 - RNA, 19 nt, synthetic construct
  misc_feature 1..19: note = siRNA sense sequence
  source 1..19: mol_type = other RNA
tgtgaagcctgtcagttga

SEQ ID NO: 21533 - RNA, 19 nt, synthetic construct
  misc_feature 1..19: note = siRNA antisense sequence
  source 1..19: mol_type = other RNA
tcaactgacaggcttcaca

SEQ ID NO: 21534 - RNA, 19 nt, synthetic construct
  misc_feature 1..19: note = siRNA sense sequence
  source 1..19: mol_type = other RNA
gtgaagcctgtcagttgag

SEQ ID NO: 21535 - RNA, 19 nt, synthetic construct
  misc_feature 1..19: note = siRNA antisense sequence
  source 1..19: mol_type = other RNA
ctcaactgacaggcttcac

SEQ ID NO: 21536 - RNA, 19 nt, synthetic construct
  misc_feature 1..19: note = siRNA sense sequence
  source 1..19: mol_type = other RNA
caatcattttaggacgttt

SEQ ID NO: 21537 - RNA, 19 nt, synthetic construct
  misc_feature 1..19: note = siRNA antisense sequence
  source 1..19: mol_type = other RNA
aaacgtcctaaaatgattg

SEQ ID NO: 21538 - RNA, 19 nt, synthetic construct
  misc_feature 1..19: note = siRNA sense sequence
  source 1..19: mol_type = other RNA
ttttaggacgtttatttgc

SEQ ID NO: 21539 - RNA, 19 nt, synthetic construct
  misc_feature 1..19: note = siRNA antisense sequence
  source 1..19: mol_type = other RNA
gcaaataaacgtcctaaaa

SEQ ID NO: 21540 - RNA, 19 nt, synthetic construct
  misc_feature 1..19: note = siRNA sense sequence
  source 1..19: mol_type = other RNA
tttaggacgtttatttgcc

SEQ ID NO: 21541 - RNA, 19 nt, synthetic construct
  misc_feature 1..19: note = siRNA antisense sequence
  source 1..19: mol_type = other RNA
ggcaaataaacgtcctaaa

SEQ ID NO: 21542 - RNA, 19 nt, synthetic construct
  misc_feature 1..19: note = siRNA sense sequence
  source 1..19: mol_type = other RNA
ttaggacgtttatttgcca

SEQ ID NO: 21543 - RNA, 19 nt, synthetic construct
  misc_feature 1..19: note = siRNA antisense sequence
  source 1..19: mol_type = other RNA
tggcaaataaacgtcctaa

SEQ ID NO: 21544 - RNA, 19 nt, synthetic construct
  misc_feature 1..19: note = siRNA sense sequence
  source 1..19: mol_type = other RNA
gccaaaattaaggacgtgc

SEQ ID NO: 21545 - RNA, 19 nt, synthetic construct
  misc_feature 1..19: note = siRNA antisense sequence
  source 1..19: mol_type = other RNA
gcacgtccttaattttggc

SEQ ID NO: 21546 - RNA, 19 nt, synthetic construct
  misc_feature 1..19: note = siRNA sense sequence
  source 1..19: mol_type = other RNA
ccaaaattaaggacgtgcg

SEQ ID NO: 21547 - RNA, 19 nt, synthetic construct
  misc_feature 1..19: note = siRNA antisense sequence
  source 1..19: mol_type = other RNA
cgcacgtccttaattttgg

SEQ ID NO: 21548 - RNA, 19 nt, synthetic construct
  misc_feature 1..19: note = siRNA sense sequence
  source 1..19: mol_type = other RNA
caaaattaaggacgtgcgc

SEQ ID NO: 21549 - RNA, 19 nt, synthetic construct
  misc_feature 1..19: note = siRNA antisense sequence
  source 1..19: mol_type = other RNA
gcgcacgtccttaattttg

SEQ ID NO: 21550 - RNA, 19 nt, synthetic construct
  misc_feature 1..19: note = siRNA sense sequence
  source 1..19: mol_type = other RNA
aaaattaaggacgtgcgcg

SEQ ID NO: 21551 - RNA, 19 nt, synthetic construct
  misc_feature 1..19: note = siRNA antisense sequence
  source 1..19: mol_type = other RNA
cgcgcacgtccttaatttt

SEQ ID NO: 21552 - RNA, 19 nt, synthetic construct
  misc_feature 1..19: note = siRNA sense sequence
  source 1..19: mol_type = other RNA
gggaagacaggtctatgcc

SEQ ID NO: 21553 - RNA, 19 nt, synthetic construct
  misc_feature 1..19: note = siRNA antisense sequence
  source 1..19: mol_type = other RNA
ggcatagacctgtcttccc

SEQ ID NO: 21554 - RNA, 19 nt, synthetic construct
  misc_feature 1..19: note = siRNA sense sequence
  source 1..19: mol_type = other RNA
caggtctatgcctttctgg

SEQ ID NO: 21555 - RNA, 19 nt, synthetic construct
  misc_feature 1..19: note = siRNA antisense sequence
  source 1..19: mol_type = other RNA
ccagaaaggcatagacctg

SEQ ID NO: 21556 - RNA, 19 nt, synthetic construct
  misc_feature 1..19: note = siRNA sense sequence
  source 1..19: mol_type = other RNA
aggtctatgcctttctggg

SEQ ID NO: 21557 - RNA, 19 nt, synthetic construct
  misc_feature 1..19: note = siRNA antisense sequence
  source 1..19: mol_type = other RNA
cccagaaaggcatagacct

SEQ ID NO: 21558 - RNA, 19 nt, synthetic construct
  misc_feature 1..19: note = siRNA sense sequence
  source 1..19: mol_type = other RNA
ggtctatgcctttctggga

SEQ ID NO: 21559 - RNA, 19 nt, synthetic construct
  misc_feature 1..19: note = siRNA antisense sequence
  source 1..19: mol_type = other RNA
tcccagaaaggcatagacc

SEQ ID NO: 21560 - RNA, 19 nt, synthetic construct
  misc_feature 1..19: note = siRNA sense sequence
  source 1..19: mol_type = other RNA
gtctatgcctttctgggaa

SEQ ID NO: 21561 - RNA, 19 nt, synthetic construct
  misc_feature 1..19: note = siRNA antisense sequence
  source 1..19: mol_type = other RNA
ttcccagaaaggcatagac

SEQ ID NO: 21562 - RNA, 19 nt, synthetic construct
  misc_feature 1..19: note = siRNA sense sequence
  source 1..19: mol_type = other RNA
tctatgcctttctgggaag

SEQ ID NO: 21563 - RNA, 19 nt, synthetic construct
  misc_feature 1..19: note = siRNA antisense sequence
  source 1..19: mol_type = other RNA
cttcccagaaaggcataga

SEQ ID NO: 21564 - RNA, 19 nt, synthetic construct
  misc_feature 1..19: note = siRNA sense sequence
  source 1..19: mol_type = other RNA
ctatgcctttctgggaaga

SEQ ID NO: 21565 - RNA, 19 nt, synthetic construct
  misc_feature 1..19: note = siRNA antisense sequence
  source 1..19: mol_type = other RNA
tcttcccagaaaggcatag

SEQ ID NO: 21566 - RNA, 19 nt, synthetic construct
  misc_feature 1..19: note = siRNA sense sequence
  source 1..19: mol_type = other RNA
tatgcctttctgggaagat

SEQ ID NO: 21567 - RNA, 19 nt, synthetic construct
  misc_feature 1..19: note = siRNA antisense sequence
  source 1..19: mol_type = other RNA
atcttcccagaaaggcata

SEQ ID NO: 21568 - RNA, 19 nt, synthetic construct
  misc_feature 1..19: note = siRNA sense sequence
  source 1..19: mol_type = other RNA
atgcctttctgggaagatg

SEQ ID NO: 21569 - RNA, 19 nt, synthetic construct
  misc_feature 1..19: note = siRNA antisense sequence
  source 1..19: mol_type = other RNA
catcttcccagaaaggcat

SEQ ID NO: 21570 - RNA, 19 nt, synthetic construct
  misc_feature 1..19: note = siRNA sense sequence
  source 1..19: mol_type = other RNA
tgcctttctgggaagatga

SEQ ID NO: 21571 - RNA, 19 nt, synthetic construct
  misc_feature 1..19: note = siRNA antisense sequence
  source 1..19: mol_type = other RNA
tcatcttcccagaaaggca

SEQ ID NO: 21572 - RNA, 19 nt, synthetic construct
  misc_feature 1..19: note = siRNA sense sequence
  source 1..19: mol_type = other RNA
gcctttctgggaagatgat

SEQ ID NO: 21573 - RNA, 19 nt, synthetic construct
  misc_feature 1..19: note = siRNA antisense sequence
  source 1..19: mol_type = other RNA
atcatcttcccagaaaggc

SEQ ID NO: 21574 - RNA, 19 nt, synthetic construct
  misc_feature 1..19: note = siRNA sense sequence
  source 1..19: mol_type = other RNA
cctttctgggaagatgatt

SEQ ID NO: 21575 - RNA, 19 nt, synthetic construct
  misc_feature 1..19: note = siRNA antisense sequence
  source 1..19: mol_type = other RNA
aatcatcttcccagaaagg

SEQ ID NO: 21576 - RNA, 19 nt, synthetic construct
  misc_feature 1..19: note = siRNA sense sequence
  source 1..19: mol_type = other RNA
ctctgtctggcttagtcaa

SEQ ID NO: 21577 - RNA, 19 nt, synthetic construct
  misc_feature 1..19: note = siRNA antisense sequence
  source 1..19: mol_type = other RNA
ttgactaagccagacagag

SEQ ID NO: 21578 - RNA, 19 nt, synthetic construct
  misc_feature 1..19: note = siRNA sense sequence
  source 1..19: mol_type = other RNA
tctgtctggcttagtcaat

SEQ ID NO: 21579 - RNA, 19 nt, synthetic construct
  misc_feature 1..19: note = siRNA antisense sequence
  source 1..19: mol_type = other RNA
attgactaagccagacaga

SEQ ID NO: 21580 - RNA, 19 nt, synthetic construct
  misc_feature 1..19: note = siRNA sense sequence
  source 1..19: mol_type = other RNA
ctgtctggcttagtcaatc

SEQ ID NO: 21581 - RNA, 19 nt, synthetic construct
  misc_feature 1..19: note = siRNA antisense sequence
  source 1..19: mol_type = other RNA
gattgactaagccagacag

SEQ ID NO: 21582 - RNA, 19 nt, synthetic construct
  misc_feature 1..19: note = siRNA sense sequence
  source 1..19: mol_type = other RNA
tgtctggcttagtcaatct

SEQ ID NO: 21583 - RNA, 19 nt, synthetic construct
  misc_feature 1..19: note = siRNA antisense sequence
  source 1..19: mol_type = other RNA
agattgactaagccagaca

SEQ ID NO: 21584 - RNA, 19 nt, synthetic construct
  misc_feature 1..19: note = siRNA sense sequence
  source 1..19: mol_type = other RNA
gtctggcttagtcaatctg

SEQ ID NO: 21585 - RNA, 19 nt, synthetic construct
  misc_feature 1..19: note = siRNA antisense sequence
  source 1..19: mol_type = other RNA
cagattgactaagccagac

SEQ ID NO: 21586 - RNA, 19 nt, synthetic construct
  misc_feature 1..19: note = siRNA sense sequence
  source 1..19: mol_type = other RNA
tctggcttagtcaatctga

SEQ ID NO: 21587 - RNA, 19 nt, synthetic construct
  misc_feature 1..19: note = siRNA antisense sequence
  source 1..19: mol_type = other RNA
tcagattgactaagccaga

SEQ ID NO: 21588 - RNA, 19 nt, synthetic construct
  misc_feature 1..19: note = siRNA sense sequence
  source 1..19: mol_type = other RNA
ctggcttagtcaatctgaa

SEQ ID NO: 21589 - RNA, 19 nt, synthetic construct
  misc_feature 1..19: note = siRNA antisense sequence
  source 1..19: mol_type = other RNA
ttcagattgactaagccag

SEQ ID NO: 21590 - RNA, 19 nt, synthetic construct
  misc_feature 1..19: note = siRNA sense sequence
  source 1..19: mol_type = other RNA
cttagtcaatctgaatctg

SEQ ID NO: 21591 - RNA, 19 nt, synthetic construct
  misc_feature 1..19: note = siRNA antisense sequence
  source 1..19: mol_type = other RNA
cagattcagattgactaag

SEQ ID NO: 21592 - RNA, 19 nt, synthetic construct
  misc_feature 1..19: note = siRNA sense sequence
  source 1..19: mol_type = other RNA
ttagtcaatctgaatctgc

SEQ ID NO: 21593 - RNA, 19 nt, synthetic construct
  misc_feature 1..19: note = siRNA antisense sequence
  source 1..19: mol_type = other RNA
gcagattcagattgactaa

SEQ ID NO: 21594 - RNA, 19 nt, synthetic construct
  misc_feature 1..19: note = siRNA sense sequence
  source 1..19: mol_type = other RNA
tagtcaatctgaatctgca

SEQ ID NO: 21595 - RNA, 19 nt, synthetic construct
  misc_feature 1..19: note = siRNA antisense sequence
  source 1..19: mol_type = other RNA
tgcagattcagattgacta

SEQ ID NO: 21596 - RNA, 19 nt, synthetic construct
  misc_feature 1..19: note = siRNA sense sequence
  source 1..19: mol_type = other RNA
agtcaatctgaatctgcat

SEQ ID NO: 21597 - RNA, 19 nt, synthetic construct
  misc_feature 1..19: note = siRNA antisense sequence
  source 1..19: mol_type = other RNA
atgcagattcagattgact

SEQ ID NO: 21598 - RNA, 19 nt, synthetic construct
  misc_feature 1..19: note = siRNA sense sequence
  source 1..19: mol_type = other RNA
gtcaatctgaatctgcatt

SEQ ID NO: 21599 - RNA, 19 nt, synthetic construct
  misc_feature 1..19: note = siRNA antisense sequence
  source 1..19: mol_type = other RNA
aatgcagattcagattgac

SEQ ID NO: 21600 - RNA, 19 nt, synthetic construct
  misc_feature 1..19: note = siRNA sense sequence
  source 1..19: mol_type = other RNA
acagaagctatctatttac

SEQ ID NO: 21601 - RNA, 19 nt, synthetic construct
  misc_feature 1..19: note = siRNA antisense sequence
  source 1..19: mol_type = other RNA
gtaaatagatagcttctgt

SEQ ID NO: 21602 - RNA, 19 nt, synthetic construct
  misc_feature 1..19: note = siRNA sense sequence
  source 1..19: mol_type = other RNA
cagaagctatctatttaca

SEQ ID NO: 21603 - RNA, 19 nt, synthetic construct
  misc_feature 1..19: note = siRNA antisense sequence
  source 1..19: mol_type = other RNA
tgtaaatagatagcttctg

SEQ ID NO: 21604 - RNA, 19 nt, synthetic construct
  misc_feature 1..19: note = siRNA sense sequence
  source 1..19: mol_type = other RNA
agctatctatttacattgc

SEQ ID NO: 21605 - RNA, 19 nt, synthetic construct
  misc_feature 1..19: note = siRNA antisense sequence
  source 1..19: mol_type = other RNA
gcaatgtaaatagatagct

SEQ ID NO: 21606 - RNA, 19 nt, synthetic construct
  misc_feature 1..19: note = siRNA sense sequence
  source 1..19: mol_type = other RNA
gctatctatttacattgcc

SEQ ID NO: 21607 - RNA, 19 nt, synthetic construct
  misc_feature 1..19: note = siRNA antisense sequence
  source 1..19: mol_type = other RNA
ggcaatgtaaatagatagc

SEQ ID NO: 21608 - RNA, 19 nt, synthetic construct
  misc_feature 1..19: note = siRNA sense sequence
  source 1..19: mol_type = other RNA
ctatctatttacattgcca

SEQ ID NO: 21609 - RNA, 19 nt, synthetic construct
  misc_feature 1..19: note = siRNA antisense sequence
  source 1..19: mol_type = other RNA
tggcaatgtaaatagatag

SEQ ID NO: 21610 - RNA, 19 nt, synthetic construct
  misc_feature 1..19: note = siRNA sense sequence
  source 1..19: mol_type = other RNA
tatggtaaagatcttggcg

SEQ ID NO: 21611 - RNA, 19 nt, synthetic construct
  misc_feature 1..19: note = siRNA antisense sequence
  source 1..19: mol_type = other RNA
cgccaagatctttaccata

SEQ ID NO: 21612 - RNA, 19 nt, synthetic construct
  misc_feature 1..19: note = siRNA sense sequence
  source 1..19: mol_type = other RNA
atggtaaagatcttggcgc

SEQ ID NO: 21613 - RNA, 19 nt, synthetic construct
  misc_feature 1..19: note = siRNA antisense sequence
  source 1..19: mol_type = other RNA
gcgccaagatctttaccat

SEQ ID NO: 21614 - RNA, 19 nt, synthetic construct
  misc_feature 1..19: note = siRNA sense sequence
  source 1..19: mol_type = other RNA
tggtaaagatcttggcgct

SEQ ID NO: 21615 - RNA, 19 nt, synthetic construct
  misc_feature 1..19: note = siRNA antisense sequence
  source 1..19: mol_type = other RNA
agcgccaagatctttacca

SEQ ID NO: 21616 - RNA, 19 nt, synthetic construct
  misc_feature 1..19: note = siRNA sense sequence
  source 1..19: mol_type = other RNA
aaagatcttggcgctcact

SEQ ID NO: 21617 - RNA, 19 nt, synthetic construct
  misc_feature 1..19: note = siRNA antisense sequence
  source 1..19: mol_type = other RNA
agtgagcgccaagatcttt

SEQ ID NO: 21618 - RNA, 19 nt, synthetic construct
  misc_feature 1..19: note = siRNA sense sequence
  source 1..19: mol_type = other RNA
aagatcttggcgctcactg

SEQ ID NO: 21619 - RNA, 19 nt, synthetic construct
  misc_feature 1..19: note = siRNA antisense sequence
  source 1..19: mol_type = other RNA
cagtgagcgccaagatctt

SEQ ID NO: 21620 - RNA, 19 nt, synthetic construct
  misc_feature 1..19: note = siRNA sense sequence
  source 1..19: mol_type = other RNA
agatcttggcgctcactga

SEQ ID NO: 21621 - RNA, 19 nt, synthetic construct
  misc_feature 1..19: note = siRNA antisense sequence
  source 1..19: mol_type = other RNA
tcagtgagcgccaagatct

SEQ ID NO: 21622 - RNA, 19 nt, synthetic construct
  misc_feature 1..19: note = siRNA sense sequence
  source 1..19: mol_type = other RNA
gatcttggcgctcactgag

SEQ ID NO: 21623 - RNA, 19 nt, synthetic construct
  misc_feature 1..19: note = siRNA antisense sequence
  source 1..19: mol_type = other RNA
ctcagtgagcgccaagatc

SEQ ID NO: 21624 - RNA, 19 nt, synthetic construct
  misc_feature 1..19: note = siRNA sense sequence
  source 1..19: mol_type = other RNA
tgggcaaaatatgagcgag

SEQ ID NO: 21625 - RNA, 19 nt, synthetic construct
  misc_feature 1..19: note = siRNA antisense sequence
  source 1..19: mol_type = other RNA
ctcgctcatattttgccca

SEQ ID NO: 21626 - RNA, 19 nt, synthetic construct
  misc_feature 1..19: note = siRNA sense sequence
  source 1..19: mol_type = other RNA
gggcaaaatatgagcgagg

SEQ ID NO: 21627 - RNA, 19 nt, synthetic construct
  misc_feature 1..19: note = siRNA antisense sequence
  source 1..19: mol_type = other RNA
cctcgctcatattttgccc

SEQ ID NO: 21628 - RNA, 19 nt, synthetic construct
  misc_feature 1..19: note = siRNA sense sequence
  source 1..19: mol_type = other RNA
ggcaaaatatgagcgaggt

SEQ ID NO: 21629 - RNA, 19 nt, synthetic construct
  misc_feature 1..19: note = siRNA antisense sequence
  source 1..19: mol_type = other RNA
acctcgctcatattttgcc

SEQ ID NO: 21630 - RNA, 19 nt, synthetic construct
  misc_feature 1..19: note = siRNA sense sequence
  source 1..19: mol_type = other RNA
gcaaaatatgagcgaggtg

SEQ ID NO: 21631 - RNA, 19 nt, synthetic construct
  misc_feature 1..19: note = siRNA antisense sequence
  source 1..19: mol_type = other RNA
cacctcgctcatattttgc

SEQ ID NO: 21632 - RNA, 19 nt, synthetic construct
  misc_feature 1..19: note = siRNA sense sequence
  source 1..19: mol_type = other RNA
caaaatatgagcgaggtgt

SEQ ID NO: 21633 - RNA, 19 nt, synthetic construct
  misc_feature 1..19: note = siRNA antisense sequence
  source 1..19: mol_type = other RNA
acacctcgctcatattttg

SEQ ID NO: 21634 - RNA, 19 nt, synthetic construct
  misc_feature 1..19: note = siRNA sense sequence
  source 1..19: mol_type = other RNA
gtagcttttcatctggtag

SEQ ID NO: 21635 - RNA, 19 nt, synthetic construct
  misc_feature 1..19: note = siRNA antisense sequence
  source 1..19: mol_type = other RNA
ctaccagatgaaaagctac

SEQ ID NO: 21636 - RNA, 19 nt, synthetic construct
  misc_feature 1..19: note = siRNA sense sequence
  source 1..19: mol_type = other RNA
tagcttttcatctggtagc

SEQ ID NO: 21637 - RNA, 19 nt, synthetic construct
  misc_feature 1..19: note = siRNA antisense sequence
  source 1..19: mol_type = other RNA
gctaccagatgaaaagcta

SEQ ID NO: 21638 - RNA, 19 nt, synthetic construct
  misc_feature 1..19: note = siRNA sense sequence
  source 1..19: mol_type = other RNA
tctggtagccatctcattt

SEQ ID NO: 21639 - RNA, 19 nt, synthetic construct
  misc_feature 1..19: note = siRNA antisense sequence
  source 1..19: mol_type = other RNA
aaatgagatggctaccaga

SEQ ID NO: 21640 - RNA, 19 nt, synthetic construct
  misc_feature 1..19: note = siRNA sense sequence
  source 1..19: mol_type = other RNA
tggtagccatctcatttaa

SEQ ID NO: 21641 - RNA, 19 nt, synthetic construct
  misc_feature 1..19: note = siRNA antisense sequence
  source 1..19: mol_type = other RNA
ttaaatgagatggctacca

SEQ ID NO: 21642 - RNA, 19 nt, synthetic construct
  misc_feature 1..19: note = siRNA sense sequence
  source 1..19: mol_type = other RNA
ggtagccatctcatttaaa

SEQ ID NO: 21643 - RNA, 19 nt, synthetic construct
  misc_feature 1..19: note = siRNA antisense sequence
  source 1..19: mol_type = other RNA
tttaaatgagatggctacc

SEQ ID NO: 21644 - RNA, 19 nt, synthetic construct
  misc_feature 1..19: note = siRNA sense sequence
  source 1..19: mol_type = other RNA
gtagccatctcatttaaaa

SEQ ID NO: 21645 - RNA, 19 nt, synthetic construct
  misc_feature 1..19: note = siRNA antisense sequence
  source 1..19: mol_type = other RNA
ttttaaatgagatggctac

SEQ ID NO: 21646 - RNA, 19 nt, synthetic construct
  misc_feature 1..19: note = siRNA sense sequence
  source 1..19: mol_type = other RNA
aaccaagaggcaaggcagt

SEQ ID NO: 21647 - RNA, 19 nt, synthetic construct
  misc_feature 1..19: note = siRNA antisense sequence
  source 1..19: mol_type = other RNA
actgccttgcctcttggtt

SEQ ID NO: 21648 - RNA, 19 nt, synthetic construct
  misc_feature 1..19: note = siRNA sense sequence
  source 1..19: mol_type = other RNA
accaagaggcaaggcagtt

SEQ ID NO: 21649 - RNA, 19 nt, synthetic construct
  misc_feature 1..19: note = siRNA antisense sequence
  source 1..19: mol_type = other RNA
aactgccttgcctcttggt

SEQ ID NO: 21650 - RNA, 19 nt, synthetic construct
  misc_feature 1..19: note = siRNA sense sequence
  source 1..19: mol_type = other RNA
ccaagaggcaaggcagttt

SEQ ID NO: 21651 - RNA, 19 nt, synthetic construct
  misc_feature 1..19: note = siRNA antisense sequence
  source 1..19: mol_type = other RNA
aaactgccttgcctcttgg

SEQ ID NO: 21652 - RNA, 19 nt, synthetic construct
  misc_feature 1..19: note = siRNA sense sequence
  source 1..19: mol_type = other RNA
caagaggcaaggcagtttt

SEQ ID NO: 21653 - RNA, 19 nt, synthetic construct
  misc_feature 1..19: note = siRNA antisense sequence
  source 1..19: mol_type = other RNA
aaaactgccttgcctcttg

SEQ ID NO: 21654 - RNA, 19 nt, synthetic construct
  misc_feature 1..19: note = siRNA sense sequence
  source 1..19: mol_type = other RNA
aagaggcaaggcagttttg

SEQ ID NO: 21655 - RNA, 19 nt, synthetic construct
  misc_feature 1..19: note = siRNA antisense sequence
  source 1..19: mol_type = other RNA
caaaactgccttgcctctt

SEQ ID NO: 21656 - RNA, 19 nt, synthetic construct
  misc_feature 1..19: note = siRNA sense sequence
  source 1..19: mol_type = other RNA
caaggcagttttgcgtgac

SEQ ID NO: 21657 - RNA, 19 nt, synthetic construct
  misc_feature 1..19: note = siRNA antisense sequence
  source 1..19: mol_type = other RNA
gtcacgcaaaactgccttg

SEQ ID NO: 21658 - RNA, 19 nt, synthetic construct
  misc_feature 1..19: note = siRNA sense sequence
  source 1..19: mol_type = other RNA
aaggcagttttgcgtgacc

SEQ ID NO: 21659 - RNA, 19 nt, synthetic construct
  misc_feature 1..19: note = siRNA antisense sequence
  source 1..19: mol_type = other RNA
ggtcacgcaaaactgcctt

SEQ ID NO: 21660 - RNA, 19 nt, synthetic construct
  misc_feature 1..19: note = siRNA sense sequence
  source 1..19: mol_type = other RNA
tttattttccttccacacg

SEQ ID NO: 21661 - RNA, 19 nt, synthetic construct
  misc_feature 1..19: note = siRNA antisense sequence
  source 1..19: mol_type = other RNA
cgtgtggaaggaaaataaa

SEQ ID NO: 21662 - RNA, 19 nt, synthetic construct
  misc_feature 1..19: note = siRNA sense sequence
  source 1..19: mol_type = other RNA
ttattttccttccacacgc

SEQ ID NO: 21663 - RNA, 19 nt, synthetic construct
  misc_feature 1..19: note = siRNA antisense sequence
  source 1..19: mol_type = other RNA
gcgtgtggaaggaaaataa

SEQ ID NO: 21664 - RNA, 19 nt, synthetic construct
  misc_feature 1..19: note = siRNA sense sequence
  source 1..19: mol_type = other RNA
tattttccttccacacgcc

SEQ ID NO: 21665 - RNA, 19 nt, synthetic construct
  misc_feature 1..19: note = siRNA antisense sequence
  source 1..19: mol_type = other RNA
ggcgtgtggaaggaaaata

SEQ ID NO: 21666 - RNA, 19 nt, synthetic construct
  misc_feature 1..19: note = siRNA sense sequence
  source 1..19: mol_type = other RNA
attttccttccacacgcct

SEQ ID NO: 21667 - RNA, 19 nt, synthetic construct
  misc_feature 1..19: note = siRNA antisense sequence
  source 1..19: mol_type = other RNA
aggcgtgtggaaggaaaat

SEQ ID NO: 21668 - RNA, 19 nt, synthetic construct
  misc_feature 1..19: note = siRNA sense sequence
  source 1..19: mol_type = other RNA
ttttccttccacacgccta

SEQ ID NO: 21669 - RNA, 19 nt, synthetic construct
  misc_feature 1..19: note = siRNA antisense sequence
  source 1..19: mol_type = other RNA
taggcgtgtggaaggaaaa

SEQ ID NO: 21670 - RNA, 19 nt, synthetic construct
  misc_feature 1..19: note = siRNA sense sequence
  source 1..19: mol_type = other RNA
tttccttccacacgcctat

SEQ ID NO: 21671 - RNA, 19 nt, synthetic construct
  misc_feature 1..19: note = siRNA antisense sequence
  source 1..19: mol_type = other RNA
ataggcgtgtggaaggaaa

SEQ ID NO: 21672 - RNA, 19 nt, synthetic construct
  misc_feature 1..19: note = siRNA sense sequence
  source 1..19: mol_type = other RNA
ttccttccacacgcctatg

SEQ ID NO: 21673 - RNA, 19 nt, synthetic construct
  misc_feature 1..19: note = siRNA antisense sequence
  source 1..19: mol_type = other RNA
cataggcgtgtggaaggaa

SEQ ID NO: 21674 - RNA, 19 nt, synthetic construct
  misc_feature 1..19: note = siRNA sense sequence
  source 1..19: mol_type = other RNA
tccttccacacgcctatgc

SEQ ID NO: 21675 - RNA, 19 nt, synthetic construct
  misc_feature 1..19: note = siRNA antisense sequence
  source 1..19: mol_type = other RNA
gcataggcgtgtggaagga

SEQ ID NO: 21676 - RNA, 19 nt, synthetic construct
  misc_feature 1..19: note = siRNA sense sequence
  source 1..19: mol_type = other RNA
ccttccacacgcctatgcc

SEQ ID NO: 21677 - RNA, 19 nt, synthetic construct
  misc_feature 1..19: note = siRNA antisense sequence
  source 1..19: mol_type = other RNA
ggcataggcgtgtggaagg

SEQ ID NO: 21678 - RNA, 19 nt, synthetic construct
  misc_feature 1..19: note = siRNA sense sequence
  source 1..19: mol_type = other RNA
cttccacacgcctatgcca

SEQ ID NO: 21679 - RNA, 19 nt, synthetic construct
  misc_feature 1..19: note = siRNA antisense sequence
  source 1..19: mol_type = other RNA
tggcataggcgtgtggaag

SEQ ID NO: 21680 - RNA, 19 nt, synthetic construct
  misc_feature 1..19: note = siRNA sense sequence
  source 1..19: mol_type = other RNA
aactcagattccttccttt

SEQ ID NO: 21681 - RNA, 19 nt, synthetic construct
  misc_feature 1..19: note = siRNA antisense sequence
  source 1..19: mol_type = other RNA
aaaggaaggaatctgagtt

SEQ ID NO: 21682 - RNA, 19 nt, synthetic construct
  misc_feature 1..19: note = siRNA sense sequence
  source 1..19: mol_type = other RNA
agattccttcctttcatcc

SEQ ID NO: 21683 - RNA, 19 nt, synthetic construct
  misc_feature 1..19: note = siRNA antisense sequence
  source 1..19: mol_type = other RNA
ggatgaaaggaaggaatct

SEQ ID NO: 21684 - RNA, 19 nt, synthetic construct
  misc_feature 1..19: note = siRNA sense sequence
  source 1..19: mol_type = other RNA
cttcctttcatccctgttt

SEQ ID NO: 21685 - RNA, 19 nt, synthetic construct
  misc_feature 1..19: note = siRNA antisense sequence
  source 1..19: mol_type = other RNA
aaacagggatgaaaggaag

SEQ ID NO: 21686 - RNA, 19 nt, synthetic construct
  misc_feature 1..19: note = siRNA sense sequence
  source 1..19: mol_type = other RNA
ctttcatccctgtttcatc

SEQ ID NO: 21687 - RNA, 19 nt, synthetic construct
  misc_feature 1..19: note = siRNA antisense sequence
  source 1..19: mol_type = other RNA
gatgaaacagggatgaaag

SEQ ID NO: 21688 - RNA, 19 nt, synthetic construct
  misc_feature 1..19: note = siRNA sense sequence
  source 1..19: mol_type = other RNA
tcatccctgtttcatctgt

SEQ ID NO: 21689 - RNA, 19 nt, synthetic construct
  misc_feature 1..19: note = siRNA antisense sequence
  source 1..19: mol_type = other RNA
acagatgaaacagggatga

SEQ ID NO: 21690 - RNA, 19 nt, synthetic construct
  misc_feature 1..19: note = siRNA sense sequence
  source 1..19: mol_type = other RNA
catccctgtttcatctgtt

SEQ ID NO: 21691 - RNA, 19 nt, synthetic construct
  misc_feature 1..19: note = siRNA antisense sequence
  source 1..19: mol_type = other RNA
aacagatgaaacagggatg

SEQ ID NO: 21692 - RNA, 19 nt, synthetic construct
  misc_feature 1..19: note = siRNA sense sequence
  source 1..19: mol_type = other RNA
atccctgtttcatctgttc

SEQ ID NO: 21693 - RNA, 19 nt, synthetic construct
  misc_feature 1..19: note = siRNA antisense sequence
  source 1..19: mol_type = other RNA
gaacagatgaaacagggat

SEQ ID NO: 21694 - RNA, 19 nt, synthetic construct
  misc_feature 1..19: note = siRNA sense sequence
  source 1..19: mol_type = other RNA
tccctgtttcatctgttca

SEQ ID NO: 21695 - RNA, 19 nt, synthetic construct
  misc_feature 1..19: note = siRNA antisense sequence
  source 1..19: mol_type = other RNA
tgaacagatgaaacaggga

SEQ ID NO: 21696 - RNA, 19 nt, synthetic construct
  misc_feature 1..19: note = siRNA sense sequence
  source 1..19: mol_type = other RNA
ctgtttcatctgttcaggc

SEQ ID NO: 21697 - RNA, 19 nt, synthetic construct
  misc_feature 1..19: note = siRNA antisense sequence
  source 1..19: mol_type = other RNA
gcctgaacagatgaaacag

SEQ ID NO: 21698 - RNA, 19 nt, synthetic construct
  misc_feature 1..19: note = siRNA sense sequence
  source 1..19: mol_type = other RNA
tgtttcatctgttcaggct

SEQ ID NO: 21699 - RNA, 19 nt, synthetic construct
  misc_feature 1..19: note = siRNA antisense sequence
  source 1..19: mol_type = other RNA
agcctgaacagatgaaaca

SEQ ID NO: 21700 - RNA, 19 nt, synthetic construct
  misc_feature 1..19: note = siRNA sense sequence
  source 1..19: mol_type = other RNA
ttcatctgttcaggctggt

SEQ ID NO: 21701 - RNA, 19 nt, synthetic construct
  misc_feature 1..19: note = siRNA antisense sequence
  source 1..19: mol_type = other RNA
accagcctgaacagatgaa

SEQ ID NO: 21702 - RNA, 19 nt, synthetic construct
  misc_feature 1..19: note = siRNA sense sequence
  source 1..19: mol_type = other RNA
tcatctgttcaggctggtt

SEQ ID NO: 21703 - RNA, 19 nt, synthetic construct
  misc_feature 1..19: note = siRNA antisense sequence
  source 1..19: mol_type = other RNA
aaccagcctgaacagatga

SEQ ID NO: 21704 - RNA, 19 nt, synthetic construct
  misc_feature 1..19: note = siRNA sense sequence
  source 1..19: mol_type = other RNA
catctgttcaggctggtta

SEQ ID NO: 21705 - RNA, 19 nt, synthetic construct
  misc_feature 1..19: note = siRNA antisense sequence
  source 1..19: mol_type = other RNA
taaccagcctgaacagatg

SEQ ID NO: 21706 - RNA, 19 nt, synthetic construct
  misc_feature 1..19: note = siRNA sense sequence
  source 1..19: mol_type = other RNA
atctgttcaggctggttag

SEQ ID NO: 21707 - RNA, 19 nt, synthetic construct
  misc_feature 1..19: note = siRNA antisense sequence
  source 1..19: mol_type = other RNA
ctaaccagcctgaacagat

SEQ ID NO: 21708 - RNA, 19 nt, synthetic construct
  misc_feature 1..19: note = siRNA sense sequence
  source 1..19: mol_type = other RNA
tctgttcaggctggttagt

SEQ ID NO: 21709 - RNA, 19 nt, synthetic construct
  misc_feature 1..19: note = siRNA antisense sequence
  source 1..19: mol_type = other RNA
actaaccagcctgaacaga

SEQ ID NO: 21710 - RNA, 19 nt, synthetic construct
  misc_feature 1..19: note = siRNA sense sequence
  source 1..19: mol_type = other RNA
ctgttcaggctggttagtt

SEQ ID NO: 21711 - RNA, 19 nt, synthetic construct
  misc_feature 1..19: note = siRNA antisense sequence
  source 1..19: mol_type = other RNA
aactaaccagcctgaacag

SEQ ID NO: 21712 - RNA, 19 nt, synthetic construct
  misc_feature 1..19: note = siRNA sense sequence
  source 1..19: mol_type = other RNA
tgttcaggctggttagttc

SEQ ID NO: 21713 - RNA, 19 nt, synthetic construct
  misc_feature 1..19: note = siRNA antisense sequence
  source 1..19: mol_type = other RNA
gaactaaccagcctgaaca

SEQ ID NO: 21714 - RNA, 19 nt, synthetic construct
  misc_feature 1..19: note = siRNA sense sequence
  source 1..19: mol_type = other RNA
gaagctatgtgtgcaggac

SEQ ID NO: 21715 - RNA, 19 nt, synthetic construct
  misc_feature 1..19: note = siRNA antisense sequence
  source 1..19: mol_type = other RNA
gtcctgcacacatagcttc

SEQ ID NO: 21716 - RNA, 19 nt, synthetic construct
  misc_feature 1..19: note = siRNA sense sequence
  source 1..19: mol_type = other RNA
aagctatgtgtgcaggact

SEQ ID NO: 21717 - RNA, 19 nt, synthetic construct
  misc_feature 1..19: note = siRNA antisense sequence
  source 1..19: mol_type = other RNA
agtcctgcacacatagctt

SEQ ID NO: 21718 - RNA, 19 nt, synthetic construct
  misc_feature 1..19: note = siRNA sense sequence
  source 1..19: mol_type = other RNA
agctatgtgtgcaggactt

SEQ ID NO: 21719 - RNA, 19 nt, synthetic construct
  misc_feature 1..19: note = siRNA antisense sequence
  source 1..19: mol_type = other RNA
aagtcctgcacacatagct

SEQ ID NO: 21720 - RNA, 19 nt, synthetic construct
  misc_feature 1..19: note = siRNA sense sequence
  source 1..19: mol_type = other RNA
gctatgtgtgcaggacttc

SEQ ID NO: 21721 - RNA, 19 nt, synthetic construct
  misc_feature 1..19: note = siRNA antisense sequence
  source 1..19: mol_type = other RNA
gaagtcctgcacacatagc

SEQ ID NO: 21722 - RNA, 19 nt, synthetic construct
  misc_feature 1..19: note = siRNA sense sequence
  source 1..19: mol_type = other RNA
ctatgtgtgcaggacttct

SEQ ID NO: 21723 - RNA, 19 nt, synthetic construct
  misc_feature 1..19: note = siRNA antisense sequence
  source 1..19: mol_type = other RNA
agaagtcctgcacacatag

SEQ ID NO: 21724 - RNA, 19 nt, synthetic construct
  misc_feature 1..19: note = siRNA sense sequence
  source 1..19: mol_type = other RNA
tatgtgtgcaggacttctc

SEQ ID NO: 21725 - RNA, 19 nt, synthetic construct
  misc_feature 1..19: note = siRNA antisense sequence
  source 1..19: mol_type = other RNA
gagaagtcctgcacacata

SEQ ID NO: 21726 - RNA, 19 nt, synthetic construct
  misc_feature 1..19: note = siRNA sense sequence
  source 1..19: mol_type = other RNA
atgtgtgcaggacttctct

SEQ ID NO: 21727 - RNA, 19 nt, synthetic construct
  misc_feature 1..19: note = siRNA antisense sequence
  source 1..19: mol_type = other RNA
agagaagtcctgcacacat

SEQ ID NO: 21728 - RNA, 19 nt, synthetic construct
  misc_feature 1..19: note = siRNA sense sequence
  source 1..19: mol_type = other RNA
tgtgtgcaggacttctctg

SEQ ID NO: 21729 - RNA, 19 nt, synthetic construct
  misc_feature 1..19: note = siRNA antisense sequence
  source 1..19: mol_type = other RNA
cagagaagtcctgcacaca

SEQ ID NO: 21730 - RNA, 19 nt, synthetic construct
  misc_feature 1..19: note = siRNA sense sequence
  source 1..19: mol_type = other RNA
caggacttctctgccctcc

SEQ ID NO: 21731 - RNA, 19 nt, synthetic construct
  misc_feature 1..19: note = siRNA antisense sequence
  source 1..19: mol_type = other RNA
ggagggcagagaagtcctg

SEQ ID NO: 21732 - RNA, 19 nt, synthetic construct
  misc_feature 1..19: note = siRNA sense sequence
  source 1..19: mol_type = other RNA
ctgccctccactccatcta

SEQ ID NO: 21733 - RNA, 19 nt, synthetic construct
  misc_feature 1..19: note = siRNA antisense sequence
  source 1..19: mol_type = other RNA
tagatggagtggagggcag

SEQ ID NO: 21734 - RNA, 19 nt, synthetic construct
  misc_feature 1..19: note = siRNA sense sequence
  source 1..19: mol_type = other RNA
tgccctccactccatctaa

SEQ ID NO: 21735 - RNA, 19 nt, synthetic construct
  misc_feature 1..19: note = siRNA antisense sequence
  source 1..19: mol_type = other RNA
ttagatggagtggagggca

SEQ ID NO: 21736 - RNA, 19 nt, synthetic construct
  misc_feature 1..19: note = siRNA sense sequence
  source 1..19: mol_type = other RNA
gccctccactccatctaag

SEQ ID NO: 21737 - RNA, 19 nt, synthetic construct
  misc_feature 1..19: note = siRNA antisense sequence
  source 1..19: mol_type = other RNA
cttagatggagtggagggc

SEQ ID NO: 21738 - RNA, 19 nt, synthetic construct
  misc_feature 1..19: note = siRNA sense sequence
  source 1..19: mol_type = other RNA
ccctccactccatctaagc

SEQ ID NO: 21739 - RNA, 19 nt, synthetic construct
  misc_feature 1..19: note = siRNA antisense sequence
  source 1..19: mol_type = other RNA
gcttagatggagtggaggg

SEQ ID NO: 21740 - RNA, 19 nt, synthetic construct
  misc_feature 1..19: note = siRNA sense sequence
  source 1..19: mol_type = other RNA
cactccatctaagctctca

SEQ ID NO: 21741 - RNA, 19 nt, synthetic construct
  misc_feature 1..19: note = siRNA antisense sequence
  source 1..19: mol_type = other RNA
tgagagcttagatggagtg

SEQ ID NO: 21742 - RNA, 19 nt, synthetic construct
  misc_feature 1..19: note = siRNA sense sequence
  source 1..19: mol_type = other RNA
actccatctaagctctcaa

SEQ ID NO: 21743 - RNA, 19 nt, synthetic construct
  misc_feature 1..19: note = siRNA antisense sequence
  source 1..19: mol_type = other RNA
ttgagagcttagatggagt

SEQ ID NO: 21744 - RNA, 19 nt, synthetic construct
  misc_feature 1..19: note = siRNA sense sequence
  source 1..19: mol_type = other RNA
ctccatctaagctctcaag

SEQ ID NO: 21745 - RNA, 19 nt, synthetic construct
  misc_feature 1..19: note = siRNA antisense sequence
  source 1..19: mol_type = other RNA
cttgagagcttagatggag

SEQ ID NO: 21746 - RNA, 19 nt, synthetic construct
  misc_feature 1..19: note = siRNA sense sequence
  source 1..19: mol_type = other RNA
tccatctaagctctcaaga

SEQ ID NO: 21747 - RNA, 19 nt, synthetic construct
  misc_feature 1..19: note = siRNA antisense sequence
  source 1..19: mol_type = other RNA
tcttgagagcttagatgga

SEQ ID NO: 21748 - RNA, 19 nt, synthetic construct
  misc_feature 1..19: note = siRNA sense sequence
  source 1..19: mol_type = other RNA
ccatctaagctctcaagaa

SEQ ID NO: 21749 - RNA, 19 nt, synthetic construct
  misc_feature 1..19: note = siRNA antisense sequence
  source 1..19: mol_type = other RNA
ttcttgagagcttagatgg

SEQ ID NO: 21750 - RNA, 19 nt, synthetic construct
  misc_feature 1..19: note = siRNA sense sequence
  source 1..19: mol_type = other RNA
tattcatcggtctcttaaa

SEQ ID NO: 21751 - RNA, 19 nt, synthetic construct
  misc_feature 1..19: note = siRNA antisense sequence
  source 1..19: mol_type = other RNA
tttaagagaccgatgaata

SEQ ID NO: 21752 - RNA, 19 nt, synthetic construct
  misc_feature 1..19: note = siRNA sense sequence
  source 1..19: mol_type = other RNA
attcatcggtctcttaaag

SEQ ID NO: 21753 - RNA, 19 nt, synthetic construct
  misc_feature 1..19: note = siRNA antisense sequence
  source 1..19: mol_type = other RNA
ctttaagagaccgatgaat

SEQ ID NO: 21754 - RNA, 19 nt, synthetic construct
  misc_feature 1..19: note = siRNA sense sequence
  source 1..19: mol_type = other RNA
ttcatcggtctcttaaaga

SEQ ID NO: 21755 - RNA, 19 nt, synthetic construct
  misc_feature 1..19: note = siRNA antisense sequence
  source 1..19: mol_type = other RNA
tctttaagagaccgatgaa

SEQ ID NO: 21756 - RNA, 19 nt, synthetic construct
  misc_feature 1..19: note = siRNA sense sequence
  source 1..19: mol_type = other RNA
taaagaggcaatcccactt

SEQ ID NO: 21757 - RNA, 19 nt, synthetic construct
  misc_feature 1..19: note = siRNA antisense sequence
  source 1..19: mol_type = other RNA
aagtgggattgcctcttta

SEQ ID NO: 21758 - RNA, 19 nt, synthetic construct
  misc_feature 1..19: note = siRNA sense sequence
  source 1..19: mol_type = other RNA
aaagaggcaatcccacttc

SEQ ID NO: 21759 - RNA, 19 nt, synthetic construct
  misc_feature 1..19: note = siRNA antisense sequence
  source 1..19: mol_type = other RNA
gaagtgggattgcctcttt

SEQ ID NO: 21760 - RNA, 19 nt, synthetic construct
  misc_feature 1..19: note = siRNA sense sequence
  source 1..19: mol_type = other RNA
agaggcaatcccacttctc

SEQ ID NO: 21761 - RNA, 19 nt, synthetic construct
  misc_feature 1..19: note = siRNA antisense sequence
  source 1..19: mol_type = other RNA
gagaagtgggattgcctct

SEQ ID NO: 21762 - RNA, 19 nt, synthetic construct
  misc_feature 1..19: note = siRNA sense sequence
  source 1..19: mol_type = other RNA
gaggcaatcccacttctcc

SEQ ID NO: 21763 - RNA, 19 nt, synthetic construct
  misc_feature 1..19: note = siRNA antisense sequence
  source 1..19: mol_type = other RNA
ggagaagtgggattgcctc

SEQ ID NO: 21764 - RNA, 19 nt, synthetic construct
  misc_feature 1..19: note = siRNA sense sequence
  source 1..19: mol_type = other RNA
aggcaatcccacttctcca

SEQ ID NO: 21765 - RNA, 19 nt, synthetic construct
  misc_feature 1..19: note = siRNA antisense sequence
  source 1..19: mol_type = other RNA
tggagaagtgggattgcct

SEQ ID NO: 21766 - RNA, 19 nt, synthetic construct
  misc_feature 1..19: note = siRNA sense sequence
  source 1..19: mol_type = other RNA
atcccacttctccatttcc

SEQ ID NO: 21767 - RNA, 19 nt, synthetic construct
  misc_feature 1..19: note = siRNA antisense sequence
  source 1..19: mol_type = other RNA
ggaaatggagaagtgggat

SEQ ID NO: 21768 - RNA, 19 nt, synthetic construct
  misc_feature 1..19: note = siRNA sense sequence
  source 1..19: mol_type = other RNA
tcccacttctccatttcca

SEQ ID NO: 21769 - RNA, 19 nt, synthetic construct
  misc_feature 1..19: note = siRNA antisense sequence
  source 1..19: mol_type = other RNA
tggaaatggagaagtggga

SEQ ID NO: 21770 - RNA, 19 nt, synthetic construct
  misc_feature 1..19: note = siRNA sense sequence
  source 1..19: mol_type = other RNA
cacttctccatttccactt

SEQ ID NO: 21771 - RNA, 19 nt, synthetic construct
  misc_feature 1..19: note = siRNA antisense sequence
  source 1..19: mol_type = other RNA
aagtggaaatggagaagtg

SEQ ID NO: 21772 - RNA, 19 nt, synthetic construct
  misc_feature 1..19: note = siRNA sense sequence
  source 1..19: mol_type = other RNA
acttctccatttccacttc

SEQ ID NO: 21773 - RNA, 19 nt, synthetic construct
  misc_feature 1..19: note = siRNA antisense sequence
  source 1..19: mol_type = other RNA
gaagtggaaatggagaagt

SEQ ID NO: 21774 - RNA, 19 nt, synthetic construct
  misc_feature 1..19: note = siRNA sense sequence
  source 1..19: mol_type = other RNA
cttctccatttccacttcc

SEQ ID NO: 21775 - RNA, 19 nt, synthetic construct
  misc_feature 1..19: note = siRNA antisense sequence
  source 1..19: mol_type = other RNA
ggaagtggaaatggagaag

SEQ ID NO: 21776 - RNA, 19 nt, synthetic construct
  misc_feature 1..19: note = siRNA sense sequence
  source 1..19: mol_type = other RNA
ccatttccacttcctaata

SEQ ID NO: 21777 - RNA, 19 nt, synthetic construct
  misc_feature 1..19: note = siRNA antisense sequence
  source 1..19: mol_type = other RNA
tattaggaagtggaaatgg

SEQ ID NO: 21778 - RNA, 19 nt, synthetic construct
  misc_feature 1..19: note = siRNA sense sequence
  source 1..19: mol_type = other RNA
catttccacttcctaataa

SEQ ID NO: 21779 - RNA, 19 nt, synthetic construct
  misc_feature 1..19: note = siRNA antisense sequence
  source 1..19: mol_type = other RNA
ttattaggaagtggaaatg

SEQ ID NO: 21780 - RNA, 19 nt, synthetic construct
  misc_feature 1..19: note = siRNA sense sequence
  source 1..19: mol_type = other RNA
tttccacttcctaataaag

SEQ ID NO: 21781 - RNA, 19 nt, synthetic construct
  misc_feature 1..19: note = siRNA antisense sequence
  source 1..19: mol_type = other RNA
ctttattaggaagtggaaa

SEQ ID NO: 21782 - RNA, 19 nt, synthetic construct
  misc_feature 1..19: note = siRNA sense sequence
  source 1..19: mol_type = other RNA
ttccacttcctaataaaga

SEQ ID NO: 21783 - RNA, 19 nt, synthetic construct
  misc_feature 1..19: note = siRNA antisense sequence
  source 1..19: mol_type = other RNA
tctttattaggaagtggaa

SEQ ID NO: 21784 - RNA, 19 nt, synthetic construct
  misc_feature 1..19: note = siRNA sense sequence
  source 1..19: mol_type = other RNA
tccacttcctaataaagaa

SEQ ID NO: 21785 - RNA, 19 nt, synthetic construct
  misc_feature 1..19: note = siRNA antisense sequence
  source 1..19: mol_type = other RNA
ttctttattaggaagtgga

SEQ ID NO: 21786 - RNA, 19 nt, synthetic construct
  misc_feature 1..19: note = siRNA sense sequence
  source 1..19: mol_type = other RNA
ccacttcctaataaagaat

SEQ ID NO: 21787 - RNA, 19 nt, synthetic construct
  misc_feature 1..19: note = siRNA antisense sequence
  source 1..19: mol_type = other RNA
attctttattaggaagtgg

SEQ ID NO: 21788 - RNA, 19 nt, synthetic construct
  misc_feature 1..19: note = siRNA sense sequence
  source 1..19: mol_type = other RNA
acttcctaataaagaatgc

SEQ ID NO: 21789 - RNA, 19 nt, synthetic construct
  misc_feature 1..19: note = siRNA antisense sequence
  source 1..19: mol_type = other RNA
gcattctttattaggaagt

SEQ ID NO: 21790 - RNA, 19 nt, synthetic construct
  misc_feature 1..19: note = siRNA sense sequence
  source 1..19: mol_type = other RNA
cctaataaagaatgctaag

SEQ ID NO: 21791 - RNA, 19 nt, synthetic construct
  misc_feature 1..19: note = siRNA antisense sequence
  source 1..19: mol_type = other RNA
cttagcattctttattagg

SEQ ID NO: 21792 - RNA, 19 nt, synthetic construct
  misc_feature 1..19: note = siRNA sense sequence
  source 1..19: mol_type = other RNA
ctattcaatcagggtcagt

SEQ ID NO: 21793 - RNA, 19 nt, synthetic construct
  misc_feature 1..19: note = siRNA antisense sequence
  source 1..19: mol_type = other RNA
actgaccctgattgaatag

SEQ ID NO: 21794 - RNA, 19 nt, synthetic construct
  misc_feature 1..19: note = siRNA sense sequence
  source 1..19: mol_type = other RNA
tattcaatcagggtcagtc

SEQ ID NO: 21795 - RNA, 19 nt, synthetic construct
  misc_feature 1..19: note = siRNA antisense sequence
  source 1..19: mol_type = other RNA
gactgaccctgattgaata

SEQ ID NO: 21796 - RNA, 19 nt, synthetic construct
  misc_feature 1..19: note = siRNA sense sequence
  source 1..19: mol_type = other RNA
attcaatcagggtcagtcc

SEQ ID NO: 21797 - RNA, 19 nt, synthetic construct
  misc_feature 1..19: note = siRNA antisense sequence
  source 1..19: mol_type = other RNA
ggactgaccctgattgaat

SEQ ID NO: 21798 - RNA, 19 nt, synthetic construct
  misc_feature 1..19: note = siRNA sense sequence
  source 1..19: mol_type = other RNA
ttcaatcagggtcagtcct

SEQ ID NO: 21799 - RNA, 19 nt, synthetic construct
  misc_feature 1..19: note = siRNA antisense sequence
  source 1..19: mol_type = other RNA
aggactgaccctgattgaa

SEQ ID NO: 21800 - RNA, 19 nt, synthetic construct
  misc_feature 1..19: note = siRNA sense sequence
  source 1..19: mol_type = other RNA
tcaatcagggtcagtccta

SEQ ID NO: 21801 - RNA, 19 nt, synthetic construct
  misc_feature 1..19: note = siRNA antisense sequence
  source 1..19: mol_type = other RNA
taggactgaccctgattga

SEQ ID NO: 21802 - RNA, 19 nt, synthetic construct
  misc_feature 1..19: note = siRNA sense sequence
  source 1..19: mol_type = other RNA
aatcagggtcagtcctagt

SEQ ID NO: 21803 - RNA, 19 nt, synthetic construct
  misc_feature 1..19: note = siRNA antisense sequence
  source 1..19: mol_type = other RNA
actaggactgaccctgatt

SEQ ID NO: 21804 - RNA, 19 nt, synthetic construct
  misc_feature 1..19: note = siRNA sense sequence
  source 1..19: mol_type = other RNA
agggtcagtcctagttaat

SEQ ID NO: 21805 - RNA, 19 nt, synthetic construct
  misc_feature 1..19: note = siRNA antisense sequence
  source 1..19: mol_type = other RNA
attaactaggactgaccct

SEQ ID NO: 21806 - RNA, 19 nt, synthetic construct
  misc_feature 1..19: note = siRNA sense sequence
  source 1..19: mol_type = other RNA
gggtcagtcctagttaata

SEQ ID NO: 21807 - RNA, 19 nt, synthetic construct
  misc_feature 1..19: note = siRNA antisense sequence
  source 1..19: mol_type = other RNA
tattaactaggactgaccc

SEQ ID NO: 21808 - RNA, 19 nt, synthetic construct
  misc_feature 1..19: note = siRNA sense sequence
  source 1..19: mol_type = other RNA
ggtcagtcctagttaatag

SEQ ID NO: 21809 - RNA, 19 nt, synthetic construct
  misc_feature 1..19: note = siRNA antisense sequence
  source 1..19: mol_type = other RNA
ctattaactaggactgacc

SEQ ID NO: 21810 - RNA, 19 nt, synthetic construct
  misc_feature 1..19: note = siRNA sense sequence
  source 1..19: mol_type = other RNA
gtcagtcctagttaatagt

SEQ ID NO: 21811 - RNA, 19 nt, synthetic construct
  misc_feature 1..19: note = siRNA antisense sequence
  source 1..19: mol_type = other RNA
actattaactaggactgac

SEQ ID NO: 21812 - RNA, 19 nt, synthetic construct
  misc_feature 1..19: note = siRNA sense sequence
  source 1..19: mol_type = other RNA
tcagtcctagttaatagtt

SEQ ID NO: 21813 - RNA, 19 nt, synthetic construct
  misc_feature 1..19: note = siRNA antisense sequence
  source 1..19: mol_type = other RNA
aactattaactaggactga

SEQ ID NO: 21814 - RNA, 19 nt, synthetic construct
  misc_feature 1..19: note = siRNA sense sequence
  source 1..19: mol_type = other RNA
cagtcctagttaatagttt

SEQ ID NO: 21815 - RNA, 19 nt, synthetic construct
  misc_feature 1..19: note = siRNA antisense sequence
  source 1..19: mol_type = other RNA
aaactattaactaggactg

SEQ ID NO: 21816 - RNA, 19 nt, synthetic construct
  misc_feature 1..19: note = siRNA sense sequence
  source 1..19: mol_type = other RNA
cacttcccatagcctcggc

SEQ ID NO: 21817 - RNA, 19 nt, synthetic construct
  misc_feature 1..19: note = siRNA antisense sequence
  source 1..19: mol_type = other RNA
gccgaggctatgggaagtg

SEQ ID NO: 21818 - RNA, 19 nt, synthetic construct
  misc_feature 1..19: note = siRNA sense sequence
  source 1..19: mol_type = other RNA
acttcccatagcctcggct

SEQ ID NO: 21819 - RNA, 19 nt, synthetic construct
  misc_feature 1..19: note = siRNA antisense sequence
  source 1..19: mol_type = other RNA
agccgaggctatgggaagt

SEQ ID NO: 21820 - RNA, 19 nt, synthetic construct
  misc_feature 1..19: note = siRNA sense sequence
  source 1..19: mol_type = other RNA
cttcccatagcctcggctt

SEQ ID NO: 21821 - RNA, 19 nt, synthetic construct
  misc_feature 1..19: note = siRNA antisense sequence
  source 1..19: mol_type = other RNA
aagccgaggctatgggaag

SEQ ID NO: 21822 - RNA, 19 nt, synthetic construct
  misc_feature 1..19: note = siRNA sense sequence
  source 1..19: mol_type = other RNA
ttcccatagcctcggcttt

SEQ ID NO: 21823 - RNA, 19 nt, synthetic construct
  misc_feature 1..19: note = siRNA antisense sequence
  source 1..19: mol_type = other RNA
aaagccgaggctatgggaa

SEQ ID NO: 21824 - RNA, 19 nt, synthetic construct
  misc_feature 1..19: note = siRNA sense sequence
  source 1..19: mol_type = other RNA
tcccatagcctcggctttt

SEQ ID NO: 21825 - RNA, 19 nt, synthetic construct
  misc_feature 1..19: note = siRNA antisense sequence
  source 1..19: mol_type = other RNA
aaaagccgaggctatggga

SEQ ID NO: 21826 - RNA, 19 nt, synthetic construct
  misc_feature 1..19: note = siRNA sense sequence
  source 1..19: mol_type = other RNA
cccatagcctcggctttta

SEQ ID NO: 21827 - RNA, 19 nt, synthetic construct
  misc_feature 1..19: note = siRNA antisense sequence
  source 1..19: mol_type = other RNA
taaaagccgaggctatggg

SEQ ID NO: 21828 - RNA, 19 nt, synthetic construct
  misc_feature 1..19: note = siRNA sense sequence
  source 1..19: mol_type = other RNA
ccatagcctcggcttttag

SEQ ID NO: 21829 - RNA, 19 nt, synthetic construct
  misc_feature 1..19: note = siRNA antisense sequence
  source 1..19: mol_type = other RNA
ctaaaagccgaggctatgg

SEQ ID NO: 21830 - RNA, 19 nt, synthetic construct
  misc_feature 1..19: note = siRNA sense sequence
  source 1..19: mol_type = other RNA
catagcctcggcttttagc

SEQ ID NO: 21831 - RNA, 19 nt, synthetic construct
  misc_feature 1..19: note = siRNA antisense sequence
  source 1..19: mol_type = other RNA
gctaaaagccgaggctatg

SEQ ID NO: 21832 - RNA, 19 nt, synthetic construct
  misc_feature 1..19: note = siRNA sense sequence
  source 1..19: mol_type = other RNA
atagcctcggcttttagct

SEQ ID NO: 21833 - RNA, 19 nt, synthetic construct
  misc_feature 1..19: note = siRNA antisense sequence
  source 1..19: mol_type = other RNA
agctaaaagccgaggctat

SEQ ID NO: 21834 - RNA, 19 nt, synthetic construct
  misc_feature 1..19: note = siRNA sense sequence
  source 1..19: mol_type = other RNA
tagcctcggcttttagctt

SEQ ID NO: 21835 - RNA, 19 nt, synthetic construct
  misc_feature 1..19: note = siRNA antisense sequence
  source 1..19: mol_type = other RNA
aagctaaaagccgaggcta

SEQ ID NO: 21836 - RNA, 19 nt, synthetic construct
  misc_feature 1..19: note = siRNA sense sequence
  source 1..19: mol_type = other RNA
agcctcggcttttagctta

SEQ ID NO: 21837 - RNA, 19 nt, synthetic construct
  misc_feature 1..19: note = siRNA antisense sequence
  source 1..19: mol_type = other RNA
taagctaaaagccgaggct

SEQ ID NO: 21838 - RNA, 19 nt, synthetic construct
  misc_feature 1..19: note = siRNA sense sequence
  source 1..19: mol_type = other RNA
gcctcggcttttagcttag

SEQ ID NO: 21839 - RNA, 19 nt, synthetic construct
  misc_feature 1..19: note = siRNA antisense sequence
  source 1..19: mol_type = other RNA
ctaagctaaaagccgaggc

SEQ ID NO: 21840 - RNA, 19 nt, synthetic construct
  misc_feature 1..19: note = siRNA sense sequence
  source 1..19: mol_type = other RNA
cctcggcttttagcttagc

SEQ ID NO: 21841 - RNA, 19 nt, synthetic construct
  misc_feature 1..19: note = siRNA antisense sequence
  source 1..19: mol_type = other RNA
gctaagctaaaagccgagg

SEQ ID NO: 21842 - RNA, 19 nt, synthetic construct
  misc_feature 1..19: note = siRNA sense sequence
  source 1..19: mol_type = other RNA
ctcggcttttagcttagct

SEQ ID NO: 21843 - RNA, 19 nt, synthetic construct
  misc_feature 1..19: note = siRNA antisense sequence
  source 1..19: mol_type = other RNA
agctaagctaaaagccgag

SEQ ID NO: 21844 - RNA, 19 nt, synthetic construct
  misc_feature 1..19: note = siRNA sense sequence
  source 1..19: mol_type = other RNA
tcggcttttagcttagctt

SEQ ID NO: 21845 - RNA, 19 nt, synthetic construct
  misc_feature 1..19: note = siRNA antisense sequence
  source 1..19: mol_type = other RNA
aagctaagctaaaagccga

SEQ ID NO: 21846 - RNA, 19 nt, synthetic construct
  misc_feature 1..19: note = siRNA sense sequence
  source 1..19: mol_type = other RNA
tttagcttagctttggcag

SEQ ID NO: 21847 - RNA, 19 nt, synthetic construct
  misc_feature 1..19: note = siRNA antisense sequence
  source 1..19: mol_type = other RNA
ctgccaaagctaagctaaa

SEQ ID NO: 21848 - RNA, 19 nt, synthetic construct
  misc_feature 1..19: note = siRNA sense sequence
  source 1..19: mol_type = other RNA
ttagcttagctttggcagt

SEQ ID NO: 21849 - RNA, 19 nt, synthetic construct
  misc_feature 1..19: note = siRNA antisense sequence
  source 1..19: mol_type = other RNA
actgccaaagctaagctaa

SEQ ID NO: 21850 - RNA, 19 nt, synthetic construct
  misc_feature 1..19: note = siRNA sense sequence
  source 1..19: mol_type = other RNA
ttagctttggcagtgaaga

SEQ ID NO: 21851 - RNA, 19 nt, synthetic construct
  misc_feature 1..19: note = siRNA antisense sequence
  source 1..19: mol_type = other RNA
tcttcactgccaaagctaa

SEQ ID NO: 21852 - RNA, 19 nt, synthetic construct
  misc_feature 1..19: note = siRNA sense sequence
  source 1..19: mol_type = other RNA
tagctttggcagtgaagat

SEQ ID NO: 21853 - RNA, 19 nt, synthetic construct
  misc_feature 1..19: note = siRNA antisense sequence
  source 1..19: mol_type = other RNA
atcttcactgccaaagcta

SEQ ID NO: 21854 - RNA, 19 nt, synthetic construct
  misc_feature 1..19: note = siRNA sense sequence
  source 1..19: mol_type = other RNA
agctttggcagtgaagatc

SEQ ID NO: 21855 - RNA, 19 nt, synthetic construct
  misc_feature 1..19: note = siRNA antisense sequence
  source 1..19: mol_type = other RNA
gatcttcactgccaaagct

SEQ ID NO: 21856 - RNA, 19 nt, synthetic construct
  misc_feature 1..19: note = siRNA sense sequence
  source 1..19: mol_type = other RNA
gctttggcagtgaagatct

SEQ ID NO: 21857 - RNA, 19 nt, synthetic construct
  misc_feature 1..19: note = siRNA antisense sequence
  source 1..19: mol_type = other RNA
agatcttcactgccaaagc

SEQ ID NO: 21858 - RNA, 19 nt, synthetic construct
  misc_feature 1..19: note = siRNA sense sequence
  source 1..19: mol_type = other RNA
ctttggcagtgaagatctg

SEQ ID NO: 21859 - RNA, 19 nt, synthetic construct
  misc_feature 1..19: note = siRNA antisense sequence
  source 1..19: mol_type = other RNA
cagatcttcactgccaaag

SEQ ID NO: 21860 - RNA, 19 nt, synthetic construct
  misc_feature 1..19: note = siRNA sense sequence
  source 1..19: mol_type = other RNA
ggcagtgaagatctggccc

SEQ ID NO: 21861 - RNA, 19 nt, synthetic construct
  misc_feature 1..19: note = siRNA antisense sequence
  source 1..19: mol_type = other RNA
gggccagatcttcactgcc

SEQ ID NO: 21862 - RNA, 19 nt, synthetic construct
  misc_feature 1..19: note = siRNA sense sequence
  source 1..19: mol_type = other RNA
gcagtgaagatctggccct

SEQ ID NO: 21863 - RNA, 19 nt, synthetic construct
  misc_feature 1..19: note = siRNA antisense sequence
  source 1..19: mol_type = other RNA
agggccagatcttcactgc

SEQ ID NO: 21864 - RNA, 19 nt, synthetic construct
  misc_feature 1..19: note = siRNA sense sequence
  source 1..19: mol_type = other RNA
cagtgaagatctggcccta

SEQ ID NO: 21865 - RNA, 19 nt, synthetic construct
  misc_feature 1..19: note = siRNA antisense sequence
  source 1..19: mol_type = other RNA
tagggccagatcttcactg

SEQ ID NO: 21866 - RNA, 19 nt, synthetic construct
  misc_feature 1..19: note = siRNA sense sequence
  source 1..19: mol_type = other RNA
agtgaagatctggccctaa

SEQ ID NO: 21867 - RNA, 19 nt, synthetic construct
  misc_feature 1..19: note = siRNA antisense sequence
  source 1..19: mol_type = other RNA
ttagggccagatcttcact

SEQ ID NO: 21868 - RNA, 19 nt, synthetic construct
  misc_feature 1..19: note = siRNA sense sequence
  source 1..19: mol_type = other RNA
gtgaagatctggccctaag

SEQ ID NO: 21869 - RNA, 19 nt, synthetic construct
  misc_feature 1..19: note = siRNA antisense sequence
  source 1..19: mol_type = other RNA
cttagggccagatcttcac

SEQ ID NO: 21870 - RNA, 19 nt, synthetic construct
  misc_feature 1..19: note = siRNA sense sequence
  source 1..19: mol_type = other RNA
tgaagatctggccctaagc

SEQ ID NO: 21871 - RNA, 19 nt, synthetic construct
  misc_feature 1..19: note = siRNA antisense sequence
  source 1..19: mol_type = other RNA
gcttagggccagatcttca

SEQ ID NO: 21872 - RNA, 19 nt, synthetic construct
  misc_feature 1..19: note = siRNA sense sequence
  source 1..19: mol_type = other RNA
tggccctaagctcttgcga

SEQ ID NO: 21873 - RNA, 19 nt, synthetic construct
  misc_feature 1..19: note = siRNA antisense sequence
  source 1..19: mol_type = other RNA
tcgcaagagcttagggcca

SEQ ID NO: 21874 - RNA, 19 nt, synthetic construct
  misc_feature 1..19: note = siRNA sense sequence
  source 1..19: mol_type = other RNA
ggccctaagctcttgcgac

SEQ ID NO: 21875 - RNA, 19 nt, synthetic construct
  misc_feature 1..19: note = siRNA antisense sequence
  source 1..19: mol_type = other RNA
gtcgcaagagcttagggcc

SEQ ID NO: 21876 - RNA, 19 nt, synthetic construct
  misc_feature 1..19: note = siRNA sense sequence
  source 1..19: mol_type = other RNA
gccctaagctcttgcgacc

SEQ ID NO: 21877 - RNA, 19 nt, synthetic construct
  misc_feature 1..19: note = siRNA antisense sequence
  source 1..19: mol_type = other RNA
ggtcgcaagagcttagggc

SEQ ID NO: 21878 - RNA, 19 nt, synthetic construct
  misc_feature 1..19: note = siRNA sense sequence
  source 1..19: mol_type = other RNA
ccctaagctcttgcgaccc

SEQ ID NO: 21879 - RNA, 19 nt, synthetic construct
  misc_feature 1..19: note = siRNA antisense sequence
  source 1..19: mol_type = other RNA
gggtcgcaagagcttaggg

SEQ ID NO: 21880 - RNA, 19 nt, synthetic construct
  misc_feature 1..19: note = siRNA sense sequence
  source 1..19: mol_type = other RNA
cctaagctcttgcgaccca

SEQ ID NO: 21881 - RNA, 19 nt, synthetic construct
  misc_feature 1..19: note = siRNA antisense sequence
  source 1..19: mol_type = other RNA
tgggtcgcaagagcttagg

SEQ ID NO: 21882 - RNA, 19 nt, synthetic construct
  misc_feature 1..19: note = siRNA sense sequence
  source 1..19: mol_type = other RNA
ctaagctcttgcgacccaa

SEQ ID NO: 21883 - RNA, 19 nt, synthetic construct
  misc_feature 1..19: note = siRNA antisense sequence
  source 1..19: mol_type = other RNA
ttgggtcgcaagagcttag

SEQ ID NO: 21884 - RNA, 19 nt, synthetic construct
  misc_feature 1..19: note = siRNA sense sequence
  source 1..19: mol_type = other RNA
taagctcttgcgacccaac

SEQ ID NO: 21885 - RNA, 19 nt, synthetic construct
  misc_feature 1..19: note = siRNA antisense sequence
  source 1..19: mol_type = other RNA
gttgggtcgcaagagctta

SEQ ID NO: 21886 - RNA, 19 nt, synthetic construct
  misc_feature 1..19: note = siRNA sense sequence
  source 1..19: mol_type = other RNA
atttcacaggctactgggc

SEQ ID NO: 21887 - RNA, 19 nt, synthetic construct
  misc_feature 1..19: note = siRNA antisense sequence
  source 1..19: mol_type = other RNA
gcccagtagcctgtgaaat

SEQ ID NO: 21888 - RNA, 19 nt, synthetic construct
  misc_feature 1..19: note = siRNA sense sequence
  source 1..19: mol_type = other RNA
tttcacaggctactgggct

SEQ ID NO: 21889 - RNA, 19 nt, synthetic construct
  misc_feature 1..19: note = siRNA antisense sequence
  source 1..19: mol_type = other RNA
agcccagtagcctgtgaaa

SEQ ID NO: 21890 - RNA, 19 nt, synthetic construct
  misc_feature 1..19: note = siRNA sense sequence
  source 1..19: mol_type = other RNA
ttcacaggctactgggctg

SEQ ID NO: 21891 - RNA, 19 nt, synthetic construct
  misc_feature 1..19: note = siRNA antisense sequence
  source 1..19: mol_type = other RNA
cagcccagtagcctgtgaa

SEQ ID NO: 21892 - RNA, 19 nt, synthetic construct
  misc_feature 1..19: note = siRNA sense sequence
  source 1..19: mol_type = other RNA
tcacaggctactgggctgc

SEQ ID NO: 21893 - RNA, 19 nt, synthetic construct
  misc_feature 1..19: note = siRNA antisense sequence
  source 1..19: mol_type = other RNA
gcagcccagtagcctgtga

SEQ ID NO: 21894 - RNA, 19 nt, synthetic construct
  misc_feature 1..19: note = siRNA sense sequence
  source 1..19: mol_type = other RNA
aggctactgggctgcggaa

SEQ ID NO: 21895 - RNA, 19 nt, synthetic construct
  misc_feature 1..19: note = siRNA antisense sequence
  source 1..19: mol_type = other RNA
ttccgcagcccagtagcct

SEQ ID NO: 21896 - RNA, 19 nt, synthetic construct
  misc_feature 1..19: note = siRNA sense sequence
  source 1..19: mol_type = other RNA
ctgaggctgccaactttgg

SEQ ID NO: 21897 - RNA, 19 nt, synthetic construct
  misc_feature 1..19: note = siRNA antisense sequence
  source 1..19: mol_type = other RNA
ccaaagttggcagcctcag

SEQ ID NO: 21898 - RNA, 19 nt, synthetic construct
  misc_feature 1..19: note = siRNA sense sequence
  source 1..19: mol_type = other RNA
tgaggctgccaactttgga

SEQ ID NO: 21899 - RNA, 19 nt, synthetic construct
  misc_feature 1..19: note = siRNA antisense sequence
  source 1..19: mol_type = other RNA
tccaaagttggcagcctca

SEQ ID NO: 21900 - RNA, 19 nt, synthetic construct
  misc_feature 1..19: note = siRNA sense sequence
  source 1..19: mol_type = other RNA
gaggctgccaactttggag

SEQ ID NO: 21901 - RNA, 19 nt, synthetic construct
  misc_feature 1..19: note = siRNA antisense sequence
  source 1..19: mol_type = other RNA
ctccaaagttggcagcctc

SEQ ID NO: 21902 - RNA, 19 nt, synthetic construct
  misc_feature 1..19: note = siRNA sense sequence
  source 1..19: mol_type = other RNA
aggctgccaactttggagc

SEQ ID NO: 21903 - RNA, 19 nt, synthetic construct
  misc_feature 1..19: note = siRNA antisense sequence
  source 1..19: mol_type = other RNA
gctccaaagttggcagcct

SEQ ID NO: 21904 - RNA, 19 nt, synthetic construct
  misc_feature 1..19: note = siRNA sense sequence
  source 1..19: mol_type = other RNA
gctgccaactttggagcct

SEQ ID NO: 21905 - RNA, 19 nt, synthetic construct
  misc_feature 1..19: note = siRNA antisense sequence
  source 1..19: mol_type = other RNA
aggctccaaagttggcagc

SEQ ID NO: 21906 - RNA, 19 nt, synthetic construct
  misc_feature 1..19: note = siRNA sense sequence
  source 1..19: mol_type = other RNA
ctgccaactttggagccta

SEQ ID NO: 21907 - RNA, 19 nt, synthetic construct
  misc_feature 1..19: note = siRNA antisense sequence
  source 1..19: mol_type = other RNA
taggctccaaagttggcag

SEQ ID NO: 21908 - RNA, 19 nt, synthetic construct
  misc_feature 1..19: note = siRNA sense sequence
  source 1..19: mol_type = other RNA
tgccaactttggagcctag

SEQ ID NO: 21909 - RNA, 19 nt, synthetic construct
  misc_feature 1..19: note = siRNA antisense sequence
  source 1..19: mol_type = other RNA
ctaggctccaaagttggca

SEQ ID NO: 21910 - RNA, 19 nt, synthetic construct
  misc_feature 1..19: note = siRNA sense sequence
  source 1..19: mol_type = other RNA
gccaactttggagcctagg

SEQ ID NO: 21911 - RNA, 19 nt, synthetic construct
  misc_feature 1..19: note = siRNA antisense sequence
  source 1..19: mol_type = other RNA
cctaggctccaaagttggc

SEQ ID NO: 21912 - RNA, 19 nt, synthetic construct
  misc_feature 1..19: note = siRNA sense sequence
  source 1..19: mol_type = other RNA
ccaactttggagcctagga

SEQ ID NO: 21913 - RNA, 19 nt, synthetic construct
  misc_feature 1..19: note = siRNA antisense sequence
  source 1..19: mol_type = other RNA
tcctaggctccaaagttgg

SEQ ID NO: 21914 - RNA, 19 nt, synthetic construct
  misc_feature 1..19: note = siRNA sense sequence
  source 1..19: mol_type = other RNA
caactttggagcctaggat

SEQ ID NO: 21915 - RNA, 19 nt, synthetic construct
  misc_feature 1..19: note = siRNA antisense sequence
  source 1..19: mol_type = other RNA
atcctaggctccaaagttg

SEQ ID NO: 21916 - RNA, 19 nt, synthetic construct
  misc_feature 1..19: note = siRNA sense sequence
  source 1..19: mol_type = other RNA
aactttggagcctaggatt

SEQ ID NO: 21917 - RNA, 19 nt, synthetic construct
  misc_feature 1..19: note = siRNA antisense sequence
  source 1..19: mol_type = other RNA
aatcctaggctccaaagtt

SEQ ID NO: 21918 - RNA, 19 nt, synthetic construct
  misc_feature 1..19: note = siRNA sense sequence
  source 1..19: mol_type = other RNA
actttggagcctaggattc

SEQ ID NO: 21919 - RNA, 19 nt, synthetic construct
  misc_feature 1..19: note = siRNA antisense sequence
  source 1..19: mol_type = other RNA
gaatcctaggctccaaagt

SEQ ID NO: 21920 - RNA, 19 nt, synthetic construct
  misc_feature 1..19: note = siRNA sense sequence
  source 1..19: mol_type = other RNA
ctttggagcctaggattcc

SEQ ID NO: 21921 - RNA, 19 nt, synthetic construct
  misc_feature 1..19: note = siRNA antisense sequence
  source 1..19: mol_type = other RNA
ggaatcctaggctccaaag

SEQ ID NO: 21922 - RNA, 19 nt, synthetic construct
  misc_feature 1..19: note = siRNA sense sequence
  source 1..19: mol_type = other RNA
tttggagcctaggattccc

SEQ ID NO: 21923 - RNA, 19 nt, synthetic construct
  misc_feature 1..19: note = siRNA antisense sequence
  source 1..19: mol_type = other RNA
gggaatcctaggctccaaa

SEQ ID NO: 21924 - RNA, 19 nt, synthetic construct
  misc_feature 1..19: note = siRNA sense sequence
  source 1..19: mol_type = other RNA
agcctaggattcccaggac

SEQ ID NO: 21925 - RNA, 19 nt, synthetic construct
  misc_feature 1..19: note = siRNA antisense sequence
  source 1..19: mol_type = other RNA
gtcctgggaatcctaggct

SEQ ID NO: 21926 - RNA, 19 nt, synthetic construct
  misc_feature 1..19: note = siRNA sense sequence
  source 1..19: mol_type = other RNA
gcctaggattcccaggaca

SEQ ID NO: 21927 - RNA, 19 nt, synthetic construct
  misc_feature 1..19: note = siRNA antisense sequence
  source 1..19: mol_type = other RNA
tgtcctgggaatcctaggc

SEQ ID NO: 21928 - RNA, 19 nt, synthetic construct
  misc_feature 1..19: note = siRNA sense sequence
  source 1..19: mol_type = other RNA
cctaggattcccaggacat

SEQ ID NO: 21929 - RNA, 19 nt, synthetic construct
  misc_feature 1..19: note = siRNA antisense sequence
  source 1..19: mol_type = other RNA
atgtcctgggaatcctagg

SEQ ID NO: 21930 - RNA, 19 nt, synthetic construct
  misc_feature 1..19: note = siRNA sense sequence
  source 1..19: mol_type = other RNA
attcccaggacatcaggtc

SEQ ID NO: 21931 - RNA, 19 nt, synthetic construct
  misc_feature 1..19: note = siRNA antisense sequence
  source 1..19: mol_type = other RNA
gacctgatgtcctgggaat

SEQ ID NO: 21932 - RNA, 19 nt, synthetic construct
  misc_feature 1..19: note = siRNA sense sequence
  source 1..19: mol_type = other RNA
ccaggacatcaggtcaagc

SEQ ID NO: 21933 - RNA, 19 nt, synthetic construct
  misc_feature 1..19: note = siRNA antisense sequence
  source 1..19: mol_type = other RNA
gcttgacctgatgtcctgg

SEQ ID NO: 21934 - RNA, 19 nt, synthetic construct
  misc_feature 1..19: note = siRNA sense sequence
  source 1..19: mol_type = other RNA
caggacatcaggtcaagca

SEQ ID NO: 21935 - RNA, 19 nt, synthetic construct
  misc_feature 1..19: note = siRNA antisense sequence
  source 1..19: mol_type = other RNA
tgcttgacctgatgtcctg

SEQ ID NO: 21936 - RNA, 19 nt, synthetic construct
  misc_feature 1..19: note = siRNA sense sequence
  source 1..19: mol_type = other RNA
aggacatcaggtcaagcaa

SEQ ID NO: 21937 - RNA, 19 nt, synthetic construct
  misc_feature 1..19: note = siRNA antisense sequence
  source 1..19: mol_type = other RNA
ttgcttgacctgatgtcct

SEQ ID NO: 21938 - RNA, 19 nt, synthetic construct
  misc_feature 1..19: note = siRNA sense sequence
  source 1..19: mol_type = other RNA
ggacatcaggtcaagcaac

SEQ ID NO: 21939 - RNA, 19 nt, synthetic construct
  misc_feature 1..19: note = siRNA antisense sequence
  source 1..19: mol_type = other RNA
gttgcttgacctgatgtcc

SEQ ID NO: 21940 - RNA, 19 nt, synthetic construct
  misc_feature 1..19: note = siRNA sense sequence
  source 1..19: mol_type = other RNA
gacatcaggtcaagcaact

SEQ ID NO: 21941 - RNA, 19 nt, synthetic construct
  misc_feature 1..19: note = siRNA antisense sequence
  source 1..19: mol_type = other RNA
agttgcttgacctgatgtc

SEQ ID NO: 21942 - RNA, 19 nt, synthetic construct
  misc_feature 1..19: note = siRNA sense sequence
  source 1..19: mol_type = other RNA
acatcaggtcaagcaactg

SEQ ID NO: 21943 - RNA, 19 nt, synthetic construct
  misc_feature 1..19: note = siRNA antisense sequence
  source 1..19: mol_type = other RNA
cagttgcttgacctgatgt

SEQ ID NO: 21944 - RNA, 19 nt, synthetic construct
  misc_feature 1..19: note = siRNA sense sequence
  source 1..19: mol_type = other RNA
gtttcttctctcttgggac

SEQ ID NO: 21945 - RNA, 19 nt, synthetic construct
  misc_feature 1..19: note = siRNA antisense sequence
  source 1..19: mol_type = other RNA
gtcccaagagagaagaaac

SEQ ID NO: 21946 - RNA, 19 nt, synthetic construct
  misc_feature 1..19: note = siRNA sense sequence
  source 1..19: mol_type = other RNA
tttcttctctcttgggacc

SEQ ID NO: 21947 - RNA, 19 nt, synthetic construct
  misc_feature 1..19: note = siRNA antisense sequence
  source 1..19: mol_type = other RNA
ggtcccaagagagaagaaa

SEQ ID NO: 21948 - RNA, 19 nt, synthetic construct
  misc_feature 1..19: note = siRNA sense sequence
  source 1..19: mol_type = other RNA
ttcttctctcttgggacca

SEQ ID NO: 21949 - RNA, 19 nt, synthetic construct
  misc_feature 1..19: note = siRNA antisense sequence
  source 1..19: mol_type = other RNA
tggtcccaagagagaagaa

SEQ ID NO: 21950 - RNA, 19 nt, synthetic construct
  misc_feature 1..19: note = siRNA sense sequence
  source 1..19: mol_type = other RNA
ctctcttgggaccagcgct

SEQ ID NO: 21951 - RNA, 19 nt, synthetic construct
  misc_feature 1..19: note = siRNA antisense sequence
  source 1..19: mol_type = other RNA
agcgctggtcccaagagag

SEQ ID NO: 21952 - RNA, 19 nt, synthetic construct
  misc_feature 1..19: note = siRNA sense sequence
  source 1..19: mol_type = other RNA
tctcttgggaccagcgctt

SEQ ID NO: 21953 - RNA, 19 nt, synthetic construct
  misc_feature 1..19: note = siRNA antisense sequence
  source 1..19: mol_type = other RNA
aagcgctggtcccaagaga

SEQ ID NO: 21954 - RNA, 19 nt, synthetic construct
  misc_feature 1..19: note = siRNA sense sequence
  source 1..19: mol_type = other RNA
ctcttgggaccagcgcttt

SEQ ID NO: 21955 - RNA, 19 nt, synthetic construct
  misc_feature 1..19: note = siRNA antisense sequence
  source 1..19: mol_type = other RNA
aaagcgctggtcccaagag

SEQ ID NO: 21956 - RNA, 19 nt, synthetic construct
  misc_feature 1..19: note = siRNA sense sequence
  source 1..19: mol_type = other RNA
ctgggtgaatcagatcgtg

SEQ ID NO: 21957 - RNA, 19 nt, synthetic construct
  misc_feature 1..19: note = siRNA antisense sequence
  source 1..19: mol_type = other RNA
cacgatctgattcacccag

SEQ ID NO: 21958 - RNA, 19 nt, synthetic construct
  misc_feature 1..19: note = siRNA sense sequence
  source 1..19: mol_type = other RNA
tgggtgaatcagatcgtgc

SEQ ID NO: 21959 - RNA, 19 nt, synthetic construct
  misc_feature 1..19: note = siRNA antisense sequence
  source 1..19: mol_type = other RNA
gcacgatctgattcaccca

SEQ ID NO: 21960 - RNA, 19 nt, synthetic construct
  misc_feature 1..19: note = siRNA sense sequence
  source 1..19: mol_type = other RNA
gggtgaatcagatcgtgca

SEQ ID NO: 21961 - RNA, 19 nt, synthetic construct
  misc_feature 1..19: note = siRNA antisense sequence
  source 1..19: mol_type = other RNA
tgcacgatctgattcaccc

SEQ ID NO: 21962 - RNA, 19 nt, synthetic construct
  misc_feature 1..19: note = siRNA sense sequence
  source 1..19: mol_type = other RNA
gtgcagacacggtaactag

SEQ ID NO: 21963 - RNA, 19 nt, synthetic construct
  misc_feature 1..19: note = siRNA antisense sequence
  source 1..19: mol_type = other RNA
ctagttaccgtgtctgcac

SEQ ID NO: 21964 - RNA, 19 nt, synthetic construct
  misc_feature 1..19: note = siRNA sense sequence
  source 1..19: mol_type = other RNA
tgcagacacggtaactagg

SEQ ID NO: 21965 - RNA, 19 nt, synthetic construct
  misc_feature 1..19: note = siRNA antisense sequence
  source 1..19: mol_type = other RNA
cctagttaccgtgtctgca

SEQ ID NO: 21966 - RNA, 19 nt, synthetic construct
  misc_feature 1..19: note = siRNA sense sequence
  source 1..19: mol_type = other RNA
acacgttgctgggagccca

SEQ ID NO: 21967 - RNA, 19 nt, synthetic construct
  misc_feature 1..19: note = siRNA antisense sequence
  source 1..19: mol_type = other RNA
tgggctcccagcaacgtgt

SEQ ID NO: 21968 - RNA, 19 nt, synthetic construct
  misc_feature 1..19: note = siRNA sense sequence
  source 1..19: mol_type = other RNA
gtgaccagtagttctcaga

SEQ ID NO: 21969 - RNA, 19 nt, synthetic construct
  misc_feature 1..19: note = siRNA antisense sequence
  source 1..19: mol_type = other RNA
tctgagaactactggtcac

SEQ ID NO: 21970 - RNA, 19 nt, synthetic construct
  misc_feature 1..19: note = siRNA sense sequence
  source 1..19: mol_type = other RNA
tgaccagtagttctcagaa

SEQ ID NO: 21971 - RNA, 19 nt, synthetic construct
  misc_feature 1..19: note = siRNA antisense sequence
  source 1..19: mol_type = other RNA
ttctgagaactactggtca

SEQ ID NO: 21972 - RNA, 19 nt, synthetic construct
  misc_feature 1..19: note = siRNA sense sequence
  source 1..19: mol_type = other RNA
aaccgcttctaaataccag

SEQ ID NO: 21973 - RNA, 19 nt, synthetic construct
  misc_feature 1..19: note = siRNA antisense sequence
  source 1..19: mol_type = other RNA
ctggtatttagaagcggtt

SEQ ID NO: 21974 - RNA, 19 nt, synthetic construct
  misc_feature 1..19: note = siRNA sense sequence
  source 1..19: mol_type = other RNA
gcttctaaataccagctcc

SEQ ID NO: 21975 - RNA, 19 nt, synthetic construct
  misc_feature 1..19: note = siRNA antisense sequence
  source 1..19: mol_type = other RNA
ggagctggtatttagaagc

SEQ ID NO: 21976 - RNA, 19 nt, synthetic construct
  misc_feature 1..19: note = siRNA sense sequence
  source 1..19: mol_type = other RNA
cttctaaataccagctcca

SEQ ID NO: 21977 - RNA, 19 nt, synthetic construct
  misc_feature 1..19: note = siRNA antisense sequence
  source 1..19: mol_type = other RNA
tggagctggtatttagaag

SEQ ID NO: 21978 - RNA, 19 nt, synthetic construct
  misc_feature 1..19: note = siRNA sense sequence
  source 1..19: mol_type = other RNA
acaggcttgtagcgtccga

SEQ ID NO: 21979 - RNA, 19 nt, synthetic construct
  misc_feature 1..19: note = siRNA antisense sequence
  source 1..19: mol_type = other RNA
tcggacgctacaagcctgt

SEQ ID NO: 21980 - RNA, 19 nt, synthetic construct
  misc_feature 1..19: note = siRNA sense sequence
  source 1..19: mol_type = other RNA
caggcttgtagcgtccgag

SEQ ID NO: 21981 - RNA, 19 nt, synthetic construct
  misc_feature 1..19: note = siRNA antisense sequence
  source 1..19: mol_type = other RNA
ctcggacgctacaagcctg

SEQ ID NO: 21982 - RNA, 19 nt, synthetic construct
  misc_feature 1..19: note = siRNA sense sequence
  source 1..19: mol_type = other RNA
aggcttgtagcgtccgagt

SEQ ID NO: 21983 - RNA, 19 nt, synthetic construct
  misc_feature 1..19: note = siRNA antisense sequence
  source 1..19: mol_type = other RNA
actcggacgctacaagcct

SEQ ID NO: 21984 - RNA, 19 nt, synthetic construct
  misc_feature 1..19: note = siRNA sense sequence
  source 1..19: mol_type = other RNA
ggcttgtagcgtccgagtg

SEQ ID NO: 21985 - RNA, 19 nt, synthetic construct
  misc_feature 1..19: note = siRNA antisense sequence
  source 1..19: mol_type = other RNA
cactcggacgctacaagcc

SEQ ID NO: 21986 - RNA, 19 nt, synthetic construct
  misc_feature 1..19: note = siRNA sense sequence
  source 1..19: mol_type = other RNA
gcttgtagcgtccgagtgc

SEQ ID NO: 21987 - RNA, 19 nt, synthetic construct
  misc_feature 1..19: note = siRNA antisense sequence
  source 1..19: mol_type = other RNA
gcactcggacgctacaagc

SEQ ID NO: 21988 - RNA, 19 nt, synthetic construct
  misc_feature 1..19: note = siRNA sense sequence
  source 1..19: mol_type = other RNA
ccgagtgcggataaggcaa

SEQ ID NO: 21989 - RNA, 19 nt, synthetic construct
  misc_feature 1..19: note = siRNA antisense sequence
  source 1..19: mol_type = other RNA
ttgccttatccgcactcgg

SEQ ID NO: 21990 - RNA, 19 nt, synthetic construct
  misc_feature 1..19: note = siRNA sense sequence
  source 1..19: mol_type = other RNA
cgagtgcggataaggcaag

SEQ ID NO: 21991 - RNA, 19 nt, synthetic construct
  misc_feature 1..19: note = siRNA antisense sequence
  source 1..19: mol_type = other RNA
cttgccttatccgcactcg

SEQ ID NO: 21992 - RNA, 19 nt, synthetic construct
  misc_feature 1..19: note = siRNA sense sequence
  source 1..19: mol_type = other RNA
gagtgcggataaggcaaga

SEQ ID NO: 21993 - RNA, 19 nt, synthetic construct
  misc_feature 1..19: note = siRNA antisense sequence
  source 1..19: mol_type = other RNA
tcttgccttatccgcactc

SEQ ID NO: 21994 - RNA, 19 nt, synthetic construct
  misc_feature 1..19: note = siRNA sense sequence
  source 1..19: mol_type = other RNA
agtgcggataaggcaagag

SEQ ID NO: 21995 - RNA, 19 nt, synthetic construct
  misc_feature 1..19: note = siRNA antisense sequence
  source 1..19: mol_type = other RNA
ctcttgccttatccgcact

SEQ ID NO: 21996 - RNA, 19 nt, synthetic construct
  misc_feature 1..19: note = siRNA sense sequence
  source 1..19: mol_type = other RNA
gtgcggataaggcaagagc

SEQ ID NO: 21997 - RNA, 19 nt, synthetic construct
  misc_feature 1..19: note = siRNA antisense sequence
  source 1..19: mol_type = other RNA
gctcttgccttatccgcac

SEQ ID NO: 21998 - RNA, 19 nt, synthetic construct
  misc_feature 1..19: note = siRNA sense sequence
  source 1..19: mol_type = other RNA
tgcggataaggcaagagca

SEQ ID NO: 21999 - RNA, 19 nt, synthetic construct
  misc_feature 1..19: note = siRNA antisense sequence
  source 1..19: mol_type = other RNA
tgctcttgccttatccgca

SEQ ID NO: 22000 - RNA, 19 nt, synthetic construct
  misc_feature 1..19: note = siRNA sense sequence
  source 1..19: mol_type = other RNA
gcggataaggcaagagcaa

SEQ ID NO: 22001 - RNA, 19 nt, synthetic construct
  misc_feature 1..19: note = siRNA antisense sequence
  source 1..19: mol_type = other RNA
ttgctcttgccttatccgc

SEQ ID NO: 22002 - RNA, 19 nt, synthetic construct
  misc_feature 1..19: note = siRNA sense sequence
  source 1..19: mol_type = other RNA
cggataaggcaagagcaaa

SEQ ID NO: 22003 - RNA, 19 nt, synthetic construct
  misc_feature 1..19: note = siRNA antisense sequence
  source 1..19: mol_type = other RNA
tttgctcttgccttatccg

SEQ ID NO: 22004 - RNA, 19 nt, synthetic construct
  misc_feature 1..19: note = siRNA sense sequence
  source 1..19: mol_type = other RNA
ggataaggcaagagcaaaa

SEQ ID NO: 22005 - RNA, 19 nt, synthetic construct
  misc_feature 1..19: note = siRNA antisense sequence
  source 1..19: mol_type = other RNA
ttttgctcttgccttatcc

SEQ ID NO: 22006 - RNA, 19 nt, synthetic construct
  misc_feature 1..19: note = siRNA sense sequence
  source 1..19: mol_type = other RNA
aacgagcatagtttgggcc

SEQ ID NO: 22007 - RNA, 19 nt, synthetic construct
  misc_feature 1..19: note = siRNA antisense sequence
  source 1..19: mol_type = other RNA
ggcccaaactatgctcgtt

SEQ ID NO: 22008 - RNA, 19 nt, synthetic construct
  misc_feature 1..19: note = siRNA sense sequence
  source 1..19: mol_type = other RNA
ggccaaatctgcacttctg

SEQ ID NO: 22009 - RNA, 19 nt, synthetic construct
  misc_feature 1..19: note = siRNA antisense sequence
  source 1..19: mol_type = other RNA
cagaagtgcagatttggcc

SEQ ID NO: 22010 - RNA, 19 nt, synthetic construct
  misc_feature 1..19: note = siRNA sense sequence
  source 1..19: mol_type = other RNA
agagctacttttactgcta

SEQ ID NO: 22011 - RNA, 19 nt, synthetic construct
  misc_feature 1..19: note = siRNA antisense sequence
  source 1..19: mol_type = other RNA
tagcagtaaaagtagctct

SEQ ID NO: 22012 - RNA, 19 nt, synthetic construct
  misc_feature 1..19: note = siRNA sense sequence
  source 1..19: mol_type = other RNA
gagctacttttactgctaa

SEQ ID NO: 22013 - RNA, 19 nt, synthetic construct
  misc_feature 1..19: note = siRNA antisense sequence
  source 1..19: mol_type = other RNA
ttagcagtaaaagtagctc

SEQ ID NO: 22014 - RNA, 19 nt, synthetic construct
  misc_feature 1..19: note = siRNA sense sequence
  source 1..19: mol_type = other RNA
agctacttttactgctaag

SEQ ID NO: 22015 - RNA, 19 nt, synthetic construct
  misc_feature 1..19: note = siRNA antisense sequence
  source 1..19: mol_type = other RNA
cttagcagtaaaagtagct

SEQ ID NO: 22016 - RNA, 19 nt, synthetic construct
  misc_feature 1..19: note = siRNA sense sequence
  source 1..19: mol_type = other RNA
gctacttttactgctaagc

SEQ ID NO: 22017 - RNA, 19 nt, synthetic construct
  misc_feature 1..19: note = siRNA antisense sequence
  source 1..19: mol_type = other RNA
gcttagcagtaaaagtagc

SEQ ID NO: 22018 - RNA, 19 nt, synthetic construct
  misc_feature 1..19: note = siRNA sense sequence
  source 1..19: mol_type = other RNA
ggatttacccagagggaag

SEQ ID NO: 22019 - RNA, 19 nt, synthetic construct
  misc_feature 1..19: note = siRNA antisense sequence
  source 1..19: mol_type = other RNA
cttccctctgggtaaatcc

SEQ ID NO: 22020 - RNA, 19 nt, synthetic construct
  misc_feature 1..19: note = siRNA sense sequence
  source 1..19: mol_type = other RNA
gatttacccagagggaagc

SEQ ID NO: 22021 - RNA, 19 nt, synthetic construct
  misc_feature 1..19: note = siRNA antisense sequence
  source 1..19: mol_type = other RNA
gcttccctctgggtaaatc

SEQ ID NO: 22022 - RNA, 19 nt, synthetic construct
  misc_feature 1..19: note = siRNA sense sequence
  source 1..19: mol_type = other RNA
atttacccagagggaagcg

SEQ ID NO: 22023 - RNA, 19 nt, synthetic construct
  misc_feature 1..19: note = siRNA antisense sequence
  source 1..19: mol_type = other RNA
cgcttccctctgggtaaat

SEQ ID NO: 22024 - RNA, 19 nt, synthetic construct
  misc_feature 1..19: note = siRNA sense sequence
  source 1..19: mol_type = other RNA
tttacccagagggaagcgt

SEQ ID NO: 22025 - RNA, 19 nt, synthetic construct
  misc_feature 1..19: note = siRNA antisense sequence
  source 1..19: mol_type = other RNA
acgcttccctctgggtaaa

SEQ ID NO: 22026 - RNA, 19 nt, synthetic construct
  misc_feature 1..19: note = siRNA sense sequence
  source 1..19: mol_type = other RNA
ttacccagagggaagcgtt

SEQ ID NO: 22027 - RNA, 19 nt, synthetic construct
  misc_feature 1..19: note = siRNA antisense sequence
  source 1..19: mol_type = other RNA
aacgcttccctctgggtaa

SEQ ID NO: 22028 - RNA, 19 nt, synthetic construct
  misc_feature 1..19: note = siRNA sense sequence
  source 1..19: mol_type = other RNA
tacccagagggaagcgttg

SEQ ID NO: 22029 - RNA, 19 nt, synthetic construct
  misc_feature 1..19: note = siRNA antisense sequence
  source 1..19: mol_type = other RNA
caacgcttccctctgggta

SEQ ID NO: 22030 - RNA, 19 nt, synthetic construct
  misc_feature 1..19: note = siRNA sense sequence
  source 1..19: mol_type = other RNA
acccagagggaagcgttgc

SEQ ID NO: 22031 - RNA, 19 nt, synthetic construct
  misc_feature 1..19: note = siRNA antisense sequence
  source 1..19: mol_type = other RNA
gcaacgcttccctctgggt

SEQ ID NO: 22032 - RNA, 19 nt, synthetic construct
  misc_feature 1..19: note = siRNA sense sequence
  source 1..19: mol_type = other RNA
cccagagggaagcgttgca

SEQ ID NO: 22033 - RNA, 19 nt, synthetic construct
  misc_feature 1..19: note = siRNA antisense sequence
  source 1..19: mol_type = other RNA
tgcaacgcttccctctggg

SEQ ID NO: 22034 - RNA, 19 nt, synthetic construct
  misc_feature 1..19: note = siRNA sense sequence
  source 1..19: mol_type = other RNA
ccagagggaagcgttgcag

SEQ ID NO: 22035 - RNA, 19 nt, synthetic construct
  misc_feature 1..19: note = siRNA antisense sequence
  source 1..19: mol_type = other RNA
ctgcaacgcttccctctgg

SEQ ID NO: 22036 - RNA, 19 nt, synthetic construct
  misc_feature 1..19: note = siRNA sense sequence
  source 1..19: mol_type = other RNA
gaagcgttgcagtggcagc

SEQ ID NO: 22037 - RNA, 19 nt, synthetic construct
  misc_feature 1..19: note = siRNA antisense sequence
  source 1..19: mol_type = other RNA
gctgccactgcaacgcttc

SEQ ID NO: 22038 - RNA, 19 nt, synthetic construct
  misc_feature 1..19: note = siRNA sense sequence
  source 1..19: mol_type = other RNA
gcagccgcaggcaggtaaa

SEQ ID NO: 22039 - RNA, 19 nt, synthetic construct
  misc_feature 1..19: note = siRNA antisense sequence
  source 1..19: mol_type = other RNA
tttacctgcctgcggctgc

SEQ ID NO: 22040 - RNA, 19 nt, synthetic construct
  misc_feature 1..19: note = siRNA sense sequence
  source 1..19: mol_type = other RNA
cagccgcaggcaggtaaaa

SEQ ID NO: 22041 - RNA, 19 nt, synthetic construct
  misc_feature 1..19: note = siRNA antisense sequence
  source 1..19: mol_type = other RNA
ttttacctgcctgcggctg

SEQ ID NO: 22042 - RNA, 19 nt, synthetic construct
  misc_feature 1..19: note = siRNA sense sequence
  source 1..19: mol_type = other RNA
ctagtatttgcactcacac

SEQ ID NO: 22043 - RNA, 19 nt, synthetic construct
  misc_feature 1..19: note = siRNA antisense sequence
  source 1..19: mol_type = other RNA
gtgtgagtgcaaatactag

SEQ ID NO: 22044 - RNA, 19 nt, synthetic construct
  misc_feature 1..19: note = siRNA sense sequence
  source 1..19: mol_type = other RNA
cccggattcttcacagaca

SEQ ID NO: 22045 - RNA, 19 nt, synthetic construct
  misc_feature 1..19: note = siRNA antisense sequence
  source 1..19: mol_type = other RNA
tgtctgtgaagaatccggg

SEQ ID NO: 22046 - RNA, 19 nt, synthetic construct
  misc_feature 1..19: note = siRNA sense sequence
  source 1..19: mol_type = other RNA
ccggattcttcacagacag

SEQ ID NO: 22047 - RNA, 19 nt, synthetic construct
  misc_feature 1..19: note = siRNA antisense sequence
  source 1..19: mol_type = other RNA
ctgtctgtgaagaatccgg

SEQ ID NO: 22048 - RNA, 19 nt, synthetic construct
  misc_feature 1..19: note = siRNA sense sequence
  source 1..19: mol_type = other RNA
cggattcttcacagacagg

SEQ ID NO: 22049 - RNA, 19 nt, synthetic construct
  misc_feature 1..19: note = siRNA antisense sequence
  source 1..19: mol_type = other RNA
cctgtctgtgaagaatccg

SEQ ID NO: 22050 - RNA, 19 nt, synthetic construct
  misc_feature 1..19: note = siRNA sense sequence
  source 1..19: mol_type = other RNA
cttcacagacagggatgga

SEQ ID NO: 22051 - RNA, 19 nt, synthetic construct
  misc_feature 1..19: note = siRNA antisense sequence
  source 1..19: mol_type = other RNA
tccatccctgtctgtgaag

SEQ ID NO: 22052 - RNA, 19 nt, synthetic construct
  misc_feature 1..19: note = siRNA sense sequence
  source 1..19: mol_type = other RNA
ttcacagacagggatggaa

SEQ ID NO: 22053 - RNA, 19 nt, synthetic construct
  misc_feature 1..19: note = siRNA antisense sequence
  source 1..19: mol_type = other RNA
ttccatccctgtctgtgaa

SEQ ID NO: 22054 - RNA, 19 nt, synthetic construct
  misc_feature 1..19: note = siRNA sense sequence
  source 1..19: mol_type = other RNA
tcacagacagggatggaag

SEQ ID NO: 22055 - RNA, 19 nt, synthetic construct
  misc_feature 1..19: note = siRNA antisense sequence
  source 1..19: mol_type = other RNA
cttccatccctgtctgtga

SEQ ID NO: 22056 - RNA, 19 nt, synthetic construct
  misc_feature 1..19: note = siRNA sense sequence
  source 1..19: mol_type = other RNA
cacagacagggatggaaga

SEQ ID NO: 22057 - RNA, 19 nt, synthetic construct
  misc_feature 1..19: note = siRNA antisense sequence
  source 1..19: mol_type = other RNA
tcttccatccctgtctgtg

SEQ ID NO: 22058 - RNA, 19 nt, synthetic construct
  misc_feature 1..19: note = siRNA sense sequence
  source 1..19: mol_type = other RNA
acagacagggatggaagag

SEQ ID NO: 22059 - RNA, 19 nt, synthetic construct
  misc_feature 1..19: note = siRNA antisense sequence
  source 1..19: mol_type = other RNA
ctcttccatccctgtctgt

SEQ ID NO: 22060 - RNA, 19 nt, synthetic construct
  misc_feature 1..19: note = siRNA sense sequence
  source 1..19: mol_type = other RNA
cttaggaagttgaagtttg

SEQ ID NO: 22061 - RNA, 19 nt, synthetic construct
  misc_feature 1..19: note = siRNA antisense sequence
  source 1..19: mol_type = other RNA
caaacttcaacttcctaag

SEQ ID NO: 22062 - RNA, 19 nt, synthetic construct
  misc_feature 1..19: note = siRNA sense sequence
  source 1..19: mol_type = other RNA
taggaagttgaagtttggc

SEQ ID NO: 22063 - RNA, 19 nt, synthetic construct
  misc_feature 1..19: note = siRNA antisense sequence
  source 1..19: mol_type = other RNA
gccaaacttcaacttccta

SEQ ID NO: 22064 - RNA, 19 nt, synthetic construct
  misc_feature 1..19: note = siRNA sense sequence
  source 1..19: mol_type = other RNA
aggaagttgaagtttggca

SEQ ID NO: 22065 - RNA, 19 nt, synthetic construct
  misc_feature 1..19: note = siRNA antisense sequence
  source 1..19: mol_type = other RNA
tgccaaacttcaacttcct

SEQ ID NO: 22066 - RNA, 19 nt, synthetic construct
  misc_feature 1..19: note = siRNA sense sequence
  source 1..19: mol_type = other RNA
ggaagttgaagtttggcat

SEQ ID NO: 22067 - RNA, 19 nt, synthetic construct
  misc_feature 1..19: note = siRNA antisense sequence
  source 1..19: mol_type = other RNA
atgccaaacttcaacttcc

SEQ ID NO: 22068 - RNA, 19 nt, synthetic construct
  misc_feature 1..19: note = siRNA sense sequence
  source 1..19: mol_type = other RNA
tggcattaaaataaaggac

SEQ ID NO: 22069 - RNA, 19 nt, synthetic construct
  misc_feature 1..19: note = siRNA antisense sequence
  source 1..19: mol_type = other RNA
gtcctttattttaatgcca

SEQ ID NO: 22070 - RNA, 19 nt, synthetic construct
  misc_feature 1..19: note = siRNA sense sequence
  source 1..19: mol_type = other RNA
ggcattaaaataaaggact

SEQ ID NO: 22071 - RNA, 19 nt, synthetic construct
  misc_feature 1..19: note = siRNA antisense sequence
  source 1..19: mol_type = other RNA
agtcctttattttaatgcc

SEQ ID NO: 22072 - RNA, 19 nt, synthetic construct
  misc_feature 1..19: note = siRNA sense sequence
  source 1..19: mol_type = other RNA
gcattaaaataaaggactc

SEQ ID NO: 22073 - RNA, 19 nt, synthetic construct
  misc_feature 1..19: note = siRNA antisense sequence
  source 1..19: mol_type = other RNA
gagtcctttattttaatgc

SEQ ID NO: 22074 - RNA, 19 nt, synthetic construct
  misc_feature 1..19: note = siRNA sense sequence
  source 1..19: mol_type = other RNA
cattaaaataaaggactcg

SEQ ID NO: 22075 - RNA, 19 nt, synthetic construct
  misc_feature 1..19: note = siRNA antisense sequence
  source 1..19: mol_type = other RNA
cgagtcctttattttaatg

SEQ ID NO: 22076 - RNA, 19 nt, synthetic construct
  misc_feature 1..19: note = siRNA sense sequence
  source 1..19: mol_type = other RNA
attaaaataaaggactcgc

SEQ ID NO: 22077 - RNA, 19 nt, synthetic construct
  misc_feature 1..19: note = siRNA antisense sequence
  source 1..19: mol_type = other RNA
gcgagtcctttattttaat

SEQ ID NO: 22078 - RNA, 19 nt, synthetic construct
  misc_feature 1..19: note = siRNA sense sequence
  source 1..19: mol_type = other RNA
ttaaaataaaggactcgcc

SEQ ID NO: 22079 - RNA, 19 nt, synthetic construct
  misc_feature 1..19: note = siRNA antisense sequence
  source 1..19: mol_type = other RNA
ggcgagtcctttattttaa

SEQ ID NO: 22080 - RNA, 19 nt, synthetic construct
  misc_feature 1..19: note = siRNA sense sequence
  source 1..19: mol_type = other RNA
taaaataaaggactcgcca

SEQ ID NO: 22081 - RNA, 19 nt, synthetic construct
  misc_feature 1..19: note = siRNA antisense sequence
  source 1..19: mol_type = other RNA
tggcgagtcctttatttta

SEQ ID NO: 22082 - RNA, 19 nt, synthetic construct
  misc_feature 1..19: note = siRNA sense sequence
  source 1..19: mol_type = other RNA
aaaataaaggactcgccac

SEQ ID NO: 22083 - RNA, 19 nt, synthetic construct
  misc_feature 1..19: note = siRNA antisense sequence
  source 1..19: mol_type = other RNA
gtggcgagtcctttatttt

SEQ ID NO: 22084 - RNA, 19 nt, synthetic construct
  misc_feature 1..19: note = siRNA sense sequence
  source 1..19: mol_type = other RNA
aaataaaggactcgccacc

SEQ ID NO: 22085 - RNA, 19 nt, synthetic construct
  misc_feature 1..19: note = siRNA antisense sequence
  source 1..19: mol_type = other RNA
ggtggcgagtcctttattt

SEQ ID NO: 22086 - RNA, 19 nt, synthetic construct
  misc_feature 1..19: note = siRNA sense sequence
  source 1..19: mol_type = other RNA
aataaaggactcgccacca

SEQ ID NO: 22087 - RNA, 19 nt, synthetic construct
  misc_feature 1..19: note = siRNA antisense sequence
  source 1..19: mol_type = other RNA
tggtggcgagtcctttatt

SEQ ID NO: 22088 - RNA, 19 nt, synthetic construct
  misc_feature 1..19: note = siRNA sense sequence
  source 1..19: mol_type = other RNA
ataaaggactcgccaccac

SEQ ID NO: 22089 - RNA, 19 nt, synthetic construct
  misc_feature 1..19: note = siRNA antisense sequence
  source 1..19: mol_type = other RNA
gtggtggcgagtcctttat

SEQ ID NO: 22090 - RNA, 19 nt, synthetic construct
  misc_feature 1..19: note = siRNA sense sequence
  source 1..19: mol_type = other RNA
actcgccaccactctgtgc

SEQ ID NO: 22091 - RNA, 19 nt, synthetic construct
  misc_feature 1..19: note = siRNA antisense sequence
  source 1..19: mol_type = other RNA
gcacagagtggtggcgagt

SEQ ID NO: 22092 - RNA, 19 nt, synthetic construct
  misc_feature 1..19: note = siRNA sense sequence
  source 1..19: mol_type = other RNA
tcgccaccactctgtgcac

SEQ ID NO: 22093 - RNA, 19 nt, synthetic construct
  misc_feature 1..19: note = siRNA antisense sequence
  source 1..19: mol_type = other RNA
gtgcacagagtggtggcga

SEQ ID NO: 22094 - RNA, 19 nt, synthetic construct
  misc_feature 1..19: note = siRNA sense sequence
  source 1..19: mol_type = other RNA
gccaccactctgtgcacct

SEQ ID NO: 22095 - RNA, 19 nt, synthetic construct
  misc_feature 1..19: note = siRNA antisense sequence
  source 1..19: mol_type = other RNA
aggtgcacagagtggtggc

SEQ ID NO: 22096 - RNA, 19 nt, synthetic construct
  misc_feature 1..19: note = siRNA sense sequence
  source 1..19: mol_type = other RNA
cactctgtgcaccttcttg

SEQ ID NO: 22097 - RNA, 19 nt, synthetic construct
  misc_feature 1..19: note = siRNA antisense sequence
  source 1..19: mol_type = other RNA
caagaaggtgcacagagtg

SEQ ID NO: 22098 - RNA, 19 nt, synthetic construct
  misc_feature 1..19: note = siRNA sense sequence
  source 1..19: mol_type = other RNA
actctgtgcaccttcttga

SEQ ID NO: 22099 - RNA, 19 nt, synthetic construct
  misc_feature 1..19: note = siRNA antisense sequence
  source 1..19: mol_type = other RNA
tcaagaaggtgcacagagt

SEQ ID NO: 22100 - RNA, 19 nt, synthetic construct
  misc_feature 1..19: note = siRNA sense sequence
  source 1..19: mol_type = other RNA
ctctgtgcaccttcttgag

SEQ ID NO: 22101 - RNA, 19 nt, synthetic construct
  misc_feature 1..19: note = siRNA antisense sequence
  source 1..19: mol_type = other RNA
ctcaagaaggtgcacagag

SEQ ID NO: 22102 - RNA, 19 nt, synthetic construct
  misc_feature 1..19: note = siRNA sense sequence
  source 1..19: mol_type = other RNA
tctgtgcaccttcttgagg

SEQ ID NO: 22103 - RNA, 19 nt, synthetic construct
  misc_feature 1..19: note = siRNA antisense sequence
  source 1..19: mol_type = other RNA
cctcaagaaggtgcacaga

SEQ ID NO: 22104 - RNA, 19 nt, synthetic construct
  misc_feature 1..19: note = siRNA sense sequence
  source 1..19: mol_type = other RNA
ctgtgcaccttcttgaggg

SEQ ID NO: 22105 - RNA, 19 nt, synthetic construct
  misc_feature 1..19: note = siRNA antisense sequence
  source 1..19: mol_type = other RNA
ccctcaagaaggtgcacag

SEQ ID NO: 22106 - RNA, 19 nt, synthetic construct
  misc_feature 1..19: note = siRNA sense sequence
  source 1..19: mol_type = other RNA
tgtgcaccttcttgaggga

SEQ ID NO: 22107 - RNA, 19 nt, synthetic construct
  misc_feature 1..19: note = siRNA antisense sequence
  source 1..19: mol_type = other RNA
tccctcaagaaggtgcaca

SEQ ID NO: 22108 - RNA, 19 nt, synthetic construct
  misc_feature 1..19: note = siRNA sense sequence
  source 1..19: mol_type = other RNA
cggagcgcctcacagctta

SEQ ID NO: 22109 - RNA, 19 nt, synthetic construct
  misc_feature 1..19: note = siRNA antisense sequence
  source 1..19: mol_type = other RNA
taagctgtgaggcgctccg

SEQ ID NO: 22110 - RNA, 19 nt, synthetic construct
  misc_feature 1..19: note = siRNA sense sequence
  source 1..19: mol_type = other RNA
ggagcgcctcacagcttag

SEQ ID NO: 22111 - RNA, 19 nt, synthetic construct
  misc_feature 1..19: note = siRNA antisense sequence
  source 1..19: mol_type = other RNA
ctaagctgtgaggcgctcc

SEQ ID NO: 22112 - RNA, 19 nt, synthetic construct
  misc_feature 1..19: note = siRNA sense sequence
  source 1..19: mol_type = other RNA
gagcgcctcacagcttagt

SEQ ID NO: 22113 - RNA, 19 nt, synthetic construct
  misc_feature 1..19: note = siRNA antisense sequence
  source 1..19: mol_type = other RNA
actaagctgtgaggcgctc

SEQ ID NO: 22114 - RNA, 19 nt, synthetic construct
  misc_feature 1..19: note = siRNA sense sequence
  source 1..19: mol_type = other RNA
gctgcgcatgcgccttcat

SEQ ID NO: 22115 - RNA, 19 nt, synthetic construct
  misc_feature 1..19: note = siRNA antisense sequence
  source 1..19: mol_type = other RNA
atgaaggcgcatgcgcagc

SEQ ID NO: 22116 - RNA, 19 nt, synthetic construct
  misc_feature 1..19: note = siRNA sense sequence
  source 1..19: mol_type = other RNA
ctgcgcatgcgccttcatt

SEQ ID NO: 22117 - RNA, 19 nt, synthetic construct
  misc_feature 1..19: note = siRNA antisense sequence
  source 1..19: mol_type = other RNA
aatgaaggcgcatgcgcag

SEQ ID NO: 22118 - RNA, 19 nt, synthetic construct
  misc_feature 1..19: note = siRNA sense sequence
  source 1..19: mol_type = other RNA
tgcgcatgcgccttcattt

SEQ ID NO: 22119 - RNA, 19 nt, synthetic construct
  misc_feature 1..19: note = siRNA antisense sequence
  source 1..19: mol_type = other RNA
aaatgaaggcgcatgcgca

SEQ ID NO: 22120 - RNA, 19 nt, synthetic construct
  misc_feature 1..19: note = siRNA sense sequence
  source 1..19: mol_type = other RNA
cccgagcctgttagacgca

SEQ ID NO: 22121 - RNA, 19 nt, synthetic construct
  misc_feature 1..19: note = siRNA antisense sequence
  source 1..19: mol_type = other RNA
tgcgtctaacaggctcggg

SEQ ID NO: 22122 - RNA, 19 nt, synthetic construct
  misc_feature 1..19: note = siRNA sense sequence
  source 1..19: mol_type = other RNA
ccgagcctgttagacgcag

SEQ ID NO: 22123 - RNA, 19 nt, synthetic construct
  misc_feature 1..19: note = siRNA antisense sequence
  source 1..19: mol_type = other RNA
ctgcgtctaacaggctcgg

SEQ ID NO: 22124 - RNA, 19 nt, synthetic construct
  misc_feature 1..19: note = siRNA sense sequence
  source 1..19: mol_type = other RNA
cgagcctgttagacgcagc

SEQ ID NO: 22125 - RNA, 19 nt, synthetic construct
  misc_feature 1..19: note = siRNA antisense sequence
  source 1..19: mol_type = other RNA
gctgcgtctaacaggctcg

SEQ ID NO: 22126 - RNA, 19 nt, synthetic construct
  misc_feature 1..19: note = siRNA sense sequence
  source 1..19: mol_type = other RNA
gagcctgttagacgcagcg

SEQ ID NO: 22127 - RNA, 19 nt, synthetic construct
  misc_feature 1..19: note = siRNA antisense sequence
  source 1..19: mol_type = other RNA
cgctgcgtctaacaggctc

SEQ ID NO: 22128 - RNA, 19 nt, synthetic construct
  misc_feature 1..19: note = siRNA sense sequence
  source 1..19: mol_type = other RNA
agcctgttagacgcagcgc

SEQ ID NO: 22129 - RNA, 19 nt, synthetic construct
  misc_feature 1..19: note = siRNA antisense sequence
  source 1..19: mol_type = other RNA
gcgctgcgtctaacaggct

SEQ ID NO: 22130 - RNA, 19 nt, synthetic construct
  misc_feature 1..19: note = siRNA sense sequence
  source 1..19: mol_type = other RNA
aaaggatagaggaagtgct

SEQ ID NO: 22131 - RNA, 19 nt, synthetic construct
  misc_feature 1..19: note = siRNA antisense sequence
  source 1..19: mol_type = other RNA
agcacttcctctatccttt

SEQ ID NO: 22132 - RNA, 19 nt, synthetic construct
  misc_feature 1..19: note = siRNA sense sequence
  source 1..19: mol_type = other RNA
atagaggaagtgctgccct

SEQ ID NO: 22133 - RNA, 19 nt, synthetic construct
  misc_feature 1..19: note = siRNA antisense sequence
  source 1..19: mol_type = other RNA
agggcagcacttcctctat

SEQ ID NO: 22134 - RNA, 19 nt, synthetic construct
  misc_feature 1..19: note = siRNA sense sequence
  source 1..19: mol_type = other RNA
tagaggaagtgctgcccta

SEQ ID NO: 22135 - RNA, 19 nt, synthetic construct
  misc_feature 1..19: note = siRNA antisense sequence
  source 1..19: mol_type = other RNA
tagggcagcacttcctcta

SEQ ID NO: 22136 - RNA, 19 nt, synthetic construct
  misc_feature 1..19: note = siRNA sense sequence
  source 1..19: mol_type = other RNA
aggaagtgctgccctaggc

SEQ ID NO: 22137 - RNA, 19 nt, synthetic construct
  misc_feature 1..19: note = siRNA antisense sequence
  source 1..19: mol_type = other RNA
gcctagggcagcacttcct

SEQ ID NO: 22138 - RNA, 19 nt, synthetic construct
  misc_feature 1..19: note = siRNA sense sequence
  source 1..19: mol_type = other RNA
ggaagtgctgccctaggct

SEQ ID NO: 22139 - RNA, 19 nt, synthetic construct
  misc_feature 1..19: note = siRNA antisense sequence
  source 1..19: mol_type = other RNA
agcctagggcagcacttcc

SEQ ID NO: 22140 - RNA, 19 nt, synthetic construct
  misc_feature 1..19: note = siRNA sense sequence
  source 1..19: mol_type = other RNA
gaagtgctgccctaggctg

SEQ ID NO: 22141 - RNA, 19 nt, synthetic construct
  misc_feature 1..19: note = siRNA antisense sequence
  source 1..19: mol_type = other RNA
cagcctagggcagcacttc

SEQ ID NO: 22142 - RNA, 19 nt, synthetic construct
  misc_feature 1..19: note = siRNA sense sequence
  source 1..19: mol_type = other RNA
aagtgctgccctaggctgc

SEQ ID NO: 22143 - RNA, 19 nt, synthetic construct
  misc_feature 1..19: note = siRNA antisense sequence
  source 1..19: mol_type = other RNA
gcagcctagggcagcactt

SEQ ID NO: 22144 - RNA, 19 nt, synthetic construct
  misc_feature 1..19: note = siRNA sense sequence
  source 1..19: mol_type = other RNA
agtgctgccctaggctgca

SEQ ID NO: 22145 - RNA, 19 nt, synthetic construct
  misc_feature 1..19: note = siRNA antisense sequence
  source 1..19: mol_type = other RNA
tgcagcctagggcagcact

SEQ ID NO: 22146 - RNA, 19 nt, synthetic construct
  misc_feature 1..19: note = siRNA sense sequence
  source 1..19: mol_type = other RNA
gtgctgccctaggctgcat

SEQ ID NO: 22147 - RNA, 19 nt, synthetic construct
  misc_feature 1..19: note = siRNA antisense sequence
  source 1..19: mol_type = other RNA
atgcagcctagggcagcac

SEQ ID NO: 22148 - RNA, 19 nt, synthetic construct
  misc_feature 1..19: note = siRNA sense sequence
  source 1..19: mol_type = other RNA
tgctgccctaggctgcatg

SEQ ID NO: 22149 - RNA, 19 nt, synthetic construct
  misc_feature 1..19: note = siRNA antisense sequence
  source 1..19: mol_type = other RNA
catgcagcctagggcagca

SEQ ID NO: 22150 - RNA, 19 nt, synthetic construct
  misc_feature 1..19: note = siRNA sense sequence
  source 1..19: mol_type = other RNA
gctgccctaggctgcatga

SEQ ID NO: 22151 - RNA, 19 nt, synthetic construct
  misc_feature 1..19: note = siRNA antisense sequence
  source 1..19: mol_type = other RNA
tcatgcagcctagggcagc

SEQ ID NO: 22152 - RNA, 19 nt, synthetic construct
  misc_feature 1..19: note = siRNA sense sequence
  source 1..19: mol_type = other RNA
tgccctaggctgcatgagt

SEQ ID NO: 22153 - RNA, 19 nt, synthetic construct
  misc_feature 1..19: note = siRNA antisense sequence
  source 1..19: mol_type = other RNA
actcatgcagcctagggca

SEQ ID NO: 22154 - RNA, 19 nt, synthetic construct
  misc_feature 1..19: note = siRNA sense sequence
  source 1..19: mol_type = other RNA
gccctaggctgcatgagtc

SEQ ID NO: 22155 - RNA, 19 nt, synthetic construct
  misc_feature 1..19: note = siRNA antisense sequence
  source 1..19: mol_type = other RNA
gactcatgcagcctagggc

SEQ ID NO: 22156 - RNA, 19 nt, synthetic construct
  misc_feature 1..19: note = siRNA sense sequence
  source 1..19: mol_type = other RNA
ccctaggctgcatgagtcg

SEQ ID NO: 22157 - RNA, 19 nt, synthetic construct
  misc_feature 1..19: note = siRNA antisense sequence
  source 1..19: mol_type = other RNA
cgactcatgcagcctaggg

SEQ ID NO: 22158 - RNA, 19 nt, synthetic construct
  misc_feature 1..19: note = siRNA sense sequence
  source 1..19: mol_type = other RNA
cctaggctgcatgagtcga

SEQ ID NO: 22159 - RNA, 19 nt, synthetic construct
  misc_feature 1..19: note = siRNA antisense sequence
  source 1..19: mol_type = other RNA
tcgactcatgcagcctagg

SEQ ID NO: 22160 - RNA, 19 nt, synthetic construct
  misc_feature 1..19: note = siRNA sense sequence
  source 1..19: mol_type = other RNA
ctaggctgcatgagtcgaa

SEQ ID NO: 22161 - RNA, 19 nt, synthetic construct
  misc_feature 1..19: note = siRNA antisense sequence
  source 1..19: mol_type = other RNA
ttcgactcatgcagcctag

SEQ ID NO: 22162 - RNA, 19 nt, synthetic construct
  misc_feature 1..19: note = siRNA sense sequence
  source 1..19: mol_type = other RNA
taggctgcatgagtcgaag

SEQ ID NO: 22163 - RNA, 19 nt, synthetic construct
  misc_feature 1..19: note = siRNA antisense sequence
  source 1..19: mol_type = other RNA
cttcgactcatgcagccta

SEQ ID NO: 22164 - RNA, 19 nt, synthetic construct
  misc_feature 1..19: note = siRNA sense sequence
  source 1..19: mol_type = other RNA
aggctgcatgagtcgaagc

SEQ ID NO: 22165 - RNA, 19 nt, synthetic construct
  misc_feature 1..19: note = siRNA antisense sequence
  source 1..19: mol_type = other RNA
gcttcgactcatgcagcct

SEQ ID NO: 22166 - RNA, 19 nt, synthetic construct
  misc_feature 1..19: note = siRNA sense sequence
  source 1..19: mol_type = other RNA
ggctgcatgagtcgaagca

SEQ ID NO: 22167 - RNA, 19 nt, synthetic construct
  misc_feature 1..19: note = siRNA antisense sequence
  source 1..19: mol_type = other RNA
tgcttcgactcatgcagcc

SEQ ID NO: 22168 - RNA, 19 nt, synthetic construct
  misc_feature 1..19: note = siRNA sense sequence
  source 1..19: mol_type = other RNA
gctgcatgagtcgaagcaa

SEQ ID NO: 22169 - RNA, 19 nt, synthetic construct
  misc_feature 1..19: note = siRNA antisense sequence
  source 1..19: mol_type = other RNA
ttgcttcgactcatgcagc

SEQ ID NO: 22170 - RNA, 19 nt, synthetic construct
  misc_feature 1..19: note = siRNA sense sequence
  source 1..19: mol_type = other RNA
ctgcatgagtcgaagcaag

SEQ ID NO: 22171 - RNA, 19 nt, synthetic construct
  misc_feature 1..19: note = siRNA antisense sequence
  source 1..19: mol_type = other RNA
cttgcttcgactcatgcag

SEQ ID NO: 22172 - RNA, 19 nt, synthetic construct
  misc_feature 1..19: note = siRNA sense sequence
  source 1..19: mol_type = other RNA
tgcatgagtcgaagcaagc

SEQ ID NO: 22173 - RNA, 19 nt, synthetic construct
  misc_feature 1..19: note = siRNA antisense sequence
  source 1..19: mol_type = other RNA
gcttgcttcgactcatgca

SEQ ID NO: 22174 - RNA, 19 nt, synthetic construct
  misc_feature 1..19: note = siRNA sense sequence
  source 1..19: mol_type = other RNA
gcatgagtcgaagcaagcg

SEQ ID NO: 22175 - RNA, 19 nt, synthetic construct
  misc_feature 1..19: note = siRNA antisense sequence
  source 1..19: mol_type = other RNA
cgcttgcttcgactcatgc

SEQ ID NO: 22176 - RNA, 19 nt, synthetic construct
  misc_feature 1..19: note = siRNA sense sequence
  source 1..19: mol_type = other RNA
catgagtcgaagcaagcgt

SEQ ID NO: 22177 - RNA, 19 nt, synthetic construct
  misc_feature 1..19: note = siRNA antisense sequence
  source 1..19: mol_type = other RNA
acgcttgcttcgactcatg

SEQ ID NO: 22178 - RNA, 19 nt, synthetic construct
  misc_feature 1..19: note = siRNA sense sequence
  source 1..19: mol_type = other RNA
atgagtcgaagcaagcgtg

SEQ ID NO: 22179 - RNA, 19 nt, synthetic construct
  misc_feature 1..19: note = siRNA antisense sequence
  source 1..19: mol_type = other RNA
cacgcttgcttcgactcat

SEQ ID NO: 22180 - RNA, 19 nt, synthetic construct
  misc_feature 1..19: note = siRNA sense sequence
  source 1..19: mol_type = other RNA
tgagtcgaagcaagcgtgt

SEQ ID NO: 22181 - RNA, 19 nt, synthetic construct
  misc_feature 1..19: note = siRNA antisense sequence
  source 1..19: mol_type = other RNA
acacgcttgcttcgactca

SEQ ID NO: 22182 - RNA, 19 nt, synthetic construct
  misc_feature 1..19: note = siRNA sense sequence
  source 1..19: mol_type = other RNA
gagtcgaagcaagcgtgtt

SEQ ID NO: 22183 - RNA, 19 nt, synthetic construct
  misc_feature 1..19: note = siRNA antisense sequence
  source 1..19: mol_type = other RNA
aacacgcttgcttcgactc

SEQ ID NO: 22184 - RNA, 19 nt, synthetic construct
  misc_feature 1..19: note = siRNA sense sequence
  source 1..19: mol_type = other RNA
agtcgaagcaagcgtgttt

SEQ ID NO: 22185 - RNA, 19 nt, synthetic construct
  misc_feature 1..19: note = siRNA antisense sequence
  source 1..19: mol_type = other RNA
aaacacgcttgcttcgact

SEQ ID NO: 22186 - RNA, 19 nt, synthetic construct
  misc_feature 1..19: note = siRNA sense sequence
  source 1..19: mol_type = other RNA
agcaagcgtgtttccttcc

SEQ ID NO: 22187 - RNA, 19 nt, synthetic construct
  misc_feature 1..19: note = siRNA antisense sequence
  source 1..19: mol_type = other RNA
ggaaggaaacacgcttgct

SEQ ID NO: 22188 - RNA, 19 nt, synthetic construct
  misc_feature 1..19: note = siRNA sense sequence
  source 1..19: mol_type = other RNA
gcaagcgtgtttccttccc

SEQ ID NO: 22189 - RNA, 19 nt, synthetic construct
  misc_feature 1..19: note = siRNA antisense sequence
  source 1..19: mol_type = other RNA
gggaaggaaacacgcttgc

SEQ ID NO: 22190 - RNA, 19 nt, synthetic construct
  misc_feature 1..19: note = siRNA sense sequence
  source 1..19: mol_type = other RNA
caagcgtgtttccttcccg

SEQ ID NO: 22191 - RNA, 19 nt, synthetic construct
  misc_feature 1..19: note = siRNA antisense sequence
  source 1..19: mol_type = other RNA
cgggaaggaaacacgcttg

SEQ ID NO: 22192 - RNA, 19 nt, synthetic construct
  misc_feature 1..19: note = siRNA sense sequence
  source 1..19: mol_type = other RNA
cgccaggcaagtgccctta

SEQ ID NO: 22193 - RNA, 19 nt, synthetic construct
  misc_feature 1..19: note = siRNA antisense sequence
  source 1..19: mol_type = other RNA
taagggcacttgcctggcg

SEQ ID NO: 22194 - RNA, 19 nt, synthetic construct
  misc_feature 1..19: note = siRNA sense sequence
  source 1..19: mol_type = other RNA
gccaggcaagtgcccttag

SEQ ID NO: 22195 - RNA, 19 nt, synthetic construct
  misc_feature 1..19: note = siRNA antisense sequence
  source 1..19: mol_type = other RNA
ctaagggcacttgcctggc

SEQ ID NO: 22196 - RNA, 19 nt, synthetic construct
  misc_feature 1..19: note = siRNA sense sequence
  source 1..19: mol_type = other RNA
ccaggcaagtgcccttaga

SEQ ID NO: 22197 - RNA, 19 nt, synthetic construct
  misc_feature 1..19: note = siRNA antisense sequence
  source 1..19: mol_type = other RNA
tctaagggcacttgcctgg

SEQ ID NO: 22198 - RNA, 19 nt, synthetic construct
  misc_feature 1..19: note = siRNA sense sequence
  source 1..19: mol_type = other RNA
caggcaagtgcccttagaa

SEQ ID NO: 22199 - RNA, 19 nt, synthetic construct
  misc_feature 1..19: note = siRNA antisense sequence
  source 1..19: mol_type = other RNA
ttctaagggcacttgcctg

SEQ ID NO: 22200 - RNA, 19 nt, synthetic construct
  misc_feature 1..19: note = siRNA sense sequence
  source 1..19: mol_type = other RNA
cccttcctggcctgcattc

SEQ ID NO: 22201 - RNA, 19 nt, synthetic construct
  misc_feature 1..19: note = siRNA antisense sequence
  source 1..19: mol_type = other RNA
gaatgcaggccaggaaggg

SEQ ID NO: 22202 - RNA, 19 nt, synthetic construct
  misc_feature 1..19: note = siRNA sense sequence
  source 1..19: mol_type = other RNA
tcctggcctgcattcccat

SEQ ID NO: 22203 - RNA, 19 nt, synthetic construct
  misc_feature 1..19: note = siRNA antisense sequence
  source 1..19: mol_type = other RNA
atgggaatgcaggccagga

SEQ ID NO: 22204 - RNA, 19 nt, synthetic construct
  misc_feature 1..19: note = siRNA sense sequence
  source 1..19: mol_type = other RNA
cctggcctgcattcccatc

SEQ ID NO: 22205 - RNA, 19 nt, synthetic construct
  misc_feature 1..19: note = siRNA antisense sequence
  source 1..19: mol_type = other RNA
gatgggaatgcaggccagg

SEQ ID NO: 22206 - RNA, 19 nt, synthetic construct
  misc_feature 1..19: note = siRNA sense sequence
  source 1..19: mol_type = other RNA
ctggcctgcattcccatcc

SEQ ID NO: 22207 - RNA, 19 nt, synthetic construct
  misc_feature 1..19: note = siRNA antisense sequence
  source 1..19: mol_type = other RNA
ggatgggaatgcaggccag

SEQ ID NO: 22208 - RNA, 19 nt, synthetic construct
  misc_feature 1..19: note = siRNA sense sequence
  source 1..19: mol_type = other RNA
tggcctgcattcccatccc

SEQ ID NO: 22209 - RNA, 19 nt, synthetic construct
  misc_feature 1..19: note = siRNA antisense sequence
  source 1..19: mol_type = other RNA
gggatgggaatgcaggcca

SEQ ID NO: 22210 - RNA, 19 nt, synthetic construct
  misc_feature 1..19: note = siRNA sense sequence
  source 1..19: mol_type = other RNA
ggtgaggacctccttggtt

SEQ ID NO: 22211 - RNA, 19 nt, synthetic construct
  misc_feature 1..19: note = siRNA antisense sequence
  source 1..19: mol_type = other RNA
aaccaaggaggtcctcacc

SEQ ID NO: 22212 - RNA, 19 nt, synthetic construct
  misc_feature 1..19: note = siRNA sense sequence
  source 1..19: mol_type = other RNA
gtgaggacctccttggttc

SEQ ID NO: 22213 - RNA, 19 nt, synthetic construct
  misc_feature 1..19: note = siRNA antisense sequence
  source 1..19: mol_type = other RNA
gaaccaaggaggtcctcac

SEQ ID NO: 22214 - RNA, 19 nt, synthetic construct
  misc_feature 1..19: note = siRNA sense sequence
  source 1..19: mol_type = other RNA
tgaggacctccttggttcc

SEQ ID NO: 22215 - RNA, 19 nt, synthetic construct
  misc_feature 1..19: note = siRNA antisense sequence
  source 1..19: mol_type = other RNA
ggaaccaaggaggtcctca

SEQ ID NO: 22216 - RNA, 19 nt, synthetic construct
  misc_feature 1..19: note = siRNA sense sequence
  source 1..19: mol_type = other RNA
ggacctccttggttccttt

SEQ ID NO: 22217 - RNA, 19 nt, synthetic construct
  misc_feature 1..19: note = siRNA antisense sequence
  source 1..19: mol_type = other RNA
aaaggaaccaaggaggtcc

SEQ ID NO: 22218 - RNA, 19 nt, synthetic construct
  misc_feature 1..19: note = siRNA sense sequence
  source 1..19: mol_type = other RNA
acctccttggttcctttgg

SEQ ID NO: 22219 - RNA, 19 nt, synthetic construct
  misc_feature 1..19: note = siRNA antisense sequence
  source 1..19: mol_type = other RNA
ccaaaggaaccaaggaggt

SEQ ID NO: 22220 - RNA, 19 nt, synthetic construct
  misc_feature 1..19: note = siRNA sense sequence
  source 1..19: mol_type = other RNA
cctccttggttcctttggt

SEQ ID NO: 22221 - RNA, 19 nt, synthetic construct
  misc_feature 1..19: note = siRNA antisense sequence
  source 1..19: mol_type = other RNA
accaaaggaaccaaggagg

SEQ ID NO: 22222 - RNA, 19 nt, synthetic construct
  misc_feature 1..19: note = siRNA sense sequence
  source 1..19: mol_type = other RNA
ctccttggttcctttggtt

SEQ ID NO: 22223 - RNA, 19 nt, synthetic construct
  misc_feature 1..19: note = siRNA antisense sequence
  source 1..19: mol_type = other RNA
aaccaaaggaaccaaggag

SEQ ID NO: 22224 - RNA, 19 nt, synthetic construct
  misc_feature 1..19: note = siRNA sense sequence
  source 1..19: mol_type = other RNA
tccttggttcctttggttc

SEQ ID NO: 22225 - RNA, 19 nt, synthetic construct
  misc_feature 1..19: note = siRNA antisense sequence
  source 1..19: mol_type = other RNA
gaaccaaaggaaccaagga

SEQ ID NO: 22226 - RNA, 19 nt, synthetic construct
  misc_feature 1..19: note = siRNA sense sequence
  source 1..19: mol_type = other RNA
cttggttcctttggttctg

SEQ ID NO: 22227 - RNA, 19 nt, synthetic construct
  misc_feature 1..19: note = siRNA antisense sequence
  source 1..19: mol_type = other RNA
cagaaccaaaggaaccaag

SEQ ID NO: 22228 - RNA, 19 nt, synthetic construct
  misc_feature 1..19: note = siRNA sense sequence
  source 1..19: mol_type = other RNA
ttggttcctttggttctgt

SEQ ID NO: 22229 - RNA, 19 nt, synthetic construct
  misc_feature 1..19: note = siRNA antisense sequence
  source 1..19: mol_type = other RNA
acagaaccaaaggaaccaa

SEQ ID NO: 22230 - RNA, 19 nt, synthetic construct
  misc_feature 1..19: note = siRNA sense sequence
  source 1..19: mol_type = other RNA
tggttcctttggttctgtc

SEQ ID NO: 22231 - RNA, 19 nt, synthetic construct
  misc_feature 1..19: note = siRNA antisense sequence
  source 1..19: mol_type = other RNA
gacagaaccaaaggaacca

SEQ ID NO: 22232 - RNA, 19 nt, synthetic construct
  misc_feature 1..19: note = siRNA sense sequence
  source 1..19: mol_type = other RNA
ggttcctttggttctgtca

SEQ ID NO: 22233 - RNA, 19 nt, synthetic construct
  misc_feature 1..19: note = siRNA antisense sequence
  source 1..19: mol_type = other RNA
tgacagaaccaaaggaacc

SEQ ID NO: 22234 - RNA, 19 nt, synthetic construct
  misc_feature 1..19: note = siRNA sense sequence
  source 1..19: mol_type = other RNA
gttcctttggttctgtcag

SEQ ID NO: 22235 - RNA, 19 nt, synthetic construct
  misc_feature 1..19: note = siRNA antisense sequence
  source 1..19: mol_type = other RNA
ctgacagaaccaaaggaac

SEQ ID NO: 22236 - RNA, 19 nt, synthetic construct
  misc_feature 1..19: note = siRNA sense sequence
  source 1..19: mol_type = other RNA
ttcctttggttctgtcagt

SEQ ID NO: 22237 - RNA, 19 nt, synthetic construct
  misc_feature 1..19: note = siRNA antisense sequence
  source 1..19: mol_type = other RNA
actgacagaaccaaaggaa

SEQ ID NO: 22238 - RNA, 19 nt, synthetic construct
  misc_feature 1..19: note = siRNA sense sequence
  source 1..19: mol_type = other RNA
tcctttggttctgtcagtg

SEQ ID NO: 22239 - RNA, 19 nt, synthetic construct
  misc_feature 1..19: note = siRNA antisense sequence
  source 1..19: mol_type = other RNA
cactgacagaaccaaagga

SEQ ID NO: 22240 - RNA, 19 nt, synthetic construct
  misc_feature 1..19: note = siRNA sense sequence
  source 1..19: mol_type = other RNA
ttggccatgaagctcgtga

SEQ ID NO: 22241 - RNA, 19 nt, synthetic construct
  misc_feature 1..19: note = siRNA antisense sequence
  source 1..19: mol_type = other RNA
tcacgagcttcatggccaa

SEQ ID NO: 22242 - RNA, 19 nt, synthetic construct
  misc_feature 1..19: note = siRNA sense sequence
  source 1..19: mol_type = other RNA
tggccatgaagctcgtgag

SEQ ID NO: 22243 - RNA, 19 nt, synthetic construct
  misc_feature 1..19: note = siRNA antisense sequence
  source 1..19: mol_type = other RNA
ctcacgagcttcatggcca

SEQ ID NO: 22244 - RNA, 19 nt, synthetic construct
  misc_feature 1..19: note = siRNA sense sequence
  source 1..19: mol_type = other RNA
ggccatgaagctcgtgagg

SEQ ID NO: 22245 - RNA, 19 nt, synthetic construct
  misc_feature 1..19: note = siRNA antisense sequence
  source 1..19: mol_type = other RNA
cctcacgagcttcatggcc

SEQ ID NO: 22246 - RNA, 19 nt, synthetic construct
  misc_feature 1..19: note = siRNA sense sequence
  source 1..19: mol_type = other RNA
gccatgaagctcgtgagga

SEQ ID NO: 22247 - RNA, 19 nt, synthetic construct
  misc_feature 1..19: note = siRNA antisense sequence
  source 1..19: mol_type = other RNA
tcctcacgagcttcatggc

SEQ ID NO: 22248 - RNA, 19 nt, synthetic construct
  misc_feature 1..19: note = siRNA sense sequence
  source 1..19: mol_type = other RNA
tgaagctcgtgaggaagaa

SEQ ID NO: 22249 - RNA, 19 nt, synthetic construct
  misc_feature 1..19: note = siRNA antisense sequence
  source 1..19: mol_type = other RNA
ttcttcctcacgagcttca

SEQ ID NO: 22250 - RNA, 19 nt, synthetic construct
  misc_feature 1..19: note = siRNA sense sequence
  source 1..19: mol_type = other RNA
aggagcctgaggacatgtg

SEQ ID NO: 22251 - RNA, 19 nt, synthetic construct
  misc_feature 1..19: note = siRNA antisense sequence
  source 1..19: mol_type = other RNA
cacatgtcctcaggctcct

SEQ ID NO: 22252 - RNA, 19 nt, synthetic construct
  misc_feature 1..19: note = siRNA sense sequence
  source 1..19: mol_type = other RNA
ggagcctgaggacatgtgg

SEQ ID NO: 22253 - RNA, 19 nt, synthetic construct
  misc_feature 1..19: note = siRNA antisense sequence
  source 1..19: mol_type = other RNA
ccacatgtcctcaggctcc

SEQ ID NO: 22254 - RNA, 19 nt, synthetic construct
  misc_feature 1..19: note = siRNA sense sequence
  source 1..19: mol_type = other RNA
gagcctgaggacatgtggc

SEQ ID NO: 22255 - RNA, 19 nt, synthetic construct
  misc_feature 1..19: note = siRNA antisense sequence
  source 1..19: mol_type = other RNA
gccacatgtcctcaggctc

SEQ ID NO: 22256 - RNA, 19 nt, synthetic construct
  misc_feature 1..19: note = siRNA sense sequence
  source 1..19: mol_type = other RNA
agcctgaggacatgtggca

SEQ ID NO: 22257 - RNA, 19 nt, synthetic construct
  misc_feature 1..19: note = siRNA antisense sequence
  source 1..19: mol_type = other RNA
tgccacatgtcctcaggct

SEQ ID NO: 22258 - RNA, 19 nt, synthetic construct
  misc_feature 1..19: note = siRNA sense sequence
  source 1..19: mol_type = other RNA
gcctgaggacatgtggcac

SEQ ID NO: 22259 - RNA, 19 nt, synthetic construct
  misc_feature 1..19: note = siRNA antisense sequence
  source 1..19: mol_type = other RNA
gtgccacatgtcctcaggc

SEQ ID NO: 22260 - RNA, 19 nt, synthetic construct
  misc_feature 1..19: note = siRNA sense sequence
  source 1..19: mol_type = other RNA
ctgaggacatgtggcacac

SEQ ID NO: 22261 - RNA, 19 nt, synthetic construct
  misc_feature 1..19: note = siRNA antisense sequence
  source 1..19: mol_type = other RNA
gtgtgccacatgtcctcag

SEQ ID NO: 22262 - RNA, 19 nt, synthetic construct
  misc_feature 1..19: note = siRNA sense sequence
  source 1..19: mol_type = other RNA
ggacatgtggcacacttac

SEQ ID NO: 22263 - RNA, 19 nt, synthetic construct
  misc_feature 1..19: note = siRNA antisense sequence
  source 1..19: mol_type = other RNA
gtaagtgtgccacatgtcc

SEQ ID NO: 22264 - RNA, 19 nt, synthetic construct
  misc_feature 1..19: note = siRNA sense sequence
  source 1..19: mol_type = other RNA
gacatgtggcacacttaca

SEQ ID NO: 22265 - RNA, 19 nt, synthetic construct
  misc_feature 1..19: note = siRNA antisense sequence
  source 1..19: mol_type = other RNA
tgtaagtgtgccacatgtc

SEQ ID NO: 22266 - RNA, 19 nt, synthetic construct
  misc_feature 1..19: note = siRNA sense sequence
  source 1..19: mol_type = other RNA
cctccaccatccgcaaggt

SEQ ID NO: 22267 - RNA, 19 nt, synthetic construct
  misc_feature 1..19: note = siRNA antisense sequence
  source 1..19: mol_type = other RNA
accttgcggatggtggagg

SEQ ID NO: 22268 - RNA, 19 nt, synthetic construct
  misc_feature 1..19: note = siRNA sense sequence
  source 1..19: mol_type = other RNA
ctccaccatccgcaaggta

SEQ ID NO: 22269 - RNA, 19 nt, synthetic construct
  misc_feature 1..19: note = siRNA antisense sequence
  source 1..19: mol_type = other RNA
taccttgcggatggtggag

SEQ ID NO: 22270 - RNA, 19 nt, synthetic construct
  misc_feature 1..19: note = siRNA sense sequence
  source 1..19: mol_type = other RNA
tccaccatccgcaaggtac

SEQ ID NO: 22271 - RNA, 19 nt, synthetic construct
  misc_feature 1..19: note = siRNA antisense sequence
  source 1..19: mol_type = other RNA
gtaccttgcggatggtgga

SEQ ID NO: 22272 - RNA, 19 nt, synthetic construct
  misc_feature 1..19: note = siRNA sense sequence
  source 1..19: mol_type = other RNA
ccaccatccgcaaggtaca

SEQ ID NO: 22273 - RNA, 19 nt, synthetic construct
  misc_feature 1..19: note = siRNA antisense sequence
  source 1..19: mol_type = other RNA
tgtaccttgcggatggtgg

SEQ ID NO: 22274 - RNA, 19 nt, synthetic construct
  misc_feature 1..19: note = siRNA sense sequence
  source 1..19: mol_type = other RNA
caccatccgcaaggtacag

SEQ ID NO: 22275 - RNA, 19 nt, synthetic construct
  misc_feature 1..19: note = siRNA antisense sequence
  source 1..19: mol_type = other RNA
ctgtaccttgcggatggtg

SEQ ID NO: 22276 - RNA, 19 nt, synthetic construct
  misc_feature 1..19: note = siRNA sense sequence
  source 1..19: mol_type = other RNA
accatccgcaaggtacaga

SEQ ID NO: 22277 - RNA, 19 nt, synthetic construct
  misc_feature 1..19: note = siRNA antisense sequence
  source 1..19: mol_type = other RNA
tctgtaccttgcggatggt

SEQ ID NO: 22278 - RNA, 19 nt, synthetic construct
  misc_feature 1..19: note = siRNA sense sequence
  source 1..19: mol_type = other RNA
ccatccgcaaggtacagac

SEQ ID NO: 22279 - RNA, 19 nt, synthetic construct
  misc_feature 1..19: note = siRNA antisense sequence
  source 1..19: mol_type = other RNA
gtctgtaccttgcggatgg

SEQ ID NO: 22280 - RNA, 19 nt, synthetic construct
  misc_feature 1..19: note = siRNA sense sequence
  source 1..19: mol_type = other RNA
catccgcaaggtacagaca

SEQ ID NO: 22281 - RNA, 19 nt, synthetic construct
  misc_feature 1..19: note = siRNA antisense sequence
  source 1..19: mol_type = other RNA
tgtctgtaccttgcggatg

SEQ ID NO: 22282 - RNA, 19 nt, synthetic construct
  misc_feature 1..19: note = siRNA sense sequence
  source 1..19: mol_type = other RNA
atccgcaaggtacagacag

SEQ ID NO: 22283 - RNA, 19 nt, synthetic construct
  misc_feature 1..19: note = siRNA antisense sequence
  source 1..19: mol_type = other RNA
ctgtctgtaccttgcggat

SEQ ID NO: 22284 - RNA, 19 nt, synthetic construct
  misc_feature 1..19: note = siRNA sense sequence
  source 1..19: mol_type = other RNA
tccgcaaggtacagacaga

SEQ ID NO: 22285 - RNA, 19 nt, synthetic construct
  misc_feature 1..19: note = siRNA antisense sequence
  source 1..19: mol_type = other RNA
tctgtctgtaccttgcgga

SEQ ID NO: 22286 - RNA, 19 nt, synthetic construct
  misc_feature 1..19: note = siRNA sense sequence
  source 1..19: mol_type = other RNA
ccgcaaggtacagacagag

SEQ ID NO: 22287 - RNA, 19 nt, synthetic construct
  misc_feature 1..19: note = siRNA antisense sequence
  source 1..19: mol_type = other RNA
ctctgtctgtaccttgcgg

SEQ ID NO: 22288 - RNA, 19 nt, synthetic construct
  misc_feature 1..19: note = siRNA sense sequence
  source 1..19: mol_type = other RNA
cgcaaggtacagacagagt

SEQ ID NO: 22289 - RNA, 19 nt, synthetic construct
  misc_feature 1..19: note = siRNA antisense sequence
  source 1..19: mol_type = other RNA
actctgtctgtaccttgcg

SEQ ID NO: 22290 - RNA, 19 nt, synthetic construct
  misc_feature 1..19: note = siRNA sense sequence
  source 1..19: mol_type = other RNA
gcaaggtacagacagagtc

SEQ ID NO: 22291 - RNA, 19 nt, synthetic construct
  misc_feature 1..19: note = siRNA antisense sequence
  source 1..19: mol_type = other RNA
gactctgtctgtaccttgc

SEQ ID NO: 22292 - RNA, 19 nt, synthetic construct
  misc_feature 1..19: note = siRNA sense sequence
  source 1..19: mol_type = other RNA
caaggtacagacagagtcc

SEQ ID NO: 22293 - RNA, 19 nt, synthetic construct
  misc_feature 1..19: note = siRNA antisense sequence
  source 1..19: mol_type = other RNA
ggactctgtctgtaccttg

SEQ ID NO: 22294 - RNA, 19 nt, synthetic construct
  misc_feature 1..19: note = siRNA sense sequence
  source 1..19: mol_type = other RNA
aaggtacagacagagtcct

SEQ ID NO: 22295 - RNA, 19 nt, synthetic construct
  misc_feature 1..19: note = siRNA antisense sequence
  source 1..19: mol_type = other RNA
aggactctgtctgtacctt

SEQ ID NO: 22296 - RNA, 19 nt, synthetic construct
  misc_feature 1..19: note = siRNA sense sequence
  source 1..19: mol_type = other RNA
aggtacagacagagtcctc

SEQ ID NO: 22297 - RNA, 19 nt, synthetic construct
  misc_feature 1..19: note = siRNA antisense sequence
  source 1..19: mol_type = other RNA
gaggactctgtctgtacct

SEQ ID NO: 22298 - RNA, 19 nt, synthetic construct
  misc_feature 1..19: note = siRNA sense sequence
  source 1..19: mol_type = other RNA
acagagtcctccacgggca

SEQ ID NO: 22299 - RNA, 19 nt, synthetic construct
  misc_feature 1..19: note = siRNA antisense sequence
  source 1..19: mol_type = other RNA
tgcccgtggaggactctgt

SEQ ID NO: 22300 - RNA, 19 nt, synthetic construct
  misc_feature 1..19: note = siRNA sense sequence
  source 1..19: mol_type = other RNA
agcaaccgggtccgcacta

SEQ ID NO: 22301 - RNA, 19 nt, synthetic construct
  misc_feature 1..19: note = siRNA antisense sequence
  source 1..19: mol_type = other RNA
tagtgcggacccggttgct

SEQ ID NO: 22302 - RNA, 19 nt, synthetic construct
  misc_feature 1..19: note = siRNA sense sequence
  source 1..19: mol_type = other RNA
ggtccgcactaccctcact

SEQ ID NO: 22303 - RNA, 19 nt, synthetic construct
  misc_feature 1..19: note = siRNA antisense sequence
  source 1..19: mol_type = other RNA
agtgagggtagtgcggacc

SEQ ID NO: 22304 - RNA, 19 nt, synthetic construct
  misc_feature 1..19: note = siRNA sense sequence
  source 1..19: mol_type = other RNA
gtccgcactaccctcactc

SEQ ID NO: 22305 - RNA, 19 nt, synthetic construct
  misc_feature 1..19: note = siRNA antisense sequence
  source 1..19: mol_type = other RNA
gagtgagggtagtgcggac

SEQ ID NO: 22306 - RNA, 19 nt, synthetic construct
  misc_feature 1..19: note = siRNA sense sequence
  source 1..19: mol_type = other RNA
tccgcactaccctcactct

SEQ ID NO: 22307 - RNA, 19 nt, synthetic construct
  misc_feature 1..19: note = siRNA antisense sequence
  source 1..19: mol_type = other RNA
agagtgagggtagtgcgga

SEQ ID NO: 22308 - RNA, 19 nt, synthetic construct
  misc_feature 1..19: note = siRNA sense sequence
  source 1..19: mol_type = other RNA
ccgcactaccctcactctc

SEQ ID NO: 22309 - RNA, 19 nt, synthetic construct
  misc_feature 1..19: note = siRNA antisense sequence
  source 1..19: mol_type = other RNA
gagagtgagggtagtgcgg

SEQ ID NO: 22310 - RNA, 19 nt, synthetic construct
  misc_feature 1..19: note = siRNA sense sequence
  source 1..19: mol_type = other RNA
cgcactaccctcactctct

SEQ ID NO: 22311 - RNA, 19 nt, synthetic construct
  misc_feature 1..19: note = siRNA antisense sequence
  source 1..19: mol_type = other RNA
agagagtgagggtagtgcg

SEQ ID NO: 22312 - RNA, 19 nt, synthetic construct
  misc_feature 1..19: note = siRNA sense sequence
  source 1..19: mol_type = other RNA
gcactaccctcactctctg

SEQ ID NO: 22313 - RNA, 19 nt, synthetic construct
  misc_feature 1..19: note = siRNA antisense sequence
  source 1..19: mol_type = other RNA
cagagagtgagggtagtgc

SEQ ID NO: 22314 - RNA, 19 nt, synthetic construct
  misc_feature 1..19: note = siRNA sense sequence
  source 1..19: mol_type = other RNA
taccctcactctctgcgtg

SEQ ID NO: 22315 - RNA, 19 nt, synthetic construct
  misc_feature 1..19: note = siRNA antisense sequence
  source 1..19: mol_type = other RNA
cacgcagagagtgagggta

SEQ ID NO: 22316 - RNA, 19 nt, synthetic construct
  misc_feature 1..19: note = siRNA sense sequence
  source 1..19: mol_type = other RNA
accctcactctctgcgtgg

SEQ ID NO: 22317 - RNA, 19 nt, synthetic construct
  misc_feature 1..19: note = siRNA antisense sequence
  source 1..19: mol_type = other RNA
ccacgcagagagtgagggt

SEQ ID NO: 22318 - RNA, 19 nt, synthetic construct
  misc_feature 1..19: note = siRNA sense sequence
  source 1..19: mol_type = other RNA
ccctcactctctgcgtgga

SEQ ID NO: 22319 - RNA, 19 nt, synthetic construct
  misc_feature 1..19: note = siRNA antisense sequence
  source 1..19: mol_type = other RNA
tccacgcagagagtgaggg

SEQ ID NO: 22320 - RNA, 19 nt, synthetic construct
  misc_feature 1..19: note = siRNA sense sequence
  source 1..19: mol_type = other RNA
cctcactctctgcgtggag

SEQ ID NO: 22321 - RNA, 19 nt, synthetic construct
  misc_feature 1..19: note = siRNA antisense sequence
  source 1..19: mol_type = other RNA
ctccacgcagagagtgagg

SEQ ID NO: 22322 - RNA, 19 nt, synthetic construct
  misc_feature 1..19: note = siRNA sense sequence
  source 1..19: mol_type = other RNA
ctcactctctgcgtggagg

SEQ ID NO: 22323 - RNA, 19 nt, synthetic construct
  misc_feature 1..19: note = siRNA antisense sequence
  source 1..19: mol_type = other RNA
cctccacgcagagagtgag

SEQ ID NO: 22324 - RNA, 19 nt, synthetic construct
  misc_feature 1..19: note = siRNA sense sequence
  source 1..19: mol_type = other RNA
tcactctctgcgtggaggc

SEQ ID NO: 22325 - RNA, 19 nt, synthetic construct
  misc_feature 1..19: note = siRNA antisense sequence
  source 1..19: mol_type = other RNA
gcctccacgcagagagtga

SEQ ID NO: 22326 - RNA, 19 nt, synthetic construct
  misc_feature 1..19: note = siRNA sense sequence
  source 1..19: mol_type = other RNA
actctctgcgtggaggcca

SEQ ID NO: 22327 - RNA, 19 nt, synthetic construct
  misc_feature 1..19: note = siRNA antisense sequence
  source 1..19: mol_type = other RNA
tggcctccacgcagagagt

SEQ ID NO: 22328 - RNA, 19 nt, synthetic construct
  misc_feature 1..19: note = siRNA sense sequence
  source 1..19: mol_type = other RNA
ctctctgcgtggaggccat

SEQ ID NO: 22329 - RNA, 19 nt, synthetic construct
  misc_feature 1..19: note = siRNA antisense sequence
  source 1..19: mol_type = other RNA
atggcctccacgcagagag

SEQ ID NO: 22330 - RNA, 19 nt, synthetic construct
  misc_feature 1..19: note = siRNA sense sequence
  source 1..19: mol_type = other RNA
tctctgcgtggaggccatc

SEQ ID NO: 22331 - RNA, 19 nt, synthetic construct
  misc_feature 1..19: note = siRNA antisense sequence
  source 1..19: mol_type = other RNA
gatggcctccacgcagaga

SEQ ID NO: 22332 - RNA, 19 nt, synthetic construct
  misc_feature 1..19: note = siRNA sense sequence
  source 1..19: mol_type = other RNA
tctgcgtggaggccatcga

SEQ ID NO: 22333 - RNA, 19 nt, synthetic construct
  misc_feature 1..19: note = siRNA antisense sequence
  source 1..19: mol_type = other RNA
tcgatggcctccacgcaga

SEQ ID NO: 22334 - RNA, 19 nt, synthetic construct
  misc_feature 1..19: note = siRNA sense sequence
  source 1..19: mol_type = other RNA
tgcgtggaggccatcgact

SEQ ID NO: 22335 - RNA, 19 nt, synthetic construct
  misc_feature 1..19: note = siRNA antisense sequence
  source 1..19: mol_type = other RNA
agtcgatggcctccacgca

SEQ ID NO: 22336 - RNA, 19 nt, synthetic construct
  misc_feature 1..19: note = siRNA sense sequence
  source 1..19: mol_type = other RNA
gcgtggaggccatcgactt

SEQ ID NO: 22337 - RNA, 19 nt, synthetic construct
  misc_feature 1..19: note = siRNA antisense sequence
  source 1..19: mol_type = other RNA
aagtcgatggcctccacgc

SEQ ID NO: 22338 - RNA, 19 nt, synthetic construct
  misc_feature 1..19: note = siRNA sense sequence
  source 1..19: mol_type = other RNA
cgtggaggccatcgacttc

SEQ ID NO: 22339 - RNA, 19 nt, synthetic construct
  misc_feature 1..19: note = siRNA antisense sequence
  source 1..19: mol_type = other RNA
gaagtcgatggcctccacg

SEQ ID NO: 22340 - RNA, 19 nt, synthetic construct
  misc_feature 1..19: note = siRNA sense sequence
  source 1..19: mol_type = other RNA
gtggaggccatcgacttcg

SEQ ID NO: 22341 - RNA, 19 nt, synthetic construct
  misc_feature 1..19: note = siRNA antisense sequence
  source 1..19: mol_type = other RNA
cgaagtcgatggcctccac

SEQ ID NO: 22342 - RNA, 19 nt, synthetic construct
  misc_feature 1..19: note = siRNA sense sequence
  source 1..19: mol_type = other RNA
tggaggccatcgacttcga

SEQ ID NO: 22343 - RNA, 19 nt, synthetic construct
  misc_feature 1..19: note = siRNA antisense sequence
  source 1..19: mol_type = other RNA
tcgaagtcgatggcctcca

SEQ ID NO: 22344 - RNA, 19 nt, synthetic construct
  misc_feature 1..19: note = siRNA sense sequence
  source 1..19: mol_type = other RNA
ggaggccatcgacttcgac

SEQ ID NO: 22345 - RNA, 19 nt, synthetic construct
  misc_feature 1..19: note = siRNA antisense sequence
  source 1..19: mol_type = other RNA
gtcgaagtcgatggcctcc

SEQ ID NO: 22346 - RNA, 19 nt, synthetic construct
  misc_feature 1..19: note = siRNA sense sequence
  source 1..19: mol_type = other RNA
gaggccatcgacttcgact

SEQ ID NO: 22347 - RNA, 19 nt, synthetic construct
  misc_feature 1..19: note = siRNA antisense sequence
  source 1..19: mol_type = other RNA
agtcgaagtcgatggcctc

SEQ ID NO: 22348 - RNA, 19 nt, synthetic construct
  misc_feature 1..19: note = siRNA sense sequence
  source 1..19: mol_type = other RNA
aggccatcgacttcgactc

SEQ ID NO: 22349 - RNA, 19 nt, synthetic construct
  misc_feature 1..19: note = siRNA antisense sequence
  source 1..19: mol_type = other RNA
gagtcgaagtcgatggcct

SEQ ID NO: 22350 - RNA, 19 nt, synthetic construct
  misc_feature 1..19: note = siRNA sense sequence
  source 1..19: mol_type = other RNA
ggccatcgacttcgactct

SEQ ID NO: 22351 - RNA, 19 nt, synthetic construct
  misc_feature 1..19: note = siRNA antisense sequence
  source 1..19: mol_type = other RNA
agagtcgaagtcgatggcc

SEQ ID NO: 22352 - RNA, 19 nt, synthetic construct
  misc_feature 1..19: note = siRNA sense sequence
  source 1..19: mol_type = other RNA
gccatcgacttcgactctc

SEQ ID NO: 22353 - RNA, 19 nt, synthetic construct
  misc_feature 1..19: note = siRNA antisense sequence
  source 1..19: mol_type = other RNA
gagagtcgaagtcgatggc

SEQ ID NO: 22354 - RNA, 19 nt, synthetic construct
  misc_feature 1..19: note = siRNA sense sequence
  source 1..19: mol_type = other RNA
ccatcgacttcgactctca

SEQ ID NO: 22355 - RNA, 19 nt, synthetic construct
  misc_feature 1..19: note = siRNA antisense sequence
  source 1..19: mol_type = other RNA
tgagagtcgaagtcgatgg

SEQ ID NO: 22356 - RNA, 19 nt, synthetic construct
  misc_feature 1..19: note = siRNA sense sequence
  source 1..19: mol_type = other RNA
catcgacttcgactctcaa

SEQ ID NO: 22357 - RNA, 19 nt, synthetic construct
  misc_feature 1..19: note = siRNA antisense sequence
  source 1..19: mol_type = other RNA
ttgagagtcgaagtcgatg

SEQ ID NO: 22358 - RNA, 19 nt, synthetic construct
  misc_feature 1..19: note = siRNA sense sequence
  source 1..19: mol_type = other RNA
atcgacttcgactctcaag

SEQ ID NO: 22359 - RNA, 19 nt, synthetic construct
  misc_feature 1..19: note = siRNA antisense sequence
  source 1..19: mol_type = other RNA
cttgagagtcgaagtcgat

SEQ ID NO: 22360 - RNA, 19 nt, synthetic construct
  misc_feature 1..19: note = siRNA sense sequence
  source 1..19: mol_type = other RNA
tcgacttcgactctcaagc

SEQ ID NO: 22361 - RNA, 19 nt, synthetic construct
  misc_feature 1..19: note = siRNA antisense sequence
  source 1..19: mol_type = other RNA
gcttgagagtcgaagtcga

SEQ ID NO: 22362 - RNA, 19 nt, synthetic construct
  misc_feature 1..19: note = siRNA sense sequence
  source 1..19: mol_type = other RNA
cgacttcgactctcaagcc

SEQ ID NO: 22363 - RNA, 19 nt, synthetic construct
  misc_feature 1..19: note = siRNA antisense sequence
  source 1..19: mol_type = other RNA
ggcttgagagtcgaagtcg

SEQ ID NO: 22364 - RNA, 19 nt, synthetic construct
  misc_feature 1..19: note = siRNA sense sequence
  source 1..19: mol_type = other RNA
gacttcgactctcaagcct

SEQ ID NO: 22365 - RNA, 19 nt, synthetic construct
  misc_feature 1..19: note = siRNA antisense sequence
  source 1..19: mol_type = other RNA
aggcttgagagtcgaagtc

SEQ ID NO: 22366 - RNA, 19 nt, synthetic construct
  misc_feature 1..19: note = siRNA sense sequence
  source 1..19: mol_type = other RNA
tcgactctcaagcctgcca

SEQ ID NO: 22367 - RNA, 19 nt, synthetic construct
  misc_feature 1..19: note = siRNA antisense sequence
  source 1..19: mol_type = other RNA
tggcaggcttgagagtcga

SEQ ID NO: 22368 - RNA, 19 nt, synthetic construct
  misc_feature 1..19: note = siRNA sense sequence
  source 1..19: mol_type = other RNA
cgactctcaagcctgccag

SEQ ID NO: 22369 - RNA, 19 nt, synthetic construct
  misc_feature 1..19: note = siRNA antisense sequence
  source 1..19: mol_type = other RNA
ctggcaggcttgagagtcg

SEQ ID NO: 22370 - RNA, 19 nt, synthetic construct
  misc_feature 1..19: note = siRNA sense sequence
  source 1..19: mol_type = other RNA
actctcaagcctgccagct

SEQ ID NO: 22371 - RNA, 19 nt, synthetic construct
  misc_feature 1..19: note = siRNA antisense sequence
  source 1..19: mol_type = other RNA
agctggcaggcttgagagt

SEQ ID NO: 22372 - RNA, 19 nt, synthetic construct
  misc_feature 1..19: note = siRNA sense sequence
  source 1..19: mol_type = other RNA
ctctcaagcctgccagctg

SEQ ID NO: 22373 - RNA, 19 nt, synthetic construct
  misc_feature 1..19: note = siRNA antisense sequence
  source 1..19: mol_type = other RNA
cagctggcaggcttgagag

SEQ ID NO: 22374 - RNA, 19 nt, synthetic construct
  misc_feature 1..19: note = siRNA sense sequence
  source 1..19: mol_type = other RNA
tctcaagcctgccagctgc

SEQ ID NO: 22375 - RNA, 19 nt, synthetic construct
  misc_feature 1..19: note = siRNA antisense sequence
  source 1..19: mol_type = other RNA
gcagctggcaggcttgaga

SEQ ID NO: 22376 - RNA, 19 nt, synthetic construct
  misc_feature 1..19: note = siRNA sense sequence
  source 1..19: mol_type = other RNA
cctgccagctgcgggttaa

SEQ ID NO: 22377 - RNA, 19 nt, synthetic construct
  misc_feature 1..19: note = siRNA antisense sequence
  source 1..19: mol_type = other RNA
ttaacccgcagctggcagg

SEQ ID NO: 22378 - RNA, 19 nt, synthetic construct
  misc_feature 1..19: note = siRNA sense sequence
  source 1..19: mol_type = other RNA
ctgccagctgcgggttaag

SEQ ID NO: 22379 - RNA, 19 nt, synthetic construct
  misc_feature 1..19: note = siRNA antisense sequence
  source 1..19: mol_type = other RNA
cttaacccgcagctggcag

SEQ ID NO: 22380 - RNA, 19 nt, synthetic construct
  misc_feature 1..19: note = siRNA sense sequence
  source 1..19: mol_type = other RNA
tgccagctgcgggttaagg

SEQ ID NO: 22381 - RNA, 19 nt, synthetic construct
  misc_feature 1..19: note = siRNA antisense sequence
  source 1..19: mol_type = other RNA
ccttaacccgcagctggca

SEQ ID NO: 22382 - RNA, 19 nt, synthetic construct
  misc_feature 1..19: note = siRNA sense sequence
  source 1..19: mol_type = other RNA
agaatgagtatgtcaagat

SEQ ID NO: 22383 - RNA, 19 nt, synthetic construct
  misc_feature 1..19: note = siRNA antisense sequence
  source 1..19: mol_type = other RNA
atcttgacatactcattct

SEQ ID NO: 22384 - RNA, 19 nt, synthetic construct
  misc_feature 1..19: note = siRNA sense sequence
  source 1..19: mol_type = other RNA
gaatgagtatgtcaagatg

SEQ ID NO: 22385 - RNA, 19 nt, synthetic construct
  misc_feature 1..19: note = siRNA antisense sequence
  source 1..19: mol_type = other RNA
catcttgacatactcattc

SEQ ID NO: 22386 - RNA, 19 nt, synthetic construct
  misc_feature 1..19: note = siRNA sense sequence
  source 1..19: mol_type = other RNA
atgagtatgtcaagatggg

SEQ ID NO: 22387 - RNA, 19 nt, synthetic construct
  misc_feature 1..19: note = siRNA antisense sequence
  source 1..19: mol_type = other RNA
cccatcttgacatactcat

SEQ ID NO: 22388 - RNA, 19 nt, synthetic construct
  misc_feature 1..19: note = siRNA sense sequence
  source 1..19: mol_type = other RNA
gggcttaccacaccatcga

SEQ ID NO: 22389 - RNA, 19 nt, synthetic construct
  misc_feature 1..19: note = siRNA antisense sequence
  source 1..19: mol_type = other RNA
tcgatggtgtggtaagccc

SEQ ID NO: 22390 - RNA, 19 nt, synthetic construct
  misc_feature 1..19: note = siRNA sense sequence
  source 1..19: mol_type = other RNA
ggcttaccacaccatcgag

SEQ ID NO: 22391 - RNA, 19 nt, synthetic construct
  misc_feature 1..19: note = siRNA antisense sequence
  source 1..19: mol_type = other RNA
ctcgatggtgtggtaagcc

SEQ ID NO: 22392 - RNA, 19 nt, synthetic construct
  misc_feature 1..19: note = siRNA sense sequence
  source 1..19: mol_type = other RNA
gcttaccacaccatcgagc

SEQ ID NO: 22393 - RNA, 19 nt, synthetic construct
  misc_feature 1..19: note = siRNA antisense sequence
  source 1..19: mol_type = other RNA
gctcgatggtgtggtaagc

SEQ ID NO: 22394 - RNA, 19 nt, synthetic construct
  misc_feature 1..19: note = siRNA sense sequence
  source 1..19: mol_type = other RNA
cttaccacaccatcgagct

SEQ ID NO: 22395 - RNA, 19 nt, synthetic construct
  misc_feature 1..19: note = siRNA antisense sequence
  source 1..19: mol_type = other RNA
agctcgatggtgtggtaag

SEQ ID NO: 22396 - RNA, 19 nt, synthetic construct
  misc_feature 1..19: note = siRNA sense sequence
  source 1..19: mol_type = other RNA
ttaccacaccatcgagctg

SEQ ID NO: 22397 - RNA, 19 nt, synthetic construct
  misc_feature 1..19: note = siRNA antisense sequence
  source 1..19: mol_type = other RNA
cagctcgatggtgtggtaa

SEQ ID NO: 22398 - RNA, 19 nt, synthetic construct
  misc_feature 1..19: note = siRNA sense sequence
  source 1..19: mol_type = other RNA
taccacaccatcgagctgg

SEQ ID NO: 22399 - RNA, 19 nt, synthetic construct
  misc_feature 1..19: note = siRNA antisense sequence
  source 1..19: mol_type = other RNA
ccagctcgatggtgtggta

SEQ ID NO: 22400 - RNA, 19 nt, synthetic construct
  misc_feature 1..19: note = siRNA sense sequence
  source 1..19: mol_type = other RNA
accacaccatcgagctgga

SEQ ID NO: 22401 - RNA, 19 nt, synthetic construct
  misc_feature 1..19: note = siRNA antisense sequence
  source 1..19: mol_type = other RNA
tccagctcgatggtgtggt

SEQ ID NO: 22402 - RNA, 19 nt, synthetic construct
  misc_feature 1..19: note = siRNA sense sequence
  source 1..19: mol_type = other RNA
ccacaccatcgagctggag

SEQ ID NO: 22403 - RNA, 19 nt, synthetic construct
  misc_feature 1..19: note = siRNA antisense sequence
  source 1..19: mol_type = other RNA
ctccagctcgatggtgtgg

SEQ ID NO: 22404 - RNA, 19 nt, synthetic construct
  misc_feature 1..19: note = siRNA sense sequence
  source 1..19: mol_type = other RNA
cacaccatcgagctggagc

SEQ ID NO: 22405 - RNA, 19 nt, synthetic construct
  misc_feature 1..19: note = siRNA antisense sequence
  source 1..19: mol_type = other RNA
gctccagctcgatggtgtg

SEQ ID NO: 22406 - RNA, 19 nt, synthetic construct
  misc_feature 1..19: note = siRNA sense sequence
  source 1..19: mol_type = other RNA
acaccatcgagctggagcc

SEQ ID NO: 22407 - RNA, 19 nt, synthetic construct
  misc_feature 1..19: note = siRNA antisense sequence
  source 1..19: mol_type = other RNA
ggctccagctcgatggtgt

SEQ ID NO: 22408 - RNA, 19 nt, synthetic construct
  misc_feature 1..19: note = siRNA sense sequence
  source 1..19: mol_type = other RNA
accatcgagctggagccca

SEQ ID NO: 22409 - RNA, 19 nt, synthetic construct
  misc_feature 1..19: note = siRNA antisense sequence
  source 1..19: mol_type = other RNA
tgggctccagctcgatggt

SEQ ID NO: 22410 - RNA, 19 nt, synthetic construct
  misc_feature 1..19: note = siRNA sense sequence
  source 1..19: mol_type = other RNA
ccatcgagctggagcccaa

SEQ ID NO: 22411 - RNA, 19 nt, synthetic construct
  misc_feature 1..19: note = siRNA antisense sequence
  source 1..19: mol_type = other RNA
ttgggctccagctcgatgg

SEQ ID NO: 22412 - RNA, 19 nt, synthetic construct
  misc_feature 1..19: note = siRNA sense sequence
  source 1..19: mol_type = other RNA
catcgagctggagcccaac

SEQ ID NO: 22413 - RNA, 19 nt, synthetic construct
  misc_feature 1..19: note = siRNA antisense sequence
  source 1..19: mol_type = other RNA
gttgggctccagctcgatg

SEQ ID NO: 22414 - RNA, 19 nt, synthetic construct
  misc_feature 1..19: note = siRNA sense sequence
  source 1..19: mol_type = other RNA
ccaaccgccagttcaccct

SEQ ID NO: 22415 - RNA, 19 nt, synthetic construct
  misc_feature 1..19: note = siRNA antisense sequence
  source 1..19: mol_type = other RNA
agggtgaactggcggttgg

SEQ ID NO: 22416 - RNA, 19 nt, synthetic construct
  misc_feature 1..19: note = siRNA sense sequence
  source 1..19: mol_type = other RNA
caaccgccagttcaccctg

SEQ ID NO: 22417 - RNA, 19 nt, synthetic construct
  misc_feature 1..19: note = siRNA antisense sequence
  source 1..19: mol_type = other RNA
cagggtgaactggcggttg

SEQ ID NO: 22418 - RNA, 19 nt, synthetic construct
  misc_feature 1..19: note = siRNA sense sequence
  source 1..19: mol_type = other RNA
agttcaccctggccaagaa

SEQ ID NO: 22419 - RNA, 19 nt, synthetic construct
  misc_feature 1..19: note = siRNA antisense sequence
  source 1..19: mol_type = other RNA
ttcttggccagggtgaact

SEQ ID NO: 22420 - RNA, 19 nt, synthetic construct
  misc_feature 1..19: note = siRNA sense sequence
  source 1..19: mol_type = other RNA
gttcaccctggccaagaag

SEQ ID NO: 22421 - RNA, 19 nt, synthetic construct
  misc_feature 1..19: note = siRNA antisense sequence
  source 1..19: mol_type = other RNA
cttcttggccagggtgaac

SEQ ID NO: 22422 - RNA, 19 nt, synthetic construct
  misc_feature 1..19: note = siRNA sense sequence
  source 1..19: mol_type = other RNA
accctggccaagaagcagt

SEQ ID NO: 22423 - RNA, 19 nt, synthetic construct
  misc_feature 1..19: note = siRNA antisense sequence
  source 1..19: mol_type = other RNA
actgcttcttggccagggt

SEQ ID NO: 22424 - RNA, 19 nt, synthetic construct
  misc_feature 1..19: note = siRNA sense sequence
  source 1..19: mol_type = other RNA
ccaagaagcagtgggatag

SEQ ID NO: 22425 - RNA, 19 nt, synthetic construct
  misc_feature 1..19: note = siRNA antisense sequence
  source 1..19: mol_type = other RNA
ctatcccactgcttcttgg

SEQ ID NO: 22426 - RNA, 19 nt, synthetic construct
  misc_feature 1..19: note = siRNA sense sequence
  source 1..19: mol_type = other RNA
caagaagcagtgggatagt

SEQ ID NO: 22427 - RNA, 19 nt, synthetic construct
  misc_feature 1..19: note = siRNA antisense sequence
  source 1..19: mol_type = other RNA
actatcccactgcttcttg

SEQ ID NO: 22428 - RNA, 19 nt, synthetic construct
  misc_feature 1..19: note = siRNA sense sequence
  source 1..19: mol_type = other RNA
aagaagcagtgggatagtg

SEQ ID NO: 22429 - RNA, 19 nt, synthetic construct
  misc_feature 1..19: note = siRNA antisense sequence
  source 1..19: mol_type = other RNA
cactatcccactgcttctt

SEQ ID NO: 22430 - RNA, 19 nt, synthetic construct
  misc_feature 1..19: note = siRNA sense sequence
  source 1..19: mol_type = other RNA
agaagcagtgggatagtgt

SEQ ID NO: 22431 - RNA, 19 nt, synthetic construct
  misc_feature 1..19: note = siRNA antisense sequence
  source 1..19: mol_type = other RNA
acactatcccactgcttct

SEQ ID NO: 22432 - RNA, 19 nt, synthetic construct
  misc_feature 1..19: note = siRNA sense sequence
  source 1..19: mol_type = other RNA
gaagcagtgggatagtgtg

SEQ ID NO: 22433 - RNA, 19 nt, synthetic construct
  misc_feature 1..19: note = siRNA antisense sequence
  source 1..19: mol_type = other RNA
cacactatcccactgcttc

SEQ ID NO: 22434 - RNA, 19 nt, synthetic construct
  misc_feature 1..19: note = siRNA sense sequence
  source 1..19: mol_type = other RNA
aagcagtgggatagtgtgg

SEQ ID NO: 22435 - RNA, 19 nt, synthetic construct
  misc_feature 1..19: note = siRNA antisense sequence
  source 1..19: mol_type = other RNA
ccacactatcccactgctt

SEQ ID NO: 22436 - RNA, 19 nt, synthetic construct
  misc_feature 1..19: note = siRNA sense sequence
  source 1..19: mol_type = other RNA
agtgggatagtgtggtact

SEQ ID NO: 22437 - RNA, 19 nt, synthetic construct
  misc_feature 1..19: note = siRNA antisense sequence
  source 1..19: mol_type = other RNA
agtaccacactatcccact

SEQ ID NO: 22438 - RNA, 19 nt, synthetic construct
  misc_feature 1..19: note = siRNA sense sequence
  source 1..19: mol_type = other RNA
gtgggatagtgtggtactg

SEQ ID NO: 22439 - RNA, 19 nt, synthetic construct
  misc_feature 1..19: note = siRNA antisense sequence
  source 1..19: mol_type = other RNA
cagtaccacactatcccac

SEQ ID NO: 22440 - RNA, 19 nt, synthetic construct
  misc_feature 1..19: note = siRNA sense sequence
  source 1..19: mol_type = other RNA
tgggatagtgtggtactgg

SEQ ID NO: 22441 - RNA, 19 nt, synthetic construct
  misc_feature 1..19: note = siRNA antisense sequence
  source 1..19: mol_type = other RNA
ccagtaccacactatccca

SEQ ID NO: 22442 - RNA, 19 nt, synthetic construct
  misc_feature 1..19: note = siRNA sense sequence
  source 1..19: mol_type = other RNA
atagtgtggtactggagcg

SEQ ID NO: 22443 - RNA, 19 nt, synthetic construct
  misc_feature 1..19: note = siRNA antisense sequence
  source 1..19: mol_type = other RNA
cgctccagtaccacactat

SEQ ID NO: 22444 - RNA, 19 nt, synthetic construct
  misc_feature 1..19: note = siRNA sense sequence
  source 1..19: mol_type = other RNA
tagtgtggtactggagcgc

SEQ ID NO: 22445 - RNA, 19 nt, synthetic construct
  misc_feature 1..19: note = siRNA antisense sequence
  source 1..19: mol_type = other RNA
gcgctccagtaccacacta

SEQ ID NO: 22446 - RNA, 19 nt, synthetic construct
  misc_feature 1..19: note = siRNA sense sequence
  source 1..19: mol_type = other RNA
agtgtggtactggagcgca

SEQ ID NO: 22447 - RNA, 19 nt, synthetic construct
  misc_feature 1..19: note = siRNA antisense sequence
  source 1..19: mol_type = other RNA
tgcgctccagtaccacact

SEQ ID NO: 22448 - RNA, 19 nt, synthetic construct
  misc_feature 1..19: note = siRNA sense sequence
  source 1..19: mol_type = other RNA
gtgtggtactggagcgcat

SEQ ID NO: 22449 - RNA, 19 nt, synthetic construct
  misc_feature 1..19: note = siRNA antisense sequence
  source 1..19: mol_type = other RNA
atgcgctccagtaccacac

SEQ ID NO: 22450 - RNA, 19 nt, synthetic construct
  misc_feature 1..19: note = siRNA sense sequence
  source 1..19: mol_type = other RNA
tgtggtactggagcgcatc

SEQ ID NO: 22451 - RNA, 19 nt, synthetic construct
  misc_feature 1..19: note = siRNA antisense sequence
  source 1..19: mol_type = other RNA
gatgcgctccagtaccaca

SEQ ID NO: 22452 - RNA, 19 nt, synthetic construct
  misc_feature 1..19: note = siRNA sense sequence
  source 1..19: mol_type = other RNA
gtggtactggagcgcatcg

SEQ ID NO: 22453 - RNA, 19 nt, synthetic construct
  misc_feature 1..19: note = siRNA antisense sequence
  source 1..19: mol_type = other RNA
cgatgcgctccagtaccac

SEQ ID NO: 22454 - RNA, 19 nt, synthetic construct
  misc_feature 1..19: note = siRNA sense sequence
  source 1..19: mol_type = other RNA
tggtactggagcgcatcga

SEQ ID NO: 22455 - RNA, 19 nt, synthetic construct
  misc_feature 1..19: note = siRNA antisense sequence
  source 1..19: mol_type = other RNA
tcgatgcgctccagtacca

SEQ ID NO: 22456 - RNA, 19 nt, synthetic construct
  misc_feature 1..19: note = siRNA sense sequence
  source 1..19: mol_type = other RNA
ggtactggagcgcatcgag

SEQ ID NO: 22457 - RNA, 19 nt, synthetic construct
  misc_feature 1..19: note = siRNA antisense sequence
  source 1..19: mol_type = other RNA
ctcgatgcgctccagtacc

SEQ ID NO: 22458 - RNA, 19 nt, synthetic construct
  misc_feature 1..19: note = siRNA sense sequence
  source 1..19: mol_type = other RNA
gtactggagcgcatcgagc

SEQ ID NO: 22459 - RNA, 19 nt, synthetic construct
  misc_feature 1..19: note = siRNA antisense sequence
  source 1..19: mol_type = other RNA
gctcgatgcgctccagtac

SEQ ID NO: 22460 - RNA, 19 nt, synthetic construct
  misc_feature 1..19: note = siRNA sense sequence
  source 1..19: mol_type = other RNA
tactggagcgcatcgagca

SEQ ID NO: 22461 - RNA, 19 nt, synthetic construct
  misc_feature 1..19: note = siRNA antisense sequence
  source 1..19: mol_type = other RNA
tgctcgatgcgctccagta

SEQ ID NO: 22462 - RNA, 19 nt, synthetic construct
  misc_feature 1..19: note = siRNA sense sequence
  source 1..19: mol_type = other RNA
actggagcgcatcgagcag

SEQ ID NO: 22463 - RNA, 19 nt, synthetic construct
  misc_feature 1..19: note = siRNA antisense sequence
  source 1..19: mol_type = other RNA
ctgctcgatgcgctccagt

SEQ ID NO: 22464 - RNA, 19 nt, synthetic construct
  misc_feature 1..19: note = siRNA sense sequence
  source 1..19: mol_type = other RNA
agcctggagcgctgatgtg

SEQ ID NO: 22465 - RNA, 19 nt, synthetic construct
  misc_feature 1..19: note = siRNA antisense sequence
  source 1..19: mol_type = other RNA
cacatcagcgctccaggct

SEQ ID NO: 22466 - RNA, 19 nt, synthetic construct
  misc_feature 1..19: note = siRNA sense sequence
  source 1..19: mol_type = other RNA
ggctgtggtcatgcaggaa

SEQ ID NO: 22467 - RNA, 19 nt, synthetic construct
  misc_feature 1..19: note = siRNA antisense sequence
  source 1..19: mol_type = other RNA
ttcctgcatgaccacagcc

SEQ ID NO: 22468 - RNA, 19 nt, synthetic construct
  misc_feature 1..19: note = siRNA sense sequence
  source 1..19: mol_type = other RNA
gctgtggtcatgcaggaag

SEQ ID NO: 22469 - RNA, 19 nt, synthetic construct
  misc_feature 1..19: note = siRNA antisense sequence
  source 1..19: mol_type = other RNA
cttcctgcatgaccacagc

SEQ ID NO: 22470 - RNA, 19 nt, synthetic construct
  misc_feature 1..19: note = siRNA sense sequence
  source 1..19: mol_type = other RNA
ctgtggtcatgcaggaagg

SEQ ID NO: 22471 - RNA, 19 nt, synthetic construct
  misc_feature 1..19: note = siRNA antisense sequence
  source 1..19: mol_type = other RNA
ccttcctgcatgaccacag

SEQ ID NO: 22472 - RNA, 19 nt, synthetic construct
  misc_feature 1..19: note = siRNA sense sequence
  source 1..19: mol_type = other RNA
gtggtcatgcaggaaggcc

SEQ ID NO: 22473 - RNA, 19 nt, synthetic construct
  misc_feature 1..19: note = siRNA antisense sequence
  source 1..19: mol_type = other RNA
ggccttcctgcatgaccac

SEQ ID NO: 22474 - RNA, 19 nt, synthetic construct
  misc_feature 1..19: note = siRNA sense sequence
  source 1..19: mol_type = other RNA
tggtcatgcaggaaggcct

SEQ ID NO: 22475 - RNA, 19 nt, synthetic construct
  misc_feature 1..19: note = siRNA antisense sequence
  source 1..19: mol_type = other RNA
aggccttcctgcatgacca

SEQ ID NO: 22476 - RNA, 19 nt, synthetic construct
  misc_feature 1..19: note = siRNA sense sequence
  source 1..19: mol_type = other RNA
ggtcatgcaggaaggcctc

SEQ ID NO: 22477 - RNA, 19 nt, synthetic construct
  misc_feature 1..19: note = siRNA antisense sequence
  source 1..19: mol_type = other RNA
gaggccttcctgcatgacc

SEQ ID NO: 22478 - RNA, 19 nt, synthetic construct
  misc_feature 1..19: note = siRNA sense sequence
  source 1..19: mol_type = other RNA
gtcatgcaggaaggcctcg

SEQ ID NO: 22479 - RNA, 19 nt, synthetic construct
  misc_feature 1..19: note = siRNA antisense sequence
  source 1..19: mol_type = other RNA
cgaggccttcctgcatgac

SEQ ID NO: 22480 - RNA, 19 nt, synthetic construct
  misc_feature 1..19: note = siRNA sense sequence
  source 1..19: mol_type = other RNA
caggaaggcctcgcccata

SEQ ID NO: 22481 - RNA, 19 nt, synthetic construct
  misc_feature 1..19: note = siRNA antisense sequence
  source 1..19: mol_type = other RNA
tatgggcgaggccttcctg

SEQ ID NO: 22482 - RNA, 19 nt, synthetic construct
  misc_feature 1..19: note = siRNA sense sequence
  source 1..19: mol_type = other RNA
aggaaggcctcgcccatat

SEQ ID NO: 22483 - RNA, 19 nt, synthetic construct
  misc_feature 1..19: note = siRNA antisense sequence
  source 1..19: mol_type = other RNA
atatgggcgaggccttcct

SEQ ID NO: 22484 - RNA, 19 nt, synthetic construct
  misc_feature 1..19: note = siRNA sense sequence
  source 1..19: mol_type = other RNA
aggcctcgcccatatctgc

SEQ ID NO: 22485 - RNA, 19 nt, synthetic construct
  misc_feature 1..19: note = siRNA antisense sequence
  source 1..19: mol_type = other RNA
gcagatatgggcgaggcct

SEQ ID NO: 22486 - RNA, 19 nt, synthetic construct
  misc_feature 1..19: note = siRNA sense sequence
  source 1..19: mol_type = other RNA
ggcctcgcccatatctgct

SEQ ID NO: 22487 - RNA, 19 nt, synthetic construct
  misc_feature 1..19: note = siRNA antisense sequence
  source 1..19: mol_type = other RNA
agcagatatgggcgaggcc

SEQ ID NO: 22488 - RNA, 19 nt, synthetic construct
  misc_feature 1..19: note = siRNA sense sequence
  source 1..19: mol_type = other RNA
gcctcgcccatatctgctt

SEQ ID NO: 22489 - RNA, 19 nt, synthetic construct
  misc_feature 1..19: note = siRNA antisense sequence
  source 1..19: mol_type = other RNA
aagcagatatgggcgaggc

SEQ ID NO: 22490 - RNA, 19 nt, synthetic construct
  misc_feature 1..19: note = siRNA sense sequence
  source 1..19: mol_type = other RNA
cctcgcccatatctgctta

SEQ ID NO: 22491 - RNA, 19 nt, synthetic construct
  misc_feature 1..19: note = siRNA antisense sequence
  source 1..19: mol_type = other RNA
taagcagatatgggcgagg

SEQ ID NO: 22492 - RNA, 19 nt, synthetic construct
  misc_feature 1..19: note = siRNA sense sequence
  source 1..19: mol_type = other RNA
ctcgcccatatctgcttag

SEQ ID NO: 22493 - RNA, 19 nt, synthetic construct
  misc_feature 1..19: note = siRNA antisense sequence
  source 1..19: mol_type = other RNA
ctaagcagatatgggcgag

SEQ ID NO: 22494 - RNA, 19 nt, synthetic construct
  misc_feature 1..19: note = siRNA sense sequence
  source 1..19: mol_type = other RNA
tcgcccatatctgcttagt

SEQ ID NO: 22495 - RNA, 19 nt, synthetic construct
  misc_feature 1..19: note = siRNA antisense sequence
  source 1..19: mol_type = other RNA
actaagcagatatgggcga

SEQ ID NO: 22496 - RNA, 19 nt, synthetic construct
  misc_feature 1..19: note = siRNA sense sequence
  source 1..19: mol_type = other RNA
cgcccatatctgcttagtc

SEQ ID NO: 22497 - RNA, 19 nt, synthetic construct
  misc_feature 1..19: note = siRNA antisense sequence
  source 1..19: mol_type = other RNA
gactaagcagatatgggcg

SEQ ID NO: 22498 - RNA, 19 nt, synthetic construct
  misc_feature 1..19: note = siRNA sense sequence
  source 1..19: mol_type = other RNA
gcccatatctgcttagtca

SEQ ID NO: 22499 - RNA, 19 nt, synthetic construct
  misc_feature 1..19: note = siRNA antisense sequence
  source 1..19: mol_type = other RNA
tgactaagcagatatgggc

SEQ ID NO: 22500 - RNA, 19 nt, synthetic construct
  misc_feature 1..19: note = siRNA sense sequence
  source 1..19: mol_type = other RNA
cttagtcactcccagcatg

SEQ ID NO: 22501 - RNA, 19 nt, synthetic construct
  misc_feature 1..19: note = siRNA antisense sequence
  source 1..19: mol_type = other RNA
catgctgggagtgactaag

SEQ ID NO: 22502 - RNA, 19 nt, synthetic construct
  misc_feature 1..19: note = siRNA sense sequence
  source 1..19: mol_type = other RNA
ttagtcactcccagcatga

SEQ ID NO: 22503 - RNA, 19 nt, synthetic construct
  misc_feature 1..19: note = siRNA antisense sequence
  source 1..19: mol_type = other RNA
tcatgctgggagtgactaa

SEQ ID NO: 22504 - RNA, 19 nt, synthetic construct
  misc_feature 1..19: note = siRNA sense sequence
  source 1..19: mol_type = other RNA
tcactcccagcatgaccct

SEQ ID NO: 22505 - RNA, 19 nt, synthetic construct
  misc_feature 1..19: note = siRNA antisense sequence
  source 1..19: mol_type = other RNA
agggtcatgctgggagtga

SEQ ID NO: 22506 - RNA, 19 nt, synthetic construct
  misc_feature 1..19: note = siRNA sense sequence
  source 1..19: mol_type = other RNA
cactcccagcatgaccctc

SEQ ID NO: 22507 - RNA, 19 nt, synthetic construct
  misc_feature 1..19: note = siRNA antisense sequence
  source 1..19: mol_type = other RNA
gagggtcatgctgggagtg

SEQ ID NO: 22508 - RNA, 19 nt, synthetic construct
  misc_feature 1..19: note = siRNA sense sequence
  source 1..19: mol_type = other RNA
actcccagcatgaccctca

SEQ ID NO: 22509 - RNA, 19 nt, synthetic construct
  misc_feature 1..19: note = siRNA antisense sequence
  source 1..19: mol_type = other RNA
tgagggtcatgctgggagt

SEQ ID NO: 22510 - RNA, 19 nt, synthetic construct
  misc_feature 1..19: note = siRNA sense sequence
  source 1..19: mol_type = other RNA
ctcccagcatgaccctcac

SEQ ID NO: 22511 - RNA, 19 nt, synthetic construct
  misc_feature 1..19: note = siRNA antisense sequence
  source 1..19: mol_type = other RNA
gtgagggtcatgctgggag

SEQ ID NO: 22512 - RNA, 19 nt, synthetic construct
  misc_feature 1..19: note = siRNA sense sequence
  source 1..19: mol_type = other RNA
tcccagcatgaccctcact

SEQ ID NO: 22513 - RNA, 19 nt, synthetic construct
  misc_feature 1..19: note = siRNA antisense sequence
  source 1..19: mol_type = other RNA
agtgagggtcatgctggga

SEQ ID NO: 22514 - RNA, 19 nt, synthetic construct
  misc_feature 1..19: note = siRNA sense sequence
  source 1..19: mol_type = other RNA
cccagcatgaccctcactc

SEQ ID NO: 22515 - RNA, 19 nt, synthetic construct
  misc_feature 1..19: note = siRNA antisense sequence
  source 1..19: mol_type = other RNA
gagtgagggtcatgctggg

SEQ ID NO: 22516 - RNA, 19 nt, synthetic construct
  misc_feature 1..19: note = siRNA sense sequence
  source 1..19: mol_type = other RNA
ccagcatgaccctcactcg

SEQ ID NO: 22517 - RNA, 19 nt, synthetic construct
  misc_feature 1..19: note = siRNA antisense sequence
  source 1..19: mol_type = other RNA
cgagtgagggtcatgctgg

SEQ ID NO: 22518 - RNA, 19 nt, synthetic construct
  misc_feature 1..19: note = siRNA sense sequence
  source 1..19: mol_type = other RNA
cagcatgaccctcactcgg

SEQ ID NO: 22519 - RNA, 19 nt, synthetic construct
  misc_feature 1..19: note = siRNA antisense sequence
  source 1..19: mol_type = other RNA
ccgagtgagggtcatgctg

SEQ ID NO: 22520 - RNA, 19 nt, synthetic construct
  misc_feature 1..19: note = siRNA sense sequence
  source 1..19: mol_type = other RNA
agcatgaccctcactcggg

SEQ ID NO: 22521 - RNA, 19 nt, synthetic construct
  misc_feature 1..19: note = siRNA antisense sequence
  source 1..19: mol_type = other RNA
cccgagtgagggtcatgct

SEQ ID NO: 22522 - RNA, 19 nt, synthetic construct
  misc_feature 1..19: note = siRNA sense sequence
  source 1..19: mol_type = other RNA
gggccttggagcggttcta

SEQ ID NO: 22523 - RNA, 19 nt, synthetic construct
  misc_feature 1..19: note = siRNA antisense sequence
  source 1..19: mol_type = other RNA
tagaaccgctccaaggccc

SEQ ID NO: 22524 - RNA, 19 nt, synthetic construct
  misc_feature 1..19: note = siRNA sense sequence
  source 1..19: mol_type = other RNA
ggccttggagcggttctat

SEQ ID NO: 22525 - RNA, 19 nt, synthetic construct
  misc_feature 1..19: note = siRNA antisense sequence
  source 1..19: mol_type = other RNA
atagaaccgctccaaggcc

SEQ ID NO: 22526 - RNA, 19 nt, synthetic construct
  misc_feature 1..19: note = siRNA sense sequence
  source 1..19: mol_type = other RNA
gccttggagcggttctatg

SEQ ID NO: 22527 - RNA, 19 nt, synthetic construct
  misc_feature 1..19: note = siRNA antisense sequence
  source 1..19: mol_type = other RNA
catagaaccgctccaaggc

SEQ ID NO: 22528 - RNA, 19 nt, synthetic construct
  misc_feature 1..19: note = siRNA sense sequence
  source 1..19: mol_type = other RNA
acaggtggtccaggctatc

SEQ ID NO: 22529 - RNA, 19 nt, synthetic construct
  misc_feature 1..19: note = siRNA antisense sequence
  source 1..19: mol_type = other RNA
gatagcctggaccacctgt

SEQ ID NO: 22530 - RNA, 19 nt, synthetic construct
  misc_feature 1..19: note = siRNA sense sequence
  source 1..19: mol_type = other RNA
caggtggtccaggctatcc

SEQ ID NO: 22531 - RNA, 19 nt, synthetic construct
  misc_feature 1..19: note = siRNA antisense sequence
  source 1..19: mol_type = other RNA
ggatagcctggaccacctg

SEQ ID NO: 22532 - RNA, 19 nt, synthetic construct
  misc_feature 1..19: note = siRNA sense sequence
  source 1..19: mol_type = other RNA
tggtccaggctatccagcg

SEQ ID NO: 22533 - RNA, 19 nt, synthetic construct
  misc_feature 1..19: note = siRNA antisense sequence
  source 1..19: mol_type = other RNA
cgctggatagcctggacca

SEQ ID NO: 22534 - RNA, 19 nt, synthetic construct
  misc_feature 1..19: note = siRNA sense sequence
  source 1..19: mol_type = other RNA
tccaggctatccagcgcca

SEQ ID NO: 22535 - RNA, 19 nt, synthetic construct
  misc_feature 1..19: note = siRNA antisense sequence
  source 1..19: mol_type = other RNA
tggcgctggatagcctgga

SEQ ID NO: 22536 - RNA, 19 nt, synthetic construct
  misc_feature 1..19: note = siRNA sense sequence
  source 1..19: mol_type = other RNA
caggctatccagcgccaca

SEQ ID NO: 22537 - RNA, 19 nt, synthetic construct
  misc_feature 1..19: note = siRNA antisense sequence
  source 1..19: mol_type = other RNA
tgtggcgctggatagcctg

SEQ ID NO: 22538 - RNA, 19 nt, synthetic construct
  misc_feature 1..19: note = siRNA sense sequence
  source 1..19: mol_type = other RNA
gcgccacatacactttgat

SEQ ID NO: 22539 - RNA, 19 nt, synthetic construct
  misc_feature 1..19: note = siRNA antisense sequence
  source 1..19: mol_type = other RNA
atcaaagtgtatgtggcgc

SEQ ID NO: 22540 - RNA, 19 nt, synthetic construct
  misc_feature 1..19: note = siRNA sense sequence
  source 1..19: mol_type = other RNA
cgccacatacactttgatg

SEQ ID NO: 22541 - RNA, 19 nt, synthetic construct
  misc_feature 1..19: note = siRNA antisense sequence
  source 1..19: mol_type = other RNA
catcaaagtgtatgtggcg

SEQ ID NO: 22542 - RNA, 19 nt, synthetic construct
  misc_feature 1..19: note = siRNA sense sequence
  source 1..19: mol_type = other RNA
tttgatgttgtaaagtgca

SEQ ID NO: 22543 - RNA, 19 nt, synthetic construct
  misc_feature 1..19: note = siRNA antisense sequence
  source 1..19: mol_type = other RNA
tgcactttacaacatcaaa

SEQ ID NO: 22544 - RNA, 19 nt, synthetic construct
  misc_feature 1..19: note = siRNA sense sequence
  source 1..19: mol_type = other RNA
atgttgtaaagtgcatcct

SEQ ID NO: 22545 - RNA, 19 nt, synthetic construct
  misc_feature 1..19: note = siRNA antisense sequence
  source 1..19: mol_type = other RNA
aggatgcactttacaacat

SEQ ID NO: 22546 - RNA, 19 nt, synthetic construct
  misc_feature 1..19: note = siRNA sense sequence
  source 1..19: mol_type = other RNA
tgttgtaaagtgcatcctg

SEQ ID NO: 22547 - RNA, 19 nt, synthetic construct
  misc_feature 1..19: note = siRNA antisense sequence
  source 1..19: mol_type = other RNA
caggatgcactttacaaca

SEQ ID NO: 22548 - RNA, 19 nt, synthetic construct
  misc_feature 1..19: note = siRNA sense sequence
  source 1..19: mol_type = other RNA
gtaaagtgcatcctggtgg

SEQ ID NO: 22549 - RNA, 19 nt, synthetic construct
  misc_feature 1..19: note = siRNA antisense sequence
  source 1..19: mol_type = other RNA
ccaccaggatgcactttac

SEQ ID NO: 22550 - RNA, 19 nt, synthetic construct
  misc_feature 1..19: note = siRNA sense sequence
  source 1..19: mol_type = other RNA
taaagtgcatcctggtggc

SEQ ID NO: 22551 - RNA, 19 nt, synthetic construct
  misc_feature 1..19: note = siRNA antisense sequence
  source 1..19: mol_type = other RNA
gccaccaggatgcacttta

SEQ ID NO: 22552 - RNA, 19 nt, synthetic construct
  misc_feature 1..19: note = siRNA sense sequence
  source 1..19: mol_type = other RNA
aaagtgcatcctggtggcc

SEQ ID NO: 22553 - RNA, 19 nt, synthetic construct
  misc_feature 1..19: note = siRNA antisense sequence
  source 1..19: mol_type = other RNA
ggccaccaggatgcacttt

SEQ ID NO: 22554 - RNA, 19 nt, synthetic construct
  misc_feature 1..19: note = siRNA sense sequence
  source 1..19: mol_type = other RNA
aagtgcatcctggtggcca

SEQ ID NO: 22555 - RNA, 19 nt, synthetic construct
  misc_feature 1..19: note = siRNA antisense sequence
  source 1..19: mol_type = other RNA
tggccaccaggatgcactt

SEQ ID NO: 22556 - RNA, 19 nt, synthetic construct
  misc_feature 1..19: note = siRNA sense sequence
  source 1..19: mol_type = other RNA
tggtggccagcccaggatt

SEQ ID NO: 22557 - RNA, 19 nt, synthetic construct
  misc_feature 1..19: note = siRNA antisense sequence
  source 1..19: mol_type = other RNA
aatcctgggctggccacca

SEQ ID NO: 22558 - RNA, 19 nt, synthetic construct
  misc_feature 1..19: note = siRNA sense sequence
  source 1..19: mol_type = other RNA
ggtggccagcccaggattt

SEQ ID NO: 22559 - RNA, 19 nt, synthetic construct
  misc_feature 1..19: note = siRNA antisense sequence
  source 1..19: mol_type = other RNA
aaatcctgggctggccacc

SEQ ID NO: 22560 - RNA, 19 nt, synthetic construct
  misc_feature 1..19: note = siRNA sense sequence
  source 1..19: mol_type = other RNA
tggccagcccaggatttgt

SEQ ID NO: 22561 - RNA, 19 nt, synthetic construct
  misc_feature 1..19: note = siRNA antisense sequence
  source 1..19: mol_type = other RNA
acaaatcctgggctggcca

SEQ ID NO: 22562 - RNA, 19 nt, synthetic construct
  misc_feature 1..19: note = siRNA sense sequence
  source 1..19: mol_type = other RNA
ggccagcccaggatttgtg

SEQ ID NO: 22563 - RNA, 19 nt, synthetic construct
  misc_feature 1..19: note = siRNA antisense sequence
  source 1..19: mol_type = other RNA
cacaaatcctgggctggcc

SEQ ID NO: 22564 - RNA, 19 nt, synthetic construct
  misc_feature 1..19: note = siRNA sense sequence
  source 1..19: mol_type = other RNA
gcccaggatttgtgaggga

SEQ ID NO: 22565 - RNA, 19 nt, synthetic construct
  misc_feature 1..19: note = siRNA antisense sequence
  source 1..19: mol_type = other RNA
tccctcacaaatcctgggc

SEQ ID NO: 22566 - RNA, 19 nt, synthetic construct
  misc_feature 1..19: note = siRNA sense sequence
  source 1..19: mol_type = other RNA
aggatttgtgagggagcag

SEQ ID NO: 22567 - RNA, 19 nt, synthetic construct
  misc_feature 1..19: note = siRNA antisense sequence
  source 1..19: mol_type = other RNA
ctgctccctcacaaatcct

SEQ ID NO: 22568 - RNA, 19 nt, synthetic construct
  misc_feature 1..19: note = siRNA sense sequence
  source 1..19: mol_type = other RNA
ggatttgtgagggagcagt

SEQ ID NO: 22569 - RNA, 19 nt, synthetic construct
  misc_feature 1..19: note = siRNA antisense sequence
  source 1..19: mol_type = other RNA
actgctccctcacaaatcc

SEQ ID NO: 22570 - RNA, 19 nt, synthetic construct
  misc_feature 1..19: note = siRNA sense sequence
  source 1..19: mol_type = other RNA
gatttgtgagggagcagtt

SEQ ID NO: 22571 - RNA, 19 nt, synthetic construct
  misc_feature 1..19: note = siRNA antisense sequence
  source 1..19: mol_type = other RNA
aactgctccctcacaaatc

SEQ ID NO: 22572 - RNA, 19 nt, synthetic construct
  misc_feature 1..19: note = siRNA sense sequence
  source 1..19: mol_type = other RNA
atttgtgagggagcagttc

SEQ ID NO: 22573 - RNA, 19 nt, synthetic construct
  misc_feature 1..19: note = siRNA antisense sequence
  source 1..19: mol_type = other RNA
gaactgctccctcacaaat

SEQ ID NO: 22574 - RNA, 19 nt, synthetic construct
  misc_feature 1..19: note = siRNA sense sequence
  source 1..19: mol_type = other RNA
tttgtgagggagcagttct

SEQ ID NO: 22575 - RNA, 19 nt, synthetic construct
  misc_feature 1..19: note = siRNA antisense sequence
  source 1..19: mol_type = other RNA
agaactgctccctcacaaa

SEQ ID NO: 22576 - RNA, 19 nt, synthetic construct
  misc_feature 1..19: note = siRNA sense sequence
  source 1..19: mol_type = other RNA
ttgtgagggagcagttctg

SEQ ID NO: 22577 - RNA, 19 nt, synthetic construct
  misc_feature 1..19: note = siRNA antisense sequence
  source 1..19: mol_type = other RNA
cagaactgctccctcacaa

SEQ ID NO: 22578 - RNA, 19 nt, synthetic construct
  misc_feature 1..19: note = siRNA sense sequence
  source 1..19: mol_type = other RNA
tgtgagggagcagttctgc

SEQ ID NO: 22579 - RNA, 19 nt, synthetic construct
  misc_feature 1..19: note = siRNA antisense sequence
  source 1..19: mol_type = other RNA
gcagaactgctccctcaca

SEQ ID NO: 22580 - RNA, 19 nt, synthetic construct
  misc_feature 1..19: note = siRNA sense sequence
  source 1..19: mol_type = other RNA
gtgagggagcagttctgcg

SEQ ID NO: 22581 - RNA, 19 nt, synthetic construct
  misc_feature 1..19: note = siRNA antisense sequence
  source 1..19: mol_type = other RNA
cgcagaactgctccctcac

SEQ ID NO: 22582 - RNA, 19 nt, synthetic construct
  misc_feature 1..19: note = siRNA sense sequence
  source 1..19: mol_type = other RNA
tgagggagcagttctgcga

SEQ ID NO: 22583 - RNA, 19 nt, synthetic construct
  misc_feature 1..19: note = siRNA antisense sequence
  source 1..19: mol_type = other RNA
tcgcagaactgctccctca

SEQ ID NO: 22584 - RNA, 19 nt, synthetic construct
  misc_feature 1..19: note = siRNA sense sequence
  source 1..19: mol_type = other RNA
gagggagcagttctgcgac

SEQ ID NO: 22585 - RNA, 19 nt, synthetic construct
  misc_feature 1..19: note = siRNA antisense sequence
  source 1..19: mol_type = other RNA
gtcgcagaactgctccctc

SEQ ID NO: 22586 - RNA, 19 nt, synthetic construct
  misc_feature 1..19: note = siRNA sense sequence
  source 1..19: mol_type = other RNA
agggagcagttctgcgact

SEQ ID NO: 22587 - RNA, 19 nt, synthetic construct
  misc_feature 1..19: note = siRNA antisense sequence
  source 1..19: mol_type = other RNA
agtcgcagaactgctccct

SEQ ID NO: 22588 - RNA, 19 nt, synthetic construct
  misc_feature 1..19: note = siRNA sense sequence
  source 1..19: mol_type = other RNA
gggagcagttctgcgacta

SEQ ID NO: 22589 - RNA, 19 nt, synthetic construct
  misc_feature 1..19: note = siRNA antisense sequence
  source 1..19: mol_type = other RNA
tagtcgcagaactgctccc

SEQ ID NO: 22590 - RNA, 19 nt, synthetic construct
  misc_feature 1..19: note = siRNA sense sequence
  source 1..19: mol_type = other RNA
ggagcagttctgcgactac

SEQ ID NO: 22591 - RNA, 19 nt, synthetic construct
  misc_feature 1..19: note = siRNA antisense sequence
  source 1..19: mol_type = other RNA
gtagtcgcagaactgctcc

SEQ ID NO: 22592 - RNA, 19 nt, synthetic construct
  misc_feature 1..19: note = siRNA sense sequence
  source 1..19: mol_type = other RNA
caagcagtgaagaccgaca

SEQ ID NO: 22593 - RNA, 19 nt, synthetic construct
  misc_feature 1..19: note = siRNA antisense sequence
  source 1..19: mol_type = other RNA
tgtcggtcttcactgcttg

SEQ ID NO: 22594 - RNA, 19 nt, synthetic construct
  misc_feature 1..19: note = siRNA sense sequence
  source 1..19: mol_type = other RNA
aaccggtccaaatttcttc

SEQ ID NO: 22595 - RNA, 19 nt, synthetic construct
  misc_feature 1..19: note = siRNA antisense sequence
  source 1..19: mol_type = other RNA
gaagaaatttggaccggtt

SEQ ID NO: 22596 - RNA, 19 nt, synthetic construct
  misc_feature 1..19: note = siRNA sense sequence
  source 1..19: mol_type = other RNA
ggtccaaatttcttcaggt

SEQ ID NO: 22597 - RNA, 19 nt, synthetic construct
  misc_feature 1..19: note = siRNA antisense sequence
  source 1..19: mol_type = other RNA
acctgaagaaatttggacc

SEQ ID NO: 22598 - RNA, 19 nt, synthetic construct
  misc_feature 1..19: note = siRNA sense sequence
  source 1..19: mol_type = other RNA
gtccaaatttcttcaggta

SEQ ID NO: 22599 - RNA, 19 nt, synthetic construct
  misc_feature 1..19: note = siRNA antisense sequence
  source 1..19: mol_type = other RNA
tacctgaagaaatttggac

SEQ ID NO: 22600 - RNA, 19 nt, synthetic construct
  misc_feature 1..19: note = siRNA sense sequence
  source 1..19: mol_type = other RNA
tccaaatttcttcaggtaa

SEQ ID NO: 22601 - RNA, 19 nt, synthetic construct
  misc_feature 1..19: note = siRNA antisense sequence
  source 1..19: mol_type = other RNA
ttacctgaagaaatttgga

SEQ ID NO: 22602 - RNA, 19 nt, synthetic construct
  misc_feature 1..19: note = siRNA sense sequence
  source 1..19: mol_type = other RNA
ccaaatttcttcaggtaaa

SEQ ID NO: 22603 - RNA, 19 nt, synthetic construct
  misc_feature 1..19: note = siRNA antisense sequence
  source 1..19: mol_type = other RNA
tttacctgaagaaatttgg

SEQ ID NO: 22604 - RNA, 19 nt, synthetic construct
  misc_feature 1..19: note = siRNA sense sequence
  source 1..19: mol_type = other RNA
aatcttacccagggataat

SEQ ID NO: 22605 - RNA, 19 nt, synthetic construct
  misc_feature 1..19: note = siRNA antisense sequence
  source 1..19: mol_type = other RNA
attatccctgggtaagatt

SEQ ID NO: 22606 - RNA, 19 nt, synthetic construct
  misc_feature 1..19: note = siRNA sense sequence
  source 1..19: mol_type = other RNA
atcttacccagggataatt

SEQ ID NO: 22607 - RNA, 19 nt, synthetic construct
  misc_feature 1..19: note = siRNA antisense sequence
  source 1..19: mol_type = other RNA
aattatccctgggtaagat

SEQ ID NO: 22608 - RNA, 19 nt, synthetic construct
  misc_feature 1..19: note = siRNA sense sequence
  source 1..19: mol_type = other RNA
tcttacccagggataatta

SEQ ID NO: 22609 - RNA, 19 nt, synthetic construct
  misc_feature 1..19: note = siRNA antisense sequence
  source 1..19: mol_type = other RNA
taattatccctgggtaaga

SEQ ID NO: 22610 - RNA, 19 nt, synthetic construct
  misc_feature 1..19: note = siRNA sense sequence
  source 1..19: mol_type = other RNA
cttacccagggataattaa

SEQ ID NO: 22611 - RNA, 19 nt, synthetic construct
  misc_feature 1..19: note = siRNA antisense sequence
  source 1..19: mol_type = other RNA
ttaattatccctgggtaag

SEQ ID NO: 22612 - RNA, 19 nt, synthetic construct
  misc_feature 1..19: note = siRNA sense sequence
  source 1..19: mol_type = other RNA
ttacccagggataattaag

SEQ ID NO: 22613 - RNA, 19 nt, synthetic construct
  misc_feature 1..19: note = siRNA antisense sequence
  source 1..19: mol_type = other RNA
cttaattatccctgggtaa

SEQ ID NO: 22614 - RNA, 19 nt, synthetic construct
  misc_feature 1..19: note = siRNA sense sequence
  source 1..19: mol_type = other RNA
tacccagggataattaaga

SEQ ID NO: 22615 - RNA, 19 nt, synthetic construct
  misc_feature 1..19: note = siRNA antisense sequence
  source 1..19: mol_type = other RNA
tcttaattatccctgggta

SEQ ID NO: 22616 - RNA, 19 nt, synthetic construct
  misc_feature 1..19: note = siRNA sense sequence
  source 1..19: mol_type = other RNA
acccagggataattaagaa

SEQ ID NO: 22617 - RNA, 19 nt, synthetic construct
  misc_feature 1..19: note = siRNA antisense sequence
  source 1..19: mol_type = other RNA
ttcttaattatccctgggt

SEQ ID NO: 22618 - RNA, 19 nt, synthetic construct
  misc_feature 1..19: note = siRNA sense sequence
  source 1..19: mol_type = other RNA
cccagggataattaagaat

SEQ ID NO: 22619 - RNA, 19 nt, synthetic construct
  misc_feature 1..19: note = siRNA antisense sequence
  source 1..19: mol_type = other RNA
attcttaattatccctggg

SEQ ID NO: 22620 - RNA, 19 nt, synthetic construct
  misc_feature 1..19: note = siRNA sense sequence
  source 1..19: mol_type = other RNA
cagggataattaagaatgg

SEQ ID NO: 22621 - RNA, 19 nt, synthetic construct
  misc_feature 1..19: note = siRNA antisense sequence
  source 1..19: mol_type = other RNA
ccattcttaattatccctg

SEQ ID NO: 22622 - RNA, 19 nt, synthetic construct
  misc_feature 1..19: note = siRNA sense sequence
  source 1..19: mol_type = other RNA
agggataattaagaatggg

SEQ ID NO: 22623 - RNA, 19 nt, synthetic construct
  misc_feature 1..19: note = siRNA antisense sequence
  source 1..19: mol_type = other RNA
cccattcttaattatccct

SEQ ID NO: 22624 - RNA, 19 nt, synthetic construct
  misc_feature 1..19: note = siRNA sense sequence
  source 1..19: mol_type = other RNA
gggataattaagaatgggc

SEQ ID NO: 22625 - RNA, 19 nt, synthetic construct
  misc_feature 1..19: note = siRNA antisense sequence
  source 1..19: mol_type = other RNA
gcccattcttaattatccc

SEQ ID NO: 22626 - RNA, 19 nt, synthetic construct
  misc_feature 1..19: note = siRNA sense sequence
  source 1..19: mol_type = other RNA
ggataattaagaatgggca

SEQ ID NO: 22627 - RNA, 19 nt, synthetic construct
  misc_feature 1..19: note = siRNA antisense sequence
  source 1..19: mol_type = other RNA
tgcccattcttaattatcc

SEQ ID NO: 22628 - RNA, 19 nt, synthetic construct
  misc_feature 1..19: note = siRNA sense sequence
  source 1..19: mol_type = other RNA
attaagaatgggcagaggg

SEQ ID NO: 22629 - RNA, 19 nt, synthetic construct
  misc_feature 1..19: note = siRNA antisense sequence
  source 1..19: mol_type = other RNA
ccctctgcccattcttaat

SEQ ID NO: 22630 - RNA, 19 nt, synthetic construct
  misc_feature 1..19: note = siRNA sense sequence
  source 1..19: mol_type = other RNA
gaatgggcagagggattgg

SEQ ID NO: 22631 - RNA, 19 nt, synthetic construct
  misc_feature 1..19: note = siRNA antisense sequence
  source 1..19: mol_type = other RNA
ccaatccctctgcccattc

SEQ ID NO: 22632 - RNA, 19 nt, synthetic construct
  misc_feature 1..19: note = siRNA sense sequence
  source 1..19: mol_type = other RNA
aatgggcagagggattggt

SEQ ID NO: 22633 - RNA, 19 nt, synthetic construct
  misc_feature 1..19: note = siRNA antisense sequence
  source 1..19: mol_type = other RNA
accaatccctctgcccatt

SEQ ID NO: 22634 - RNA, 19 nt, synthetic construct
  misc_feature 1..19: note = siRNA sense sequence
  source 1..19: mol_type = other RNA
atgggcagagggattggta

SEQ ID NO: 22635 - RNA, 19 nt, synthetic construct
  misc_feature 1..19: note = siRNA antisense sequence
  source 1..19: mol_type = other RNA
taccaatccctctgcccat

SEQ ID NO: 22636 - RNA, 19 nt, synthetic construct
  misc_feature 1..19: note = siRNA sense sequence
  source 1..19: mol_type = other RNA
tgggcagagggattggtat

SEQ ID NO: 22637 - RNA, 19 nt, synthetic construct
  misc_feature 1..19: note = siRNA antisense sequence
  source 1..19: mol_type = other RNA
ataccaatccctctgccca

SEQ ID NO: 22638 - RNA, 19 nt, synthetic construct
  misc_feature 1..19: note = siRNA sense sequence
  source 1..19: mol_type = other RNA
gggcagagggattggtata

SEQ ID NO: 22639 - RNA, 19 nt, synthetic construct
  misc_feature 1..19: note = siRNA antisense sequence
  source 1..19: mol_type = other RNA
tataccaatccctctgccc

SEQ ID NO: 22640 - RNA, 19 nt, synthetic construct
  misc_feature 1..19: note = siRNA sense sequence
  source 1..19: mol_type = other RNA
ggcagagggattggtataa

SEQ ID NO: 22641 - RNA, 19 nt, synthetic construct
  misc_feature 1..19: note = siRNA antisense sequence
  source 1..19: mol_type = other RNA
ttataccaatccctctgcc

SEQ ID NO: 22642 - RNA, 19 nt, synthetic construct
  misc_feature 1..19: note = siRNA sense sequence
  source 1..19: mol_type = other RNA
agtctttacttagctggga

SEQ ID NO: 22643 - RNA, 19 nt, synthetic construct
  misc_feature 1..19: note = siRNA antisense sequence
  source 1..19: mol_type = other RNA
tcccagctaagtaaagact

SEQ ID NO: 22644 - RNA, 19 nt, synthetic construct
  misc_feature 1..19: note = siRNA sense sequence
  source 1..19: mol_type = other RNA
gtctttacttagctgggat

SEQ ID NO: 22645 - RNA, 19 nt, synthetic construct
  misc_feature 1..19: note = siRNA antisense sequence
  source 1..19: mol_type = other RNA
atcccagctaagtaaagac

SEQ ID NO: 22646 - RNA, 19 nt, synthetic construct
  misc_feature 1..19: note = siRNA sense sequence
  source 1..19: mol_type = other RNA
tctttacttagctgggatt

SEQ ID NO: 22647 - RNA, 19 nt, synthetic construct
  misc_feature 1..19: note = siRNA antisense sequence
  source 1..19: mol_type = other RNA
aatcccagctaagtaaaga

SEQ ID NO: 22648 - RNA, 19 nt, synthetic construct
  misc_feature 1..19: note = siRNA sense sequence
  source 1..19: mol_type = other RNA
ctttacttagctgggattt

SEQ ID NO: 22649 - RNA, 19 nt, synthetic construct
  misc_feature 1..19: note = siRNA antisense sequence
  source 1..19: mol_type = other RNA
aaatcccagctaagtaaag

SEQ ID NO: 22650 - RNA, 19 nt, synthetic construct
  misc_feature 1..19: note = siRNA sense sequence
  source 1..19: mol_type = other RNA
tttacttagctgggatttt

SEQ ID NO: 22651 - RNA, 19 nt, synthetic construct
  misc_feature 1..19: note = siRNA antisense sequence
  source 1..19: mol_type = other RNA
aaaatcccagctaagtaaa

SEQ ID NO: 22652 - RNA, 19 nt, synthetic construct
  misc_feature 1..19: note = siRNA sense sequence
  source 1..19: mol_type = other RNA
ttacttagctgggattttc

SEQ ID NO: 22653 - RNA, 19 nt, synthetic construct
  misc_feature 1..19: note = siRNA antisense sequence
  source 1..19: mol_type = other RNA
gaaaatcccagctaagtaa

SEQ ID NO: 22654 - RNA, 19 nt, synthetic construct
  misc_feature 1..19: note = siRNA sense sequence
  source 1..19: mol_type = other RNA
tacttagctgggattttca

SEQ ID NO: 22655 - RNA, 19 nt, synthetic construct
  misc_feature 1..19: note = siRNA antisense sequence
  source 1..19: mol_type = other RNA
tgaaaatcccagctaagta

SEQ ID NO: 22656 - RNA, 19 nt, synthetic construct
  misc_feature 1..19: note = siRNA sense sequence
  source 1..19: mol_type = other RNA
acttagctgggattttcat

SEQ ID NO: 22657 - RNA, 19 nt, synthetic construct
  misc_feature 1..19: note = siRNA antisense sequence
  source 1..19: mol_type = other RNA
atgaaaatcccagctaagt

SEQ ID NO: 22658 - RNA, 19 nt, synthetic construct
  misc_feature 1..19: note = siRNA sense sequence
  source 1..19: mol_type = other RNA
cttagctgggattttcatg

SEQ ID NO: 22659 - RNA, 19 nt, synthetic construct
  misc_feature 1..19: note = siRNA antisense sequence
  source 1..19: mol_type = other RNA
catgaaaatcccagctaag

SEQ ID NO: 22660 - RNA, 19 nt, synthetic construct
  misc_feature 1..19: note = siRNA sense sequence
  source 1..19: mol_type = other RNA
agaatgttaaatgtctagc

SEQ ID NO: 22661 - RNA, 19 nt, synthetic construct
  misc_feature 1..19: note = siRNA antisense sequence
  source 1..19: mol_type = other RNA
gctagacatttaacattct

SEQ ID NO: 22662 - RNA, 19 nt, synthetic construct
  misc_feature 1..19: note = siRNA sense sequence
  source 1..19: mol_type = other RNA
gaatgttaaatgtctagca

SEQ ID NO: 22663 - RNA, 19 nt, synthetic construct
  misc_feature 1..19: note = siRNA antisense sequence
  source 1..19: mol_type = other RNA
tgctagacatttaacattc

SEQ ID NO: 22664 - RNA, 19 nt, synthetic construct
  misc_feature 1..19: note = siRNA sense sequence
  source 1..19: mol_type = other RNA
atgtctagcaaatttatgg

SEQ ID NO: 22665 - RNA, 19 nt, synthetic construct
  misc_feature 1..19: note = siRNA antisense sequence
  source 1..19: mol_type = other RNA
ccataaatttgctagacat

SEQ ID NO: 22666 - RNA, 19 nt, synthetic construct
  misc_feature 1..19: note = siRNA sense sequence
  source 1..19: mol_type = other RNA
tgtctagcaaatttatgga

SEQ ID NO: 22667 - RNA, 19 nt, synthetic construct
  misc_feature 1..19: note = siRNA antisense sequence
  source 1..19: mol_type = other RNA
tccataaatttgctagaca

SEQ ID NO: 22668 - RNA, 19 nt, synthetic construct
  misc_feature 1..19: note = siRNA sense sequence
  source 1..19: mol_type = other RNA
tatgaagccttactagcgc

SEQ ID NO: 22669 - RNA, 19 nt, synthetic construct
  misc_feature 1..19: note = siRNA antisense sequence
  source 1..19: mol_type = other RNA
gcgctagtaaggcttcata

SEQ ID NO: 22670 - RNA, 19 nt, synthetic construct
  misc_feature 1..19: note = siRNA sense sequence
  source 1..19: mol_type = other RNA
atgaagccttactagcgct

SEQ ID NO: 22671 - RNA, 19 nt, synthetic construct
  misc_feature 1..19: note = siRNA antisense sequence
  source 1..19: mol_type = other RNA
agcgctagtaaggcttcat

SEQ ID NO: 22672 - RNA, 19 nt, synthetic construct
  misc_feature 1..19: note = siRNA sense sequence
  source 1..19: mol_type = other RNA
agccttactagcgcttttg

SEQ ID NO: 22673 - RNA, 19 nt, synthetic construct
  misc_feature 1..19: note = siRNA antisense sequence
  source 1..19: mol_type = other RNA
caaaagcgctagtaaggct

SEQ ID NO: 22674 - RNA, 19 nt, synthetic construct
  misc_feature 1..19: note = siRNA sense sequence
  source 1..19: mol_type = other RNA
gccttactagcgcttttgg

SEQ ID NO: 22675 - RNA, 19 nt, synthetic construct
  misc_feature 1..19: note = siRNA antisense sequence
  source 1..19: mol_type = other RNA
ccaaaagcgctagtaaggc

SEQ ID NO: 22676 - RNA, 19 nt, synthetic construct
  misc_feature 1..19: note = siRNA sense sequence
  source 1..19: mol_type = other RNA
ccttactagcgcttttggc

SEQ ID NO: 22677 - RNA, 19 nt, synthetic construct
  misc_feature 1..19: note = siRNA antisense sequence
  source 1..19: mol_type = other RNA
gccaaaagcgctagtaagg

SEQ ID NO: 22678 - RNA, 19 nt, synthetic construct
  misc_feature 1..19: note = siRNA sense sequence
  source 1..19: mol_type = other RNA
cttactagcgcttttggct

SEQ ID NO: 22679 - RNA, 19 nt, synthetic construct
  misc_feature 1..19: note = siRNA antisense sequence
  source 1..19: mol_type = other RNA
agccaaaagcgctagtaag

SEQ ID NO: 22680 - RNA, 19 nt, synthetic construct
  misc_feature 1..19: note = siRNA sense sequence
  source 1..19: mol_type = other RNA
ttactagcgcttttggctt

SEQ ID NO: 22681 - RNA, 19 nt, synthetic construct
  misc_feature 1..19: note = siRNA antisense sequence
  source 1..19: mol_type = other RNA
aagccaaaagcgctagtaa

SEQ ID NO: 22682 - RNA, 19 nt, synthetic construct
  misc_feature 1..19: note = siRNA sense sequence
  source 1..19: mol_type = other RNA
tactagcgcttttggcttt

SEQ ID NO: 22683 - RNA, 19 nt, synthetic construct
  misc_feature 1..19: note = siRNA antisense sequence
  source 1..19: mol_type = other RNA
aaagccaaaagcgctagta

SEQ ID NO: 22684 - RNA, 19 nt, synthetic construct
  misc_feature 1..19: note = siRNA sense sequence
  source 1..19: mol_type = other RNA
gctgattaatgggtgttct

SEQ ID NO: 22685 - RNA, 19 nt, synthetic construct
  misc_feature 1..19: note = siRNA antisense sequence
  source 1..19: mol_type = other RNA
agaacacccattaatcagc

SEQ ID NO: 22686 - RNA, 19 nt, synthetic construct
  misc_feature 1..19: note = siRNA sense sequence
  source 1..19: mol_type = other RNA
ctgattaatgggtgttcta

SEQ ID NO: 22687 - RNA, 19 nt, synthetic construct
  misc_feature 1..19: note = siRNA antisense sequence
  source 1..19: mol_type = other RNA
tagaacacccattaatcag

SEQ ID NO: 22688 - RNA, 19 nt, synthetic construct
  misc_feature 1..19: note = siRNA sense sequence
  source 1..19: mol_type = other RNA
tgattaatgggtgttctag

SEQ ID NO: 22689 - RNA, 19 nt, synthetic construct
  misc_feature 1..19: note = siRNA antisense sequence
  source 1..19: mol_type = other RNA
ctagaacacccattaatca

SEQ ID NO: 22690 - RNA, 19 nt, synthetic construct
  misc_feature 1..19: note = siRNA sense sequence
  source 1..19: mol_type = other RNA
tgcctaacttttgtaattg

SEQ ID NO: 22691 - RNA, 19 nt, synthetic construct
  misc_feature 1..19: note = siRNA antisense sequence
  source 1..19: mol_type = other RNA
caattacaaaagttaggca

SEQ ID NO: 22692 - RNA, 19 nt, synthetic construct
  misc_feature 1..19: note = siRNA sense sequence
  source 1..19: mol_type = other RNA
gcctaacttttgtaattgt

SEQ ID NO: 22693 - RNA, 19 nt, synthetic construct
  misc_feature 1..19: note = siRNA antisense sequence
  source 1..19: mol_type = other RNA
acaattacaaaagttaggc

SEQ ID NO: 22694 - RNA, 19 nt, synthetic construct
  misc_feature 1..19: note = siRNA sense sequence
  source 1..19: mol_type = other RNA
cctaacttttgtaattgtg

SEQ ID NO: 22695 - RNA, 19 nt, synthetic construct
  misc_feature 1..19: note = siRNA antisense sequence
  source 1..19: mol_type = other RNA
cacaattacaaaagttagg

SEQ ID NO: 22696 - RNA, 19 nt, synthetic construct
  misc_feature 1..19: note = siRNA sense sequence
  source 1..19: mol_type = other RNA
ttgtaattgtgattctagg

SEQ ID NO: 22697 - RNA, 19 nt, synthetic construct
  misc_feature 1..19: note = siRNA antisense sequence
  source 1..19: mol_type = other RNA
cctagaatcacaattacaa

SEQ ID NO: 22698 - RNA, 19 nt, synthetic construct
  misc_feature 1..19: note = siRNA sense sequence
  source 1..19: mol_type = other RNA
tgtaattgtgattctaggt

SEQ ID NO: 22699 - RNA, 19 nt, synthetic construct
  misc_feature 1..19: note = siRNA antisense sequence
  source 1..19: mol_type = other RNA
acctagaatcacaattaca

SEQ ID NO: 22700 - RNA, 19 nt, synthetic construct
  misc_feature 1..19: note = siRNA sense sequence
  source 1..19: mol_type = other RNA
gtaattgtgattctaggta

SEQ ID NO: 22701 - RNA, 19 nt, synthetic construct
  misc_feature 1..19: note = siRNA antisense sequence
  source 1..19: mol_type = other RNA
tacctagaatcacaattac

SEQ ID NO: 22702 - RNA, 19 nt, synthetic construct
  misc_feature 1..19: note = siRNA sense sequence
  source 1..19: mol_type = other RNA
aattgtgattctaggtaca

SEQ ID NO: 22703 - RNA, 19 nt, synthetic construct
  misc_feature 1..19: note = siRNA antisense sequence
  source 1..19: mol_type = other RNA
tgtacctagaatcacaatt

SEQ ID NO: 22704 - RNA, 19 nt, synthetic construct
  misc_feature 1..19: note = siRNA sense sequence
  source 1..19: mol_type = other RNA
attgtgattctaggtacat

SEQ ID NO: 22705 - RNA, 19 nt, synthetic construct
  misc_feature 1..19: note = siRNA antisense sequence
  source 1..19: mol_type = other RNA
atgtacctagaatcacaat

SEQ ID NO: 22706 - RNA, 19 nt, synthetic construct
  misc_feature 1..19: note = siRNA sense sequence
  source 1..19: mol_type = other RNA
ttgtgattctaggtacatg

SEQ ID NO: 22707 - RNA, 19 nt, synthetic construct
  misc_feature 1..19: note = siRNA antisense sequence
  source 1..19: mol_type = other RNA
catgtacctagaatcacaa

SEQ ID NO: 22708 - RNA, 19 nt, synthetic construct
  misc_feature 1..19: note = siRNA sense sequence
  source 1..19: mol_type = other RNA
tgtgattctaggtacatgc

SEQ ID NO: 22709 - RNA, 19 nt, synthetic construct
  misc_feature 1..19: note = siRNA antisense sequence
  source 1..19: mol_type = other RNA
gcatgtacctagaatcaca

SEQ ID NO: 22710 - RNA, 19 nt, synthetic construct
  misc_feature 1..19: note = siRNA sense sequence
  source 1..19: mol_type = other RNA
gtgattctaggtacatgcc

SEQ ID NO: 22711 - RNA, 19 nt, synthetic construct
  misc_feature 1..19: note = siRNA antisense sequence
  source 1..19: mol_type = other RNA
ggcatgtacctagaatcac

SEQ ID NO: 22712 - RNA, 19 nt, synthetic construct
  misc_feature 1..19: note = siRNA sense sequence
  source 1..19: mol_type = other RNA
tgattctaggtacatgcct

SEQ ID NO: 22713 - RNA, 19 nt, synthetic construct
  misc_feature 1..19: note = siRNA antisense sequence
  source 1..19: mol_type = other RNA
aggcatgtacctagaatca

SEQ ID NO: 22714 - RNA, 19 nt, synthetic construct
  misc_feature 1..19: note = siRNA sense sequence
  source 1..19: mol_type = other RNA
ggtacatgcctcctccgga

SEQ ID NO: 22715 - RNA, 19 nt, synthetic construct
  misc_feature 1..19: note = siRNA antisense sequence
  source 1..19: mol_type = other RNA
tccggaggaggcatgtacc

SEQ ID NO: 22716 - RNA, 19 nt, synthetic construct
  misc_feature 1..19: note = siRNA sense sequence
  source 1..19: mol_type = other RNA
gtacatgcctcctccggac

SEQ ID NO: 22717 - RNA, 19 nt, synthetic construct
  misc_feature 1..19: note = siRNA antisense sequence
  source 1..19: mol_type = other RNA
gtccggaggaggcatgtac

SEQ ID NO: 22718 - RNA, 19 nt, synthetic construct
  misc_feature 1..19: note = siRNA sense sequence
  source 1..19: mol_type = other RNA
tacatgcctcctccggaca

SEQ ID NO: 22719 - RNA, 19 nt, synthetic construct
  misc_feature 1..19: note = siRNA antisense sequence
  source 1..19: mol_type = other RNA
tgtccggaggaggcatgta

SEQ ID NO: 22720 - RNA, 19 nt, synthetic construct
  misc_feature 1..19: note = siRNA sense sequence
  source 1..19: mol_type = other RNA
acatgcctcctccggacac

SEQ ID NO: 22721 - RNA, 19 nt, synthetic construct
  misc_feature 1..19: note = siRNA antisense sequence
  source 1..19: mol_type = other RNA
gtgtccggaggaggcatgt

SEQ ID NO: 22722 - RNA, 19 nt, synthetic construct
  misc_feature 1..19: note = siRNA sense sequence
  source 1..19: mol_type = other RNA
agaggccctttgtgaccct

SEQ ID NO: 22723 - RNA, 19 nt, synthetic construct
  misc_feature 1..19: note = siRNA antisense sequence
  source 1..19: mol_type = other RNA
agggtcacaaagggcctct

SEQ ID NO: 22724 - RNA, 19 nt, synthetic construct
  misc_feature 1..19: note = siRNA sense sequence
  source 1..19: mol_type = other RNA
gaggccctttgtgacccta

SEQ ID NO: 22725 - RNA, 19 nt, synthetic construct
  misc_feature 1..19: note = siRNA antisense sequence
  source 1..19: mol_type = other RNA
tagggtcacaaagggcctc

SEQ ID NO: 22726 - RNA, 19 nt, synthetic construct
  misc_feature 1..19: note = siRNA sense sequence
  source 1..19: mol_type = other RNA
aggccctttgtgaccctac

SEQ ID NO: 22727 - RNA, 19 nt, synthetic construct
  misc_feature 1..19: note = siRNA antisense sequence
  source 1..19: mol_type = other RNA
gtagggtcacaaagggcct

SEQ ID NO: 22728 - RNA, 19 nt, synthetic construct
  misc_feature 1..19: note = siRNA sense sequence
  source 1..19: mol_type = other RNA
ggccctttgtgaccctact

SEQ ID NO: 22729 - RNA, 19 nt, synthetic construct
  misc_feature 1..19: note = siRNA antisense sequence
  source 1..19: mol_type = other RNA
agtagggtcacaaagggcc

SEQ ID NO: 22730 - RNA, 19 nt, synthetic construct
  misc_feature 1..19: note = siRNA sense sequence
  source 1..19: mol_type = other RNA
ttgtgaccctactgtggct

SEQ ID NO: 22731 - RNA, 19 nt, synthetic construct
  misc_feature 1..19: note = siRNA antisense sequence
  source 1..19: mol_type = other RNA
agccacagtagggtcacaa

SEQ ID NO: 22732 - RNA, 19 nt, synthetic construct
  misc_feature 1..19: note = siRNA sense sequence
  source 1..19: mol_type = other RNA
tgtgaccctactgtggcta

SEQ ID NO: 22733 - RNA, 19 nt, synthetic construct
  misc_feature 1..19: note = siRNA antisense sequence
  source 1..19: mol_type = other RNA
tagccacagtagggtcaca

SEQ ID NO: 22734 - RNA, 19 nt, synthetic construct
  misc_feature 1..19: note = siRNA sense sequence
  source 1..19: mol_type = other RNA
gtgaccctactgtggctag

SEQ ID NO: 22735 - RNA, 19 nt, synthetic construct
  misc_feature 1..19: note = siRNA antisense sequence
  source 1..19: mol_type = other RNA
ctagccacagtagggtcac

SEQ ID NO: 22736 - RNA, 19 nt, synthetic construct
  misc_feature 1..19: note = siRNA sense sequence
  source 1..19: mol_type = other RNA
tgaccctactgtggctagc

SEQ ID NO: 22737 - RNA, 19 nt, synthetic construct
  misc_feature 1..19: note = siRNA antisense sequence
  source 1..19: mol_type = other RNA
gctagccacagtagggtca

SEQ ID NO: 22738 - RNA, 19 nt, synthetic construct
  misc_feature 1..19: note = siRNA sense sequence
  source 1..19: mol_type = other RNA
gaccctactgtggctagcc

SEQ ID NO: 22739 - RNA, 19 nt, synthetic construct
  misc_feature 1..19: note = siRNA antisense sequence
  source 1..19: mol_type = other RNA
ggctagccacagtagggtc

SEQ ID NO: 22740 - RNA, 19 nt, synthetic construct
  misc_feature 1..19: note = siRNA sense sequence
  source 1..19: mol_type = other RNA
accctactgtggctagccg

SEQ ID NO: 22741 - RNA, 19 nt, synthetic construct
  misc_feature 1..19: note = siRNA antisense sequence
  source 1..19: mol_type = other RNA
cggctagccacagtagggt

SEQ ID NO: 22742 - RNA, 19 nt, synthetic construct
  misc_feature 1..19: note = siRNA sense sequence
  source 1..19: mol_type = other RNA
ccgcctttcagacactaaa

SEQ ID NO: 22743 - RNA, 19 nt, synthetic construct
  misc_feature 1..19: note = siRNA antisense sequence
  source 1..19: mol_type = other RNA
tttagtgtctgaaaggcgg

SEQ ID NO: 22744 - RNA, 19 nt, synthetic construct
  misc_feature 1..19: note = siRNA sense sequence
  source 1..19: mol_type = other RNA
gggaagtcaaagccttgga

SEQ ID NO: 22745 - RNA, 19 nt, synthetic construct
  misc_feature 1..19: note = siRNA antisense sequence
  source 1..19: mol_type = other RNA
tccaaggctttgacttccc

SEQ ID NO: 22746 - RNA, 19 nt, synthetic construct
  misc_feature 1..19: note = siRNA sense sequence
  source 1..19: mol_type = other RNA
ggaagtcaaagccttggat

SEQ ID NO: 22747 - RNA, 19 nt, synthetic construct
  misc_feature 1..19: note = siRNA antisense sequence
  source 1..19: mol_type = other RNA
atccaaggctttgacttcc

SEQ ID NO: 22748 - RNA, 19 nt, synthetic construct
  misc_feature 1..19: note = siRNA sense sequence
  source 1..19: mol_type = other RNA
gaagtcaaagccttggatg

SEQ ID NO: 22749 - RNA, 19 nt, synthetic construct
  misc_feature 1..19: note = siRNA antisense sequence
  source 1..19: mol_type = other RNA
catccaaggctttgacttc

SEQ ID NO: 22750 - RNA, 19 nt, synthetic construct
  misc_feature 1..19: note = siRNA sense sequence
  source 1..19: mol_type = other RNA
tcaaagccttggatgactt

SEQ ID NO: 22751 - RNA, 19 nt, synthetic construct
  misc_feature 1..19: note = siRNA antisense sequence
  source 1..19: mol_type = other RNA
aagtcatccaaggctttga

SEQ ID NO: 22752 - RNA, 19 nt, synthetic construct
  misc_feature 1..19: note = siRNA sense sequence
  source 1..19: mol_type = other RNA
caaagccttggatgacttc

SEQ ID NO: 22753 - RNA, 19 nt, synthetic construct
  misc_feature 1..19: note = siRNA antisense sequence
  source 1..19: mol_type = other RNA
gaagtcatccaaggctttg

SEQ ID NO: 22754 - RNA, 19 nt, synthetic construct
  misc_feature 1..19: note = siRNA sense sequence
  source 1..19: mol_type = other RNA
aaagccttggatgacttct

SEQ ID NO: 22755 - RNA, 19 nt, synthetic construct
  misc_feature 1..19: note = siRNA antisense sequence
  source 1..19: mol_type = other RNA
agaagtcatccaaggcttt

SEQ ID NO: 22756 - RNA, 19 nt, synthetic construct
  misc_feature 1..19: note = siRNA sense sequence
  source 1..19: mol_type = other RNA
aagccttggatgacttcta

SEQ ID NO: 22757 - RNA, 19 nt, synthetic construct
  misc_feature 1..19: note = siRNA antisense sequence
  source 1..19: mol_type = other RNA
tagaagtcatccaaggctt

SEQ ID NO: 22758 - RNA, 19 nt, synthetic construct
  misc_feature 1..19: note = siRNA sense sequence
  source 1..19: mol_type = other RNA
agccttggatgacttctat

SEQ ID NO: 22759 - RNA, 19 nt, synthetic construct
  misc_feature 1..19: note = siRNA antisense sequence
  source 1..19: mol_type = other RNA
atagaagtcatccaaggct

SEQ ID NO: 22760 - RNA, 19 nt, synthetic construct
  misc_feature 1..19: note = siRNA sense sequence
  source 1..19: mol_type = other RNA
gccttggatgacttctata

SEQ ID NO: 22761 - RNA, 19 nt, synthetic construct
  misc_feature 1..19: note = siRNA antisense sequence
  source 1..19: mol_type = other RNA
tatagaagtcatccaaggc

SEQ ID NO: 22762 - RNA, 19 nt, synthetic construct
  misc_feature 1..19: note = siRNA sense sequence
  source 1..19: mol_type = other RNA
ccttggatgacttctataa

SEQ ID NO: 22763 - RNA, 19 nt, synthetic construct
  misc_feature 1..19: note = siRNA antisense sequence
  source 1..19: mol_type = other RNA
ttatagaagtcatccaagg

SEQ ID NO: 22764 - RNA, 19 nt, synthetic construct
  misc_feature 1..19: note = siRNA sense sequence
  source 1..19: mol_type = other RNA
cttggatgacttctataaa

SEQ ID NO: 22765 - RNA, 19 nt, synthetic construct
  misc_feature 1..19: note = siRNA antisense sequence
  source 1..19: mol_type = other RNA
tttatagaagtcatccaag

SEQ ID NO: 22766 - RNA, 19 nt, synthetic construct
  misc_feature 1..19: note = siRNA sense sequence
  source 1..19: mol_type = other RNA
aaccggatcgagctttcta

SEQ ID NO: 22767 - RNA, 19 nt, synthetic construct
  misc_feature 1..19: note = siRNA antisense sequence
  source 1..19: mol_type = other RNA
tagaaagctcgatccggtt

SEQ ID NO: 22768 - RNA, 19 nt, synthetic construct
  misc_feature 1..19: note = siRNA sense sequence
  source 1..19: mol_type = other RNA
accggatcgagctttctat

SEQ ID NO: 22769 - RNA, 19 nt, synthetic construct
  misc_feature 1..19: note = siRNA antisense sequence
  source 1..19: mol_type = other RNA
atagaaagctcgatccggt

SEQ ID NO: 22770 - RNA, 19 nt, synthetic construct
  misc_feature 1..19: note = siRNA sense sequence
  source 1..19: mol_type = other RNA
ccggatcgagctttctatg

SEQ ID NO: 22771 - RNA, 19 nt, synthetic construct
  misc_feature 1..19: note = siRNA antisense sequence
  source 1..19: mol_type = other RNA
catagaaagctcgatccgg

SEQ ID NO: 22772 - RNA, 19 nt, synthetic construct
  misc_feature 1..19: note = siRNA sense sequence
  source 1..19: mol_type = other RNA
cggatcgagctttctatgg

SEQ ID NO: 22773 - RNA, 19 nt, synthetic construct
  misc_feature 1..19: note = siRNA antisense sequence
  source 1..19: mol_type = other RNA
ccatagaaagctcgatccg

SEQ ID NO: 22774 - RNA, 19 nt, synthetic construct
  misc_feature 1..19: note = siRNA sense sequence
  source 1..19: mol_type = other RNA
ggatcgagctttctatgga

SEQ ID NO: 22775 - RNA, 19 nt, synthetic construct
  misc_feature 1..19: note = siRNA antisense sequence
  source 1..19: mol_type = other RNA
tccatagaaagctcgatcc

SEQ ID NO: 22776 - RNA, 19 nt, synthetic construct
  misc_feature 1..19: note = siRNA sense sequence
  source 1..19: mol_type = other RNA
gatcgagctttctatggac

SEQ ID NO: 22777 - RNA, 19 nt, synthetic construct
  misc_feature 1..19: note = siRNA antisense sequence
  source 1..19: mol_type = other RNA
gtccatagaaagctcgatc

SEQ ID NO: 22778 - RNA, 19 nt, synthetic construct
  misc_feature 1..19: note = siRNA sense sequence
  source 1..19: mol_type = other RNA
atcgagctttctatggact

SEQ ID NO: 22779 - RNA, 19 nt, synthetic construct
  misc_feature 1..19: note = siRNA antisense sequence
  source 1..19: mol_type = other RNA
agtccatagaaagctcgat

SEQ ID NO: 22780 - RNA, 19 nt, synthetic construct
  misc_feature 1..19: note = siRNA sense sequence
  source 1..19: mol_type = other RNA
tcgagctttctatggactc

SEQ ID NO: 22781 - RNA, 19 nt, synthetic construct
  misc_feature 1..19: note = siRNA antisense sequence
  source 1..19: mol_type = other RNA
gagtccatagaaagctcga

SEQ ID NO: 22782 - RNA, 19 nt, synthetic construct
  misc_feature 1..19: note = siRNA sense sequence
  source 1..19: mol_type = other RNA
cgagctttctatggactca

SEQ ID NO: 22783 - RNA, 19 nt, synthetic construct
  misc_feature 1..19: note = siRNA antisense sequence
  source 1..19: mol_type = other RNA
tgagtccatagaaagctcg

SEQ ID NO: 22784 - RNA, 19 nt, synthetic construct
  misc_feature 1..19: note = siRNA sense sequence
  source 1..19: mol_type = other RNA
gagctttctatggactcaa

SEQ ID NO: 22785 - RNA, 19 nt, synthetic construct
  misc_feature 1..19: note = siRNA antisense sequence
  source 1..19: mol_type = other RNA
ttgagtccatagaaagctc

SEQ ID NO: 22786 - RNA, 19 nt, synthetic construct
  misc_feature 1..19: note = siRNA sense sequence
  source 1..19: mol_type = other RNA
agctttctatggactcaag

SEQ ID NO: 22787 - RNA, 19 nt, synthetic construct
  misc_feature 1..19: note = siRNA antisense sequence
  source 1..19: mol_type = other RNA
cttgagtccatagaaagct

SEQ ID NO: 22788 - RNA, 19 nt, synthetic construct
  misc_feature 1..19: note = siRNA sense sequence
  source 1..19: mol_type = other RNA
ctttctatggactcaagca

SEQ ID NO: 22789 - RNA, 19 nt, synthetic construct
  misc_feature 1..19: note = siRNA antisense sequence
  source 1..19: mol_type = other RNA
tgcttgagtccatagaaag

SEQ ID NO: 22790 - RNA, 19 nt, synthetic construct
  misc_feature 1..19: note = siRNA sense sequence
  source 1..19: mol_type = other RNA
tttctatggactcaagcag

SEQ ID NO: 22791 - RNA, 19 nt, synthetic construct
  misc_feature 1..19: note = siRNA antisense sequence
  source 1..19: mol_type = other RNA
ctgcttgagtccatagaaa

SEQ ID NO: 22792 - RNA, 19 nt, synthetic construct
  misc_feature 1..19: note = siRNA sense sequence
  source 1..19: mol_type = other RNA
tatggactcaagcaggtgg

SEQ ID NO: 22793 - RNA, 19 nt, synthetic construct
  misc_feature 1..19: note = siRNA antisense sequence
  source 1..19: mol_type = other RNA
ccacctgcttgagtccata

SEQ ID NO: 22794 - RNA, 19 nt, synthetic construct
  misc_feature 1..19: note = siRNA sense sequence
  source 1..19: mol_type = other RNA
tggactcaagcaggtggag

SEQ ID NO: 22795 - RNA, 19 nt, synthetic construct
  misc_feature 1..19: note = siRNA antisense sequence
  source 1..19: mol_type = other RNA
ctccacctgcttgagtcca

SEQ ID NO: 22796 - RNA, 19 nt, synthetic construct
  misc_feature 1..19: note = siRNA sense sequence
  source 1..19: mol_type = other RNA
ccaatgaagccatggcaat

SEQ ID NO: 22797 - RNA, 19 nt, synthetic construct
  misc_feature 1..19: note = siRNA antisense sequence
  source 1..19: mol_type = other RNA
attgccatggcttcattgg

SEQ ID NO: 22798 - RNA, 19 nt, synthetic construct
  misc_feature 1..19: note = siRNA sense sequence
  source 1..19: mol_type = other RNA
caatgaagccatggcaatt

SEQ ID NO: 22799 - RNA, 19 nt, synthetic construct
  misc_feature 1..19: note = siRNA antisense sequence
  source 1..19: mol_type = other RNA
aattgccatggcttcattg

SEQ ID NO: 22800 - RNA, 19 nt, synthetic construct
  misc_feature 1..19: note = siRNA sense sequence
  source 1..19: mol_type = other RNA
aatgaagccatggcaattg

SEQ ID NO: 22801 - RNA, 19 nt, synthetic construct
  misc_feature 1..19: note = siRNA antisense sequence
  source 1..19: mol_type = other RNA
caattgccatggcttcatt

SEQ ID NO: 22802 - RNA, 19 nt, synthetic construct
  misc_feature 1..19: note = siRNA sense sequence
  source 1..19: mol_type = other RNA
atgaagccatggcaattga

SEQ ID NO: 22803 - RNA, 19 nt, synthetic construct
  misc_feature 1..19: note = siRNA antisense sequence
  source 1..19: mol_type = other RNA
tcaattgccatggcttcat

SEQ ID NO: 22804 - RNA, 19 nt, synthetic construct
  misc_feature 1..19: note = siRNA sense sequence
  source 1..19: mol_type = other RNA
tgaagccatggcaattgac

SEQ ID NO: 22805 - RNA, 19 nt, synthetic construct
  misc_feature 1..19: note = siRNA antisense sequence
  source 1..19: mol_type = other RNA
gtcaattgccatggcttca

SEQ ID NO: 22806 - RNA, 19 nt, synthetic construct
  misc_feature 1..19: note = siRNA sense sequence
  source 1..19: mol_type = other RNA
gaagccatggcaattgaca

SEQ ID NO: 22807 - RNA, 19 nt, synthetic construct
  misc_feature 1..19: note = siRNA antisense sequence
  source 1..19: mol_type = other RNA
tgtcaattgccatggcttc

SEQ ID NO: 22808 - RNA, 19 nt, synthetic construct
  misc_feature 1..19: note = siRNA sense sequence
  source 1..19: mol_type = other RNA
cacattgctcatcagcgat

SEQ ID NO: 22809 - RNA, 19 nt, synthetic construct
  misc_feature 1..19: note = siRNA antisense sequence
  source 1..19: mol_type = other RNA
atcgctgatgagcaatgtg

SEQ ID NO: 22810 - RNA, 19 nt, synthetic construct
  misc_feature 1..19: note = siRNA sense sequence
  source 1..19: mol_type = other RNA
agcgatgagctcttcaggc

SEQ ID NO: 22811 - RNA, 19 nt, synthetic construct
  misc_feature 1..19: note = siRNA antisense sequence
  source 1..19: mol_type = other RNA
gcctgaagagctcatcgct

SEQ ID NO: 22812 - RNA, 19 nt, synthetic construct
  misc_feature 1..19: note = siRNA sense sequence
  source 1..19: mol_type = other RNA
tcttcaggcatcaggatgt

SEQ ID NO: 22813 - RNA, 19 nt, synthetic construct
  misc_feature 1..19: note = siRNA antisense sequence
  source 1..19: mol_type = other RNA
acatcctgatgcctgaaga

SEQ ID NO: 22814 - RNA, 19 nt, synthetic construct
  misc_feature 1..19: note = siRNA sense sequence
  source 1..19: mol_type = other RNA
cttcaggcatcaggatgta

SEQ ID NO: 22815 - RNA, 19 nt, synthetic construct
  misc_feature 1..19: note = siRNA antisense sequence
  source 1..19: mol_type = other RNA
tacatcctgatgcctgaag

SEQ ID NO: 22816 - RNA, 19 nt, synthetic construct
  misc_feature 1..19: note = siRNA sense sequence
  source 1..19: mol_type = other RNA
ttcaggcatcaggatgtag

SEQ ID NO: 22817 - RNA, 19 nt, synthetic construct
  misc_feature 1..19: note = siRNA antisense sequence
  source 1..19: mol_type = other RNA
ctacatcctgatgcctgaa

SEQ ID NO: 22818 - RNA, 19 nt, synthetic construct
  misc_feature 1..19: note = siRNA sense sequence
  source 1..19: mol_type = other RNA
ggcatcaggatgtagccac

SEQ ID NO: 22819 - RNA, 19 nt, synthetic construct
  misc_feature 1..19: note = siRNA antisense sequence
  source 1..19: mol_type = other RNA
gtggctacatcctgatgcc

SEQ ID NO: 22820 - RNA, 19 nt, synthetic construct
  misc_feature 1..19: note = siRNA sense sequence
  source 1..19: mol_type = other RNA
gcatcaggatgtagccaca

SEQ ID NO: 22821 - RNA, 19 nt, synthetic construct
  misc_feature 1..19: note = siRNA antisense sequence
  source 1..19: mol_type = other RNA
tgtggctacatcctgatgc

SEQ ID NO: 22822 - RNA, 19 nt, synthetic construct
  misc_feature 1..19: note = siRNA sense sequence
  source 1..19: mol_type = other RNA
catcaggatgtagccacac

SEQ ID NO: 22823 - RNA, 19 nt, synthetic construct
  misc_feature 1..19: note = siRNA antisense sequence
  source 1..19: mol_type = other RNA
gtgtggctacatcctgatg

SEQ ID NO: 22824 - RNA, 19 nt, synthetic construct
  misc_feature 1..19: note = siRNA sense sequence
  source 1..19: mol_type = other RNA
atcaggatgtagccacacg

SEQ ID NO: 22825 - RNA, 19 nt, synthetic construct
  misc_feature 1..19: note = siRNA antisense sequence
  source 1..19: mol_type = other RNA
cgtgtggctacatcctgat

SEQ ID NO: 22826 - RNA, 19 nt, synthetic construct
  misc_feature 1..19: note = siRNA sense sequence
  source 1..19: mol_type = other RNA
tcaggatgtagccacacgg

SEQ ID NO: 22827 - RNA, 19 nt, synthetic construct
  misc_feature 1..19: note = siRNA antisense sequence
  source 1..19: mol_type = other RNA
ccgtgtggctacatcctga

SEQ ID NO: 22828 - RNA, 19 nt, synthetic construct
  misc_feature 1..19: note = siRNA sense sequence
  source 1..19: mol_type = other RNA
caggatgtagccacacgga

SEQ ID NO: 22829 - RNA, 19 nt, synthetic construct
  misc_feature 1..19: note = siRNA antisense sequence
  source 1..19: mol_type = other RNA
tccgtgtggctacatcctg

SEQ ID NO: 22830 - RNA, 19 nt, synthetic construct
  misc_feature 1..19: note = siRNA sense sequence
  source 1..19: mol_type = other RNA
aggatgtagccacacggag

SEQ ID NO: 22831 - RNA, 19 nt, synthetic construct
  misc_feature 1..19: note = siRNA antisense sequence
  source 1..19: mol_type = other RNA
ctccgtgtggctacatcct

SEQ ID NO: 22832 - RNA, 19 nt, synthetic construct
  misc_feature 1..19: note = siRNA sense sequence
  source 1..19: mol_type = other RNA
ggatgtagccacacggagc

SEQ ID NO: 22833 - RNA, 19 nt, synthetic construct
  misc_feature 1..19: note = siRNA antisense sequence
  source 1..19: mol_type = other RNA
gctccgtgtggctacatcc

SEQ ID NO: 22834 - RNA, 19 nt, synthetic construct
  misc_feature 1..19: note = siRNA sense sequence
  source 1..19: mol_type = other RNA
gatgtagccacacggagcc

SEQ ID NO: 22835 - RNA, 19 nt, synthetic construct
  misc_feature 1..19: note = siRNA antisense sequence
  source 1..19: mol_type = other RNA
ggctccgtgtggctacatc

SEQ ID NO: 22836 - RNA, 19 nt, synthetic construct
  misc_feature 1..19: note = siRNA sense sequence
  source 1..19: mol_type = other RNA
atgtagccacacggagccg

SEQ ID NO: 22837 - RNA, 19 nt, synthetic construct
  misc_feature 1..19: note = siRNA antisense sequence
  source 1..19: mol_type = other RNA
cggctccgtgtggctacat

SEQ ID NO: 22838 - RNA, 19 nt, synthetic construct
  misc_feature 1..19: note = siRNA sense sequence
  source 1..19: mol_type = other RNA
tagccacacggagccggta

SEQ ID NO: 22839 - RNA, 19 nt, synthetic construct
  misc_feature 1..19: note = siRNA antisense sequence
  source 1..19: mol_type = other RNA
taccggctccgtgtggcta

SEQ ID NO: 22840 - RNA, 19 nt, synthetic construct
  misc_feature 1..19: note = siRNA sense sequence
  source 1..19: mol_type = other RNA
agccacacggagccggtat

SEQ ID NO: 22841 - RNA, 19 nt, synthetic construct
  misc_feature 1..19: note = siRNA antisense sequence
  source 1..19: mol_type = other RNA
ataccggctccgtgtggct

SEQ ID NO: 22842 - RNA, 19 nt, synthetic construct
  misc_feature 1..19: note = siRNA sense sequence
  source 1..19: mol_type = other RNA
ccacacggagccggtatgt

SEQ ID NO: 22843 - RNA, 19 nt, synthetic construct
  misc_feature 1..19: note = siRNA antisense sequence
  source 1..19: mol_type = other RNA
acataccggctccgtgtgg

SEQ ID NO: 22844 - RNA, 19 nt, synthetic construct
  misc_feature 1..19: note = siRNA sense sequence
  source 1..19: mol_type = other RNA
gccggtatgtgaggctggt

SEQ ID NO: 22845 - RNA, 19 nt, synthetic construct
  misc_feature 1..19: note = siRNA antisense sequence
  source 1..19: mol_type = other RNA
accagcctcacataccggc

SEQ ID NO: 22846 - RNA, 19 nt, synthetic construct
  misc_feature 1..19: note = siRNA sense sequence
  source 1..19: mol_type = other RNA
ccggtatgtgaggctggtg

SEQ ID NO: 22847 - RNA, 19 nt, synthetic construct
  misc_feature 1..19: note = siRNA antisense sequence
  source 1..19: mol_type = other RNA
caccagcctcacataccgg

SEQ ID NO: 22848 - RNA, 19 nt, synthetic construct
  misc_feature 1..19: note = siRNA sense sequence
  source 1..19: mol_type = other RNA
ggtatgtgaggctggtgga

SEQ ID NO: 22849 - RNA, 19 nt, synthetic construct
  misc_feature 1..19: note = siRNA antisense sequence
  source 1..19: mol_type = other RNA
tccaccagcctcacatacc

SEQ ID NO: 22850 - RNA, 19 nt, synthetic construct
  misc_feature 1..19: note = siRNA sense sequence
  source 1..19: mol_type = other RNA
gtatgtgaggctggtggac

SEQ ID NO: 22851 - RNA, 19 nt, synthetic construct
  misc_feature 1..19: note = siRNA antisense sequence
  source 1..19: mol_type = other RNA
gtccaccagcctcacatac

SEQ ID NO: 22852 - RNA, 19 nt, synthetic construct
  misc_feature 1..19: note = siRNA sense sequence
  source 1..19: mol_type = other RNA
tatgtgaggctggtggaca

SEQ ID NO: 22853 - RNA, 19 nt, synthetic construct
  misc_feature 1..19: note = siRNA antisense sequence
  source 1..19: mol_type = other RNA
tgtccaccagcctcacata

SEQ ID NO: 22854 - RNA, 19 nt, synthetic construct
  misc_feature 1..19: note = siRNA sense sequence
  source 1..19: mol_type = other RNA
atgtgaggctggtggacag

SEQ ID NO: 22855 - RNA, 19 nt, synthetic construct
  misc_feature 1..19: note = siRNA antisense sequence
  source 1..19: mol_type = other RNA
ctgtccaccagcctcacat

SEQ ID NO: 22856 - RNA, 19 nt, synthetic construct
  misc_feature 1..19: note = siRNA sense sequence
  source 1..19: mol_type = other RNA
tgtgaggctggtggacagt

SEQ ID NO: 22857 - RNA, 19 nt, synthetic construct
  misc_feature 1..19: note = siRNA antisense sequence
  source 1..19: mol_type = other RNA
actgtccaccagcctcaca

SEQ ID NO: 22858 - RNA, 19 nt, synthetic construct
  misc_feature 1..19: note = siRNA sense sequence
  source 1..19: mol_type = other RNA
gtgaggctggtggacagtg

SEQ ID NO: 22859 - RNA, 19 nt, synthetic construct
  misc_feature 1..19: note = siRNA antisense sequence
  source 1..19: mol_type = other RNA
cactgtccaccagcctcac

SEQ ID NO: 22860 - RNA, 19 nt, synthetic construct
  misc_feature 1..19: note = siRNA sense sequence
  source 1..19: mol_type = other RNA
tgaggctggtggacagtgt

SEQ ID NO: 22861 - RNA, 19 nt, synthetic construct
  misc_feature 1..19: note = siRNA antisense sequence
  source 1..19: mol_type = other RNA
acactgtccaccagcctca

SEQ ID NO: 22862 - RNA, 19 nt, synthetic construct
  misc_feature 1..19: note = siRNA sense sequence
  source 1..19: mol_type = other RNA
gaggctggtggacagtgtg

SEQ ID NO: 22863 - RNA, 19 nt, synthetic construct
  misc_feature 1..19: note = siRNA antisense sequence
  source 1..19: mol_type = other RNA
cacactgtccaccagcctc

SEQ ID NO: 22864 - RNA, 19 nt, synthetic construct
  misc_feature 1..19: note = siRNA sense sequence
  source 1..19: mol_type = other RNA
aggctggtggacagtgtga

SEQ ID NO: 22865 - RNA, 19 nt, synthetic construct
  misc_feature 1..19: note = siRNA antisense sequence
  source 1..19: mol_type = other RNA
tcacactgtccaccagcct

SEQ ID NO: 22866 - RNA, 19 nt, synthetic construct
  misc_feature 1..19: note = siRNA sense sequence
  source 1..19: mol_type = other RNA
ggctggtggacagtgtgaa

SEQ ID NO: 22867 - RNA, 19 nt, synthetic construct
  misc_feature 1..19: note = siRNA antisense sequence
  source 1..19: mol_type = other RNA
ttcacactgtccaccagcc

SEQ ID NO: 22868 - RNA, 19 nt, synthetic construct
  misc_feature 1..19: note = siRNA sense sequence
  source 1..19: mol_type = other RNA
agaatgcaggcaccgttag

SEQ ID NO: 22869 - RNA, 19 nt, synthetic construct
  misc_feature 1..19: note = siRNA antisense sequence
  source 1..19: mol_type = other RNA
ctaacggtgcctgcattct

SEQ ID NO: 22870 - RNA, 19 nt, synthetic construct
  misc_feature 1..19: note = siRNA sense sequence
  source 1..19: mol_type = other RNA
gaatgcaggcaccgttagg

SEQ ID NO: 22871 - RNA, 19 nt, synthetic construct
  misc_feature 1..19: note = siRNA antisense sequence
  source 1..19: mol_type = other RNA
cctaacggtgcctgcattc

SEQ ID NO: 22872 - RNA, 19 nt, synthetic construct
  misc_feature 1..19: note = siRNA sense sequence
  source 1..19: mol_type = other RNA
aatgcaggcaccgttagga

SEQ ID NO: 22873 - RNA, 19 nt, synthetic construct
  misc_feature 1..19: note = siRNA antisense sequence
  source 1..19: mol_type = other RNA
tcctaacggtgcctgcatt

SEQ ID NO: 22874 - RNA, 19 nt, synthetic construct
  misc_feature 1..19: note = siRNA sense sequence
  source 1..19: mol_type = other RNA
atgcaggcaccgttaggat

SEQ ID NO: 22875 - RNA, 19 nt, synthetic construct
  misc_feature 1..19: note = siRNA antisense sequence
  source 1..19: mol_type = other RNA
atcctaacggtgcctgcat

SEQ ID NO: 22876 - RNA, 19 nt, synthetic construct
  misc_feature 1..19: note = siRNA sense sequence
  source 1..19: mol_type = other RNA
gcaggcaccgttaggatat

SEQ ID NO: 22877 - RNA, 19 nt, synthetic construct
  misc_feature 1..19: note = siRNA antisense sequence
  source 1..19: mol_type = other RNA
atatcctaacggtgcctgc

SEQ ID NO: 22878 - RNA, 19 nt, synthetic construct
  misc_feature 1..19: note = siRNA sense sequence
  source 1..19: mol_type = other RNA
caggcaccgttaggatatt

SEQ ID NO: 22879 - RNA, 19 nt, synthetic construct
  misc_feature 1..19: note = siRNA antisense sequence
  source 1..19: mol_type = other RNA
aatatcctaacggtgcctg

SEQ ID NO: 22880 - RNA, 19 nt, synthetic construct
  misc_feature 1..19: note = siRNA sense sequence
  source 1..19: mol_type = other RNA
aggcaccgttaggatattc

SEQ ID NO: 22881 - RNA, 19 nt, synthetic construct
  misc_feature 1..19: note = siRNA antisense sequence
  source 1..19: mol_type = other RNA
gaatatcctaacggtgcct

SEQ ID NO: 22882 - RNA, 19 nt, synthetic construct
  misc_feature 1..19: note = siRNA sense sequence
  source 1..19: mol_type = other RNA
ggcaccgttaggatattct

SEQ ID NO: 22883 - RNA, 19 nt, synthetic construct
  misc_feature 1..19: note = siRNA antisense sequence
  source 1..19: mol_type = other RNA
agaatatcctaacggtgcc

SEQ ID NO: 22884 - RNA, 19 nt, synthetic construct
  misc_feature 1..19: note = siRNA sense sequence
  source 1..19: mol_type = other RNA
gcaccgttaggatattctc

SEQ ID NO: 22885 - RNA, 19 nt, synthetic construct
  misc_feature 1..19: note = siRNA antisense sequence
  source 1..19: mol_type = other RNA
gagaatatcctaacggtgc

SEQ ID NO: 22886 - RNA, 19 nt, synthetic construct
  misc_feature 1..19: note = siRNA sense sequence
  source 1..19: mol_type = other RNA
caccgttaggatattctct

SEQ ID NO: 22887 - RNA, 19 nt, synthetic construct
  misc_feature 1..19: note = siRNA antisense sequence
  source 1..19: mol_type = other RNA
agagaatatcctaacggtg

SEQ ID NO: 22888 - RNA, 19 nt, synthetic construct
  misc_feature 1..19: note = siRNA sense sequence
  source 1..19: mol_type = other RNA
accgttaggatattctcta

SEQ ID NO: 22889 - RNA, 19 nt, synthetic construct
  misc_feature 1..19: note = siRNA antisense sequence
  source 1..19: mol_type = other RNA
tagagaatatcctaacggt

SEQ ID NO: 22890 - RNA, 19 nt, synthetic construct
  misc_feature 1..19: note = siRNA sense sequence
  source 1..19: mol_type = other RNA
ccgttaggatattctctag

SEQ ID NO: 22891 - RNA, 19 nt, synthetic construct
  misc_feature 1..19: note = siRNA antisense sequence
  source 1..19: mol_type = other RNA
ctagagaatatcctaacgg

SEQ ID NO: 22892 - RNA, 19 nt, synthetic construct
  misc_feature 1..19: note = siRNA sense sequence
  source 1..19: mol_type = other RNA
taggatattctctagtctt

SEQ ID NO: 22893 - RNA, 19 nt, synthetic construct
  misc_feature 1..19: note = siRNA antisense sequence
  source 1..19: mol_type = other RNA
aagactagagaatatccta

SEQ ID NO: 22894 - RNA, 19 nt, synthetic construct
  misc_feature 1..19: note = siRNA sense sequence
  source 1..19: mol_type = other RNA
aggatattctctagtcttc

SEQ ID NO: 22895 - RNA, 19 nt, synthetic construct
  misc_feature 1..19: note = siRNA antisense sequence
  source 1..19: mol_type = other RNA
gaagactagagaatatcct

SEQ ID NO: 22896 - RNA, 19 nt, synthetic construct
  misc_feature 1..19: note = siRNA sense sequence
  source 1..19: mol_type = other RNA
tattctctagtcttcacgt

SEQ ID NO: 22897 - RNA, 19 nt, synthetic construct
  misc_feature 1..19: note = siRNA antisense sequence
  source 1..19: mol_type = other RNA
acgtgaagactagagaata

SEQ ID NO: 22898 - RNA, 19 nt, synthetic construct
  misc_feature 1..19: note = siRNA sense sequence
  source 1..19: mol_type = other RNA
attctctagtcttcacgtt

SEQ ID NO: 22899 - RNA, 19 nt, synthetic construct
  misc_feature 1..19: note = siRNA antisense sequence
  source 1..19: mol_type = other RNA
aacgtgaagactagagaat

SEQ ID NO: 22900 - RNA, 19 nt, synthetic construct
  misc_feature 1..19: note = siRNA sense sequence
  source 1..19: mol_type = other RNA
ttctctagtcttcacgttt

SEQ ID NO: 22901 - RNA, 19 nt, synthetic construct
  misc_feature 1..19: note = siRNA antisense sequence
  source 1..19: mol_type = other RNA
aaacgtgaagactagagaa

SEQ ID NO: 22902 - RNA, 19 nt, synthetic construct
  misc_feature 1..19: note = siRNA sense sequence
  source 1..19: mol_type = other RNA
tctctagtcttcacgtttc

SEQ ID NO: 22903 - RNA, 19 nt, synthetic construct
  misc_feature 1..19: note = siRNA antisense sequence
  source 1..19: mol_type = other RNA
gaaacgtgaagactagaga

SEQ ID NO: 22904 - RNA, 19 nt, synthetic construct
  misc_feature 1..19: note = siRNA sense sequence
  source 1..19: mol_type = other RNA
ctctagtcttcacgtttct

SEQ ID NO: 22905 - RNA, 19 nt, synthetic construct
  misc_feature 1..19: note = siRNA antisense sequence
  source 1..19: mol_type = other RNA
agaaacgtgaagactagag

SEQ ID NO: 22906 - RNA, 19 nt, synthetic construct
  misc_feature 1..19: note = siRNA sense sequence
  source 1..19: mol_type = other RNA
tctagtcttcacgtttctg

SEQ ID NO: 22907 - RNA, 19 nt, synthetic construct
  misc_feature 1..19: note = siRNA antisense sequence
  source 1..19: mol_type = other RNA
cagaaacgtgaagactaga

SEQ ID NO: 22908 - RNA, 19 nt, synthetic construct
  misc_feature 1..19: note = siRNA sense sequence
  source 1..19: mol_type = other RNA
ctagtcttcacgtttctgg

SEQ ID NO: 22909 - RNA, 19 nt, synthetic construct
  misc_feature 1..19: note = siRNA antisense sequence
  source 1..19: mol_type = other RNA
ccagaaacgtgaagactag

SEQ ID NO: 22910 - RNA, 19 nt, synthetic construct
  misc_feature 1..19: note = siRNA sense sequence
  source 1..19: mol_type = other RNA
tagtcttcacgtttctggg

SEQ ID NO: 22911 - RNA, 19 nt, synthetic construct
  misc_feature 1..19: note = siRNA antisense sequence
  source 1..19: mol_type = other RNA
cccagaaacgtgaagacta

SEQ ID NO: 22912 - RNA, 19 nt, synthetic construct
  misc_feature 1..19: note = siRNA sense sequence
  source 1..19: mol_type = other RNA
acagctcagccagttgact

SEQ ID NO: 22913 - RNA, 19 nt, synthetic construct
  misc_feature 1..19: note = siRNA antisense sequence
  source 1..19: mol_type = other RNA
agtcaactggctgagctgt

SEQ ID NO: 22914 - RNA, 19 nt, synthetic construct
  misc_feature 1..19: note = siRNA sense sequence
  source 1..19: mol_type = other RNA
cagctcagccagttgactg

SEQ ID NO: 22915 - RNA, 19 nt, synthetic construct
  misc_feature 1..19: note = siRNA antisense sequence
  source 1..19: mol_type = other RNA
cagtcaactggctgagctg

SEQ ID NO: 22916 - RNA, 19 nt, synthetic construct
  misc_feature 1..19: note = siRNA sense sequence
  source 1..19: mol_type = other RNA
tagctgccattctccgctt

SEQ ID NO: 22917 - RNA, 19 nt, synthetic construct
  misc_feature 1..19: note = siRNA antisense sequence
  source 1..19: mol_type = other RNA
aagcggagaatggcagcta

SEQ ID NO: 22918 - RNA, 19 nt, synthetic construct
  misc_feature 1..19: note = siRNA sense sequence
  source 1..19: mol_type = other RNA
agctgccattctccgcttc

SEQ ID NO: 22919 - RNA, 19 nt, synthetic construct
  misc_feature 1..19: note = siRNA antisense sequence
  source 1..19: mol_type = other RNA
gaagcggagaatggcagct

SEQ ID NO: 22920 - RNA, 19 nt, synthetic construct
  misc_feature 1..19: note = siRNA sense sequence
  source 1..19: mol_type = other RNA
gctgccattctccgcttcc

SEQ ID NO: 22921 - RNA, 19 nt, synthetic construct
  misc_feature 1..19: note = siRNA antisense sequence
  source 1..19: mol_type = other RNA
ggaagcggagaatggcagc

SEQ ID NO: 22922 - RNA, 19 nt, synthetic construct
  misc_feature 1..19: note = siRNA sense sequence
  source 1..19: mol_type = other RNA
ctgccattctccgcttccc

SEQ ID NO: 22923 - RNA, 19 nt, synthetic construct
  misc_feature 1..19: note = siRNA antisense sequence
  source 1..19: mol_type = other RNA
gggaagcggagaatggcag

SEQ ID NO: 22924 - RNA, 19 nt, synthetic construct
  misc_feature 1..19: note = siRNA sense sequence
  source 1..19: mol_type = other RNA
tgccattctccgcttccct

SEQ ID NO: 22925 - RNA, 19 nt, synthetic construct
  misc_feature 1..19: note = siRNA antisense sequence
  source 1..19: mol_type = other RNA
agggaagcggagaatggca

SEQ ID NO: 22926 - RNA, 19 nt, synthetic construct
  misc_feature 1..19: note = siRNA sense sequence
  source 1..19: mol_type = other RNA
gccattctccgcttccctg

SEQ ID NO: 22927 - RNA, 19 nt, synthetic construct
  misc_feature 1..19: note = siRNA antisense sequence
  source 1..19: mol_type = other RNA
cagggaagcggagaatggc

SEQ ID NO: 22928 - RNA, 19 nt, synthetic construct
  misc_feature 1..19: note = siRNA sense sequence
  source 1..19: mol_type = other RNA
ccattctccgcttccctgt

SEQ ID NO: 22929 - RNA, 19 nt, synthetic construct
  misc_feature 1..19: note = siRNA antisense sequence
  source 1..19: mol_type = other RNA
acagggaagcggagaatgg

SEQ ID NO: 22930 - RNA, 19 nt, synthetic construct
  misc_feature 1..19: note = siRNA sense sequence
  source 1..19: mol_type = other RNA
cattctccgcttccctgtt

SEQ ID NO: 22931 - RNA, 19 nt, synthetic construct
  misc_feature 1..19: note = siRNA antisense sequence
  source 1..19: mol_type = other RNA
aacagggaagcggagaatg

SEQ ID NO: 22932 - RNA, 19 nt, synthetic construct
  misc_feature 1..19: note = siRNA sense sequence
  source 1..19: mol_type = other RNA
attctccgcttccctgttc

SEQ ID NO: 22933 - RNA, 19 nt, synthetic construct
  misc_feature 1..19: note = siRNA antisense sequence
  source 1..19: mol_type = other RNA
gaacagggaagcggagaat

SEQ ID NO: 22934 - RNA, 19 nt, synthetic construct
  misc_feature 1..19: note = siRNA sense sequence
  source 1..19: mol_type = other RNA
ttctccgcttccctgttcc

SEQ ID NO: 22935 - RNA, 19 nt, synthetic construct
  misc_feature 1..19: note = siRNA antisense sequence
  source 1..19: mol_type = other RNA
ggaacagggaagcggagaa

SEQ ID NO: 22936 - RNA, 19 nt, synthetic construct
  misc_feature 1..19: note = siRNA sense sequence
  source 1..19: mol_type = other RNA
aactttctgaccaagaggg

SEQ ID NO: 22937 - RNA, 19 nt, synthetic construct
  misc_feature 1..19: note = siRNA antisense sequence
  source 1..19: mol_type = other RNA
ccctcttggtcagaaagtt

SEQ ID NO: 22938 - RNA, 19 nt, synthetic construct
  misc_feature 1..19: note = siRNA sense sequence
  source 1..19: mol_type = other RNA
actttctgaccaagagggt

SEQ ID NO: 22939 - RNA, 19 nt, synthetic construct
  misc_feature 1..19: note = siRNA antisense sequence
  source 1..19: mol_type = other RNA
accctcttggtcagaaagt

SEQ ID NO: 22940 - RNA, 19 nt, synthetic construct
  misc_feature 1..19: note = siRNA sense sequence
  source 1..19: mol_type = other RNA
tctgaccaagagggtgatt

SEQ ID NO: 22941 - RNA, 19 nt, synthetic construct
  misc_feature 1..19: note = siRNA antisense sequence
  source 1..19: mol_type = other RNA
aatcaccctcttggtcaga

SEQ ID NO: 22942 - RNA, 19 nt, synthetic construct
  misc_feature 1..19: note = siRNA sense sequence
  source 1..19: mol_type = other RNA
accaagagggtgattccag

SEQ ID NO: 22943 - RNA, 19 nt, synthetic construct
  misc_feature 1..19: note = siRNA antisense sequence
  source 1..19: mol_type = other RNA
ctggaatcaccctcttggt

SEQ ID NO: 22944 - RNA, 19 nt, synthetic construct
  misc_feature 1..19: note = siRNA sense sequence
  source 1..19: mol_type = other RNA
ccaagagggtgattccagt

SEQ ID NO: 22945 - RNA, 19 nt, synthetic construct
  misc_feature 1..19: note = siRNA antisense sequence
  source 1..19: mol_type = other RNA
actggaatcaccctcttgg

SEQ ID NO: 22946 - RNA, 19 nt, synthetic construct
  misc_feature 1..19: note = siRNA sense sequence
  source 1..19: mol_type = other RNA
caagagggtgattccagtt

SEQ ID NO: 22947 - RNA, 19 nt, synthetic construct
  misc_feature 1..19: note = siRNA antisense sequence
  source 1..19: mol_type = other RNA
aactggaatcaccctcttg

SEQ ID NO: 22948 - RNA, 19 nt, synthetic construct
  misc_feature 1..19: note = siRNA sense sequence
  source 1..19: mol_type = other RNA
aagagggtgattccagttc

SEQ ID NO: 22949 - RNA, 19 nt, synthetic construct
  misc_feature 1..19: note = siRNA antisense sequence
  source 1..19: mol_type = other RNA
gaactggaatcaccctctt

SEQ ID NO: 22950 - RNA, 19 nt, synthetic construct
  misc_feature 1..19: note = siRNA sense sequence
  source 1..19: mol_type = other RNA
agagggtgattccagttct

SEQ ID NO: 22951 - RNA, 19 nt, synthetic construct
  misc_feature 1..19: note = siRNA antisense sequence
  source 1..19: mol_type = other RNA
agaactggaatcaccctct

SEQ ID NO: 22952 - RNA, 19 nt, synthetic construct
  misc_feature 1..19: note = siRNA sense sequence
  source 1..19: mol_type = other RNA
gagggtgattccagttctg

SEQ ID NO: 22953 - RNA, 19 nt, synthetic construct
  misc_feature 1..19: note = siRNA antisense sequence
  source 1..19: mol_type = other RNA
cagaactggaatcaccctc

SEQ ID NO: 22954 - RNA, 19 nt, synthetic construct
  misc_feature 1..19: note = siRNA sense sequence
  source 1..19: mol_type = other RNA
agggtgattccagttctga

SEQ ID NO: 22955 - RNA, 19 nt, synthetic construct
  misc_feature 1..19: note = siRNA antisense sequence
  source 1..19: mol_type = other RNA
tcagaactggaatcaccct

SEQ ID NO: 22956 - RNA, 19 nt, synthetic construct
  misc_feature 1..19: note = siRNA sense sequence
  source 1..19: mol_type = other RNA
ggtgattccagttctgaag

SEQ ID NO: 22957 - RNA, 19 nt, synthetic construct
  misc_feature 1..19: note = siRNA antisense sequence
  source 1..19: mol_type = other RNA
cttcagaactggaatcacc

SEQ ID NO: 22958 - RNA, 19 nt, synthetic construct
  misc_feature 1..19: note = siRNA sense sequence
  source 1..19: mol_type = other RNA
gtgattccagttctgaaga

SEQ ID NO: 22959 - RNA, 19 nt, synthetic construct
  misc_feature 1..19: note = siRNA antisense sequence
  source 1..19: mol_type = other RNA
tcttcagaactggaatcac

SEQ ID NO: 22960 - RNA, 19 nt, synthetic construct
  misc_feature 1..19: note = siRNA sense sequence
  source 1..19: mol_type = other RNA
gattccagttctgaagagg

SEQ ID NO: 22961 - RNA, 19 nt, synthetic construct
  misc_feature 1..19: note = siRNA antisense sequence
  source 1..19: mol_type = other RNA
cctcttcagaactggaatc

SEQ ID NO: 22962 - RNA, 19 nt, synthetic construct
  misc_feature 1..19: note = siRNA sense sequence
  source 1..19: mol_type = other RNA
attccagttctgaagagga

SEQ ID NO: 22963 - RNA, 19 nt, synthetic construct
  misc_feature 1..19: note = siRNA antisense sequence
  source 1..19: mol_type = other RNA
tcctcttcagaactggaat

SEQ ID NO: 22964 - RNA, 19 nt, synthetic construct
  misc_feature 1..19: note = siRNA sense sequence
  source 1..19: mol_type = other RNA
ccagttctgaagaggatta

SEQ ID NO: 22965 - RNA, 19 nt, synthetic construct
  misc_feature 1..19: note = siRNA antisense sequence
  source 1..19: mol_type = other RNA
taatcctcttcagaactgg

SEQ ID NO: 22966 - RNA, 19 nt, synthetic construct
  misc_feature 1..19: note = siRNA sense sequence
  source 1..19: mol_type = other RNA
cagttctgaagaggattaa

SEQ ID NO: 22967 - RNA, 19 nt, synthetic construct
  misc_feature 1..19: note = siRNA antisense sequence
  source 1..19: mol_type = other RNA
ttaatcctcttcagaactg

SEQ ID NO: 22968 - RNA, 19 nt, synthetic construct
  misc_feature 1..19: note = siRNA sense sequence
  source 1..19: mol_type = other RNA
agttctgaagaggattaat

SEQ ID NO: 22969 - RNA, 19 nt, synthetic construct
  misc_feature 1..19: note = siRNA antisense sequence
  source 1..19: mol_type = other RNA
attaatcctcttcagaact

SEQ ID NO: 22970 - RNA, 19 nt, synthetic construct
  misc_feature 1..19: note = siRNA sense sequence
  source 1..19: mol_type = other RNA
gttctgaagaggattaatg

SEQ ID NO: 22971 - RNA, 19 nt, synthetic construct
  misc_feature 1..19: note = siRNA antisense sequence
  source 1..19: mol_type = other RNA
cattaatcctcttcagaac

SEQ ID NO: 22972 - RNA, 19 nt, synthetic construct
  misc_feature 1..19: note = siRNA sense sequence
  source 1..19: mol_type = other RNA
ttctgaagaggattaatga

SEQ ID NO: 22973 - RNA, 19 nt, synthetic construct
  misc_feature 1..19: note = siRNA antisense sequence
  source 1..19: mol_type = other RNA
tcattaatcctcttcagaa

SEQ ID NO: 22974 - RNA, 19 nt, synthetic construct
  misc_feature 1..19: note = siRNA sense sequence
  source 1..19: mol_type = other RNA
tctgaagaggattaatgat

SEQ ID NO: 22975 - RNA, 19 nt, synthetic construct
  misc_feature 1..19: note = siRNA antisense sequence
  source 1..19: mol_type = other RNA
atcattaatcctcttcaga

SEQ ID NO: 22976 - RNA, 19 nt, synthetic construct
  misc_feature 1..19: note = siRNA sense sequence
  source 1..19: mol_type = other RNA
ctgaagaggattaatgatt

SEQ ID NO: 22977 - RNA, 19 nt, synthetic construct
  misc_feature 1..19: note = siRNA antisense sequence
  source 1..19: mol_type = other RNA
aatcattaatcctcttcag

SEQ ID NO: 22978 - RNA, 19 nt, synthetic construct
  misc_feature 1..19: note = siRNA sense sequence
  source 1..19: mol_type = other RNA
tgaagaggattaatgattg

SEQ ID NO: 22979 - RNA, 19 nt, synthetic construct
  misc_feature 1..19: note = siRNA antisense sequence
  source 1..19: mol_type = other RNA
caatcattaatcctcttca

SEQ ID NO: 22980 - RNA, 19 nt, synthetic construct
  misc_feature 1..19: note = siRNA sense sequence
  source 1..19: mol_type = other RNA
gaagaggattaatgattga

SEQ ID NO: 22981 - RNA, 19 nt, synthetic construct
  misc_feature 1..19: note = siRNA antisense sequence
  source 1..19: mol_type = other RNA
tcaatcattaatcctcttc

SEQ ID NO: 22982 - RNA, 19 nt, synthetic construct
  misc_feature 1..19: note = siRNA sense sequence
  source 1..19: mol_type = other RNA
caatcttgtgtttcctaaa

SEQ ID NO: 22983 - RNA, 19 nt, synthetic construct
  misc_feature 1..19: note = siRNA antisense sequence
  source 1..19: mol_type = other RNA
tttaggaaacacaagattg

SEQ ID NO: 22984 - RNA, 19 nt, synthetic construct
  misc_feature 1..19: note = siRNA sense sequence
  source 1..19: mol_type = other RNA
agtacatttctcagcatcc

SEQ ID NO: 22985 - RNA, 19 nt, synthetic construct
  misc_feature 1..19: note = siRNA antisense sequence
  source 1..19: mol_type = other RNA
ggatgctgagaaatgtact

SEQ ID NO: 22986 - RNA, 19 nt, synthetic construct
  misc_feature 1..19: note = siRNA sense sequence
  source 1..19: mol_type = other RNA
acatttctcagcatccttg

SEQ ID NO: 22987 - RNA, 19 nt, synthetic construct
  misc_feature 1..19: note = siRNA antisense sequence
  source 1..19: mol_type = other RNA
caaggatgctgagaaatgt

SEQ ID NO: 22988 - RNA, 19 nt, synthetic construct
  misc_feature 1..19: note = siRNA sense sequence
  source 1..19: mol_type = other RNA
ctcagcatccttgtgacag

SEQ ID NO: 22989 - RNA, 19 nt, synthetic construct
  misc_feature 1..19: note = siRNA antisense sequence
  source 1..19: mol_type = other RNA
ctgtcacaaggatgctgag

SEQ ID NO: 22990 - RNA, 19 nt, synthetic construct
  misc_feature 1..19: note = siRNA sense sequence
  source 1..19: mol_type = other RNA
tcagcatccttgtgacaga

SEQ ID NO: 22991 - RNA, 19 nt, synthetic construct
  misc_feature 1..19: note = siRNA antisense sequence
  source 1..19: mol_type = other RNA
tctgtcacaaggatgctga

SEQ ID NO: 22992 - RNA, 19 nt, synthetic construct
  misc_feature 1..19: note = siRNA sense sequence
  source 1..19: mol_type = other RNA
tgattcatacagggatttc

SEQ ID NO: 22993 - RNA, 19 nt, synthetic construct
  misc_feature 1..19: note = siRNA antisense sequence
  source 1..19: mol_type = other RNA
gaaatccctgtatgaatca

SEQ ID NO: 22994 - RNA, 19 nt, synthetic construct
  misc_feature 1..19: note = siRNA sense sequence
  source 1..19: mol_type = other RNA
gattcatacagggatttct

SEQ ID NO: 22995 - RNA, 19 nt, synthetic construct
  misc_feature 1..19: note = siRNA antisense sequence
  source 1..19: mol_type = other RNA
agaaatccctgtatgaatc

SEQ ID NO: 22996 - RNA, 19 nt, synthetic construct
  misc_feature 1..19: note = siRNA sense sequence
  source 1..19: mol_type = other RNA
attcatacagggatttctt

SEQ ID NO: 22997 - RNA, 19 nt, synthetic construct
  misc_feature 1..19: note = siRNA antisense sequence
  source 1..19: mol_type = other RNA
aagaaatccctgtatgaat

SEQ ID NO: 22998 - RNA, 19 nt, synthetic construct
  misc_feature 1..19: note = siRNA sense sequence
  source 1..19: mol_type = other RNA
ttcatacagggatttctta

SEQ ID NO: 22999 - RNA, 19 nt, synthetic construct
  misc_feature 1..19: note = siRNA antisense sequence
  source 1..19: mol_type = other RNA
taagaaatccctgtatgaa

SEQ ID NO: 23000 - RNA, 19 nt, synthetic construct
  misc_feature 1..19: note = siRNA sense sequence
  source 1..19: mol_type = other RNA
tcatacagggatttcttat

SEQ ID NO: 23001 - RNA, 19 nt, synthetic construct
  misc_feature 1..19: note = siRNA antisense sequence
  source 1..19: mol_type = other RNA
ataagaaatccctgtatga

SEQ ID NO: 23002 - RNA, 19 nt, synthetic construct
  misc_feature 1..19: note = siRNA sense sequence
  source 1..19: mol_type = other RNA
tacagggatttcttatgtc

SEQ ID NO: 23003 - RNA, 19 nt, synthetic construct
  misc_feature 1..19: note = siRNA antisense sequence
  source 1..19: mol_type = other RNA
gacataagaaatccctgta

SEQ ID NO: 23004 - RNA, 19 nt, synthetic construct
  misc_feature 1..19: note = siRNA sense sequence
  source 1..19: mol_type = other RNA
tttcttatgtctttggcta

SEQ ID NO: 23005 - RNA, 19 nt, synthetic construct
  misc_feature 1..19: note = siRNA antisense sequence
  source 1..19: mol_type = other RNA
tagccaaagacataagaaa

SEQ ID NO: 23006 - RNA, 19 nt, synthetic construct
  misc_feature 1..19: note = siRNA sense sequence
  source 1..19: mol_type = other RNA
tcttatgtctttggctaca

SEQ ID NO: 23007 - RNA, 19 nt, synthetic construct
  misc_feature 1..19: note = siRNA antisense sequence
  source 1..19: mol_type = other RNA
tgtagccaaagacataaga

SEQ ID NO: 23008 - RNA, 19 nt, synthetic construct
  misc_feature 1..19: note = siRNA sense sequence
  source 1..19: mol_type = other RNA
cttatgtctttggctacac

SEQ ID NO: 23009 - RNA, 19 nt, synthetic construct
  misc_feature 1..19: note = siRNA antisense sequence
  source 1..19: mol_type = other RNA
gtgtagccaaagacataag

SEQ ID NO: 23010 - RNA, 19 nt, synthetic construct
  misc_feature 1..19: note = siRNA sense sequence
  source 1..19: mol_type = other RNA
tatgtctttggctacacta

SEQ ID NO: 23011 - RNA, 19 nt, synthetic construct
  misc_feature 1..19: note = siRNA antisense sequence
  source 1..19: mol_type = other RNA
tagtgtagccaaagacata

SEQ ID NO: 23012 - RNA, 19 nt, synthetic construct
  misc_feature 1..19: note = siRNA sense sequence
  source 1..19: mol_type = other RNA
atgtctttggctacactag

SEQ ID NO: 23013 - RNA, 19 nt, synthetic construct
  misc_feature 1..19: note = siRNA antisense sequence
  source 1..19: mol_type = other RNA
ctagtgtagccaaagacat

SEQ ID NO: 23014 - RNA, 19 nt, synthetic construct
  misc_feature 1..19: note = siRNA sense sequence
  source 1..19: mol_type = other RNA
aaataatctccacgtacta

SEQ ID NO: 23015 - RNA, 19 nt, synthetic construct
  misc_feature 1..19: note = siRNA antisense sequence
  source 1..19: mol_type = other RNA
tagtacgtggagattattt

SEQ ID NO: 23016 - RNA, 19 nt, synthetic construct
  misc_feature 1..19: note = siRNA sense sequence
  source 1..19: mol_type = other RNA
aataatctccacgtactac

SEQ ID NO: 23017 - RNA, 19 nt, synthetic construct
  misc_feature 1..19: note = siRNA antisense sequence
  source 1..19: mol_type = other RNA
gtagtacgtggagattatt

SEQ ID NO: 23018 - RNA, 19 nt, synthetic construct
  misc_feature 1..19: note = siRNA sense sequence
  source 1..19: mol_type = other RNA
ataatctccacgtactacc

SEQ ID NO: 23019 - RNA, 19 nt, synthetic construct
  misc_feature 1..19: note = siRNA antisense sequence
  source 1..19: mol_type = other RNA
ggtagtacgtggagattat

SEQ ID NO: 23020 - RNA, 19 nt, synthetic construct
  misc_feature 1..19: note = siRNA sense sequence
  source 1..19: mol_type = other RNA
taatctccacgtactacca

SEQ ID NO: 23021 - RNA, 19 nt, synthetic construct
  misc_feature 1..19: note = siRNA antisense sequence
  source 1..19: mol_type = other RNA
tggtagtacgtggagatta

SEQ ID NO: 23022 - RNA, 19 nt, synthetic construct
  misc_feature 1..19: note = siRNA sense sequence
  source 1..19: mol_type = other RNA
aatctccacgtactaccat

SEQ ID NO: 23023 - RNA, 19 nt, synthetic construct
  misc_feature 1..19: note = siRNA antisense sequence
  source 1..19: mol_type = other RNA
atggtagtacgtggagatt

SEQ ID NO: 23024 - RNA, 19 nt, synthetic construct
  misc_feature 1..19: note = siRNA sense sequence
  source 1..19: mol_type = other RNA
atctccacgtactaccatc

SEQ ID NO: 23025 - RNA, 19 nt, synthetic construct
  misc_feature 1..19: note = siRNA antisense sequence
  source 1..19: mol_type = other RNA
gatggtagtacgtggagat

SEQ ID NO: 23026 - RNA, 19 nt, synthetic construct
  misc_feature 1..19: note = siRNA sense sequence
  source 1..19: mol_type = other RNA
tctccacgtactaccatct

SEQ ID NO: 23027 - RNA, 19 nt, synthetic construct
  misc_feature 1..19: note = siRNA antisense sequence
  source 1..19: mol_type = other RNA
agatggtagtacgtggaga

SEQ ID NO: 23028 - RNA, 19 nt, synthetic construct
  misc_feature 1..19: note = siRNA sense sequence
  source 1..19: mol_type = other RNA
ctccacgtactaccatctt

SEQ ID NO: 23029 - RNA, 19 nt, synthetic construct
  misc_feature 1..19: note = siRNA antisense sequence
  source 1..19: mol_type = other RNA
aagatggtagtacgtggag

SEQ ID NO: 23030 - RNA, 19 nt, synthetic construct
  misc_feature 1..19: note = siRNA sense sequence
  source 1..19: mol_type = other RNA
tccacgtactaccatcttg

SEQ ID NO: 23031 - RNA, 19 nt, synthetic construct
  misc_feature 1..19: note = siRNA antisense sequence
  source 1..19: mol_type = other RNA
caagatggtagtacgtgga

SEQ ID NO: 23032 - RNA, 19 nt, synthetic construct
  misc_feature 1..19: note = siRNA sense sequence
  source 1..19: mol_type = other RNA
ccacgtactaccatcttga

SEQ ID NO: 23033 - RNA, 19 nt, synthetic construct
  misc_feature 1..19: note = siRNA antisense sequence
  source 1..19: mol_type = other RNA
tcaagatggtagtacgtgg

SEQ ID NO: 23034 - RNA, 19 nt, synthetic construct
  misc_feature 1..19: note = siRNA sense sequence
  source 1..19: mol_type = other RNA
cacgtactaccatcttgat

SEQ ID NO: 23035 - RNA, 19 nt, synthetic construct
  misc_feature 1..19: note = siRNA antisense sequence
  source 1..19: mol_type = other RNA
atcaagatggtagtacgtg

SEQ ID NO: 23036 - RNA, 19 nt, synthetic construct
  misc_feature 1..19: note = siRNA sense sequence
  source 1..19: mol_type = other RNA
acgtactaccatcttgatt

SEQ ID NO: 23037 - RNA, 19 nt, synthetic construct
  misc_feature 1..19: note = siRNA antisense sequence
  source 1..19: mol_type = other RNA
aatcaagatggtagtacgt

SEQ ID NO: 23038 - RNA, 19 nt, synthetic construct
  misc_feature 1..19: note = siRNA sense sequence
  source 1..19: mol_type = other RNA
cgtactaccatcttgatta

SEQ ID NO: 23039 - RNA, 19 nt, synthetic construct
  misc_feature 1..19: note = siRNA antisense sequence
  source 1..19: mol_type = other RNA
taatcaagatggtagtacg

SEQ ID NO: 23040 - RNA, 19 nt, synthetic construct
  misc_feature 1..19: note = siRNA sense sequence
  source 1..19: mol_type = other RNA
gtactaccatcttgattaa

SEQ ID NO: 23041 - RNA, 19 nt, synthetic construct
  misc_feature 1..19: note = siRNA antisense sequence
  source 1..19: mol_type = other RNA
ttaatcaagatggtagtac

SEQ ID NO: 23042 - RNA, 19 nt, synthetic construct
  misc_feature 1..19: note = siRNA sense sequence
  source 1..19: mol_type = other RNA
ccatcttgattaaattgtg

SEQ ID NO: 23043 - RNA, 19 nt, synthetic construct
  misc_feature 1..19: note = siRNA antisense sequence
  source 1..19: mol_type = other RNA
cacaatttaatcaagatgg

SEQ ID NO: 23044 - RNA, 19 nt, synthetic construct
  misc_feature 1..19: note = siRNA sense sequence
  source 1..19: mol_type = other RNA
aggaattatgagttatctg

SEQ ID NO: 23045 - RNA, 19 nt, synthetic construct
  misc_feature 1..19: note = siRNA antisense sequence
  source 1..19: mol_type = other RNA
cagataactcataattcct

SEQ ID NO: 23046 - RNA, 19 nt, synthetic construct
  misc_feature 1..19: note = siRNA sense sequence
  source 1..19: mol_type = other RNA
ggaattatgagttatctgt

SEQ ID NO: 23047 - RNA, 19 nt, synthetic construct
  misc_feature 1..19: note = siRNA antisense sequence
  source 1..19: mol_type = other RNA
acagataactcataattcc

SEQ ID NO: 23048 - RNA, 19 nt, synthetic construct
  misc_feature 1..19: note = siRNA sense sequence
  source 1..19: mol_type = other RNA
tatgagttatctgtagtac

SEQ ID NO: 23049 - RNA, 19 nt, synthetic construct
  misc_feature 1..19: note = siRNA antisense sequence
  source 1..19: mol_type = other RNA
gtactacagataactcata

SEQ ID NO: 23050 - RNA, 19 nt, synthetic construct
  misc_feature 1..19: note = siRNA sense sequence
  source 1..19: mol_type = other RNA
atgagttatctgtagtact

SEQ ID NO: 23051 - RNA, 19 nt, synthetic construct
  misc_feature 1..19: note = siRNA antisense sequence
  source 1..19: mol_type = other RNA
agtactacagataactcat

SEQ ID NO: 23052 - RNA, 19 nt, synthetic construct
  misc_feature 1..19: note = siRNA sense sequence
  source 1..19: mol_type = other RNA
tgagttatctgtagtactt

SEQ ID NO: 23053 - RNA, 19 nt, synthetic construct
  misc_feature 1..19: note = siRNA antisense sequence
  source 1..19: mol_type = other RNA
aagtactacagataactca

SEQ ID NO: 23054 - RNA, 19 nt, synthetic construct
  misc_feature 1..19: note = siRNA sense sequence
  source 1..19: mol_type = other RNA
gagttatctgtagtacttg

SEQ ID NO: 23055 - RNA, 19 nt, synthetic construct
  misc_feature 1..19: note = siRNA antisense sequence
  source 1..19: mol_type = other RNA
caagtactacagataactc

SEQ ID NO: 23056 - RNA, 19 nt, synthetic construct
  misc_feature 1..19: note = siRNA sense sequence
  source 1..19: mol_type = other RNA
agttatctgtagtacttgg

SEQ ID NO: 23057 - RNA, 19 nt, synthetic construct
  misc_feature 1..19: note = siRNA antisense sequence
  source 1..19: mol_type = other RNA
ccaagtactacagataact

SEQ ID NO: 23058 - RNA, 19 nt, synthetic construct
  misc_feature 1..19: note = siRNA sense sequence
  source 1..19: mol_type = other RNA
gttatctgtagtacttgga

SEQ ID NO: 23059 - RNA, 19 nt, synthetic construct
  misc_feature 1..19: note = siRNA antisense sequence
  source 1..19: mol_type = other RNA
tccaagtactacagataac

SEQ ID NO: 23060 - RNA, 19 nt, synthetic construct
  misc_feature 1..19: note = siRNA sense sequence
  source 1..19: mol_type = other RNA
ttatctgtagtacttggaa

SEQ ID NO: 23061 - RNA, 19 nt, synthetic construct
  misc_feature 1..19: note = siRNA antisense sequence
  source 1..19: mol_type = other RNA
ttccaagtactacagataa

SEQ ID NO: 23062 - RNA, 19 nt, synthetic construct
  misc_feature 1..19: note = siRNA sense sequence
  source 1..19: mol_type = other RNA
atgtgtgtatttaaagacg

SEQ ID NO: 23063 - RNA, 19 nt, synthetic construct
  misc_feature 1..19: note = siRNA antisense sequence
  source 1..19: mol_type = other RNA
cgtctttaaatacacacat

SEQ ID NO: 23064 - RNA, 19 nt, synthetic construct
  misc_feature 1..19: note = siRNA sense sequence
  source 1..19: mol_type = other RNA
tgtgtgtatttaaagacga

SEQ ID NO: 23065 - RNA, 19 nt, synthetic construct
  misc_feature 1..19: note = siRNA antisense sequence
  source 1..19: mol_type = other RNA
tcgtctttaaatacacaca

SEQ ID NO: 23066 - RNA, 19 nt, synthetic construct
  misc_feature 1..19: note = siRNA sense sequence
  source 1..19: mol_type = other RNA
gtgtgtatttaaagacgat

SEQ ID NO: 23067 - RNA, 19 nt, synthetic construct
  misc_feature 1..19: note = siRNA antisense sequence
  source 1..19: mol_type = other RNA
atcgtctttaaatacacac

SEQ ID NO: 23068 - RNA, 19 nt, synthetic construct
  misc_feature 1..19: note = siRNA sense sequence
  source 1..19: mol_type = other RNA
tgtgtatttaaagacgatg

SEQ ID NO: 23069 - RNA, 19 nt, synthetic construct
  misc_feature 1..19: note = siRNA antisense sequence
  source 1..19: mol_type = other RNA
catcgtctttaaatacaca

SEQ ID NO: 23070 - RNA, 19 nt, synthetic construct
  misc_feature 1..19: note = siRNA sense sequence
  source 1..19: mol_type = other RNA
gtgtatttaaagacgatgc

SEQ ID NO: 23071 - RNA, 19 nt, synthetic construct
  misc_feature 1..19: note = siRNA antisense sequence
  source 1..19: mol_type = other RNA
gcatcgtctttaaatacac

SEQ ID NO: 23072 - RNA, 19 nt, synthetic construct
  misc_feature 1..19: note = siRNA sense sequence
  source 1..19: mol_type = other RNA
tgtatttaaagacgatgcc

SEQ ID NO: 23073 - RNA, 19 nt, synthetic construct
  misc_feature 1..19: note = siRNA antisense sequence
  source 1..19: mol_type = other RNA
ggcatcgtctttaaataca

SEQ ID NO: 23074 - RNA, 19 nt, synthetic construct
  misc_feature 1..19: note = siRNA sense sequence
  source 1..19: mol_type = other RNA
gtatttaaagacgatgcct

SEQ ID NO: 23075 - RNA, 19 nt, synthetic construct
  misc_feature 1..19: note = siRNA antisense sequence
  source 1..19: mol_type = other RNA
aggcatcgtctttaaatac

SEQ ID NO: 23076 - RNA, 19 nt, synthetic construct
  misc_feature 1..19: note = siRNA sense sequence
  source 1..19: mol_type = other RNA
tatttaaagacgatgccta

SEQ ID NO: 23077 - RNA, 19 nt, synthetic construct
  misc_feature 1..19: note = siRNA antisense sequence
  source 1..19: mol_type = other RNA
taggcatcgtctttaaata

SEQ ID NO: 23078 - RNA, 19 nt, synthetic construct
  misc_feature 1..19: note = siRNA sense sequence
  source 1..19: mol_type = other RNA
atttaaagacgatgcctat

SEQ ID NO: 23079 - RNA, 19 nt, synthetic construct
  misc_feature 1..19: note = siRNA antisense sequence
  source 1..19: mol_type = other RNA
ataggcatcgtctttaaat

SEQ ID NO: 23080 - RNA, 19 nt, synthetic construct
  misc_feature 1..19: note = siRNA sense sequence
  source 1..19: mol_type = other RNA
tttaaagacgatgcctatg

SEQ ID NO: 23081 - RNA, 19 nt, synthetic construct
  misc_feature 1..19: note = siRNA antisense sequence
  source 1..19: mol_type = other RNA
cataggcatcgtctttaaa

SEQ ID NO: 23082 - RNA, 19 nt, synthetic construct
  misc_feature 1..19: note = siRNA sense sequence
  source 1..19: mol_type = other RNA
ttaaagacgatgcctatgc

SEQ ID NO: 23083 - RNA, 19 nt, synthetic construct
  misc_feature 1..19: note = siRNA antisense sequence
  source 1..19: mol_type = other RNA
gcataggcatcgtctttaa

SEQ ID NO: 23084 - RNA, 19 nt, synthetic construct
  misc_feature 1..19: note = siRNA sense sequence
  source 1..19: mol_type = other RNA
acgatgcctatgcagtata

SEQ ID NO: 23085 - RNA, 19 nt, synthetic construct
  misc_feature 1..19: note = siRNA antisense sequence
  source 1..19: mol_type = other RNA
tatactgcataggcatcgt

SEQ ID NO: 23086 - RNA, 19 nt, synthetic construct
  misc_feature 1..19: note = siRNA sense sequence
  source 1..19: mol_type = other RNA
cgatgcctatgcagtatat

SEQ ID NO: 23087 - RNA, 19 nt, synthetic construct
  misc_feature 1..19: note = siRNA antisense sequence
  source 1..19: mol_type = other RNA
atatactgcataggcatcg

SEQ ID NO: 23088 - RNA, 19 nt, synthetic construct
  misc_feature 1..19: note = siRNA sense sequence
  source 1..19: mol_type = other RNA
gatgcctatgcagtatatt

SEQ ID NO: 23089 - RNA, 19 nt, synthetic construct
  misc_feature 1..19: note = siRNA antisense sequence
  source 1..19: mol_type = other RNA
aatatactgcataggcatc

SEQ ID NO: 23090 - RNA, 19 nt, synthetic construct
  misc_feature 1..19: note = siRNA sense sequence
  source 1..19: mol_type = other RNA
ctatgcagtatattgtttg

SEQ ID NO: 23091 - RNA, 19 nt, synthetic construct
  misc_feature 1..19: note = siRNA antisense sequence
  source 1..19: mol_type = other RNA
caaacaatatactgcatag

SEQ ID NO: 23092 - RNA, 19 nt, synthetic construct
  misc_feature 1..19: note = siRNA sense sequence
  source 1..19: mol_type = other RNA
tatgcagtatattgtttgg

SEQ ID NO: 23093 - RNA, 19 nt, synthetic construct
  misc_feature 1..19: note = siRNA antisense sequence
  source 1..19: mol_type = other RNA
ccaaacaatatactgcata

SEQ ID NO: 23094 - RNA, 19 nt, synthetic construct
  misc_feature 1..19: note = siRNA sense sequence
  source 1..19: mol_type = other RNA
atgcagtatattgtttggg

SEQ ID NO: 23095 - RNA, 19 nt, synthetic construct
  misc_feature 1..19: note = siRNA antisense sequence
  source 1..19: mol_type = other RNA
cccaaacaatatactgcat

SEQ ID NO: 23096 - RNA, 19 nt, synthetic construct
  misc_feature 1..19: note = siRNA sense sequence
  source 1..19: mol_type = other RNA
cagtatattgtttgggata

SEQ ID NO: 23097 - RNA, 19 nt, synthetic construct
  misc_feature 1..19: note = siRNA antisense sequence
  source 1..19: mol_type = other RNA
tatcccaaacaatatactg

SEQ ID NO: 23098 - RNA, 19 nt, synthetic construct
  misc_feature 1..19: note = siRNA sense sequence
  source 1..19: mol_type = other RNA
agtatattgtttgggatag

SEQ ID NO: 23099 - RNA, 19 nt, synthetic construct
  misc_feature 1..19: note = siRNA antisense sequence
  source 1..19: mol_type = other RNA
ctatcccaaacaatatact

SEQ ID NO: 23100 - RNA, 19 nt, synthetic construct
  misc_feature 1..19: note = siRNA sense sequence
  source 1..19: mol_type = other RNA
tattgtttgggatagattg

SEQ ID NO: 23101 - RNA, 19 nt, synthetic construct
  misc_feature 1..19: note = siRNA antisense sequence
  source 1..19: mol_type = other RNA
caatctatcccaaacaata

SEQ ID NO: 23102 - RNA, 19 nt, synthetic construct
  misc_feature 1..19: note = siRNA sense sequence
  source 1..19: mol_type = other RNA
attgtttgggatagattgc

SEQ ID NO: 23103 - RNA, 19 nt, synthetic construct
  misc_feature 1..19: note = siRNA antisense sequence
  source 1..19: mol_type = other RNA
gcaatctatcccaaacaat

SEQ ID NO: 23104 - RNA, 19 nt, synthetic construct
  misc_feature 1..19: note = siRNA sense sequence
  source 1..19: mol_type = other RNA
ttgtttgggatagattgca

SEQ ID NO: 23105 - RNA, 19 nt, synthetic construct
  misc_feature 1..19: note = siRNA antisense sequence
  source 1..19: mol_type = other RNA
tgcaatctatcccaaacaa

SEQ ID NO: 23106 - RNA, 19 nt, synthetic construct
  misc_feature 1..19: note = siRNA sense sequence
  source 1..19: mol_type = other RNA
tgtttgggatagattgcaa

SEQ ID NO: 23107 - RNA, 19 nt, synthetic construct
  misc_feature 1..19: note = siRNA antisense sequence
  source 1..19: mol_type = other RNA
ttgcaatctatcccaaaca

SEQ ID NO: 23108 - RNA, 19 nt, synthetic construct
  misc_feature 1..19: note = siRNA sense sequence
  source 1..19: mol_type = other RNA
ttgggatagattgcaaaat

SEQ ID NO: 23109 - RNA, 19 nt, synthetic construct
  misc_feature 1..19: note = siRNA antisense sequence
  source 1..19: mol_type = other RNA
attttgcaatctatcccaa

SEQ ID NO: 23110 - RNA, 19 nt, synthetic construct
  misc_feature 1..19: note = siRNA sense sequence
  source 1..19: mol_type = other RNA
agattgcaaaatttcacac

SEQ ID NO: 23111 - RNA, 19 nt, synthetic construct
  misc_feature 1..19: note = siRNA antisense sequence
  source 1..19: mol_type = other RNA
gtgtgaaattttgcaatct

SEQ ID NO: 23112 - RNA, 19 nt, synthetic construct
  misc_feature 1..19: note = siRNA sense sequence
  source 1..19: mol_type = other RNA
gattgcaaaatttcacact

SEQ ID NO: 23113 - RNA, 19 nt, synthetic construct
  misc_feature 1..19: note = siRNA antisense sequence
  source 1..19: mol_type = other RNA
agtgtgaaattttgcaatc

SEQ ID NO: 23114 - RNA, 19 nt, synthetic construct
  misc_feature 1..19: note = siRNA sense sequence
  source 1..19: mol_type = other RNA
attgcaaaatttcacactg

SEQ ID NO: 23115 - RNA, 19 nt, synthetic construct
  misc_feature 1..19: note = siRNA antisense sequence
  source 1..19: mol_type = other RNA
cagtgtgaaattttgcaat

SEQ ID NO: 23116 - RNA, 19 nt, synthetic construct
  misc_feature 1..19: note = siRNA sense sequence
  source 1..19: mol_type = other RNA
ttgcaaaatttcacactgc

SEQ ID NO: 23117 - RNA, 19 nt, synthetic construct
  misc_feature 1..19: note = siRNA antisense sequence
  source 1..19: mol_type = other RNA
gcagtgtgaaattttgcaa

SEQ ID NO: 23118 - RNA, 19 nt, synthetic construct
  misc_feature 1..19: note = siRNA sense sequence
  source 1..19: mol_type = other RNA
gcaaaatttcacactgcat

SEQ ID NO: 23119 - RNA, 19 nt, synthetic construct
  misc_feature 1..19: note = siRNA antisense sequence
  source 1..19: mol_type = other RNA
atgcagtgtgaaattttgc

SEQ ID NO: 23120 - RNA, 19 nt, synthetic construct
  misc_feature 1..19: note = siRNA sense sequence
  source 1..19: mol_type = other RNA
caaaatttcacactgcatg

SEQ ID NO: 23121 - RNA, 19 nt, synthetic construct
  misc_feature 1..19: note = siRNA antisense sequence
  source 1..19: mol_type = other RNA
catgcagtgtgaaattttg

SEQ ID NO: 23122 - RNA, 19 nt, synthetic construct
  misc_feature 1..19: note = siRNA sense sequence
  source 1..19: mol_type = other RNA
aaaatttcacactgcatgc

SEQ ID NO: 23123 - RNA, 19 nt, synthetic construct
  misc_feature 1..19: note = siRNA antisense sequence
  source 1..19: mol_type = other RNA
gcatgcagtgtgaaatttt

SEQ ID NO: 23124 - RNA, 19 nt, synthetic construct
  misc_feature 1..19: note = siRNA sense sequence
  source 1..19: mol_type = other RNA
aaatttcacactgcatgct

SEQ ID NO: 23125 - RNA, 19 nt, synthetic construct
  misc_feature 1..19: note = siRNA antisense sequence
  source 1..19: mol_type = other RNA
agcatgcagtgtgaaattt

SEQ ID NO: 23126 - RNA, 19 nt, synthetic construct
  misc_feature 1..19: note = siRNA sense sequence
  source 1..19: mol_type = other RNA
aagcttttgctatcttatc

SEQ ID NO: 23127 - RNA, 19 nt, synthetic construct
  misc_feature 1..19: note = siRNA antisense sequence
  source 1..19: mol_type = other RNA
gataagatagcaaaagctt

SEQ ID NO: 23128 - RNA, 19 nt, synthetic construct
  misc_feature 1..19: note = siRNA sense sequence
  source 1..19: mol_type = other RNA
agcttttgctatcttatcc

SEQ ID NO: 23129 - RNA, 19 nt, synthetic construct
  misc_feature 1..19: note = siRNA antisense sequence
  source 1..19: mol_type = other RNA
ggataagatagcaaaagct

SEQ ID NO: 23130 - RNA, 19 nt, synthetic construct
  misc_feature 1..19: note = siRNA sense sequence
  source 1..19: mol_type = other RNA
gcttttgctatcttatcct

SEQ ID NO: 23131 - RNA, 19 nt, synthetic construct
  misc_feature 1..19: note = siRNA antisense sequence
  source 1..19: mol_type = other RNA
aggataagatagcaaaagc

SEQ ID NO: 23132 - RNA, 19 nt, synthetic construct
  misc_feature 1..19: note = siRNA sense sequence
  source 1..19: mol_type = other RNA
cttttgctatcttatcctg

SEQ ID NO: 23133 - RNA, 19 nt, synthetic construct
  misc_feature 1..19: note = siRNA antisense sequence
  source 1..19: mol_type = other RNA
caggataagatagcaaaag

SEQ ID NO: 23134 - RNA, 19 nt, synthetic construct
  misc_feature 1..19: note = siRNA sense sequence
  source 1..19: mol_type = other RNA
ttttgctatcttatcctgt

SEQ ID NO: 23135 - RNA, 19 nt, synthetic construct
  misc_feature 1..19: note = siRNA antisense sequence
  source 1..19: mol_type = other RNA
acaggataagatagcaaaa

SEQ ID NO: 23136 - RNA, 19 nt, synthetic construct
  misc_feature 1..19: note = siRNA sense sequence
  source 1..19: mol_type = other RNA
tttgctatcttatcctgtt

SEQ ID NO: 23137 - RNA, 19 nt, synthetic construct
  misc_feature 1..19: note = siRNA antisense sequence
  source 1..19: mol_type = other RNA
aacaggataagatagcaaa

SEQ ID NO: 23138 - RNA, 19 nt, synthetic construct
  misc_feature 1..19: note = siRNA sense sequence
  source 1..19: mol_type = other RNA
ttgctatcttatcctgttt

SEQ ID NO: 23139 - RNA, 19 nt, synthetic construct
  misc_feature 1..19: note = siRNA antisense sequence
  source 1..19: mol_type = other RNA
aaacaggataagatagcaa

SEQ ID NO: 23140 - RNA, 19 nt, synthetic construct
  misc_feature 1..19: note = siRNA sense sequence
  source 1..19: mol_type = other RNA
tgctatcttatcctgttta

SEQ ID NO: 23141 - RNA, 19 nt, synthetic construct
  misc_feature 1..19: note = siRNA antisense sequence
  source 1..19: mol_type = other RNA
taaacaggataagatagca

SEQ ID NO: 23142 - RNA, 19 nt, synthetic construct
  misc_feature 1..19: note = siRNA sense sequence
  source 1..19: mol_type = other RNA
attttaattctgcttggtg

SEQ ID NO: 23143 - RNA, 19 nt, synthetic construct
  misc_feature 1..19: note = siRNA antisense sequence
  source 1..19: mol_type = other RNA
caccaagcagaattaaaat

SEQ ID NO: 23144 - RNA, 19 nt, synthetic construct
  misc_feature 1..19: note = siRNA sense sequence
  source 1..19: mol_type = other RNA
attctgcttggtgttcttg

SEQ ID NO: 23145 - RNA, 19 nt, synthetic construct
  misc_feature 1..19: note = siRNA antisense sequence
  source 1..19: mol_type = other RNA
caagaacaccaagcagaat

SEQ ID NO: 23146 - RNA, 19 nt, synthetic construct
  misc_feature 1..19: note = siRNA sense sequence
  source 1..19: mol_type = other RNA
ctgcttggtgttcttgcat

SEQ ID NO: 23147 - RNA, 19 nt, synthetic construct
  misc_feature 1..19: note = siRNA antisense sequence
  source 1..19: mol_type = other RNA
atgcaagaacaccaagcag

SEQ ID NO: 23148 - RNA, 19 nt, synthetic construct
  misc_feature 1..19: note = siRNA sense sequence
  source 1..19: mol_type = other RNA
tgcttggtgttcttgcatt

SEQ ID NO: 23149 - RNA, 19 nt, synthetic construct
  misc_feature 1..19: note = siRNA antisense sequence
  source 1..19: mol_type = other RNA
aatgcaagaacaccaagca

SEQ ID NO: 23150 - RNA, 19 nt, synthetic construct
  misc_feature 1..19: note = siRNA sense sequence
  source 1..19: mol_type = other RNA
gcttggtgttcttgcattg

SEQ ID NO: 23151 - RNA, 19 nt, synthetic construct
  misc_feature 1..19: note = siRNA antisense sequence
  source 1..19: mol_type = other RNA
caatgcaagaacaccaagc

SEQ ID NO: 23152 - RNA, 19 nt, synthetic construct
  misc_feature 1..19: note = siRNA sense sequence
  source 1..19: mol_type = other RNA
cttggtgttcttgcattgc

SEQ ID NO: 23153 - RNA, 19 nt, synthetic construct
  misc_feature 1..19: note = siRNA antisense sequence
  source 1..19: mol_type = other RNA
gcaatgcaagaacaccaag

SEQ ID NO: 23154 - RNA, 19 nt, synthetic construct
  misc_feature 1..19: note = siRNA sense sequence
  source 1..19: mol_type = other RNA
ttggtgttcttgcattgca

SEQ ID NO: 23155 - RNA, 19 nt, synthetic construct
  misc_feature 1..19: note = siRNA antisense sequence
  source 1..19: mol_type = other RNA
tgcaatgcaagaacaccaa

SEQ ID NO: 23156 - RNA, 19 nt, synthetic construct
  misc_feature 1..19: note = siRNA sense sequence
  source 1..19: mol_type = other RNA
tggtgttcttgcattgcat

SEQ ID NO: 23157 - RNA, 19 nt, synthetic construct
  misc_feature 1..19: note = siRNA antisense sequence
  source 1..19: mol_type = other RNA
atgcaatgcaagaacacca

SEQ ID NO: 23158 - RNA, 19 nt, synthetic construct
  misc_feature 1..19: note = siRNA sense sequence
  source 1..19: mol_type = other RNA
ggtgttcttgcattgcatt

SEQ ID NO: 23159 - RNA, 19 nt, synthetic construct
  misc_feature 1..19: note = siRNA antisense sequence
  source 1..19: mol_type = other RNA
aatgcaatgcaagaacacc

SEQ ID NO: 23160 - RNA, 19 nt, synthetic construct
  misc_feature 1..19: note = siRNA sense sequence
  source 1..19: mol_type = other RNA
gtgttcttgcattgcattt

SEQ ID NO: 23161 - RNA, 19 nt, synthetic construct
  misc_feature 1..19: note = siRNA antisense sequence
  source 1..19: mol_type = other RNA
aaatgcaatgcaagaacac

SEQ ID NO: 23162 - RNA, 19 nt, synthetic construct
  misc_feature 1..19: note = siRNA sense sequence
  source 1..19: mol_type = other RNA
tgttcttgcattgcattta

SEQ ID NO: 23163 - RNA, 19 nt, synthetic construct
  misc_feature 1..19: note = siRNA antisense sequence
  source 1..19: mol_type = other RNA
taaatgcaatgcaagaaca

SEQ ID NO: 23164 - RNA, 19 nt, synthetic construct
  misc_feature 1..19: note = siRNA sense sequence
  source 1..19: mol_type = other RNA
gttcttgcattgcatttaa

SEQ ID NO: 23165 - RNA, 19 nt, synthetic construct
  misc_feature 1..19: note = siRNA antisense sequence
  source 1..19: mol_type = other RNA
ttaaatgcaatgcaagaac

SEQ ID NO: 23166 - RNA, 19 nt, synthetic construct
  misc_feature 1..19: note = siRNA sense sequence
  source 1..19: mol_type = other RNA
catttaatgatcccttttc

SEQ ID NO: 23167 - RNA, 19 nt, synthetic construct
  misc_feature 1..19: note = siRNA antisense sequence
  source 1..19: mol_type = other RNA
gaaaagggatcattaaatg

SEQ ID NO: 23168 - RNA, 19 nt, synthetic construct
  misc_feature 1..19: note = siRNA sense sequence
  source 1..19: mol_type = other RNA
tttaaatgattgccgtaca

SEQ ID NO: 23169 - RNA, 19 nt, synthetic construct
  misc_feature 1..19: note = siRNA antisense sequence
  source 1..19: mol_type = other RNA
tgtacggcaatcatttaaa

SEQ ID NO: 23170 - RNA, 19 nt, synthetic construct
  misc_feature 1..19: note = siRNA sense sequence
  source 1..19: mol_type = other RNA
caattagtagacttgaaga

SEQ ID NO: 23171 - RNA, 19 nt, synthetic construct
  misc_feature 1..19: note = siRNA antisense sequence
  source 1..19: mol_type = other RNA
tcttcaagtctactaattg

SEQ ID NO: 23172 - RNA, 19 nt, synthetic construct
  misc_feature 1..19: note = siRNA sense sequence
  source 1..19: mol_type = other RNA
aattagtagacttgaagac

SEQ ID NO: 23173 - RNA, 19 nt, synthetic construct
  misc_feature 1..19: note = siRNA antisense sequence
  source 1..19: mol_type = other RNA
gtcttcaagtctactaatt

SEQ ID NO: 23174 - RNA, 19 nt, synthetic construct
  misc_feature 1..19: note = siRNA sense sequence
  source 1..19: mol_type = other RNA
attagtagacttgaagaca

SEQ ID NO: 23175 - RNA, 19 nt, synthetic construct
  misc_feature 1..19: note = siRNA antisense sequence
  source 1..19: mol_type = other RNA
tgtcttcaagtctactaat

SEQ ID NO: 23176 - RNA, 19 nt, synthetic construct
  misc_feature 1..19: note = siRNA sense sequence
  source 1..19: mol_type = other RNA
tttcttcaaaggcttgtta

SEQ ID NO: 23177 - RNA, 19 nt, synthetic construct
  misc_feature 1..19: note = siRNA antisense sequence
  source 1..19: mol_type = other RNA
taacaagcctttgaagaaa

SEQ ID NO: 23178 - RNA, 19 nt, synthetic construct
  misc_feature 1..19: note = siRNA sense sequence
  source 1..19: mol_type = other RNA
ttcttcaaaggcttgttaa

SEQ ID NO: 23179 - RNA, 19 nt, synthetic construct
  misc_feature 1..19: note = siRNA antisense sequence
  source 1..19: mol_type = other RNA
ttaacaagcctttgaagaa

SEQ ID NO: 23180 - RNA, 19 nt, synthetic construct
  misc_feature 1..19: note = siRNA sense sequence
  source 1..19: mol_type = other RNA
aaccaatcatgttaaaagg

SEQ ID NO: 23181 - RNA, 19 nt, synthetic construct
  misc_feature 1..19: note = siRNA antisense sequence
  source 1..19: mol_type = other RNA
ccttttaacatgattggtt

SEQ ID NO: 23182 - RNA, 19 nt, synthetic construct
  misc_feature 1..19: note = siRNA sense sequence
  source 1..19: mol_type = other RNA
accaatcatgttaaaagga

SEQ ID NO: 23183 - RNA, 19 nt, synthetic construct
  misc_feature 1..19: note = siRNA antisense sequence
  source 1..19: mol_type = other RNA
tccttttaacatgattggt

SEQ ID NO: 23184 - RNA, 19 nt, synthetic construct
  misc_feature 1..19: note = siRNA sense sequence
  source 1..19: mol_type = other RNA
ccaatcatgttaaaaggaa

SEQ ID NO: 23185 - RNA, 19 nt, synthetic construct
  misc_feature 1..19: note = siRNA antisense sequence
  source 1..19: mol_type = other RNA
ttccttttaacatgattgg

SEQ ID NO: 23186 - RNA, 19 nt, synthetic construct
  misc_feature 1..19: note = siRNA sense sequence
  source 1..19: mol_type = other RNA
ttggtttgttgttgttagc

SEQ ID NO: 23187 - RNA, 19 nt, synthetic construct
  misc_feature 1..19: note = siRNA antisense sequence
  source 1..19: mol_type = other RNA
gctaacaacaacaaaccaa

SEQ ID NO: 23188 - RNA, 19 nt, synthetic construct
  misc_feature 1..19: note = siRNA sense sequence
  source 1..19: mol_type = other RNA
tggtttgttgttgttagca

SEQ ID NO: 23189 - RNA, 19 nt, synthetic construct
  misc_feature 1..19: note = siRNA antisense sequence
  source 1..19: mol_type = other RNA
tgctaacaacaacaaacca

SEQ ID NO: 23190 - RNA, 19 nt, synthetic construct
  misc_feature 1..19: note = siRNA sense sequence
  source 1..19: mol_type = other RNA
ggtttgttgttgttagcat

SEQ ID NO: 23191 - RNA, 19 nt, synthetic construct
  misc_feature 1..19: note = siRNA antisense sequence
  source 1..19: mol_type = other RNA
atgctaacaacaacaaacc

SEQ ID NO: 23192 - RNA, 19 nt, synthetic construct
  misc_feature 1..19: note = siRNA sense sequence
  source 1..19: mol_type = other RNA
gttgttgttagcattagtc

SEQ ID NO: 23193 - RNA, 19 nt, synthetic construct
  misc_feature 1..19: note = siRNA antisense sequence
  source 1..19: mol_type = other RNA
gactaatgctaacaacaac

SEQ ID NO: 23194 - RNA, 19 nt, synthetic construct
  misc_feature 1..19: note = siRNA sense sequence
  source 1..19: mol_type = other RNA
ttgttgttagcattagtca

SEQ ID NO: 23195 - RNA, 19 nt, synthetic construct
  misc_feature 1..19: note = siRNA antisense sequence
  source 1..19: mol_type = other RNA
tgactaatgctaacaacaa

SEQ ID NO: 23196 - RNA, 19 nt, synthetic construct
  misc_feature 1..19: note = siRNA sense sequence
  source 1..19: mol_type = other RNA
tgttgttagcattagtcat

SEQ ID NO: 23197 - RNA, 19 nt, synthetic construct
  misc_feature 1..19: note = siRNA antisense sequence
  source 1..19: mol_type = other RNA
atgactaatgctaacaaca

SEQ ID NO: 23198 - RNA, 19 nt, synthetic construct
  misc_feature 1..19: note = siRNA sense sequence
  source 1..19: mol_type = other RNA
gttgttagcattagtcata

SEQ ID NO: 23199 - RNA, 19 nt, synthetic construct
  misc_feature 1..19: note = siRNA antisense sequence
  source 1..19: mol_type = other RNA
tatgactaatgctaacaac

SEQ ID NO: 23200 - RNA, 19 nt, synthetic construct
  misc_feature 1..19: note = siRNA sense sequence
  source 1..19: mol_type = other RNA
gtcatatttgatttagagg

SEQ ID NO: 23201 - RNA, 19 nt, synthetic construct
  misc_feature 1..19: note = siRNA antisense sequence
  source 1..19: mol_type = other RNA
cctctaaatcaaatatgac

SEQ ID NO: 23202 - RNA, 19 nt, synthetic construct
  misc_feature 1..19: note = siRNA sense sequence
  source 1..19: mol_type = other RNA
tcatatttgatttagaggg

SEQ ID NO: 23203 - RNA, 19 nt, synthetic construct
  misc_feature 1..19: note = siRNA antisense sequence
  source 1..19: mol_type = other RNA
ccctctaaatcaaatatga

SEQ ID NO: 23204 - RNA, 19 nt, synthetic construct
  misc_feature 1..19: note = siRNA sense sequence
  source 1..19: mol_type = other RNA
catatttgatttagagggt

SEQ ID NO: 23205 - RNA, 19 nt, synthetic construct
  misc_feature 1..19: note = siRNA antisense sequence
  source 1..19: mol_type = other RNA
accctctaaatcaaatatg

SEQ ID NO: 23206 - RNA, 19 nt, synthetic construct
  misc_feature 1..19: note = siRNA sense sequence
  source 1..19: mol_type = other RNA
aactttgatctgctaggga

SEQ ID NO: 23207 - RNA, 19 nt, synthetic construct
  misc_feature 1..19: note = siRNA antisense sequence
  source 1..19: mol_type = other RNA
tccctagcagatcaaagtt

SEQ ID NO: 23208 - RNA, 19 nt, synthetic construct
  misc_feature 1..19: note = siRNA sense sequence
  source 1..19: mol_type = other RNA
ttgatctgctagggattgt

SEQ ID NO: 23209 - RNA, 19 nt, synthetic construct
  misc_feature 1..19: note = siRNA antisense sequence
  source 1..19: mol_type = other RNA
acaatccctagcagatcaa

SEQ ID NO: 23210 - RNA, 19 nt, synthetic construct
  misc_feature 1..19: note = siRNA sense sequence
  source 1..19: mol_type = other RNA
tgatctgctagggattgtc

SEQ ID NO: 23211 - RNA, 19 nt, synthetic construct
  misc_feature 1..19: note = siRNA antisense sequence
  source 1..19: mol_type = other RNA
gacaatccctagcagatca

SEQ ID NO: 23212 - RNA, 19 nt, synthetic construct
  misc_feature 1..19: note = siRNA sense sequence
  source 1..19: mol_type = other RNA
gatctgctagggattgtca

SEQ ID NO: 23213 - RNA, 19 nt, synthetic construct
  misc_feature 1..19: note = siRNA antisense sequence
  source 1..19: mol_type = other RNA
tgacaatccctagcagatc

SEQ ID NO: 23214 - RNA, 19 nt, synthetic construct
  misc_feature 1..19: note = siRNA sense sequence
  source 1..19: mol_type = other RNA
atctgctagggattgtcaa

SEQ ID NO: 23215 - RNA, 19 nt, synthetic construct
  misc_feature 1..19: note = siRNA antisense sequence
  source 1..19: mol_type = other RNA
ttgacaatccctagcagat

SEQ ID NO: 23216 - RNA, 19 nt, synthetic construct
  misc_feature 1..19: note = siRNA sense sequence
  source 1..19: mol_type = other RNA
tctgctagggattgtcaaa

SEQ ID NO: 23217 - RNA, 19 nt, synthetic construct
  misc_feature 1..19: note = siRNA antisense sequence
  source 1..19: mol_type = other RNA
tttgacaatccctagcaga

SEQ ID NO: 23218 - RNA, 19 nt, synthetic construct
  misc_feature 1..19: note = siRNA sense sequence
  source 1..19: mol_type = other RNA
ctgctagggattgtcaaaa

SEQ ID NO: 23219 - RNA, 19 nt, synthetic construct
  misc_feature 1..19: note = siRNA antisense sequence
  source 1..19: mol_type = other RNA
ttttgacaatccctagcag

SEQ ID NO: 23220 - RNA, 19 nt, synthetic construct
  misc_feature 1..19: note = siRNA sense sequence
  source 1..19: mol_type = other RNA
tgctagggattgtcaaaat

SEQ ID NO: 23221 - RNA, 19 nt, synthetic construct
  misc_feature 1..19: note = siRNA antisense sequence
  source 1..19: mol_type = other RNA
attttgacaatccctagca

SEQ ID NO: 23222 - RNA, 19 nt, synthetic construct
  misc_feature 1..19: note = siRNA sense sequence
  source 1..19: mol_type = other RNA
gctagggattgtcaaaata

SEQ ID NO: 23223 - RNA, 19 nt, synthetic construct
  misc_feature 1..19: note = siRNA antisense sequence
  source 1..19: mol_type = other RNA
tattttgacaatccctagc

SEQ ID NO: 23224 - RNA, 19 nt, synthetic construct
  misc_feature 1..19: note = siRNA sense sequence
  source 1..19: mol_type = other RNA
ctagggattgtcaaaataa

SEQ ID NO: 23225 - RNA, 19 nt, synthetic construct
  misc_feature 1..19: note = siRNA antisense sequence
  source 1..19: mol_type = other RNA
ttattttgacaatccctag

SEQ ID NO: 23226 - RNA, 19 nt, synthetic construct
  misc_feature 1..19: note = siRNA sense sequence
  source 1..19: mol_type = other RNA
caaaataatctccttgagg

SEQ ID NO: 23227 - RNA, 19 nt, synthetic construct
  misc_feature 1..19: note = siRNA antisense sequence
  source 1..19: mol_type = other RNA
cctcaaggagattattttg

SEQ ID NO: 23228 - RNA, 19 nt, synthetic construct
  misc_feature 1..19: note = siRNA sense sequence
  source 1..19: mol_type = other RNA
aaaataatctccttgaggc

SEQ ID NO: 23229 - RNA, 19 nt, synthetic construct
  misc_feature 1..19: note = siRNA antisense sequence
  source 1..19: mol_type = other RNA
gcctcaaggagattatttt

SEQ ID NO: 23230 - RNA, 19 nt, synthetic construct
  misc_feature 1..19: note = siRNA sense sequence
  source 1..19: mol_type = other RNA
aatctccttgaggcatctt

SEQ ID NO: 23231 - RNA, 19 nt, synthetic construct
  misc_feature 1..19: note = siRNA antisense sequence
  source 1..19: mol_type = other RNA
aagatgcctcaaggagatt

SEQ ID NO: 23232 - RNA, 19 nt, synthetic construct
  misc_feature 1..19: note = siRNA sense sequence
  source 1..19: mol_type = other RNA
atctccttgaggcatcttt

SEQ ID NO: 23233 - RNA, 19 nt, synthetic construct
  misc_feature 1..19: note = siRNA antisense sequence
  source 1..19: mol_type = other RNA
aaagatgcctcaaggagat

SEQ ID NO: 23234 - RNA, 19 nt, synthetic construct
  misc_feature 1..19: note = siRNA sense sequence
  source 1..19: mol_type = other RNA
tctccttgaggcatcttta

SEQ ID NO: 23235 - RNA, 19 nt, synthetic construct
  misc_feature 1..19: note = siRNA antisense sequence
  source 1..19: mol_type = other RNA
taaagatgcctcaaggaga

SEQ ID NO: 23236 - RNA, 19 nt, synthetic construct
  misc_feature 1..19: note = siRNA sense sequence
  source 1..19: mol_type = other RNA
cttgaggcatctttatttt

SEQ ID NO: 23237 - RNA, 19 nt, synthetic construct
  misc_feature 1..19: note = siRNA antisense sequence
  source 1..19: mol_type = other RNA
aaaataaagatgcctcaag

SEQ ID NO: 23238 - RNA, 19 nt, synthetic construct
  misc_feature 1..19: note = siRNA sense sequence
  source 1..19: mol_type = other RNA
ggctaattagtggcaaagc

SEQ ID NO: 23239 - RNA, 19 nt, synthetic construct
  misc_feature 1..19: note = siRNA antisense sequence
  source 1..19: mol_type = other RNA
gctttgccactaattagcc

SEQ ID NO: 23240 - RNA, 19 nt, synthetic construct
  misc_feature 1..19: note = siRNA sense sequence
  source 1..19: mol_type = other RNA
gtggcaaagctggaagtca

SEQ ID NO: 23241 - RNA, 19 nt, synthetic construct
  misc_feature 1..19: note = siRNA antisense sequence
  source 1..19: mol_type = other RNA
tgacttccagctttgccac

SEQ ID NO: 23242 - RNA, 19 nt, synthetic construct
  misc_feature 1..19: note = siRNA sense sequence
  source 1..19: mol_type = other RNA
tggcaaagctggaagtcat

SEQ ID NO: 23243 - RNA, 19 nt, synthetic construct
  misc_feature 1..19: note = siRNA antisense sequence
  source 1..19: mol_type = other RNA
atgacttccagctttgcca

SEQ ID NO: 23244 - RNA, 19 nt, synthetic construct
  misc_feature 1..19: note = siRNA sense sequence
  source 1..19: mol_type = other RNA
ggcaaagctggaagtcatt

SEQ ID NO: 23245 - RNA, 19 nt, synthetic construct
  misc_feature 1..19: note = siRNA antisense sequence
  source 1..19: mol_type = other RNA
aatgacttccagctttgcc

SEQ ID NO: 23246 - RNA, 19 nt, synthetic construct
  misc_feature 1..19: note = siRNA sense sequence
  source 1..19: mol_type = other RNA
gcaaagctggaagtcattc

SEQ ID NO: 23247 - RNA, 19 nt, synthetic construct
  misc_feature 1..19: note = siRNA antisense sequence
  source 1..19: mol_type = other RNA
gaatgacttccagctttgc

SEQ ID NO: 23248 - RNA, 19 nt, synthetic construct
  misc_feature 1..19: note = siRNA sense sequence
  source 1..19: mol_type = other RNA
cattcccagtctggacttt

SEQ ID NO: 23249 - RNA, 19 nt, synthetic construct
  misc_feature 1..19: note = siRNA antisense sequence
  source 1..19: mol_type = other RNA
aaagtccagactgggaatg

SEQ ID NO: 23250 - RNA, 19 nt, synthetic construct
  misc_feature 1..19: note = siRNA sense sequence
  source 1..19: mol_type = other RNA
attcccagtctggacttta

SEQ ID NO: 23251 - RNA, 19 nt, synthetic construct
  misc_feature 1..19: note = siRNA antisense sequence
  source 1..19: mol_type = other RNA
taaagtccagactgggaat

SEQ ID NO: 23252 - RNA, 19 nt, synthetic construct
  misc_feature 1..19: note = siRNA sense sequence
  source 1..19: mol_type = other RNA
ttcccagtctggactttag

SEQ ID NO: 23253 - RNA, 19 nt, synthetic construct
  misc_feature 1..19: note = siRNA antisense sequence
  source 1..19: mol_type = other RNA
ctaaagtccagactgggaa

SEQ ID NO: 23254 - RNA, 19 nt, synthetic construct
  misc_feature 1..19: note = siRNA sense sequence
  source 1..19: mol_type = other RNA
tcccagtctggactttagt

SEQ ID NO: 23255 - RNA, 19 nt, synthetic construct
  misc_feature 1..19: note = siRNA antisense sequence
  source 1..19: mol_type = other RNA
actaaagtccagactggga

SEQ ID NO: 23256 - RNA, 19 nt, synthetic construct
  misc_feature 1..19: note = siRNA sense sequence
  source 1..19: mol_type = other RNA
cccagtctggactttagtt

SEQ ID NO: 23257 - RNA, 19 nt, synthetic construct
  misc_feature 1..19: note = siRNA antisense sequence
  source 1..19: mol_type = other RNA
aactaaagtccagactggg

SEQ ID NO: 23258 - RNA, 19 nt, synthetic construct
  misc_feature 1..19: note = siRNA sense sequence
  source 1..19: mol_type = other RNA
agtctggactttagttctt

SEQ ID NO: 23259 - RNA, 19 nt, synthetic construct
  misc_feature 1..19: note = siRNA antisense sequence
  source 1..19: mol_type = other RNA
aagaactaaagtccagact

SEQ ID NO: 23260 - RNA, 19 nt, synthetic construct
  misc_feature 1..19: note = siRNA sense sequence
  source 1..19: mol_type = other RNA
tggactttagttctttgcg

SEQ ID NO: 23261 - RNA, 19 nt, synthetic construct
  misc_feature 1..19: note = siRNA antisense sequence
  source 1..19: mol_type = other RNA
cgcaaagaactaaagtcca

SEQ ID NO: 23262 - RNA, 19 nt, synthetic construct
  misc_feature 1..19: note = siRNA sense sequence
  source 1..19: mol_type = other RNA
ggactttagttctttgcgc

SEQ ID NO: 23263 - RNA, 19 nt, synthetic construct
  misc_feature 1..19: note = siRNA antisense sequence
  source 1..19: mol_type = other RNA
gcgcaaagaactaaagtcc

SEQ ID NO: 23264 - RNA, 19 nt, synthetic construct
  misc_feature 1..19: note = siRNA sense sequence
  source 1..19: mol_type = other RNA
gactttagttctttgcgcc

SEQ ID NO: 23265 - RNA, 19 nt, synthetic construct
  misc_feature 1..19: note = siRNA antisense sequence
  source 1..19: mol_type = other RNA
ggcgcaaagaactaaagtc

SEQ ID NO: 23266 - RNA, 19 nt, synthetic construct
  misc_feature 1..19: note = siRNA sense sequence
  source 1..19: mol_type = other RNA
actttagttctttgcgcca

SEQ ID NO: 23267 - RNA, 19 nt, synthetic construct
  misc_feature 1..19: note = siRNA antisense sequence
  source 1..19: mol_type = other RNA
tggcgcaaagaactaaagt

SEQ ID NO: 23268 - RNA, 19 nt, synthetic construct
  misc_feature 1..19: note = siRNA sense sequence
  source 1..19: mol_type = other RNA
ctttagttctttgcgccaa

SEQ ID NO: 23269 - RNA, 19 nt, synthetic construct
  misc_feature 1..19: note = siRNA antisense sequence
  source 1..19: mol_type = other RNA
ttggcgcaaagaactaaag

SEQ ID NO: 23270 - RNA, 19 nt, synthetic construct
  misc_feature 1..19: note = siRNA sense sequence
  source 1..19: mol_type = other RNA
ttgcttgtcaaagttatac

SEQ ID NO: 23271 - RNA, 19 nt, synthetic construct
  misc_feature 1..19: note = siRNA antisense sequence
  source 1..19: mol_type = other RNA
gtataactttgacaagcaa

SEQ ID NO: 23272 - RNA, 19 nt, synthetic construct
  misc_feature 1..19: note = siRNA sense sequence
  source 1..19: mol_type = other RNA
tgcttgtcaaagttatact

SEQ ID NO: 23273 - RNA, 19 nt, synthetic construct
  misc_feature 1..19: note = siRNA antisense sequence
  source 1..19: mol_type = other RNA
agtataactttgacaagca

SEQ ID NO: 23274 - RNA, 19 nt, synthetic construct
  misc_feature 1..19: note = siRNA sense sequence
  source 1..19: mol_type = other RNA
tgtatgtggcattaatttg

SEQ ID NO: 23275 - RNA, 19 nt, synthetic construct
  misc_feature 1..19: note = siRNA antisense sequence
  source 1..19: mol_type = other RNA
caaattaatgccacataca

SEQ ID NO: 23276 - RNA, 19 nt, synthetic construct
  misc_feature 1..19: note = siRNA sense sequence
  source 1..19: mol_type = other RNA
gtatgtggcattaatttgg

SEQ ID NO: 23277 - RNA, 19 nt, synthetic construct
  misc_feature 1..19: note = siRNA antisense sequence
  source 1..19: mol_type = other RNA
ccaaattaatgccacatac

SEQ ID NO: 23278 - RNA, 19 nt, synthetic construct
  misc_feature 1..19: note = siRNA sense sequence
  source 1..19: mol_type = other RNA
tatgtggcattaatttggg

SEQ ID NO: 23279 - RNA, 19 nt, synthetic construct
  misc_feature 1..19: note = siRNA antisense sequence
  source 1..19: mol_type = other RNA
cccaaattaatgccacata

SEQ ID NO: 23280 - RNA, 19 nt, synthetic construct
  misc_feature 1..19: note = siRNA sense sequence
  source 1..19: mol_type = other RNA
atgtggcattaatttgggt

SEQ ID NO: 23281 - RNA, 19 nt, synthetic construct
  misc_feature 1..19: note = siRNA antisense sequence
  source 1..19: mol_type = other RNA
acccaaattaatgccacat

SEQ ID NO: 23282 - RNA, 19 nt, synthetic construct
  misc_feature 1..19: note = siRNA sense sequence
  source 1..19: mol_type = other RNA
tgtggcattaatttgggtt

SEQ ID NO: 23283 - RNA, 19 nt, synthetic construct
  misc_feature 1..19: note = siRNA antisense sequence
  source 1..19: mol_type = other RNA
aacccaaattaatgccaca

SEQ ID NO: 23284 - RNA, 19 nt, synthetic construct
  misc_feature 1..19: note = siRNA sense sequence
  source 1..19: mol_type = other RNA
gtggcattaatttgggttt

SEQ ID NO: 23285 - RNA, 19 nt, synthetic construct
  misc_feature 1..19: note = siRNA antisense sequence
  source 1..19: mol_type = other RNA
aaacccaaattaatgccac

SEQ ID NO: 23286 - RNA, 19 nt, synthetic construct
  misc_feature 1..19: note = siRNA sense sequence
  source 1..19: mol_type = other RNA
gaagcctgttctaaagttt

SEQ ID NO: 23287 - RNA, 19 nt, synthetic construct
  misc_feature 1..19: note = siRNA antisense sequence
  source 1..19: mol_type = other RNA
aaactttagaacaggcttc

SEQ ID NO: 23288 - RNA, 19 nt, synthetic construct
  misc_feature 1..19: note = siRNA sense sequence
  source 1..19: mol_type = other RNA
aagcctgttctaaagttta

SEQ ID NO: 23289 - RNA, 19 nt, synthetic construct
  misc_feature 1..19: note = siRNA antisense sequence
  source 1..19: mol_type = other RNA
taaactttagaacaggctt

SEQ ID NO: 23290 - RNA, 19 nt, synthetic construct
  misc_feature 1..19: note = siRNA sense sequence
  source 1..19: mol_type = other RNA
agcctgttctaaagtttaa

SEQ ID NO: 23291 - RNA, 19 nt, synthetic construct
  misc_feature 1..19: note = siRNA antisense sequence
  source 1..19: mol_type = other RNA
ttaaactttagaacaggct

SEQ ID NO: 23292 - RNA, 19 nt, synthetic construct
  misc_feature 1..19: note = siRNA sense sequence
  source 1..19: mol_type = other RNA
gcctgttctaaagtttaag

SEQ ID NO: 23293 - RNA, 19 nt, synthetic construct
  misc_feature 1..19: note = siRNA antisense sequence
  source 1..19: mol_type = other RNA
cttaaactttagaacaggc

SEQ ID NO: 23294 - RNA, 19 nt, synthetic construct
  misc_feature 1..19: note = siRNA sense sequence
  source 1..19: mol_type = other RNA
cctgttctaaagtttaagt

SEQ ID NO: 23295 - RNA, 19 nt, synthetic construct
  misc_feature 1..19: note = siRNA antisense sequence
  source 1..19: mol_type = other RNA
acttaaactttagaacagg

SEQ ID NO: 23296 - RNA, 19 nt, synthetic construct
  misc_feature 1..19: note = siRNA sense sequence
  source 1..19: mol_type = other RNA
ctgttctaaagtttaagtc

SEQ ID NO: 23297 - RNA, 19 nt, synthetic construct
  misc_feature 1..19: note = siRNA antisense sequence
  source 1..19: mol_type = other RNA
gacttaaactttagaacag

SEQ ID NO: 23298 - RNA, 19 nt, synthetic construct
  misc_feature 1..19: note = siRNA sense sequence
  source 1..19: mol_type = other RNA
ctaaagtttaagtcacatg

SEQ ID NO: 23299 - RNA, 19 nt, synthetic construct
  misc_feature 1..19: note = siRNA antisense sequence
  source 1..19: mol_type = other RNA
catgtgacttaaactttag

SEQ ID NO: 23300 - RNA, 19 nt, synthetic construct
  misc_feature 1..19: note = siRNA sense sequence
  source 1..19: mol_type = other RNA
aaagtttaagtcacatgac

SEQ ID NO: 23301 - RNA, 19 nt, synthetic construct
  misc_feature 1..19: note = siRNA antisense sequence
  source 1..19: mol_type = other RNA
gtcatgtgacttaaacttt

SEQ ID NO: 23302 - RNA, 19 nt, synthetic construct
  misc_feature 1..19: note = siRNA sense sequence
  source 1..19: mol_type = other RNA
catgactagtatgtggcag

SEQ ID NO: 23303 - RNA, 19 nt, synthetic construct
  misc_feature 1..19: note = siRNA antisense sequence
  source 1..19: mol_type = other RNA
ctgccacatactagtcatg

SEQ ID NO: 23304 - RNA, 19 nt, synthetic construct
  misc_feature 1..19: note = siRNA sense sequence
  source 1..19: mol_type = other RNA
atgactagtatgtggcagt

SEQ ID NO: 23305 - RNA, 19 nt, synthetic construct
  misc_feature 1..19: note = siRNA antisense sequence
  source 1..19: mol_type = other RNA
actgccacatactagtcat

SEQ ID NO: 23306 - RNA, 19 nt, synthetic construct
  misc_feature 1..19: note = siRNA sense sequence
  source 1..19: mol_type = other RNA
gactagtatgtggcagttg

SEQ ID NO: 23307 - RNA, 19 nt, synthetic construct
  misc_feature 1..19: note = siRNA antisense sequence
  source 1..19: mol_type = other RNA
caactgccacatactagtc

SEQ ID NO: 23308 - RNA, 19 nt, synthetic construct
  misc_feature 1..19: note = siRNA sense sequence
  source 1..19: mol_type = other RNA
actagtatgtggcagttga

SEQ ID NO: 23309 - RNA, 19 nt, synthetic construct
  misc_feature 1..19: note = siRNA antisense sequence
  source 1..19: mol_type = other RNA
tcaactgccacatactagt

SEQ ID NO: 23310 - RNA, 19 nt, synthetic construct
  misc_feature 1..19: note = siRNA sense sequence
  source 1..19: mol_type = other RNA
ctagtatgtggcagttgac

SEQ ID NO: 23311 - RNA, 19 nt, synthetic construct
  misc_feature 1..19: note = siRNA antisense sequence
  source 1..19: mol_type = other RNA
gtcaactgccacatactag

SEQ ID NO: 23312 - RNA, 19 nt, synthetic construct
  misc_feature 1..19: note = siRNA sense sequence
  source 1..19: mol_type = other RNA
tagtatgtggcagttgact

SEQ ID NO: 23313 - RNA, 19 nt, synthetic construct
  misc_feature 1..19: note = siRNA antisense sequence
  source 1..19: mol_type = other RNA
agtcaactgccacatacta

SEQ ID NO: 23314 - RNA, 19 nt, synthetic construct
  misc_feature 1..19: note = siRNA sense sequence
  source 1..19: mol_type = other RNA
agtatgtggcagttgactt

SEQ ID NO: 23315 - RNA, 19 nt, synthetic construct
  misc_feature 1..19: note = siRNA antisense sequence
  source 1..19: mol_type = other RNA
aagtcaactgccacatact

SEQ ID NO: 23316 - RNA, 19 nt, synthetic construct
  misc_feature 1..19: note = siRNA sense sequence
  source 1..19: mol_type = other RNA
gtatgtggcagttgactta

SEQ ID NO: 23317 - RNA, 19 nt, synthetic construct
  misc_feature 1..19: note = siRNA antisense sequence
  source 1..19: mol_type = other RNA
taagtcaactgccacatac

SEQ ID NO: 23318 - RNA, 19 nt, synthetic construct
  misc_feature 1..19: note = siRNA sense sequence
  source 1..19: mol_type = other RNA
tatgtggcagttgacttaa

SEQ ID NO: 23319 - RNA, 19 nt, synthetic construct
  misc_feature 1..19: note = siRNA antisense sequence
  source 1..19: mol_type = other RNA
ttaagtcaactgccacata

SEQ ID NO: 23320 - RNA, 19 nt, synthetic construct
  misc_feature 1..19: note = siRNA sense sequence
  source 1..19: mol_type = other RNA
atgtggcagttgacttaaa

SEQ ID NO: 23321 - RNA, 19 nt, synthetic construct
  misc_feature 1..19: note = siRNA antisense sequence
  source 1..19: mol_type = other RNA
tttaagtcaactgccacat

SEQ ID NO: 23322 - RNA, 19 nt, synthetic construct
  misc_feature 1..19: note = siRNA sense sequence
  source 1..19: mol_type = other RNA
aactccaatactctttact

SEQ ID NO: 23323 - RNA, 19 nt, synthetic construct
  misc_feature 1..19: note = siRNA antisense sequence
  source 1..19: mol_type = other RNA
agtaaagagtattggagtt

SEQ ID NO: 23324 - RNA, 19 nt, synthetic construct
  misc_feature 1..19: note = siRNA sense sequence
  source 1..19: mol_type = other RNA
actccaatactctttacta

SEQ ID NO: 23325 - RNA, 19 nt, synthetic construct
  misc_feature 1..19: note = siRNA antisense sequence
  source 1..19: mol_type = other RNA
tagtaaagagtattggagt

SEQ ID NO: 23326 - RNA, 19 nt, synthetic construct
  misc_feature 1..19: note = siRNA sense sequence
  source 1..19: mol_type = other RNA
ctccaatactctttactat

SEQ ID NO: 23327 - RNA, 19 nt, synthetic construct
  misc_feature 1..19: note = siRNA antisense sequence
  source 1..19: mol_type = other RNA
atagtaaagagtattggag

SEQ ID NO: 23328 - RNA, 19 nt, synthetic construct
  misc_feature 1..19: note = siRNA sense sequence
  source 1..19: mol_type = other RNA
tccaatactctttactatc

SEQ ID NO: 23329 - RNA, 19 nt, synthetic construct
  misc_feature 1..19: note = siRNA antisense sequence
  source 1..19: mol_type = other RNA
gatagtaaagagtattgga

SEQ ID NO: 23330 - RNA, 19 nt, synthetic construct
  misc_feature 1..19: note = siRNA sense sequence
  source 1..19: mol_type = other RNA
ccaatactctttactatca

SEQ ID NO: 23331 - RNA, 19 nt, synthetic construct
  misc_feature 1..19: note = siRNA antisense sequence
  source 1..19: mol_type = other RNA
tgatagtaaagagtattgg

SEQ ID NO: 23332 - RNA, 19 nt, synthetic construct
  misc_feature 1..19: note = siRNA sense sequence
  source 1..19: mol_type = other RNA
actctttactatcattgac

SEQ ID NO: 23333 - RNA, 19 nt, synthetic construct
  misc_feature 1..19: note = siRNA antisense sequence
  source 1..19: mol_type = other RNA
gtcaatgatagtaaagagt

SEQ ID NO: 23334 - RNA, 19 nt, synthetic construct
  misc_feature 1..19: note = siRNA sense sequence
  source 1..19: mol_type = other RNA
ctctttactatcattgact

SEQ ID NO: 23335 - RNA, 19 nt, synthetic construct
  misc_feature 1..19: note = siRNA antisense sequence
  source 1..19: mol_type = other RNA
agtcaatgatagtaaagag

SEQ ID NO: 23336 - RNA, 19 nt, synthetic construct
  misc_feature 1..19: note = siRNA sense sequence
  source 1..19: mol_type = other RNA
aactctgatactctttact

SEQ ID NO: 23337 - RNA, 19 nt, synthetic construct
  misc_feature 1..19: note = siRNA antisense sequence
  source 1..19: mol_type = other RNA
agtaaagagtatcagagtt

SEQ ID NO: 23338 - RNA, 19 nt, synthetic construct
  misc_feature 1..19: note = siRNA sense sequence
  source 1..19: mol_type = other RNA
actctgatactctttacta

SEQ ID NO: 23339 - RNA, 19 nt, synthetic construct
  misc_feature 1..19: note = siRNA antisense sequence
  source 1..19: mol_type = other RNA
tagtaaagagtatcagagt

SEQ ID NO: 23340 - RNA, 19 nt, synthetic construct
  misc_feature 1..19: note = siRNA sense sequence
  source 1..19: mol_type = other RNA
ctctgatactctttactat

SEQ ID NO: 23341 - RNA, 19 nt, synthetic construct
  misc_feature 1..19: note = siRNA antisense sequence
  source 1..19: mol_type = other RNA
atagtaaagagtatcagag

SEQ ID NO: 23342 - RNA, 19 nt, synthetic construct
  misc_feature 1..19: note = siRNA sense sequence
  source 1..19: mol_type = other RNA
tatggaattgtgcaaatac

SEQ ID NO: 23343 - RNA, 19 nt, synthetic construct
  misc_feature 1..19: note = siRNA antisense sequence
  source 1..19: mol_type = other RNA
gtatttgcacaattccata

SEQ ID NO: 23344 - RNA, 19 nt, synthetic construct
  misc_feature 1..19: note = siRNA sense sequence
  source 1..19: mol_type = other RNA
atggaattgtgcaaatacc

SEQ ID NO: 23345 - RNA, 19 nt, synthetic construct
  misc_feature 1..19: note = siRNA antisense sequence
  source 1..19: mol_type = other RNA
ggtatttgcacaattccat

SEQ ID NO: 23346 - RNA, 19 nt, synthetic construct
  misc_feature 1..19: note = siRNA sense sequence
  source 1..19: mol_type = other RNA
tggaattgtgcaaatacct

SEQ ID NO: 23347 - RNA, 19 nt, synthetic construct
  misc_feature 1..19: note = siRNA antisense sequence
  source 1..19: mol_type = other RNA
aggtatttgcacaattcca

SEQ ID NO: 23348 - RNA, 19 nt, synthetic construct
  misc_feature 1..19: note = siRNA sense sequence
  source 1..19: mol_type = other RNA
ttttggtgcacattcctaa

SEQ ID NO: 23349 - RNA, 19 nt, synthetic construct
  misc_feature 1..19: note = siRNA antisense sequence
  source 1..19: mol_type = other RNA
ttaggaatgtgcaccaaaa

SEQ ID NO: 23350 - RNA, 19 nt, synthetic construct
  misc_feature 1..19: note = siRNA sense sequence
  source 1..19: mol_type = other RNA
tttggtgcacattcctaaa

SEQ ID NO: 23351 - RNA, 19 nt, synthetic construct
  misc_feature 1..19: note = siRNA antisense sequence
  source 1..19: mol_type = other RNA
tttaggaatgtgcaccaaa

SEQ ID NO: 23352 - RNA, 19 nt, synthetic construct
  misc_feature 1..19: note = siRNA sense sequence
  source 1..19: mol_type = other RNA
ttggtgcacattcctaaaa

SEQ ID NO: 23353 - RNA, 19 nt, synthetic construct
  misc_feature 1..19: note = siRNA antisense sequence
  source 1..19: mol_type = other RNA
ttttaggaatgtgcaccaa

SEQ ID NO: 23354 - RNA, 19 nt, synthetic construct
  misc_feature 1..19: note = siRNA sense sequence
  source 1..19: mol_type = other RNA
tggtgcacattcctaaaag

SEQ ID NO: 23355 - RNA, 19 nt, synthetic construct
  misc_feature 1..19: note = siRNA antisense sequence
  source 1..19: mol_type = other RNA
cttttaggaatgtgcacca

SEQ ID NO: 23356 - RNA, 19 nt, synthetic construct
  misc_feature 1..19: note = siRNA sense sequence
  source 1..19: mol_type = other RNA
ggtgcacattcctaaaagt

SEQ ID NO: 23357 - RNA, 19 nt, synthetic construct
  misc_feature 1..19: note = siRNA antisense sequence
  source 1..19: mol_type = other RNA
acttttaggaatgtgcacc

SEQ ID NO: 23358 - RNA, 19 nt, synthetic construct
  misc_feature 1..19: note = siRNA sense sequence
  source 1..19: mol_type = other RNA
gtgcacattcctaaaagtt

SEQ ID NO: 23359 - RNA, 19 nt, synthetic construct
  misc_feature 1..19: note = siRNA antisense sequence
  source 1..19: mol_type = other RNA
aacttttaggaatgtgcac

SEQ ID NO: 23360 - RNA, 19 nt, synthetic construct
  misc_feature 1..19: note = siRNA sense sequence
  source 1..19: mol_type = other RNA
tgcacattcctaaaagtta

SEQ ID NO: 23361 - RNA, 19 nt, synthetic construct
  misc_feature 1..19: note = siRNA antisense sequence
  source 1..19: mol_type = other RNA
taacttttaggaatgtgca

SEQ ID NO: 23362 - RNA, 19 nt, synthetic construct
  misc_feature 1..19: note = siRNA sense sequence
  source 1..19: mol_type = other RNA
gcacattcctaaaagttaa

SEQ ID NO: 23363 - RNA, 19 nt, synthetic construct
  misc_feature 1..19: note = siRNA antisense sequence
  source 1..19: mol_type = other RNA
ttaacttttaggaatgtgc

SEQ ID NO: 23364 - RNA, 19 nt, synthetic construct
  misc_feature 1..19: note = siRNA sense sequence
  source 1..19: mol_type = other RNA
acattcctaaaagttaagg

SEQ ID NO: 23365 - RNA, 19 nt, synthetic construct
  misc_feature 1..19: note = siRNA antisense sequence
  source 1..19: mol_type = other RNA
ccttaacttttaggaatgt

SEQ ID NO: 23366 - RNA, 19 nt, synthetic construct
  misc_feature 1..19: note = siRNA sense sequence
  source 1..19: mol_type = other RNA
cctaaaagttaaggaagga

SEQ ID NO: 23367 - RNA, 19 nt, synthetic construct
  misc_feature 1..19: note = siRNA antisense sequence
  source 1..19: mol_type = other RNA
tccttccttaacttttagg

SEQ ID NO: 23368 - RNA, 19 nt, synthetic construct
  misc_feature 1..19: note = siRNA sense sequence
  source 1..19: mol_type = other RNA
ctaaaagttaaggaaggag

SEQ ID NO: 23369 - RNA, 19 nt, synthetic construct
  misc_feature 1..19: note = siRNA antisense sequence
  source 1..19: mol_type = other RNA
ctccttccttaacttttag

SEQ ID NO: 23370 - RNA, 19 nt, synthetic construct
  misc_feature 1..19: note = siRNA sense sequence
  source 1..19: mol_type = other RNA
taaaagttaaggaaggagc

SEQ ID NO: 23371 - RNA, 19 nt, synthetic construct
  misc_feature 1..19: note = siRNA antisense sequence
  source 1..19: mol_type = other RNA
gctccttccttaactttta

SEQ ID NO: 23372 - RNA, 19 nt, synthetic construct
  misc_feature 1..19: note = siRNA sense sequence
  source 1..19: mol_type = other RNA
aaaagttaaggaaggagcc

SEQ ID NO: 23373 - RNA, 19 nt, synthetic construct
  misc_feature 1..19: note = siRNA antisense sequence
  source 1..19: mol_type = other RNA
ggctccttccttaactttt

SEQ ID NO: 23374 - RNA, 19 nt, synthetic construct
  misc_feature 1..19: note = siRNA sense sequence
  source 1..19: mol_type = other RNA
aaagttaaggaaggagcct

SEQ ID NO: 23375 - RNA, 19 nt, synthetic construct
  misc_feature 1..19: note = siRNA antisense sequence
  source 1..19: mol_type = other RNA
aggctccttccttaacttt

SEQ ID NO: 23376 - RNA, 19 nt, synthetic construct
  misc_feature 1..19: note = siRNA sense sequence
  source 1..19: mol_type = other RNA
taaggaaggagcctcagta

SEQ ID NO: 23377 - RNA, 19 nt, synthetic construct
  misc_feature 1..19: note = siRNA antisense sequence
  source 1..19: mol_type = other RNA
tactgaggctccttcctta

SEQ ID NO: 23378 - RNA, 19 nt, synthetic construct
  misc_feature 1..19: note = siRNA sense sequence
  source 1..19: mol_type = other RNA
aaggaaggagcctcagtaa

SEQ ID NO: 23379 - RNA, 19 nt, synthetic construct
  misc_feature 1..19: note = siRNA antisense sequence
  source 1..19: mol_type = other RNA
ttactgaggctccttcctt

SEQ ID NO: 23380 - RNA, 19 nt, synthetic construct
  misc_feature 1..19: note = siRNA sense sequence
  source 1..19: mol_type = other RNA
aggaaggagcctcagtaat

SEQ ID NO: 23381 - RNA, 19 nt, synthetic construct
  misc_feature 1..19: note = siRNA antisense sequence
  source 1..19: mol_type = other RNA
attactgaggctccttcct

SEQ ID NO: 23382 - RNA, 19 nt, synthetic construct
  misc_feature 1..19: note = siRNA sense sequence
  source 1..19: mol_type = other RNA
ggaaggagcctcagtaatg

SEQ ID NO: 23383 - RNA, 19 nt, synthetic construct
  misc_feature 1..19: note = siRNA antisense sequence
  source 1..19: mol_type = other RNA
cattactgaggctccttcc

SEQ ID NO: 23384 - RNA, 19 nt, synthetic construct
  misc_feature 1..19: note = siRNA sense sequence
  source 1..19: mol_type = other RNA
gaaggagcctcagtaatgg

SEQ ID NO: 23385 - RNA, 19 nt, synthetic construct
  misc_feature 1..19: note = siRNA antisense sequence
  source 1..19: mol_type = other RNA
ccattactgaggctccttc

SEQ ID NO: 23386 - RNA, 19 nt, synthetic construct
  misc_feature 1..19: note = siRNA sense sequence
  source 1..19: mol_type = other RNA
aaggagcctcagtaatgga

SEQ ID NO: 23387 - RNA, 19 nt, synthetic construct
  misc_feature 1..19: note = siRNA antisense sequence
  source 1..19: mol_type = other RNA
tccattactgaggctcctt

SEQ ID NO: 23388 - RNA, 19 nt, synthetic construct
  misc_feature 1..19: note = siRNA sense sequence
  source 1..19: mol_type = other RNA
ggagcctcagtaatggaat

SEQ ID NO: 23389 - RNA, 19 nt, synthetic construct
  misc_feature 1..19: note = siRNA antisense sequence
  source 1..19: mol_type = other RNA
attccattactgaggctcc

SEQ ID NO: 23390 - RNA, 19 nt, synthetic construct
  misc_feature 1..19: note = siRNA sense sequence
  source 1..19: mol_type = other RNA
gcctcagtaatggaattgc

SEQ ID NO: 23391 - RNA, 19 nt, synthetic construct
  misc_feature 1..19: note = siRNA antisense sequence
  source 1..19: mol_type = other RNA
gcaattccattactgaggc

SEQ ID NO: 23392 - RNA, 19 nt, synthetic construct
  misc_feature 1..19: note = siRNA sense sequence
  source 1..19: mol_type = other RNA
cagtaatggaattgcttct

SEQ ID NO: 23393 - RNA, 19 nt, synthetic construct
  misc_feature 1..19: note = siRNA antisense sequence
  source 1..19: mol_type = other RNA
agaagcaattccattactg

SEQ ID NO: 23394 - RNA, 19 nt, synthetic construct
  misc_feature 1..19: note = siRNA sense sequence
  source 1..19: mol_type = other RNA
agtaatggaattgcttctt

SEQ ID NO: 23395 - RNA, 19 nt, synthetic construct
  misc_feature 1..19: note = siRNA antisense sequence
  source 1..19: mol_type = other RNA
aagaagcaattccattact

SEQ ID NO: 23396 - RNA, 19 nt, synthetic construct
  misc_feature 1..19: note = siRNA sense sequence
  source 1..19: mol_type = other RNA
gtaatggaattgcttcttg

SEQ ID NO: 23397 - RNA, 19 nt, synthetic construct
  misc_feature 1..19: note = siRNA antisense sequence
  source 1..19: mol_type = other RNA
caagaagcaattccattac

SEQ ID NO: 23398 - RNA, 19 nt, synthetic construct
  misc_feature 1..19: note = siRNA sense sequence
  source 1..19: mol_type = other RNA
taatggaattgcttcttga

SEQ ID NO: 23399 - RNA, 19 nt, synthetic construct
  misc_feature 1..19: note = siRNA antisense sequence
  source 1..19: mol_type = other RNA
tcaagaagcaattccatta

SEQ ID NO: 23400 - RNA, 19 nt, synthetic construct
  misc_feature 1..19: note = siRNA sense sequence
  source 1..19: mol_type = other RNA
atggaattgcttcttgacc

SEQ ID NO: 23401 - RNA, 19 nt, synthetic construct
  misc_feature 1..19: note = siRNA antisense sequence
  source 1..19: mol_type = other RNA
ggtcaagaagcaattccat

SEQ ID NO: 23402 - RNA, 19 nt, synthetic construct
  misc_feature 1..19: note = siRNA sense sequence
  source 1..19: mol_type = other RNA
tgcttcttgaccttttgca

SEQ ID NO: 23403 - RNA, 19 nt, synthetic construct
  misc_feature 1..19: note = siRNA antisense sequence
  source 1..19: mol_type = other RNA
tgcaaaaggtcaagaagca

SEQ ID NO: 23404 - RNA, 19 nt, synthetic construct
  misc_feature 1..19: note = siRNA sense sequence
  source 1..19: mol_type = other RNA
gcttcttgaccttttgcaa

SEQ ID NO: 23405 - RNA, 19 nt, synthetic construct
  misc_feature 1..19: note = siRNA antisense sequence
  source 1..19: mol_type = other RNA
ttgcaaaaggtcaagaagc

SEQ ID NO: 23406 - RNA, 19 nt, synthetic construct
  misc_feature 1..19: note = siRNA sense sequence
  source 1..19: mol_type = other RNA
acgatctaatagtgatgat

SEQ ID NO: 23407 - RNA, 19 nt, synthetic construct
  misc_feature 1..19: note = siRNA antisense sequence
  source 1..19: mol_type = other RNA
atcatcactattagatcgt

SEQ ID NO: 23408 - RNA, 19 nt, synthetic construct
  misc_feature 1..19: note = siRNA sense sequence
  source 1..19: mol_type = other RNA
cgatctaatagtgatgata

SEQ ID NO: 23409 - RNA, 19 nt, synthetic construct
  misc_feature 1..19: note = siRNA antisense sequence
  source 1..19: mol_type = other RNA
tatcatcactattagatcg

SEQ ID NO: 23410 - RNA, 19 nt, synthetic construct
  misc_feature 1..19: note = siRNA sense sequence
  source 1..19: mol_type = other RNA
gatctaatagtgatgatac

SEQ ID NO: 23411 - RNA, 19 nt, synthetic construct
  misc_feature 1..19: note = siRNA antisense sequence
  source 1..19: mol_type = other RNA
gtatcatcactattagatc

SEQ ID NO: 23412 - RNA, 19 nt, synthetic construct
  misc_feature 1..19: note = siRNA sense sequence
  source 1..19: mol_type = other RNA
tctaatagtgatgatacag

SEQ ID NO: 23413 - RNA, 19 nt, synthetic construct
  misc_feature 1..19: note = siRNA antisense sequence
  source 1..19: mol_type = other RNA
ctgtatcatcactattaga

SEQ ID NO: 23414 - RNA, 19 nt, synthetic construct
  misc_feature 1..19: note = siRNA sense sequence
  source 1..19: mol_type = other RNA
ctaatagtgatgatacagt

SEQ ID NO: 23415 - RNA, 19 nt, synthetic construct
  misc_feature 1..19: note = siRNA antisense sequence
  source 1..19: mol_type = other RNA
actgtatcatcactattag

SEQ ID NO: 23416 - RNA, 19 nt, synthetic construct
  misc_feature 1..19: note = siRNA sense sequence
  source 1..19: mol_type = other RNA
acgcctatttcaagtagtg

SEQ ID NO: 23417 - RNA, 19 nt, synthetic construct
  misc_feature 1..19: note = siRNA antisense sequence
  source 1..19: mol_type = other RNA
cactacttgaaataggcgt

SEQ ID NO: 23418 - RNA, 19 nt, synthetic construct
  misc_feature 1..19: note = siRNA sense sequence
  source 1..19: mol_type = other RNA
cgcctatttcaagtagtga

SEQ ID NO: 23419 - RNA, 19 nt, synthetic construct
  misc_feature 1..19: note = siRNA antisense sequence
  source 1..19: mol_type = other RNA
tcactacttgaaataggcg

SEQ ID NO: 23420 - RNA, 19 nt, synthetic construct
  misc_feature 1..19: note = siRNA sense sequence
  source 1..19: mol_type = other RNA
gccggtctttcctgtgtct

SEQ ID NO: 23421 - RNA, 19 nt, synthetic construct
  misc_feature 1..19: note = siRNA antisense sequence
  source 1..19: mol_type = other RNA
agacacaggaaagaccggc

SEQ ID NO: 23422 - RNA, 19 nt, synthetic construct
  misc_feature 1..19: note = siRNA sense sequence
  source 1..19: mol_type = other RNA
ggtctttcctgtgtctgtg

SEQ ID NO: 23423 - RNA, 19 nt, synthetic construct
  misc_feature 1..19: note = siRNA antisense sequence
  source 1..19: mol_type = other RNA
cacagacacaggaaagacc

SEQ ID NO: 23424 - RNA, 19 nt, synthetic construct
  misc_feature 1..19: note = siRNA sense sequence
  source 1..19: mol_type = other RNA
tctttcctgtgtctgtggg

SEQ ID NO: 23425 - RNA, 19 nt, synthetic construct
  misc_feature 1..19: note = siRNA antisense sequence
  source 1..19: mol_type = other RNA
cccacagacacaggaaaga

SEQ ID NO: 23426 - RNA, 19 nt, synthetic construct
  misc_feature 1..19: note = siRNA sense sequence
  source 1..19: mol_type = other RNA
tttcctgtgtctgtgggcc

SEQ ID NO: 23427 - RNA, 19 nt, synthetic construct
  misc_feature 1..19: note = siRNA antisense sequence
  source 1..19: mol_type = other RNA
ggcccacagacacaggaaa

SEQ ID NO: 23428 - RNA, 19 nt, synthetic construct
  misc_feature 1..19: note = siRNA sense sequence
  source 1..19: mol_type = other RNA
ttcctgtgtctgtgggcct

SEQ ID NO: 23429 - RNA, 19 nt, synthetic construct
  misc_feature 1..19: note = siRNA antisense sequence
  source 1..19: mol_type = other RNA
aggcccacagacacaggaa

SEQ ID NO: 23430 - RNA, 19 nt, synthetic construct
  misc_feature 1..19: note = siRNA sense sequence
  source 1..19: mol_type = other RNA
tcctgtgtctgtgggcctt

SEQ ID NO: 23431 - RNA, 19 nt, synthetic construct
  misc_feature 1..19: note = siRNA antisense sequence
  source 1..19: mol_type = other RNA
aaggcccacagacacagga

SEQ ID NO: 23432 - RNA, 19 nt, synthetic construct
  misc_feature 1..19: note = siRNA sense sequence
  source 1..19: mol_type = other RNA
cctgtgtctgtgggccttc

SEQ ID NO: 23433 - RNA, 19 nt, synthetic construct
  misc_feature 1..19: note = siRNA antisense sequence
  source 1..19: mol_type = other RNA
gaaggcccacagacacagg

SEQ ID NO: 23434 - RNA, 19 nt, synthetic construct
  misc_feature 1..19: note = siRNA sense sequence
  source 1..19: mol_type = other RNA
tgtgtctgtgggccttcct

SEQ ID NO: 23435 - RNA, 19 nt, synthetic construct
  misc_feature 1..19: note = siRNA antisense sequence
  source 1..19: mol_type = other RNA
aggaaggcccacagacaca

SEQ ID NO: 23436 - RNA, 19 nt, synthetic construct
  misc_feature 1..19: note = siRNA sense sequence
  source 1..19: mol_type = other RNA
gtgtctgtgggccttcctc

SEQ ID NO: 23437 - RNA, 19 nt, synthetic construct
  misc_feature 1..19: note = siRNA antisense sequence
  source 1..19: mol_type = other RNA
gaggaaggcccacagacac

SEQ ID NO: 23438 - RNA, 19 nt, synthetic construct
  misc_feature 1..19: note = siRNA sense sequence
  source 1..19: mol_type = other RNA
tgggccttcctcctggtgt

SEQ ID NO: 23439 - RNA, 19 nt, synthetic construct
  misc_feature 1..19: note = siRNA antisense sequence
  source 1..19: mol_type = other RNA
acaccaggaggaaggccca

SEQ ID NO: 23440 - RNA, 19 nt, synthetic construct
  misc_feature 1..19: note = siRNA sense sequence
  source 1..19: mol_type = other RNA
ggccttcctcctggtgtga

SEQ ID NO: 23441 - RNA, 19 nt, synthetic construct
  misc_feature 1..19: note = siRNA antisense sequence
  source 1..19: mol_type = other RNA
tcacaccaggaggaaggcc

SEQ ID NO: 23442 - RNA, 19 nt, synthetic construct
  misc_feature 1..19: note = siRNA sense sequence
  source 1..19: mol_type = other RNA
ccttcctcctggtgtgaca

SEQ ID NO: 23443 - RNA, 19 nt, synthetic construct
  misc_feature 1..19: note = siRNA antisense sequence
  source 1..19: mol_type = other RNA
tgtcacaccaggaggaagg

SEQ ID NO: 23444 - RNA, 19 nt, synthetic construct
  misc_feature 1..19: note = siRNA sense sequence
  source 1..19: mol_type = other RNA
cttcctcctggtgtgacag

SEQ ID NO: 23445 - RNA, 19 nt, synthetic construct
  misc_feature 1..19: note = siRNA antisense sequence
  source 1..19: mol_type = other RNA
ctgtcacaccaggaggaag

SEQ ID NO: 23446 - RNA, 19 nt, synthetic construct
  misc_feature 1..19: note = siRNA sense sequence
  source 1..19: mol_type = other RNA
cctcctggtgtgacagact

SEQ ID NO: 23447 - RNA, 19 nt, synthetic construct
  misc_feature 1..19: note = siRNA antisense sequence
  source 1..19: mol_type = other RNA
agtctgtcacaccaggagg

SEQ ID NO: 23448 - RNA, 19 nt, synthetic construct
  misc_feature 1..19: note = siRNA sense sequence
  source 1..19: mol_type = other RNA
ctcctggtgtgacagactt

SEQ ID NO: 23449 - RNA, 19 nt, synthetic construct
  misc_feature 1..19: note = siRNA antisense sequence
  source 1..19: mol_type = other RNA
aagtctgtcacaccaggag

SEQ ID NO: 23450 - RNA, 19 nt, synthetic construct
  misc_feature 1..19: note = siRNA sense sequence
  source 1..19: mol_type = other RNA
acttcctaactagtctgaa

SEQ ID NO: 23451 - RNA, 19 nt, synthetic construct
  misc_feature 1..19: note = siRNA antisense sequence
  source 1..19: mol_type = other RNA
ttcagactagttaggaagt

SEQ ID NO: 23452 - RNA, 19 nt, synthetic construct
  misc_feature 1..19: note = siRNA sense sequence
  source 1..19: mol_type = other RNA
aactgacacttccctatac

SEQ ID NO: 23453 - RNA, 19 nt, synthetic construct
  misc_feature 1..19: note = siRNA antisense sequence
  source 1..19: mol_type = other RNA
gtatagggaagtgtcagtt

SEQ ID NO: 23454 - RNA, 19 nt, synthetic construct
  misc_feature 1..19: note = siRNA sense sequence
  source 1..19: mol_type = other RNA
actgacacttccctatact

SEQ ID NO: 23455 - RNA, 19 nt, synthetic construct
  misc_feature 1..19: note = siRNA antisense sequence
  source 1..19: mol_type = other RNA
agtatagggaagtgtcagt

SEQ ID NO: 23456 - RNA, 19 nt, synthetic construct
  misc_feature 1..19: note = siRNA sense sequence
  source 1..19: mol_type = other RNA
ctgacacttccctatactt

SEQ ID NO: 23457 - RNA, 19 nt, synthetic construct
  misc_feature 1..19: note = siRNA antisense sequence
  source 1..19: mol_type = other RNA
aagtatagggaagtgtcag

SEQ ID NO: 23458 - RNA, 19 nt, synthetic construct
  misc_feature 1..19: note = siRNA sense sequence
  source 1..19: mol_type = other RNA
tgacacttccctatacttt

SEQ ID NO: 23459 - RNA, 19 nt, synthetic construct
  misc_feature 1..19: note = siRNA antisense sequence
  source 1..19: mol_type = other RNA
aaagtatagggaagtgtca

SEQ ID NO: 23460 - RNA, 19 nt, synthetic construct
  misc_feature 1..19: note = siRNA sense sequence
  source 1..19: mol_type = other RNA
ttgtacatctatctcctaa

SEQ ID NO: 23461 - RNA, 19 nt, synthetic construct
  misc_feature 1..19: note = siRNA antisense sequence
  source 1..19: mol_type = other RNA
ttaggagatagatgtacaa

SEQ ID NO: 23462 - RNA, 19 nt, synthetic construct
  misc_feature 1..19: note = siRNA sense sequence
  source 1..19: mol_type = other RNA
tgtacatctatctcctaat

SEQ ID NO: 23463 - RNA, 19 nt, synthetic construct
  misc_feature 1..19: note = siRNA antisense sequence
  source 1..19: mol_type = other RNA
attaggagatagatgtaca

SEQ ID NO: 23464 - RNA, 19 nt, synthetic construct
  misc_feature 1..19: note = siRNA sense sequence
  source 1..19: mol_type = other RNA
gtacatctatctcctaatt

SEQ ID NO: 23465 - RNA, 19 nt, synthetic construct
  misc_feature 1..19: note = siRNA antisense sequence
  source 1..19: mol_type = other RNA
aattaggagatagatgtac

SEQ ID NO: 23466 - RNA, 19 nt, synthetic construct
  misc_feature 1..19: note = siRNA sense sequence
  source 1..19: mol_type = other RNA
tacatctatctcctaattc

SEQ ID NO: 23467 - RNA, 19 nt, synthetic construct
  misc_feature 1..19: note = siRNA antisense sequence
  source 1..19: mol_type = other RNA
gaattaggagatagatgta

SEQ ID NO: 23468 - RNA, 19 nt, synthetic construct
  misc_feature 1..19: note = siRNA sense sequence
  source 1..19: mol_type = other RNA
acatctatctcctaattca

SEQ ID NO: 23469 - RNA, 19 nt, synthetic construct
  misc_feature 1..19: note = siRNA antisense sequence
  source 1..19: mol_type = other RNA
tgaattaggagatagatgt

SEQ ID NO: 23470 - RNA, 19 nt, synthetic construct
  misc_feature 1..19: note = siRNA sense sequence
  source 1..19: mol_type = other RNA
catctatctcctaattcaa

SEQ ID NO: 23471 - RNA, 19 nt, synthetic construct
  misc_feature 1..19: note = siRNA antisense sequence
  source 1..19: mol_type = other RNA
ttgaattaggagatagatg

SEQ ID NO: 23472 - RNA, 19 nt, synthetic construct
  misc_feature 1..19: note = siRNA sense sequence
  source 1..19: mol_type = other RNA
ctatctcctaattcaaaag

SEQ ID NO: 23473 - RNA, 19 nt, synthetic construct
  misc_feature 1..19: note = siRNA antisense sequence
  source 1..19: mol_type = other RNA
cttttgaattaggagatag

SEQ ID NO: 23474 - RNA, 19 nt, synthetic construct
  misc_feature 1..19: note = siRNA sense sequence
  source 1..19: mol_type = other RNA
ttcattataattccgtgag

SEQ ID NO: 23475 - RNA, 19 nt, synthetic construct
  misc_feature 1..19: note = siRNA antisense sequence
  source 1..19: mol_type = other RNA
ctcacggaattataatgaa

SEQ ID NO: 23476 - RNA, 19 nt, synthetic construct
  misc_feature 1..19: note = siRNA sense sequence
  source 1..19: mol_type = other RNA
ttataattccgtgagtatc

SEQ ID NO: 23477 - RNA, 19 nt, synthetic construct
  misc_feature 1..19: note = siRNA antisense sequence
  source 1..19: mol_type = other RNA
gatactcacggaattataa

SEQ ID NO: 23478 - RNA, 19 nt, synthetic construct
  misc_feature 1..19: note = siRNA sense sequence
  source 1..19: mol_type = other RNA
tataattccgtgagtatct

SEQ ID NO: 23479 - RNA, 19 nt, synthetic construct
  misc_feature 1..19: note = siRNA antisense sequence
  source 1..19: mol_type = other RNA
agatactcacggaattata

SEQ ID NO: 23480 - RNA, 19 nt, synthetic construct
  misc_feature 1..19: note = siRNA sense sequence
  source 1..19: mol_type = other RNA
ataattccgtgagtatctt

SEQ ID NO: 23481 - RNA, 19 nt, synthetic construct
  misc_feature 1..19: note = siRNA antisense sequence
  source 1..19: mol_type = other RNA
aagatactcacggaattat

SEQ ID NO: 23482 - RNA, 19 nt, synthetic construct
  misc_feature 1..19: note = siRNA sense sequence
  source 1..19: mol_type = other RNA
taattccgtgagtatcttt

SEQ ID NO: 23483 - RNA, 19 nt, synthetic construct
  misc_feature 1..19: note = siRNA antisense sequence
  source 1..19: mol_type = other RNA
aaagatactcacggaatta

SEQ ID NO: 23484 - RNA, 19 nt, synthetic construct
  misc_feature 1..19: note = siRNA sense sequence
  source 1..19: mol_type = other RNA
aattccgtgagtatcttta

SEQ ID NO: 23485 - RNA, 19 nt, synthetic construct
  misc_feature 1..19: note = siRNA antisense sequence
  source 1..19: mol_type = other RNA
taaagatactcacggaatt

SEQ ID NO: 23486 - RNA, 19 nt, synthetic construct
  misc_feature 1..19: note = siRNA sense sequence
  source 1..19: mol_type = other RNA
attccgtgagtatctttaa

SEQ ID NO: 23487 - RNA, 19 nt, synthetic construct
  misc_feature 1..19: note = siRNA antisense sequence
  source 1..19: mol_type = other RNA
ttaaagatactcacggaat

SEQ ID NO: 23488 - RNA, 19 nt, synthetic construct
  misc_feature 1..19: note = siRNA sense sequence
  source 1..19: mol_type = other RNA
ttccgtgagtatctttaaa

SEQ ID NO: 23489 - RNA, 19 nt, synthetic construct
  misc_feature 1..19: note = siRNA antisense sequence
  source 1..19: mol_type = other RNA
tttaaagatactcacggaa

SEQ ID NO: 23490 - RNA, 19 nt, synthetic construct
  misc_feature 1..19: note = siRNA sense sequence
  source 1..19: mol_type = other RNA
tccgtgagtatctttaaat

SEQ ID NO: 23491 - RNA, 19 nt, synthetic construct
  misc_feature 1..19: note = siRNA antisense sequence
  source 1..19: mol_type = other RNA
atttaaagatactcacgga

SEQ ID NO: 23492 - RNA, 19 nt, synthetic construct
  misc_feature 1..19: note = siRNA sense sequence
  source 1..19: mol_type = other RNA
ccgtgagtatctttaaatt

SEQ ID NO: 23493 - RNA, 19 nt, synthetic construct
  misc_feature 1..19: note = siRNA antisense sequence
  source 1..19: mol_type = other RNA
aatttaaagatactcacgg

SEQ ID NO: 23494 - RNA, 19 nt, synthetic construct
  misc_feature 1..19: note = siRNA sense sequence
  source 1..19: mol_type = other RNA
attttcagtaaggatttgg

SEQ ID NO: 23495 - RNA, 19 nt, synthetic construct
  misc_feature 1..19: note = siRNA antisense sequence
  source 1..19: mol_type = other RNA
ccaaatccttactgaaaat

SEQ ID NO: 23496 - RNA, 19 nt, synthetic construct
  misc_feature 1..19: note = siRNA sense sequence
  source 1..19: mol_type = other RNA
ttttcagtaaggatttgga

SEQ ID NO: 23497 - RNA, 19 nt, synthetic construct
  misc_feature 1..19: note = siRNA antisense sequence
  source 1..19: mol_type = other RNA
tccaaatccttactgaaaa

SEQ ID NO: 23498 - RNA, 19 nt, synthetic construct
  misc_feature 1..19: note = siRNA sense sequence
  source 1..19: mol_type = other RNA
ataatctatgcagtactga

SEQ ID NO: 23499 - RNA, 19 nt, synthetic construct
  misc_feature 1..19: note = siRNA antisense sequence
  source 1..19: mol_type = other RNA
tcagtactgcatagattat

SEQ ID NO: 23500 - RNA, 19 nt, synthetic construct
  misc_feature 1..19: note = siRNA sense sequence
  source 1..19: mol_type = other RNA
taatctatgcagtactgaa

SEQ ID NO: 23501 - RNA, 19 nt, synthetic construct
  misc_feature 1..19: note = siRNA antisense sequence
  source 1..19: mol_type = other RNA
ttcagtactgcatagatta

SEQ ID NO: 23502 - RNA, 19 nt, synthetic construct
  misc_feature 1..19: note = siRNA sense sequence
  source 1..19: mol_type = other RNA
aaccaatacatgttaggcc

SEQ ID NO: 23503 - RNA, 19 nt, synthetic construct
  misc_feature 1..19: note = siRNA antisense sequence
  source 1..19: mol_type = other RNA
ggcctaacatgtattggtt

SEQ ID NO: 23504 - RNA, 19 nt, synthetic construct
  misc_feature 1..19: note = siRNA sense sequence
  source 1..19: mol_type = other RNA
accaatacatgttaggcca

SEQ ID NO: 23505 - RNA, 19 nt, synthetic construct
  misc_feature 1..19: note = siRNA antisense sequence
  source 1..19: mol_type = other RNA
tggcctaacatgtattggt

SEQ ID NO: 23506 - RNA, 19 nt, synthetic construct
  misc_feature 1..19: note = siRNA sense sequence
  source 1..19: mol_type = other RNA
ccaatacatgttaggccat

SEQ ID NO: 23507 - RNA, 19 nt, synthetic construct
  misc_feature 1..19: note = siRNA antisense sequence
  source 1..19: mol_type = other RNA
atggcctaacatgtattgg

SEQ ID NO: 23508 - RNA, 19 nt, synthetic construct
  misc_feature 1..19: note = siRNA sense sequence
  source 1..19: mol_type = other RNA
caatacatgttaggccata

SEQ ID NO: 23509 - RNA, 19 nt, synthetic construct
  misc_feature 1..19: note = siRNA antisense sequence
  source 1..19: mol_type = other RNA
tatggcctaacatgtattg

SEQ ID NO: 23510 - RNA, 19 nt, synthetic construct
  misc_feature 1..19: note = siRNA sense sequence
  source 1..19: mol_type = other RNA
aatacatgttaggccatag

SEQ ID NO: 23511 - RNA, 19 nt, synthetic construct
  misc_feature 1..19: note = siRNA antisense sequence
  source 1..19: mol_type = other RNA
ctatggcctaacatgtatt

SEQ ID NO: 23512 - RNA, 19 nt, synthetic construct
  misc_feature 1..19: note = siRNA sense sequence
  source 1..19: mol_type = other RNA
atacatgttaggccatagg

SEQ ID NO: 23513 - RNA, 19 nt, synthetic construct
  misc_feature 1..19: note = siRNA antisense sequence
  source 1..19: mol_type = other RNA
cctatggcctaacatgtat

SEQ ID NO: 23514 - RNA, 19 nt, synthetic construct
  misc_feature 1..19: note = siRNA sense sequence
  source 1..19: mol_type = other RNA
tacatgttaggccataggt

SEQ ID NO: 23515 - RNA, 19 nt, synthetic construct
  misc_feature 1..19: note = siRNA antisense sequence
  source 1..19: mol_type = other RNA
acctatggcctaacatgta

SEQ ID NO: 23516 - RNA, 19 nt, synthetic construct
  misc_feature 1..19: note = siRNA sense sequence
  source 1..19: mol_type = other RNA
acatgttaggccataggtt

SEQ ID NO: 23517 - RNA, 19 nt, synthetic construct
  misc_feature 1..19: note = siRNA antisense sequence
  source 1..19: mol_type = other RNA
aacctatggcctaacatgt

SEQ ID NO: 23518 - RNA, 19 nt, synthetic construct
  misc_feature 1..19: note = siRNA sense sequence
  source 1..19: mol_type = other RNA
catgttaggccataggttc

SEQ ID NO: 23519 - RNA, 19 nt, synthetic construct
  misc_feature 1..19: note = siRNA antisense sequence
  source 1..19: mol_type = other RNA
gaacctatggcctaacatg

SEQ ID NO: 23520 - RNA, 19 nt, synthetic construct
  misc_feature 1..19: note = siRNA sense sequence
  source 1..19: mol_type = other RNA
atgttaggccataggttct

SEQ ID NO: 23521 - RNA, 19 nt, synthetic construct
  misc_feature 1..19: note = siRNA antisense sequence
  source 1..19: mol_type = other RNA
agaacctatggcctaacat

SEQ ID NO: 23522 - RNA, 19 nt, synthetic construct
  misc_feature 1..19: note = siRNA sense sequence
  source 1..19: mol_type = other RNA
tgttaggccataggttctt

SEQ ID NO: 23523 - RNA, 19 nt, synthetic construct
  misc_feature 1..19: note = siRNA antisense sequence
  source 1..19: mol_type = other RNA
aagaacctatggcctaaca

SEQ ID NO: 23524 - RNA, 19 nt, synthetic construct
  misc_feature 1..19: note = siRNA sense sequence
  source 1..19: mol_type = other RNA
gttaggccataggttctta

SEQ ID NO: 23525 - RNA, 19 nt, synthetic construct
  misc_feature 1..19: note = siRNA antisense sequence
  source 1..19: mol_type = other RNA
taagaacctatggcctaac

SEQ ID NO: 23526 - RNA, 19 nt, synthetic construct
  misc_feature 1..19: note = siRNA sense sequence
  source 1..19: mol_type = other RNA
ttaggccataggttcttaa

SEQ ID NO: 23527 - RNA, 19 nt, synthetic construct
  misc_feature 1..19: note = siRNA antisense sequence
  source 1..19: mol_type = other RNA
ttaagaacctatggcctaa

SEQ ID NO: 23528 - RNA, 19 nt, synthetic construct
  misc_feature 1..19: note = siRNA sense sequence
  source 1..19: mol_type = other RNA
taggccataggttcttaaa

SEQ ID NO: 23529 - RNA, 19 nt, synthetic construct
  misc_feature 1..19: note = siRNA antisense sequence
  source 1..19: mol_type = other RNA
tttaagaacctatggccta

SEQ ID NO: 23530 - RNA, 19 nt, synthetic construct
  misc_feature 1..19: note = siRNA sense sequence
  source 1..19: mol_type = other RNA
ggccataggttcttaaatt

SEQ ID NO: 23531 - RNA, 19 nt, synthetic construct
  misc_feature 1..19: note = siRNA antisense sequence
  source 1..19: mol_type = other RNA
aatttaagaacctatggcc

SEQ ID NO: 23532 - RNA, 19 nt, synthetic construct
  misc_feature 1..19: note = siRNA sense sequence
  source 1..19: mol_type = other RNA
gccataggttcttaaattt

SEQ ID NO: 23533 - RNA, 19 nt, synthetic construct
  misc_feature 1..19: note = siRNA antisense sequence
  source 1..19: mol_type = other RNA
aaatttaagaacctatggc

SEQ ID NO: 23534 - RNA, 19 nt, synthetic construct
  misc_feature 1..19: note = siRNA sense sequence
  source 1..19: mol_type = other RNA
ggttcttaaatttagctac

SEQ ID NO: 23535 - RNA, 19 nt, synthetic construct
  misc_feature 1..19: note = siRNA antisense sequence
  source 1..19: mol_type = other RNA
gtagctaaatttaagaacc

SEQ ID NO: 23536 - RNA, 19 nt, synthetic construct
  misc_feature 1..19: note = siRNA sense sequence
  source 1..19: mol_type = other RNA
gttcttaaatttagctacc

SEQ ID NO: 23537 - RNA, 19 nt, synthetic construct
  misc_feature 1..19: note = siRNA antisense sequence
  source 1..19: mol_type = other RNA
ggtagctaaatttaagaac

SEQ ID NO: 23538 - RNA, 19 nt, synthetic construct
  misc_feature 1..19: note = siRNA sense sequence
  source 1..19: mol_type = other RNA
taaatttagctacctgttc

SEQ ID NO: 23539 - RNA, 19 nt, synthetic construct
  misc_feature 1..19: note = siRNA antisense sequence
  source 1..19: mol_type = other RNA
gaacaggtagctaaattta

SEQ ID NO: 23540 - RNA, 19 nt, synthetic construct
  misc_feature 1..19: note = siRNA sense sequence
  source 1..19: mol_type = other RNA
aaatttagctacctgttca

SEQ ID NO: 23541 - RNA, 19 nt, synthetic construct
  misc_feature 1..19: note = siRNA antisense sequence
  source 1..19: mol_type = other RNA
tgaacaggtagctaaattt

SEQ ID NO: 23542 - RNA, 19 nt, synthetic construct
  misc_feature 1..19: note = siRNA sense sequence
  source 1..19: mol_type = other RNA
aatttagctacctgttcac

SEQ ID NO: 23543 - RNA, 19 nt, synthetic construct
  misc_feature 1..19: note = siRNA antisense sequence
  source 1..19: mol_type = other RNA
gtgaacaggtagctaaatt

SEQ ID NO: 23544 - RNA, 19 nt, synthetic construct
  misc_feature 1..19: note = siRNA sense sequence
  source 1..19: mol_type = other RNA
atttagctacctgttcacc

SEQ ID NO: 23545 - RNA, 19 nt, synthetic construct
  misc_feature 1..19: note = siRNA antisense sequence
  source 1..19: mol_type = other RNA
ggtgaacaggtagctaaat

SEQ ID NO: 23546 - RNA, 19 nt, synthetic construct
  misc_feature 1..19: note = siRNA sense sequence
  source 1..19: mol_type = other RNA
tttagctacctgttcacct

SEQ ID NO: 23547 - RNA, 19 nt, synthetic construct
  misc_feature 1..19: note = siRNA antisense sequence
  source 1..19: mol_type = other RNA
aggtgaacaggtagctaaa

SEQ ID NO: 23548 - RNA, 19 nt, synthetic construct
  misc_feature 1..19: note = siRNA sense sequence
  source 1..19: mol_type = other RNA
ttagctacctgttcacctc

SEQ ID NO: 23549 - RNA, 19 nt, synthetic construct
  misc_feature 1..19: note = siRNA antisense sequence
  source 1..19: mol_type = other RNA
gaggtgaacaggtagctaa

SEQ ID NO: 23550 - RNA, 19 nt, synthetic construct
  misc_feature 1..19: note = siRNA sense sequence
  source 1..19: mol_type = other RNA
tagctacctgttcacctca

SEQ ID NO: 23551 - RNA, 19 nt, synthetic construct
  misc_feature 1..19: note = siRNA antisense sequence
  source 1..19: mol_type = other RNA
tgaggtgaacaggtagcta

SEQ ID NO: 23552 - RNA, 19 nt, synthetic construct
  misc_feature 1..19: note = siRNA sense sequence
  source 1..19: mol_type = other RNA
agctacctgttcacctcaa

SEQ ID NO: 23553 - RNA, 19 nt, synthetic construct
  misc_feature 1..19: note = siRNA antisense sequence
  source 1..19: mol_type = other RNA
ttgaggtgaacaggtagct

SEQ ID NO: 23554 - RNA, 19 nt, synthetic construct
  misc_feature 1..19: note = siRNA sense sequence
  source 1..19: mol_type = other RNA
gctacctgttcacctcaac

SEQ ID NO: 23555 - RNA, 19 nt, synthetic construct
  misc_feature 1..19: note = siRNA antisense sequence
  source 1..19: mol_type = other RNA
gttgaggtgaacaggtagc

SEQ ID NO: 23556 - RNA, 19 nt, synthetic construct
  misc_feature 1..19: note = siRNA sense sequence
  source 1..19: mol_type = other RNA
ctacctgttcacctcaact

SEQ ID NO: 23557 - RNA, 19 nt, synthetic construct
  misc_feature 1..19: note = siRNA antisense sequence
  source 1..19: mol_type = other RNA
agttgaggtgaacaggtag

SEQ ID NO: 23558 - RNA, 19 nt, synthetic construct
  misc_feature 1..19: note = siRNA sense sequence
  source 1..19: mol_type = other RNA
ctcagtgtccaggttgcag

SEQ ID NO: 23559 - RNA, 19 nt, synthetic construct
  misc_feature 1..19: note = siRNA antisense sequence
  source 1..19: mol_type = other RNA
ctgcaacctggacactgag

SEQ ID NO: 23560 - RNA, 19 nt, synthetic construct
  misc_feature 1..19: note = siRNA sense sequence
  source 1..19: mol_type = other RNA
tcagtgtccaggttgcagc

SEQ ID NO: 23561 - RNA, 19 nt, synthetic construct
  misc_feature 1..19: note = siRNA antisense sequence
  source 1..19: mol_type = other RNA
gctgcaacctggacactga

SEQ ID NO: 23562 - RNA, 19 nt, synthetic construct
  misc_feature 1..19: note = siRNA sense sequence
  source 1..19: mol_type = other RNA
cagactagttaaataacgt

SEQ ID NO: 23563 - RNA, 19 nt, synthetic construct
  misc_feature 1..19: note = siRNA antisense sequence
  source 1..19: mol_type = other RNA
acgttatttaactagtctg

SEQ ID NO: 23564 - RNA, 19 nt, synthetic construct
  misc_feature 1..19: note = siRNA sense sequence
  source 1..19: mol_type = other RNA
taacgttttatccctagaa

SEQ ID NO: 23565 - RNA, 19 nt, synthetic construct
  misc_feature 1..19: note = siRNA antisense sequence
  source 1..19: mol_type = other RNA
ttctagggataaaacgtta

SEQ ID NO: 23566 - RNA, 19 nt, synthetic construct
  misc_feature 1..19: note = siRNA sense sequence
  source 1..19: mol_type = other RNA
acccagatgattccaatag

SEQ ID NO: 23567 - RNA, 19 nt, synthetic construct
  misc_feature 1..19: note = siRNA antisense sequence
  source 1..19: mol_type = other RNA
ctattggaatcatctgggt

SEQ ID NO: 23568 - RNA, 19 nt, synthetic construct
  misc_feature 1..19: note = siRNA sense sequence
  source 1..19: mol_type = other RNA
ccagatgattccaataggc

SEQ ID NO: 23569 - RNA, 19 nt, synthetic construct
  misc_feature 1..19: note = siRNA antisense sequence
  source 1..19: mol_type = other RNA
gcctattggaatcatctgg

SEQ ID NO: 23570 - RNA, 19 nt, synthetic construct
  misc_feature 1..19: note = siRNA sense sequence
  source 1..19: mol_type = other RNA
cagatgattccaataggcg

SEQ ID NO: 23571 - RNA, 19 nt, synthetic construct
  misc_feature 1..19: note = siRNA antisense sequence
  source 1..19: mol_type = other RNA
cgcctattggaatcatctg

SEQ ID NO: 23572 - RNA, 19 nt, synthetic construct
  misc_feature 1..19: note = siRNA sense sequence
  source 1..19: mol_type = other RNA
agatgattccaataggcgt

SEQ ID NO: 23573 - RNA, 19 nt, synthetic construct
  misc_feature 1..19: note = siRNA antisense sequence
  source 1..19: mol_type = other RNA
acgcctattggaatcatct

SEQ ID NO: 23574 - RNA, 19 nt, synthetic construct
  misc_feature 1..19: note = siRNA sense sequence
  source 1..19: mol_type = other RNA
gatgattccaataggcgtc

SEQ ID NO: 23575 - RNA, 19 nt, synthetic construct
  misc_feature 1..19: note = siRNA antisense sequence
  source 1..19: mol_type = other RNA
gacgcctattggaatcatc

SEQ ID NO: 23576 - RNA, 19 nt, synthetic construct
  misc_feature 1..19: note = siRNA sense sequence
  source 1..19: mol_type = other RNA
atgattccaataggcgtca

SEQ ID NO: 23577 - RNA, 19 nt, synthetic construct
  misc_feature 1..19: note = siRNA antisense sequence
  source 1..19: mol_type = other RNA
tgacgcctattggaatcat

SEQ ID NO: 23578 - RNA, 19 nt, synthetic construct
  misc_feature 1..19: note = siRNA sense sequence
  source 1..19: mol_type = other RNA
tgattccaataggcgtcaa

SEQ ID NO: 23579 - RNA, 19 nt, synthetic construct
  misc_feature 1..19: note = siRNA antisense sequence
  source 1..19: mol_type = other RNA
ttgacgcctattggaatca

SEQ ID NO: 23580 - RNA, 19 nt, synthetic construct
  misc_feature 1..19: note = siRNA sense sequence
  source 1..19: mol_type = other RNA
gattccaataggcgtcaag

SEQ ID NO: 23581 - RNA, 19 nt, synthetic construct
  misc_feature 1..19: note = siRNA antisense sequence
  source 1..19: mol_type = other RNA
cttgacgcctattggaatc

SEQ ID NO: 23582 - RNA, 19 nt, synthetic construct
  misc_feature 1..19: note = siRNA sense sequence
  source 1..19: mol_type = other RNA
attccaataggcgtcaagg

SEQ ID NO: 23583 - RNA, 19 nt, synthetic construct
  misc_feature 1..19: note = siRNA antisense sequence
  source 1..19: mol_type = other RNA
ccttgacgcctattggaat

SEQ ID NO: 23584 - RNA, 19 nt, synthetic construct
  misc_feature 1..19: note = siRNA sense sequence
  source 1..19: mol_type = other RNA
ttccaataggcgtcaaggc

SEQ ID NO: 23585 - RNA, 19 nt, synthetic construct
  misc_feature 1..19: note = siRNA antisense sequence
  source 1..19: mol_type = other RNA
gccttgacgcctattggaa

SEQ ID NO: 23586 - RNA, 19 nt, synthetic construct
  misc_feature 1..19: note = siRNA sense sequence
  source 1..19: mol_type = other RNA
tccaataggcgtcaaggct

SEQ ID NO: 23587 - RNA, 19 nt, synthetic construct
  misc_feature 1..19: note = siRNA antisense sequence
  source 1..19: mol_type = other RNA
agccttgacgcctattgga

SEQ ID NO: 23588 - RNA, 19 nt, synthetic construct
  misc_feature 1..19: note = siRNA sense sequence
  source 1..19: mol_type = other RNA
ccaataggcgtcaaggcta

SEQ ID NO: 23589 - RNA, 19 nt, synthetic construct
  misc_feature 1..19: note = siRNA antisense sequence
  source 1..19: mol_type = other RNA
tagccttgacgcctattgg

SEQ ID NO: 23590 - RNA, 19 nt, synthetic construct
  misc_feature 1..19: note = siRNA sense sequence
  source 1..19: mol_type = other RNA
caataggcgtcaaggctaa

SEQ ID NO: 23591 - RNA, 19 nt, synthetic construct
  misc_feature 1..19: note = siRNA antisense sequence
  source 1..19: mol_type = other RNA
ttagccttgacgcctattg

SEQ ID NO: 23592 - RNA, 19 nt, synthetic construct
  misc_feature 1..19: note = siRNA sense sequence
  source 1..19: mol_type = other RNA
aataggcgtcaaggctaat

SEQ ID NO: 23593 - RNA, 19 nt, synthetic construct
  misc_feature 1..19: note = siRNA antisense sequence
  source 1..19: mol_type = other RNA
attagccttgacgcctatt

SEQ ID NO: 23594 - RNA, 19 nt, synthetic construct
  misc_feature 1..19: note = siRNA sense sequence
  source 1..19: mol_type = other RNA
ataggcgtcaaggctaata

SEQ ID NO: 23595 - RNA, 19 nt, synthetic construct
  misc_feature 1..19: note = siRNA antisense sequence
  source 1..19: mol_type = other RNA
tattagccttgacgcctat

SEQ ID NO: 23596 - RNA, 19 nt, synthetic construct
  misc_feature 1..19: note = siRNA sense sequence
  source 1..19: mol_type = other RNA
taggcgtcaaggctaatag

SEQ ID NO: 23597 - RNA, 19 nt, synthetic construct
  misc_feature 1..19: note = siRNA antisense sequence
  source 1..19: mol_type = other RNA
ctattagccttgacgccta

SEQ ID NO: 23598 - RNA, 19 nt, synthetic construct
  misc_feature 1..19: note = siRNA sense sequence
  source 1..19: mol_type = other RNA
aggcgtcaaggctaatagc

SEQ ID NO: 23599 - RNA, 19 nt, synthetic construct
  misc_feature 1..19: note = siRNA antisense sequence
  source 1..19: mol_type = other RNA
gctattagccttgacgcct

SEQ ID NO: 23600 - RNA, 19 nt, synthetic construct
  misc_feature 1..19: note = siRNA sense sequence
  source 1..19: mol_type = other RNA
aatagccactgattcaggc

SEQ ID NO: 23601 - RNA, 19 nt, synthetic construct
  misc_feature 1..19: note = siRNA antisense sequence
  source 1..19: mol_type = other RNA
gcctgaatcagtggctatt

SEQ ID NO: 23602 - RNA, 19 nt, synthetic construct
  misc_feature 1..19: note = siRNA sense sequence
  source 1..19: mol_type = other RNA
atagccactgattcaggcc

SEQ ID NO: 23603 - RNA, 19 nt, synthetic construct
  misc_feature 1..19: note = siRNA antisense sequence
  source 1..19: mol_type = other RNA
ggcctgaatcagtggctat

SEQ ID NO: 23604 - RNA, 19 nt, synthetic construct
  misc_feature 1..19: note = siRNA sense sequence
  source 1..19: mol_type = other RNA
tagccactgattcaggcct

SEQ ID NO: 23605 - RNA, 19 nt, synthetic construct
  misc_feature 1..19: note = siRNA antisense sequence
  source 1..19: mol_type = other RNA
aggcctgaatcagtggcta

SEQ ID NO: 23606 - RNA, 19 nt, synthetic construct
  misc_feature 1..19: note = siRNA sense sequence
  source 1..19: mol_type = other RNA
agccactgattcaggcctt

SEQ ID NO: 23607 - RNA, 19 nt, synthetic construct
  misc_feature 1..19: note = siRNA antisense sequence
  source 1..19: mol_type = other RNA
aaggcctgaatcagtggct

SEQ ID NO: 23608 - RNA, 19 nt, synthetic construct
  misc_feature 1..19: note = siRNA sense sequence
  source 1..19: mol_type = other RNA
gccactgattcaggccttg

SEQ ID NO: 23609 - RNA, 19 nt, synthetic construct
  misc_feature 1..19: note = siRNA antisense sequence
  source 1..19: mol_type = other RNA
caaggcctgaatcagtggc

SEQ ID NO: 23610 - RNA, 19 nt, synthetic construct
  misc_feature 1..19: note = siRNA sense sequence
  source 1..19: mol_type = other RNA
ctgattcaggccttgctat

SEQ ID NO: 23611 - RNA, 19 nt, synthetic construct
  misc_feature 1..19: note = siRNA antisense sequence
  source 1..19: mol_type = other RNA
atagcaaggcctgaatcag

SEQ ID NO: 23612 - RNA, 19 nt, synthetic construct
  misc_feature 1..19: note = siRNA sense sequence
  source 1..19: mol_type = other RNA
gattcaggccttgctattc

SEQ ID NO: 23613 - RNA, 19 nt, synthetic construct
  misc_feature 1..19: note = siRNA antisense sequence
  source 1..19: mol_type = other RNA
gaatagcaaggcctgaatc

SEQ ID NO: 23614 - RNA, 19 nt, synthetic construct
  misc_feature 1..19: note = siRNA sense sequence
  source 1..19: mol_type = other RNA
attcaggccttgctattca

SEQ ID NO: 23615 - RNA, 19 nt, synthetic construct
  misc_feature 1..19: note = siRNA antisense sequence
  source 1..19: mol_type = other RNA
tgaatagcaaggcctgaat

SEQ ID NO: 23616 - RNA, 19 nt, synthetic construct
  misc_feature 1..19: note = siRNA sense sequence
  source 1..19: mol_type = other RNA
ttcaggccttgctattcaa

SEQ ID NO: 23617 - RNA, 19 nt, synthetic construct
  misc_feature 1..19: note = siRNA antisense sequence
  source 1..19: mol_type = other RNA
ttgaatagcaaggcctgaa

SEQ ID NO: 23618 - RNA, 19 nt, synthetic construct
  misc_feature 1..19: note = siRNA sense sequence
  source 1..19: mol_type = other RNA
aggccttgctattcaaaag

SEQ ID NO: 23619 - RNA, 19 nt, synthetic construct
  misc_feature 1..19: note = siRNA antisense sequence
  source 1..19: mol_type = other RNA
cttttgaatagcaaggcct

SEQ ID NO: 23620 - RNA, 19 nt, synthetic construct
  misc_feature 1..19: note = siRNA sense sequence
  source 1..19: mol_type = other RNA
ggccttgctattcaaaagt

SEQ ID NO: 23621 - RNA, 19 nt, synthetic construct
  misc_feature 1..19: note = siRNA antisense sequence
  source 1..19: mol_type = other RNA
acttttgaatagcaaggcc

SEQ ID NO: 23622 - RNA, 19 nt, synthetic construct
  misc_feature 1..19: note = siRNA sense sequence
  source 1..19: mol_type = other RNA
gccttgctattcaaaagta

SEQ ID NO: 23623 - RNA, 19 nt, synthetic construct
  misc_feature 1..19: note = siRNA antisense sequence
  source 1..19: mol_type = other RNA
tacttttgaatagcaaggc

SEQ ID NO: 23624 - RNA, 19 nt, synthetic construct
  misc_feature 1..19: note = siRNA sense sequence
  source 1..19: mol_type = other RNA
ccttgctattcaaaagtat

SEQ ID NO: 23625 - RNA, 19 nt, synthetic construct
  misc_feature 1..19: note = siRNA antisense sequence
  source 1..19: mol_type = other RNA
atacttttgaatagcaagg

SEQ ID NO: 23626 - RNA, 19 nt, synthetic construct
  misc_feature 1..19: note = siRNA sense sequence
  source 1..19: mol_type = other RNA
cttgctattcaaaagtatg

SEQ ID NO: 23627 - RNA, 19 nt, synthetic construct
  misc_feature 1..19: note = siRNA antisense sequence
  source 1..19: mol_type = other RNA
catacttttgaatagcaag

SEQ ID NO: 23628 - RNA, 19 nt, synthetic construct
  misc_feature 1..19: note = siRNA sense sequence
  source 1..19: mol_type = other RNA
ttgctattcaaaagtatgg

SEQ ID NO: 23629 - RNA, 19 nt, synthetic construct
  misc_feature 1..19: note = siRNA antisense sequence
  source 1..19: mol_type = other RNA
ccatacttttgaatagcaa

SEQ ID NO: 23630 - RNA, 19 nt, synthetic construct
  misc_feature 1..19: note = siRNA sense sequence
  source 1..19: mol_type = other RNA
gctattcaaaagtatggtc

SEQ ID NO: 23631 - RNA, 19 nt, synthetic construct
  misc_feature 1..19: note = siRNA antisense sequence
  source 1..19: mol_type = other RNA
gaccatacttttgaatagc

SEQ ID NO: 23632 - RNA, 19 nt, synthetic construct
  misc_feature 1..19: note = siRNA sense sequence
  source 1..19: mol_type = other RNA
ctattcaaaagtatggtcc

SEQ ID NO: 23633 - RNA, 19 nt, synthetic construct
  misc_feature 1..19: note = siRNA antisense sequence
  source 1..19: mol_type = other RNA
ggaccatacttttgaatag

SEQ ID NO: 23634 - RNA, 19 nt, synthetic construct
  misc_feature 1..19: note = siRNA sense sequence
  source 1..19: mol_type = other RNA
tattcaaaagtatggtccg

SEQ ID NO: 23635 - RNA, 19 nt, synthetic construct
  misc_feature 1..19: note = siRNA antisense sequence
  source 1..19: mol_type = other RNA
cggaccatacttttgaata

SEQ ID NO: 23636 - RNA, 19 nt, synthetic construct
  misc_feature 1..19: note = siRNA sense sequence
  source 1..19: mol_type = other RNA
attcaaaagtatggtccgt

SEQ ID NO: 23637 - RNA, 19 nt, synthetic construct
  misc_feature 1..19: note = siRNA antisense sequence
  source 1..19: mol_type = other RNA
acggaccatacttttgaat

SEQ ID NO: 23638 - RNA, 19 nt, synthetic construct
  misc_feature 1..19: note = siRNA sense sequence
  source 1..19: mol_type = other RNA
ttcaaaagtatggtccgta

SEQ ID NO: 23639 - RNA, 19 nt, synthetic construct
  misc_feature 1..19: note = siRNA antisense sequence
  source 1..19: mol_type = other RNA
tacggaccatacttttgaa

SEQ ID NO: 23640 - RNA, 19 nt, synthetic construct
  misc_feature 1..19: note = siRNA sense sequence
  source 1..19: mol_type = other RNA
tcaaaagtatggtccgtaa

SEQ ID NO: 23641 - RNA, 19 nt, synthetic construct
  misc_feature 1..19: note = siRNA antisense sequence
  source 1..19: mol_type = other RNA
ttacggaccatacttttga

SEQ ID NO: 23642 - RNA, 19 nt, synthetic construct
  misc_feature 1..19: note = siRNA sense sequence
  source 1..19: mol_type = other RNA
caaaagtatggtccgtaaa

SEQ ID NO: 23643 - RNA, 19 nt, synthetic construct
  misc_feature 1..19: note = siRNA antisense sequence
  source 1..19: mol_type = other RNA
tttacggaccatacttttg

SEQ ID NO: 23644 - RNA, 19 nt, synthetic construct
  misc_feature 1..19: note = siRNA sense sequence
  source 1..19: mol_type = other RNA
aaccagcagcatccctgag

SEQ ID NO: 23645 - RNA, 19 nt, synthetic construct
  misc_feature 1..19: note = siRNA antisense sequence
  source 1..19: mol_type = other RNA
ctcagggatgctgctggtt

SEQ ID NO: 23646 - RNA, 19 nt, synthetic construct
  misc_feature 1..19: note = siRNA sense sequence
  source 1..19: mol_type = other RNA
actagaattcagggatctt

SEQ ID NO: 23647 - RNA, 19 nt, synthetic construct
  misc_feature 1..19: note = siRNA antisense sequence
  source 1..19: mol_type = other RNA
aagatccctgaattctagt

SEQ ID NO: 23648 - RNA, 19 nt, synthetic construct
  misc_feature 1..19: note = siRNA sense sequence
  source 1..19: mol_type = other RNA
ctagaattcagggatcttt

SEQ ID NO: 23649 - RNA, 19 nt, synthetic construct
  misc_feature 1..19: note = siRNA antisense sequence
  source 1..19: mol_type = other RNA
aaagatccctgaattctag

SEQ ID NO: 23650 - RNA, 19 nt, synthetic construct
  misc_feature 1..19: note = siRNA sense sequence
  source 1..19: mol_type = other RNA
tagaattcagggatctttt

SEQ ID NO: 23651 - RNA, 19 nt, synthetic construct
  misc_feature 1..19: note = siRNA antisense sequence
  source 1..19: mol_type = other RNA
aaaagatccctgaattcta

SEQ ID NO: 23652 - RNA, 19 nt, synthetic construct
  misc_feature 1..19: note = siRNA sense sequence
  source 1..19: mol_type = other RNA
agaattcagggatcttttg

SEQ ID NO: 23653 - RNA, 19 nt, synthetic construct
  misc_feature 1..19: note = siRNA antisense sequence
  source 1..19: mol_type = other RNA
caaaagatccctgaattct

SEQ ID NO: 23654 - RNA, 19 nt, synthetic construct
  misc_feature 1..19: note = siRNA sense sequence
  source 1..19: mol_type = other RNA
gaattcagggatcttttgt

SEQ ID NO: 23655 - RNA, 19 nt, synthetic construct
  misc_feature 1..19: note = siRNA antisense sequence
  source 1..19: mol_type = other RNA
acaaaagatccctgaattc

SEQ ID NO: 23656 - RNA, 19 nt, synthetic construct
  misc_feature 1..19: note = siRNA sense sequence
  source 1..19: mol_type = other RNA
aattcagggatcttttgta

SEQ ID NO: 23657 - RNA, 19 nt, synthetic construct
  misc_feature 1..19: note = siRNA antisense sequence
  source 1..19: mol_type = other RNA
tacaaaagatccctgaatt

SEQ ID NO: 23658 - RNA, 19 nt, synthetic construct
  misc_feature 1..19: note = siRNA sense sequence
  source 1..19: mol_type = other RNA
attcagggatcttttgtag

SEQ ID NO: 23659 - RNA, 19 nt, synthetic construct
  misc_feature 1..19: note = siRNA antisense sequence
  source 1..19: mol_type = other RNA
ctacaaaagatccctgaat

SEQ ID NO: 23660 - RNA, 19 nt, synthetic construct
  misc_feature 1..19: note = siRNA sense sequence
  source 1..19: mol_type = other RNA
ttcagggatcttttgtaga

SEQ ID NO: 23661 - RNA, 19 nt, synthetic construct
  misc_feature 1..19: note = siRNA antisense sequence
  source 1..19: mol_type = other RNA
tctacaaaagatccctgaa

SEQ ID NO: 23662 - RNA, 19 nt, synthetic construct
  misc_feature 1..19: note = siRNA sense sequence
  source 1..19: mol_type = other RNA
tcagggatcttttgtagac

SEQ ID NO: 23663 - RNA, 19 nt, synthetic construct
  misc_feature 1..19: note = siRNA antisense sequence
  source 1..19: mol_type = other RNA
gtctacaaaagatccctga

SEQ ID NO: 23664 - RNA, 19 nt, synthetic construct
  misc_feature 1..19: note = siRNA sense sequence
  source 1..19: mol_type = other RNA
cagggatcttttgtagacc

SEQ ID NO: 23665 - RNA, 19 nt, synthetic construct
  misc_feature 1..19: note = siRNA antisense sequence
  source 1..19: mol_type = other RNA
ggtctacaaaagatccctg

SEQ ID NO: 23666 - RNA, 19 nt, synthetic construct
  misc_feature 1..19: note = siRNA sense sequence
  source 1..19: mol_type = other RNA
agggatcttttgtagacct

SEQ ID NO: 23667 - RNA, 19 nt, synthetic construct
  misc_feature 1..19: note = siRNA antisense sequence
  source 1..19: mol_type = other RNA
aggtctacaaaagatccct

SEQ ID NO: 23668 - RNA, 19 nt, synthetic construct
  misc_feature 1..19: note = siRNA sense sequence
  source 1..19: mol_type = other RNA
gggatcttttgtagaccta

SEQ ID NO: 23669 - RNA, 19 nt, synthetic construct
  misc_feature 1..19: note = siRNA antisense sequence
  source 1..19: mol_type = other RNA
taggtctacaaaagatccc

SEQ ID NO: 23670 - RNA, 19 nt, synthetic construct
  misc_feature 1..19: note = siRNA sense sequence
  source 1..19: mol_type = other RNA
ggatcttttgtagacctac

SEQ ID NO: 23671 - RNA, 19 nt, synthetic construct
  misc_feature 1..19: note = siRNA antisense sequence
  source 1..19: mol_type = other RNA
gtaggtctacaaaagatcc

SEQ ID NO: 23672 - RNA, 19 nt, synthetic construct
  misc_feature 1..19: note = siRNA sense sequence
  source 1..19: mol_type = other RNA
gatcttttgtagacctact

SEQ ID NO: 23673 - RNA, 19 nt, synthetic construct
  misc_feature 1..19: note = siRNA antisense sequence
  source 1..19: mol_type = other RNA
agtaggtctacaaaagatc

SEQ ID NO: 23674 - RNA, 19 nt, synthetic construct
  misc_feature 1..19: note = siRNA sense sequence
  source 1..19: mol_type = other RNA
ctctagatgattcctgtgc

SEQ ID NO: 23675 - RNA, 19 nt, synthetic construct
  misc_feature 1..19: note = siRNA antisense sequence
  source 1..19: mol_type = other RNA
gcacaggaatcatctagag

SEQ ID NO: 23676 - RNA, 19 nt, synthetic construct
  misc_feature 1..19: note = siRNA sense sequence
  source 1..19: mol_type = other RNA
tctagatgattcctgtgca

SEQ ID NO: 23677 - RNA, 19 nt, synthetic construct
  misc_feature 1..19: note = siRNA antisense sequence
  source 1..19: mol_type = other RNA
tgcacaggaatcatctaga

SEQ ID NO: 23678 - RNA, 19 nt, synthetic construct
  misc_feature 1..19: note = siRNA sense sequence
  source 1..19: mol_type = other RNA
gatgattcctgtgcataat

SEQ ID NO: 23679 - RNA, 19 nt, synthetic construct
  misc_feature 1..19: note = siRNA antisense sequence
  source 1..19: mol_type = other RNA
attatgcacaggaatcatc

SEQ ID NO: 23680 - RNA, 19 nt, synthetic construct
  misc_feature 1..19: note = siRNA sense sequence
  source 1..19: mol_type = other RNA
atgattcctgtgcataata

SEQ ID NO: 23681 - RNA, 19 nt, synthetic construct
  misc_feature 1..19: note = siRNA antisense sequence
  source 1..19: mol_type = other RNA
tattatgcacaggaatcat

SEQ ID NO: 23682 - RNA, 19 nt, synthetic construct
  misc_feature 1..19: note = siRNA sense sequence
  source 1..19: mol_type = other RNA
gattcctgtgcataataaa

SEQ ID NO: 23683 - RNA, 19 nt, synthetic construct
  misc_feature 1..19: note = siRNA antisense sequence
  source 1..19: mol_type = other RNA
tttattatgcacaggaatc

SEQ ID NO: 23684 - RNA, 19 nt, synthetic construct
  misc_feature 1..19: note = siRNA sense sequence
  source 1..19: mol_type = other RNA
tcctgtgcataataaaatc

SEQ ID NO: 23685 - RNA, 19 nt, synthetic construct
  misc_feature 1..19: note = siRNA antisense sequence
  source 1..19: mol_type = other RNA
gattttattatgcacagga

SEQ ID NO: 23686 - RNA, 19 nt, synthetic construct
  misc_feature 1..19: note = siRNA sense sequence
  source 1..19: mol_type = other RNA
cctgtgcataataaaatct

SEQ ID NO: 23687 - RNA, 19 nt, synthetic construct
  misc_feature 1..19: note = siRNA antisense sequence
  source 1..19: mol_type = other RNA
agattttattatgcacagg

SEQ ID NO: 23688 - RNA, 19 nt, synthetic construct
  misc_feature 1..19: note = siRNA sense sequence
  source 1..19: mol_type = other RNA
ctgtgcataataaaatctg

SEQ ID NO: 23689 - RNA, 19 nt, synthetic construct
  misc_feature 1..19: note = siRNA antisense sequence
  source 1..19: mol_type = other RNA
cagattttattatgcacag

SEQ ID NO: 23690 - RNA, 19 nt, synthetic construct
  misc_feature 1..19: note = siRNA sense sequence
  source 1..19: mol_type = other RNA
taggttattcttcctgtgc

SEQ ID NO: 23691 - RNA, 19 nt, synthetic construct
  misc_feature 1..19: note = siRNA antisense sequence
  source 1..19: mol_type = other RNA
gcacaggaagaataaccta

SEQ ID NO: 23692 - RNA, 19 nt, synthetic construct
  misc_feature 1..19: note = siRNA sense sequence
  source 1..19: mol_type = other RNA
aggttattcttcctgtgct

SEQ ID NO: 23693 - RNA, 19 nt, synthetic construct
  misc_feature 1..19: note = siRNA antisense sequence
  source 1..19: mol_type = other RNA
agcacaggaagaataacct

SEQ ID NO: 23694 - RNA, 19 nt, synthetic construct
  misc_feature 1..19: note = siRNA sense sequence
  source 1..19: mol_type = other RNA
tcttcctgtgctggtaaat

SEQ ID NO: 23695 - RNA, 19 nt, synthetic construct
  misc_feature 1..19: note = siRNA antisense sequence
  source 1..19: mol_type = other RNA
atttaccagcacaggaaga

SEQ ID NO: 23696 - RNA, 19 nt, synthetic construct
  misc_feature 1..19: note = siRNA sense sequence
  source 1..19: mol_type = other RNA
cttcctgtgctggtaaatc

SEQ ID NO: 23697 - RNA, 19 nt, synthetic construct
  misc_feature 1..19: note = siRNA antisense sequence
  source 1..19: mol_type = other RNA
gatttaccagcacaggaag

SEQ ID NO: 23698 - RNA, 19 nt, synthetic construct
  misc_feature 1..19: note = siRNA sense sequence
  source 1..19: mol_type = other RNA
ttcctgtgctggtaaatct

SEQ ID NO: 23699 - RNA, 19 nt, synthetic construct
  misc_feature 1..19: note = siRNA antisense sequence
  source 1..19: mol_type = other RNA
agatttaccagcacaggaa

SEQ ID NO: 23700 - RNA, 19 nt, synthetic construct
  misc_feature 1..19: note = siRNA sense sequence
  source 1..19: mol_type = other RNA
tcctgtgctggtaaatctc

SEQ ID NO: 23701 - RNA, 19 nt, synthetic construct
  misc_feature 1..19: note = siRNA antisense sequence
  source 1..19: mol_type = other RNA
gagatttaccagcacagga

SEQ ID NO: 23702 - RNA, 19 nt, synthetic construct
  misc_feature 1..19: note = siRNA sense sequence
  source 1..19: mol_type = other RNA
cctgtgctggtaaatctct

SEQ ID NO: 23703 - RNA, 19 nt, synthetic construct
  misc_feature 1..19: note = siRNA antisense sequence
  source 1..19: mol_type = other RNA
agagatttaccagcacagg

SEQ ID NO: 23704 - RNA, 19 nt, synthetic construct
  misc_feature 1..19: note = siRNA sense sequence
  source 1..19: mol_type = other RNA
ctgtgctggtaaatctctg

SEQ ID NO: 23705 - RNA, 19 nt, synthetic construct
  misc_feature 1..19: note = siRNA antisense sequence
  source 1..19: mol_type = other RNA
cagagatttaccagcacag

SEQ ID NO: 23706 - RNA, 19 nt, synthetic construct
  misc_feature 1..19: note = siRNA sense sequence
  source 1..19: mol_type = other RNA
tgtgctggtaaatctctgg

SEQ ID NO: 23707 - RNA, 19 nt, synthetic construct
  misc_feature 1..19: note = siRNA antisense sequence
  source 1..19: mol_type = other RNA
ccagagatttaccagcaca

SEQ ID NO: 23708 - RNA, 19 nt, synthetic construct
  misc_feature 1..19: note = siRNA sense sequence
  source 1..19: mol_type = other RNA
gtgctggtaaatctctggc

SEQ ID NO: 23709 - RNA, 19 nt, synthetic construct
  misc_feature 1..19: note = siRNA antisense sequence
  source 1..19: mol_type = other RNA
gccagagatttaccagcac

SEQ ID NO: 23710 - RNA, 19 nt, synthetic construct
  misc_feature 1..19: note = siRNA sense sequence
  source 1..19: mol_type = other RNA
tgctggtaaatctctggca

SEQ ID NO: 23711 - RNA, 19 nt, synthetic construct
  misc_feature 1..19: note = siRNA antisense sequence
  source 1..19: mol_type = other RNA
tgccagagatttaccagca

SEQ ID NO: 23712 - RNA, 19 nt, synthetic construct
  misc_feature 1..19: note = siRNA sense sequence
  source 1..19: mol_type = other RNA
gctggtaaatctctggcag

SEQ ID NO: 23713 - RNA, 19 nt, synthetic construct
  misc_feature 1..19: note = siRNA antisense sequence
  source 1..19: mol_type = other RNA
ctgccagagatttaccagc

SEQ ID NO: 23714 - RNA, 19 nt, synthetic construct
  misc_feature 1..19: note = siRNA sense sequence
  source 1..19: mol_type = other RNA
ctggtaaatctctggcagg

SEQ ID NO: 23715 - RNA, 19 nt, synthetic construct
  misc_feature 1..19: note = siRNA antisense sequence
  source 1..19: mol_type = other RNA
cctgccagagatttaccag

SEQ ID NO: 23716 - RNA, 19 nt, synthetic construct
  misc_feature 1..19: note = siRNA sense sequence
  source 1..19: mol_type = other RNA
tggtaaatctctggcaggg

SEQ ID NO: 23717 - RNA, 19 nt, synthetic construct
  misc_feature 1..19: note = siRNA antisense sequence
  source 1..19: mol_type = other RNA
ccctgccagagatttacca

SEQ ID NO: 23718 - RNA, 19 nt, synthetic construct
  misc_feature 1..19: note = siRNA sense sequence
  source 1..19: mol_type = other RNA
agatttgagtattaaggtc

SEQ ID NO: 23719 - RNA, 19 nt, synthetic construct
  misc_feature 1..19: note = siRNA antisense sequence
  source 1..19: mol_type = other RNA
gaccttaatactcaaatct

SEQ ID NO: 23720 - RNA, 19 nt, synthetic construct
  misc_feature 1..19: note = siRNA sense sequence
  source 1..19: mol_type = other RNA
gatttgagtattaaggtct

SEQ ID NO: 23721 - RNA, 19 nt, synthetic construct
  misc_feature 1..19: note = siRNA antisense sequence
  source 1..19: mol_type = other RNA
agaccttaatactcaaatc

SEQ ID NO: 23722 - RNA, 19 nt, synthetic construct
  misc_feature 1..19: note = siRNA sense sequence
  source 1..19: mol_type = other RNA
aaaagttaactggccatac

SEQ ID NO: 23723 - RNA, 19 nt, synthetic construct
  misc_feature 1..19: note = siRNA antisense sequence
  source 1..19: mol_type = other RNA
gtatggccagttaactttt

SEQ ID NO: 23724 - RNA, 19 nt, synthetic construct
  misc_feature 1..19: note = siRNA sense sequence
  source 1..19: mol_type = other RNA
aaagttaactggccatact

SEQ ID NO: 23725 - RNA, 19 nt, synthetic construct
  misc_feature 1..19: note = siRNA antisense sequence
  source 1..19: mol_type = other RNA
agtatggccagttaacttt

SEQ ID NO: 23726 - RNA, 19 nt, synthetic construct
  misc_feature 1..19: note = siRNA sense sequence
  source 1..19: mol_type = other RNA
ttaactggccatactcaac

SEQ ID NO: 23727 - RNA, 19 nt, synthetic construct
  misc_feature 1..19: note = siRNA antisense sequence
  source 1..19: mol_type = other RNA
gttgagtatggccagttaa

SEQ ID NO: 23728 - RNA, 19 nt, synthetic construct
  misc_feature 1..19: note = siRNA sense sequence
  source 1..19: mol_type = other RNA
taactggccatactcaact

SEQ ID NO: 23729 - RNA, 19 nt, synthetic construct
  misc_feature 1..19: note = siRNA antisense sequence
  source 1..19: mol_type = other RNA
agttgagtatggccagtta

SEQ ID NO: 23730 - RNA, 19 nt, synthetic construct
  misc_feature 1..19: note = siRNA sense sequence
  source 1..19: mol_type = other RNA
ctggccatactcaactgtc

SEQ ID NO: 23731 - RNA, 19 nt, synthetic construct
  misc_feature 1..19: note = siRNA antisense sequence
  source 1..19: mol_type = other RNA
gacagttgagtatggccag

SEQ ID NO: 23732 - RNA, 19 nt, synthetic construct
  misc_feature 1..19: note = siRNA sense sequence
  source 1..19: mol_type = other RNA
tggccatactcaactgtct

SEQ ID NO: 23733 - RNA, 19 nt, synthetic construct
  misc_feature 1..19: note = siRNA antisense sequence
  source 1..19: mol_type = other RNA
agacagttgagtatggcca

SEQ ID NO: 23734 - RNA, 19 nt, synthetic construct
  misc_feature 1..19: note = siRNA sense sequence
  source 1..19: mol_type = other RNA
ggccatactcaactgtcta

SEQ ID NO: 23735 - RNA, 19 nt, synthetic construct
  misc_feature 1..19: note = siRNA antisense sequence
  source 1..19: mol_type = other RNA
tagacagttgagtatggcc

SEQ ID NO: 23736 - RNA, 19 nt, synthetic construct
  misc_feature 1..19: note = siRNA sense sequence
  source 1..19: mol_type = other RNA
attcttactagatcatagg

SEQ ID NO: 23737 - RNA, 19 nt, synthetic construct
  misc_feature 1..19: note = siRNA antisense sequence
  source 1..19: mol_type = other RNA
cctatgatctagtaagaat

SEQ ID NO: 23738 - RNA, 19 nt, synthetic construct
  misc_feature 1..19: note = siRNA sense sequence
  source 1..19: mol_type = other RNA
ttcttactagatcataggt

SEQ ID NO: 23739 - RNA, 19 nt, synthetic construct
  misc_feature 1..19: note = siRNA antisense sequence
  source 1..19: mol_type = other RNA
acctatgatctagtaagaa

SEQ ID NO: 23740 - RNA, 19 nt, synthetic construct
  misc_feature 1..19: note = siRNA sense sequence
  source 1..19: mol_type = other RNA
tcttactagatcataggtg

SEQ ID NO: 23741 - RNA, 19 nt, synthetic construct
  misc_feature 1..19: note = siRNA antisense sequence
  source 1..19: mol_type = other RNA
cacctatgatctagtaaga

SEQ ID NO: 23742 - RNA, 19 nt, synthetic construct
  misc_feature 1..19: note = siRNA sense sequence
  source 1..19: mol_type = other RNA
ttactagatcataggtgaa

SEQ ID NO: 23743 - RNA, 19 nt, synthetic construct
  misc_feature 1..19: note = siRNA antisense sequence
  source 1..19: mol_type = other RNA
ttcacctatgatctagtaa

SEQ ID NO: 23744 - RNA, 19 nt, synthetic construct
  misc_feature 1..19: note = siRNA sense sequence
  source 1..19: mol_type = other RNA
gtcaataatgataggagca

SEQ ID NO: 23745 - RNA, 19 nt, synthetic construct
  misc_feature 1..19: note = siRNA antisense sequence
  source 1..19: mol_type = other RNA
tgctcctatcattattgac

SEQ ID NO: 23746 - RNA, 19 nt, synthetic construct
  misc_feature 1..19: note = siRNA sense sequence
  source 1..19: mol_type = other RNA
tcaataatgataggagcaa

SEQ ID NO: 23747 - RNA, 19 nt, synthetic construct
  misc_feature 1..19: note = siRNA antisense sequence
  source 1..19: mol_type = other RNA
ttgctcctatcattattga

SEQ ID NO: 23748 - RNA, 19 nt, synthetic construct
  misc_feature 1..19: note = siRNA sense sequence
  source 1..19: mol_type = other RNA
caataatgataggagcaaa

SEQ ID NO: 23749 - RNA, 19 nt, synthetic construct
  misc_feature 1..19: note = siRNA antisense sequence
  source 1..19: mol_type = other RNA
tttgctcctatcattattg

SEQ ID NO: 23750 - RNA, 19 nt, synthetic construct
  misc_feature 1..19: note = siRNA sense sequence
  source 1..19: mol_type = other RNA
gaagacataattatctctg

SEQ ID NO: 23751 - RNA, 19 nt, synthetic construct
  misc_feature 1..19: note = siRNA antisense sequence
  source 1..19: mol_type = other RNA
cagagataattatgtcttc

SEQ ID NO: 23752 - RNA, 19 nt, synthetic construct
  misc_feature 1..19: note = siRNA sense sequence
  source 1..19: mol_type = other RNA
agacataattatctctgga

SEQ ID NO: 23753 - RNA, 19 nt, synthetic construct
  misc_feature 1..19: note = siRNA antisense sequence
  source 1..19: mol_type = other RNA
tccagagataattatgtct

SEQ ID NO: 23754 - RNA, 19 nt, synthetic construct
  misc_feature 1..19: note = siRNA sense sequence
  source 1..19: mol_type = other RNA
gacataattatctctggaa

SEQ ID NO: 23755 - RNA, 19 nt, synthetic construct
  misc_feature 1..19: note = siRNA antisense sequence
  source 1..19: mol_type = other RNA
ttccagagataattatgtc

SEQ ID NO: 23756 - RNA, 19 nt, synthetic construct
  misc_feature 1..19: note = siRNA sense sequence
  source 1..19: mol_type = other RNA
aaagcatatacagtagtct

SEQ ID NO: 23757 - RNA, 19 nt, synthetic construct
  misc_feature 1..19: note = siRNA antisense sequence
  source 1..19: mol_type = other RNA
agactactgtatatgcttt

SEQ ID NO: 23758 - RNA, 19 nt, synthetic construct
  misc_feature 1..19: note = siRNA sense sequence
  source 1..19: mol_type = other RNA
tatacagtagtctaattcc

SEQ ID NO: 23759 - RNA, 19 nt, synthetic construct
  misc_feature 1..19: note = siRNA antisense sequence
  source 1..19: mol_type = other RNA
ggaattagactactgtata

SEQ ID NO: 23760 - RNA, 19 nt, synthetic construct
  misc_feature 1..19: note = siRNA sense sequence
  source 1..19: mol_type = other RNA
atacagtagtctaattcca

SEQ ID NO: 23761 - RNA, 19 nt, synthetic construct
  misc_feature 1..19: note = siRNA antisense sequence
  source 1..19: mol_type = other RNA
tggaattagactactgtat

SEQ ID NO: 23762 - RNA, 19 nt, synthetic construct
  misc_feature 1..19: note = siRNA sense sequence
  source 1..19: mol_type = other RNA
tacagtagtctaattccaa

SEQ ID NO: 23763 - RNA, 19 nt, synthetic construct
  misc_feature 1..19: note = siRNA antisense sequence
  source 1..19: mol_type = other RNA
ttggaattagactactgta

SEQ ID NO: 23764 - RNA, 19 nt, synthetic construct
  misc_feature 1..19: note = siRNA sense sequence
  source 1..19: mol_type = other RNA
acagtagtctaattccaac

SEQ ID NO: 23765 - RNA, 19 nt, synthetic construct
  misc_feature 1..19: note = siRNA antisense sequence
  source 1..19: mol_type = other RNA
gttggaattagactactgt

SEQ ID NO: 23766 - RNA, 19 nt, synthetic construct
  misc_feature 1..19: note = siRNA sense sequence
  source 1..19: mol_type = other RNA
cagtagtctaattccaact

SEQ ID NO: 23767 - RNA, 19 nt, synthetic construct
  misc_feature 1..19: note = siRNA antisense sequence
  source 1..19: mol_type = other RNA
agttggaattagactactg

SEQ ID NO: 23768 - RNA, 19 nt, synthetic construct
  misc_feature 1..19: note = siRNA sense sequence
  source 1..19: mol_type = other RNA
agtagtctaattccaactg

SEQ ID NO: 23769 - RNA, 19 nt, synthetic construct
  misc_feature 1..19: note = siRNA antisense sequence
  source 1..19: mol_type = other RNA
cagttggaattagactact

SEQ ID NO: 23770 - RNA, 19 nt, synthetic construct
  misc_feature 1..19: note = siRNA sense sequence
  source 1..19: mol_type = other RNA
gtagtctaattccaactgc

SEQ ID NO: 23771 - RNA, 19 nt, synthetic construct
  misc_feature 1..19: note = siRNA antisense sequence
  source 1..19: mol_type = other RNA
gcagttggaattagactac

SEQ ID NO: 23772 - RNA, 19 nt, synthetic construct
  misc_feature 1..19: note = siRNA sense sequence
  source 1..19: mol_type = other RNA
tagtctaattccaactgct

SEQ ID NO: 23773 - RNA, 19 nt, synthetic construct
  misc_feature 1..19: note = siRNA antisense sequence
  source 1..19: mol_type = other RNA
agcagttggaattagacta

SEQ ID NO: 23774 - RNA, 19 nt, synthetic construct
  misc_feature 1..19: note = siRNA sense sequence
  source 1..19: mol_type = other RNA
agtctaattccaactgcta

SEQ ID NO: 23775 - RNA, 19 nt, synthetic construct
  misc_feature 1..19: note = siRNA antisense sequence
  source 1..19: mol_type = other RNA
tagcagttggaattagact

SEQ ID NO: 23776 - RNA, 19 nt, synthetic construct
  misc_feature 1..19: note = siRNA sense sequence
  source 1..19: mol_type = other RNA
gtctaattccaactgctac

SEQ ID NO: 23777 - RNA, 19 nt, synthetic construct
  misc_feature 1..19: note = siRNA antisense sequence
  source 1..19: mol_type = other RNA
gtagcagttggaattagac

SEQ ID NO: 23778 - RNA, 19 nt, synthetic construct
  misc_feature 1..19: note = siRNA sense sequence
  source 1..19: mol_type = other RNA
tctaattccaactgctact

SEQ ID NO: 23779 - RNA, 19 nt, synthetic construct
  misc_feature 1..19: note = siRNA antisense sequence
  source 1..19: mol_type = other RNA
agtagcagttggaattaga

SEQ ID NO: 23780 - RNA, 19 nt, synthetic construct
  misc_feature 1..19: note = siRNA sense sequence
  source 1..19: mol_type = other RNA
ctaattccaactgctactc

SEQ ID NO: 23781 - RNA, 19 nt, synthetic construct
  misc_feature 1..19: note = siRNA antisense sequence
  source 1..19: mol_type = other RNA
gagtagcagttggaattag

SEQ ID NO: 23782 - RNA, 19 nt, synthetic construct
  misc_feature 1..19: note = siRNA sense sequence
  source 1..19: mol_type = other RNA
taattccaactgctactca

SEQ ID NO: 23783 - RNA, 19 nt, synthetic construct
  misc_feature 1..19: note = siRNA antisense sequence
  source 1..19: mol_type = other RNA
tgagtagcagttggaatta

SEQ ID NO: 23784 - RNA, 19 nt, synthetic construct
  misc_feature 1..19: note = siRNA sense sequence
  source 1..19: mol_type = other RNA
attccaactgctactcatt

SEQ ID NO: 23785 - RNA, 19 nt, synthetic construct
  misc_feature 1..19: note = siRNA antisense sequence
  source 1..19: mol_type = other RNA
aatgagtagcagttggaat

SEQ ID NO: 23786 - RNA, 19 nt, synthetic construct
  misc_feature 1..19: note = siRNA sense sequence
  source 1..19: mol_type = other RNA
ttccaactgctactcatta

SEQ ID NO: 23787 - RNA, 19 nt, synthetic construct
  misc_feature 1..19: note = siRNA antisense sequence
  source 1..19: mol_type = other RNA
taatgagtagcagttggaa

SEQ ID NO: 23788 - RNA, 19 nt, synthetic construct
  misc_feature 1..19: note = siRNA sense sequence
  source 1..19: mol_type = other RNA
tccaactgctactcattaa

SEQ ID NO: 23789 - RNA, 19 nt, synthetic construct
  misc_feature 1..19: note = siRNA antisense sequence
  source 1..19: mol_type = other RNA
ttaatgagtagcagttgga

SEQ ID NO: 23790 - RNA, 19 nt, synthetic construct
  misc_feature 1..19: note = siRNA sense sequence
  source 1..19: mol_type = other RNA
ccaactgctactcattaag

SEQ ID NO: 23791 - RNA, 19 nt, synthetic construct
  misc_feature 1..19: note = siRNA antisense sequence
  source 1..19: mol_type = other RNA
cttaatgagtagcagttgg

SEQ ID NO: 23792 - RNA, 19 nt, synthetic construct
  misc_feature 1..19: note = siRNA sense sequence
  source 1..19: mol_type = other RNA
tctatcgataactccaatg

SEQ ID NO: 23793 - RNA, 19 nt, synthetic construct
  misc_feature 1..19: note = siRNA antisense sequence
  source 1..19: mol_type = other RNA
cattggagttatcgataga

SEQ ID NO: 23794 - RNA, 19 nt, synthetic construct
  misc_feature 1..19: note = siRNA sense sequence
  source 1..19: mol_type = other RNA
ctatcgataactccaatgt

SEQ ID NO: 23795 - RNA, 19 nt, synthetic construct
  misc_feature 1..19: note = siRNA antisense sequence
  source 1..19: mol_type = other RNA
acattggagttatcgatag

SEQ ID NO: 23796 - RNA, 19 nt, synthetic construct
  misc_feature 1..19: note = siRNA sense sequence
  source 1..19: mol_type = other RNA
tatcgataactccaatgta

SEQ ID NO: 23797 - RNA, 19 nt, synthetic construct
  misc_feature 1..19: note = siRNA antisense sequence
  source 1..19: mol_type = other RNA
tacattggagttatcgata

SEQ ID NO: 23798 - RNA, 19 nt, synthetic construct
  misc_feature 1..19: note = siRNA sense sequence
  source 1..19: mol_type = other RNA
atcgataactccaatgtac

SEQ ID NO: 23799 - RNA, 19 nt, synthetic construct
  misc_feature 1..19: note = siRNA antisense sequence
  source 1..19: mol_type = other RNA
gtacattggagttatcgat

SEQ ID NO: 23800 - RNA, 19 nt, synthetic construct
  misc_feature 1..19: note = siRNA sense sequence
  source 1..19: mol_type = other RNA
tcgataactccaatgtacc

SEQ ID NO: 23801 - RNA, 19 nt, synthetic construct
  misc_feature 1..19: note = siRNA antisense sequence
  source 1..19: mol_type = other RNA
ggtacattggagttatcga

SEQ ID NO: 23802 - RNA, 19 nt, synthetic construct
  misc_feature 1..19: note = siRNA sense sequence
  source 1..19: mol_type = other RNA
cgataactccaatgtacct

SEQ ID NO: 23803 - RNA, 19 nt, synthetic construct
  misc_feature 1..19: note = siRNA antisense sequence
  source 1..19: mol_type = other RNA
aggtacattggagttatcg

SEQ ID NO: 23804 - RNA, 19 nt, synthetic construct
  misc_feature 1..19: note = siRNA sense sequence
  source 1..19: mol_type = other RNA
gataactccaatgtacctt

SEQ ID NO: 23805 - RNA, 19 nt, synthetic construct
  misc_feature 1..19: note = siRNA antisense sequence
  source 1..19: mol_type = other RNA
aaggtacattggagttatc

SEQ ID NO: 23806 - RNA, 19 nt, synthetic construct
  misc_feature 1..19: note = siRNA sense sequence
  source 1..19: mol_type = other RNA
actccaatgtaccttctct

SEQ ID NO: 23807 - RNA, 19 nt, synthetic construct
  misc_feature 1..19: note = siRNA antisense sequence
  source 1..19: mol_type = other RNA
agagaaggtacattggagt

SEQ ID NO: 23808 - RNA, 19 nt, synthetic construct
  misc_feature 1..19: note = siRNA sense sequence
  source 1..19: mol_type = other RNA
ctccaatgtaccttctcta

SEQ ID NO: 23809 - RNA, 19 nt, synthetic construct
  misc_feature 1..19: note = siRNA antisense sequence
  source 1..19: mol_type = other RNA
tagagaaggtacattggag

SEQ ID NO: 23810 - RNA, 19 nt, synthetic construct
  misc_feature 1..19: note = siRNA sense sequence
  source 1..19: mol_type = other RNA
tccaatgtaccttctctaa

SEQ ID NO: 23811 - RNA, 19 nt, synthetic construct
  misc_feature 1..19: note = siRNA antisense sequence
  source 1..19: mol_type = other RNA
ttagagaaggtacattgga

SEQ ID NO: 23812 - RNA, 19 nt, synthetic construct
  misc_feature 1..19: note = siRNA sense sequence
  source 1..19: mol_type = other RNA
ccaatgtaccttctctaat

SEQ ID NO: 23813 - RNA, 19 nt, synthetic construct
  misc_feature 1..19: note = siRNA antisense sequence
  source 1..19: mol_type = other RNA
attagagaaggtacattgg

SEQ ID NO: 23814 - RNA, 19 nt, synthetic construct
  misc_feature 1..19: note = siRNA sense sequence
  source 1..19: mol_type = other RNA
caatgtaccttctctaatg

SEQ ID NO: 23815 - RNA, 19 nt, synthetic construct
  misc_feature 1..19: note = siRNA antisense sequence
  source 1..19: mol_type = other RNA
cattagagaaggtacattg

SEQ ID NO: 23816 - RNA, 19 nt, synthetic construct
  misc_feature 1..19: note = siRNA sense sequence
  source 1..19: mol_type = other RNA
taccttctctaatgtactg

SEQ ID NO: 23817 - RNA, 19 nt, synthetic construct
  misc_feature 1..19: note = siRNA antisense sequence
  source 1..19: mol_type = other RNA
cagtacattagagaaggta

SEQ ID NO: 23818 - RNA, 19 nt, synthetic construct
  misc_feature 1..19: note = siRNA sense sequence
  source 1..19: mol_type = other RNA
atttccatttcctatcatg

SEQ ID NO: 23819 - RNA, 19 nt, synthetic construct
  misc_feature 1..19: note = siRNA antisense sequence
  source 1..19: mol_type = other RNA
catgataggaaatggaaat

SEQ ID NO: 23820 - RNA, 19 nt, synthetic construct
  misc_feature 1..19: note = siRNA sense sequence
  source 1..19: mol_type = other RNA
tttccatttcctatcatgt

SEQ ID NO: 23821 - RNA, 19 nt, synthetic construct
  misc_feature 1..19: note = siRNA antisense sequence
  source 1..19: mol_type = other RNA
acatgataggaaatggaaa

SEQ ID NO: 23822 - RNA, 19 nt, synthetic construct
  misc_feature 1..19: note = siRNA sense sequence
  source 1..19: mol_type = other RNA
ttccatttcctatcatgtg

SEQ ID NO: 23823 - RNA, 19 nt, synthetic construct
  misc_feature 1..19: note = siRNA antisense sequence
  source 1..19: mol_type = other RNA
cacatgataggaaatggaa

SEQ ID NO: 23824 - RNA, 19 nt, synthetic construct
  misc_feature 1..19: note = siRNA sense sequence
  source 1..19: mol_type = other RNA
tccatttcctatcatgtgc

SEQ ID NO: 23825 - RNA, 19 nt, synthetic construct
  misc_feature 1..19: note = siRNA antisense sequence
  source 1..19: mol_type = other RNA
gcacatgataggaaatgga

SEQ ID NO: 23826 - RNA, 19 nt, synthetic construct
  misc_feature 1..19: note = siRNA sense sequence
  source 1..19: mol_type = other RNA
ccatttcctatcatgtgct

SEQ ID NO: 23827 - RNA, 19 nt, synthetic construct
  misc_feature 1..19: note = siRNA antisense sequence
  source 1..19: mol_type = other RNA
agcacatgataggaaatgg

SEQ ID NO: 23828 - RNA, 19 nt, synthetic construct
  misc_feature 1..19: note = siRNA sense sequence
  source 1..19: mol_type = other RNA
catttcctatcatgtgctt

SEQ ID NO: 23829 - RNA, 19 nt, synthetic construct
  misc_feature 1..19: note = siRNA antisense sequence
  source 1..19: mol_type = other RNA
aagcacatgataggaaatg

SEQ ID NO: 23830 - RNA, 19 nt, synthetic construct
  misc_feature 1..19: note = siRNA sense sequence
  source 1..19: mol_type = other RNA
atttcctatcatgtgcttg

SEQ ID NO: 23831 - RNA, 19 nt, synthetic construct
  misc_feature 1..19: note = siRNA antisense sequence
  source 1..19: mol_type = other RNA
caagcacatgataggaaat

SEQ ID NO: 23832 - RNA, 19 nt, synthetic construct
  misc_feature 1..19: note = siRNA sense sequence
  source 1..19: mol_type = other RNA
tttcctatcatgtgcttgc

SEQ ID NO: 23833 - RNA, 19 nt, synthetic construct
  misc_feature 1..19: note = siRNA antisense sequence
  source 1..19: mol_type = other RNA
gcaagcacatgataggaaa

SEQ ID NO: 23834 - RNA, 19 nt, synthetic construct
  misc_feature 1..19: note = siRNA sense sequence
  source 1..19: mol_type = other RNA
ttcctatcatgtgcttgca

SEQ ID NO: 23835 - RNA, 19 nt, synthetic construct
  misc_feature 1..19: note = siRNA antisense sequence
  source 1..19: mol_type = other RNA
tgcaagcacatgataggaa

SEQ ID NO: 23836 - RNA, 19 nt, synthetic construct
  misc_feature 1..19: note = siRNA sense sequence
  source 1..19: mol_type = other RNA
tcctatcatgtgcttgcaa

SEQ ID NO: 23837 - RNA, 19 nt, synthetic construct
  misc_feature 1..19: note = siRNA antisense sequence
  source 1..19: mol_type = other RNA
ttgcaagcacatgatagga

SEQ ID NO: 23838 - RNA, 19 nt, synthetic construct
  misc_feature 1..19: note = siRNA sense sequence
  source 1..19: mol_type = other RNA
cctatcatgtgcttgcaaa

SEQ ID NO: 23839 - RNA, 19 nt, synthetic construct
  misc_feature 1..19: note = siRNA antisense sequence
  source 1..19: mol_type = other RNA
tttgcaagcacatgatagg

SEQ ID NO: 23840 - RNA, 19 nt, synthetic construct
  misc_feature 1..19: note = siRNA sense sequence
  source 1..19: mol_type = other RNA
agaagcttgcacattattt

SEQ ID NO: 23841 - RNA, 19 nt, synthetic construct
  misc_feature 1..19: note = siRNA antisense sequence
  source 1..19: mol_type = other RNA
aaataatgtgcaagcttct

SEQ ID NO: 23842 - RNA, 19 nt, synthetic construct
  misc_feature 1..19: note = siRNA sense sequence
  source 1..19: mol_type = other RNA
gaagcttgcacattatttc

SEQ ID NO: 23843 - RNA, 19 nt, synthetic construct
  misc_feature 1..19: note = siRNA antisense sequence
  source 1..19: mol_type = other RNA
gaaataatgtgcaagcttc

SEQ ID NO: 23844 - RNA, 19 nt, synthetic construct
  misc_feature 1..19: note = siRNA sense sequence
  source 1..19: mol_type = other RNA
gcacattatttcattttgc

SEQ ID NO: 23845 - RNA, 19 nt, synthetic construct
  misc_feature 1..19: note = siRNA antisense sequence
  source 1..19: mol_type = other RNA
gcaaaatgaaataatgtgc

SEQ ID NO: 23846 - RNA, 19 nt, synthetic construct
  misc_feature 1..19: note = siRNA sense sequence
  source 1..19: mol_type = other RNA
ttcattttgctatagctac

SEQ ID NO: 23847 - RNA, 19 nt, synthetic construct
  misc_feature 1..19: note = siRNA antisense sequence
  source 1..19: mol_type = other RNA
gtagctatagcaaaatgaa

SEQ ID NO: 23848 - RNA, 19 nt, synthetic construct
  misc_feature 1..19: note = siRNA sense sequence
  source 1..19: mol_type = other RNA
tcattttgctatagctacg

SEQ ID NO: 23849 - RNA, 19 nt, synthetic construct
  misc_feature 1..19: note = siRNA antisense sequence
  source 1..19: mol_type = other RNA
cgtagctatagcaaaatga

SEQ ID NO: 23850 - RNA, 19 nt, synthetic construct
  misc_feature 1..19: note = siRNA sense sequence
  source 1..19: mol_type = other RNA
cattttgctatagctacga

SEQ ID NO: 23851 - RNA, 19 nt, synthetic construct
  misc_feature 1..19: note = siRNA antisense sequence
  source 1..19: mol_type = other RNA
tcgtagctatagcaaaatg

SEQ ID NO: 23852 - RNA, 19 nt, synthetic construct
  misc_feature 1..19: note = siRNA sense sequence
  source 1..19: mol_type = other RNA
ttgctatagctacgataca

SEQ ID NO: 23853 - RNA, 19 nt, synthetic construct
  misc_feature 1..19: note = siRNA antisense sequence
  source 1..19: mol_type = other RNA
tgtatcgtagctatagcaa

SEQ ID NO: 23854 - RNA, 19 nt, synthetic construct
  misc_feature 1..19: note = siRNA sense sequence
  source 1..19: mol_type = other RNA
tgctatagctacgatacat

SEQ ID NO: 23855 - RNA, 19 nt, synthetic construct
  misc_feature 1..19: note = siRNA antisense sequence
  source 1..19: mol_type = other RNA
atgtatcgtagctatagca

SEQ ID NO: 23856 - RNA, 19 nt, synthetic construct
  misc_feature 1..19: note = siRNA sense sequence
  source 1..19: mol_type = other RNA
gctatagctacgatacata

SEQ ID NO: 23857 - RNA, 19 nt, synthetic construct
  misc_feature 1..19: note = siRNA antisense sequence
  source 1..19: mol_type = other RNA
tatgtatcgtagctatagc

SEQ ID NO: 23858 - RNA, 19 nt, synthetic construct
  misc_feature 1..19: note = siRNA sense sequence
  source 1..19: mol_type = other RNA
ctatagctacgatacatat

SEQ ID NO: 23859 - RNA, 19 nt, synthetic construct
  misc_feature 1..19: note = siRNA antisense sequence
  source 1..19: mol_type = other RNA
atatgtatcgtagctatag

SEQ ID NO: 23860 - RNA, 19 nt, synthetic construct
  misc_feature 1..19: note = siRNA sense sequence
  source 1..19: mol_type = other RNA
agctacgatacatatcaaa

SEQ ID NO: 23861 - RNA, 19 nt, synthetic construct
  misc_feature 1..19: note = siRNA antisense sequence
  source 1..19: mol_type = other RNA
tttgatatgtatcgtagct

SEQ ID NO: 23862 - RNA, 19 nt, synthetic construct
  misc_feature 1..19: note = siRNA sense sequence
  source 1..19: mol_type = other RNA
gctacgatacatatcaaat

SEQ ID NO: 23863 - RNA, 19 nt, synthetic construct
  misc_feature 1..19: note = siRNA antisense sequence
  source 1..19: mol_type = other RNA
atttgatatgtatcgtagc

SEQ ID NO: 23864 - RNA, 19 nt, synthetic construct
  misc_feature 1..19: note = siRNA sense sequence
  source 1..19: mol_type = other RNA
gatacatatcaaatgacag

SEQ ID NO: 23865 - RNA, 19 nt, synthetic construct
  misc_feature 1..19: note = siRNA antisense sequence
  source 1..19: mol_type = other RNA
ctgtcatttgatatgtatc

SEQ ID NO: 23866 - RNA, 19 nt, synthetic construct
  misc_feature 1..19: note = siRNA sense sequence
  source 1..19: mol_type = other RNA
acatatcaaatgacagcta

SEQ ID NO: 23867 - RNA, 19 nt, synthetic construct
  misc_feature 1..19: note = siRNA antisense sequence
  source 1..19: mol_type = other RNA
tagctgtcatttgatatgt

SEQ ID NO: 23868 - RNA, 19 nt, synthetic construct
  misc_feature 1..19: note = siRNA sense sequence
  source 1..19: mol_type = other RNA
catatcaaatgacagctac

SEQ ID NO: 23869 - RNA, 19 nt, synthetic construct
  misc_feature 1..19: note = siRNA antisense sequence
  source 1..19: mol_type = other RNA
gtagctgtcatttgatatg

SEQ ID NO: 23870 - RNA, 19 nt, synthetic construct
  misc_feature 1..19: note = siRNA sense sequence
  source 1..19: mol_type = other RNA
atatcaaatgacagctact

SEQ ID NO: 23871 - RNA, 19 nt, synthetic construct
  misc_feature 1..19: note = siRNA antisense sequence
  source 1..19: mol_type = other RNA
agtagctgtcatttgatat

SEQ ID NO: 23872 - RNA, 19 nt, synthetic construct
  misc_feature 1..19: note = siRNA sense sequence
  source 1..19: mol_type = other RNA
tatcaaatgacagctactc

SEQ ID NO: 23873 - RNA, 19 nt, synthetic construct
  misc_feature 1..19: note = siRNA antisense sequence
  source 1..19: mol_type = other RNA
gagtagctgtcatttgata

SEQ ID NO: 23874 - RNA, 19 nt, synthetic construct
  misc_feature 1..19: note = siRNA sense sequence
  source 1..19: mol_type = other RNA
atcaaatgacagctactcc

SEQ ID NO: 23875 - RNA, 19 nt, synthetic construct
  misc_feature 1..19: note = siRNA antisense sequence
  source 1..19: mol_type = other RNA
ggagtagctgtcatttgat

SEQ ID NO: 23876 - RNA, 19 nt, synthetic construct
  misc_feature 1..19: note = siRNA sense sequence
  source 1..19: mol_type = other RNA
tcaaatgacagctactcct

SEQ ID NO: 23877 - RNA, 19 nt, synthetic construct
  misc_feature 1..19: note = siRNA antisense sequence
  source 1..19: mol_type = other RNA
aggagtagctgtcatttga

SEQ ID NO: 23878 - RNA, 19 nt, synthetic construct
  misc_feature 1..19: note = siRNA sense sequence
  source 1..19: mol_type = other RNA
caaatgacagctactcctg

SEQ ID NO: 23879 - RNA, 19 nt, synthetic construct
  misc_feature 1..19: note = siRNA antisense sequence
  source 1..19: mol_type = other RNA
caggagtagctgtcatttg

SEQ ID NO: 23880 - RNA, 19 nt, synthetic construct
  misc_feature 1..19: note = siRNA sense sequence
  source 1..19: mol_type = other RNA
tgacagctactcctggtcc

SEQ ID NO: 23881 - RNA, 19 nt, synthetic construct
  misc_feature 1..19: note = siRNA antisense sequence
  source 1..19: mol_type = other RNA
ggaccaggagtagctgtca

SEQ ID NO: 23882 - RNA, 19 nt, synthetic construct
  misc_feature 1..19: note = siRNA sense sequence
  source 1..19: mol_type = other RNA
gacagctactcctggtccc

SEQ ID NO: 23883 - RNA, 19 nt, synthetic construct
  misc_feature 1..19: note = siRNA antisense sequence
  source 1..19: mol_type = other RNA
gggaccaggagtagctgtc

SEQ ID NO: 23884 - RNA, 19 nt, synthetic construct
  misc_feature 1..19: note = siRNA sense sequence
  source 1..19: mol_type = other RNA
acagctactcctggtccct

SEQ ID NO: 23885 - RNA, 19 nt, synthetic construct
  misc_feature 1..19: note = siRNA antisense sequence
  source 1..19: mol_type = other RNA
agggaccaggagtagctgt

SEQ ID NO: 23886 - RNA, 19 nt, synthetic construct
  misc_feature 1..19: note = siRNA sense sequence
  source 1..19: mol_type = other RNA
cagctactcctggtccctc

SEQ ID NO: 23887 - RNA, 19 nt, synthetic construct
  misc_feature 1..19: note = siRNA antisense sequence
  source 1..19: mol_type = other RNA
gagggaccaggagtagctg

SEQ ID NO: 23888 - RNA, 19 nt, synthetic construct
  misc_feature 1..19: note = siRNA sense sequence
  source 1..19: mol_type = other RNA
gctactcctggtccctcat

SEQ ID NO: 23889 - RNA, 19 nt, synthetic construct
  misc_feature 1..19: note = siRNA antisense sequence
  source 1..19: mol_type = other RNA
atgagggaccaggagtagc

SEQ ID NO: 23890 - RNA, 19 nt, synthetic construct
  misc_feature 1..19: note = siRNA sense sequence
  source 1..19: mol_type = other RNA
ctactcctggtccctcatt

SEQ ID NO: 23891 - RNA, 19 nt, synthetic construct
  misc_feature 1..19: note = siRNA antisense sequence
  source 1..19: mol_type = other RNA
aatgagggaccaggagtag

SEQ ID NO: 23892 - RNA, 19 nt, synthetic construct
  misc_feature 1..19: note = siRNA sense sequence
  source 1..19: mol_type = other RNA
tactcctggtccctcattt

SEQ ID NO: 23893 - RNA, 19 nt, synthetic construct
  misc_feature 1..19: note = siRNA antisense sequence
  source 1..19: mol_type = other RNA
aaatgagggaccaggagta

SEQ ID NO: 23894 - RNA, 19 nt, synthetic construct
  misc_feature 1..19: note = siRNA sense sequence
  source 1..19: mol_type = other RNA
actcctggtccctcatttg

SEQ ID NO: 23895 - RNA, 19 nt, synthetic construct
  misc_feature 1..19: note = siRNA antisense sequence
  source 1..19: mol_type = other RNA
caaatgagggaccaggagt

SEQ ID NO: 23896 - RNA, 19 nt, synthetic construct
  misc_feature 1..19: note = siRNA sense sequence
  source 1..19: mol_type = other RNA
ctcctggtccctcatttgt

SEQ ID NO: 23897 - RNA, 19 nt, synthetic construct
  misc_feature 1..19: note = siRNA antisense sequence
  source 1..19: mol_type = other RNA
acaaatgagggaccaggag

SEQ ID NO: 23898 - RNA, 19 nt, synthetic construct
  misc_feature 1..19: note = siRNA sense sequence
  source 1..19: mol_type = other RNA
tcctggtccctcatttgta

SEQ ID NO: 23899 - RNA, 19 nt, synthetic construct
  misc_feature 1..19: note = siRNA antisense sequence
  source 1..19: mol_type = other RNA
tacaaatgagggaccagga

SEQ ID NO: 23900 - RNA, 19 nt, synthetic construct
  misc_feature 1..19: note = siRNA sense sequence
  source 1..19: mol_type = other RNA
ggtccctcatttgtatgtt

SEQ ID NO: 23901 - RNA, 19 nt, synthetic construct
  misc_feature 1..19: note = siRNA antisense sequence
  source 1..19: mol_type = other RNA
aacatacaaatgagggacc

SEQ ID NO: 23902 - RNA, 19 nt, synthetic construct
  misc_feature 1..19: note = siRNA sense sequence
  source 1..19: mol_type = other RNA
gtccctcatttgtatgtta

SEQ ID NO: 23903 - RNA, 19 nt, synthetic construct
  misc_feature 1..19: note = siRNA antisense sequence
  source 1..19: mol_type = other RNA
taacatacaaatgagggac

SEQ ID NO: 23904 - RNA, 19 nt, synthetic construct
  misc_feature 1..19: note = siRNA sense sequence
  source 1..19: mol_type = other RNA
tccctcatttgtatgttaa

SEQ ID NO: 23905 - RNA, 19 nt, synthetic construct
  misc_feature 1..19: note = siRNA antisense sequence
  source 1..19: mol_type = other RNA
ttaacatacaaatgaggga

SEQ ID NO: 23906 - RNA, 19 nt, synthetic construct
  misc_feature 1..19: note = siRNA sense sequence
  source 1..19: mol_type = other RNA
ccctcatttgtatgttaaa

SEQ ID NO: 23907 - RNA, 19 nt, synthetic construct
  misc_feature 1..19: note = siRNA antisense sequence
  source 1..19: mol_type = other RNA
tttaacatacaaatgaggg

SEQ ID NO: 23908 - RNA, 19 nt, synthetic construct
  misc_feature 1..19: note = siRNA sense sequence
  source 1..19: mol_type = other RNA
ttgatcttggatttcactt

SEQ ID NO: 23909 - RNA, 19 nt, synthetic construct
  misc_feature 1..19: note = siRNA antisense sequence
  source 1..19: mol_type = other RNA
aagtgaaatccaagatcaa

SEQ ID NO: 23910 - RNA, 19 nt, synthetic construct
  misc_feature 1..19: note = siRNA sense sequence
  source 1..19: mol_type = other RNA
gatttcactttcattaccg

SEQ ID NO: 23911 - RNA, 19 nt, synthetic construct
  misc_feature 1..19: note = siRNA antisense sequence
  source 1..19: mol_type = other RNA
cggtaatgaaagtgaaatc

SEQ ID NO: 23912 - RNA, 19 nt, synthetic construct
  misc_feature 1..19: note = siRNA sense sequence
  source 1..19: mol_type = other RNA
tttcactttcattaccgtc

SEQ ID NO: 23913 - RNA, 19 nt, synthetic construct
  misc_feature 1..19: note = siRNA antisense sequence
  source 1..19: mol_type = other RNA
gacggtaatgaaagtgaaa

SEQ ID NO: 23914 - RNA, 19 nt, synthetic construct
  misc_feature 1..19: note = siRNA sense sequence
  source 1..19: mol_type = other RNA
tttcattaccgtcttagaa

SEQ ID NO: 23915 - RNA, 19 nt, synthetic construct
  misc_feature 1..19: note = siRNA antisense sequence
  source 1..19: mol_type = other RNA
ttctaagacggtaatgaaa

SEQ ID NO: 23916 - RNA, 19 nt, synthetic construct
  misc_feature 1..19: note = siRNA sense sequence
  source 1..19: mol_type = other RNA
ctgctcccagatgccacta

SEQ ID NO: 23917 - RNA, 19 nt, synthetic construct
  misc_feature 1..19: note = siRNA antisense sequence
  source 1..19: mol_type = other RNA
tagtggcatctgggagcag

SEQ ID NO: 23918 - RNA, 19 nt, synthetic construct
  misc_feature 1..19: note = siRNA sense sequence
  source 1..19: mol_type = other RNA
tgctcccagatgccactag

SEQ ID NO: 23919 - RNA, 19 nt, synthetic construct
  misc_feature 1..19: note = siRNA antisense sequence
  source 1..19: mol_type = other RNA
ctagtggcatctgggagca

SEQ ID NO: 23920 - RNA, 19 nt, synthetic construct
  misc_feature 1..19: note = siRNA sense sequence
  source 1..19: mol_type = other RNA
gctcccagatgccactaga

SEQ ID NO: 23921 - RNA, 19 nt, synthetic construct
  misc_feature 1..19: note = siRNA antisense sequence
  source 1..19: mol_type = other RNA
tctagtggcatctgggagc

SEQ ID NO: 23922 - RNA, 19 nt, synthetic construct
  misc_feature 1..19: note = siRNA sense sequence
  source 1..19: mol_type = other RNA
ctcccagatgccactagag

SEQ ID NO: 23923 - RNA, 19 nt, synthetic construct
  misc_feature 1..19: note = siRNA antisense sequence
  source 1..19: mol_type = other RNA
ctctagtggcatctgggag

SEQ ID NO: 23924 - RNA, 19 nt, synthetic construct
  misc_feature 1..19: note = siRNA sense sequence
  source 1..19: mol_type = other RNA
tcccagatgccactagagt

SEQ ID NO: 23925 - RNA, 19 nt, synthetic construct
  misc_feature 1..19: note = siRNA antisense sequence
  source 1..19: mol_type = other RNA
actctagtggcatctggga

SEQ ID NO: 23926 - RNA, 19 nt, synthetic construct
  misc_feature 1..19: note = siRNA sense sequence
  source 1..19: mol_type = other RNA
cccagatgccactagagta

SEQ ID NO: 23927 - RNA, 19 nt, synthetic construct
  misc_feature 1..19: note = siRNA antisense sequence
  source 1..19: mol_type = other RNA
tactctagtggcatctggg

SEQ ID NO: 23928 - RNA, 19 nt, synthetic construct
  misc_feature 1..19: note = siRNA sense sequence
  source 1..19: mol_type = other RNA
ccagatgccactagagtag

SEQ ID NO: 23929 - RNA, 19 nt, synthetic construct
  misc_feature 1..19: note = siRNA antisense sequence
  source 1..19: mol_type = other RNA
ctactctagtggcatctgg

SEQ ID NO: 23930 - RNA, 19 nt, synthetic construct
  misc_feature 1..19: note = siRNA sense sequence
  source 1..19: mol_type = other RNA
cagatgccactagagtagc

SEQ ID NO: 23931 - RNA, 19 nt, synthetic construct
  misc_feature 1..19: note = siRNA antisense sequence
  source 1..19: mol_type = other RNA
gctactctagtggcatctg

SEQ ID NO: 23932 - RNA, 19 nt, synthetic construct
  misc_feature 1..19: note = siRNA sense sequence
  source 1..19: mol_type = other RNA
agatgccactagagtagct

SEQ ID NO: 23933 - RNA, 19 nt, synthetic construct
  misc_feature 1..19: note = siRNA antisense sequence
  source 1..19: mol_type = other RNA
agctactctagtggcatct

SEQ ID NO: 23934 - RNA, 19 nt, synthetic construct
  misc_feature 1..19: note = siRNA sense sequence
  source 1..19: mol_type = other RNA
gatgccactagagtagctt

SEQ ID NO: 23935 - RNA, 19 nt, synthetic construct
  misc_feature 1..19: note = siRNA antisense sequence
  source 1..19: mol_type = other RNA
aagctactctagtggcatc

SEQ ID NO: 23936 - RNA, 19 nt, synthetic construct
  misc_feature 1..19: note = siRNA sense sequence
  source 1..19: mol_type = other RNA
cactagagtagctttgtaa

SEQ ID NO: 23937 - RNA, 19 nt, synthetic construct
  misc_feature 1..19: note = siRNA antisense sequence
  source 1..19: mol_type = other RNA
ttacaaagctactctagtg

SEQ ID NO: 23938 - RNA, 19 nt, synthetic construct
  misc_feature 1..19: note = siRNA sense sequence
  source 1..19: mol_type = other RNA
actagagtagctttgtaaa

SEQ ID NO: 23939 - RNA, 19 nt, synthetic construct
  misc_feature 1..19: note = siRNA antisense sequence
  source 1..19: mol_type = other RNA
tttacaaagctactctagt

SEQ ID NO: 23940 - RNA, 19 nt, synthetic construct
  misc_feature 1..19: note = siRNA sense sequence
  source 1..19: mol_type = other RNA
ctagagtagctttgtaaag

SEQ ID NO: 23941 - RNA, 19 nt, synthetic construct
  misc_feature 1..19: note = siRNA antisense sequence
  source 1..19: mol_type = other RNA
ctttacaaagctactctag

SEQ ID NO: 23942 - RNA, 19 nt, synthetic construct
  misc_feature 1..19: note = siRNA sense sequence
  source 1..19: mol_type = other RNA
tctttacttagtttctgtc

SEQ ID NO: 23943 - RNA, 19 nt, synthetic construct
  misc_feature 1..19: note = siRNA antisense sequence
  source 1..19: mol_type = other RNA
gacagaaactaagtaaaga

SEQ ID NO: 23944 - RNA, 19 nt, synthetic construct
  misc_feature 1..19: note = siRNA sense sequence
  source 1..19: mol_type = other RNA
ctttacttagtttctgtct

SEQ ID NO: 23945 - RNA, 19 nt, synthetic construct
  misc_feature 1..19: note = siRNA antisense sequence
  source 1..19: mol_type = other RNA
agacagaaactaagtaaag

SEQ ID NO: 23946 - RNA, 19 nt, synthetic construct
  misc_feature 1..19: note = siRNA sense sequence
  source 1..19: mol_type = other RNA
tacttagtttctgtctcta

SEQ ID NO: 23947 - RNA, 19 nt, synthetic construct
  misc_feature 1..19: note = siRNA antisense sequence
  source 1..19: mol_type = other RNA
tagagacagaaactaagta

SEQ ID NO: 23948 - RNA, 19 nt, synthetic construct
  misc_feature 1..19: note = siRNA sense sequence
  source 1..19: mol_type = other RNA
gtttctgtctctaacttta

SEQ ID NO: 23949 - RNA, 19 nt, synthetic construct
  misc_feature 1..19: note = siRNA antisense sequence
  source 1..19: mol_type = other RNA
taaagttagagacagaaac

SEQ ID NO: 23950 - RNA, 19 nt, synthetic construct
  misc_feature 1..19: note = siRNA sense sequence
  source 1..19: mol_type = other RNA
tttctgtctctaactttag

SEQ ID NO: 23951 - RNA, 19 nt, synthetic construct
  misc_feature 1..19: note = siRNA antisense sequence
  source 1..19: mol_type = other RNA
ctaaagttagagacagaaa

SEQ ID NO: 23952 - RNA, 19 nt, synthetic construct
  misc_feature 1..19: note = siRNA sense sequence
  source 1..19: mol_type = other RNA
ttctgtctctaactttagt

SEQ ID NO: 23953 - RNA, 19 nt, synthetic construct
  misc_feature 1..19: note = siRNA antisense sequence
  source 1..19: mol_type = other RNA
actaaagttagagacagaa

SEQ ID NO: 23954 - RNA, 19 nt, synthetic construct
  misc_feature 1..19: note = siRNA sense sequence
  source 1..19: mol_type = other RNA
tgtctctaactttagtttc

SEQ ID NO: 23955 - RNA, 19 nt, synthetic construct
  misc_feature 1..19: note = siRNA antisense sequence
  source 1..19: mol_type = other RNA
gaaactaaagttagagaca

SEQ ID NO: 23956 - RNA, 19 nt, synthetic construct
  misc_feature 1..19: note = siRNA sense sequence
  source 1..19: mol_type = other RNA
gtctctaactttagtttcc

SEQ ID NO: 23957 - RNA, 19 nt, synthetic construct
  misc_feature 1..19: note = siRNA antisense sequence
  source 1..19: mol_type = other RNA
ggaaactaaagttagagac

SEQ ID NO: 23958 - RNA, 19 nt, synthetic construct
  misc_feature 1..19: note = siRNA sense sequence
  source 1..19: mol_type = other RNA
tcttaacctccaattatct

SEQ ID NO: 23959 - RNA, 19 nt, synthetic construct
  misc_feature 1..19: note = siRNA antisense sequence
  source 1..19: mol_type = other RNA
agataattggaggttaaga

SEQ ID NO: 23960 - RNA, 19 nt, synthetic construct
  misc_feature 1..19: note = siRNA sense sequence
  source 1..19: mol_type = other RNA
cttaacctccaattatctt

SEQ ID NO: 23961 - RNA, 19 nt, synthetic construct
  misc_feature 1..19: note = siRNA antisense sequence
  source 1..19: mol_type = other RNA
aagataattggaggttaag

SEQ ID NO: 23962 - RNA, 19 nt, synthetic construct
  misc_feature 1..19: note = siRNA sense sequence
  source 1..19: mol_type = other RNA
acctccaattatctttaac

SEQ ID NO: 23963 - RNA, 19 nt, synthetic construct
  misc_feature 1..19: note = siRNA antisense sequence
  source 1..19: mol_type = other RNA
gttaaagataattggaggt

SEQ ID NO: 23964 - RNA, 19 nt, synthetic construct
  misc_feature 1..19: note = siRNA sense sequence
  source 1..19: mol_type = other RNA
tgttcctaagcaaccaagt

SEQ ID NO: 23965 - RNA, 19 nt, synthetic construct
  misc_feature 1..19: note = siRNA antisense sequence
  source 1..19: mol_type = other RNA
acttggttgcttaggaaca

SEQ ID NO: 23966 - RNA, 19 nt, synthetic construct
  misc_feature 1..19: note = siRNA sense sequence
  source 1..19: mol_type = other RNA
gttcctaagcaaccaagta

SEQ ID NO: 23967 - RNA, 19 nt, synthetic construct
  misc_feature 1..19: note = siRNA antisense sequence
  source 1..19: mol_type = other RNA
tacttggttgcttaggaac

SEQ ID NO: 23968 - RNA, 19 nt, synthetic construct
  misc_feature 1..19: note = siRNA sense sequence
  source 1..19: mol_type = other RNA
ttcctaagcaaccaagtat

SEQ ID NO: 23969 - RNA, 19 nt, synthetic construct
  misc_feature 1..19: note = siRNA antisense sequence
  source 1..19: mol_type = other RNA
atacttggttgcttaggaa

SEQ ID NO: 23970 - RNA, 19 nt, synthetic construct
  misc_feature 1..19: note = siRNA sense sequence
  source 1..19: mol_type = other RNA
tcctaagcaaccaagtata

SEQ ID NO: 23971 - RNA, 19 nt, synthetic construct
  misc_feature 1..19: note = siRNA antisense sequence
  source 1..19: mol_type = other RNA
tatacttggttgcttagga

SEQ ID NO: 23972 - RNA, 19 nt, synthetic construct
  misc_feature 1..19: note = siRNA sense sequence
  source 1..19: mol_type = other RNA
cctaagcaaccaagtatac

SEQ ID NO: 23973 - RNA, 19 nt, synthetic construct
  misc_feature 1..19: note = siRNA antisense sequence
  source 1..19: mol_type = other RNA
gtatacttggttgcttagg

SEQ ID NO: 23974 - RNA, 19 nt, synthetic construct
  misc_feature 1..19: note = siRNA sense sequence
  source 1..19: mol_type = other RNA
agcaaccaagtatacatat

SEQ ID NO: 23975 - RNA, 19 nt, synthetic construct
  misc_feature 1..19: note = siRNA antisense sequence
  source 1..19: mol_type = other RNA
atatgtatacttggttgct

SEQ ID NO: 23976 - RNA, 19 nt, synthetic construct
  misc_feature 1..19: note = siRNA sense sequence
  source 1..19: mol_type = other RNA
gcaaccaagtatacatatg

SEQ ID NO: 23977 - RNA, 19 nt, synthetic construct
  misc_feature 1..19: note = siRNA antisense sequence
  source 1..19: mol_type = other RNA
catatgtatacttggttgc

SEQ ID NO: 23978 - RNA, 19 nt, synthetic construct
  misc_feature 1..19: note = siRNA sense sequence
  source 1..19: mol_type = other RNA
caaccaagtatacatatga

SEQ ID NO: 23979 - RNA, 19 nt, synthetic construct
  misc_feature 1..19: note = siRNA antisense sequence
  source 1..19: mol_type = other RNA
tcatatgtatacttggttg

SEQ ID NO: 23980 - RNA, 19 nt, synthetic construct
  misc_feature 1..19: note = siRNA sense sequence
  source 1..19: mol_type = other RNA
aacggtctgtacattaatg

SEQ ID NO: 23981 - RNA, 19 nt, synthetic construct
  misc_feature 1..19: note = siRNA antisense sequence
  source 1..19: mol_type = other RNA
cattaatgtacagaccgtt

SEQ ID NO: 23982 - RNA, 19 nt, synthetic construct
  misc_feature 1..19: note = siRNA sense sequence
  source 1..19: mol_type = other RNA
acggtctgtacattaatgc

SEQ ID NO: 23983 - RNA, 19 nt, synthetic construct
  misc_feature 1..19: note = siRNA antisense sequence
  source 1..19: mol_type = other RNA
gcattaatgtacagaccgt

SEQ ID NO: 23984 - RNA, 19 nt, synthetic construct
  misc_feature 1..19: note = siRNA sense sequence
  source 1..19: mol_type = other RNA
cggtctgtacattaatgcc

SEQ ID NO: 23985 - RNA, 19 nt, synthetic construct
  misc_feature 1..19: note = siRNA antisense sequence
  source 1..19: mol_type = other RNA
ggcattaatgtacagaccg

SEQ ID NO: 23986 - RNA, 19 nt, synthetic construct
  misc_feature 1..19: note = siRNA sense sequence
  source 1..19: mol_type = other RNA
ggtctgtacattaatgcct

SEQ ID NO: 23987 - RNA, 19 nt, synthetic construct
  misc_feature 1..19: note = siRNA antisense sequence
  source 1..19: mol_type = other RNA
aggcattaatgtacagacc

SEQ ID NO: 23988 - RNA, 19 nt, synthetic construct
  misc_feature 1..19: note = siRNA sense sequence
  source 1..19: mol_type = other RNA
gtacattaatgcctcataa

SEQ ID NO: 23989 - RNA, 19 nt, synthetic construct
  misc_feature 1..19: note = siRNA antisense sequence
  source 1..19: mol_type = other RNA
ttatgaggcattaatgtac

SEQ ID NO: 23990 - RNA, 19 nt, synthetic construct
  misc_feature 1..19: note = siRNA sense sequence
  source 1..19: mol_type = other RNA
ttaatgcctcataatagca

SEQ ID NO: 23991 - RNA, 19 nt, synthetic construct
  misc_feature 1..19: note = siRNA antisense sequence
  source 1..19: mol_type = other RNA
tgctattatgaggcattaa

SEQ ID NO: 23992 - RNA, 19 nt, synthetic construct
  misc_feature 1..19: note = siRNA sense sequence
  source 1..19: mol_type = other RNA
taatgcctcataatagcag

SEQ ID NO: 23993 - RNA, 19 nt, synthetic construct
  misc_feature 1..19: note = siRNA antisense sequence
  source 1..19: mol_type = other RNA
ctgctattatgaggcatta

SEQ ID NO: 23994 - RNA, 19 nt, synthetic construct
  misc_feature 1..19: note = siRNA sense sequence
  source 1..19: mol_type = other RNA
aatgcctcataatagcagc

SEQ ID NO: 23995 - RNA, 19 nt, synthetic construct
  misc_feature 1..19: note = siRNA antisense sequence
  source 1..19: mol_type = other RNA
gctgctattatgaggcatt

SEQ ID NO: 23996 - RNA, 19 nt, synthetic construct
  misc_feature 1..19: note = siRNA sense sequence
  source 1..19: mol_type = other RNA
cctcataatagcagctctt

SEQ ID NO: 23997 - RNA, 19 nt, synthetic construct
  misc_feature 1..19: note = siRNA antisense sequence
  source 1..19: mol_type = other RNA
aagagctgctattatgagg

SEQ ID NO: 23998 - RNA, 19 nt, synthetic construct
  misc_feature 1..19: note = siRNA sense sequence
  source 1..19: mol_type = other RNA
ctcataatagcagctctta

SEQ ID NO: 23999 - RNA, 19 nt, synthetic construct
  misc_feature 1..19: note = siRNA antisense sequence
  source 1..19: mol_type = other RNA
taagagctgctattatgag

SEQ ID NO: 24000 - RNA, 19 nt, synthetic construct
  misc_feature 1..19: note = siRNA sense sequence
  source 1..19: mol_type = other RNA
atagcagctcttatttggg

SEQ ID NO: 24001 - RNA, 19 nt, synthetic construct
  misc_feature 1..19: note = siRNA antisense sequence
  source 1..19: mol_type = other RNA
cccaaataagagctgctat

SEQ ID NO: 24002 - RNA, 19 nt, synthetic construct
  misc_feature 1..19: note = siRNA sense sequence
  source 1..19: mol_type = other RNA
tagcagctcttatttggga

SEQ ID NO: 24003 - RNA, 19 nt, synthetic construct
  misc_feature 1..19: note = siRNA antisense sequence
  source 1..19: mol_type = other RNA
tcccaaataagagctgcta

SEQ ID NO: 24004 - RNA, 19 nt, synthetic construct
  misc_feature 1..19: note = siRNA sense sequence
  source 1..19: mol_type = other RNA
agcagctcttatttgggaa

SEQ ID NO: 24005 - RNA, 19 nt, synthetic construct
  misc_feature 1..19: note = siRNA antisense sequence
  source 1..19: mol_type = other RNA
ttcccaaataagagctgct

SEQ ID NO: 24006 - RNA, 19 nt, synthetic construct
  misc_feature 1..19: note = siRNA sense sequence
  source 1..19: mol_type = other RNA
ccatgtggttttccaagca

SEQ ID NO: 24007 - RNA, 19 nt, synthetic construct
  misc_feature 1..19: note = siRNA antisense sequence
  source 1..19: mol_type = other RNA
tgcttggaaaaccacatgg

SEQ ID NO: 24008 - RNA, 19 nt, synthetic construct
  misc_feature 1..19: note = siRNA sense sequence
  source 1..19: mol_type = other RNA
catgtggttttccaagcaa

SEQ ID NO: 24009 - RNA, 19 nt, synthetic construct
  misc_feature 1..19: note = siRNA antisense sequence
  source 1..19: mol_type = other RNA
ttgcttggaaaaccacatg

SEQ ID NO: 24010 - RNA, 19 nt, synthetic construct
  misc_feature 1..19: note = siRNA sense sequence
  source 1..19: mol_type = other RNA
atgtggttttccaagcaag

SEQ ID NO: 24011 - RNA, 19 nt, synthetic construct
  misc_feature 1..19: note = siRNA antisense sequence
  source 1..19: mol_type = other RNA
cttgcttggaaaaccacat

SEQ ID NO: 24012 - RNA, 19 nt, synthetic construct
  misc_feature 1..19: note = siRNA sense sequence
  source 1..19: mol_type = other RNA
tgtggttttccaagcaagt

SEQ ID NO: 24013 - RNA, 19 nt, synthetic construct
  misc_feature 1..19: note = siRNA antisense sequence
  source 1..19: mol_type = other RNA
acttgcttggaaaaccaca

SEQ ID NO: 24014 - RNA, 19 nt, synthetic construct
  misc_feature 1..19: note = siRNA sense sequence
  source 1..19: mol_type = other RNA
gtggttttccaagcaagtt

SEQ ID NO: 24015 - RNA, 19 nt, synthetic construct
  misc_feature 1..19: note = siRNA antisense sequence
  source 1..19: mol_type = other RNA
aacttgcttggaaaaccac

SEQ ID NO: 24016 - RNA, 19 nt, synthetic construct
  misc_feature 1..19: note = siRNA sense sequence
  source 1..19: mol_type = other RNA
tggttttccaagcaagtta

SEQ ID NO: 24017 - RNA, 19 nt, synthetic construct
  misc_feature 1..19: note = siRNA antisense sequence
  source 1..19: mol_type = other RNA
taacttgcttggaaaacca

SEQ ID NO: 24018 - RNA, 19 nt, synthetic construct
  misc_feature 1..19: note = siRNA sense sequence
  source 1..19: mol_type = other RNA
ggttttccaagcaagttaa

SEQ ID NO: 24019 - RNA, 19 nt, synthetic construct
  misc_feature 1..19: note = siRNA antisense sequence
  source 1..19: mol_type = other RNA
ttaacttgcttggaaaacc

SEQ ID NO: 24020 - RNA, 19 nt, synthetic construct
  misc_feature 1..19: note = siRNA sense sequence
  source 1..19: mol_type = other RNA
gttttccaagcaagttaag

SEQ ID NO: 24021 - RNA, 19 nt, synthetic construct
  misc_feature 1..19: note = siRNA antisense sequence
  source 1..19: mol_type = other RNA
cttaacttgcttggaaaac

SEQ ID NO: 24022 - RNA, 19 nt, synthetic construct
  misc_feature 1..19: note = siRNA sense sequence
  source 1..19: mol_type = other RNA
ttttccaagcaagttaaga

SEQ ID NO: 24023 - RNA, 19 nt, synthetic construct
  misc_feature 1..19: note = siRNA antisense sequence
  source 1..19: mol_type = other RNA
tcttaacttgcttggaaaa

SEQ ID NO: 24024 - RNA, 19 nt, synthetic construct
  misc_feature 1..19: note = siRNA sense sequence
  source 1..19: mol_type = other RNA
tatttgtgtttagtgtcag

SEQ ID NO: 24025 - RNA, 19 nt, synthetic construct
  misc_feature 1..19: note = siRNA antisense sequence
  source 1..19: mol_type = other RNA
ctgacactaaacacaaata

SEQ ID NO: 24026 - RNA, 19 nt, synthetic construct
  misc_feature 1..19: note = siRNA sense sequence
  source 1..19: mol_type = other RNA
tttgtgtttagtgtcagaa

SEQ ID NO: 24027 - RNA, 19 nt, synthetic construct
  misc_feature 1..19: note = siRNA antisense sequence
  source 1..19: mol_type = other RNA
ttctgacactaaacacaaa

SEQ ID NO: 24028 - RNA, 19 nt, synthetic construct
  misc_feature 1..19: note = siRNA sense sequence
  source 1..19: mol_type = other RNA
ttgtgtttagtgtcagaat

SEQ ID NO: 24029 - RNA, 19 nt, synthetic construct
  misc_feature 1..19: note = siRNA antisense sequence
  source 1..19: mol_type = other RNA
attctgacactaaacacaa

SEQ ID NO: 24030 - RNA, 19 nt, synthetic construct
  misc_feature 1..19: note = siRNA sense sequence
  source 1..19: mol_type = other RNA
tgtgtttagtgtcagaata

SEQ ID NO: 24031 - RNA, 19 nt, synthetic construct
  misc_feature 1..19: note = siRNA antisense sequence
  source 1..19: mol_type = other RNA
tattctgacactaaacaca

SEQ ID NO: 24032 - RNA, 19 nt, synthetic construct
  misc_feature 1..19: note = siRNA sense sequence
  source 1..19: mol_type = other RNA
gtgtttagtgtcagaatat

SEQ ID NO: 24033 - RNA, 19 nt, synthetic construct
  misc_feature 1..19: note = siRNA antisense sequence
  source 1..19: mol_type = other RNA
atattctgacactaaacac

SEQ ID NO: 24034 - RNA, 19 nt, synthetic construct
  misc_feature 1..19: note = siRNA sense sequence
  source 1..19: mol_type = other RNA
tgtttagtgtcagaatatg

SEQ ID NO: 24035 - RNA, 19 nt, synthetic construct
  misc_feature 1..19: note = siRNA antisense sequence
  source 1..19: mol_type = other RNA
catattctgacactaaaca

SEQ ID NO: 24036 - RNA, 19 nt, synthetic construct
  misc_feature 1..19: note = siRNA sense sequence
  source 1..19: mol_type = other RNA
gtttagtgtcagaatatgt

SEQ ID NO: 24037 - RNA, 19 nt, synthetic construct
  misc_feature 1..19: note = siRNA antisense sequence
  source 1..19: mol_type = other RNA
acatattctgacactaaac

SEQ ID NO: 24038 - RNA, 19 nt, synthetic construct
  misc_feature 1..19: note = siRNA sense sequence
  source 1..19: mol_type = other RNA
ttagtgtcagaatatgttg

SEQ ID NO: 24039 - RNA, 19 nt, synthetic construct
  misc_feature 1..19: note = siRNA antisense sequence
  source 1..19: mol_type = other RNA
caacatattctgacactaa

SEQ ID NO: 24040 - RNA, 19 nt, synthetic construct
  misc_feature 1..19: note = siRNA sense sequence
  source 1..19: mol_type = other RNA
gttgaattagaagttgaag

SEQ ID NO: 24041 - RNA, 19 nt, synthetic construct
  misc_feature 1..19: note = siRNA antisense sequence
  source 1..19: mol_type = other RNA
cttcaacttctaattcaac

SEQ ID NO: 24042 - RNA, 19 nt, synthetic construct
  misc_feature 1..19: note = siRNA sense sequence
  source 1..19: mol_type = other RNA
tgaattagaagttgaagag

SEQ ID NO: 24043 - RNA, 19 nt, synthetic construct
  misc_feature 1..19: note = siRNA antisense sequence
  source 1..19: mol_type = other RNA
ctcttcaacttctaattca

SEQ ID NO: 24044 - RNA, 19 nt, synthetic construct
  misc_feature 1..19: note = siRNA sense sequence
  source 1..19: mol_type = other RNA
gaattagaagttgaagagt

SEQ ID NO: 24045 - RNA, 19 nt, synthetic construct
  misc_feature 1..19: note = siRNA antisense sequence
  source 1..19: mol_type = other RNA
actcttcaacttctaattc

SEQ ID NO: 24046 - RNA, 19 nt, synthetic construct
  misc_feature 1..19: note = siRNA sense sequence
  source 1..19: mol_type = other RNA
ttagaagttgaagagtttc

SEQ ID NO: 24047 - RNA, 19 nt, synthetic construct
  misc_feature 1..19: note = siRNA antisense sequence
  source 1..19: mol_type = other RNA
gaaactcttcaacttctaa

SEQ ID NO: 24048 - RNA, 19 nt, synthetic construct
  misc_feature 1..19: note = siRNA sense sequence
  source 1..19: mol_type = other RNA
gaagttgaagagtttctaa

SEQ ID NO: 24049 - RNA, 19 nt, synthetic construct
  misc_feature 1..19: note = siRNA antisense sequence
  source 1..19: mol_type = other RNA
ttagaaactcttcaacttc

SEQ ID NO: 24050 - RNA, 19 nt, synthetic construct
  misc_feature 1..19: note = siRNA sense sequence
  source 1..19: mol_type = other RNA
agttgaagagtttctaaag

SEQ ID NO: 24051 - RNA, 19 nt, synthetic construct
  misc_feature 1..19: note = siRNA antisense sequence
  source 1..19: mol_type = other RNA
ctttagaaactcttcaact

SEQ ID NO: 24052 - RNA, 19 nt, synthetic construct
  misc_feature 1..19: note = siRNA sense sequence
  source 1..19: mol_type = other RNA
tgaagagtttctaaagtga

SEQ ID NO: 24053 - RNA, 19 nt, synthetic construct
  misc_feature 1..19: note = siRNA antisense sequence
  source 1..19: mol_type = other RNA
tcactttagaaactcttca

SEQ ID NO: 24054 - RNA, 19 nt, synthetic construct
  misc_feature 1..19: note = siRNA sense sequence
  source 1..19: mol_type = other RNA
agtgattttaagggcttga

SEQ ID NO: 24055 - RNA, 19 nt, synthetic construct
  misc_feature 1..19: note = siRNA antisense sequence
  source 1..19: mol_type = other RNA
tcaagcccttaaaatcact

SEQ ID NO: 24056 - RNA, 19 nt, synthetic construct
  misc_feature 1..19: note = siRNA sense sequence
  source 1..19: mol_type = other RNA
gattttaagggcttgagga

SEQ ID NO: 24057 - RNA, 19 nt, synthetic construct
  misc_feature 1..19: note = siRNA antisense sequence
  source 1..19: mol_type = other RNA
tcctcaagcccttaaaatc

SEQ ID NO: 24058 - RNA, 19 nt, synthetic construct
  misc_feature 1..19: note = siRNA sense sequence
  source 1..19: mol_type = other RNA
attttaagggcttgaggag

SEQ ID NO: 24059 - RNA, 19 nt, synthetic construct
  misc_feature 1..19: note = siRNA antisense sequence
  source 1..19: mol_type = other RNA
ctcctcaagcccttaaaat

SEQ ID NO: 24060 - RNA, 19 nt, synthetic construct
  misc_feature 1..19: note = siRNA sense sequence
  source 1..19: mol_type = other RNA
tcactgggctagatgtggg

SEQ ID NO: 24061 - RNA, 19 nt, synthetic construct
  misc_feature 1..19: note = siRNA antisense sequence
  source 1..19: mol_type = other RNA
cccacatctagcccagtga

SEQ ID NO: 24062 - RNA, 19 nt, synthetic construct
  misc_feature 1..19: note = siRNA sense sequence
  source 1..19: mol_type = other RNA
acatgtaagcaaatcactg

SEQ ID NO: 24063 - RNA, 19 nt, synthetic construct
  misc_feature 1..19: note = siRNA antisense sequence
  source 1..19: mol_type = other RNA
cagtgatttgcttacatgt

SEQ ID NO: 24064 - RNA, 19 nt, synthetic construct
  misc_feature 1..19: note = siRNA sense sequence
  source 1..19: mol_type = other RNA
catgtaagcaaatcactgt

SEQ ID NO: 24065 - RNA, 19 nt, synthetic construct
  misc_feature 1..19: note = siRNA antisense sequence
  source 1..19: mol_type = other RNA
acagtgatttgcttacatg

SEQ ID NO: 24066 - RNA, 19 nt, synthetic construct
  misc_feature 1..19: note = siRNA sense sequence
  source 1..19: mol_type = other RNA
taagcaaatcactgttaga

SEQ ID NO: 24067 - RNA, 19 nt, synthetic construct
  misc_feature 1..19: note = siRNA antisense sequence
  source 1..19: mol_type = other RNA
tctaacagtgatttgctta

SEQ ID NO: 24068 - RNA, 19 nt, synthetic construct
  misc_feature 1..19: note = siRNA sense sequence
  source 1..19: mol_type = other RNA
aagcaaatcactgttagaa

SEQ ID NO: 24069 - RNA, 19 nt, synthetic construct
  misc_feature 1..19: note = siRNA antisense sequence
  source 1..19: mol_type = other RNA
ttctaacagtgatttgctt

SEQ ID NO: 24070 - RNA, 19 nt, synthetic construct
  misc_feature 1..19: note = siRNA sense sequence
  source 1..19: mol_type = other RNA
agcaaatcactgttagaag

SEQ ID NO: 24071 - RNA, 19 nt, synthetic construct
  misc_feature 1..19: note = siRNA antisense sequence
  source 1..19: mol_type = other RNA
cttctaacagtgatttgct

SEQ ID NO: 24072 - RNA, 19 nt, synthetic construct
  misc_feature 1..19: note = siRNA sense sequence
  source 1..19: mol_type = other RNA
gcaaatcactgttagaagt

SEQ ID NO: 24073 - RNA, 19 nt, synthetic construct
  misc_feature 1..19: note = siRNA antisense sequence
  source 1..19: mol_type = other RNA
acttctaacagtgatttgc

SEQ ID NO: 24074 - RNA, 19 nt, synthetic construct
  misc_feature 1..19: note = siRNA sense sequence
  source 1..19: mol_type = other RNA
caaagtgtgtaaaaggaca

SEQ ID NO: 24075 - RNA, 19 nt, synthetic construct
  misc_feature 1..19: note = siRNA antisense sequence
  source 1..19: mol_type = other RNA
tgtccttttacacactttg

SEQ ID NO: 24076 - RNA, 19 nt, synthetic construct
  misc_feature 1..19: note = siRNA sense sequence
  source 1..19: mol_type = other RNA
atagagcaaggaccagtaa

SEQ ID NO: 24077 - RNA, 19 nt, synthetic construct
  misc_feature 1..19: note = siRNA antisense sequence
  source 1..19: mol_type = other RNA
ttactggtccttgctctat

SEQ ID NO: 24078 - RNA, 19 nt, synthetic construct
  misc_feature 1..19: note = siRNA sense sequence
  source 1..19: mol_type = other RNA
agagcaaggaccagtaagt

SEQ ID NO: 24079 - RNA, 19 nt, synthetic construct
  misc_feature 1..19: note = siRNA antisense sequence
  source 1..19: mol_type = other RNA
acttactggtccttgctct

SEQ ID NO: 24080 - RNA, 19 nt, synthetic construct
  misc_feature 1..19: note = siRNA sense sequence
  source 1..19: mol_type = other RNA
gagcaaggaccagtaagtt

SEQ ID NO: 24081 - RNA, 19 nt, synthetic construct
  misc_feature 1..19: note = siRNA antisense sequence
  source 1..19: mol_type = other RNA
aacttactggtccttgctc

SEQ ID NO: 24082 - RNA, 19 nt, synthetic construct
  misc_feature 1..19: note = siRNA sense sequence
  source 1..19: mol_type = other RNA
agcaaggaccagtaagttt

SEQ ID NO: 24083 - RNA, 19 nt, synthetic construct
  misc_feature 1..19: note = siRNA antisense sequence
  source 1..19: mol_type = other RNA
aaacttactggtccttgct

SEQ ID NO: 24084 - RNA, 19 nt, synthetic construct
  misc_feature 1..19: note = siRNA sense sequence
  source 1..19: mol_type = other RNA
gcaaggaccagtaagttta

SEQ ID NO: 24085 - RNA, 19 nt, synthetic construct
  misc_feature 1..19: note = siRNA antisense sequence
  source 1..19: mol_type = other RNA
taaacttactggtccttgc

SEQ ID NO: 24086 - RNA, 19 nt, synthetic construct
  misc_feature 1..19: note = siRNA sense sequence
  source 1..19: mol_type = other RNA
ggaccagtaagtttaccta

SEQ ID NO: 24087 - RNA, 19 nt, synthetic construct
  misc_feature 1..19: note = siRNA antisense sequence
  source 1..19: mol_type = other RNA
taggtaaacttactggtcc

SEQ ID NO: 24088 - RNA, 19 nt, synthetic construct
  misc_feature 1..19: note = siRNA sense sequence
  source 1..19: mol_type = other RNA
gaccagtaagtttacctaa

SEQ ID NO: 24089 - RNA, 19 nt, synthetic construct
  misc_feature 1..19: note = siRNA antisense sequence
  source 1..19: mol_type = other RNA
ttaggtaaacttactggtc

SEQ ID NO: 24090 - RNA, 19 nt, synthetic construct
  misc_feature 1..19: note = siRNA sense sequence
  source 1..19: mol_type = other RNA
accagtaagtttacctaaa

SEQ ID NO: 24091 - RNA, 19 nt, synthetic construct
  misc_feature 1..19: note = siRNA antisense sequence
  source 1..19: mol_type = other RNA
tttaggtaaacttactggt

SEQ ID NO: 24092 - RNA, 19 nt, synthetic construct
  misc_feature 1..19: note = siRNA sense sequence
  source 1..19: mol_type = other RNA
ccagtaagtttacctaaaa

SEQ ID NO: 24093 - RNA, 19 nt, synthetic construct
  misc_feature 1..19: note = siRNA antisense sequence
  source 1..19: mol_type = other RNA
ttttaggtaaacttactgg

SEQ ID NO: 24094 - RNA, 19 nt, synthetic construct
  misc_feature 1..19: note = siRNA sense sequence
  source 1..19: mol_type = other RNA
cagtaagtttacctaaaag

SEQ ID NO: 24095 - RNA, 19 nt, synthetic construct
  misc_feature 1..19: note = siRNA antisense sequence
  source 1..19: mol_type = other RNA
cttttaggtaaacttactg

SEQ ID NO: 24096 - RNA, 19 nt, synthetic construct
  misc_feature 1..19: note = siRNA sense sequence
  source 1..19: mol_type = other RNA
agtaagtttacctaaaagg

SEQ ID NO: 24097 - RNA, 19 nt, synthetic construct
  misc_feature 1..19: note = siRNA antisense sequence
  source 1..19: mol_type = other RNA
ccttttaggtaaacttact

SEQ ID NO: 24098 - RNA, 19 nt, synthetic construct
  misc_feature 1..19: note = siRNA sense sequence
  source 1..19: mol_type = other RNA
gtaagtttacctaaaaggg

SEQ ID NO: 24099 - RNA, 19 nt, synthetic construct
  misc_feature 1..19: note = siRNA antisense sequence
  source 1..19: mol_type = other RNA
cccttttaggtaaacttac

SEQ ID NO: 24100 - RNA, 19 nt, synthetic construct
  misc_feature 1..19: note = siRNA sense sequence
  source 1..19: mol_type = other RNA
aattaagtgggaagatggg

SEQ ID NO: 24101 - RNA, 19 nt, synthetic construct
  misc_feature 1..19: note = siRNA antisense sequence
  source 1..19: mol_type = other RNA
cccatcttcccacttaatt

SEQ ID NO: 24102 - RNA, 19 nt, synthetic construct
  misc_feature 1..19: note = siRNA sense sequence
  source 1..19: mol_type = other RNA
gggaagtgtgctaatcacc

SEQ ID NO: 24103 - RNA, 19 nt, synthetic construct
  misc_feature 1..19: note = siRNA antisense sequence
  source 1..19: mol_type = other RNA
ggtgattagcacacttccc

SEQ ID NO: 24104 - RNA, 19 nt, synthetic construct
  misc_feature 1..19: note = siRNA sense sequence
  source 1..19: mol_type = other RNA
ggaagtgtgctaatcacct

SEQ ID NO: 24105 - RNA, 19 nt, synthetic construct
  misc_feature 1..19: note = siRNA antisense sequence
  source 1..19: mol_type = other RNA
aggtgattagcacacttcc

SEQ ID NO: 24106 - RNA, 19 nt, synthetic construct
  misc_feature 1..19: note = siRNA sense sequence
  source 1..19: mol_type = other RNA
gaagtgtgctaatcaccta

SEQ ID NO: 24107 - RNA, 19 nt, synthetic construct
  misc_feature 1..19: note = siRNA antisense sequence
  source 1..19: mol_type = other RNA
taggtgattagcacacttc

SEQ ID NO: 24108 - RNA, 19 nt, synthetic construct
  misc_feature 1..19: note = siRNA sense sequence
  source 1..19: mol_type = other RNA
aagtgtgctaatcacctaa

SEQ ID NO: 24109 - RNA, 19 nt, synthetic construct
  misc_feature 1..19: note = siRNA antisense sequence
  source 1..19: mol_type = other RNA
ttaggtgattagcacactt

SEQ ID NO: 24110 - RNA, 19 nt, synthetic construct
  misc_feature 1..19: note = siRNA sense sequence
  source 1..19: mol_type = other RNA
agtgtgctaatcacctaag

SEQ ID NO: 24111 - RNA, 19 nt, synthetic construct
  misc_feature 1..19: note = siRNA antisense sequence
  source 1..19: mol_type = other RNA
cttaggtgattagcacact

SEQ ID NO: 24112 - RNA, 19 nt, synthetic construct
  misc_feature 1..19: note = siRNA sense sequence
  source 1..19: mol_type = other RNA
gtgtgctaatcacctaaga

SEQ ID NO: 24113 - RNA, 19 nt, synthetic construct
  misc_feature 1..19: note = siRNA antisense sequence
  source 1..19: mol_type = other RNA
tcttaggtgattagcacac

SEQ ID NO: 24114 - RNA, 19 nt, synthetic construct
  misc_feature 1..19: note = siRNA sense sequence
  source 1..19: mol_type = other RNA
tgtgctaatcacctaagaa

SEQ ID NO: 24115 - RNA, 19 nt, synthetic construct
  misc_feature 1..19: note = siRNA antisense sequence
  source 1..19: mol_type = other RNA
ttcttaggtgattagcaca

SEQ ID NO: 24116 - RNA, 19 nt, synthetic construct
  misc_feature 1..19: note = siRNA sense sequence
  source 1..19: mol_type = other RNA
caagaaggagtttgggttt

SEQ ID NO: 24117 - RNA, 19 nt, synthetic construct
  misc_feature 1..19: note = siRNA antisense sequence
  source 1..19: mol_type = other RNA
aaacccaaactccttcttg

SEQ ID NO: 24118 - RNA, 19 nt, synthetic construct
  misc_feature 1..19: note = siRNA sense sequence
  source 1..19: mol_type = other RNA
aaggagtttgggtttgacc

SEQ ID NO: 24119 - RNA, 19 nt, synthetic construct
  misc_feature 1..19: note = siRNA antisense sequence
  source 1..19: mol_type = other RNA
ggtcaaacccaaactcctt

SEQ ID NO: 24120 - RNA, 19 nt, synthetic construct
  misc_feature 1..19: note = siRNA sense sequence
  source 1..19: mol_type = other RNA
aggagtttgggtttgacca

SEQ ID NO: 24121 - RNA, 19 nt, synthetic construct
  misc_feature 1..19: note = siRNA antisense sequence
  source 1..19: mol_type = other RNA
tggtcaaacccaaactcct

SEQ ID NO: 24122 - RNA, 19 nt, synthetic construct
  misc_feature 1..19: note = siRNA sense sequence
  source 1..19: mol_type = other RNA
ggagtttgggtttgaccat

SEQ ID NO: 24123 - RNA, 19 nt, synthetic construct
  misc_feature 1..19: note = siRNA antisense sequence
  source 1..19: mol_type = other RNA
atggtcaaacccaaactcc

SEQ ID NO: 24124 - RNA, 19 nt, synthetic construct
  misc_feature 1..19: note = siRNA sense sequence
  source 1..19: mol_type = other RNA
gagtttgggtttgaccatt

SEQ ID NO: 24125 - RNA, 19 nt, synthetic construct
  misc_feature 1..19: note = siRNA antisense sequence
  source 1..19: mol_type = other RNA
aatggtcaaacccaaactc

SEQ ID NO: 24126 - RNA, 19 nt, synthetic construct
  misc_feature 1..19: note = siRNA sense sequence
  source 1..19: mol_type = other RNA
agtttgggtttgaccatta

SEQ ID NO: 24127 - RNA, 19 nt, synthetic construct
  misc_feature 1..19: note = siRNA antisense sequence
  source 1..19: mol_type = other RNA
taatggtcaaacccaaact

SEQ ID NO: 24128 - RNA, 19 nt, synthetic construct
  misc_feature 1..19: note = siRNA sense sequence
  source 1..19: mol_type = other RNA
gtttgggtttgaccattag

SEQ ID NO: 24129 - RNA, 19 nt, synthetic construct
  misc_feature 1..19: note = siRNA antisense sequence
  source 1..19: mol_type = other RNA
ctaatggtcaaacccaaac

SEQ ID NO: 24130 - RNA, 19 nt, synthetic construct
  misc_feature 1..19: note = siRNA sense sequence
  source 1..19: mol_type = other RNA
tttgggtttgaccattagg

SEQ ID NO: 24131 - RNA, 19 nt, synthetic construct
  misc_feature 1..19: note = siRNA antisense sequence
  source 1..19: mol_type = other RNA
cctaatggtcaaacccaaa

SEQ ID NO: 24132 - RNA, 19 nt, synthetic construct
  misc_feature 1..19: note = siRNA sense sequence
  source 1..19: mol_type = other RNA
ttgggtttgaccattagga

SEQ ID NO: 24133 - RNA, 19 nt, synthetic construct
  misc_feature 1..19: note = siRNA antisense sequence
  source 1..19: mol_type = other RNA
tcctaatggtcaaacccaa

SEQ ID NO: 24134 - RNA, 19 nt, synthetic construct
  misc_feature 1..19: note = siRNA sense sequence
  source 1..19: mol_type = other RNA
tgggtttgaccattaggag

SEQ ID NO: 24135 - RNA, 19 nt, synthetic construct
  misc_feature 1..19: note = siRNA antisense sequence
  source 1..19: mol_type = other RNA
ctcctaatggtcaaaccca

SEQ ID NO: 24136 - RNA, 19 nt, synthetic construct
  misc_feature 1..19: note = siRNA sense sequence
  source 1..19: mol_type = other RNA
aataccactttggcagcat

SEQ ID NO: 24137 - RNA, 19 nt, synthetic construct
  misc_feature 1..19: note = siRNA antisense sequence
  source 1..19: mol_type = other RNA
atgctgccaaagtggtatt

SEQ ID NO: 24138 - RNA, 19 nt, synthetic construct
  misc_feature 1..19: note = siRNA sense sequence
  source 1..19: mol_type = other RNA
ataccactttggcagcatc

SEQ ID NO: 24139 - RNA, 19 nt, synthetic construct
  misc_feature 1..19: note = siRNA antisense sequence
  source 1..19: mol_type = other RNA
gatgctgccaaagtggtat

SEQ ID NO: 24140 - RNA, 19 nt, synthetic construct
  misc_feature 1..19: note = siRNA sense sequence
  source 1..19: mol_type = other RNA
taccactttggcagcatca

SEQ ID NO: 24141 - RNA, 19 nt, synthetic construct
  misc_feature 1..19: note = siRNA antisense sequence
  source 1..19: mol_type = other RNA
tgatgctgccaaagtggta

SEQ ID NO: 24142 - RNA, 19 nt, synthetic construct
  misc_feature 1..19: note = siRNA sense sequence
  source 1..19: mol_type = other RNA
accactttggcagcatcaa

SEQ ID NO: 24143 - RNA, 19 nt, synthetic construct
  misc_feature 1..19: note = siRNA antisense sequence
  source 1..19: mol_type = other RNA
ttgatgctgccaaagtggt

SEQ ID NO: 24144 - RNA, 19 nt, synthetic construct
  misc_feature 1..19: note = siRNA sense sequence
  source 1..19: mol_type = other RNA
ccactttggcagcatcaag

SEQ ID NO: 24145 - RNA, 19 nt, synthetic construct
  misc_feature 1..19: note = siRNA antisense sequence
  source 1..19: mol_type = other RNA
cttgatgctgccaaagtgg

SEQ ID NO: 24146 - RNA, 19 nt, synthetic construct
  misc_feature 1..19: note = siRNA sense sequence
  source 1..19: mol_type = other RNA
cactttggcagcatcaagg

SEQ ID NO: 24147 - RNA, 19 nt, synthetic construct
  misc_feature 1..19: note = siRNA antisense sequence
  source 1..19: mol_type = other RNA
ccttgatgctgccaaagtg

SEQ ID NO: 24148 - RNA, 19 nt, synthetic construct
  misc_feature 1..19: note = siRNA sense sequence
  source 1..19: mol_type = other RNA
aggaggcaagactggaggc

SEQ ID NO: 24149 - RNA, 19 nt, synthetic construct
  misc_feature 1..19: note = siRNA antisense sequence
  source 1..19: mol_type = other RNA
gcctccagtcttgcctcct

SEQ ID NO: 24150 - RNA, 19 nt, synthetic construct
  misc_feature 1..19: note = siRNA sense sequence
  source 1..19: mol_type = other RNA
ggaggcaagactggaggca

SEQ ID NO: 24151 - RNA, 19 nt, synthetic construct
  misc_feature 1..19: note = siRNA antisense sequence
  source 1..19: mol_type = other RNA
tgcctccagtcttgcctcc

SEQ ID NO: 24152 - RNA, 19 nt, synthetic construct
  misc_feature 1..19: note = siRNA sense sequence
  source 1..19: mol_type = other RNA
aggcaggaagactggttaa

SEQ ID NO: 24153 - RNA, 19 nt, synthetic construct
  misc_feature 1..19: note = siRNA antisense sequence
  source 1..19: mol_type = other RNA
ttaaccagtcttcctgcct

SEQ ID NO: 24154 - RNA, 19 nt, synthetic construct
  misc_feature 1..19: note = siRNA sense sequence
  source 1..19: mol_type = other RNA
ggcaggaagactggttaaa

SEQ ID NO: 24155 - RNA, 19 nt, synthetic construct
  misc_feature 1..19: note = siRNA antisense sequence
  source 1..19: mol_type = other RNA
tttaaccagtcttcctgcc

SEQ ID NO: 24156 - RNA, 19 nt, synthetic construct
  misc_feature 1..19: note = siRNA sense sequence
  source 1..19: mol_type = other RNA
gcaggaagactggttaaaa

SEQ ID NO: 24157 - RNA, 19 nt, synthetic construct
  misc_feature 1..19: note = siRNA antisense sequence
  source 1..19: mol_type = other RNA
ttttaaccagtcttcctgc

SEQ ID NO: 24158 - RNA, 19 nt, synthetic construct
  misc_feature 1..19: note = siRNA sense sequence
  source 1..19: mol_type = other RNA
gatgggatcaaaaggacat

SEQ ID NO: 24159 - RNA, 19 nt, synthetic construct
  misc_feature 1..19: note = siRNA antisense sequence
  source 1..19: mol_type = other RNA
atgtccttttgatcccatc

SEQ ID NO: 24160 - RNA, 19 nt, synthetic construct
  misc_feature 1..19: note = siRNA sense sequence
  source 1..19: mol_type = other RNA
atgggatcaaaaggacatg

SEQ ID NO: 24161 - RNA, 19 nt, synthetic construct
  misc_feature 1..19: note = siRNA antisense sequence
  source 1..19: mol_type = other RNA
catgtccttttgatcccat

SEQ ID NO: 24162 - RNA, 19 nt, synthetic construct
  misc_feature 1..19: note = siRNA sense sequence
  source 1..19: mol_type = other RNA
tgggatcaaaaggacatga

SEQ ID NO: 24163 - RNA, 19 nt, synthetic construct
  misc_feature 1..19: note = siRNA antisense sequence
  source 1..19: mol_type = other RNA
tcatgtccttttgatccca

SEQ ID NO: 24164 - RNA, 19 nt, synthetic construct
  misc_feature 1..19: note = siRNA sense sequence
  source 1..19: mol_type = other RNA
gggatcaaaaggacatgac

SEQ ID NO: 24165 - RNA, 19 nt, synthetic construct
  misc_feature 1..19: note = siRNA antisense sequence
  source 1..19: mol_type = other RNA
gtcatgtccttttgatccc

SEQ ID NO: 24166 - RNA, 19 nt, synthetic construct
  misc_feature 1..19: note = siRNA sense sequence
  source 1..19: mol_type = other RNA
ggatcaaaaggacatgact

SEQ ID NO: 24167 - RNA, 19 nt, synthetic construct
  misc_feature 1..19: note = siRNA antisense sequence
  source 1..19: mol_type = other RNA
agtcatgtccttttgatcc

SEQ ID NO: 24168 - RNA, 19 nt, synthetic construct
  misc_feature 1..19: note = siRNA sense sequence
  source 1..19: mol_type = other RNA
gatcaaaaggacatgactg

SEQ ID NO: 24169 - RNA, 19 nt, synthetic construct
  misc_feature 1..19: note = siRNA antisense sequence
  source 1..19: mol_type = other RNA
cagtcatgtccttttgatc

SEQ ID NO: 24170 - RNA, 19 nt, synthetic construct
  misc_feature 1..19: note = siRNA sense sequence
  source 1..19: mol_type = other RNA
atcaaaaggacatgactgc

SEQ ID NO: 24171 - RNA, 19 nt, synthetic construct
  misc_feature 1..19: note = siRNA antisense sequence
  source 1..19: mol_type = other RNA
gcagtcatgtccttttgat

SEQ ID NO: 24172 - RNA, 19 nt, synthetic construct
  misc_feature 1..19: note = siRNA sense sequence
  source 1..19: mol_type = other RNA
tcaaaaggacatgactgca

SEQ ID NO: 24173 - RNA, 19 nt, synthetic construct
  misc_feature 1..19: note = siRNA antisense sequence
  source 1..19: mol_type = other RNA
tgcagtcatgtccttttga

SEQ ID NO: 24174 - RNA, 19 nt, synthetic construct
  misc_feature 1..19: note = siRNA sense sequence
  source 1..19: mol_type = other RNA
aaggacatgactgcagatt

SEQ ID NO: 24175 - RNA, 19 nt, synthetic construct
  misc_feature 1..19: note = siRNA antisense sequence
  source 1..19: mol_type = other RNA
aatctgcagtcatgtcctt

SEQ ID NO: 24176 - RNA, 19 nt, synthetic construct
  misc_feature 1..19: note = siRNA sense sequence
  source 1..19: mol_type = other RNA
aggacatgactgcagattg

SEQ ID NO: 24177 - RNA, 19 nt, synthetic construct
  misc_feature 1..19: note = siRNA antisense sequence
  source 1..19: mol_type = other RNA
caatctgcagtcatgtcct

SEQ ID NO: 24178 - RNA, 19 nt, synthetic construct
  misc_feature 1..19: note = siRNA sense sequence
  source 1..19: mol_type = other RNA
ggacatgactgcagattgc

SEQ ID NO: 24179 - RNA, 19 nt, synthetic construct
  misc_feature 1..19: note = siRNA antisense sequence
  source 1..19: mol_type = other RNA
gcaatctgcagtcatgtcc

SEQ ID NO: 24180 - RNA, 19 nt, synthetic construct
  misc_feature 1..19: note = siRNA sense sequence
  source 1..19: mol_type = other RNA
gacatgactgcagattgct

SEQ ID NO: 24181 - RNA, 19 nt, synthetic construct
  misc_feature 1..19: note = siRNA antisense sequence
  source 1..19: mol_type = other RNA
agcaatctgcagtcatgtc

SEQ ID NO: 24182 - RNA, 19 nt, synthetic construct
  misc_feature 1..19: note = siRNA sense sequence
  source 1..19: mol_type = other RNA
acatgactgcagattgctg

SEQ ID NO: 24183 - RNA, 19 nt, synthetic construct
  misc_feature 1..19: note = siRNA antisense sequence
  source 1..19: mol_type = other RNA
cagcaatctgcagtcatgt

SEQ ID NO: 24184 - RNA, 19 nt, synthetic construct
  misc_feature 1..19: note = siRNA sense sequence
  source 1..19: mol_type = other RNA
catgactgcagattgctgt

SEQ ID NO: 24185 - RNA, 19 nt, synthetic construct
  misc_feature 1..19: note = siRNA antisense sequence
  source 1..19: mol_type = other RNA
acagcaatctgcagtcatg

SEQ ID NO: 24186 - RNA, 19 nt, synthetic construct
  misc_feature 1..19: note = siRNA sense sequence
  source 1..19: mol_type = other RNA
atgactgcagattgctgtt

SEQ ID NO: 24187 - RNA, 19 nt, synthetic construct
  misc_feature 1..19: note = siRNA antisense sequence
  source 1..19: mol_type = other RNA
aacagcaatctgcagtcat

SEQ ID NO: 24188 - RNA, 19 nt, synthetic construct
  misc_feature 1..19: note = siRNA sense sequence
  source 1..19: mol_type = other RNA
tgactgcagattgctgttt

SEQ ID NO: 24189 - RNA, 19 nt, synthetic construct
  misc_feature 1..19: note = siRNA antisense sequence
  source 1..19: mol_type = other RNA
aaacagcaatctgcagtca

SEQ ID NO: 24190 - RNA, 19 nt, synthetic construct
  misc_feature 1..19: note = siRNA sense sequence
  source 1..19: mol_type = other RNA
gactgcagattgctgttta

SEQ ID NO: 24191 - RNA, 19 nt, synthetic construct
  misc_feature 1..19: note = siRNA antisense sequence
  source 1..19: mol_type = other RNA
taaacagcaatctgcagtc

SEQ ID NO: 24192 - RNA, 19 nt, synthetic construct
  misc_feature 1..19: note = siRNA sense sequence
  source 1..19: mol_type = other RNA
ctgcagattgctgtttaga

SEQ ID NO: 24193 - RNA, 19 nt, synthetic construct
  misc_feature 1..19: note = siRNA antisense sequence
  source 1..19: mol_type = other RNA
tctaaacagcaatctgcag

SEQ ID NO: 24194 - RNA, 19 nt, synthetic construct
  misc_feature 1..19: note = siRNA sense sequence
  source 1..19: mol_type = other RNA
tgcagattgctgtttagag

SEQ ID NO: 24195 - RNA, 19 nt, synthetic construct
  misc_feature 1..19: note = siRNA antisense sequence
  source 1..19: mol_type = other RNA
ctctaaacagcaatctgca

SEQ ID NO: 24196 - RNA, 19 nt, synthetic construct
  misc_feature 1..19: note = siRNA sense sequence
  source 1..19: mol_type = other RNA
gcagattgctgtttagagt

SEQ ID NO: 24197 - RNA, 19 nt, synthetic construct
  misc_feature 1..19: note = siRNA antisense sequence
  source 1..19: mol_type = other RNA
actctaaacagcaatctgc

SEQ ID NO: 24198 - RNA, 19 nt, synthetic construct
  misc_feature 1..19: note = siRNA sense sequence
  source 1..19: mol_type = other RNA
cagattgctgtttagagtt

SEQ ID NO: 24199 - RNA, 19 nt, synthetic construct
  misc_feature 1..19: note = siRNA antisense sequence
  source 1..19: mol_type = other RNA
aactctaaacagcaatctg

SEQ ID NO: 24200 - RNA, 19 nt, synthetic construct
  misc_feature 1..19: note = siRNA sense sequence
  source 1..19: mol_type = other RNA
gattgctgtttagagttat

SEQ ID NO: 24201 - RNA, 19 nt, synthetic construct
  misc_feature 1..19: note = siRNA antisense sequence
  source 1..19: mol_type = other RNA
ataactctaaacagcaatc

SEQ ID NO: 24202 - RNA, 19 nt, synthetic construct
  misc_feature 1..19: note = siRNA sense sequence
  source 1..19: mol_type = other RNA
attgctgtttagagttatg

SEQ ID NO: 24203 - RNA, 19 nt, synthetic construct
  misc_feature 1..19: note = siRNA antisense sequence
  source 1..19: mol_type = other RNA
cataactctaaacagcaat

SEQ ID NO: 24204 - RNA, 19 nt, synthetic construct
  misc_feature 1..19: note = siRNA sense sequence
  source 1..19: mol_type = other RNA
tgctgtttagagttatgga

SEQ ID NO: 24205 - RNA, 19 nt, synthetic construct
  misc_feature 1..19: note = siRNA antisense sequence
  source 1..19: mol_type = other RNA
tccataactctaaacagca

SEQ ID NO: 24206 - RNA, 19 nt, synthetic construct
  misc_feature 1..19: note = siRNA sense sequence
  source 1..19: mol_type = other RNA
gctgtttagagttatggaa

SEQ ID NO: 24207 - RNA, 19 nt, synthetic construct
  misc_feature 1..19: note = siRNA antisense sequence
  source 1..19: mol_type = other RNA
ttccataactctaaacagc

SEQ ID NO: 24208 - RNA, 19 nt, synthetic construct
  misc_feature 1..19: note = siRNA sense sequence
  source 1..19: mol_type = other RNA
aaagtagaatccaaaggta

SEQ ID NO: 24209 - RNA, 19 nt, synthetic construct
  misc_feature 1..19: note = siRNA antisense sequence
  source 1..19: mol_type = other RNA
tacctttggattctacttt

SEQ ID NO: 24210 - RNA, 19 nt, synthetic construct
  misc_feature 1..19: note = siRNA sense sequence
  source 1..19: mol_type = other RNA
aagtagaatccaaaggtaa

SEQ ID NO: 24211 - RNA, 19 nt, synthetic construct
  misc_feature 1..19: note = siRNA antisense sequence
  source 1..19: mol_type = other RNA
ttacctttggattctactt

SEQ ID NO: 24212 - RNA, 19 nt, synthetic construct
  misc_feature 1..19: note = siRNA sense sequence
  source 1..19: mol_type = other RNA
agtagaatccaaaggtaaa

SEQ ID NO: 24213 - RNA, 19 nt, synthetic construct
  misc_feature 1..19: note = siRNA antisense sequence
  source 1..19: mol_type = other RNA
tttacctttggattctact

SEQ ID NO: 24214 - RNA, 19 nt, synthetic construct
  misc_feature 1..19: note = siRNA sense sequence
  source 1..19: mol_type = other RNA
gtagaatccaaaggtaaat

SEQ ID NO: 24215 - RNA, 19 nt, synthetic construct
  misc_feature 1..19: note = siRNA antisense sequence
  source 1..19: mol_type = other RNA
atttacctttggattctac

SEQ ID NO: 24216 - RNA, 19 nt, synthetic construct
  misc_feature 1..19: note = siRNA sense sequence
  source 1..19: mol_type = other RNA
agaatccaaaggtaaatct

SEQ ID NO: 24217 - RNA, 19 nt, synthetic construct
  misc_feature 1..19: note = siRNA antisense sequence
  source 1..19: mol_type = other RNA
agatttacctttggattct

SEQ ID NO: 24218 - RNA, 19 nt, synthetic construct
  misc_feature 1..19: note = siRNA sense sequence
  source 1..19: mol_type = other RNA
gaatccaaaggtaaatctc

SEQ ID NO: 24219 - RNA, 19 nt, synthetic construct
  misc_feature 1..19: note = siRNA antisense sequence
  source 1..19: mol_type = other RNA
gagatttacctttggattc

SEQ ID NO: 24220 - RNA, 19 nt, synthetic construct
  misc_feature 1..19: note = siRNA sense sequence
  source 1..19: mol_type = other RNA
aatccaaaggtaaatctca

SEQ ID NO: 24221 - RNA, 19 nt, synthetic construct
  misc_feature 1..19: note = siRNA antisense sequence
  source 1..19: mol_type = other RNA
tgagatttacctttggatt

SEQ ID NO: 24222 - RNA, 19 nt, synthetic construct
  misc_feature 1..19: note = siRNA sense sequence
  source 1..19: mol_type = other RNA
atccaaaggtaaatctcag

SEQ ID NO: 24223 - RNA, 19 nt, synthetic construct
  misc_feature 1..19: note = siRNA antisense sequence
  source 1..19: mol_type = other RNA
ctgagatttacctttggat

SEQ ID NO: 24224 - RNA, 19 nt, synthetic construct
  misc_feature 1..19: note = siRNA sense sequence
  source 1..19: mol_type = other RNA
tccaaaggtaaatctcaga

SEQ ID NO: 24225 - RNA, 19 nt, synthetic construct
  misc_feature 1..19: note = siRNA antisense sequence
  source 1..19: mol_type = other RNA
tctgagatttacctttgga

SEQ ID NO: 24226 - RNA, 19 nt, synthetic construct
  misc_feature 1..19: note = siRNA sense sequence
  source 1..19: mol_type = other RNA
ccaaaggtaaatctcagat

SEQ ID NO: 24227 - RNA, 19 nt, synthetic construct
  misc_feature 1..19: note = siRNA antisense sequence
  source 1..19: mol_type = other RNA
atctgagatttacctttgg

SEQ ID NO: 24228 - RNA, 19 nt, synthetic construct
  misc_feature 1..19: note = siRNA sense sequence
  source 1..19: mol_type = other RNA
tcagatttcttgagtggtg

SEQ ID NO: 24229 - RNA, 19 nt, synthetic construct
  misc_feature 1..19: note = siRNA antisense sequence
  source 1..19: mol_type = other RNA
caccactcaagaaatctga

SEQ ID NO: 24230 - RNA, 19 nt, synthetic construct
  misc_feature 1..19: note = siRNA sense sequence
  source 1..19: mol_type = other RNA
cagatttcttgagtggtgg

SEQ ID NO: 24231 - RNA, 19 nt, synthetic construct
  misc_feature 1..19: note = siRNA antisense sequence
  source 1..19: mol_type = other RNA
ccaccactcaagaaatctg

SEQ ID NO: 24232 - RNA, 19 nt, synthetic construct
  misc_feature 1..19: note = siRNA sense sequence
  source 1..19: mol_type = other RNA
agatttcttgagtggtggg

SEQ ID NO: 24233 - RNA, 19 nt, synthetic construct
  misc_feature 1..19: note = siRNA antisense sequence
  source 1..19: mol_type = other RNA
cccaccactcaagaaatct

SEQ ID NO: 24234 - RNA, 19 nt, synthetic construct
  misc_feature 1..19: note = siRNA sense sequence
  source 1..19: mol_type = other RNA
aatgttttatgcagtggtg

SEQ ID NO: 24235 - RNA, 19 nt, synthetic construct
  misc_feature 1..19: note = siRNA antisense sequence
  source 1..19: mol_type = other RNA
caccactgcataaaacatt

SEQ ID NO: 24236 - RNA, 19 nt, synthetic construct
  misc_feature 1..19: note = siRNA sense sequence
  source 1..19: mol_type = other RNA
atgttttatgcagtggtgg

SEQ ID NO: 24237 - RNA, 19 nt, synthetic construct
  misc_feature 1..19: note = siRNA antisense sequence
  source 1..19: mol_type = other RNA
ccaccactgcataaaacat

SEQ ID NO: 24238 - RNA, 19 nt, synthetic construct
  misc_feature 1..19: note = siRNA sense sequence
  source 1..19: mol_type = other RNA
tgttttatgcagtggtggt

SEQ ID NO: 24239 - RNA, 19 nt, synthetic construct
  misc_feature 1..19: note = siRNA antisense sequence
  source 1..19: mol_type = other RNA
accaccactgcataaaaca

SEQ ID NO: 24240 - RNA, 19 nt, synthetic construct
  misc_feature 1..19: note = siRNA sense sequence
  source 1..19: mol_type = other RNA
gttttatgcagtggtggtt

SEQ ID NO: 24241 - RNA, 19 nt, synthetic construct
  misc_feature 1..19: note = siRNA antisense sequence
  source 1..19: mol_type = other RNA
aaccaccactgcataaaac

SEQ ID NO: 24242 - RNA, 19 nt, synthetic construct
  misc_feature 1..19: note = siRNA sense sequence
  source 1..19: mol_type = other RNA
tttatgcagtggtggttaa

SEQ ID NO: 24243 - RNA, 19 nt, synthetic construct
  misc_feature 1..19: note = siRNA antisense sequence
  source 1..19: mol_type = other RNA
ttaaccaccactgcataaa

SEQ ID NO: 24244 - RNA, 19 nt, synthetic construct
  misc_feature 1..19: note = siRNA sense sequence
  source 1..19: mol_type = other RNA
tatgcagtggtggttaaat

SEQ ID NO: 24245 - RNA, 19 nt, synthetic construct
  misc_feature 1..19: note = siRNA antisense sequence
  source 1..19: mol_type = other RNA
atttaaccaccactgcata

SEQ ID NO: 24246 - RNA, 19 nt, synthetic construct
  misc_feature 1..19: note = siRNA sense sequence
  source 1..19: mol_type = other RNA
atgcagtggtggttaaatt

SEQ ID NO: 24247 - RNA, 19 nt, synthetic construct
  misc_feature 1..19: note = siRNA antisense sequence
  source 1..19: mol_type = other RNA
aatttaaccaccactgcat

SEQ ID NO: 24248 - RNA, 19 nt, synthetic construct
  misc_feature 1..19: note = siRNA sense sequence
  source 1..19: mol_type = other RNA
tgcagtggtggttaaattt

SEQ ID NO: 24249 - RNA, 19 nt, synthetic construct
  misc_feature 1..19: note = siRNA antisense sequence
  source 1..19: mol_type = other RNA
aaatttaaccaccactgca

SEQ ID NO: 24250 - RNA, 19 nt, synthetic construct
  misc_feature 1..19: note = siRNA sense sequence
  source 1..19: mol_type = other RNA
gcagtggtggttaaattta

SEQ ID NO: 24251 - RNA, 19 nt, synthetic construct
  misc_feature 1..19: note = siRNA antisense sequence
  source 1..19: mol_type = other RNA
taaatttaaccaccactgc

SEQ ID NO: 24252 - RNA, 19 nt, synthetic construct
  misc_feature 1..19: note = siRNA sense sequence
  source 1..19: mol_type = other RNA
cagtggtggttaaatttac

SEQ ID NO: 24253 - RNA, 19 nt, synthetic construct
  misc_feature 1..19: note = siRNA antisense sequence
  source 1..19: mol_type = other RNA
gtaaatttaaccaccactg

SEQ ID NO: 24254 - RNA, 19 nt, synthetic construct
  misc_feature 1..19: note = siRNA sense sequence
  source 1..19: mol_type = other RNA
agtggtggttaaatttact

SEQ ID NO: 24255 - RNA, 19 nt, synthetic construct
  misc_feature 1..19: note = siRNA antisense sequence
  source 1..19: mol_type = other RNA
agtaaatttaaccaccact

SEQ ID NO: 24256 - RNA, 19 nt, synthetic construct
  misc_feature 1..19: note = siRNA sense sequence
  source 1..19: mol_type = other RNA
gtggtggttaaatttacta

SEQ ID NO: 24257 - RNA, 19 nt, synthetic construct
  misc_feature 1..19: note = siRNA antisense sequence
  source 1..19: mol_type = other RNA
tagtaaatttaaccaccac

SEQ ID NO: 24258 - RNA, 19 nt, synthetic construct
  misc_feature 1..19: note = siRNA sense sequence
  source 1..19: mol_type = other RNA
tttcaggattcccatagtg

SEQ ID NO: 24259 - RNA, 19 nt, synthetic construct
  misc_feature 1..19: note = siRNA antisense sequence
  source 1..19: mol_type = other RNA
cactatgggaatcctgaaa

SEQ ID NO: 24260 - RNA, 19 nt, synthetic construct
  misc_feature 1..19: note = siRNA sense sequence
  source 1..19: mol_type = other RNA
tcaggattcccatagtgca

SEQ ID NO: 24261 - RNA, 19 nt, synthetic construct
  misc_feature 1..19: note = siRNA antisense sequence
  source 1..19: mol_type = other RNA
tgcactatgggaatcctga

SEQ ID NO: 24262 - RNA, 19 nt, synthetic construct
  misc_feature 1..19: note = siRNA sense sequence
  source 1..19: mol_type = other RNA
cccatagtgcaggaattag

SEQ ID NO: 24263 - RNA, 19 nt, synthetic construct
  misc_feature 1..19: note = siRNA antisense sequence
  source 1..19: mol_type = other RNA
ctaattcctgcactatggg

SEQ ID NO: 24264 - RNA, 19 nt, synthetic construct
  misc_feature 1..19: note = siRNA sense sequence
  source 1..19: mol_type = other RNA
catagtgcaggaattagca

SEQ ID NO: 24265 - RNA, 19 nt, synthetic construct
  misc_feature 1..19: note = siRNA antisense sequence
  source 1..19: mol_type = other RNA
tgctaattcctgcactatg

SEQ ID NO: 24266 - RNA, 19 nt, synthetic construct
  misc_feature 1..19: note = siRNA sense sequence
  source 1..19: mol_type = other RNA
atagtgcaggaattagcaa

SEQ ID NO: 24267 - RNA, 19 nt, synthetic construct
  misc_feature 1..19: note = siRNA antisense sequence
  source 1..19: mol_type = other RNA
ttgctaattcctgcactat

SEQ ID NO: 24268 - RNA, 19 nt, synthetic construct
  misc_feature 1..19: note = siRNA sense sequence
  source 1..19: mol_type = other RNA
tagtgcaggaattagcaag

SEQ ID NO: 24269 - RNA, 19 nt, synthetic construct
  misc_feature 1..19: note = siRNA antisense sequence
  source 1..19: mol_type = other RNA
cttgctaattcctgcacta

SEQ ID NO: 24270 - RNA, 19 nt, synthetic construct
  misc_feature 1..19: note = siRNA sense sequence
  source 1..19: mol_type = other RNA
agtgcaggaattagcaagc

SEQ ID NO: 24271 - RNA, 19 nt, synthetic construct
  misc_feature 1..19: note = siRNA antisense sequence
  source 1..19: mol_type = other RNA
gcttgctaattcctgcact

SEQ ID NO: 24272 - RNA, 19 nt, synthetic construct
  misc_feature 1..19: note = siRNA sense sequence
  source 1..19: mol_type = other RNA
gtgcaggaattagcaagct

SEQ ID NO: 24273 - RNA, 19 nt, synthetic construct
  misc_feature 1..19: note = siRNA antisense sequence
  source 1..19: mol_type = other RNA
agcttgctaattcctgcac

SEQ ID NO: 24274 - RNA, 19 nt, synthetic construct
  misc_feature 1..19: note = siRNA sense sequence
  source 1..19: mol_type = other RNA
tgcaggaattagcaagcta

SEQ ID NO: 24275 - RNA, 19 nt, synthetic construct
  misc_feature 1..19: note = siRNA antisense sequence
  source 1..19: mol_type = other RNA
tagcttgctaattcctgca

SEQ ID NO: 24276 - RNA, 19 nt, synthetic construct
  misc_feature 1..19: note = siRNA sense sequence
  source 1..19: mol_type = other RNA
aggaattagcaagctatat

SEQ ID NO: 24277 - RNA, 19 nt, synthetic construct
  misc_feature 1..19: note = siRNA antisense sequence
  source 1..19: mol_type = other RNA
atatagcttgctaattcct

SEQ ID NO: 24278 - RNA, 19 nt, synthetic construct
  misc_feature 1..19: note = siRNA sense sequence
  source 1..19: mol_type = other RNA
ggaattagcaagctatatc

SEQ ID NO: 24279 - RNA, 19 nt, synthetic construct
  misc_feature 1..19: note = siRNA antisense sequence
  source 1..19: mol_type = other RNA
gatatagcttgctaattcc

SEQ ID NO: 24280 - RNA, 19 nt, synthetic construct
  misc_feature 1..19: note = siRNA sense sequence
  source 1..19: mol_type = other RNA
gaattagcaagctatatct

SEQ ID NO: 24281 - RNA, 19 nt, synthetic construct
  misc_feature 1..19: note = siRNA antisense sequence
  source 1..19: mol_type = other RNA
agatatagcttgctaattc

SEQ ID NO: 24282 - RNA, 19 nt, synthetic construct
  misc_feature 1..19: note = siRNA sense sequence
  source 1..19: mol_type = other RNA
aattagcaagctatatctc

SEQ ID NO: 24283 - RNA, 19 nt, synthetic construct
  misc_feature 1..19: note = siRNA antisense sequence
  source 1..19: mol_type = other RNA
gagatatagcttgctaatt

SEQ ID NO: 24284 - RNA, 19 nt, synthetic construct
  misc_feature 1..19: note = siRNA sense sequence
  source 1..19: mol_type = other RNA
attagcaagctatatctca

SEQ ID NO: 24285 - RNA, 19 nt, synthetic construct
  misc_feature 1..19: note = siRNA antisense sequence
  source 1..19: mol_type = other RNA
tgagatatagcttgctaat

SEQ ID NO: 24286 - RNA, 19 nt, synthetic construct
  misc_feature 1..19: note = siRNA sense sequence
  source 1..19: mol_type = other RNA
ttagcaagctatatctcat

SEQ ID NO: 24287 - RNA, 19 nt, synthetic construct
  misc_feature 1..19: note = siRNA antisense sequence
  source 1..19: mol_type = other RNA
atgagatatagcttgctaa

SEQ ID NO: 24288 - RNA, 19 nt, synthetic construct
  misc_feature 1..19: note = siRNA sense sequence
  source 1..19: mol_type = other RNA
tagcaagctatatctcatt

SEQ ID NO: 24289 - RNA, 19 nt, synthetic construct
  misc_feature 1..19: note = siRNA antisense sequence
  source 1..19: mol_type = other RNA
aatgagatatagcttgcta

SEQ ID NO: 24290 - RNA, 19 nt, synthetic construct
  misc_feature 1..19: note = siRNA sense sequence
  source 1..19: mol_type = other RNA
agcaagctatatctcattc

SEQ ID NO: 24291 - RNA, 19 nt, synthetic construct
  misc_feature 1..19: note = siRNA antisense sequence
  source 1..19: mol_type = other RNA
gaatgagatatagcttgct

SEQ ID NO: 24292 - RNA, 19 nt, synthetic construct
  misc_feature 1..19: note = siRNA sense sequence
  source 1..19: mol_type = other RNA
gcaagctatatctcattca

SEQ ID NO: 24293 - RNA, 19 nt, synthetic construct
  misc_feature 1..19: note = siRNA antisense sequence
  source 1..19: mol_type = other RNA
tgaatgagatatagcttgc

SEQ ID NO: 24294 - RNA, 19 nt, synthetic construct
  misc_feature 1..19: note = siRNA sense sequence
  source 1..19: mol_type = other RNA
aagctatatctcattcagg

SEQ ID NO: 24295 - RNA, 19 nt, synthetic construct
  misc_feature 1..19: note = siRNA antisense sequence
  source 1..19: mol_type = other RNA
cctgaatgagatatagctt

SEQ ID NO: 24296 - RNA, 19 nt, synthetic construct
  misc_feature 1..19: note = siRNA sense sequence
  source 1..19: mol_type = other RNA
agctatatctcattcaggc

SEQ ID NO: 24297 - RNA, 19 nt, synthetic construct
  misc_feature 1..19: note = siRNA antisense sequence
  source 1..19: mol_type = other RNA
gcctgaatgagatatagct

SEQ ID NO: 24298 - RNA, 19 nt, synthetic construct
  misc_feature 1..19: note = siRNA sense sequence
  source 1..19: mol_type = other RNA
gctatatctcattcaggcc

SEQ ID NO: 24299 - RNA, 19 nt, synthetic construct
  misc_feature 1..19: note = siRNA antisense sequence
  source 1..19: mol_type = other RNA
ggcctgaatgagatatagc

SEQ ID NO: 24300 - RNA, 19 nt, synthetic construct
  misc_feature 1..19: note = siRNA sense sequence
  source 1..19: mol_type = other RNA
ctatatctcattcaggcca

SEQ ID NO: 24301 - RNA, 19 nt, synthetic construct
  misc_feature 1..19: note = siRNA antisense sequence
  source 1..19: mol_type = other RNA
tggcctgaatgagatatag

SEQ ID NO: 24302 - RNA, 19 nt, synthetic construct
  misc_feature 1..19: note = siRNA sense sequence
  source 1..19: mol_type = other RNA
tatatctcattcaggccaa

SEQ ID NO: 24303 - RNA, 19 nt, synthetic construct
  misc_feature 1..19: note = siRNA antisense sequence
  source 1..19: mol_type = other RNA
ttggcctgaatgagatata

SEQ ID NO: 24304 - RNA, 19 nt, synthetic construct
  misc_feature 1..19: note = siRNA sense sequence
  source 1..19: mol_type = other RNA
atatctcattcaggccaat

SEQ ID NO: 24305 - RNA, 19 nt, synthetic construct
  misc_feature 1..19: note = siRNA antisense sequence
  source 1..19: mol_type = other RNA
attggcctgaatgagatat

SEQ ID NO: 24306 - RNA, 19 nt, synthetic construct
  misc_feature 1..19: note = siRNA sense sequence
  source 1..19: mol_type = other RNA
tatctcattcaggccaatc

SEQ ID NO: 24307 - RNA, 19 nt, synthetic construct
  misc_feature 1..19: note = siRNA antisense sequence
  source 1..19: mol_type = other RNA
gattggcctgaatgagata

SEQ ID NO: 24308 - RNA, 19 nt, synthetic construct
  misc_feature 1..19: note = siRNA sense sequence
  source 1..19: mol_type = other RNA
atctcattcaggccaatca

SEQ ID NO: 24309 - RNA, 19 nt, synthetic construct
  misc_feature 1..19: note = siRNA antisense sequence
  source 1..19: mol_type = other RNA
tgattggcctgaatgagat

SEQ ID NO: 24310 - RNA, 19 nt, synthetic construct
  misc_feature 1..19: note = siRNA sense sequence
  source 1..19: mol_type = other RNA
cattcaggccaatcagtta

SEQ ID NO: 24311 - RNA, 19 nt, synthetic construct
  misc_feature 1..19: note = siRNA antisense sequence
  source 1..19: mol_type = other RNA
taactgattggcctgaatg

SEQ ID NO: 24312 - RNA, 19 nt, synthetic construct
  misc_feature 1..19: note = siRNA sense sequence
  source 1..19: mol_type = other RNA
attcaggccaatcagttac

SEQ ID NO: 24313 - RNA, 19 nt, synthetic construct
  misc_feature 1..19: note = siRNA antisense sequence
  source 1..19: mol_type = other RNA
gtaactgattggcctgaat

SEQ ID NO: 24314 - RNA, 19 nt, synthetic construct
  misc_feature 1..19: note = siRNA sense sequence
  source 1..19: mol_type = other RNA
ttcaggccaatcagttact

SEQ ID NO: 24315 - RNA, 19 nt, synthetic construct
  misc_feature 1..19: note = siRNA antisense sequence
  source 1..19: mol_type = other RNA
agtaactgattggcctgaa

SEQ ID NO: 24316 - RNA, 19 nt, synthetic construct
  misc_feature 1..19: note = siRNA sense sequence
  source 1..19: mol_type = other RNA
ggccaatcagttactgcta

SEQ ID NO: 24317 - RNA, 19 nt, synthetic construct
  misc_feature 1..19: note = siRNA antisense sequence
  source 1..19: mol_type = other RNA
tagcagtaactgattggcc

SEQ ID NO: 24318 - RNA, 19 nt, synthetic construct
  misc_feature 1..19: note = siRNA sense sequence
  source 1..19: mol_type = other RNA
gccaatcagttactgctag

SEQ ID NO: 24319 - RNA, 19 nt, synthetic construct
  misc_feature 1..19: note = siRNA antisense sequence
  source 1..19: mol_type = other RNA
ctagcagtaactgattggc

SEQ ID NO: 24320 - RNA, 19 nt, synthetic construct
  misc_feature 1..19: note = siRNA sense sequence
  source 1..19: mol_type = other RNA
ccaatcagttactgctagc

SEQ ID NO: 24321 - RNA, 19 nt, synthetic construct
  misc_feature 1..19: note = siRNA antisense sequence
  source 1..19: mol_type = other RNA
gctagcagtaactgattgg

SEQ ID NO: 24322 - RNA, 19 nt, synthetic construct
  misc_feature 1..19: note = siRNA sense sequence
  source 1..19: mol_type = other RNA
caatcagttactgctagcg

SEQ ID NO: 24323 - RNA, 19 nt, synthetic construct
  misc_feature 1..19: note = siRNA antisense sequence
  source 1..19: mol_type = other RNA
cgctagcagtaactgattg

SEQ ID NO: 24324 - RNA, 19 nt, synthetic construct
  misc_feature 1..19: note = siRNA sense sequence
  source 1..19: mol_type = other RNA
aatcagttactgctagcgg

SEQ ID NO: 24325 - RNA, 19 nt, synthetic construct
  misc_feature 1..19: note = siRNA antisense sequence
  source 1..19: mol_type = other RNA
ccgctagcagtaactgatt

SEQ ID NO: 24326 - RNA, 19 nt, synthetic construct
  misc_feature 1..19: note = siRNA sense sequence
  source 1..19: mol_type = other RNA
atcagttactgctagcgga

SEQ ID NO: 24327 - RNA, 19 nt, synthetic construct
  misc_feature 1..19: note = siRNA antisense sequence
  source 1..19: mol_type = other RNA
tccgctagcagtaactgat

SEQ ID NO: 24328 - RNA, 19 nt, synthetic construct
  misc_feature 1..19: note = siRNA sense sequence
  source 1..19: mol_type = other RNA
tcagttactgctagcggac

SEQ ID NO: 24329 - RNA, 19 nt, synthetic construct
  misc_feature 1..19: note = siRNA antisense sequence
  source 1..19: mol_type = other RNA
gtccgctagcagtaactga

SEQ ID NO: 24330 - RNA, 19 nt, synthetic construct
  misc_feature 1..19: note = siRNA sense sequence
  source 1..19: mol_type = other RNA
cagttactgctagcggacc

SEQ ID NO: 24331 - RNA, 19 nt, synthetic construct
  misc_feature 1..19: note = siRNA antisense sequence
  source 1..19: mol_type = other RNA
ggtccgctagcagtaactg

SEQ ID NO: 24332 - RNA, 19 nt, synthetic construct
  misc_feature 1..19: note = siRNA sense sequence
  source 1..19: mol_type = other RNA
agttactgctagcggaccc

SEQ ID NO: 24333 - RNA, 19 nt, synthetic construct
  misc_feature 1..19: note = siRNA antisense sequence
  source 1..19: mol_type = other RNA
gggtccgctagcagtaact

SEQ ID NO: 24334 - RNA, 19 nt, synthetic construct
  misc_feature 1..19: note = siRNA sense sequence
  source 1..19: mol_type = other RNA
atagtatctctgatttgtc

SEQ ID NO: 24335 - RNA, 19 nt, synthetic construct
  misc_feature 1..19: note = siRNA antisense sequence
  source 1..19: mol_type = other RNA
gacaaatcagagatactat

SEQ ID NO: 24336 - RNA, 19 nt, synthetic construct
  misc_feature 1..19: note = siRNA sense sequence
  source 1..19: mol_type = other RNA
tagtatctctgatttgtct

SEQ ID NO: 24337 - RNA, 19 nt, synthetic construct
  misc_feature 1..19: note = siRNA antisense sequence
  source 1..19: mol_type = other RNA
agacaaatcagagatacta

SEQ ID NO: 24338 - RNA, 19 nt, synthetic construct
  misc_feature 1..19: note = siRNA sense sequence
  source 1..19: mol_type = other RNA
gtatctctgatttgtctca

SEQ ID NO: 24339 - RNA, 19 nt, synthetic construct
  misc_feature 1..19: note = siRNA antisense sequence
  source 1..19: mol_type = other RNA
tgagacaaatcagagatac

SEQ ID NO: 24340 - RNA, 19 nt, synthetic construct
  misc_feature 1..19: note = siRNA sense sequence
  source 1..19: mol_type = other RNA
tatctctgatttgtctcac

SEQ ID NO: 24341 - RNA, 19 nt, synthetic construct
  misc_feature 1..19: note = siRNA antisense sequence
  source 1..19: mol_type = other RNA
gtgagacaaatcagagata

SEQ ID NO: 24342 - RNA, 19 nt, synthetic construct
  misc_feature 1..19: note = siRNA sense sequence
  source 1..19: mol_type = other RNA
atctctgatttgtctcacc

SEQ ID NO: 24343 - RNA, 19 nt, synthetic construct
  misc_feature 1..19: note = siRNA antisense sequence
  source 1..19: mol_type = other RNA
ggtgagacaaatcagagat

SEQ ID NO: 24344 - RNA, 19 nt, synthetic construct
  misc_feature 1..19: note = siRNA sense sequence
  source 1..19: mol_type = other RNA
ctctgatttgtctcaccag

SEQ ID NO: 24345 - RNA, 19 nt, synthetic construct
  misc_feature 1..19: note = siRNA antisense sequence
  source 1..19: mol_type = other RNA
ctggtgagacaaatcagag

SEQ ID NO: 24346 - RNA, 19 nt, synthetic construct
  misc_feature 1..19: note = siRNA sense sequence
  source 1..19: mol_type = other RNA
cccttttattccgtgagga

SEQ ID NO: 24347 - RNA, 19 nt, synthetic construct
  misc_feature 1..19: note = siRNA antisense sequence
  source 1..19: mol_type = other RNA
tcctcacggaataaaaggg

SEQ ID NO: 24348 - RNA, 19 nt, synthetic construct
  misc_feature 1..19: note = siRNA sense sequence
  source 1..19: mol_type = other RNA
caattttgctggtatatca

SEQ ID NO: 24349 - RNA, 19 nt, synthetic construct
  misc_feature 1..19: note = siRNA antisense sequence
  source 1..19: mol_type = other RNA
tgatataccagcaaaattg

SEQ ID NO: 24350 - RNA, 19 nt, synthetic construct
  misc_feature 1..19: note = siRNA sense sequence
  source 1..19: mol_type = other RNA
attttgctggtatatcatg

SEQ ID NO: 24351 - RNA, 19 nt, synthetic construct
  misc_feature 1..19: note = siRNA antisense sequence
  source 1..19: mol_type = other RNA
catgatataccagcaaaat

SEQ ID NO: 24352 - RNA, 19 nt, synthetic construct
  misc_feature 1..19: note = siRNA sense sequence
  source 1..19: mol_type = other RNA
ttttgctggtatatcatgt

SEQ ID NO: 24353 - RNA, 19 nt, synthetic construct
  misc_feature 1..19: note = siRNA antisense sequence
  source 1..19: mol_type = other RNA
acatgatataccagcaaaa

SEQ ID NO: 24354 - RNA, 19 nt, synthetic construct
  misc_feature 1..19: note = siRNA sense sequence
  source 1..19: mol_type = other RNA
tttgctggtatatcatgtt

SEQ ID NO: 24355 - RNA, 19 nt, synthetic construct
  misc_feature 1..19: note = siRNA antisense sequence
  source 1..19: mol_type = other RNA
aacatgatataccagcaaa

SEQ ID NO: 24356 - RNA, 19 nt, synthetic construct
  misc_feature 1..19: note = siRNA sense sequence
  source 1..19: mol_type = other RNA
ttgctggtatatcatgttt

SEQ ID NO: 24357 - RNA, 19 nt, synthetic construct
  misc_feature 1..19: note = siRNA antisense sequence
  source 1..19: mol_type = other RNA
aaacatgatataccagcaa

SEQ ID NO: 24358 - RNA, 19 nt, synthetic construct
  misc_feature 1..19: note = siRNA sense sequence
  source 1..19: mol_type = other RNA
tgctggtatatcatgttta

SEQ ID NO: 24359 - RNA, 19 nt, synthetic construct
  misc_feature 1..19: note = siRNA antisense sequence
  source 1..19: mol_type = other RNA
taaacatgatataccagca

SEQ ID NO: 24360 - RNA, 19 nt, synthetic construct
  misc_feature 1..19: note = siRNA sense sequence
  source 1..19: mol_type = other RNA
gctggtatatcatgtttaa

SEQ ID NO: 24361 - RNA, 19 nt, synthetic construct
  misc_feature 1..19: note = siRNA antisense sequence
  source 1..19: mol_type = other RNA
ttaaacatgatataccagc

SEQ ID NO: 24362 - RNA, 19 nt, synthetic construct
  misc_feature 1..19: note = siRNA sense sequence
  source 1..19: mol_type = other RNA
ctggtatatcatgtttaag

SEQ ID NO: 24363 - RNA, 19 nt, synthetic construct
  misc_feature 1..19: note = siRNA antisense sequence
  source 1..19: mol_type = other RNA
cttaaacatgatataccag

SEQ ID NO: 24364 - RNA, 19 nt, synthetic construct
  misc_feature 1..19: note = siRNA sense sequence
  source 1..19: mol_type = other RNA
aagtaaatgaattctccag

SEQ ID NO: 24365 - RNA, 19 nt, synthetic construct
  misc_feature 1..19: note = siRNA antisense sequence
  source 1..19: mol_type = other RNA
ctggagaattcatttactt

SEQ ID NO: 24366 - RNA, 19 nt, synthetic construct
  misc_feature 1..19: note = siRNA sense sequence
  source 1..19: mol_type = other RNA
agtaaatgaattctccagc

SEQ ID NO: 24367 - RNA, 19 nt, synthetic construct
  misc_feature 1..19: note = siRNA antisense sequence
  source 1..19: mol_type = other RNA
gctggagaattcatttact

SEQ ID NO: 24368 - RNA, 19 nt, synthetic construct
  misc_feature 1..19: note = siRNA sense sequence
  source 1..19: mol_type = other RNA
aattctccagcagtgaagc

SEQ ID NO: 24369 - RNA, 19 nt, synthetic construct
  misc_feature 1..19: note = siRNA antisense sequence
  source 1..19: mol_type = other RNA
gcttcactgctggagaatt

SEQ ID NO: 24370 - RNA, 19 nt, synthetic construct
  misc_feature 1..19: note = siRNA sense sequence
  source 1..19: mol_type = other RNA
caactaaagtgaagagctg

SEQ ID NO: 24371 - RNA, 19 nt, synthetic construct
  misc_feature 1..19: note = siRNA antisense sequence
  source 1..19: mol_type = other RNA
cagctcttcactttagttg

SEQ ID NO: 24372 - RNA, 19 nt, synthetic construct
  misc_feature 1..19: note = siRNA sense sequence
  source 1..19: mol_type = other RNA
aactaaagtgaagagctga

SEQ ID NO: 24373 - RNA, 19 nt, synthetic construct
  misc_feature 1..19: note = siRNA antisense sequence
  source 1..19: mol_type = other RNA
tcagctcttcactttagtt

SEQ ID NO: 24374 - RNA, 19 nt, synthetic construct
  misc_feature 1..19: note = siRNA sense sequence
  source 1..19: mol_type = other RNA
actaaagtgaagagctgaa

SEQ ID NO: 24375 - RNA, 19 nt, synthetic construct
  misc_feature 1..19: note = siRNA antisense sequence
  source 1..19: mol_type = other RNA
ttcagctcttcactttagt

SEQ ID NO: 24376 - RNA, 19 nt, synthetic construct
  misc_feature 1..19: note = siRNA sense sequence
  source 1..19: mol_type = other RNA
ctaaagtgaagagctgaag

SEQ ID NO: 24377 - RNA, 19 nt, synthetic construct
  misc_feature 1..19: note = siRNA antisense sequence
  source 1..19: mol_type = other RNA
cttcagctcttcactttag

SEQ ID NO: 24378 - RNA, 19 nt, synthetic construct
  misc_feature 1..19: note = siRNA sense sequence
  source 1..19: mol_type = other RNA
taaagtgaagagctgaaga

SEQ ID NO: 24379 - RNA, 19 nt, synthetic construct
  misc_feature 1..19: note = siRNA antisense sequence
  source 1..19: mol_type = other RNA
tcttcagctcttcacttta

SEQ ID NO: 24380 - RNA, 19 nt, synthetic construct
  misc_feature 1..19: note = siRNA sense sequence
  source 1..19: mol_type = other RNA
aaagtgaagagctgaagag

SEQ ID NO: 24381 - RNA, 19 nt, synthetic construct
  misc_feature 1..19: note = siRNA antisense sequence
  source 1..19: mol_type = other RNA
ctcttcagctcttcacttt

SEQ ID NO: 24382 - RNA, 19 nt, synthetic construct
  misc_feature 1..19: note = siRNA sense sequence
  source 1..19: mol_type = other RNA
aagtgaagagctgaagagc

SEQ ID NO: 24383 - RNA, 19 nt, synthetic construct
  misc_feature 1..19: note = siRNA antisense sequence
  source 1..19: mol_type = other RNA
gctcttcagctcttcactt

SEQ ID NO: 24384 - RNA, 19 nt, synthetic construct
  misc_feature 1..19: note = siRNA sense sequence
  source 1..19: mol_type = other RNA
agtgaagagctgaagagca

SEQ ID NO: 24385 - RNA, 19 nt, synthetic construct
  misc_feature 1..19: note = siRNA antisense sequence
  source 1..19: mol_type = other RNA
tgctcttcagctcttcact

SEQ ID NO: 24386 - RNA, 19 nt, synthetic construct
  misc_feature 1..19: note = siRNA sense sequence
  source 1..19: mol_type = other RNA
gtgaagagctgaagagcaa

SEQ ID NO: 24387 - RNA, 19 nt, synthetic construct
  misc_feature 1..19: note = siRNA antisense sequence
  source 1..19: mol_type = other RNA
ttgctcttcagctcttcac

SEQ ID NO: 24388 - RNA, 19 nt, synthetic construct
  misc_feature 1..19: note = siRNA sense sequence
  source 1..19: mol_type = other RNA
taaagttggtaaaatgctc

SEQ ID NO: 24389 - RNA, 19 nt, synthetic construct
  misc_feature 1..19: note = siRNA antisense sequence
  source 1..19: mol_type = other RNA
gagcattttaccaacttta

SEQ ID NO: 24390 - RNA, 19 nt, synthetic construct
  misc_feature 1..19: note = siRNA sense sequence
  source 1..19: mol_type = other RNA
aagttggtaaaatgctcag

SEQ ID NO: 24391 - RNA, 19 nt, synthetic construct
  misc_feature 1..19: note = siRNA antisense sequence
  source 1..19: mol_type = other RNA
ctgagcattttaccaactt

SEQ ID NO: 24392 - RNA, 19 nt, synthetic construct
  misc_feature 1..19: note = siRNA sense sequence
  source 1..19: mol_type = other RNA
agttggtaaaatgctcagt

SEQ ID NO: 24393 - RNA, 19 nt, synthetic construct
  misc_feature 1..19: note = siRNA antisense sequence
  source 1..19: mol_type = other RNA
actgagcattttaccaact

SEQ ID NO: 24394 - RNA, 19 nt, synthetic construct
  misc_feature 1..19: note = siRNA sense sequence
  source 1..19: mol_type = other RNA
gttggtaaaatgctcagta

SEQ ID NO: 24395 - RNA, 19 nt, synthetic construct
  misc_feature 1..19: note = siRNA antisense sequence
  source 1..19: mol_type = other RNA
tactgagcattttaccaac

SEQ ID NO: 24396 - RNA, 19 nt, synthetic construct
  misc_feature 1..19: note = siRNA sense sequence
  source 1..19: mol_type = other RNA
ttggtaaaatgctcagtaa

SEQ ID NO: 24397 - RNA, 19 nt, synthetic construct
  misc_feature 1..19: note = siRNA antisense sequence
  source 1..19: mol_type = other RNA
ttactgagcattttaccaa

SEQ ID NO: 24398 - RNA, 19 nt, synthetic construct
  misc_feature 1..19: note = siRNA sense sequence
  source 1..19: mol_type = other RNA
aattttcttccaatggatg

SEQ ID NO: 24399 - RNA, 19 nt, synthetic construct
  misc_feature 1..19: note = siRNA antisense sequence
  source 1..19: mol_type = other RNA
catccattggaagaaaatt

SEQ ID NO: 24400 - RNA, 19 nt, synthetic construct
  misc_feature 1..19: note = siRNA sense sequence
  source 1..19: mol_type = other RNA
attttcttccaatggatgt

SEQ ID NO: 24401 - RNA, 19 nt, synthetic construct
  misc_feature 1..19: note = siRNA antisense sequence
  source 1..19: mol_type = other RNA
acatccattggaagaaaat

SEQ ID NO: 24402 - RNA, 19 nt, synthetic construct
  misc_feature 1..19: note = siRNA sense sequence
  source 1..19: mol_type = other RNA
ttttcttccaatggatgtc

SEQ ID NO: 24403 - RNA, 19 nt, synthetic construct
  misc_feature 1..19: note = siRNA antisense sequence
  source 1..19: mol_type = other RNA
gacatccattggaagaaaa

SEQ ID NO: 24404 - RNA, 19 nt, synthetic construct
  misc_feature 1..19: note = siRNA sense sequence
  source 1..19: mol_type = other RNA
tttcttccaatggatgtca

SEQ ID NO: 24405 - RNA, 19 nt, synthetic construct
  misc_feature 1..19: note = siRNA antisense sequence
  source 1..19: mol_type = other RNA
tgacatccattggaagaaa

SEQ ID NO: 24406 - RNA, 19 nt, synthetic construct
  misc_feature 1..19: note = siRNA sense sequence
  source 1..19: mol_type = other RNA
ttcttccaatggatgtcag

SEQ ID NO: 24407 - RNA, 19 nt, synthetic construct
  misc_feature 1..19: note = siRNA antisense sequence
  source 1..19: mol_type = other RNA
ctgacatccattggaagaa

SEQ ID NO: 24408 - RNA, 19 nt, synthetic construct
  misc_feature 1..19: note = siRNA sense sequence
  source 1..19: mol_type = other RNA
tcttccaatggatgtcagc

SEQ ID NO: 24409 - RNA, 19 nt, synthetic construct
  misc_feature 1..19: note = siRNA antisense sequence
  source 1..19: mol_type = other RNA
gctgacatccattggaaga

SEQ ID NO: 24410 - RNA, 19 nt, synthetic construct
  misc_feature 1..19: note = siRNA sense sequence
  source 1..19: mol_type = other RNA
ccaatggatgtcagcatat

SEQ ID NO: 24411 - RNA, 19 nt, synthetic construct
  misc_feature 1..19: note = siRNA antisense sequence
  source 1..19: mol_type = other RNA
atatgctgacatccattgg

SEQ ID NO: 24412 - RNA, 19 nt, synthetic construct
  misc_feature 1..19: note = siRNA sense sequence
  source 1..19: mol_type = other RNA
caatggatgtcagcatatt

SEQ ID NO: 24413 - RNA, 19 nt, synthetic construct
  misc_feature 1..19: note = siRNA antisense sequence
  source 1..19: mol_type = other RNA
aatatgctgacatccattg

SEQ ID NO: 24414 - RNA, 19 nt, synthetic construct
  misc_feature 1..19: note = siRNA sense sequence
  source 1..19: mol_type = other RNA
aatggatgtcagcatattt

SEQ ID NO: 24415 - RNA, 19 nt, synthetic construct
  misc_feature 1..19: note = siRNA antisense sequence
  source 1..19: mol_type = other RNA
aaatatgctgacatccatt

SEQ ID NO: 24416 - RNA, 19 nt, synthetic construct
  misc_feature 1..19: note = siRNA sense sequence
  source 1..19: mol_type = other RNA
tggatgtcagcatatttaa

SEQ ID NO: 24417 - RNA, 19 nt, synthetic construct
  misc_feature 1..19: note = siRNA antisense sequence
  source 1..19: mol_type = other RNA
ttaaatatgctgacatcca

SEQ ID NO: 24418 - RNA, 19 nt, synthetic construct
  misc_feature 1..19: note = siRNA sense sequence
  source 1..19: mol_type = other RNA
ctttgtggtgtgattcagt

SEQ ID NO: 24419 - RNA, 19 nt, synthetic construct
  misc_feature 1..19: note = siRNA antisense sequence
  source 1..19: mol_type = other RNA
actgaatcacaccacaaag

SEQ ID NO: 24420 - RNA, 19 nt, synthetic construct
  misc_feature 1..19: note = siRNA sense sequence
  source 1..19: mol_type = other RNA
tttgtggtgtgattcagtt

SEQ ID NO: 24421 - RNA, 19 nt, synthetic construct
  misc_feature 1..19: note = siRNA antisense sequence
  source 1..19: mol_type = other RNA
aactgaatcacaccacaaa

SEQ ID NO: 24422 - RNA, 19 nt, synthetic construct
  misc_feature 1..19: note = siRNA sense sequence
  source 1..19: mol_type = other RNA
ttgtggtgtgattcagttt

SEQ ID NO: 24423 - RNA, 19 nt, synthetic construct
  misc_feature 1..19: note = siRNA antisense sequence
  source 1..19: mol_type = other RNA
aaactgaatcacaccacaa

SEQ ID NO: 24424 - RNA, 19 nt, synthetic construct
  misc_feature 1..19: note = siRNA sense sequence
  source 1..19: mol_type = other RNA
tgtggtgtgattcagttta

SEQ ID NO: 24425 - RNA, 19 nt, synthetic construct
  misc_feature 1..19: note = siRNA antisense sequence
  source 1..19: mol_type = other RNA
taaactgaatcacaccaca

SEQ ID NO: 24426 - RNA, 19 nt, synthetic construct
  misc_feature 1..19: note = siRNA sense sequence
  source 1..19: mol_type = other RNA
gtggtgtgattcagtttat

SEQ ID NO: 24427 - RNA, 19 nt, synthetic construct
  misc_feature 1..19: note = siRNA antisense sequence
  source 1..19: mol_type = other RNA
ataaactgaatcacaccac

SEQ ID NO: 24428 - RNA, 19 nt, synthetic construct
  misc_feature 1..19: note = siRNA sense sequence
  source 1..19: mol_type = other RNA
aaaagtgctcttcaagatt

SEQ ID NO: 24429 - RNA, 19 nt, synthetic construct
  misc_feature 1..19: note = siRNA antisense sequence
  source 1..19: mol_type = other RNA
aatcttgaagagcactttt

SEQ ID NO: 24430 - RNA, 19 nt, synthetic construct
  misc_feature 1..19: note = siRNA sense sequence
  source 1..19: mol_type = other RNA
aaagtgctcttcaagattt

SEQ ID NO: 24431 - RNA, 19 nt, synthetic construct
  misc_feature 1..19: note = siRNA antisense sequence
  source 1..19: mol_type = other RNA
aaatcttgaagagcacttt

SEQ ID NO: 24432 - RNA, 19 nt, synthetic construct
  misc_feature 1..19: note = siRNA sense sequence
  source 1..19: mol_type = other RNA
aagtgctcttcaagatttt

SEQ ID NO: 24433 - RNA, 19 nt, synthetic construct
  misc_feature 1..19: note = siRNA antisense sequence
  source 1..19: mol_type = other RNA
aaaatcttgaagagcactt

SEQ ID NO: 24434 - RNA, 19 nt, synthetic construct
  misc_feature 1..19: note = siRNA sense sequence
  source 1..19: mol_type = other RNA
agtgctcttcaagattttc

SEQ ID NO: 24435 - RNA, 19 nt, synthetic construct
  misc_feature 1..19: note = siRNA antisense sequence
  source 1..19: mol_type = other RNA
gaaaatcttgaagagcact

SEQ ID NO: 24436 - RNA, 19 nt, synthetic construct
  misc_feature 1..19: note = siRNA sense sequence
  source 1..19: mol_type = other RNA
gtgctcttcaagattttcc

SEQ ID NO: 24437 - RNA, 19 nt, synthetic construct
  misc_feature 1..19: note = siRNA antisense sequence
  source 1..19: mol_type = other RNA
ggaaaatcttgaagagcac

SEQ ID NO: 24438 - RNA, 19 nt, synthetic construct
  misc_feature 1..19: note = siRNA sense sequence
  source 1..19: mol_type = other RNA
cttcaagattttcctaatg

SEQ ID NO: 24439 - RNA, 19 nt, synthetic construct
  misc_feature 1..19: note = siRNA antisense sequence
  source 1..19: mol_type = other RNA
cattaggaaaatcttgaag

SEQ ID NO: 24440 - RNA, 19 nt, synthetic construct
  misc_feature 1..19: note = siRNA sense sequence
  source 1..19: mol_type = other RNA
gtatctctcatgaattgaa

SEQ ID NO: 24441 - RNA, 19 nt, synthetic construct
  misc_feature 1..19: note = siRNA antisense sequence
  source 1..19: mol_type = other RNA
ttcaattcatgagagatac

SEQ ID NO: 24442 - RNA, 19 nt, synthetic construct
  misc_feature 1..19: note = siRNA sense sequence
  source 1..19: mol_type = other RNA
tctctcatgaattgaattg

SEQ ID NO: 24443 - RNA, 19 nt, synthetic construct
  misc_feature 1..19: note = siRNA antisense sequence
  source 1..19: mol_type = other RNA
caattcaattcatgagaga

SEQ ID NO: 24444 - RNA, 19 nt, synthetic construct
  misc_feature 1..19: note = siRNA sense sequence
  source 1..19: mol_type = other RNA
ctctcatgaattgaattga

SEQ ID NO: 24445 - RNA, 19 nt, synthetic construct
  misc_feature 1..19: note = siRNA antisense sequence
  source 1..19: mol_type = other RNA
tcaattcaattcatgagag

SEQ ID NO: 24446 - RNA, 19 nt, synthetic construct
  misc_feature 1..19: note = siRNA sense sequence
  source 1..19: mol_type = other RNA
gatttataaaggatctagg

SEQ ID NO: 24447 - RNA, 19 nt, synthetic construct
  misc_feature 1..19: note = siRNA antisense sequence
  source 1..19: mol_type = other RNA
cctagatcctttataaatc

SEQ ID NO: 24448 - RNA, 19 nt, synthetic construct
  misc_feature 1..19: note = siRNA sense sequence
  source 1..19: mol_type = other RNA
ttataaaggatctaggatg

SEQ ID NO: 24449 - RNA, 19 nt, synthetic construct
  misc_feature 1..19: note = siRNA antisense sequence
  source 1..19: mol_type = other RNA
catcctagatcctttataa

SEQ ID NO: 24450 - RNA, 19 nt, synthetic construct
  misc_feature 1..19: note = siRNA sense sequence
  source 1..19: mol_type = other RNA
ggatctaggatgcaattat

SEQ ID NO: 24451 - RNA, 19 nt, synthetic construct
  misc_feature 1..19: note = siRNA antisense sequence
  source 1..19: mol_type = other RNA
ataattgcatcctagatcc

SEQ ID NO: 24452 - RNA, 19 nt, synthetic construct
  misc_feature 1..19: note = siRNA sense sequence
  source 1..19: mol_type = other RNA
tttgtgaatcaattatgcc

SEQ ID NO: 24453 - RNA, 19 nt, synthetic construct
  misc_feature 1..19: note = siRNA antisense sequence
  source 1..19: mol_type = other RNA
ggcataattgattcacaaa

SEQ ID NO: 24454 - RNA, 19 nt, synthetic construct
  misc_feature 1..19: note = siRNA sense sequence
  source 1..19: mol_type = other RNA
ttgtgaatcaattatgcct

SEQ ID NO: 24455 - RNA, 19 nt, synthetic construct
  misc_feature 1..19: note = siRNA antisense sequence
  source 1..19: mol_type = other RNA
aggcataattgattcacaa

SEQ ID NO: 24456 - RNA, 19 nt, synthetic construct
  misc_feature 1..19: note = siRNA sense sequence
  source 1..19: mol_type = other RNA
aaaatgcagctaatgaagc

SEQ ID NO: 24457 - RNA, 19 nt, synthetic construct
  misc_feature 1..19: note = siRNA antisense sequence
  source 1..19: mol_type = other RNA
gcttcattagctgcatttt

SEQ ID NO: 24458 - RNA, 19 nt, synthetic construct
  misc_feature 1..19: note = siRNA sense sequence
  source 1..19: mol_type = other RNA
aacctgtattagtagtctt

SEQ ID NO: 24459 - RNA, 19 nt, synthetic construct
  misc_feature 1..19: note = siRNA antisense sequence
  source 1..19: mol_type = other RNA
aagactactaatacaggtt

SEQ ID NO: 24460 - RNA, 19 nt, synthetic construct
  misc_feature 1..19: note = siRNA sense sequence
  source 1..19: mol_type = other RNA
acctgtattagtagtcttg

SEQ ID NO: 24461 - RNA, 19 nt, synthetic construct
  misc_feature 1..19: note = siRNA antisense sequence
  source 1..19: mol_type = other RNA
caagactactaatacaggt

SEQ ID NO: 24462 - RNA, 19 nt, synthetic construct
  misc_feature 1..19: note = siRNA sense sequence
  source 1..19: mol_type = other RNA
cctgtattagtagtcttgg

SEQ ID NO: 24463 - RNA, 19 nt, synthetic construct
  misc_feature 1..19: note = siRNA antisense sequence
  source 1..19: mol_type = other RNA
ccaagactactaatacagg

SEQ ID NO: 24464 - RNA, 19 nt, synthetic construct
  misc_feature 1..19: note = siRNA sense sequence
  source 1..19: mol_type = other RNA
ctgtattagtagtcttgga

SEQ ID NO: 24465 - RNA, 19 nt, synthetic construct
  misc_feature 1..19: note = siRNA antisense sequence
  source 1..19: mol_type = other RNA
tccaagactactaatacag

SEQ ID NO: 24466 - RNA, 19 nt, synthetic construct
  misc_feature 1..19: note = siRNA sense sequence
  source 1..19: mol_type = other RNA
tgtattagtagtcttggat

SEQ ID NO: 24467 - RNA, 19 nt, synthetic construct
  misc_feature 1..19: note = siRNA antisense sequence
  source 1..19: mol_type = other RNA
atccaagactactaataca

SEQ ID NO: 24468 - RNA, 19 nt, synthetic construct
  misc_feature 1..19: note = siRNA sense sequence
  source 1..19: mol_type = other RNA
gtattagtagtcttggatt

SEQ ID NO: 24469 - RNA, 19 nt, synthetic construct
  misc_feature 1..19: note = siRNA antisense sequence
  source 1..19: mol_type = other RNA
aatccaagactactaatac

SEQ ID NO: 24470 - RNA, 19 nt, synthetic construct
  misc_feature 1..19: note = siRNA sense sequence
  source 1..19: mol_type = other RNA
tagtagtcttggatttaac

SEQ ID NO: 24471 - RNA, 19 nt, synthetic construct
  misc_feature 1..19: note = siRNA antisense sequence
  source 1..19: mol_type = other RNA
gttaaatccaagactacta

SEQ ID NO: 24472 - RNA, 19 nt, synthetic construct
  misc_feature 1..19: note = siRNA sense sequence
  source 1..19: mol_type = other RNA
tatggtcatcaagtagtaa

SEQ ID NO: 24473 - RNA, 19 nt, synthetic construct
  misc_feature 1..19: note = siRNA antisense sequence
  source 1..19: mol_type = other RNA
ttactacttgatgaccata

SEQ ID NO: 24474 - RNA, 19 nt, synthetic construct
  misc_feature 1..19: note = siRNA sense sequence
  source 1..19: mol_type = other RNA
atggtcatcaagtagtaaa

SEQ ID NO: 24475 - RNA, 19 nt, synthetic construct
  misc_feature 1..19: note = siRNA antisense sequence
  source 1..19: mol_type = other RNA
tttactacttgatgaccat

SEQ ID NO: 24476 - RNA, 19 nt, synthetic construct
  misc_feature 1..19: note = siRNA sense sequence
  source 1..19: mol_type = other RNA
aaattgaccaagttcagta

SEQ ID NO: 24477 - RNA, 19 nt, synthetic construct
  misc_feature 1..19: note = siRNA antisense sequence
  source 1..19: mol_type = other RNA
tactgaacttggtcaattt

SEQ ID NO: 24478 - RNA, 19 nt, synthetic construct
  misc_feature 1..19: note = siRNA sense sequence
  source 1..19: mol_type = other RNA
aattgaccaagttcagtaa

SEQ ID NO: 24479 - RNA, 19 nt, synthetic construct
  misc_feature 1..19: note = siRNA antisense sequence
  source 1..19: mol_type = other RNA
ttactgaacttggtcaatt

SEQ ID NO: 24480 - RNA, 19 nt, synthetic construct
  misc_feature 1..19: note = siRNA sense sequence
  source 1..19: mol_type = other RNA
attgaccaagttcagtaaa

SEQ ID NO: 24481 - RNA, 19 nt, synthetic construct
  misc_feature 1..19: note = siRNA antisense sequence
  source 1..19: mol_type = other RNA
tttactgaacttggtcaat

SEQ ID NO: 24482 - RNA, 19 nt, synthetic construct
  misc_feature 1..19: note = siRNA sense sequence
  source 1..19: mol_type = other RNA
ttgaccaagttcagtaaag

SEQ ID NO: 24483 - RNA, 19 nt, synthetic construct
  misc_feature 1..19: note = siRNA antisense sequence
  source 1..19: mol_type = other RNA
ctttactgaacttggtcaa

SEQ ID NO: 24484 - RNA, 19 nt, synthetic construct
  misc_feature 1..19: note = siRNA sense sequence
  source 1..19: mol_type = other RNA
tgaccaagttcagtaaaga

SEQ ID NO: 24485 - RNA, 19 nt, synthetic construct
  misc_feature 1..19: note = siRNA antisense sequence
  source 1..19: mol_type = other RNA
tctttactgaacttggtca

SEQ ID NO: 24486 - RNA, 19 nt, synthetic construct
  misc_feature 1..19: note = siRNA sense sequence
  source 1..19: mol_type = other RNA
taccttcttcagtggcgat

SEQ ID NO: 24487 - RNA, 19 nt, synthetic construct
  misc_feature 1..19: note = siRNA antisense sequence
  source 1..19: mol_type = other RNA
atcgccactgaagaaggta

SEQ ID NO: 24488 - RNA, 19 nt, synthetic construct
  misc_feature 1..19: note = siRNA sense sequence
  source 1..19: mol_type = other RNA
accttcttcagtggcgatg

SEQ ID NO: 24489 - RNA, 19 nt, synthetic construct
  misc_feature 1..19: note = siRNA antisense sequence
  source 1..19: mol_type = other RNA
catcgccactgaagaaggt

SEQ ID NO: 24490 - RNA, 19 nt, synthetic construct
  misc_feature 1..19: note = siRNA sense sequence
  source 1..19: mol_type = other RNA
ccttcttcagtggcgatga

SEQ ID NO: 24491 - RNA, 19 nt, synthetic construct
  misc_feature 1..19: note = siRNA antisense sequence
  source 1..19: mol_type = other RNA
tcatcgccactgaagaagg

SEQ ID NO: 24492 - RNA, 19 nt, synthetic construct
  misc_feature 1..19: note = siRNA sense sequence
  source 1..19: mol_type = other RNA
cttcttcagtggcgatgat

SEQ ID NO: 24493 - RNA, 19 nt, synthetic construct
  misc_feature 1..19: note = siRNA antisense sequence
  source 1..19: mol_type = other RNA
atcatcgccactgaagaag

SEQ ID NO: 24494 - RNA, 19 nt, synthetic construct
  misc_feature 1..19: note = siRNA sense sequence
  source 1..19: mol_type = other RNA
ttcttcagtggcgatgata

SEQ ID NO: 24495 - RNA, 19 nt, synthetic construct
  misc_feature 1..19: note = siRNA antisense sequence
  source 1..19: mol_type = other RNA
tatcatcgccactgaagaa

SEQ ID NO: 24496 - RNA, 19 nt, synthetic construct
  misc_feature 1..19: note = siRNA sense sequence
  source 1..19: mol_type = other RNA
tcttcagtggcgatgataa

SEQ ID NO: 24497 - RNA, 19 nt, synthetic construct
  misc_feature 1..19: note = siRNA antisense sequence
  source 1..19: mol_type = other RNA
ttatcatcgccactgaaga

SEQ ID NO: 24498 - RNA, 19 nt, synthetic construct
  misc_feature 1..19: note = siRNA sense sequence
  source 1..19: mol_type = other RNA
cttcagtggcgatgataaa

SEQ ID NO: 24499 - RNA, 19 nt, synthetic construct
  misc_feature 1..19: note = siRNA antisense sequence
  source 1..19: mol_type = other RNA
tttatcatcgccactgaag

SEQ ID NO: 24500 - RNA, 19 nt, synthetic construct
  misc_feature 1..19: note = siRNA sense sequence
  source 1..19: mol_type = other RNA
ttcagtggcgatgataaag

SEQ ID NO: 24501 - RNA, 19 nt, synthetic construct
  misc_feature 1..19: note = siRNA antisense sequence
  source 1..19: mol_type = other RNA
ctttatcatcgccactgaa

SEQ ID NO: 24502 - RNA, 19 nt, synthetic construct
  misc_feature 1..19: note = siRNA sense sequence
  source 1..19: mol_type = other RNA
tcagtggcgatgataaagt

SEQ ID NO: 24503 - RNA, 19 nt, synthetic construct
  misc_feature 1..19: note = siRNA antisense sequence
  source 1..19: mol_type = other RNA
actttatcatcgccactga

SEQ ID NO: 24504 - RNA, 19 nt, synthetic construct
  misc_feature 1..19: note = siRNA sense sequence
  source 1..19: mol_type = other RNA
cagtggcgatgataaagtc

SEQ ID NO: 24505 - RNA, 19 nt, synthetic construct
  misc_feature 1..19: note = siRNA antisense sequence
  source 1..19: mol_type = other RNA
gactttatcatcgccactg

SEQ ID NO: 24506 - RNA, 19 nt, synthetic construct
  misc_feature 1..19: note = siRNA sense sequence
  source 1..19: mol_type = other RNA
agtggcgatgataaagtct

SEQ ID NO: 24507 - RNA, 19 nt, synthetic construct
  misc_feature 1..19: note = siRNA antisense sequence
  source 1..19: mol_type = other RNA
agactttatcatcgccact

SEQ ID NO: 24508 - RNA, 19 nt, synthetic construct
  misc_feature 1..19: note = siRNA sense sequence
  source 1..19: mol_type = other RNA
gtggcgatgataaagtctc

SEQ ID NO: 24509 - RNA, 19 nt, synthetic construct
  misc_feature 1..19: note = siRNA antisense sequence
  source 1..19: mol_type = other RNA
gagactttatcatcgccac

SEQ ID NO: 24510 - RNA, 19 nt, synthetic construct
  misc_feature 1..19: note = siRNA sense sequence
  source 1..19: mol_type = other RNA
tggcgatgataaagtctca

SEQ ID NO: 24511 - RNA, 19 nt, synthetic construct
  misc_feature 1..19: note = siRNA antisense sequence
  source 1..19: mol_type = other RNA
tgagactttatcatcgcca

SEQ ID NO: 24512 - RNA, 19 nt, synthetic construct
  misc_feature 1..19: note = siRNA sense sequence
  source 1..19: mol_type = other RNA
ttttaggaagtgtgtgata

SEQ ID NO: 24513 - RNA, 19 nt, synthetic construct
  misc_feature 1..19: note = siRNA antisense sequence
  source 1..19: mol_type = other RNA
tatcacacacttcctaaaa

SEQ ID NO: 24514 - RNA, 19 nt, synthetic construct
  misc_feature 1..19: note = siRNA sense sequence
  source 1..19: mol_type = other RNA
aggaagtgtgtgatatata

SEQ ID NO: 24515 - RNA, 19 nt, synthetic construct
  misc_feature 1..19: note = siRNA antisense sequence
  source 1..19: mol_type = other RNA
tatatatcacacacttcct

SEQ ID NO: 24516 - RNA, 19 nt, synthetic construct
  misc_feature 1..19: note = siRNA sense sequence
  source 1..19: mol_type = other RNA
ggaagtgtgtgatatatat

SEQ ID NO: 24517 - RNA, 19 nt, synthetic construct
  misc_feature 1..19: note = siRNA antisense sequence
  source 1..19: mol_type = other RNA
atatatatcacacacttcc

SEQ ID NO: 24518 - RNA, 19 nt, synthetic construct
  misc_feature 1..19: note = siRNA sense sequence
  source 1..19: mol_type = other RNA
gaagtgtgtgatatatatc

SEQ ID NO: 24519 - RNA, 19 nt, synthetic construct
  misc_feature 1..19: note = siRNA antisense sequence
  source 1..19: mol_type = other RNA
gatatatatcacacacttc

SEQ ID NO: 24520 - RNA, 19 nt, synthetic construct
  misc_feature 1..19: note = siRNA sense sequence
  source 1..19: mol_type = other RNA
gatatatatcaccatctgt

SEQ ID NO: 24521 - RNA, 19 nt, synthetic construct
  misc_feature 1..19: note = siRNA antisense sequence
  source 1..19: mol_type = other RNA
acagatggtgatatatatc

SEQ ID NO: 24522 - RNA, 19 nt, synthetic construct
  misc_feature 1..19: note = siRNA sense sequence
  source 1..19: mol_type = other RNA
tatatcaccatctgtattc

SEQ ID NO: 24523 - RNA, 19 nt, synthetic construct
  misc_feature 1..19: note = siRNA antisense sequence
  source 1..19: mol_type = other RNA
gaatacagatggtgatata

SEQ ID NO: 24524 - RNA, 19 nt, synthetic construct
  misc_feature 1..19: note = siRNA sense sequence
  source 1..19: mol_type = other RNA
atatcaccatctgtattct

SEQ ID NO: 24525 - RNA, 19 nt, synthetic construct
  misc_feature 1..19: note = siRNA antisense sequence
  source 1..19: mol_type = other RNA
agaatacagatggtgatat

SEQ ID NO: 24526 - RNA, 19 nt, synthetic construct
  misc_feature 1..19: note = siRNA sense sequence
  source 1..19: mol_type = other RNA
tatcaccatctgtattctc

SEQ ID NO: 24527 - RNA, 19 nt, synthetic construct
  misc_feature 1..19: note = siRNA antisense sequence
  source 1..19: mol_type = other RNA
gagaatacagatggtgata

SEQ ID NO: 24528 - RNA, 19 nt, synthetic construct
  misc_feature 1..19: note = siRNA sense sequence
  source 1..19: mol_type = other RNA
tccacatgttacactatta

SEQ ID NO: 24529 - RNA, 19 nt, synthetic construct
  misc_feature 1..19: note = siRNA antisense sequence
  source 1..19: mol_type = other RNA
taatagtgtaacatgtgga

SEQ ID NO: 24530 - RNA, 19 nt, synthetic construct
  misc_feature 1..19: note = siRNA sense sequence
  source 1..19: mol_type = other RNA
gaatgagtttctgtaagga

SEQ ID NO: 24531 - RNA, 19 nt, synthetic construct
  misc_feature 1..19: note = siRNA antisense sequence
  source 1..19: mol_type = other RNA
tccttacagaaactcattc

SEQ ID NO: 24532 - RNA, 19 nt, synthetic construct
  misc_feature 1..19: note = siRNA sense sequence
  source 1..19: mol_type = other RNA
gtgtgtagtattatagttg

SEQ ID NO: 24533 - RNA, 19 nt, synthetic construct
  misc_feature 1..19: note = siRNA antisense sequence
  source 1..19: mol_type = other RNA
caactataatactacacac

SEQ ID NO: 24534 - RNA, 19 nt, synthetic construct
  misc_feature 1..19: note = siRNA sense sequence
  source 1..19: mol_type = other RNA
ttgaggctacagtgtttgc

SEQ ID NO: 24535 - RNA, 19 nt, synthetic construct
  misc_feature 1..19: note = siRNA antisense sequence
  source 1..19: mol_type = other RNA
gcaaacactgtagcctcaa

SEQ ID NO: 24536 - RNA, 19 nt, synthetic construct
  misc_feature 1..19: note = siRNA sense sequence
  source 1..19: mol_type = other RNA
aggctacagtgtttgcttt

SEQ ID NO: 24537 - RNA, 19 nt, synthetic construct
  misc_feature 1..19: note = siRNA antisense sequence
  source 1..19: mol_type = other RNA
aaagcaaacactgtagcct

SEQ ID NO: 24538 - RNA, 19 nt, synthetic construct
  misc_feature 1..19: note = siRNA sense sequence
  source 1..19: mol_type = other RNA
ggctacagtgtttgctttt

SEQ ID NO: 24539 - RNA, 19 nt, synthetic construct
  misc_feature 1..19: note = siRNA antisense sequence
  source 1..19: mol_type = other RNA
aaaagcaaacactgtagcc

SEQ ID NO: 24540 - RNA, 19 nt, synthetic construct
  misc_feature 1..19: note = siRNA sense sequence
  source 1..19: mol_type = other RNA
attgacattgatatgggaa

SEQ ID NO: 24541 - RNA, 19 nt, synthetic construct
  misc_feature 1..19: note = siRNA antisense sequence
  source 1..19: mol_type = other RNA
ttcccatatcaatgtcaat

SEQ ID NO: 24542 - RNA, 19 nt, synthetic construct
  misc_feature 1..19: note = siRNA sense sequence
  source 1..19: mol_type = other RNA
tgacattgatatgggaagg

SEQ ID NO: 24543 - RNA, 19 nt, synthetic construct
  misc_feature 1..19: note = siRNA antisense sequence
  source 1..19: mol_type = other RNA
ccttcccatatcaatgtca

SEQ ID NO: 24544 - RNA, 19 nt, synthetic construct
  misc_feature 1..19: note = siRNA sense sequence
  source 1..19: mol_type = other RNA
gacattgatatgggaaggt

SEQ ID NO: 24545 - RNA, 19 nt, synthetic construct
  misc_feature 1..19: note = siRNA antisense sequence
  source 1..19: mol_type = other RNA
accttcccatatcaatgtc

SEQ ID NO: 24546 - RNA, 19 nt, synthetic construct
  misc_feature 1..19: note = siRNA sense sequence
  source 1..19: mol_type = other RNA
cattgatatgggaaggtct

SEQ ID NO: 24547 - RNA, 19 nt, synthetic construct
  misc_feature 1..19: note = siRNA antisense sequence
  source 1..19: mol_type = other RNA
agaccttcccatatcaatg

SEQ ID NO: 24548 - RNA, 19 nt, synthetic construct
  misc_feature 1..19: note = siRNA sense sequence
  source 1..19: mol_type = other RNA
atatgggaaggtcttaaat

SEQ ID NO: 24549 - RNA, 19 nt, synthetic construct
  misc_feature 1..19: note = siRNA antisense sequence
  source 1..19: mol_type = other RNA
atttaagaccttcccatat

SEQ ID NO: 24550 - RNA, 19 nt, synthetic construct
  misc_feature 1..19: note = siRNA sense sequence
  source 1..19: mol_type = other RNA
tatgggaaggtcttaaatt

SEQ ID NO: 24551 - RNA, 19 nt, synthetic construct
  misc_feature 1..19: note = siRNA antisense sequence
  source 1..19: mol_type = other RNA
aatttaagaccttcccata

SEQ ID NO: 24552 - RNA, 19 nt, synthetic construct
  misc_feature 1..19: note = siRNA sense sequence
  source 1..19: mol_type = other RNA
atgggaaggtcttaaattt

SEQ ID NO: 24553 - RNA, 19 nt, synthetic construct
  misc_feature 1..19: note = siRNA antisense sequence
  source 1..19: mol_type = other RNA
aaatttaagaccttcccat

SEQ ID NO: 24554 - RNA, 19 nt, synthetic construct
  misc_feature 1..19: note = siRNA sense sequence
  source 1..19: mol_type = other RNA
ggaaggtcttaaattttca

SEQ ID NO: 24555 - RNA, 19 nt, synthetic construct
  misc_feature 1..19: note = siRNA antisense sequence
  source 1..19: mol_type = other RNA
tgaaaatttaagaccttcc

SEQ ID NO: 24556 - RNA, 19 nt, synthetic construct
  misc_feature 1..19: note = siRNA sense sequence
  source 1..19: mol_type = other RNA
gaaggtcttaaattttcag

SEQ ID NO: 24557 - RNA, 19 nt, synthetic construct
  misc_feature 1..19: note = siRNA antisense sequence
  source 1..19: mol_type = other RNA
ctgaaaatttaagaccttc

SEQ ID NO: 24558 - RNA, 19 nt, synthetic construct
  misc_feature 1..19: note = siRNA sense sequence
  source 1..19: mol_type = other RNA
ttttcagatttcagtgcta

SEQ ID NO: 24559 - RNA, 19 nt, synthetic construct
  misc_feature 1..19: note = siRNA antisense sequence
  source 1..19: mol_type = other RNA
tagcactgaaatctgaaaa

SEQ ID NO: 24560 - RNA, 19 nt, synthetic construct
  misc_feature 1..19: note = siRNA sense sequence
  source 1..19: mol_type = other RNA
tttcagatttcagtgctaa

SEQ ID NO: 24561 - RNA, 19 nt, synthetic construct
  misc_feature 1..19: note = siRNA antisense sequence
  source 1..19: mol_type = other RNA
ttagcactgaaatctgaaa

SEQ ID NO: 24562 - RNA, 19 nt, synthetic construct
  misc_feature 1..19: note = siRNA sense sequence
  source 1..19: mol_type = other RNA
ttcagatttcagtgctaag

SEQ ID NO: 24563 - RNA, 19 nt, synthetic construct
  misc_feature 1..19: note = siRNA antisense sequence
  source 1..19: mol_type = other RNA
cttagcactgaaatctgaa

SEQ ID NO: 24564 - RNA, 19 nt, synthetic construct
  misc_feature 1..19: note = siRNA sense sequence
  source 1..19: mol_type = other RNA
tcagatttcagtgctaagg

SEQ ID NO: 24565 - RNA, 19 nt, synthetic construct
  misc_feature 1..19: note = siRNA antisense sequence
  source 1..19: mol_type = other RNA
ccttagcactgaaatctga

SEQ ID NO: 24566 - RNA, 19 nt, synthetic construct
  misc_feature 1..19: note = siRNA sense sequence
  source 1..19: mol_type = other RNA
cagatttcagtgctaagga

SEQ ID NO: 24567 - RNA, 19 nt, synthetic construct
  misc_feature 1..19: note = siRNA antisense sequence
  source 1..19: mol_type = other RNA
tccttagcactgaaatctg

SEQ ID NO: 24568 - RNA, 19 nt, synthetic construct
  misc_feature 1..19: note = siRNA sense sequence
  source 1..19: mol_type = other RNA
tttcagtgctaaggatgat

SEQ ID NO: 24569 - RNA, 19 nt, synthetic construct
  misc_feature 1..19: note = siRNA antisense sequence
  source 1..19: mol_type = other RNA
atcatccttagcactgaaa

SEQ ID NO: 24570 - RNA, 19 nt, synthetic construct
  misc_feature 1..19: note = siRNA sense sequence
  source 1..19: mol_type = other RNA
ttcagtgctaaggatgata

SEQ ID NO: 24571 - RNA, 19 nt, synthetic construct
  misc_feature 1..19: note = siRNA antisense sequence
  source 1..19: mol_type = other RNA
tatcatccttagcactgaa

SEQ ID NO: 24572 - RNA, 19 nt, synthetic construct
  misc_feature 1..19: note = siRNA sense sequence
  source 1..19: mol_type = other RNA
tcagtgctaaggatgataa

SEQ ID NO: 24573 - RNA, 19 nt, synthetic construct
  misc_feature 1..19: note = siRNA antisense sequence
  source 1..19: mol_type = other RNA
ttatcatccttagcactga

SEQ ID NO: 24574 - RNA, 19 nt, synthetic construct
  misc_feature 1..19: note = siRNA sense sequence
  source 1..19: mol_type = other RNA
cagtgctaaggatgataac

SEQ ID NO: 24575 - RNA, 19 nt, synthetic construct
  misc_feature 1..19: note = siRNA antisense sequence
  source 1..19: mol_type = other RNA
gttatcatccttagcactg

SEQ ID NO: 24576 - RNA, 19 nt, synthetic construct
  misc_feature 1..19: note = siRNA sense sequence
  source 1..19: mol_type = other RNA
acttggatatcagtcttct

SEQ ID NO: 24577 - RNA, 19 nt, synthetic construct
  misc_feature 1..19: note = siRNA antisense sequence
  source 1..19: mol_type = other RNA
agaagactgatatccaagt

SEQ ID NO: 24578 - RNA, 19 nt, synthetic construct
  misc_feature 1..19: note = siRNA sense sequence
  source 1..19: mol_type = other RNA
cttggatatcagtcttctt

SEQ ID NO: 24579 - RNA, 19 nt, synthetic construct
  misc_feature 1..19: note = siRNA antisense sequence
  source 1..19: mol_type = other RNA
aagaagactgatatccaag

SEQ ID NO: 24580 - RNA, 19 nt, synthetic construct
  misc_feature 1..19: note = siRNA sense sequence
  source 1..19: mol_type = other RNA
tggaagtgcctgttttcta

SEQ ID NO: 24581 - RNA, 19 nt, synthetic construct
  misc_feature 1..19: note = siRNA antisense sequence
  source 1..19: mol_type = other RNA
tagaaaacaggcacttcca

SEQ ID NO: 24582 - RNA, 19 nt, synthetic construct
  misc_feature 1..19: note = siRNA sense sequence
  source 1..19: mol_type = other RNA
ggaagtgcctgttttctat

SEQ ID NO: 24583 - RNA, 19 nt, synthetic construct
  misc_feature 1..19: note = siRNA antisense sequence
  source 1..19: mol_type = other RNA
atagaaaacaggcacttcc

SEQ ID NO: 24584 - RNA, 19 nt, synthetic construct
  misc_feature 1..19: note = siRNA sense sequence
  source 1..19: mol_type = other RNA
gaagtgcctgttttctata

SEQ ID NO: 24585 - RNA, 19 nt, synthetic construct
  misc_feature 1..19: note = siRNA antisense sequence
  source 1..19: mol_type = other RNA
tatagaaaacaggcacttc

SEQ ID NO: 24586 - RNA, 19 nt, synthetic construct
  misc_feature 1..19: note = siRNA sense sequence
  source 1..19: mol_type = other RNA
aagtgcctgttttctataa

SEQ ID NO: 24587 - RNA, 19 nt, synthetic construct
  misc_feature 1..19: note = siRNA antisense sequence
  source 1..19: mol_type = other RNA
ttatagaaaacaggcactt

SEQ ID NO: 24588 - RNA, 19 nt, synthetic construct
  misc_feature 1..19: note = siRNA sense sequence
  source 1..19: mol_type = other RNA
agtgcctgttttctataat

SEQ ID NO: 24589 - RNA, 19 nt, synthetic construct
  misc_feature 1..19: note = siRNA antisense sequence
  source 1..19: mol_type = other RNA
attatagaaaacaggcact

SEQ ID NO: 24590 - RNA, 19 nt, synthetic construct
  misc_feature 1..19: note = siRNA sense sequence
  source 1..19: mol_type = other RNA
gtgcctgttttctataatg

SEQ ID NO: 24591 - RNA, 19 nt, synthetic construct
  misc_feature 1..19: note = siRNA antisense sequence
  source 1..19: mol_type = other RNA
cattatagaaaacaggcac

SEQ ID NO: 24592 - RNA, 19 nt, synthetic construct
  misc_feature 1..19: note = siRNA sense sequence
  source 1..19: mol_type = other RNA
agcttatttctatttgggt

SEQ ID NO: 24593 - RNA, 19 nt, synthetic construct
  misc_feature 1..19: note = siRNA antisense sequence
  source 1..19: mol_type = other RNA
acccaaatagaaataagct

SEQ ID NO: 24594 - RNA, 19 nt, synthetic construct
  misc_feature 1..19: note = siRNA sense sequence
  source 1..19: mol_type = other RNA
atttctatttgggtgccac

SEQ ID NO: 24595 - RNA, 19 nt, synthetic construct
  misc_feature 1..19: note = siRNA antisense sequence
  source 1..19: mol_type = other RNA
gtggcacccaaatagaaat

SEQ ID NO: 24596 - RNA, 19 nt, synthetic construct
  misc_feature 1..19: note = siRNA sense sequence
  source 1..19: mol_type = other RNA
tttctatttgggtgccaca

SEQ ID NO: 24597 - RNA, 19 nt, synthetic construct
  misc_feature 1..19: note = siRNA antisense sequence
  source 1..19: mol_type = other RNA
tgtggcacccaaatagaaa

SEQ ID NO: 24598 - RNA, 19 nt, synthetic construct
  misc_feature 1..19: note = siRNA sense sequence
  source 1..19: mol_type = other RNA
tatttgggtgccacatttg

SEQ ID NO: 24599 - RNA, 19 nt, synthetic construct
  misc_feature 1..19: note = siRNA antisense sequence
  source 1..19: mol_type = other RNA
caaatgtggcacccaaata

SEQ ID NO: 24600 - RNA, 19 nt, synthetic construct
  misc_feature 1..19: note = siRNA sense sequence
  source 1..19: mol_type = other RNA
atttgggtgccacatttgt

SEQ ID NO: 24601 - RNA, 19 nt, synthetic construct
  misc_feature 1..19: note = siRNA antisense sequence
  source 1..19: mol_type = other RNA
acaaatgtggcacccaaat

SEQ ID NO: 24602 - RNA, 19 nt, synthetic construct
  misc_feature 1..19: note = siRNA sense sequence
  source 1..19: mol_type = other RNA
gggtgccacatttgttttc

SEQ ID NO: 24603 - RNA, 19 nt, synthetic construct
  misc_feature 1..19: note = siRNA antisense sequence
  source 1..19: mol_type = other RNA
gaaaacaaatgtggcaccc

SEQ ID NO: 24604 - RNA, 19 nt, synthetic construct
  misc_feature 1..19: note = siRNA sense sequence
  source 1..19: mol_type = other RNA
ggtgccacatttgttttca

SEQ ID NO: 24605 - RNA, 19 nt, synthetic construct
  misc_feature 1..19: note = siRNA antisense sequence
  source 1..19: mol_type = other RNA
tgaaaacaaatgtggcacc

SEQ ID NO: 24606 - RNA, 19 nt, synthetic construct
  misc_feature 1..19: note = siRNA sense sequence
  source 1..19: mol_type = other RNA
gtgccacatttgttttcaa

SEQ ID NO: 24607 - RNA, 19 nt, synthetic construct
  misc_feature 1..19: note = siRNA antisense sequence
  source 1..19: mol_type = other RNA
ttgaaaacaaatgtggcac

SEQ ID NO: 24608 - RNA, 19 nt, synthetic construct
  misc_feature 1..19: note = siRNA sense sequence
  source 1..19: mol_type = other RNA
acacccaatactgaggcaa

SEQ ID NO: 24609 - RNA, 19 nt, synthetic construct
  misc_feature 1..19: note = siRNA antisense sequence
  source 1..19: mol_type = other RNA
ttgcctcagtattgggtgt

SEQ ID NO: 24610 - RNA, 19 nt, synthetic construct
  misc_feature 1..19: note = siRNA sense sequence
  source 1..19: mol_type = other RNA
cacccaatactgaggcaag

SEQ ID NO: 24611 - RNA, 19 nt, synthetic construct
  misc_feature 1..19: note = siRNA antisense sequence
  source 1..19: mol_type = other RNA
cttgcctcagtattgggtg

SEQ ID NO: 24612 - RNA, 19 nt, synthetic construct
  misc_feature 1..19: note = siRNA sense sequence
  source 1..19: mol_type = other RNA
acccaatactgaggcaaga

SEQ ID NO: 24613 - RNA, 19 nt, synthetic construct
  misc_feature 1..19: note = siRNA antisense sequence
  source 1..19: mol_type = other RNA
tcttgcctcagtattgggt

SEQ ID NO: 24614 - RNA, 19 nt, synthetic construct
  misc_feature 1..19: note = siRNA sense sequence
  source 1..19: mol_type = other RNA
cccaatactgaggcaagag

SEQ ID NO: 24615 - RNA, 19 nt, synthetic construct
  misc_feature 1..19: note = siRNA antisense sequence
  source 1..19: mol_type = other RNA
ctcttgcctcagtattggg

SEQ ID NO: 24616 - RNA, 19 nt, synthetic construct
  misc_feature 1..19: note = siRNA sense sequence
  source 1..19: mol_type = other RNA
ccaatactgaggcaagagc

SEQ ID NO: 24617 - RNA, 19 nt, synthetic construct
  misc_feature 1..19: note = siRNA antisense sequence
  source 1..19: mol_type = other RNA
gctcttgcctcagtattgg

SEQ ID NO: 24618 - RNA, 19 nt, synthetic construct
  misc_feature 1..19: note = siRNA sense sequence
  source 1..19: mol_type = other RNA
caatactgaggcaagagca

SEQ ID NO: 24619 - RNA, 19 nt, synthetic construct
  misc_feature 1..19: note = siRNA antisense sequence
  source 1..19: mol_type = other RNA
tgctcttgcctcagtattg

SEQ ID NO: 24620 - RNA, 19 nt, synthetic construct
  misc_feature 1..19: note = siRNA sense sequence
  source 1..19: mol_type = other RNA
aatactgaggcaagagcag

SEQ ID NO: 24621 - RNA, 19 nt, synthetic construct
  misc_feature 1..19: note = siRNA antisense sequence
  source 1..19: mol_type = other RNA
ctgctcttgcctcagtatt

SEQ ID NO: 24622 - RNA, 19 nt, synthetic construct
  misc_feature 1..19: note = siRNA sense sequence
  source 1..19: mol_type = other RNA
aaaatgttttggcagtcat

SEQ ID NO: 24623 - RNA, 19 nt, synthetic construct
  misc_feature 1..19: note = siRNA antisense sequence
  source 1..19: mol_type = other RNA
atgactgccaaaacatttt

SEQ ID NO: 24624 - RNA, 19 nt, synthetic construct
  misc_feature 1..19: note = siRNA sense sequence
  source 1..19: mol_type = other RNA
aaatgttttggcagtcata

SEQ ID NO: 24625 - RNA, 19 nt, synthetic construct
  misc_feature 1..19: note = siRNA antisense sequence
  source 1..19: mol_type = other RNA
tatgactgccaaaacattt

SEQ ID NO: 24626 - RNA, 19 nt, synthetic construct
  misc_feature 1..19: note = siRNA sense sequence
  source 1..19: mol_type = other RNA
aatgttttggcagtcatat

SEQ ID NO: 24627 - RNA, 19 nt, synthetic construct
  misc_feature 1..19: note = siRNA antisense sequence
  source 1..19: mol_type = other RNA
atatgactgccaaaacatt

SEQ ID NO: 24628 - RNA, 19 nt, synthetic construct
  misc_feature 1..19: note = siRNA sense sequence
  source 1..19: mol_type = other RNA
gcagtcatattgcctggct

SEQ ID NO: 24629 - RNA, 19 nt, synthetic construct
  misc_feature 1..19: note = siRNA antisense sequence
  source 1..19: mol_type = other RNA
agccaggcaatatgactgc

SEQ ID NO: 24630 - RNA, 19 nt, synthetic construct
  misc_feature 1..19: note = siRNA sense sequence
  source 1..19: mol_type = other RNA
cagtcatattgcctggctt

SEQ ID NO: 24631 - RNA, 19 nt, synthetic construct
  misc_feature 1..19: note = siRNA antisense sequence
  source 1..19: mol_type = other RNA
aagccaggcaatatgactg

SEQ ID NO: 24632 - RNA, 19 nt, synthetic construct
  misc_feature 1..19: note = siRNA sense sequence
  source 1..19: mol_type = other RNA
agtcatattgcctggcttt

SEQ ID NO: 24633 - RNA, 19 nt, synthetic construct
  misc_feature 1..19: note = siRNA antisense sequence
  source 1..19: mol_type = other RNA
aaagccaggcaatatgact

SEQ ID NO: 24634 - RNA, 19 nt, synthetic construct
  misc_feature 1..19: note = siRNA sense sequence
  source 1..19: mol_type = other RNA
atattgcctggctttgccc

SEQ ID NO: 24635 - RNA, 19 nt, synthetic construct
  misc_feature 1..19: note = siRNA antisense sequence
  source 1..19: mol_type = other RNA
gggcaaagccaggcaatat

SEQ ID NO: 24636 - RNA, 19 nt, synthetic construct
  misc_feature 1..19: note = siRNA sense sequence
  source 1..19: mol_type = other RNA
tattgcctggctttgccca

SEQ ID NO: 24637 - RNA, 19 nt, synthetic construct
  misc_feature 1..19: note = siRNA antisense sequence
  source 1..19: mol_type = other RNA
tgggcaaagccaggcaata

SEQ ID NO: 24638 - RNA, 19 nt, synthetic construct
  misc_feature 1..19: note = siRNA sense sequence
  source 1..19: mol_type = other RNA
gctttgcccagggttggta

SEQ ID NO: 24639 - RNA, 19 nt, synthetic construct
  misc_feature 1..19: note = siRNA antisense sequence
  source 1..19: mol_type = other RNA
taccaaccctgggcaaagc

SEQ ID NO: 24640 - RNA, 19 nt, synthetic construct
  misc_feature 1..19: note = siRNA sense sequence
  source 1..19: mol_type = other RNA
ctttgcccagggttggtac

SEQ ID NO: 24641 - RNA, 19 nt, synthetic construct
  misc_feature 1..19: note = siRNA antisense sequence
  source 1..19: mol_type = other RNA
gtaccaaccctgggcaaag

SEQ ID NO: 24642 - RNA, 19 nt, synthetic construct
  misc_feature 1..19: note = siRNA sense sequence
  source 1..19: mol_type = other RNA
tttgcccagggttggtacc

SEQ ID NO: 24643 - RNA, 19 nt, synthetic construct
  misc_feature 1..19: note = siRNA antisense sequence
  source 1..19: mol_type = other RNA
ggtaccaaccctgggcaaa

SEQ ID NO: 24644 - RNA, 19 nt, synthetic construct
  misc_feature 1..19: note = siRNA sense sequence
  source 1..19: mol_type = other RNA
agggttggtaccactgtcc

SEQ ID NO: 24645 - RNA, 19 nt, synthetic construct
  misc_feature 1..19: note = siRNA antisense sequence
  source 1..19: mol_type = other RNA
ggacagtggtaccaaccct

SEQ ID NO: 24646 - RNA, 19 nt, synthetic construct
  misc_feature 1..19: note = siRNA sense sequence
  source 1..19: mol_type = other RNA
gggttggtaccactgtccc

SEQ ID NO: 24647 - RNA, 19 nt, synthetic construct
  misc_feature 1..19: note = siRNA antisense sequence
  source 1..19: mol_type = other RNA
gggacagtggtaccaaccc

SEQ ID NO: 24648 - RNA, 19 nt, synthetic construct
  misc_feature 1..19: note = siRNA sense sequence
  source 1..19: mol_type = other RNA
ttattaagtgtcaggtctt

SEQ ID NO: 24649 - RNA, 19 nt, synthetic construct
  misc_feature 1..19: note = siRNA antisense sequence
  source 1..19: mol_type = other RNA
aagacctgacacttaataa

SEQ ID NO: 24650 - RNA, 19 nt, synthetic construct
  misc_feature 1..19: note = siRNA sense sequence
  source 1..19: mol_type = other RNA
gtgtcaggtcttatggtaa

SEQ ID NO: 24651 - RNA, 19 nt, synthetic construct
  misc_feature 1..19: note = siRNA antisense sequence
  source 1..19: mol_type = other RNA
ttaccataagacctgacac

SEQ ID NO: 24652 - RNA, 19 nt, synthetic construct
  misc_feature 1..19: note = siRNA sense sequence
  source 1..19: mol_type = other RNA
tggtaagtgctttaaaatg

SEQ ID NO: 24653 - RNA, 19 nt, synthetic construct
  misc_feature 1..19: note = siRNA antisense sequence
  source 1..19: mol_type = other RNA
cattttaaagcacttacca

SEQ ID NO: 24654 - RNA, 19 nt, synthetic construct
  misc_feature 1..19: note = siRNA sense sequence
  source 1..19: mol_type = other RNA
ggtaagtgctttaaaatgc

SEQ ID NO: 24655 - RNA, 19 nt, synthetic construct
  misc_feature 1..19: note = siRNA antisense sequence
  source 1..19: mol_type = other RNA
gcattttaaagcacttacc

SEQ ID NO: 24656 - RNA, 19 nt, synthetic construct
  misc_feature 1..19: note = siRNA sense sequence
  source 1..19: mol_type = other RNA
gctttaaaatgcattagtc

SEQ ID NO: 24657 - RNA, 19 nt, synthetic construct
  misc_feature 1..19: note = siRNA antisense sequence
  source 1..19: mol_type = other RNA
gactaatgcattttaaagc

SEQ ID NO: 24658 - RNA, 19 nt, synthetic construct
  misc_feature 1..19: note = siRNA sense sequence
  source 1..19: mol_type = other RNA
atgcattagtctttcaaga

SEQ ID NO: 24659 - RNA, 19 nt, synthetic construct
  misc_feature 1..19: note = siRNA antisense sequence
  source 1..19: mol_type = other RNA
tcttgaaagactaatgcat

SEQ ID NO: 24660 - RNA, 19 nt, synthetic construct
  misc_feature 1..19: note = siRNA sense sequence
  source 1..19: mol_type = other RNA
tgcattagtctttcaagaa

SEQ ID NO: 24661 - RNA, 19 nt, synthetic construct
  misc_feature 1..19: note = siRNA antisense sequence
  source 1..19: mol_type = other RNA
ttcttgaaagactaatgca

SEQ ID NO: 24662 - RNA, 19 nt, synthetic construct
  misc_feature 1..19: note = siRNA sense sequence
  source 1..19: mol_type = other RNA
cccagtcagaagggttttg

SEQ ID NO: 24663 - RNA, 19 nt, synthetic construct
  misc_feature 1..19: note = siRNA antisense sequence
  source 1..19: mol_type = other RNA
caaaacccttctgactggg

SEQ ID NO: 24664 - RNA, 19 nt, synthetic construct
  misc_feature 1..19: note = siRNA sense sequence
  source 1..19: mol_type = other RNA
ccagtcagaagggttttgt

SEQ ID NO: 24665 - RNA, 19 nt, synthetic construct
  misc_feature 1..19: note = siRNA antisense sequence
  source 1..19: mol_type = other RNA
acaaaacccttctgactgg

SEQ ID NO: 24666 - RNA, 19 nt, synthetic construct
  misc_feature 1..19: note = siRNA sense sequence
  source 1..19: mol_type = other RNA
cagtcagaagggttttgtc

SEQ ID NO: 24667 - RNA, 19 nt, synthetic construct
  misc_feature 1..19: note = siRNA antisense sequence
  source 1..19: mol_type = other RNA
gacaaaacccttctgactg

SEQ ID NO: 24668 - RNA, 19 nt, synthetic construct
  misc_feature 1..19: note = siRNA sense sequence
  source 1..19: mol_type = other RNA
agtcagaagggttttgtca

SEQ ID NO: 24669 - RNA, 19 nt, synthetic construct
  misc_feature 1..19: note = siRNA antisense sequence
  source 1..19: mol_type = other RNA
tgacaaaacccttctgact

SEQ ID NO: 24670 - RNA, 19 nt, synthetic construct
  misc_feature 1..19: note = siRNA sense sequence
  source 1..19: mol_type = other RNA
agaagggttttgtcattac

SEQ ID NO: 24671 - RNA, 19 nt, synthetic construct
  misc_feature 1..19: note = siRNA antisense sequence
  source 1..19: mol_type = other RNA
gtaatgacaaaacccttct

SEQ ID NO: 24672 - RNA, 19 nt, synthetic construct
  misc_feature 1..19: note = siRNA sense sequence
  source 1..19: mol_type = other RNA
aagggttttgtcattacta

SEQ ID NO: 24673 - RNA, 19 nt, synthetic construct
  misc_feature 1..19: note = siRNA antisense sequence
  source 1..19: mol_type = other RNA
tagtaatgacaaaaccctt

SEQ ID NO: 24674 - RNA, 19 nt, synthetic construct
  misc_feature 1..19: note = siRNA sense sequence
  source 1..19: mol_type = other RNA
agggttttgtcattactat

SEQ ID NO: 24675 - RNA, 19 nt, synthetic construct
  misc_feature 1..19: note = siRNA antisense sequence
  source 1..19: mol_type = other RNA
atagtaatgacaaaaccct

SEQ ID NO: 24676 - RNA, 19 nt, synthetic construct
  misc_feature 1..19: note = siRNA sense sequence
  source 1..19: mol_type = other RNA
cattactattttctgatgc

SEQ ID NO: 24677 - RNA, 19 nt, synthetic construct
  misc_feature 1..19: note = siRNA antisense sequence
  source 1..19: mol_type = other RNA
gcatcagaaaatagtaatg

SEQ ID NO: 24678 - RNA, 19 nt, synthetic construct
  misc_feature 1..19: note = siRNA sense sequence
  source 1..19: mol_type = other RNA
acagttagtgggtgtgatg

SEQ ID NO: 24679 - RNA, 19 nt, synthetic construct
  misc_feature 1..19: note = siRNA antisense sequence
  source 1..19: mol_type = other RNA
catcacacccactaactgt

SEQ ID NO: 24680 - RNA, 19 nt, synthetic construct
  misc_feature 1..19: note = siRNA sense sequence
  source 1..19: mol_type = other RNA
cagttagtgggtgtgatga

SEQ ID NO: 24681 - RNA, 19 nt, synthetic construct
  misc_feature 1..19: note = siRNA antisense sequence
  source 1..19: mol_type = other RNA
tcatcacacccactaactg

SEQ ID NO: 24682 - RNA, 19 nt, synthetic construct
  misc_feature 1..19: note = siRNA sense sequence
  source 1..19: mol_type = other RNA
agttagtgggtgtgatgag

SEQ ID NO: 24683 - RNA, 19 nt, synthetic construct
  misc_feature 1..19: note = siRNA antisense sequence
  source 1..19: mol_type = other RNA
ctcatcacacccactaact

SEQ ID NO: 24684 - RNA, 19 nt, synthetic construct
  misc_feature 1..19: note = siRNA sense sequence
  source 1..19: mol_type = other RNA
gttagtgggtgtgatgagg

SEQ ID NO: 24685 - RNA, 19 nt, synthetic construct
  misc_feature 1..19: note = siRNA antisense sequence
  source 1..19: mol_type = other RNA
cctcatcacacccactaac

SEQ ID NO: 24686 - RNA, 19 nt, synthetic construct
  misc_feature 1..19: note = siRNA sense sequence
  source 1..19: mol_type = other RNA
ttagtgggtgtgatgaggt

SEQ ID NO: 24687 - RNA, 19 nt, synthetic construct
  misc_feature 1..19: note = siRNA antisense sequence
  source 1..19: mol_type = other RNA
acctcatcacacccactaa

SEQ ID NO: 24688 - RNA, 19 nt, synthetic construct
  misc_feature 1..19: note = siRNA sense sequence
  source 1..19: mol_type = other RNA
agtgggtgtgatgaggtgc

SEQ ID NO: 24689 - RNA, 19 nt, synthetic construct
  misc_feature 1..19: note = siRNA antisense sequence
  source 1..19: mol_type = other RNA
gcacctcatcacacccact

SEQ ID NO: 24690 - RNA, 19 nt, synthetic construct
  misc_feature 1..19: note = siRNA sense sequence
  source 1..19: mol_type = other RNA
gtgtgatgaggtgctccct

SEQ ID NO: 24691 - RNA, 19 nt, synthetic construct
  misc_feature 1..19: note = siRNA antisense sequence
  source 1..19: mol_type = other RNA
agggagcacctcatcacac

SEQ ID NO: 24692 - RNA, 19 nt, synthetic construct
  misc_feature 1..19: note = siRNA sense sequence
  source 1..19: mol_type = other RNA
aggtgctccctcagctatc

SEQ ID NO: 24693 - RNA, 19 nt, synthetic construct
  misc_feature 1..19: note = siRNA antisense sequence
  source 1..19: mol_type = other RNA
gatagctgagggagcacct

SEQ ID NO: 24694 - RNA, 19 nt, synthetic construct
  misc_feature 1..19: note = siRNA sense sequence
  source 1..19: mol_type = other RNA
ggtgctccctcagctatca

SEQ ID NO: 24695 - RNA, 19 nt, synthetic construct
  misc_feature 1..19: note = siRNA antisense sequence
  source 1..19: mol_type = other RNA
tgatagctgagggagcacc

SEQ ID NO: 24696 - RNA, 19 nt, synthetic construct
  misc_feature 1..19: note = siRNA sense sequence
  source 1..19: mol_type = other RNA
gtgctccctcagctatcac

SEQ ID NO: 24697 - RNA, 19 nt, synthetic construct
  misc_feature 1..19: note = siRNA antisense sequence
  source 1..19: mol_type = other RNA
gtgatagctgagggagcac

SEQ ID NO: 24698 - RNA, 19 nt, synthetic construct
  misc_feature 1..19: note = siRNA sense sequence
  source 1..19: mol_type = other RNA
tgctccctcagctatcacc

SEQ ID NO: 24699 - RNA, 19 nt, synthetic construct
  misc_feature 1..19: note = siRNA antisense sequence
  source 1..19: mol_type = other RNA
ggtgatagctgagggagca

SEQ ID NO: 24700 - RNA, 19 nt, synthetic construct
  misc_feature 1..19: note = siRNA sense sequence
  source 1..19: mol_type = other RNA
gctccctcagctatcaccc

SEQ ID NO: 24701 - RNA, 19 nt, synthetic construct
  misc_feature 1..19: note = siRNA antisense sequence
  source 1..19: mol_type = other RNA
gggtgatagctgagggagc

SEQ ID NO: 24702 - RNA, 19 nt, synthetic construct
  misc_feature 1..19: note = siRNA sense sequence
  source 1..19: mol_type = other RNA
ctccctcagctatcaccct

SEQ ID NO: 24703 - RNA, 19 nt, synthetic construct
  misc_feature 1..19: note = siRNA antisense sequence
  source 1..19: mol_type = other RNA
agggtgatagctgagggag

SEQ ID NO: 24704 - RNA, 19 nt, synthetic construct
  misc_feature 1..19: note = siRNA sense sequence
  source 1..19: mol_type = other RNA
tccctcagctatcacccta

SEQ ID NO: 24705 - RNA, 19 nt, synthetic construct
  misc_feature 1..19: note = siRNA antisense sequence
  source 1..19: mol_type = other RNA
tagggtgatagctgaggga

SEQ ID NO: 24706 - RNA, 19 nt, synthetic construct
  misc_feature 1..19: note = siRNA sense sequence
  source 1..19: mol_type = other RNA
ccctcagctatcaccctaa

SEQ ID NO: 24707 - RNA, 19 nt, synthetic construct
  misc_feature 1..19: note = siRNA antisense sequence
  source 1..19: mol_type = other RNA
ttagggtgatagctgaggg

SEQ ID NO: 24708 - RNA, 19 nt, synthetic construct
  misc_feature 1..19: note = siRNA sense sequence
  source 1..19: mol_type = other RNA
cctcagctatcaccctaaa

SEQ ID NO: 24709 - RNA, 19 nt, synthetic construct
  misc_feature 1..19: note = siRNA antisense sequence
  source 1..19: mol_type = other RNA
tttagggtgatagctgagg

SEQ ID NO: 24710 - RNA, 19 nt, synthetic construct
  misc_feature 1..19: note = siRNA sense sequence
  source 1..19: mol_type = other RNA
ctcagctatcaccctaaaa

SEQ ID NO: 24711 - RNA, 19 nt, synthetic construct
  misc_feature 1..19: note = siRNA antisense sequence
  source 1..19: mol_type = other RNA
ttttagggtgatagctgag

SEQ ID NO: 24712 - RNA, 19 nt, synthetic construct
  misc_feature 1..19: note = siRNA sense sequence
  source 1..19: mol_type = other RNA
gaatgccagttcttctcag

SEQ ID NO: 24713 - RNA, 19 nt, synthetic construct
  misc_feature 1..19: note = siRNA antisense sequence
  source 1..19: mol_type = other RNA
ctgagaagaactggcattc

SEQ ID NO: 24714 - RNA, 19 nt, synthetic construct
  misc_feature 1..19: note = siRNA sense sequence
  source 1..19: mol_type = other RNA
tcttctcagctttcagttt

SEQ ID NO: 24715 - RNA, 19 nt, synthetic construct
  misc_feature 1..19: note = siRNA antisense sequence
  source 1..19: mol_type = other RNA
aaactgaaagctgagaaga

SEQ ID NO: 24716 - RNA, 19 nt, synthetic construct
  misc_feature 1..19: note = siRNA sense sequence
  source 1..19: mol_type = other RNA
ttctcagctttcagtttgg

SEQ ID NO: 24717 - RNA, 19 nt, synthetic construct
  misc_feature 1..19: note = siRNA antisense sequence
  source 1..19: mol_type = other RNA
ccaaactgaaagctgagaa

SEQ ID NO: 24718 - RNA, 19 nt, synthetic construct
  misc_feature 1..19: note = siRNA sense sequence
  source 1..19: mol_type = other RNA
tctcagctttcagtttgga

SEQ ID NO: 24719 - RNA, 19 nt, synthetic construct
  misc_feature 1..19: note = siRNA antisense sequence
  source 1..19: mol_type = other RNA
tccaaactgaaagctgaga

SEQ ID NO: 24720 - RNA, 19 nt, synthetic construct
  misc_feature 1..19: note = siRNA sense sequence
  source 1..19: mol_type = other RNA
gctttcagtttggagtagg

SEQ ID NO: 24721 - RNA, 19 nt, synthetic construct
  misc_feature 1..19: note = siRNA antisense sequence
  source 1..19: mol_type = other RNA
cctactccaaactgaaagc

SEQ ID NO: 24722 - RNA, 19 nt, synthetic construct
  misc_feature 1..19: note = siRNA sense sequence
  source 1..19: mol_type = other RNA
ctttcagtttggagtaggc

SEQ ID NO: 24723 - RNA, 19 nt, synthetic construct
  misc_feature 1..19: note = siRNA antisense sequence
  source 1..19: mol_type = other RNA
gcctactccaaactgaaag

SEQ ID NO: 24724 - RNA, 19 nt, synthetic construct
  misc_feature 1..19: note = siRNA sense sequence
  source 1..19: mol_type = other RNA
tttcagtttggagtaggca

SEQ ID NO: 24725 - RNA, 19 nt, synthetic construct
  misc_feature 1..19: note = siRNA antisense sequence
  source 1..19: mol_type = other RNA
tgcctactccaaactgaaa

SEQ ID NO: 24726 - RNA, 19 nt, synthetic construct
  misc_feature 1..19: note = siRNA sense sequence
  source 1..19: mol_type = other RNA
ttcagtttggagtaggcaa

SEQ ID NO: 24727 - RNA, 19 nt, synthetic construct
  misc_feature 1..19: note = siRNA antisense sequence
  source 1..19: mol_type = other RNA
ttgcctactccaaactgaa

SEQ ID NO: 24728 - RNA, 19 nt, synthetic construct
  misc_feature 1..19: note = siRNA sense sequence
  source 1..19: mol_type = other RNA
taatcagccaaagtttatg

SEQ ID NO: 24729 - RNA, 19 nt, synthetic construct
  misc_feature 1..19: note = siRNA antisense sequence
  source 1..19: mol_type = other RNA
cataaactttggctgatta

SEQ ID NO: 24730 - RNA, 19 nt, synthetic construct
  misc_feature 1..19: note = siRNA sense sequence
  source 1..19: mol_type = other RNA
ctcaattctgtggtcctct

SEQ ID NO: 24731 - RNA, 19 nt, synthetic construct
  misc_feature 1..19: note = siRNA antisense sequence
  source 1..19: mol_type = other RNA
agaggaccacagaattgag

SEQ ID NO: 24732 - RNA, 19 nt, synthetic construct
  misc_feature 1..19: note = siRNA sense sequence
  source 1..19: mol_type = other RNA
attctgtggtcctctaatc

SEQ ID NO: 24733 - RNA, 19 nt, synthetic construct
  misc_feature 1..19: note = siRNA antisense sequence
  source 1..19: mol_type = other RNA
gattagaggaccacagaat

SEQ ID NO: 24734 - RNA, 19 nt, synthetic construct
  misc_feature 1..19: note = siRNA sense sequence
  source 1..19: mol_type = other RNA
ttctgtggtcctctaatct

SEQ ID NO: 24735 - RNA, 19 nt, synthetic construct
  misc_feature 1..19: note = siRNA antisense sequence
  source 1..19: mol_type = other RNA
agattagaggaccacagaa

SEQ ID NO: 24736 - RNA, 19 nt, synthetic construct
  misc_feature 1..19: note = siRNA sense sequence
  source 1..19: mol_type = other RNA
tctgtggtcctctaatcta

SEQ ID NO: 24737 - RNA, 19 nt, synthetic construct
  misc_feature 1..19: note = siRNA antisense sequence
  source 1..19: mol_type = other RNA
tagattagaggaccacaga

SEQ ID NO: 24738 - RNA, 19 nt, synthetic construct
  misc_feature 1..19: note = siRNA sense sequence
  source 1..19: mol_type = other RNA
gtcctctaatctacctgga

SEQ ID NO: 24739 - RNA, 19 nt, synthetic construct
  misc_feature 1..19: note = siRNA antisense sequence
  source 1..19: mol_type = other RNA
tccaggtagattagaggac

SEQ ID NO: 24740 - RNA, 19 nt, synthetic construct
  misc_feature 1..19: note = siRNA sense sequence
  source 1..19: mol_type = other RNA
tctaatctacctggatcat

SEQ ID NO: 24741 - RNA, 19 nt, synthetic construct
  misc_feature 1..19: note = siRNA antisense sequence
  source 1..19: mol_type = other RNA
atgatccaggtagattaga

SEQ ID NO: 24742 - RNA, 19 nt, synthetic construct
  misc_feature 1..19: note = siRNA sense sequence
  source 1..19: mol_type = other RNA
ctaatctacctggatcata

SEQ ID NO: 24743 - RNA, 19 nt, synthetic construct
  misc_feature 1..19: note = siRNA antisense sequence
  source 1..19: mol_type = other RNA
tatgatccaggtagattag

SEQ ID NO: 24744 - RNA, 19 nt, synthetic construct
  misc_feature 1..19: note = siRNA sense sequence
  source 1..19: mol_type = other RNA
taatctacctggatcatag

SEQ ID NO: 24745 - RNA, 19 nt, synthetic construct
  misc_feature 1..19: note = siRNA antisense sequence
  source 1..19: mol_type = other RNA
ctatgatccaggtagatta

SEQ ID NO: 24746 - RNA, 19 nt, synthetic construct
  misc_feature 1..19: note = siRNA sense sequence
  source 1..19: mol_type = other RNA
aatctacctggatcatagt

SEQ ID NO: 24747 - RNA, 19 nt, synthetic construct
  misc_feature 1..19: note = siRNA antisense sequence
  source 1..19: mol_type = other RNA
actatgatccaggtagatt

SEQ ID NO: 24748 - RNA, 19 nt, synthetic construct
  misc_feature 1..19: note = siRNA sense sequence
  source 1..19: mol_type = other RNA
atctacctggatcatagtg

SEQ ID NO: 24749 - RNA, 19 nt, synthetic construct
  misc_feature 1..19: note = siRNA antisense sequence
  source 1..19: mol_type = other RNA
cactatgatccaggtagat

SEQ ID NO: 24750 - RNA, 19 nt, synthetic construct
  misc_feature 1..19: note = siRNA sense sequence
  source 1..19: mol_type = other RNA
tctacctggatcatagtgg

SEQ ID NO: 24751 - RNA, 19 nt, synthetic construct
  misc_feature 1..19: note = siRNA antisense sequence
  source 1..19: mol_type = other RNA
ccactatgatccaggtaga

SEQ ID NO: 24752 - RNA, 19 nt, synthetic construct
  misc_feature 1..19: note = siRNA sense sequence
  source 1..19: mol_type = other RNA
ctacctggatcatagtgga

SEQ ID NO: 24753 - RNA, 19 nt, synthetic construct
  misc_feature 1..19: note = siRNA antisense sequence
  source 1..19: mol_type = other RNA
tccactatgatccaggtag

SEQ ID NO: 24754 - RNA, 19 nt, synthetic construct
  misc_feature 1..19: note = siRNA sense sequence
  source 1..19: mol_type = other RNA
tacctggatcatagtggag

SEQ ID NO: 24755 - RNA, 19 nt, synthetic construct
  misc_feature 1..19: note = siRNA antisense sequence
  source 1..19: mol_type = other RNA
ctccactatgatccaggta

SEQ ID NO: 24756 - RNA, 19 nt, synthetic construct
  misc_feature 1..19: note = siRNA sense sequence
  source 1..19: mol_type = other RNA
tgtggcaaatctatgtatt

SEQ ID NO: 24757 - RNA, 19 nt, synthetic construct
  misc_feature 1..19: note = siRNA antisense sequence
  source 1..19: mol_type = other RNA
aatacatagatttgccaca

SEQ ID NO: 24758 - RNA, 19 nt, synthetic construct
  misc_feature 1..19: note = siRNA sense sequence
  source 1..19: mol_type = other RNA
gtggcaaatctatgtatta

SEQ ID NO: 24759 - RNA, 19 nt, synthetic construct
  misc_feature 1..19: note = siRNA antisense sequence
  source 1..19: mol_type = other RNA
taatacatagatttgccac

SEQ ID NO: 24760 - RNA, 19 nt, synthetic construct
  misc_feature 1..19: note = siRNA sense sequence
  source 1..19: mol_type = other RNA
ctatgtattaaagcaatcc

SEQ ID NO: 24761 - RNA, 19 nt, synthetic construct
  misc_feature 1..19: note = siRNA antisense sequence
  source 1..19: mol_type = other RNA
ggattgctttaatacatag

SEQ ID NO: 24762 - RNA, 19 nt, synthetic construct
  misc_feature 1..19: note = siRNA sense sequence
  source 1..19: mol_type = other RNA
tatgtattaaagcaatccc

SEQ ID NO: 24763 - RNA, 19 nt, synthetic construct
  misc_feature 1..19: note = siRNA antisense sequence
  source 1..19: mol_type = other RNA
gggattgctttaatacata

SEQ ID NO: 24764 - RNA, 19 nt, synthetic construct
  misc_feature 1..19: note = siRNA sense sequence
  source 1..19: mol_type = other RNA
atccagcattcatttattg

SEQ ID NO: 24765 - RNA, 19 nt, synthetic construct
  misc_feature 1..19: note = siRNA antisense sequence
  source 1..19: mol_type = other RNA
caataaatgaatgctggat

SEQ ID NO: 24766 - RNA, 19 nt, synthetic construct
  misc_feature 1..19: note = siRNA sense sequence
  source 1..19: mol_type = other RNA
attgttatttcacacctag

SEQ ID NO: 24767 - RNA, 19 nt, synthetic construct
  misc_feature 1..19: note = siRNA antisense sequence
  source 1..19: mol_type = other RNA
ctaggtgtgaaataacaat

SEQ ID NO: 24768 - RNA, 19 nt, synthetic construct
  misc_feature 1..19: note = siRNA sense sequence
  source 1..19: mol_type = other RNA
ttgttatttcacacctagt

SEQ ID NO: 24769 - RNA, 19 nt, synthetic construct
  misc_feature 1..19: note = siRNA antisense sequence
  source 1..19: mol_type = other RNA
actaggtgtgaaataacaa

SEQ ID NO: 24770 - RNA, 19 nt, synthetic construct
  misc_feature 1..19: note = siRNA sense sequence
  source 1..19: mol_type = other RNA
tatttcacacctagtttca

SEQ ID NO: 24771 - RNA, 19 nt, synthetic construct
  misc_feature 1..19: note = siRNA antisense sequence
  source 1..19: mol_type = other RNA
tgaaactaggtgtgaaata

SEQ ID NO: 24772 - RNA, 19 nt, synthetic construct
  misc_feature 1..19: note = siRNA sense sequence
  source 1..19: mol_type = other RNA
atttcacacctagtttcag

SEQ ID NO: 24773 - RNA, 19 nt, synthetic construct
  misc_feature 1..19: note = siRNA antisense sequence
  source 1..19: mol_type = other RNA
ctgaaactaggtgtgaaat

SEQ ID NO: 24774 - RNA, 19 nt, synthetic construct
  misc_feature 1..19: note = siRNA sense sequence
  source 1..19: mol_type = other RNA
tttcacacctagtttcagc

SEQ ID NO: 24775 - RNA, 19 nt, synthetic construct
  misc_feature 1..19: note = siRNA antisense sequence
  source 1..19: mol_type = other RNA
gctgaaactaggtgtgaaa

SEQ ID NO: 24776 - RNA, 19 nt, synthetic construct
  misc_feature 1..19: note = siRNA sense sequence
  source 1..19: mol_type = other RNA
acacctagtttcagcaagc

SEQ ID NO: 24777 - RNA, 19 nt, synthetic construct
  misc_feature 1..19: note = siRNA antisense sequence
  source 1..19: mol_type = other RNA
gcttgctgaaactaggtgt

SEQ ID NO: 24778 - RNA, 19 nt, synthetic construct
  misc_feature 1..19: note = siRNA sense sequence
  source 1..19: mol_type = other RNA
cacctagtttcagcaagct

SEQ ID NO: 24779 - RNA, 19 nt, synthetic construct
  misc_feature 1..19: note = siRNA antisense sequence
  source 1..19: mol_type = other RNA
agcttgctgaaactaggtg

SEQ ID NO: 24780 - RNA, 19 nt, synthetic construct
  misc_feature 1..19: note = siRNA sense sequence
  source 1..19: mol_type = other RNA
acctagtttcagcaagctt

SEQ ID NO: 24781 - RNA, 19 nt, synthetic construct
  misc_feature 1..19: note = siRNA antisense sequence
  source 1..19: mol_type = other RNA
aagcttgctgaaactaggt

SEQ ID NO: 24782 - RNA, 19 nt, synthetic construct
  misc_feature 1..19: note = siRNA sense sequence
  source 1..19: mol_type = other RNA
ttaagtcatgcactattac

SEQ ID NO: 24783 - RNA, 19 nt, synthetic construct
  misc_feature 1..19: note = siRNA antisense sequence
  source 1..19: mol_type = other RNA
gtaatagtgcatgacttaa

SEQ ID NO: 24784 - RNA, 19 nt, synthetic construct
  misc_feature 1..19: note = siRNA sense sequence
  source 1..19: mol_type = other RNA
taagtcatgcactattaca

SEQ ID NO: 24785 - RNA, 19 nt, synthetic construct
  misc_feature 1..19: note = siRNA antisense sequence
  source 1..19: mol_type = other RNA
tgtaatagtgcatgactta

SEQ ID NO: 24786 - RNA, 19 nt, synthetic construct
  misc_feature 1..19: note = siRNA sense sequence
  source 1..19: mol_type = other RNA
taatgactcaccttaagta

SEQ ID NO: 24787 - RNA, 19 nt, synthetic construct
  misc_feature 1..19: note = siRNA antisense sequence
  source 1..19: mol_type = other RNA
tacttaaggtgagtcatta

SEQ ID NO: 24788 - RNA, 19 nt, synthetic construct
  misc_feature 1..19: note = siRNA sense sequence
  source 1..19: mol_type = other RNA
aatgactcaccttaagtag

SEQ ID NO: 24789 - RNA, 19 nt, synthetic construct
  misc_feature 1..19: note = siRNA antisense sequence
  source 1..19: mol_type = other RNA
ctacttaaggtgagtcatt

SEQ ID NO: 24790 - RNA, 19 nt, synthetic construct
  misc_feature 1..19: note = siRNA sense sequence
  source 1..19: mol_type = other RNA
atgactcaccttaagtagc

SEQ ID NO: 24791 - RNA, 19 nt, synthetic construct
  misc_feature 1..19: note = siRNA antisense sequence
  source 1..19: mol_type = other RNA
gctacttaaggtgagtcat

SEQ ID NO: 24792 - RNA, 19 nt, synthetic construct
  misc_feature 1..19: note = siRNA sense sequence
  source 1..19: mol_type = other RNA
tgactcaccttaagtagct

SEQ ID NO: 24793 - RNA, 19 nt, synthetic construct
  misc_feature 1..19: note = siRNA antisense sequence
  source 1..19: mol_type = other RNA
agctacttaaggtgagtca

SEQ ID NO: 24794 - RNA, 19 nt, synthetic construct
  misc_feature 1..19: note = siRNA sense sequence
  source 1..19: mol_type = other RNA
gactcaccttaagtagcta

SEQ ID NO: 24795 - RNA, 19 nt, synthetic construct
  misc_feature 1..19: note = siRNA antisense sequence
  source 1..19: mol_type = other RNA
tagctacttaaggtgagtc

SEQ ID NO: 24796 - RNA, 19 nt, synthetic construct
  misc_feature 1..19: note = siRNA sense sequence
  source 1..19: mol_type = other RNA
actcaccttaagtagctag

SEQ ID NO: 24797 - RNA, 19 nt, synthetic construct
  misc_feature 1..19: note = siRNA antisense sequence
  source 1..19: mol_type = other RNA
ctagctacttaaggtgagt

SEQ ID NO: 24798 - RNA, 19 nt, synthetic construct
  misc_feature 1..19: note = siRNA sense sequence
  source 1..19: mol_type = other RNA
ctgggtatgcaaggatgaa

SEQ ID NO: 24799 - RNA, 19 nt, synthetic construct
  misc_feature 1..19: note = siRNA antisense sequence
  source 1..19: mol_type = other RNA
ttcatccttgcatacccag

SEQ ID NO: 24800 - RNA, 19 nt, synthetic construct
  misc_feature 1..19: note = siRNA sense sequence
  source 1..19: mol_type = other RNA
gtatgcaaggatgaattaa

SEQ ID NO: 24801 - RNA, 19 nt, synthetic construct
  misc_feature 1..19: note = siRNA antisense sequence
  source 1..19: mol_type = other RNA
ttaattcatccttgcatac

SEQ ID NO: 24802 - RNA, 19 nt, synthetic construct
  misc_feature 1..19: note = siRNA sense sequence
  source 1..19: mol_type = other RNA
tatgcaaggatgaattaag

SEQ ID NO: 24803 - RNA, 19 nt, synthetic construct
  misc_feature 1..19: note = siRNA antisense sequence
  source 1..19: mol_type = other RNA
cttaattcatccttgcata

SEQ ID NO: 24804 - RNA, 19 nt, synthetic construct
  misc_feature 1..19: note = siRNA sense sequence
  source 1..19: mol_type = other RNA
atgcaaggatgaattaaga

SEQ ID NO: 24805 - RNA, 19 nt, synthetic construct
  misc_feature 1..19: note = siRNA antisense sequence
  source 1..19: mol_type = other RNA
tcttaattcatccttgcat

SEQ ID NO: 24806 - RNA, 19 nt, synthetic construct
  misc_feature 1..19: note = siRNA sense sequence
  source 1..19: mol_type = other RNA
aaggatgaattaagacagt

SEQ ID NO: 24807 - RNA, 19 nt, synthetic construct
  misc_feature 1..19: note = siRNA antisense sequence
  source 1..19: mol_type = other RNA
actgtcttaattcatcctt

SEQ ID NO: 24808 - RNA, 19 nt, synthetic construct
  misc_feature 1..19: note = siRNA sense sequence
  source 1..19: mol_type = other RNA
aggatgaattaagacagtt

SEQ ID NO: 24809 - RNA, 19 nt, synthetic construct
  misc_feature 1..19: note = siRNA antisense sequence
  source 1..19: mol_type = other RNA
aactgtcttaattcatcct

SEQ ID NO: 24810 - RNA, 19 nt, synthetic construct
  misc_feature 1..19: note = siRNA sense sequence
  source 1..19: mol_type = other RNA
tgaattaagacagttttcc

SEQ ID NO: 24811 - RNA, 19 nt, synthetic construct
  misc_feature 1..19: note = siRNA antisense sequence
  source 1..19: mol_type = other RNA
ggaaaactgtcttaattca

SEQ ID NO: 24812 - RNA, 19 nt, synthetic construct
  misc_feature 1..19: note = siRNA sense sequence
  source 1..19: mol_type = other RNA
cagttttccctgcctttaa

SEQ ID NO: 24813 - RNA, 19 nt, synthetic construct
  misc_feature 1..19: note = siRNA antisense sequence
  source 1..19: mol_type = other RNA
ttaaaggcagggaaaactg

SEQ ID NO: 24814 - RNA, 19 nt, synthetic construct
  misc_feature 1..19: note = siRNA sense sequence
  source 1..19: mol_type = other RNA
agttttccctgcctttaat

SEQ ID NO: 24815 - RNA, 19 nt, synthetic construct
  misc_feature 1..19: note = siRNA antisense sequence
  source 1..19: mol_type = other RNA
attaaaggcagggaaaact

SEQ ID NO: 24816 - RNA, 19 nt, synthetic construct
  misc_feature 1..19: note = siRNA sense sequence
  source 1..19: mol_type = other RNA
gttttccctgcctttaatc

SEQ ID NO: 24817 - RNA, 19 nt, synthetic construct
  misc_feature 1..19: note = siRNA antisense sequence
  source 1..19: mol_type = other RNA
gattaaaggcagggaaaac

SEQ ID NO: 24818 - RNA, 19 nt, synthetic construct
  misc_feature 1..19: note = siRNA sense sequence
  source 1..19: mol_type = other RNA
tttccctgcctttaatcta

SEQ ID NO: 24819 - RNA, 19 nt, synthetic construct
  misc_feature 1..19: note = siRNA antisense sequence
  source 1..19: mol_type = other RNA
tagattaaaggcagggaaa

SEQ ID NO: 24820 - RNA, 19 nt, synthetic construct
  misc_feature 1..19: note = siRNA sense sequence
  source 1..19: mol_type = other RNA
ttccctgcctttaatctag

SEQ ID NO: 24821 - RNA, 19 nt, synthetic construct
  misc_feature 1..19: note = siRNA antisense sequence
  source 1..19: mol_type = other RNA
ctagattaaaggcagggaa

SEQ ID NO: 24822 - RNA, 19 nt, synthetic construct
  misc_feature 1..19: note = siRNA sense sequence
  source 1..19: mol_type = other RNA
tccctgcctttaatctaga

SEQ ID NO: 24823 - RNA, 19 nt, synthetic construct
  misc_feature 1..19: note = siRNA antisense sequence
  source 1..19: mol_type = other RNA
tctagattaaaggcaggga

SEQ ID NO: 24824 - RNA, 19 nt, synthetic construct
  misc_feature 1..19: note = siRNA sense sequence
  source 1..19: mol_type = other RNA
ccctgcctttaatctagaa

SEQ ID NO: 24825 - RNA, 19 nt, synthetic construct
  misc_feature 1..19: note = siRNA antisense sequence
  source 1..19: mol_type = other RNA
ttctagattaaaggcaggg

SEQ ID NO: 24826 - RNA, 19 nt, synthetic construct
  misc_feature 1..19: note = siRNA sense sequence
  source 1..19: mol_type = other RNA
caagtggccaagttgacag

SEQ ID NO: 24827 - RNA, 19 nt, synthetic construct
  misc_feature 1..19: note = siRNA antisense sequence
  source 1..19: mol_type = other RNA
ctgtcaacttggccacttg

SEQ ID NO: 24828 - RNA, 19 nt, synthetic construct
  misc_feature 1..19: note = siRNA sense sequence
  source 1..19: mol_type = other RNA
aagtggccaagttgacaga

SEQ ID NO: 24829 - RNA, 19 nt, synthetic construct
  misc_feature 1..19: note = siRNA antisense sequence
  source 1..19: mol_type = other RNA
tctgtcaacttggccactt

SEQ ID NO: 24830 - RNA, 19 nt, synthetic construct
  misc_feature 1..19: note = siRNA sense sequence
  source 1..19: mol_type = other RNA
agtggccaagttgacagaa

SEQ ID NO: 24831 - RNA, 19 nt, synthetic construct
  misc_feature 1..19: note = siRNA antisense sequence
  source 1..19: mol_type = other RNA
ttctgtcaacttggccact

SEQ ID NO: 24832 - RNA, 19 nt, synthetic construct
  misc_feature 1..19: note = siRNA sense sequence
  source 1..19: mol_type = other RNA
gtggccaagttgacagaat

SEQ ID NO: 24833 - RNA, 19 nt, synthetic construct
  misc_feature 1..19: note = siRNA antisense sequence
  source 1..19: mol_type = other RNA
attctgtcaacttggccac

SEQ ID NO: 24834 - RNA, 19 nt, synthetic construct
  misc_feature 1..19: note = siRNA sense sequence
  source 1..19: mol_type = other RNA
tggccaagttgacagaatt

SEQ ID NO: 24835 - RNA, 19 nt, synthetic construct
  misc_feature 1..19: note = siRNA antisense sequence
  source 1..19: mol_type = other RNA
aattctgtcaacttggcca

SEQ ID NO: 24836 - RNA, 19 nt, synthetic construct
  misc_feature 1..19: note = siRNA sense sequence
  source 1..19: mol_type = other RNA
ggccaagttgacagaattg

SEQ ID NO: 24837 - RNA, 19 nt, synthetic construct
  misc_feature 1..19: note = siRNA antisense sequence
  source 1..19: mol_type = other RNA
caattctgtcaacttggcc

SEQ ID NO: 24838 - RNA, 19 nt, synthetic construct
  misc_feature 1..19: note = siRNA sense sequence
  source 1..19: mol_type = other RNA
gccaagttgacagaattga

SEQ ID NO: 24839 - RNA, 19 nt, synthetic construct
  misc_feature 1..19: note = siRNA antisense sequence
  source 1..19: mol_type = other RNA
tcaattctgtcaacttggc

SEQ ID NO: 24840 - RNA, 19 nt, synthetic construct
  misc_feature 1..19: note = siRNA sense sequence
  source 1..19: mol_type = other RNA
ccaagttgacagaattgac

SEQ ID NO: 24841 - RNA, 19 nt, synthetic construct
  misc_feature 1..19: note = siRNA antisense sequence
  source 1..19: mol_type = other RNA
gtcaattctgtcaacttgg

SEQ ID NO: 24842 - RNA, 19 nt, synthetic construct
  misc_feature 1..19: note = siRNA sense sequence
  source 1..19: mol_type = other RNA
caagttgacagaattgaca

SEQ ID NO: 24843 - RNA, 19 nt, synthetic construct
  misc_feature 1..19: note = siRNA antisense sequence
  source 1..19: mol_type = other RNA
tgtcaattctgtcaacttg

SEQ ID NO: 24844 - RNA, 19 nt, synthetic construct
  misc_feature 1..19: note = siRNA sense sequence
  source 1..19: mol_type = other RNA
aagttgacagaattgacag

SEQ ID NO: 24845 - RNA, 19 nt, synthetic construct
  misc_feature 1..19: note = siRNA antisense sequence
  source 1..19: mol_type = other RNA
ctgtcaattctgtcaactt

SEQ ID NO: 24846 - RNA, 19 nt, synthetic construct
  misc_feature 1..19: note = siRNA sense sequence
  source 1..19: mol_type = other RNA
agttgacagaattgacagc

SEQ ID NO: 24847 - RNA, 19 nt, synthetic construct
  misc_feature 1..19: note = siRNA antisense sequence
  source 1..19: mol_type = other RNA
gctgtcaattctgtcaact

SEQ ID NO: 24848 - RNA, 19 nt, synthetic construct
  misc_feature 1..19: note = siRNA sense sequence
  source 1..19: mol_type = other RNA
gttgacagaattgacagca

SEQ ID NO: 24849 - RNA, 19 nt, synthetic construct
  misc_feature 1..19: note = siRNA antisense sequence
  source 1..19: mol_type = other RNA
tgctgtcaattctgtcaac

SEQ ID NO: 24850 - RNA, 19 nt, synthetic construct
  misc_feature 1..19: note = siRNA sense sequence
  source 1..19: mol_type = other RNA
acagaattgacagcagtta

SEQ ID NO: 24851 - RNA, 19 nt, synthetic construct
  misc_feature 1..19: note = siRNA antisense sequence
  source 1..19: mol_type = other RNA
taactgctgtcaattctgt

SEQ ID NO: 24852 - RNA, 19 nt, synthetic construct
  misc_feature 1..19: note = siRNA sense sequence
  source 1..19: mol_type = other RNA
cagaattgacagcagttaa

SEQ ID NO: 24853 - RNA, 19 nt, synthetic construct
  misc_feature 1..19: note = siRNA antisense sequence
  source 1..19: mol_type = other RNA
ttaactgctgtcaattctg

SEQ ID NO: 24854 - RNA, 19 nt, synthetic construct
  misc_feature 1..19: note = siRNA sense sequence
  source 1..19: mol_type = other RNA
gaattgacagcagttaaaa

SEQ ID NO: 24855 - RNA, 19 nt, synthetic construct
  misc_feature 1..19: note = siRNA antisense sequence
  source 1..19: mol_type = other RNA
ttttaactgctgtcaattc

SEQ ID NO: 24856 - RNA, 19 nt, synthetic construct
  misc_feature 1..19: note = siRNA sense sequence
  source 1..19: mol_type = other RNA
aattgacagcagttaaaag

SEQ ID NO: 24857 - RNA, 19 nt, synthetic construct
  misc_feature 1..19: note = siRNA antisense sequence
  source 1..19: mol_type = other RNA
cttttaactgctgtcaatt

SEQ ID NO: 24858 - RNA, 19 nt, synthetic construct
  misc_feature 1..19: note = siRNA sense sequence
  source 1..19: mol_type = other RNA
attgacagcagttaaaagt

SEQ ID NO: 24859 - RNA, 19 nt, synthetic construct
  misc_feature 1..19: note = siRNA antisense sequence
  source 1..19: mol_type = other RNA
acttttaactgctgtcaat

SEQ ID NO: 24860 - RNA, 19 nt, synthetic construct
  misc_feature 1..19: note = siRNA sense sequence
  source 1..19: mol_type = other RNA
ttgacagcagttaaaagtg

SEQ ID NO: 24861 - RNA, 19 nt, synthetic construct
  misc_feature 1..19: note = siRNA antisense sequence
  source 1..19: mol_type = other RNA
cacttttaactgctgtcaa

SEQ ID NO: 24862 - RNA, 19 nt, synthetic construct
  misc_feature 1..19: note = siRNA sense sequence
  source 1..19: mol_type = other RNA
tgacagcagttaaaagtga

SEQ ID NO: 24863 - RNA, 19 nt, synthetic construct
  misc_feature 1..19: note = siRNA antisense sequence
  source 1..19: mol_type = other RNA
tcacttttaactgctgtca

SEQ ID NO: 24864 - RNA, 19 nt, synthetic construct
  misc_feature 1..19: note = siRNA sense sequence
  source 1..19: mol_type = other RNA
agcagttaaaagtgacagc

SEQ ID NO: 24865 - RNA, 19 nt, synthetic construct
  misc_feature 1..19: note = siRNA antisense sequence
  source 1..19: mol_type = other RNA
gctgtcacttttaactgct

SEQ ID NO: 24866 - RNA, 19 nt, synthetic construct
  misc_feature 1..19: note = siRNA sense sequence
  source 1..19: mol_type = other RNA
gcagttaaaagtgacagct

SEQ ID NO: 24867 - RNA, 19 nt, synthetic construct
  misc_feature 1..19: note = siRNA antisense sequence
  source 1..19: mol_type = other RNA
agctgtcacttttaactgc

SEQ ID NO: 24868 - RNA, 19 nt, synthetic construct
  misc_feature 1..19: note = siRNA sense sequence
  source 1..19: mol_type = other RNA
cagttaaaagtgacagctg

SEQ ID NO: 24869 - RNA, 19 nt, synthetic construct
  misc_feature 1..19: note = siRNA antisense sequence
  source 1..19: mol_type = other RNA
cagctgtcacttttaactg

SEQ ID NO: 24870 - RNA, 19 nt, synthetic construct
  misc_feature 1..19: note = siRNA sense sequence
  source 1..19: mol_type = other RNA
aaagtgacagctgatagtg

SEQ ID NO: 24871 - RNA, 19 nt, synthetic construct
  misc_feature 1..19: note = siRNA antisense sequence
  source 1..19: mol_type = other RNA
cactatcagctgtcacttt

SEQ ID NO: 24872 - RNA, 19 nt, synthetic construct
  misc_feature 1..19: note = siRNA sense sequence
  source 1..19: mol_type = other RNA
aagtgacagctgatagtgg

SEQ ID NO: 24873 - RNA, 19 nt, synthetic construct
  misc_feature 1..19: note = siRNA antisense sequence
  source 1..19: mol_type = other RNA
ccactatcagctgtcactt

SEQ ID NO: 24874 - RNA, 19 nt, synthetic construct
  misc_feature 1..19: note = siRNA sense sequence
  source 1..19: mol_type = other RNA
agtgacagctgatagtggg

SEQ ID NO: 24875 - RNA, 19 nt, synthetic construct
  misc_feature 1..19: note = siRNA antisense sequence
  source 1..19: mol_type = other RNA
cccactatcagctgtcact

SEQ ID NO: 24876 - RNA, 19 nt, synthetic construct
  misc_feature 1..19: note = siRNA sense sequence
  source 1..19: mol_type = other RNA
cagctgatagtgggagtgg

SEQ ID NO: 24877 - RNA, 19 nt, synthetic construct
  misc_feature 1..19: note = siRNA antisense sequence
  source 1..19: mol_type = other RNA
ccactcccactatcagctg

SEQ ID NO: 24878 - RNA, 19 nt, synthetic construct
  misc_feature 1..19: note = siRNA sense sequence
  source 1..19: mol_type = other RNA
agctgatagtgggagtgga

SEQ ID NO: 24879 - RNA, 19 nt, synthetic construct
  misc_feature 1..19: note = siRNA antisense sequence
  source 1..19: mol_type = other RNA
tccactcccactatcagct

SEQ ID NO: 24880 - RNA, 19 nt, synthetic construct
  misc_feature 1..19: note = siRNA sense sequence
  source 1..19: mol_type = other RNA
gctgatagtgggagtggat

SEQ ID NO: 24881 - RNA, 19 nt, synthetic construct
  misc_feature 1..19: note = siRNA antisense sequence
  source 1..19: mol_type = other RNA
atccactcccactatcagc

SEQ ID NO: 24882 - RNA, 19 nt, synthetic construct
  misc_feature 1..19: note = siRNA sense sequence
  source 1..19: mol_type = other RNA
ctgatagtgggagtggatt

SEQ ID NO: 24883 - RNA, 19 nt, synthetic construct
  misc_feature 1..19: note = siRNA antisense sequence
  source 1..19: mol_type = other RNA
aatccactcccactatcag

SEQ ID NO: 24884 - RNA, 19 nt, synthetic construct
  misc_feature 1..19: note = siRNA sense sequence
  source 1..19: mol_type = other RNA
tgatagtgggagtggattc

SEQ ID NO: 24885 - RNA, 19 nt, synthetic construct
  misc_feature 1..19: note = siRNA antisense sequence
  source 1..19: mol_type = other RNA
gaatccactcccactatca

SEQ ID NO: 24886 - RNA, 19 nt, synthetic construct
  misc_feature 1..19: note = siRNA sense sequence
  source 1..19: mol_type = other RNA
gatagtgggagtggattct

SEQ ID NO: 24887 - RNA, 19 nt, synthetic construct
  misc_feature 1..19: note = siRNA antisense sequence
  source 1..19: mol_type = other RNA
agaatccactcccactatc

SEQ ID NO: 24888 - RNA, 19 nt, synthetic construct
  misc_feature 1..19: note = siRNA sense sequence
  source 1..19: mol_type = other RNA
atagtgggagtggattctg

SEQ ID NO: 24889 - RNA, 19 nt, synthetic construct
  misc_feature 1..19: note = siRNA antisense sequence
  source 1..19: mol_type = other RNA
cagaatccactcccactat

SEQ ID NO: 24890 - RNA, 19 nt, synthetic construct
  misc_feature 1..19: note = siRNA sense sequence
  source 1..19: mol_type = other RNA
tagtgggagtggattctga

SEQ ID NO: 24891 - RNA, 19 nt, synthetic construct
  misc_feature 1..19: note = siRNA antisense sequence
  source 1..19: mol_type = other RNA
tcagaatccactcccacta

SEQ ID NO: 24892 - RNA, 19 nt, synthetic construct
  misc_feature 1..19: note = siRNA sense sequence
  source 1..19: mol_type = other RNA
agtgggagtggattctgaa

SEQ ID NO: 24893 - RNA, 19 nt, synthetic construct
  misc_feature 1..19: note = siRNA antisense sequence
  source 1..19: mol_type = other RNA
ttcagaatccactcccact

SEQ ID NO: 24894 - RNA, 19 nt, synthetic construct
  misc_feature 1..19: note = siRNA sense sequence
  source 1..19: mol_type = other RNA
agcctagagtattatagag

SEQ ID NO: 24895 - RNA, 19 nt, synthetic construct
  misc_feature 1..19: note = siRNA antisense sequence
  source 1..19: mol_type = other RNA
ctctataatactctaggct

SEQ ID NO: 24896 - RNA, 19 nt, synthetic construct
  misc_feature 1..19: note = siRNA sense sequence
  source 1..19: mol_type = other RNA
gcctagagtattatagagt

SEQ ID NO: 24897 - RNA, 19 nt, synthetic construct
  misc_feature 1..19: note = siRNA antisense sequence
  source 1..19: mol_type = other RNA
actctataatactctaggc

SEQ ID NO: 24898 - RNA, 19 nt, synthetic construct
  misc_feature 1..19: note = siRNA sense sequence
  source 1..19: mol_type = other RNA
cctagagtattatagagta

SEQ ID NO: 24899 - RNA, 19 nt, synthetic construct
  misc_feature 1..19: note = siRNA antisense sequence
  source 1..19: mol_type = other RNA
tactctataatactctagg

SEQ ID NO: 24900 - RNA, 19 nt, synthetic construct
  misc_feature 1..19: note = siRNA sense sequence
  source 1..19: mol_type = other RNA
gagtatttcactgggactt

SEQ ID NO: 24901 - RNA, 19 nt, synthetic construct
  misc_feature 1..19: note = siRNA antisense sequence
  source 1..19: mol_type = other RNA
aagtcccagtgaaatactc

SEQ ID NO: 24902 - RNA, 19 nt, synthetic construct
  misc_feature 1..19: note = siRNA sense sequence
  source 1..19: mol_type = other RNA
tttcactgggacttgagga

SEQ ID NO: 24903 - RNA, 19 nt, synthetic construct
  misc_feature 1..19: note = siRNA antisense sequence
  source 1..19: mol_type = other RNA
tcctcaagtcccagtgaaa

SEQ ID NO: 24904 - RNA, 19 nt, synthetic construct
  misc_feature 1..19: note = siRNA sense sequence
  source 1..19: mol_type = other RNA
ttcactgggacttgaggat

SEQ ID NO: 24905 - RNA, 19 nt, synthetic construct
  misc_feature 1..19: note = siRNA antisense sequence
  source 1..19: mol_type = other RNA
atcctcaagtcccagtgaa

SEQ ID NO: 24906 - RNA, 19 nt, synthetic construct
  misc_feature 1..19: note = siRNA sense sequence
  source 1..19: mol_type = other RNA
tcactgggacttgaggatg

SEQ ID NO: 24907 - RNA, 19 nt, synthetic construct
  misc_feature 1..19: note = siRNA antisense sequence
  source 1..19: mol_type = other RNA
catcctcaagtcccagtga

SEQ ID NO: 24908 - RNA, 19 nt, synthetic construct
  misc_feature 1..19: note = siRNA sense sequence
  source 1..19: mol_type = other RNA
actgggacttgaggatgtt

SEQ ID NO: 24909 - RNA, 19 nt, synthetic construct
  misc_feature 1..19: note = siRNA antisense sequence
  source 1..19: mol_type = other RNA
aacatcctcaagtcccagt

SEQ ID NO: 24910 - RNA, 19 nt, synthetic construct
  misc_feature 1..19: note = siRNA sense sequence
  source 1..19: mol_type = other RNA
ctgggacttgaggatgtta

SEQ ID NO: 24911 - RNA, 19 nt, synthetic construct
  misc_feature 1..19: note = siRNA antisense sequence
  source 1..19: mol_type = other RNA
taacatcctcaagtcccag

SEQ ID NO: 24912 - RNA, 19 nt, synthetic construct
  misc_feature 1..19: note = siRNA sense sequence
  source 1..19: mol_type = other RNA
cttgaggatgttactgagg

SEQ ID NO: 24913 - RNA, 19 nt, synthetic construct
  misc_feature 1..19: note = siRNA antisense sequence
  source 1..19: mol_type = other RNA
cctcagtaacatcctcaag

SEQ ID NO: 24914 - RNA, 19 nt, synthetic construct
  misc_feature 1..19: note = siRNA sense sequence
  source 1..19: mol_type = other RNA
agtacctggtattcacact

SEQ ID NO: 24915 - RNA, 19 nt, synthetic construct
  misc_feature 1..19: note = siRNA antisense sequence
  source 1..19: mol_type = other RNA
agtgtgaataccaggtact

SEQ ID NO: 24916 - RNA, 19 nt, synthetic construct
  misc_feature 1..19: note = siRNA sense sequence
  source 1..19: mol_type = other RNA
gtacctggtattcacactg

SEQ ID NO: 24917 - RNA, 19 nt, synthetic construct
  misc_feature 1..19: note = siRNA antisense sequence
  source 1..19: mol_type = other RNA
cagtgtgaataccaggtac

SEQ ID NO: 24918 - RNA, 19 nt, synthetic construct
  misc_feature 1..19: note = siRNA sense sequence
  source 1..19: mol_type = other RNA
tacctggtattcacactga

SEQ ID NO: 24919 - RNA, 19 nt, synthetic construct
  misc_feature 1..19: note = siRNA antisense sequence
  source 1..19: mol_type = other RNA
tcagtgtgaataccaggta

SEQ ID NO: 24920 - RNA, 19 nt, synthetic construct
  misc_feature 1..19: note = siRNA sense sequence
  source 1..19: mol_type = other RNA
acctggtattcacactgag

SEQ ID NO: 24921 - RNA, 19 nt, synthetic construct
  misc_feature 1..19: note = siRNA antisense sequence
  source 1..19: mol_type = other RNA
ctcagtgtgaataccaggt

SEQ ID NO: 24922 - RNA, 19 nt, synthetic construct
  misc_feature 1..19: note = siRNA sense sequence
  source 1..19: mol_type = other RNA
cctggtattcacactgagg

SEQ ID NO: 24923 - RNA, 19 nt, synthetic construct
  misc_feature 1..19: note = siRNA antisense sequence
  source 1..19: mol_type = other RNA
cctcagtgtgaataccagg

SEQ ID NO: 24924 - RNA, 19 nt, synthetic construct
  misc_feature 1..19: note = siRNA sense sequence
  source 1..19: mol_type = other RNA
ctggtattcacactgagga

SEQ ID NO: 24925 - RNA, 19 nt, synthetic construct
  misc_feature 1..19: note = siRNA antisense sequence
  source 1..19: mol_type = other RNA
tcctcagtgtgaataccag

SEQ ID NO: 24926 - RNA, 19 nt, synthetic construct
  misc_feature 1..19: note = siRNA sense sequence
  source 1..19: mol_type = other RNA
acattcagtgtattctgtt

SEQ ID NO: 24927 - RNA, 19 nt, synthetic construct
  misc_feature 1..19: note = siRNA antisense sequence
  source 1..19: mol_type = other RNA
aacagaatacactgaatgt

SEQ ID NO: 24928 - RNA, 19 nt, synthetic construct
  misc_feature 1..19: note = siRNA sense sequence
  source 1..19: mol_type = other RNA
cattcagtgtattctgtta

SEQ ID NO: 24929 - RNA, 19 nt, synthetic construct
  misc_feature 1..19: note = siRNA antisense sequence
  source 1..19: mol_type = other RNA
taacagaatacactgaatg

SEQ ID NO: 24930 - RNA, 19 nt, synthetic construct
  misc_feature 1..19: note = siRNA sense sequence
  source 1..19: mol_type = other RNA
tcagtgtattctgttaaag

SEQ ID NO: 24931 - RNA, 19 nt, synthetic construct
  misc_feature 1..19: note = siRNA antisense sequence
  source 1..19: mol_type = other RNA
ctttaacagaatacactga

SEQ ID NO: 24932 - RNA, 19 nt, synthetic construct
  misc_feature 1..19: note = siRNA sense sequence
  source 1..19: mol_type = other RNA
cagtgtattctgttaaaga

SEQ ID NO: 24933 - RNA, 19 nt, synthetic construct
  misc_feature 1..19: note = siRNA antisense sequence
  source 1..19: mol_type = other RNA
tctttaacagaatacactg

SEQ ID NO: 24934 - RNA, 19 nt, synthetic construct
  misc_feature 1..19: note = siRNA sense sequence
  source 1..19: mol_type = other RNA
acctagaatgactgttcca

SEQ ID NO: 24935 - RNA, 19 nt, synthetic construct
  misc_feature 1..19: note = siRNA antisense sequence
  source 1..19: mol_type = other RNA
tggaacagtcattctaggt

SEQ ID NO: 24936 - RNA, 19 nt, synthetic construct
  misc_feature 1..19: note = siRNA sense sequence
  source 1..19: mol_type = other RNA
cctagaatgactgttccag

SEQ ID NO: 24937 - RNA, 19 nt, synthetic construct
  misc_feature 1..19: note = siRNA antisense sequence
  source 1..19: mol_type = other RNA
ctggaacagtcattctagg

SEQ ID NO: 24938 - RNA, 19 nt, synthetic construct
  misc_feature 1..19: note = siRNA sense sequence
  source 1..19: mol_type = other RNA
ctagaatgactgttccaga

SEQ ID NO: 24939 - RNA, 19 nt, synthetic construct
  misc_feature 1..19: note = siRNA antisense sequence
  source 1..19: mol_type = other RNA
tctggaacagtcattctag

SEQ ID NO: 24940 - RNA, 19 nt, synthetic construct
  misc_feature 1..19: note = siRNA sense sequence
  source 1..19: mol_type = other RNA
agaatgactgttccagata

SEQ ID NO: 24941 - RNA, 19 nt, synthetic construct
  misc_feature 1..19: note = siRNA antisense sequence
  source 1..19: mol_type = other RNA
tatctggaacagtcattct

SEQ ID NO: 24942 - RNA, 19 nt, synthetic construct
  misc_feature 1..19: note = siRNA sense sequence
  source 1..19: mol_type = other RNA
gaatgactgttccagataa

SEQ ID NO: 24943 - RNA, 19 nt, synthetic construct
  misc_feature 1..19: note = siRNA antisense sequence
  source 1..19: mol_type = other RNA
ttatctggaacagtcattc

SEQ ID NO: 24944 - RNA, 19 nt, synthetic construct
  misc_feature 1..19: note = siRNA sense sequence
  source 1..19: mol_type = other RNA
aatgactgttccagataac

SEQ ID NO: 24945 - RNA, 19 nt, synthetic construct
  misc_feature 1..19: note = siRNA antisense sequence
  source 1..19: mol_type = other RNA
gttatctggaacagtcatt

SEQ ID NO: 24946 - RNA, 19 nt, synthetic construct
  misc_feature 1..19: note = siRNA sense sequence
  source 1..19: mol_type = other RNA
atgactgttccagataacc

SEQ ID NO: 24947 - RNA, 19 nt, synthetic construct
  misc_feature 1..19: note = siRNA antisense sequence
  source 1..19: mol_type = other RNA
ggttatctggaacagtcat

SEQ ID NO: 24948 - RNA, 19 nt, synthetic construct
  misc_feature 1..19: note = siRNA sense sequence
  source 1..19: mol_type = other RNA
tgactgttccagataacca

SEQ ID NO: 24949 - RNA, 19 nt, synthetic construct
  misc_feature 1..19: note = siRNA antisense sequence
  source 1..19: mol_type = other RNA
tggttatctggaacagtca

SEQ ID NO: 24950 - RNA, 19 nt, synthetic construct
  misc_feature 1..19: note = siRNA sense sequence
  source 1..19: mol_type = other RNA
gactgttccagataaccag

SEQ ID NO: 24951 - RNA, 19 nt, synthetic construct
  misc_feature 1..19: note = siRNA antisense sequence
  source 1..19: mol_type = other RNA
ctggttatctggaacagtc

SEQ ID NO: 24952 - RNA, 19 nt, synthetic construct
  misc_feature 1..19: note = siRNA sense sequence
  source 1..19: mol_type = other RNA
actgttccagataaccaga

SEQ ID NO: 24953 - RNA, 19 nt, synthetic construct
  misc_feature 1..19: note = siRNA antisense sequence
  source 1..19: mol_type = other RNA
tctggttatctggaacagt

SEQ ID NO: 24954 - RNA, 19 nt, synthetic construct
  misc_feature 1..19: note = siRNA sense sequence
  source 1..19: mol_type = other RNA
ttccagataaccagagttt

SEQ ID NO: 24955 - RNA, 19 nt, synthetic construct
  misc_feature 1..19: note = siRNA antisense sequence
  source 1..19: mol_type = other RNA
aaactctggttatctggaa

SEQ ID NO: 24956 - RNA, 19 nt, synthetic construct
  misc_feature 1..19: note = siRNA sense sequence
  source 1..19: mol_type = other RNA
tccagataaccagagtttt

SEQ ID NO: 24957 - RNA, 19 nt, synthetic construct
  misc_feature 1..19: note = siRNA antisense sequence
  source 1..19: mol_type = other RNA
aaaactctggttatctgga

SEQ ID NO: 24958 - RNA, 19 nt, synthetic construct
  misc_feature 1..19: note = siRNA sense sequence
  source 1..19: mol_type = other RNA
ccagataaccagagtttta

SEQ ID NO: 24959 - RNA, 19 nt, synthetic construct
  misc_feature 1..19: note = siRNA antisense sequence
  source 1..19: mol_type = other RNA
taaaactctggttatctgg

SEQ ID NO: 24960 - RNA, 19 nt, synthetic construct
  misc_feature 1..19: note = siRNA sense sequence
  source 1..19: mol_type = other RNA
cagataaccagagttttac

SEQ ID NO: 24961 - RNA, 19 nt, synthetic construct
  misc_feature 1..19: note = siRNA antisense sequence
  source 1..19: mol_type = other RNA
gtaaaactctggttatctg

SEQ ID NO: 24962 - RNA, 19 nt, synthetic construct
  misc_feature 1..19: note = siRNA sense sequence
  source 1..19: mol_type = other RNA
agataaccagagttttact

SEQ ID NO: 24963 - RNA, 19 nt, synthetic construct
  misc_feature 1..19: note = siRNA antisense sequence
  source 1..19: mol_type = other RNA
agtaaaactctggttatct

SEQ ID NO: 24964 - RNA, 19 nt, synthetic construct
  misc_feature 1..19: note = siRNA sense sequence
  source 1..19: mol_type = other RNA
gataaccagagttttacta

SEQ ID NO: 24965 - RNA, 19 nt, synthetic construct
  misc_feature 1..19: note = siRNA antisense sequence
  source 1..19: mol_type = other RNA
tagtaaaactctggttatc

SEQ ID NO: 24966 - RNA, 19 nt, synthetic construct
  misc_feature 1..19: note = siRNA sense sequence
  source 1..19: mol_type = other RNA
taaccagagttttactatg

SEQ ID NO: 24967 - RNA, 19 nt, synthetic construct
  misc_feature 1..19: note = siRNA antisense sequence
  source 1..19: mol_type = other RNA
catagtaaaactctggtta

SEQ ID NO: 24968 - RNA, 19 nt, synthetic construct
  misc_feature 1..19: note = siRNA sense sequence
  source 1..19: mol_type = other RNA
aaccagagttttactatgc

SEQ ID NO: 24969 - RNA, 19 nt, synthetic construct
  misc_feature 1..19: note = siRNA antisense sequence
  source 1..19: mol_type = other RNA
gcatagtaaaactctggtt

SEQ ID NO: 24970 - RNA, 19 nt, synthetic construct
  misc_feature 1..19: note = siRNA sense sequence
  source 1..19: mol_type = other RNA
accagagttttactatgcc

SEQ ID NO: 24971 - RNA, 19 nt, synthetic construct
  misc_feature 1..19: note = siRNA antisense sequence
  source 1..19: mol_type = other RNA
ggcatagtaaaactctggt

SEQ ID NO: 24972 - RNA, 19 nt, synthetic construct
  misc_feature 1..19: note = siRNA sense sequence
  source 1..19: mol_type = other RNA
ccagagttttactatgcct

SEQ ID NO: 24973 - RNA, 19 nt, synthetic construct
  misc_feature 1..19: note = siRNA antisense sequence
  source 1..19: mol_type = other RNA
aggcatagtaaaactctgg

SEQ ID NO: 24974 - RNA, 19 nt, synthetic construct
  misc_feature 1..19: note = siRNA sense sequence
  source 1..19: mol_type = other RNA
tatgccttaatagtctcag

SEQ ID NO: 24975 - RNA, 19 nt, synthetic construct
  misc_feature 1..19: note = siRNA antisense sequence
  source 1..19: mol_type = other RNA
ctgagactattaaggcata

SEQ ID NO: 24976 - RNA, 19 nt, synthetic construct
  misc_feature 1..19: note = siRNA sense sequence
  source 1..19: mol_type = other RNA
atgccttaatagtctcagt

SEQ ID NO: 24977 - RNA, 19 nt, synthetic construct
  misc_feature 1..19: note = siRNA antisense sequence
  source 1..19: mol_type = other RNA
actgagactattaaggcat

SEQ ID NO: 24978 - RNA, 19 nt, synthetic construct
  misc_feature 1..19: note = siRNA sense sequence
  source 1..19: mol_type = other RNA
tgccttaatagtctcagta

SEQ ID NO: 24979 - RNA, 19 nt, synthetic construct
  misc_feature 1..19: note = siRNA antisense sequence
  source 1..19: mol_type = other RNA
tactgagactattaaggca

SEQ ID NO: 24980 - RNA, 19 nt, synthetic construct
  misc_feature 1..19: note = siRNA sense sequence
  source 1..19: mol_type = other RNA
gccttaatagtctcagtaa

SEQ ID NO: 24981 - RNA, 19 nt, synthetic construct
  misc_feature 1..19: note = siRNA antisense sequence
  source 1..19: mol_type = other RNA
ttactgagactattaaggc

SEQ ID NO: 24982 - RNA, 19 nt, synthetic construct
  misc_feature 1..19: note = siRNA sense sequence
  source 1..19: mol_type = other RNA
ccttaatagtctcagtaat

SEQ ID NO: 24983 - RNA, 19 nt, synthetic construct
  misc_feature 1..19: note = siRNA antisense sequence
  source 1..19: mol_type = other RNA
attactgagactattaagg

SEQ ID NO: 24984 - RNA, 19 nt, synthetic construct
  misc_feature 1..19: note = siRNA sense sequence
  source 1..19: mol_type = other RNA
tcccaatagattttagttg

SEQ ID NO: 24985 - RNA, 19 nt, synthetic construct
  misc_feature 1..19: note = siRNA antisense sequence
  source 1..19: mol_type = other RNA
caactaaaatctattggga

SEQ ID NO: 24986 - RNA, 19 nt, synthetic construct
  misc_feature 1..19: note = siRNA sense sequence
  source 1..19: mol_type = other RNA
agataggaggtccttctga

SEQ ID NO: 24987 - RNA, 19 nt, synthetic construct
  misc_feature 1..19: note = siRNA antisense sequence
  source 1..19: mol_type = other RNA
tcagaaggacctcctatct

SEQ ID NO: 24988 - RNA, 19 nt, synthetic construct
  misc_feature 1..19: note = siRNA sense sequence
  source 1..19: mol_type = other RNA
gataggaggtccttctgag

SEQ ID NO: 24989 - RNA, 19 nt, synthetic construct
  misc_feature 1..19: note = siRNA antisense sequence
  source 1..19: mol_type = other RNA
ctcagaaggacctcctatc

SEQ ID NO: 24990 - RNA, 19 nt, synthetic construct
  misc_feature 1..19: note = siRNA sense sequence
  source 1..19: mol_type = other RNA
ggtccttctgagttcaagt

SEQ ID NO: 24991 - RNA, 19 nt, synthetic construct
  misc_feature 1..19: note = siRNA antisense sequence
  source 1..19: mol_type = other RNA
acttgaactcagaaggacc

SEQ ID NO: 24992 - RNA, 19 nt, synthetic construct
  misc_feature 1..19: note = siRNA sense sequence
  source 1..19: mol_type = other RNA
gtccttctgagttcaagtc

SEQ ID NO: 24993 - RNA, 19 nt, synthetic construct
  misc_feature 1..19: note = siRNA antisense sequence
  source 1..19: mol_type = other RNA
gacttgaactcagaaggac

SEQ ID NO: 24994 - RNA, 19 nt, synthetic construct
  misc_feature 1..19: note = siRNA sense sequence
  source 1..19: mol_type = other RNA
gagttcaagtctacgttcc

SEQ ID NO: 24995 - RNA, 19 nt, synthetic construct
  misc_feature 1..19: note = siRNA antisense sequence
  source 1..19: mol_type = other RNA
ggaacgtagacttgaactc

SEQ ID NO: 24996 - RNA, 19 nt, synthetic construct
  misc_feature 1..19: note = siRNA sense sequence
  source 1..19: mol_type = other RNA
agttcaagtctacgttcca

SEQ ID NO: 24997 - RNA, 19 nt, synthetic construct
  misc_feature 1..19: note = siRNA antisense sequence
  source 1..19: mol_type = other RNA
tggaacgtagacttgaact

SEQ ID NO: 24998 - RNA, 19 nt, synthetic construct
  misc_feature 1..19: note = siRNA sense sequence
  source 1..19: mol_type = other RNA
gttcaagtctacgttccag

SEQ ID NO: 24999 - RNA, 19 nt, synthetic construct
  misc_feature 1..19: note = siRNA antisense sequence
  source 1..19: mol_type = other RNA
ctggaacgtagacttgaac

SEQ ID NO: 25000 - RNA, 19 nt, synthetic construct
  misc_feature 1..19: note = siRNA sense sequence
  source 1..19: mol_type = other RNA
ttcaagtctacgttccaga

SEQ ID NO: 25001 - RNA, 19 nt, synthetic construct
  misc_feature 1..19: note = siRNA antisense sequence
  source 1..19: mol_type = other RNA
tctggaacgtagacttgaa

SEQ ID NO: 25002 - RNA, 19 nt, synthetic construct
  misc_feature 1..19: note = siRNA sense sequence
  source 1..19: mol_type = other RNA
tcaagtctacgttccagaa

SEQ ID NO: 25003 - RNA, 19 nt, synthetic construct
  misc_feature 1..19: note = siRNA antisense sequence
  source 1..19: mol_type = other RNA
ttctggaacgtagacttga

SEQ ID NO: 25004 - RNA, 19 nt, synthetic construct
  misc_feature 1..19: note = siRNA sense sequence
  source 1..19: mol_type = other RNA
caagtctacgttccagaag

SEQ ID NO: 25005 - RNA, 19 nt, synthetic construct
  misc_feature 1..19: note = siRNA antisense sequence
  source 1..19: mol_type = other RNA
cttctggaacgtagacttg

SEQ ID NO: 25006 - RNA, 19 nt, synthetic construct
  misc_feature 1..19: note = siRNA sense sequence
  source 1..19: mol_type = other RNA
aagtctacgttccagaagt

SEQ ID NO: 25007 - RNA, 19 nt, synthetic construct
  misc_feature 1..19: note = siRNA antisense sequence
  source 1..19: mol_type = other RNA
acttctggaacgtagactt

SEQ ID NO: 25008 - RNA, 19 nt, synthetic construct
  misc_feature 1..19: note = siRNA sense sequence
  source 1..19: mol_type = other RNA
agtctacgttccagaagtt

SEQ ID NO: 25009 - RNA, 19 nt, synthetic construct
  misc_feature 1..19: note = siRNA antisense sequence
  source 1..19: mol_type = other RNA
aacttctggaacgtagact

SEQ ID NO: 25010 - RNA, 19 nt, synthetic construct
  misc_feature 1..19: note = siRNA sense sequence
  source 1..19: mol_type = other RNA
gtctacgttccagaagttt

SEQ ID NO: 25011 - RNA, 19 nt, synthetic construct
  misc_feature 1..19: note = siRNA antisense sequence
  source 1..19: mol_type = other RNA
aaacttctggaacgtagac

SEQ ID NO: 25012 - RNA, 19 nt, synthetic construct
  misc_feature 1..19: note = siRNA sense sequence
  source 1..19: mol_type = other RNA
tctacgttccagaagtttt

SEQ ID NO: 25013 - RNA, 19 nt, synthetic construct
  misc_feature 1..19: note = siRNA antisense sequence
  source 1..19: mol_type = other RNA
aaaacttctggaacgtaga

SEQ ID NO: 25014 - RNA, 19 nt, synthetic construct
  misc_feature 1..19: note = siRNA sense sequence
  source 1..19: mol_type = other RNA
ctacgttccagaagtttta

SEQ ID NO: 25015 - RNA, 19 nt, synthetic construct
  misc_feature 1..19: note = siRNA antisense sequence
  source 1..19: mol_type = other RNA
taaaacttctggaacgtag

SEQ ID NO: 25016 - RNA, 19 nt, synthetic construct
  misc_feature 1..19: note = siRNA sense sequence
  source 1..19: mol_type = other RNA
tacgttccagaagttttat

SEQ ID NO: 25017 - RNA, 19 nt, synthetic construct
  misc_feature 1..19: note = siRNA antisense sequence
  source 1..19: mol_type = other RNA
ataaaacttctggaacgta

SEQ ID NO: 25018 - RNA, 19 nt, synthetic construct
  misc_feature 1..19: note = siRNA sense sequence
  source 1..19: mol_type = other RNA
acgttccagaagttttatg

SEQ ID NO: 25019 - RNA, 19 nt, synthetic construct
  misc_feature 1..19: note = siRNA antisense sequence
  source 1..19: mol_type = other RNA
cataaaacttctggaacgt

SEQ ID NO: 25020 - RNA, 19 nt, synthetic construct
  misc_feature 1..19: note = siRNA sense sequence
  source 1..19: mol_type = other RNA
cgttccagaagttttatgt

SEQ ID NO: 25021 - RNA, 19 nt, synthetic construct
  misc_feature 1..19: note = siRNA antisense sequence
  source 1..19: mol_type = other RNA
acataaaacttctggaacg

SEQ ID NO: 25022 - RNA, 19 nt, synthetic construct
  misc_feature 1..19: note = siRNA sense sequence
  source 1..19: mol_type = other RNA
gttccagaagttttatgtc

SEQ ID NO: 25023 - RNA, 19 nt, synthetic construct
  misc_feature 1..19: note = siRNA antisense sequence
  source 1..19: mol_type = other RNA
gacataaaacttctggaac

SEQ ID NO: 25024 - RNA, 19 nt, synthetic construct
  misc_feature 1..19: note = siRNA sense sequence
  source 1..19: mol_type = other RNA
agaagttttatgtctggaa

SEQ ID NO: 25025 - RNA, 19 nt, synthetic construct
  misc_feature 1..19: note = siRNA antisense sequence
  source 1..19: mol_type = other RNA
ttccagacataaaacttct

SEQ ID NO: 25026 - RNA, 19 nt, synthetic construct
  misc_feature 1..19: note = siRNA sense sequence
  source 1..19: mol_type = other RNA
gaagttttatgtctggaat

SEQ ID NO: 25027 - RNA, 19 nt, synthetic construct
  misc_feature 1..19: note = siRNA antisense sequence
  source 1..19: mol_type = other RNA
attccagacataaaacttc

SEQ ID NO: 25028 - RNA, 19 nt, synthetic construct
  misc_feature 1..19: note = siRNA sense sequence
  source 1..19: mol_type = other RNA
ttttcatcaagtcctagtg

SEQ ID NO: 25029 - RNA, 19 nt, synthetic construct
  misc_feature 1..19: note = siRNA antisense sequence
  source 1..19: mol_type = other RNA
cactaggacttgatgaaaa

SEQ ID NO: 25030 - RNA, 19 nt, synthetic construct
  misc_feature 1..19: note = siRNA sense sequence
  source 1..19: mol_type = other RNA
tttcatcaagtcctagtgt

SEQ ID NO: 25031 - RNA, 19 nt, synthetic construct
  misc_feature 1..19: note = siRNA antisense sequence
  source 1..19: mol_type = other RNA
acactaggacttgatgaaa

SEQ ID NO: 25032 - RNA, 19 nt, synthetic construct
  misc_feature 1..19: note = siRNA sense sequence
  source 1..19: mol_type = other RNA
ttcatcaagtcctagtgta

SEQ ID NO: 25033 - RNA, 19 nt, synthetic construct
  misc_feature 1..19: note = siRNA antisense sequence
  source 1..19: mol_type = other RNA
tacactaggacttgatgaa

SEQ ID NO: 25034 - RNA, 19 nt, synthetic construct
  misc_feature 1..19: note = siRNA sense sequence
  source 1..19: mol_type = other RNA
tcatcaagtcctagtgtaa

SEQ ID NO: 25035 - RNA, 19 nt, synthetic construct
  misc_feature 1..19: note = siRNA antisense sequence
  source 1..19: mol_type = other RNA
ttacactaggacttgatga

SEQ ID NO: 25036 - RNA, 19 nt, synthetic construct
  misc_feature 1..19: note = siRNA sense sequence
  source 1..19: mol_type = other RNA
catcaagtcctagtgtaaa

SEQ ID NO: 25037 - RNA, 19 nt, synthetic construct
  misc_feature 1..19: note = siRNA antisense sequence
  source 1..19: mol_type = other RNA
tttacactaggacttgatg

SEQ ID NO: 25038 - RNA, 19 nt, synthetic construct
  misc_feature 1..19: note = siRNA sense sequence
  source 1..19: mol_type = other RNA
ttttgtttgacaccattgt

SEQ ID NO: 25039 - RNA, 19 nt, synthetic construct
  misc_feature 1..19: note = siRNA antisense sequence
  source 1..19: mol_type = other RNA
acaatggtgtcaaacaaaa

SEQ ID NO: 25040 - RNA, 19 nt, synthetic construct
  misc_feature 1..19: note = siRNA sense sequence
  source 1..19: mol_type = other RNA
tttgtttgacaccattgtg

SEQ ID NO: 25041 - RNA, 19 nt, synthetic construct
  misc_feature 1..19: note = siRNA antisense sequence
  source 1..19: mol_type = other RNA
cacaatggtgtcaaacaaa

SEQ ID NO: 25042 - RNA, 19 nt, synthetic construct
  misc_feature 1..19: note = siRNA sense sequence
  source 1..19: mol_type = other RNA
aaaattgctctgtggatag

SEQ ID NO: 25043 - RNA, 19 nt, synthetic construct
  misc_feature 1..19: note = siRNA antisense sequence
  source 1..19: mol_type = other RNA
ctatccacagagcaatttt

SEQ ID NO: 25044 - RNA, 19 nt, synthetic construct
  misc_feature 1..19: note = siRNA sense sequence
  source 1..19: mol_type = other RNA
tttaatcttgtgtttcagc

SEQ ID NO: 25045 - RNA, 19 nt, synthetic construct
  misc_feature 1..19: note = siRNA antisense sequence
  source 1..19: mol_type = other RNA
gctgaaacacaagattaaa

SEQ ID NO: 25046 - RNA, 19 nt, synthetic construct
  misc_feature 1..19: note = siRNA sense sequence
  source 1..19: mol_type = other RNA
ttaatcttgtgtttcagct

SEQ ID NO: 25047 - RNA, 19 nt, synthetic construct
  misc_feature 1..19: note = siRNA antisense sequence
  source 1..19: mol_type = other RNA
agctgaaacacaagattaa

SEQ ID NO: 25048 - RNA, 19 nt, synthetic construct
  misc_feature 1..19: note = siRNA sense sequence
  source 1..19: mol_type = other RNA
taatcttgtgtttcagctc

SEQ ID NO: 25049 - RNA, 19 nt, synthetic construct
  misc_feature 1..19: note = siRNA antisense sequence
  source 1..19: mol_type = other RNA
gagctgaaacacaagatta

SEQ ID NO: 25050 - RNA, 19 nt, synthetic construct
  misc_feature 1..19: note = siRNA sense sequence
  source 1..19: mol_type = other RNA
aatcttgtgtttcagctca

SEQ ID NO: 25051 - RNA, 19 nt, synthetic construct
  misc_feature 1..19: note = siRNA antisense sequence
  source 1..19: mol_type = other RNA
tgagctgaaacacaagatt

SEQ ID NO: 25052 - RNA, 19 nt, synthetic construct
  misc_feature 1..19: note = siRNA sense sequence
  source 1..19: mol_type = other RNA
atcttgtgtttcagctcat

SEQ ID NO: 25053 - RNA, 19 nt, synthetic construct
  misc_feature 1..19: note = siRNA antisense sequence
  source 1..19: mol_type = other RNA
atgagctgaaacacaagat

SEQ ID NO: 25054 - RNA, 19 nt, synthetic construct
  misc_feature 1..19: note = siRNA sense sequence
  source 1..19: mol_type = other RNA
tgtgtttcagctcatttga

SEQ ID NO: 25055 - RNA, 19 nt, synthetic construct
  misc_feature 1..19: note = siRNA antisense sequence
  source 1..19: mol_type = other RNA
tcaaatgagctgaaacaca

SEQ ID NO: 25056 - RNA, 19 nt, synthetic construct
  misc_feature 1..19: note = siRNA sense sequence
  source 1..19: mol_type = other RNA
gtgtttcagctcatttgat

SEQ ID NO: 25057 - RNA, 19 nt, synthetic construct
  misc_feature 1..19: note = siRNA antisense sequence
  source 1..19: mol_type = other RNA
atcaaatgagctgaaacac

SEQ ID NO: 25058 - RNA, 19 nt, synthetic construct
  misc_feature 1..19: note = siRNA sense sequence
  source 1..19: mol_type = other RNA
tgtttcagctcatttgatc

SEQ ID NO: 25059 - RNA, 19 nt, synthetic construct
  misc_feature 1..19: note = siRNA antisense sequence
  source 1..19: mol_type = other RNA
gatcaaatgagctgaaaca

SEQ ID NO: 25060 - RNA, 19 nt, synthetic construct
  misc_feature 1..19: note = siRNA sense sequence
  source 1..19: mol_type = other RNA
gtttcagctcatttgatct

SEQ ID NO: 25061 - RNA, 19 nt, synthetic construct
  misc_feature 1..19: note = siRNA antisense sequence
  source 1..19: mol_type = other RNA
agatcaaatgagctgaaac

SEQ ID NO: 25062 - RNA, 19 nt, synthetic construct
  misc_feature 1..19: note = siRNA sense sequence
  source 1..19: mol_type = other RNA
tttcagctcatttgatctg

SEQ ID NO: 25063 - RNA, 19 nt, synthetic construct
  misc_feature 1..19: note = siRNA antisense sequence
  source 1..19: mol_type = other RNA
cagatcaaatgagctgaaa

SEQ ID NO: 25064 - RNA, 19 nt, synthetic construct
  misc_feature 1..19: note = siRNA sense sequence
  source 1..19: mol_type = other RNA
cagctcatttgatctgatg

SEQ ID NO: 25065 - RNA, 19 nt, synthetic construct
  misc_feature 1..19: note = siRNA antisense sequence
  source 1..19: mol_type = other RNA
catcagatcaaatgagctg

SEQ ID NO: 25066 - RNA, 19 nt, synthetic construct
  misc_feature 1..19: note = siRNA sense sequence
  source 1..19: mol_type = other RNA
catttgatctgatgaccat

SEQ ID NO: 25067 - RNA, 19 nt, synthetic construct
  misc_feature 1..19: note = siRNA antisense sequence
  source 1..19: mol_type = other RNA
atggtcatcagatcaaatg

SEQ ID NO: 25068 - RNA, 19 nt, synthetic construct
  misc_feature 1..19: note = siRNA sense sequence
  source 1..19: mol_type = other RNA
atttgatctgatgaccata

SEQ ID NO: 25069 - RNA, 19 nt, synthetic construct
  misc_feature 1..19: note = siRNA antisense sequence
  source 1..19: mol_type = other RNA
tatggtcatcagatcaaat

SEQ ID NO: 25070 - RNA, 19 nt, synthetic construct
  misc_feature 1..19: note = siRNA sense sequence
  source 1..19: mol_type = other RNA
tttgatctgatgaccataa

SEQ ID NO: 25071 - RNA, 19 nt, synthetic construct
  misc_feature 1..19: note = siRNA antisense sequence
  source 1..19: mol_type = other RNA
ttatggtcatcagatcaaa

SEQ ID NO: 25072 - RNA, 19 nt, synthetic construct
  misc_feature 1..19: note = siRNA sense sequence
  source 1..19: mol_type = other RNA
ttgatctgatgaccataat

SEQ ID NO: 25073 - RNA, 19 nt, synthetic construct
  misc_feature 1..19: note = siRNA antisense sequence
  source 1..19: mol_type = other RNA
attatggtcatcagatcaa

SEQ ID NO: 25074 - RNA, 19 nt, synthetic construct
  misc_feature 1..19: note = siRNA sense sequence
  source 1..19: mol_type = other RNA
tgatctgatgaccataatt

SEQ ID NO: 25075 - RNA, 19 nt, synthetic construct
  misc_feature 1..19: note = siRNA antisense sequence
  source 1..19: mol_type = other RNA
aattatggtcatcagatca

SEQ ID NO: 25076 - RNA, 19 nt, synthetic construct
  misc_feature 1..19: note = siRNA sense sequence
  source 1..19: mol_type = other RNA
gatctgatgaccataattt

SEQ ID NO: 25077 - RNA, 19 nt, synthetic construct
  misc_feature 1..19: note = siRNA antisense sequence
  source 1..19: mol_type = other RNA
aaattatggtcatcagatc

SEQ ID NO: 25078 - RNA, 19 nt, synthetic construct
  misc_feature 1..19: note = siRNA sense sequence
  source 1..19: mol_type = other RNA
ttgtttgatgagtttgaag

SEQ ID NO: 25079 - RNA, 19 nt, synthetic construct
  misc_feature 1..19: note = siRNA antisense sequence
  source 1..19: mol_type = other RNA
cttcaaactcatcaaacaa

SEQ ID NO: 25080 - RNA, 19 nt, synthetic construct
  misc_feature 1..19: note = siRNA sense sequence
  source 1..19: mol_type = other RNA
tgtttgatgagtttgaaga

SEQ ID NO: 25081 - RNA, 19 nt, synthetic construct
  misc_feature 1..19: note = siRNA antisense sequence
  source 1..19: mol_type = other RNA
tcttcaaactcatcaaaca

SEQ ID NO: 25082 - RNA, 19 nt, synthetic construct
  misc_feature 1..19: note = siRNA sense sequence
  source 1..19: mol_type = other RNA
ttgatgagtttgaagagga

SEQ ID NO: 25083 - RNA, 19 nt, synthetic construct
  misc_feature 1..19: note = siRNA antisense sequence
  source 1..19: mol_type = other RNA
tcctcttcaaactcatcaa

SEQ ID NO: 25084 - RNA, 19 nt, synthetic construct
  misc_feature 1..19: note = siRNA sense sequence
  source 1..19: mol_type = other RNA
gagtttgaagaggaagctt

SEQ ID NO: 25085 - RNA, 19 nt, synthetic construct
  misc_feature 1..19: note = siRNA antisense sequence
  source 1..19: mol_type = other RNA
aagcttcctcttcaaactc

SEQ ID NO: 25086 - RNA, 19 nt, synthetic construct
  misc_feature 1..19: note = siRNA sense sequence
  source 1..19: mol_type = other RNA
agtttgaagaggaagctta

SEQ ID NO: 25087 - RNA, 19 nt, synthetic construct
  misc_feature 1..19: note = siRNA antisense sequence
  source 1..19: mol_type = other RNA
taagcttcctcttcaaact

SEQ ID NO: 25088 - RNA, 19 nt, synthetic construct
  misc_feature 1..19: note = siRNA sense sequence
  source 1..19: mol_type = other RNA
gtttgaagaggaagcttaa

SEQ ID NO: 25089 - RNA, 19 nt, synthetic construct
  misc_feature 1..19: note = siRNA antisense sequence
  source 1..19: mol_type = other RNA
ttaagcttcctcttcaaac

SEQ ID NO: 25090 - RNA, 19 nt, synthetic construct
  misc_feature 1..19: note = siRNA sense sequence
  source 1..19: mol_type = other RNA
tttgaagaggaagcttaaa

SEQ ID NO: 25091 - RNA, 19 nt, synthetic construct
  misc_feature 1..19: note = siRNA antisense sequence
  source 1..19: mol_type = other RNA
tttaagcttcctcttcaaa

SEQ ID NO: 25092 - RNA, 19 nt, synthetic construct
  misc_feature 1..19: note = siRNA sense sequence
  source 1..19: mol_type = other RNA
ttgaagaggaagcttaaaa

SEQ ID NO: 25093 - RNA, 19 nt, synthetic construct
  misc_feature 1..19: note = siRNA antisense sequence
  source 1..19: mol_type = other RNA
ttttaagcttcctcttcaa

SEQ ID NO: 25094 - RNA, 19 nt, synthetic construct
  misc_feature 1..19: note = siRNA sense sequence
  source 1..19: mol_type = other RNA
tgaagaggaagcttaaaat

SEQ ID NO: 25095 - RNA, 19 nt, synthetic construct
  misc_feature 1..19: note = siRNA antisense sequence
  source 1..19: mol_type = other RNA
attttaagcttcctcttca

SEQ ID NO: 25096 - RNA, 19 nt, synthetic construct
  misc_feature 1..19: note = siRNA sense sequence
  source 1..19: mol_type = other RNA
gaagaggaagcttaaaata

SEQ ID NO: 25097 - RNA, 19 nt, synthetic construct
  misc_feature 1..19: note = siRNA antisense sequence
  source 1..19: mol_type = other RNA
tattttaagcttcctcttc

SEQ ID NO: 25098 - RNA, 19 nt, synthetic construct
  misc_feature 1..19: note = siRNA sense sequence
  source 1..19: mol_type = other RNA
aagaggaagcttaaaatac

SEQ ID NO: 25099 - RNA, 19 nt, synthetic construct
  misc_feature 1..19: note = siRNA antisense sequence
  source 1..19: mol_type = other RNA
gtattttaagcttcctctt

SEQ ID NO: 25100 - RNA, 19 nt, synthetic construct
  misc_feature 1..19: note = siRNA sense sequence
  source 1..19: mol_type = other RNA
agaggaagcttaaaataca

SEQ ID NO: 25101 - RNA, 19 nt, synthetic construct
  misc_feature 1..19: note = siRNA antisense sequence
  source 1..19: mol_type = other RNA
tgtattttaagcttcctct

SEQ ID NO: 25102 - RNA, 19 nt, synthetic construct
  misc_feature 1..19: note = siRNA sense sequence
  source 1..19: mol_type = other RNA
gaggaagcttaaaatacat

SEQ ID NO: 25103 - RNA, 19 nt, synthetic construct
  misc_feature 1..19: note = siRNA antisense sequence
  source 1..19: mol_type = other RNA
atgtattttaagcttcctc

SEQ ID NO: 25104 - RNA, 19 nt, synthetic construct
  misc_feature 1..19: note = siRNA sense sequence
  source 1..19: mol_type = other RNA
aatacatttcagtacatgg

SEQ ID NO: 25105 - RNA, 19 nt, synthetic construct
  misc_feature 1..19: note = siRNA antisense sequence
  source 1..19: mol_type = other RNA
ccatgtactgaaatgtatt

SEQ ID NO: 25106 - RNA, 19 nt, synthetic construct
  misc_feature 1..19: note = siRNA sense sequence
  source 1..19: mol_type = other RNA
atacatttcagtacatggc

SEQ ID NO: 25107 - RNA, 19 nt, synthetic construct
  misc_feature 1..19: note = siRNA antisense sequence
  source 1..19: mol_type = other RNA
gccatgtactgaaatgtat

SEQ ID NO: 25108 - RNA, 19 nt, synthetic construct
  misc_feature 1..19: note = siRNA sense sequence
  source 1..19: mol_type = other RNA
tacatttcagtacatggct

SEQ ID NO: 25109 - RNA, 19 nt, synthetic construct
  misc_feature 1..19: note = siRNA antisense sequence
  source 1..19: mol_type = other RNA
agccatgtactgaaatgta

SEQ ID NO: 25110 - RNA, 19 nt, synthetic construct
  misc_feature 1..19: note = siRNA sense sequence
  source 1..19: mol_type = other RNA
acatttcagtacatggctc

SEQ ID NO: 25111 - RNA, 19 nt, synthetic construct
  misc_feature 1..19: note = siRNA antisense sequence
  source 1..19: mol_type = other RNA
gagccatgtactgaaatgt

SEQ ID NO: 25112 - RNA, 19 nt, synthetic construct
  misc_feature 1..19: note = siRNA sense sequence
  source 1..19: mol_type = other RNA
catttcagtacatggctct

SEQ ID NO: 25113 - RNA, 19 nt, synthetic construct
  misc_feature 1..19: note = siRNA antisense sequence
  source 1..19: mol_type = other RNA
agagccatgtactgaaatg

SEQ ID NO: 25114 - RNA, 19 nt, synthetic construct
  misc_feature 1..19: note = siRNA sense sequence
  source 1..19: mol_type = other RNA
atttcagtacatggctctg

SEQ ID NO: 25115 - RNA, 19 nt, synthetic construct
  misc_feature 1..19: note = siRNA antisense sequence
  source 1..19: mol_type = other RNA
cagagccatgtactgaaat

SEQ ID NO: 25116 - RNA, 19 nt, synthetic construct
  misc_feature 1..19: note = siRNA sense sequence
  source 1..19: mol_type = other RNA
gtacatggctctgaatcac

SEQ ID NO: 25117 - RNA, 19 nt, synthetic construct
  misc_feature 1..19: note = siRNA antisense sequence
  source 1..19: mol_type = other RNA
gtgattcagagccatgtac

SEQ ID NO: 25118 - RNA, 19 nt, synthetic construct
  misc_feature 1..19: note = siRNA sense sequence
  source 1..19: mol_type = other RNA
tacatggctctgaatcact

SEQ ID NO: 25119 - RNA, 19 nt, synthetic construct
  misc_feature 1..19: note = siRNA antisense sequence
  source 1..19: mol_type = other RNA
agtgattcagagccatgta

SEQ ID NO: 25120 - RNA, 19 nt, synthetic construct
  misc_feature 1..19: note = siRNA sense sequence
  source 1..19: mol_type = other RNA
acatggctctgaatcactt

SEQ ID NO: 25121 - RNA, 19 nt, synthetic construct
  misc_feature 1..19: note = siRNA antisense sequence
  source 1..19: mol_type = other RNA
aagtgattcagagccatgt

SEQ ID NO: 25122 - RNA, 19 nt, synthetic construct
  misc_feature 1..19: note = siRNA sense sequence
  source 1..19: mol_type = other RNA
tggctctgaatcacttaaa

SEQ ID NO: 25123 - RNA, 19 nt, synthetic construct
  misc_feature 1..19: note = siRNA antisense sequence
  source 1..19: mol_type = other RNA
tttaagtgattcagagcca

SEQ ID NO: 25124 - RNA, 19 nt, synthetic construct
  misc_feature 1..19: note = siRNA sense sequence
  source 1..19: mol_type = other RNA
ggctctgaatcacttaaaa

SEQ ID NO: 25125 - RNA, 19 nt, synthetic construct
  misc_feature 1..19: note = siRNA antisense sequence
  source 1..19: mol_type = other RNA
ttttaagtgattcagagcc

SEQ ID NO: 25126 - RNA, 19 nt, synthetic construct
  misc_feature 1..19: note = siRNA sense sequence
  source 1..19: mol_type = other RNA
gctctgaatcacttaaaat

SEQ ID NO: 25127 - RNA, 19 nt, synthetic construct
  misc_feature 1..19: note = siRNA antisense sequence
  source 1..19: mol_type = other RNA
attttaagtgattcagagc

SEQ ID NO: 25128 - RNA, 19 nt, synthetic construct
  misc_feature 1..19: note = siRNA sense sequence
  source 1..19: mol_type = other RNA
ctctgaatcacttaaaatc

SEQ ID NO: 25129 - RNA, 19 nt, synthetic construct
  misc_feature 1..19: note = siRNA antisense sequence
  source 1..19: mol_type = other RNA
gattttaagtgattcagag

SEQ ID NO: 25130 - RNA, 19 nt, synthetic construct
  misc_feature 1..19: note = siRNA sense sequence
  source 1..19: mol_type = other RNA
aatcataagaggttaaagc

SEQ ID NO: 25131 - RNA, 19 nt, synthetic construct
  misc_feature 1..19: note = siRNA antisense sequence
  source 1..19: mol_type = other RNA
gctttaacctcttatgatt

SEQ ID NO: 25132 - RNA, 19 nt, synthetic construct
  misc_feature 1..19: note = siRNA sense sequence
  source 1..19: mol_type = other RNA
ataagaggttaaagctgta

SEQ ID NO: 25133 - RNA, 19 nt, synthetic construct
  misc_feature 1..19: note = siRNA antisense sequence
  source 1..19: mol_type = other RNA
tacagctttaacctcttat

SEQ ID NO: 25134 - RNA, 19 nt, synthetic construct
  misc_feature 1..19: note = siRNA sense sequence
  source 1..19: mol_type = other RNA
taagaggttaaagctgtaa

SEQ ID NO: 25135 - RNA, 19 nt, synthetic construct
  misc_feature 1..19: note = siRNA antisense sequence
  source 1..19: mol_type = other RNA
ttacagctttaacctctta

SEQ ID NO: 25136 - RNA, 19 nt, synthetic construct
  misc_feature 1..19: note = siRNA sense sequence
  source 1..19: mol_type = other RNA
aagaggttaaagctgtaag

SEQ ID NO: 25137 - RNA, 19 nt, synthetic construct
  misc_feature 1..19: note = siRNA antisense sequence
  source 1..19: mol_type = other RNA
cttacagctttaacctctt

SEQ ID NO: 25138 - RNA, 19 nt, synthetic construct
  misc_feature 1..19: note = siRNA sense sequence
  source 1..19: mol_type = other RNA
agaggttaaagctgtaagg

SEQ ID NO: 25139 - RNA, 19 nt, synthetic construct
  misc_feature 1..19: note = siRNA antisense sequence
  source 1..19: mol_type = other RNA
ccttacagctttaacctct

SEQ ID NO: 25140 - RNA, 19 nt, synthetic construct
  misc_feature 1..19: note = siRNA sense sequence
  source 1..19: mol_type = other RNA
gaggttaaagctgtaagga

SEQ ID NO: 25141 - RNA, 19 nt, synthetic construct
  misc_feature 1..19: note = siRNA antisense sequence
  source 1..19: mol_type = other RNA
tccttacagctttaacctc

SEQ ID NO: 25142 - RNA, 19 nt, synthetic construct
  misc_feature 1..19: note = siRNA sense sequence
  source 1..19: mol_type = other RNA
actttatatatcatcggac

SEQ ID NO: 25143 - RNA, 19 nt, synthetic construct
  misc_feature 1..19: note = siRNA antisense sequence
  source 1..19: mol_type = other RNA
gtccgatgatatataaagt

SEQ ID NO: 25144 - RNA, 19 nt, synthetic construct
  misc_feature 1..19: note = siRNA sense sequence
  source 1..19: mol_type = other RNA
ctttatatatcatcggacc

SEQ ID NO: 25145 - RNA, 19 nt, synthetic construct
  misc_feature 1..19: note = siRNA antisense sequence
  source 1..19: mol_type = other RNA
ggtccgatgatatataaag

SEQ ID NO: 25146 - RNA, 19 nt, synthetic construct
  misc_feature 1..19: note = siRNA sense sequence
  source 1..19: mol_type = other RNA
tttatatatcatcggacct

SEQ ID NO: 25147 - RNA, 19 nt, synthetic construct
  misc_feature 1..19: note = siRNA antisense sequence
  source 1..19: mol_type = other RNA
aggtccgatgatatataaa

SEQ ID NO: 25148 - RNA, 19 nt, synthetic construct
  misc_feature 1..19: note = siRNA sense sequence
  source 1..19: mol_type = other RNA
ttatatatcatcggaccta

SEQ ID NO: 25149 - RNA, 19 nt, synthetic construct
  misc_feature 1..19: note = siRNA antisense sequence
  source 1..19: mol_type = other RNA
taggtccgatgatatataa

SEQ ID NO: 25150 - RNA, 19 nt, synthetic construct
  misc_feature 1..19: note = siRNA sense sequence
  source 1..19: mol_type = other RNA
tatatatcatcggacctag

SEQ ID NO: 25151 - RNA, 19 nt, synthetic construct
  misc_feature 1..19: note = siRNA antisense sequence
  source 1..19: mol_type = other RNA
ctaggtccgatgatatata

SEQ ID NO: 25152 - RNA, 19 nt, synthetic construct
  misc_feature 1..19: note = siRNA sense sequence
  source 1..19: mol_type = other RNA
atatatcatcggacctagt

SEQ ID NO: 25153 - RNA, 19 nt, synthetic construct
  misc_feature 1..19: note = siRNA antisense sequence
  source 1..19: mol_type = other RNA
actaggtccgatgatatat

SEQ ID NO: 25154 - RNA, 19 nt, synthetic construct
  misc_feature 1..19: note = siRNA sense sequence
  source 1..19: mol_type = other RNA
atcatcggacctagttcct

SEQ ID NO: 25155 - RNA, 19 nt, synthetic construct
  misc_feature 1..19: note = siRNA antisense sequence
  source 1..19: mol_type = other RNA
aggaactaggtccgatgat

SEQ ID NO: 25156 - RNA, 19 nt, synthetic construct
  misc_feature 1..19: note = siRNA sense sequence
  source 1..19: mol_type = other RNA
tcatcggacctagttcctt

SEQ ID NO: 25157 - RNA, 19 nt, synthetic construct
  misc_feature 1..19: note = siRNA antisense sequence
  source 1..19: mol_type = other RNA
aaggaactaggtccgatga

SEQ ID NO: 25158 - RNA, 19 nt, synthetic construct
  misc_feature 1..19: note = siRNA sense sequence
  source 1..19: mol_type = other RNA
catcggacctagttccttc

SEQ ID NO: 25159 - RNA, 19 nt, synthetic construct
  misc_feature 1..19: note = siRNA antisense sequence
  source 1..19: mol_type = other RNA
gaaggaactaggtccgatg

SEQ ID NO: 25160 - RNA, 19 nt, synthetic construct
  misc_feature 1..19: note = siRNA sense sequence
  source 1..19: mol_type = other RNA
atcggacctagttccttca

SEQ ID NO: 25161 - RNA, 19 nt, synthetic construct
  misc_feature 1..19: note = siRNA antisense sequence
  source 1..19: mol_type = other RNA
tgaaggaactaggtccgat

SEQ ID NO: 25162 - RNA, 19 nt, synthetic construct
  misc_feature 1..19: note = siRNA sense sequence
  source 1..19: mol_type = other RNA
tcggacctagttccttcat

SEQ ID NO: 25163 - RNA, 19 nt, synthetic construct
  misc_feature 1..19: note = siRNA antisense sequence
  source 1..19: mol_type = other RNA
atgaaggaactaggtccga

SEQ ID NO: 25164 - RNA, 19 nt, synthetic construct
  misc_feature 1..19: note = siRNA sense sequence
  source 1..19: mol_type = other RNA
cggacctagttccttcatg

SEQ ID NO: 25165 - RNA, 19 nt, synthetic construct
  misc_feature 1..19: note = siRNA antisense sequence
  source 1..19: mol_type = other RNA
catgaaggaactaggtccg

SEQ ID NO: 25166 - RNA, 19 nt, synthetic construct
  misc_feature 1..19: note = siRNA sense sequence
  source 1..19: mol_type = other RNA
ggacctagttccttcatgt

SEQ ID NO: 25167 - RNA, 19 nt, synthetic construct
  misc_feature 1..19: note = siRNA antisense sequence
  source 1..19: mol_type = other RNA
acatgaaggaactaggtcc

SEQ ID NO: 25168 - RNA, 19 nt, synthetic construct
  misc_feature 1..19: note = siRNA sense sequence
  source 1..19: mol_type = other RNA
agttccttcatgttacaga

SEQ ID NO: 25169 - RNA, 19 nt, synthetic construct
  misc_feature 1..19: note = siRNA antisense sequence
  source 1..19: mol_type = other RNA
tctgtaacatgaaggaact

SEQ ID NO: 25170 - RNA, 19 nt, synthetic construct
  misc_feature 1..19: note = siRNA sense sequence
  source 1..19: mol_type = other RNA
ccttcatgttacagattta

SEQ ID NO: 25171 - RNA, 19 nt, synthetic construct
  misc_feature 1..19: note = siRNA antisense sequence
  source 1..19: mol_type = other RNA
taaatctgtaacatgaagg

SEQ ID NO: 25172 - RNA, 19 nt, synthetic construct
  misc_feature 1..19: note = siRNA sense sequence
  source 1..19: mol_type = other RNA
atgttacagatttaagcca

SEQ ID NO: 25173 - RNA, 19 nt, synthetic construct
  misc_feature 1..19: note = siRNA antisense sequence
  source 1..19: mol_type = other RNA
tggcttaaatctgtaacat

SEQ ID NO: 25174 - RNA, 19 nt, synthetic construct
  misc_feature 1..19: note = siRNA sense sequence
  source 1..19: mol_type = other RNA
cagatttaagccagcccag

SEQ ID NO: 25175 - RNA, 19 nt, synthetic construct
  misc_feature 1..19: note = siRNA antisense sequence
  source 1..19: mol_type = other RNA
ctgggctggcttaaatctg

SEQ ID NO: 25176 - RNA, 19 nt, synthetic construct
  misc_feature 1..19: note = siRNA sense sequence
  source 1..19: mol_type = other RNA
agatttaagccagcccaga

SEQ ID NO: 25177 - RNA, 19 nt, synthetic construct
  misc_feature 1..19: note = siRNA antisense sequence
  source 1..19: mol_type = other RNA
tctgggctggcttaaatct

SEQ ID NO: 25178 - RNA, 19 nt, synthetic construct
  misc_feature 1..19: note = siRNA sense sequence
  source 1..19: mol_type = other RNA
agagggttggtaacttgct

SEQ ID NO: 25179 - RNA, 19 nt, synthetic construct
  misc_feature 1..19: note = siRNA antisense sequence
  source 1..19: mol_type = other RNA
agcaagttaccaaccctct

SEQ ID NO: 25180 - RNA, 19 nt, synthetic construct
  misc_feature 1..19: note = siRNA sense sequence
  source 1..19: mol_type = other RNA
gagggttggtaacttgctc

SEQ ID NO: 25181 - RNA, 19 nt, synthetic construct
  misc_feature 1..19: note = siRNA antisense sequence
  source 1..19: mol_type = other RNA
gagcaagttaccaaccctc

SEQ ID NO: 25182 - RNA, 19 nt, synthetic construct
  misc_feature 1..19: note = siRNA sense sequence
  source 1..19: mol_type = other RNA
agggttggtaacttgctca

SEQ ID NO: 25183 - RNA, 19 nt, synthetic construct
  misc_feature 1..19: note = siRNA antisense sequence
  source 1..19: mol_type = other RNA
tgagcaagttaccaaccct

SEQ ID NO: 25184 - RNA, 19 nt, synthetic construct
  misc_feature 1..19: note = siRNA sense sequence
  source 1..19: mol_type = other RNA
agggtccacattcctgttt

SEQ ID NO: 25185 - RNA, 19 nt, synthetic construct
  misc_feature 1..19: note = siRNA antisense sequence
  source 1..19: mol_type = other RNA
aaacaggaatgtggaccct

SEQ ID NO: 25186 - RNA, 19 nt, synthetic construct
  misc_feature 1..19: note = siRNA sense sequence
  source 1..19: mol_type = other RNA
ggtccacattcctgtttga

SEQ ID NO: 25187 - RNA, 19 nt, synthetic construct
  misc_feature 1..19: note = siRNA antisense sequence
  source 1..19: mol_type = other RNA
tcaaacaggaatgtggacc

SEQ ID NO: 25188 - RNA, 19 nt, synthetic construct
  misc_feature 1..19: note = siRNA sense sequence
  source 1..19: mol_type = other RNA
gtccacattcctgtttgat

SEQ ID NO: 25189 - RNA, 19 nt, synthetic construct
  misc_feature 1..19: note = siRNA antisense sequence
  source 1..19: mol_type = other RNA
atcaaacaggaatgtggac

SEQ ID NO: 25190 - RNA, 19 nt, synthetic construct
  misc_feature 1..19: note = siRNA sense sequence
  source 1..19: mol_type = other RNA
tccacattcctgtttgata

SEQ ID NO: 25191 - RNA, 19 nt, synthetic construct
  misc_feature 1..19: note = siRNA antisense sequence
  source 1..19: mol_type = other RNA
tatcaaacaggaatgtgga

SEQ ID NO: 25192 - RNA, 19 nt, synthetic construct
  misc_feature 1..19: note = siRNA sense sequence
  source 1..19: mol_type = other RNA
cattcctgtttgatatatc

SEQ ID NO: 25193 - RNA, 19 nt, synthetic construct
  misc_feature 1..19: note = siRNA antisense sequence
  source 1..19: mol_type = other RNA
gatatatcaaacaggaatg

SEQ ID NO: 25194 - RNA, 19 nt, synthetic construct
  misc_feature 1..19: note = siRNA sense sequence
  source 1..19: mol_type = other RNA
ttcctgtttgatatatctg

SEQ ID NO: 25195 - RNA, 19 nt, synthetic construct
  misc_feature 1..19: note = siRNA antisense sequence
  source 1..19: mol_type = other RNA
cagatatatcaaacaggaa

SEQ ID NO: 25196 - RNA, 19 nt, synthetic construct
  misc_feature 1..19: note = siRNA sense sequence
  source 1..19: mol_type = other RNA
cctgtttgatatatctgat

SEQ ID NO: 25197 - RNA, 19 nt, synthetic construct
  misc_feature 1..19: note = siRNA antisense sequence
  source 1..19: mol_type = other RNA
atcagatatatcaaacagg

SEQ ID NO: 25198 - RNA, 19 nt, synthetic construct
  misc_feature 1..19: note = siRNA sense sequence
  source 1..19: mol_type = other RNA
gatatatctgattccaatg

SEQ ID NO: 25199 - RNA, 19 nt, synthetic construct
  misc_feature 1..19: note = siRNA antisense sequence
  source 1..19: mol_type = other RNA
cattggaatcagatatatc

SEQ ID NO: 25200 - RNA, 19 nt, synthetic construct
  misc_feature 1..19: note = siRNA sense sequence
  source 1..19: mol_type = other RNA
tatatctgattccaatgtc

SEQ ID NO: 25201 - RNA, 19 nt, synthetic construct
  misc_feature 1..19: note = siRNA antisense sequence
  source 1..19: mol_type = other RNA
gacattggaatcagatata

SEQ ID NO: 25202 - RNA, 19 nt, synthetic construct
  misc_feature 1..19: note = siRNA sense sequence
  source 1..19: mol_type = other RNA
atatctgattccaatgtca

SEQ ID NO: 25203 - RNA, 19 nt, synthetic construct
  misc_feature 1..19: note = siRNA antisense sequence
  source 1..19: mol_type = other RNA
tgacattggaatcagatat

SEQ ID NO: 25204 - RNA, 19 nt, synthetic construct
  misc_feature 1..19: note = siRNA sense sequence
  source 1..19: mol_type = other RNA
ctgattccaatgtcaccta

SEQ ID NO: 25205 - RNA, 19 nt, synthetic construct
  misc_feature 1..19: note = siRNA antisense sequence
  source 1..19: mol_type = other RNA
taggtgacattggaatcag

SEQ ID NO: 25206 - RNA, 19 nt, synthetic construct
  misc_feature 1..19: note = siRNA sense sequence
  source 1..19: mol_type = other RNA
tcacctattcatattgagt

SEQ ID NO: 25207 - RNA, 19 nt, synthetic construct
  misc_feature 1..19: note = siRNA antisense sequence
  source 1..19: mol_type = other RNA
actcaatatgaataggtga

SEQ ID NO: 25208 - RNA, 19 nt, synthetic construct
  misc_feature 1..19: note = siRNA sense sequence
  source 1..19: mol_type = other RNA
cacctattcatattgagtc

SEQ ID NO: 25209 - RNA, 19 nt, synthetic construct
  misc_feature 1..19: note = siRNA antisense sequence
  source 1..19: mol_type = other RNA
gactcaatatgaataggtg

SEQ ID NO: 25210 - RNA, 19 nt, synthetic construct
  misc_feature 1..19: note = siRNA sense sequence
  source 1..19: mol_type = other RNA
acctattcatattgagtca

SEQ ID NO: 25211 - RNA, 19 nt, synthetic construct
  misc_feature 1..19: note = siRNA antisense sequence
  source 1..19: mol_type = other RNA
tgactcaatatgaataggt

SEQ ID NO: 25212 - RNA, 19 nt, synthetic construct
  misc_feature 1..19: note = siRNA sense sequence
  source 1..19: mol_type = other RNA
cctattcatattgagtcat

SEQ ID NO: 25213 - RNA, 19 nt, synthetic construct
  misc_feature 1..19: note = siRNA antisense sequence
  source 1..19: mol_type = other RNA
atgactcaatatgaatagg

SEQ ID NO: 25214 - RNA, 19 nt, synthetic construct
  misc_feature 1..19: note = siRNA sense sequence
  source 1..19: mol_type = other RNA
ttcatattgagtcatttgg

SEQ ID NO: 25215 - RNA, 19 nt, synthetic construct
  misc_feature 1..19: note = siRNA antisense sequence
  source 1..19: mol_type = other RNA
ccaaatgactcaatatgaa

SEQ ID NO: 25216 - RNA, 19 nt, synthetic construct
  misc_feature 1..19: note = siRNA sense sequence
  source 1..19: mol_type = other RNA
tcatattgagtcatttggg

SEQ ID NO: 25217 - RNA, 19 nt, synthetic construct
  misc_feature 1..19: note = siRNA antisense sequence
  source 1..19: mol_type = other RNA
cccaaatgactcaatatga

SEQ ID NO: 25218 - RNA, 19 nt, synthetic construct
  misc_feature 1..19: note = siRNA sense sequence
  source 1..19: mol_type = other RNA
aaccctccttatttatcaa

SEQ ID NO: 25219 - RNA, 19 nt, synthetic construct
  misc_feature 1..19: note = siRNA antisense sequence
  source 1..19: mol_type = other RNA
ttgataaataaggagggtt

SEQ ID NO: 25220 - RNA, 19 nt, synthetic construct
  misc_feature 1..19: note = siRNA sense sequence
  source 1..19: mol_type = other RNA
accctccttatttatcaaa

SEQ ID NO: 25221 - RNA, 19 nt, synthetic construct
  misc_feature 1..19: note = siRNA antisense sequence
  source 1..19: mol_type = other RNA
tttgataaataaggagggt

SEQ ID NO: 25222 - RNA, 19 nt, synthetic construct
  misc_feature 1..19: note = siRNA sense sequence
  source 1..19: mol_type = other RNA
ttttctctgagcagcattg

SEQ ID NO: 25223 - RNA, 19 nt, synthetic construct
  misc_feature 1..19: note = siRNA antisense sequence
  source 1..19: mol_type = other RNA
caatgctgctcagagaaaa

SEQ ID NO: 25224 - RNA, 19 nt, synthetic construct
  misc_feature 1..19: note = siRNA sense sequence
  source 1..19: mol_type = other RNA
cagttttgaagtcttgttc

SEQ ID NO: 25225 - RNA, 19 nt, synthetic construct
  misc_feature 1..19: note = siRNA antisense sequence
  source 1..19: mol_type = other RNA
gaacaagacttcaaaactg

SEQ ID NO: 25226 - RNA, 19 nt, synthetic construct
  misc_feature 1..19: note = siRNA sense sequence
  source 1..19: mol_type = other RNA
gaggagtatttatatttcc

SEQ ID NO: 25227 - RNA, 19 nt, synthetic construct
  misc_feature 1..19: note = siRNA antisense sequence
  source 1..19: mol_type = other RNA
ggaaatataaatactcctc

SEQ ID NO: 25228 - RNA, 19 nt, synthetic construct
  misc_feature 1..19: note = siRNA sense sequence
  source 1..19: mol_type = other RNA
actatgtgacagggactct

SEQ ID NO: 25229 - RNA, 19 nt, synthetic construct
  misc_feature 1..19: note = siRNA antisense sequence
  source 1..19: mol_type = other RNA
agagtccctgtcacatagt

SEQ ID NO: 25230 - RNA, 19 nt, synthetic construct
  misc_feature 1..19: note = siRNA sense sequence
  source 1..19: mol_type = other RNA
ctatgtgacagggactcta

SEQ ID NO: 25231 - RNA, 19 nt, synthetic construct
  misc_feature 1..19: note = siRNA antisense sequence
  source 1..19: mol_type = other RNA
tagagtccctgtcacatag

SEQ ID NO: 25232 - RNA, 19 nt, synthetic construct
  misc_feature 1..19: note = siRNA sense sequence
  source 1..19: mol_type = other RNA
tatgtgacagggactctaa

SEQ ID NO: 25233 - RNA, 19 nt, synthetic construct
  misc_feature 1..19: note = siRNA antisense sequence
  source 1..19: mol_type = other RNA
ttagagtccctgtcacata

SEQ ID NO: 25234 - RNA, 19 nt, synthetic construct
  misc_feature 1..19: note = siRNA sense sequence
  source 1..19: mol_type = other RNA
atgtgacagggactctaat

SEQ ID NO: 25235 - RNA, 19 nt, synthetic construct
  misc_feature 1..19: note = siRNA antisense sequence
  source 1..19: mol_type = other RNA
attagagtccctgtcacat

SEQ ID NO: 25236 - RNA, 19 nt, synthetic construct
  misc_feature 1..19: note = siRNA sense sequence
  source 1..19: mol_type = other RNA
tgtgacagggactctaata

SEQ ID NO: 25237 - RNA, 19 nt, synthetic construct
  misc_feature 1..19: note = siRNA antisense sequence
  source 1..19: mol_type = other RNA
tattagagtccctgtcaca

SEQ ID NO: 25238 - RNA, 19 nt, synthetic construct
  misc_feature 1..19: note = siRNA sense sequence
  source 1..19: mol_type = other RNA
gtgacagggactctaatag

SEQ ID NO: 25239 - RNA, 19 nt, synthetic construct
  misc_feature 1..19: note = siRNA antisense sequence
  source 1..19: mol_type = other RNA
ctattagagtccctgtcac

SEQ ID NO: 25240 - RNA, 19 nt, synthetic construct
  misc_feature 1..19: note = siRNA sense sequence
  source 1..19: mol_type = other RNA
tgacagggactctaatagc

SEQ ID NO: 25241 - RNA, 19 nt, synthetic construct
  misc_feature 1..19: note = siRNA antisense sequence
  source 1..19: mol_type = other RNA
gctattagagtccctgtca

SEQ ID NO: 25242 - RNA, 19 nt, synthetic construct
  misc_feature 1..19: note = siRNA sense sequence
  source 1..19: mol_type = other RNA
gacagggactctaatagcc

SEQ ID NO: 25243 - RNA, 19 nt, synthetic construct
  misc_feature 1..19: note = siRNA antisense sequence
  source 1..19: mol_type = other RNA
ggctattagagtccctgtc

SEQ ID NO: 25244 - RNA, 19 nt, synthetic construct
  misc_feature 1..19: note = siRNA sense sequence
  source 1..19: mol_type = other RNA
acagggactctaatagccc

SEQ ID NO: 25245 - RNA, 19 nt, synthetic construct
  misc_feature 1..19: note = siRNA antisense sequence
  source 1..19: mol_type = other RNA
gggctattagagtccctgt

SEQ ID NO: 25246 - RNA, 19 nt, synthetic construct
  misc_feature 1..19: note = siRNA sense sequence
  source 1..19: mol_type = other RNA
cccagtgatcagaagtaaa

SEQ ID NO: 25247 - RNA, 19 nt, synthetic construct
  misc_feature 1..19: note = siRNA antisense sequence
  source 1..19: mol_type = other RNA
tttacttctgatcactggg

SEQ ID NO: 25248 - RNA, 19 nt, synthetic construct
  misc_feature 1..19: note = siRNA sense sequence
  source 1..19: mol_type = other RNA
ccagtgatcagaagtaaag

SEQ ID NO: 25249 - RNA, 19 nt, synthetic construct
  misc_feature 1..19: note = siRNA antisense sequence
  source 1..19: mol_type = other RNA
ctttacttctgatcactgg

SEQ ID NO: 25250 - RNA, 19 nt, synthetic construct
  misc_feature 1..19: note = siRNA sense sequence
  source 1..19: mol_type = other RNA
gatcacagtctcttccttg

SEQ ID NO: 25251 - RNA, 19 nt, synthetic construct
  misc_feature 1..19: note = siRNA antisense sequence
  source 1..19: mol_type = other RNA
caaggaagagactgtgatc

SEQ ID NO: 25252 - RNA, 19 nt, synthetic construct
  misc_feature 1..19: note = siRNA sense sequence
  source 1..19: mol_type = other RNA
acagtctcttccttgcaaa

SEQ ID NO: 25253 - RNA, 19 nt, synthetic construct
  misc_feature 1..19: note = siRNA antisense sequence
  source 1..19: mol_type = other RNA
tttgcaaggaagagactgt

SEQ ID NO: 25254 - RNA, 19 nt, synthetic construct
  misc_feature 1..19: note = siRNA sense sequence
  source 1..19: mol_type = other RNA
cagtctcttccttgcaaaa

SEQ ID NO: 25255 - RNA, 19 nt, synthetic construct
  misc_feature 1..19: note = siRNA antisense sequence
  source 1..19: mol_type = other RNA
ttttgcaaggaagagactg

SEQ ID NO: 25256 - RNA, 19 nt, synthetic construct
  misc_feature 1..19: note = siRNA sense sequence
  source 1..19: mol_type = other RNA
gaatggtaaagcagtagta

SEQ ID NO: 25257 - RNA, 19 nt, synthetic construct
  misc_feature 1..19: note = siRNA antisense sequence
  source 1..19: mol_type = other RNA
tactactgctttaccattc

SEQ ID NO: 25258 - RNA, 19 nt, synthetic construct
  misc_feature 1..19: note = siRNA sense sequence
  source 1..19: mol_type = other RNA
aatggtaaagcagtagtaa

SEQ ID NO: 25259 - RNA, 19 nt, synthetic construct
  misc_feature 1..19: note = siRNA antisense sequence
  source 1..19: mol_type = other RNA
ttactactgctttaccatt

SEQ ID NO: 25260 - RNA, 19 nt, synthetic construct
  misc_feature 1..19: note = siRNA sense sequence
  source 1..19: mol_type = other RNA
atggtaaagcagtagtaat

SEQ ID NO: 25261 - RNA, 19 nt, synthetic construct
  misc_feature 1..19: note = siRNA antisense sequence
  source 1..19: mol_type = other RNA
attactactgctttaccat

SEQ ID NO: 25262 - RNA, 19 nt, synthetic construct
  misc_feature 1..19: note = siRNA sense sequence
  source 1..19: mol_type = other RNA
tggtaaagcagtagtaata

SEQ ID NO: 25263 - RNA, 19 nt, synthetic construct
  misc_feature 1..19: note = siRNA antisense sequence
  source 1..19: mol_type = other RNA
tattactactgctttacca

SEQ ID NO: 25264 - RNA, 19 nt, synthetic construct
  misc_feature 1..19: note = siRNA sense sequence
  source 1..19: mol_type = other RNA
ggtaaagcagtagtaatag

SEQ ID NO: 25265 - RNA, 19 nt, synthetic construct
  misc_feature 1..19: note = siRNA antisense sequence
  source 1..19: mol_type = other RNA
ctattactactgctttacc

SEQ ID NO: 25266 - RNA, 19 nt, synthetic construct
  misc_feature 1..19: note = siRNA sense sequence
  source 1..19: mol_type = other RNA
gtaaagcagtagtaatagc

SEQ ID NO: 25267 - RNA, 19 nt, synthetic construct
  misc_feature 1..19: note = siRNA antisense sequence
  source 1..19: mol_type = other RNA
gctattactactgctttac

SEQ ID NO: 25268 - RNA, 19 nt, synthetic construct
  misc_feature 1..19: note = siRNA sense sequence
  source 1..19: mol_type = other RNA
taaagcagtagtaatagca

SEQ ID NO: 25269 - RNA, 19 nt, synthetic construct
  misc_feature 1..19: note = siRNA antisense sequence
  source 1..19: mol_type = other RNA
tgctattactactgcttta

SEQ ID NO: 25270 - RNA, 19 nt, synthetic construct
  misc_feature 1..19: note = siRNA sense sequence
  source 1..19: mol_type = other RNA
aagcagtagtaatagcagt

SEQ ID NO: 25271 - RNA, 19 nt, synthetic construct
  misc_feature 1..19: note = siRNA antisense sequence
  source 1..19: mol_type = other RNA
actgctattactactgctt

SEQ ID NO: 25272 - RNA, 19 nt, synthetic construct
  misc_feature 1..19: note = siRNA sense sequence
  source 1..19: mol_type = other RNA
gtaatagcagtgcaatctg

SEQ ID NO: 25273 - RNA, 19 nt, synthetic construct
  misc_feature 1..19: note = siRNA antisense sequence
  source 1..19: mol_type = other RNA
cagattgcactgctattac

SEQ ID NO: 25274 - RNA, 19 nt, synthetic construct
  misc_feature 1..19: note = siRNA sense sequence
  source 1..19: mol_type = other RNA
gggagctcagagggctaac

SEQ ID NO: 25275 - RNA, 19 nt, synthetic construct
  misc_feature 1..19: note = siRNA antisense sequence
  source 1..19: mol_type = other RNA
gttagccctctgagctccc

SEQ ID NO: 25276 - RNA, 19 nt, synthetic construct
  misc_feature 1..19: note = siRNA sense sequence
  source 1..19: mol_type = other RNA
ggagctcagagggctaact

SEQ ID NO: 25277 - RNA, 19 nt, synthetic construct
  misc_feature 1..19: note = siRNA antisense sequence
  source 1..19: mol_type = other RNA
agttagccctctgagctcc

SEQ ID NO: 25278 - RNA, 19 nt, synthetic construct
  misc_feature 1..19: note = siRNA sense sequence
  source 1..19: mol_type = other RNA
gagctcagagggctaactc

SEQ ID NO: 25279 - RNA, 19 nt, synthetic construct
  misc_feature 1..19: note = siRNA antisense sequence
  source 1..19: mol_type = other RNA
gagttagccctctgagctc

SEQ ID NO: 25280 - RNA, 19 nt, synthetic construct
  misc_feature 1..19: note = siRNA sense sequence
  source 1..19: mol_type = other RNA
agctcagagggctaactca

SEQ ID NO: 25281 - RNA, 19 nt, synthetic construct
  misc_feature 1..19: note = siRNA antisense sequence
  source 1..19: mol_type = other RNA
tgagttagccctctgagct

SEQ ID NO: 25282 - RNA, 19 nt, synthetic construct
  misc_feature 1..19: note = siRNA sense sequence
  source 1..19: mol_type = other RNA
gctaactcagcctggcttt

SEQ ID NO: 25283 - RNA, 19 nt, synthetic construct
  misc_feature 1..19: note = siRNA antisense sequence
  source 1..19: mol_type = other RNA
aaagccaggctgagttagc

SEQ ID NO: 25284 - RNA, 19 nt, synthetic construct
  misc_feature 1..19: note = siRNA sense sequence
  source 1..19: mol_type = other RNA
actcagcctggctttagtg

SEQ ID NO: 25285 - RNA, 19 nt, synthetic construct
  misc_feature 1..19: note = siRNA antisense sequence
  source 1..19: mol_type = other RNA
cactaaagccaggctgagt

SEQ ID NO: 25286 - RNA, 19 nt, synthetic construct
  misc_feature 1..19: note = siRNA sense sequence
  source 1..19: mol_type = other RNA
ctcagcctggctttagtga

SEQ ID NO: 25287 - RNA, 19 nt, synthetic construct
  misc_feature 1..19: note = siRNA antisense sequence
  source 1..19: mol_type = other RNA
tcactaaagccaggctgag

SEQ ID NO: 25288 - RNA, 19 nt, synthetic construct
  misc_feature 1..19: note = siRNA sense sequence
  source 1..19: mol_type = other RNA
tcagcctggctttagtgag

SEQ ID NO: 25289 - RNA, 19 nt, synthetic construct
  misc_feature 1..19: note = siRNA antisense sequence
  source 1..19: mol_type = other RNA
ctcactaaagccaggctga

SEQ ID NO: 25290 - RNA, 19 nt, synthetic construct
  misc_feature 1..19: note = siRNA sense sequence
  source 1..19: mol_type = other RNA
cagcctggctttagtgagg

SEQ ID NO: 25291 - RNA, 19 nt, synthetic construct
  misc_feature 1..19: note = siRNA antisense sequence
  source 1..19: mol_type = other RNA
cctcactaaagccaggctg

SEQ ID NO: 25292 - RNA, 19 nt, synthetic construct
  misc_feature 1..19: note = siRNA sense sequence
  source 1..19: mol_type = other RNA
gcctggctttagtgaggag

SEQ ID NO: 25293 - RNA, 19 nt, synthetic construct
  misc_feature 1..19: note = siRNA antisense sequence
  source 1..19: mol_type = other RNA
ctcctcactaaagccaggc

SEQ ID NO: 25294 - RNA, 19 nt, synthetic construct
  misc_feature 1..19: note = siRNA sense sequence
  source 1..19: mol_type = other RNA
cctggctttagtgaggagg

SEQ ID NO: 25295 - RNA, 19 nt, synthetic construct
  misc_feature 1..19: note = siRNA antisense sequence
  source 1..19: mol_type = other RNA
cctcctcactaaagccagg

SEQ ID NO: 25296 - RNA, 19 nt, synthetic construct
  misc_feature 1..19: note = siRNA sense sequence
  source 1..19: mol_type = other RNA
ctggctttagtgaggaggt

SEQ ID NO: 25297 - RNA, 19 nt, synthetic construct
  misc_feature 1..19: note = siRNA antisense sequence
  source 1..19: mol_type = other RNA
acctcctcactaaagccag

SEQ ID NO: 25298 - RNA, 19 nt, synthetic construct
  misc_feature 1..19: note = siRNA sense sequence
  source 1..19: mol_type = other RNA
tggctttagtgaggaggta

SEQ ID NO: 25299 - RNA, 19 nt, synthetic construct
  misc_feature 1..19: note = siRNA antisense sequence
  source 1..19: mol_type = other RNA
tacctcctcactaaagcca

SEQ ID NO: 25300 - RNA, 19 nt, synthetic construct
  misc_feature 1..19: note = siRNA sense sequence
  source 1..19: mol_type = other RNA
tttagtgaggaggtattcc

SEQ ID NO: 25301 - RNA, 19 nt, synthetic construct
  misc_feature 1..19: note = siRNA antisense sequence
  source 1..19: mol_type = other RNA
ggaatacctcctcactaaa

SEQ ID NO: 25302 - RNA, 19 nt, synthetic construct
  misc_feature 1..19: note = siRNA sense sequence
  source 1..19: mol_type = other RNA
ttagtgaggaggtattccc

SEQ ID NO: 25303 - RNA, 19 nt, synthetic construct
  misc_feature 1..19: note = siRNA antisense sequence
  source 1..19: mol_type = other RNA
gggaatacctcctcactaa

SEQ ID NO: 25304 - RNA, 19 nt, synthetic construct
  misc_feature 1..19: note = siRNA sense sequence
  source 1..19: mol_type = other RNA
tagtgaggaggtattccca

SEQ ID NO: 25305 - RNA, 19 nt, synthetic construct
  misc_feature 1..19: note = siRNA antisense sequence
  source 1..19: mol_type = other RNA
tgggaatacctcctcacta

SEQ ID NO: 25306 - RNA, 19 nt, synthetic construct
  misc_feature 1..19: note = siRNA sense sequence
  source 1..19: mol_type = other RNA
ggaggtattcccagagttt

SEQ ID NO: 25307 - RNA, 19 nt, synthetic construct
  misc_feature 1..19: note = siRNA antisense sequence
  source 1..19: mol_type = other RNA
aaactctgggaatacctcc

SEQ ID NO: 25308 - RNA, 19 nt, synthetic construct
  misc_feature 1..19: note = siRNA sense sequence
  source 1..19: mol_type = other RNA
gaggtattcccagagttta

SEQ ID NO: 25309 - RNA, 19 nt, synthetic construct
  misc_feature 1..19: note = siRNA antisense sequence
  source 1..19: mol_type = other RNA
taaactctgggaatacctc

SEQ ID NO: 25310 - RNA, 19 nt, synthetic construct
  misc_feature 1..19: note = siRNA sense sequence
  source 1..19: mol_type = other RNA
aggtattcccagagtttaa

SEQ ID NO: 25311 - RNA, 19 nt, synthetic construct
  misc_feature 1..19: note = siRNA antisense sequence
  source 1..19: mol_type = other RNA
ttaaactctgggaatacct

SEQ ID NO: 25312 - RNA, 19 nt, synthetic construct
  misc_feature 1..19: note = siRNA sense sequence
  source 1..19: mol_type = other RNA
ggtattcccagagtttaaa

SEQ ID NO: 25313 - RNA, 19 nt, synthetic construct
  misc_feature 1..19: note = siRNA antisense sequence
  source 1..19: mol_type = other RNA
tttaaactctgggaatacc

SEQ ID NO: 25314 - RNA, 19 nt, synthetic construct
  misc_feature 1..19: note = siRNA sense sequence
  source 1..19: mol_type = other RNA
gttccagaagcccacactg

SEQ ID NO: 25315 - RNA, 19 nt, synthetic construct
  misc_feature 1..19: note = siRNA antisense sequence
  source 1..19: mol_type = other RNA
cagtgtgggcttctggaac

SEQ ID NO: 25316 - RNA, 19 nt, synthetic construct
  misc_feature 1..19: note = siRNA sense sequence
  source 1..19: mol_type = other RNA
ttccagaagcccacactga

SEQ ID NO: 25317 - RNA, 19 nt, synthetic construct
  misc_feature 1..19: note = siRNA antisense sequence
  source 1..19: mol_type = other RNA
tcagtgtgggcttctggaa

SEQ ID NO: 25318 - RNA, 19 nt, synthetic construct
  misc_feature 1..19: note = siRNA sense sequence
  source 1..19: mol_type = other RNA
tccagaagcccacactgat

SEQ ID NO: 25319 - RNA, 19 nt, synthetic construct
  misc_feature 1..19: note = siRNA antisense sequence
  source 1..19: mol_type = other RNA
atcagtgtgggcttctgga

SEQ ID NO: 25320 - RNA, 19 nt, synthetic construct
  misc_feature 1..19: note = siRNA sense sequence
  source 1..19: mol_type = other RNA
cccacactgatcttccatt

SEQ ID NO: 25321 - RNA, 19 nt, synthetic construct
  misc_feature 1..19: note = siRNA antisense sequence
  source 1..19: mol_type = other RNA
aatggaagatcagtgtggg

SEQ ID NO: 25322 - RNA, 19 nt, synthetic construct
  misc_feature 1..19: note = siRNA sense sequence
  source 1..19: mol_type = other RNA
ccacactgatcttccatta

SEQ ID NO: 25323 - RNA, 19 nt, synthetic construct
  misc_feature 1..19: note = siRNA antisense sequence
  source 1..19: mol_type = other RNA
taatggaagatcagtgtgg

SEQ ID NO: 25324 - RNA, 19 nt, synthetic construct
  misc_feature 1..19: note = siRNA sense sequence
  source 1..19: mol_type = other RNA
acactgatcttccattagt

SEQ ID NO: 25325 - RNA, 19 nt, synthetic construct
  misc_feature 1..19: note = siRNA antisense sequence
  source 1..19: mol_type = other RNA
actaatggaagatcagtgt

SEQ ID NO: 25326 - RNA, 19 nt, synthetic construct
  misc_feature 1..19: note = siRNA sense sequence
  source 1..19: mol_type = other RNA
gatcttccattagtttcta

SEQ ID NO: 25327 - RNA, 19 nt, synthetic construct
  misc_feature 1..19: note = siRNA antisense sequence
  source 1..19: mol_type = other RNA
tagaaactaatggaagatc

SEQ ID NO: 25328 - RNA, 19 nt, synthetic construct
  misc_feature 1..19: note = siRNA sense sequence
  source 1..19: mol_type = other RNA
atcttccattagtttctag

SEQ ID NO: 25329 - RNA, 19 nt, synthetic construct
  misc_feature 1..19: note = siRNA antisense sequence
  source 1..19: mol_type = other RNA
ctagaaactaatggaagat

SEQ ID NO: 25330 - RNA, 19 nt, synthetic construct
  misc_feature 1..19: note = siRNA sense sequence
  source 1..19: mol_type = other RNA
tcttccattagtttctaga

SEQ ID NO: 25331 - RNA, 19 nt, synthetic construct
  misc_feature 1..19: note = siRNA antisense sequence
  source 1..19: mol_type = other RNA
tctagaaactaatggaaga

SEQ ID NO: 25332 - RNA, 19 nt, synthetic construct
  misc_feature 1..19: note = siRNA sense sequence
  source 1..19: mol_type = other RNA
attcctcttttaaggcctc

SEQ ID NO: 25333 - RNA, 19 nt, synthetic construct
  misc_feature 1..19: note = siRNA antisense sequence
  source 1..19: mol_type = other RNA
gaggccttaaaagaggaat

SEQ ID NO: 25334 - RNA, 19 nt, synthetic construct
  misc_feature 1..19: note = siRNA sense sequence
  source 1..19: mol_type = other RNA
cctcttttaaggcctctca

SEQ ID NO: 25335 - RNA, 19 nt, synthetic construct
  misc_feature 1..19: note = siRNA antisense sequence
  source 1..19: mol_type = other RNA
tgagaggccttaaaagagg

SEQ ID NO: 25336 - RNA, 19 nt, synthetic construct
  misc_feature 1..19: note = siRNA sense sequence
  source 1..19: mol_type = other RNA
ctcttttaaggcctctcaa

SEQ ID NO: 25337 - RNA, 19 nt, synthetic construct
  misc_feature 1..19: note = siRNA antisense sequence
  source 1..19: mol_type = other RNA
ttgagaggccttaaaagag

SEQ ID NO: 25338 - RNA, 19 nt, synthetic construct
  misc_feature 1..19: note = siRNA sense sequence
  source 1..19: mol_type = other RNA
tcttttaaggcctctcaac

SEQ ID NO: 25339 - RNA, 19 nt, synthetic construct
  misc_feature 1..19: note = siRNA antisense sequence
  source 1..19: mol_type = other RNA
gttgagaggccttaaaaga

SEQ ID NO: 25340 - RNA, 19 nt, synthetic construct
  misc_feature 1..19: note = siRNA sense sequence
  source 1..19: mol_type = other RNA
taaggcctctcaactttac

SEQ ID NO: 25341 - RNA, 19 nt, synthetic construct
  misc_feature 1..19: note = siRNA antisense sequence
  source 1..19: mol_type = other RNA
gtaaagttgagaggcctta

SEQ ID NO: 25342 - RNA, 19 nt, synthetic construct
  misc_feature 1..19: note = siRNA sense sequence
  source 1..19: mol_type = other RNA
aaggcctctcaactttact

SEQ ID NO: 25343 - RNA, 19 nt, synthetic construct
  misc_feature 1..19: note = siRNA antisense sequence
  source 1..19: mol_type = other RNA
agtaaagttgagaggcctt

SEQ ID NO: 25344 - RNA, 19 nt, synthetic construct
  misc_feature 1..19: note = siRNA sense sequence
  source 1..19: mol_type = other RNA
aggcctctcaactttactt

SEQ ID NO: 25345 - RNA, 19 nt, synthetic construct
  misc_feature 1..19: note = siRNA antisense sequence
  source 1..19: mol_type = other RNA
aagtaaagttgagaggcct

SEQ ID NO: 25346 - RNA, 19 nt, synthetic construct
  misc_feature 1..19: note = siRNA sense sequence
  source 1..19: mol_type = other RNA
ggcctctcaactttacttt

SEQ ID NO: 25347 - RNA, 19 nt, synthetic construct
  misc_feature 1..19: note = siRNA antisense sequence
  source 1..19: mol_type = other RNA
aaagtaaagttgagaggcc

SEQ ID NO: 25348 - RNA, 19 nt, synthetic construct
  misc_feature 1..19: note = siRNA sense sequence
  source 1..19: mol_type = other RNA
gcctctcaactttactttt

SEQ ID NO: 25349 - RNA, 19 nt, synthetic construct
  misc_feature 1..19: note = siRNA antisense sequence
  source 1..19: mol_type = other RNA
aaaagtaaagttgagaggc

SEQ ID NO: 25350 - RNA, 19 nt, synthetic construct
  misc_feature 1..19: note = siRNA sense sequence
  source 1..19: mol_type = other RNA
tggagtgcagtggcctgat

SEQ ID NO: 25351 - RNA, 19 nt, synthetic construct
  misc_feature 1..19: note = siRNA antisense sequence
  source 1..19: mol_type = other RNA
atcaggccactgcactcca

SEQ ID NO: 25352 - RNA, 19 nt, synthetic construct
  misc_feature 1..19: note = siRNA sense sequence
  source 1..19: mol_type = other RNA
tggcctgatcttggctcac

SEQ ID NO: 25353 - RNA, 19 nt, synthetic construct
  misc_feature 1..19: note = siRNA antisense sequence
  source 1..19: mol_type = other RNA
gtgagccaagatcaggcca

SEQ ID NO: 25354 - RNA, 19 nt, synthetic construct
  misc_feature 1..19: note = siRNA sense sequence
  source 1..19: mol_type = other RNA
ggcctgatcttggctcact

SEQ ID NO: 25355 - RNA, 19 nt, synthetic construct
  misc_feature 1..19: note = siRNA antisense sequence
  source 1..19: mol_type = other RNA
agtgagccaagatcaggcc

SEQ ID NO: 25356 - RNA, 19 nt, synthetic construct
  misc_feature 1..19: note = siRNA sense sequence
  source 1..19: mol_type = other RNA
gcctgatcttggctcactg

SEQ ID NO: 25357 - RNA, 19 nt, synthetic construct
  misc_feature 1..19: note = siRNA antisense sequence
  source 1..19: mol_type = other RNA
cagtgagccaagatcaggc

SEQ ID NO: 25358 - RNA, 19 nt, synthetic construct
  misc_feature 1..19: note = siRNA sense sequence
  source 1..19: mol_type = other RNA
cctgatcttggctcactgc

SEQ ID NO: 25359 - RNA, 19 nt, synthetic construct
  misc_feature 1..19: note = siRNA antisense sequence
  source 1..19: mol_type = other RNA
gcagtgagccaagatcagg

SEQ ID NO: 25360 - RNA, 19 nt, synthetic construct
  misc_feature 1..19: note = siRNA sense sequence
  source 1..19: mol_type = other RNA
cctctgcctcctgggttca

SEQ ID NO: 25361 - RNA, 19 nt, synthetic construct
  misc_feature 1..19: note = siRNA antisense sequence
  source 1..19: mol_type = other RNA
tgaacccaggaggcagagg

SEQ ID NO: 25362 - RNA, 19 nt, synthetic construct
  misc_feature 1..19: note = siRNA sense sequence
  source 1..19: mol_type = other RNA
ctctgcctcctgggttcaa

SEQ ID NO: 25363 - RNA, 19 nt, synthetic construct
  misc_feature 1..19: note = siRNA antisense sequence
  source 1..19: mol_type = other RNA
ttgaacccaggaggcagag

SEQ ID NO: 25364 - RNA, 19 nt, synthetic construct
  misc_feature 1..19: note = siRNA sense sequence
  source 1..19: mol_type = other RNA
tctgcctcctgggttcaag

SEQ ID NO: 25365 - RNA, 19 nt, synthetic construct
  misc_feature 1..19: note = siRNA antisense sequence
  source 1..19: mol_type = other RNA
cttgaacccaggaggcaga

SEQ ID NO: 25366 - RNA, 19 nt, synthetic construct
  misc_feature 1..19: note = siRNA sense sequence
  source 1..19: mol_type = other RNA
ctgcctcctgggttcaagc

SEQ ID NO: 25367 - RNA, 19 nt, synthetic construct
  misc_feature 1..19: note = siRNA antisense sequence
  source 1..19: mol_type = other RNA
gcttgaacccaggaggcag

SEQ ID NO: 25368 - RNA, 19 nt, synthetic construct
  misc_feature 1..19: note = siRNA sense sequence
  source 1..19: mol_type = other RNA
tgcctcctgggttcaagca

SEQ ID NO: 25369 - RNA, 19 nt, synthetic construct
  misc_feature 1..19: note = siRNA antisense sequence
  source 1..19: mol_type = other RNA
tgcttgaacccaggaggca

SEQ ID NO: 25370 - RNA, 19 nt, synthetic construct
  misc_feature 1..19: note = siRNA sense sequence
  source 1..19: mol_type = other RNA
gcctcctgggttcaagcaa

SEQ ID NO: 25371 - RNA, 19 nt, synthetic construct
  misc_feature 1..19: note = siRNA antisense sequence
  source 1..19: mol_type = other RNA
ttgcttgaacccaggaggc

SEQ ID NO: 25372 - RNA, 19 nt, synthetic construct
  misc_feature 1..19: note = siRNA sense sequence
  source 1..19: mol_type = other RNA
cctcctgggttcaagcaat

SEQ ID NO: 25373 - RNA, 19 nt, synthetic construct
  misc_feature 1..19: note = siRNA antisense sequence
  source 1..19: mol_type = other RNA
attgcttgaacccaggagg

SEQ ID NO: 25374 - RNA, 19 nt, synthetic construct
  misc_feature 1..19: note = siRNA sense sequence
  source 1..19: mol_type = other RNA
ctcctgggttcaagcaatt

SEQ ID NO: 25375 - RNA, 19 nt, synthetic construct
  misc_feature 1..19: note = siRNA antisense sequence
  source 1..19: mol_type = other RNA
aattgcttgaacccaggag

SEQ ID NO: 25376 - RNA, 19 nt, synthetic construct
  misc_feature 1..19: note = siRNA sense sequence
  source 1..19: mol_type = other RNA
tgggttcaagcaattctcg

SEQ ID NO: 25377 - RNA, 19 nt, synthetic construct
  misc_feature 1..19: note = siRNA antisense sequence
  source 1..19: mol_type = other RNA
cgagaattgcttgaaccca

SEQ ID NO: 25378 - RNA, 19 nt, synthetic construct
  misc_feature 1..19: note = siRNA sense sequence
  source 1..19: mol_type = other RNA
gggttcaagcaattctcgt

SEQ ID NO: 25379 - RNA, 19 nt, synthetic construct
  misc_feature 1..19: note = siRNA antisense sequence
  source 1..19: mol_type = other RNA
acgagaattgcttgaaccc

SEQ ID NO: 25380 - RNA, 19 nt, synthetic construct
  misc_feature 1..19: note = siRNA sense sequence
  source 1..19: mol_type = other RNA
ggttcaagcaattctcgtg

SEQ ID NO: 25381 - RNA, 19 nt, synthetic construct
  misc_feature 1..19: note = siRNA antisense sequence
  source 1..19: mol_type = other RNA
cacgagaattgcttgaacc

SEQ ID NO: 25382 - RNA, 19 nt, synthetic construct
  misc_feature 1..19: note = siRNA sense sequence
  source 1..19: mol_type = other RNA
gttcaagcaattctcgtgc

SEQ ID NO: 25383 - RNA, 19 nt, synthetic construct
  misc_feature 1..19: note = siRNA antisense sequence
  source 1..19: mol_type = other RNA
gcacgagaattgcttgaac

SEQ ID NO: 25384 - RNA, 19 nt, synthetic construct
  misc_feature 1..19: note = siRNA sense sequence
  source 1..19: mol_type = other RNA
ttcaagcaattctcgtgcc

SEQ ID NO: 25385 - RNA, 19 nt, synthetic construct
  misc_feature 1..19: note = siRNA antisense sequence
  source 1..19: mol_type = other RNA
ggcacgagaattgcttgaa

SEQ ID NO: 25386 - RNA, 19 nt, synthetic construct
  misc_feature 1..19: note = siRNA sense sequence
  source 1..19: mol_type = other RNA
gtgccaccacacccagcta

SEQ ID NO: 25387 - RNA, 19 nt, synthetic construct
  misc_feature 1..19: note = siRNA antisense sequence
  source 1..19: mol_type = other RNA
tagctgggtgtggtggcac

SEQ ID NO: 25388 - RNA, 19 nt, synthetic construct
  misc_feature 1..19: note = siRNA sense sequence
  source 1..19: mol_type = other RNA
gggtttcaccatgttggcc

SEQ ID NO: 25389 - RNA, 19 nt, synthetic construct
  misc_feature 1..19: note = siRNA antisense sequence
  source 1..19: mol_type = other RNA
ggccaacatggtgaaaccc

SEQ ID NO: 25390 - RNA, 19 nt, synthetic construct
  misc_feature 1..19: note = siRNA sense sequence
  source 1..19: mol_type = other RNA
ggtttcaccatgttggcca

SEQ ID NO: 25391 - RNA, 19 nt, synthetic construct
  misc_feature 1..19: note = siRNA antisense sequence
  source 1..19: mol_type = other RNA
tggccaacatggtgaaacc

SEQ ID NO: 25392 - RNA, 19 nt, synthetic construct
  misc_feature 1..19: note = siRNA sense sequence
  source 1..19: mol_type = other RNA
gtttcaccatgttggccag

SEQ ID NO: 25393 - RNA, 19 nt, synthetic construct
  misc_feature 1..19: note = siRNA antisense sequence
  source 1..19: mol_type = other RNA
ctggccaacatggtgaaac

SEQ ID NO: 25394 - RNA, 19 nt, synthetic construct
  misc_feature 1..19: note = siRNA sense sequence
  source 1..19: mol_type = other RNA
ccatgttggccaggttggt

SEQ ID NO: 25395 - RNA, 19 nt, synthetic construct
  misc_feature 1..19: note = siRNA antisense sequence
  source 1..19: mol_type = other RNA
accaacctggccaacatgg

SEQ ID NO: 25396 - RNA, 19 nt, synthetic construct
  misc_feature 1..19: note = siRNA sense sequence
  source 1..19: mol_type = other RNA
tgacctcaagtgatctgcc

SEQ ID NO: 25397 - RNA, 19 nt, synthetic construct
  misc_feature 1..19: note = siRNA antisense sequence
  source 1..19: mol_type = other RNA
ggcagatcacttgaggtca

SEQ ID NO: 25398 - RNA, 19 nt, synthetic construct
  misc_feature 1..19: note = siRNA sense sequence
  source 1..19: mol_type = other RNA
gacctcaagtgatctgccc

SEQ ID NO: 25399 - RNA, 19 nt, synthetic construct
  misc_feature 1..19: note = siRNA antisense sequence
  source 1..19: mol_type = other RNA
gggcagatcacttgaggtc

SEQ ID NO: 25400 - RNA, 19 nt, synthetic construct
  misc_feature 1..19: note = siRNA sense sequence
  source 1..19: mol_type = other RNA
acctcaagtgatctgccca

SEQ ID NO: 25401 - RNA, 19 nt, synthetic construct
  misc_feature 1..19: note = siRNA antisense sequence
  source 1..19: mol_type = other RNA
tgggcagatcacttgaggt

SEQ ID NO: 25402 - RNA, 19 nt, synthetic construct
  misc_feature 1..19: note = siRNA sense sequence
  source 1..19: mol_type = other RNA
cctcaagtgatctgcccat

SEQ ID NO: 25403 - RNA, 19 nt, synthetic construct
  misc_feature 1..19: note = siRNA antisense sequence
  source 1..19: mol_type = other RNA
atgggcagatcacttgagg

SEQ ID NO: 25404 - RNA, 19 nt, synthetic construct
  misc_feature 1..19: note = siRNA sense sequence
  source 1..19: mol_type = other RNA
ctcaagtgatctgcccatc

SEQ ID NO: 25405 - RNA, 19 nt, synthetic construct
  misc_feature 1..19: note = siRNA antisense sequence
  source 1..19: mol_type = other RNA
gatgggcagatcacttgag

SEQ ID NO: 25406 - RNA, 19 nt, synthetic construct
  misc_feature 1..19: note = siRNA sense sequence
  source 1..19: mol_type = other RNA
tcaagtgatctgcccatct

SEQ ID NO: 25407 - RNA, 19 nt, synthetic construct
  misc_feature 1..19: note = siRNA antisense sequence
  source 1..19: mol_type = other RNA
agatgggcagatcacttga

SEQ ID NO: 25408 - RNA, 19 nt, synthetic construct
  misc_feature 1..19: note = siRNA sense sequence
  source 1..19: mol_type = other RNA
caagtgatctgcccatctt

SEQ ID NO: 25409 - RNA, 19 nt, synthetic construct
  misc_feature 1..19: note = siRNA antisense sequence
  source 1..19: mol_type = other RNA
aagatgggcagatcacttg

SEQ ID NO: 25410 - RNA, 19 nt, synthetic construct
  misc_feature 1..19: note = siRNA sense sequence
  source 1..19: mol_type = other RNA
aagtgatctgcccatcttg

SEQ ID NO: 25411 - RNA, 19 nt, synthetic construct
  misc_feature 1..19: note = siRNA antisense sequence
  source 1..19: mol_type = other RNA
caagatgggcagatcactt

SEQ ID NO: 25412 - RNA, 19 nt, synthetic construct
  misc_feature 1..19: note = siRNA sense sequence
  source 1..19: mol_type = other RNA
agtgatctgcccatcttgt

SEQ ID NO: 25413 - RNA, 19 nt, synthetic construct
  misc_feature 1..19: note = siRNA antisense sequence
  source 1..19: mol_type = other RNA
acaagatgggcagatcact

SEQ ID NO: 25414 - RNA, 19 nt, synthetic construct
  misc_feature 1..19: note = siRNA sense sequence
  source 1..19: mol_type = other RNA
cacctggcctcaacttcac

SEQ ID NO: 25415 - RNA, 19 nt, synthetic construct
  misc_feature 1..19: note = siRNA antisense sequence
  source 1..19: mol_type = other RNA
gtgaagttgaggccaggtg

SEQ ID NO: 25416 - RNA, 19 nt, synthetic construct
  misc_feature 1..19: note = siRNA sense sequence
  source 1..19: mol_type = other RNA
acctggcctcaacttcact

SEQ ID NO: 25417 - RNA, 19 nt, synthetic construct
  misc_feature 1..19: note = siRNA antisense sequence
  source 1..19: mol_type = other RNA
agtgaagttgaggccaggt

SEQ ID NO: 25418 - RNA, 19 nt, synthetic construct
  misc_feature 1..19: note = siRNA sense sequence
  source 1..19: mol_type = other RNA
cctggcctcaacttcactt

SEQ ID NO: 25419 - RNA, 19 nt, synthetic construct
  misc_feature 1..19: note = siRNA antisense sequence
  source 1..19: mol_type = other RNA
aagtgaagttgaggccagg

SEQ ID NO: 25420 - RNA, 19 nt, synthetic construct
  misc_feature 1..19: note = siRNA sense sequence
  source 1..19: mol_type = other RNA
gcctcaacttcactttggt

SEQ ID NO: 25421 - RNA, 19 nt, synthetic construct
  misc_feature 1..19: note = siRNA antisense sequence
  source 1..19: mol_type = other RNA
accaaagtgaagttgaggc

SEQ ID NO: 25422 - RNA, 19 nt, synthetic construct
  misc_feature 1..19: note = siRNA sense sequence
  source 1..19: mol_type = other RNA
cctcaacttcactttggta

SEQ ID NO: 25423 - RNA, 19 nt, synthetic construct
  misc_feature 1..19: note = siRNA antisense sequence
  source 1..19: mol_type = other RNA
taccaaagtgaagttgagg

SEQ ID NO: 25424 - RNA, 19 nt, synthetic construct
  misc_feature 1..19: note = siRNA sense sequence
  source 1..19: mol_type = other RNA
ctcaacttcactttggtaa

SEQ ID NO: 25425 - RNA, 19 nt, synthetic construct
  misc_feature 1..19: note = siRNA antisense sequence
  source 1..19: mol_type = other RNA
ttaccaaagtgaagttgag

SEQ ID NO: 25426 - RNA, 19 nt, synthetic construct
  misc_feature 1..19: note = siRNA sense sequence
  source 1..19: mol_type = other RNA
tcaacttcactttggtaat

SEQ ID NO: 25427 - RNA, 19 nt, synthetic construct
  misc_feature 1..19: note = siRNA antisense sequence
  source 1..19: mol_type = other RNA
attaccaaagtgaagttga

SEQ ID NO: 25428 - RNA, 19 nt, synthetic construct
  misc_feature 1..19: note = siRNA sense sequence
  source 1..19: mol_type = other RNA
caacttcactttggtaata

SEQ ID NO: 25429 - RNA, 19 nt, synthetic construct
  misc_feature 1..19: note = siRNA antisense sequence
  source 1..19: mol_type = other RNA
tattaccaaagtgaagttg

SEQ ID NO: 25430 - RNA, 19 nt, synthetic construct
  misc_feature 1..19: note = siRNA sense sequence
  source 1..19: mol_type = other RNA
ttcttctacagagtggtct

SEQ ID NO: 25431 - RNA, 19 nt, synthetic construct
  misc_feature 1..19: note = siRNA antisense sequence
  source 1..19: mol_type = other RNA
agaccactctgtagaagaa

SEQ ID NO: 25432 - RNA, 19 nt, synthetic construct
  misc_feature 1..19: note = siRNA sense sequence
  source 1..19: mol_type = other RNA
tcttctacagagtggtctc

SEQ ID NO: 25433 - RNA, 19 nt, synthetic construct
  misc_feature 1..19: note = siRNA antisense sequence
  source 1..19: mol_type = other RNA
gagaccactctgtagaaga

SEQ ID NO: 25434 - RNA, 19 nt, synthetic construct
  misc_feature 1..19: note = siRNA sense sequence
  source 1..19: mol_type = other RNA
atcaaatacagaccaggga

SEQ ID NO: 25435 - RNA, 19 nt, synthetic construct
  misc_feature 1..19: note = siRNA antisense sequence
  source 1..19: mol_type = other RNA
tccctggtctgtatttgat

SEQ ID NO: 25436 - RNA, 19 nt, synthetic construct
  misc_feature 1..19: note = siRNA sense sequence
  source 1..19: mol_type = other RNA
caaatacagaccagggacc

SEQ ID NO: 25437 - RNA, 19 nt, synthetic construct
  misc_feature 1..19: note = siRNA antisense sequence
  source 1..19: mol_type = other RNA
ggtccctggtctgtatttg

SEQ ID NO: 25438 - RNA, 19 nt, synthetic construct
  misc_feature 1..19: note = siRNA sense sequence
  source 1..19: mol_type = other RNA
aaatacagaccagggacca

SEQ ID NO: 25439 - RNA, 19 nt, synthetic construct
  misc_feature 1..19: note = siRNA antisense sequence
  source 1..19: mol_type = other RNA
tggtccctggtctgtattt

SEQ ID NO: 25440 - RNA, 19 nt, synthetic construct
  misc_feature 1..19: note = siRNA sense sequence
  source 1..19: mol_type = other RNA
aatacagaccagggaccat

SEQ ID NO: 25441 - RNA, 19 nt, synthetic construct
  misc_feature 1..19: note = siRNA antisense sequence
  source 1..19: mol_type = other RNA
atggtccctggtctgtatt

SEQ ID NO: 25442 - RNA, 19 nt, synthetic construct
  misc_feature 1..19: note = siRNA sense sequence
  source 1..19: mol_type = other RNA
atacagaccagggaccatg

SEQ ID NO: 25443 - RNA, 19 nt, synthetic construct
  misc_feature 1..19: note = siRNA antisense sequence
  source 1..19: mol_type = other RNA
catggtccctggtctgtat

SEQ ID NO: 25444 - RNA, 19 nt, synthetic construct
  misc_feature 1..19: note = siRNA sense sequence
  source 1..19: mol_type = other RNA
tacagaccagggaccatga

SEQ ID NO: 25445 - RNA, 19 nt, synthetic construct
  misc_feature 1..19: note = siRNA antisense sequence
  source 1..19: mol_type = other RNA
tcatggtccctggtctgta

SEQ ID NO: 25446 - RNA, 19 nt, synthetic construct
  misc_feature 1..19: note = siRNA sense sequence
  source 1..19: mol_type = other RNA
cctttgtataatagtatcc

SEQ ID NO: 25447 - RNA, 19 nt, synthetic construct
  misc_feature 1..19: note = siRNA antisense sequence
  source 1..19: mol_type = other RNA
ggatactattatacaaagg

SEQ ID NO: 25448 - RNA, 19 nt, synthetic construct
  misc_feature 1..19: note = siRNA sense sequence
  source 1..19: mol_type = other RNA
ttgttgtctcctctgcatt

SEQ ID NO: 25449 - RNA, 19 nt, synthetic construct
  misc_feature 1..19: note = siRNA antisense sequence
  source 1..19: mol_type = other RNA
aatgcagaggagacaacaa

SEQ ID NO: 25450 - RNA, 19 nt, synthetic construct
  misc_feature 1..19: note = siRNA sense sequence
  source 1..19: mol_type = other RNA
ttgtctcctctgcatttct

SEQ ID NO: 25451 - RNA, 19 nt, synthetic construct
  misc_feature 1..19: note = siRNA antisense sequence
  source 1..19: mol_type = other RNA
agaaatgcagaggagacaa

SEQ ID NO: 25452 - RNA, 19 nt, synthetic construct
  misc_feature 1..19: note = siRNA sense sequence
  source 1..19: mol_type = other RNA
gcatttcttacatgactaa

SEQ ID NO: 25453 - RNA, 19 nt, synthetic construct
  misc_feature 1..19: note = siRNA antisense sequence
  source 1..19: mol_type = other RNA
ttagtcatgtaagaaatgc

SEQ ID NO: 25454 - RNA, 19 nt, synthetic construct
  misc_feature 1..19: note = siRNA sense sequence
  source 1..19: mol_type = other RNA
atgactaagcactgactgg

SEQ ID NO: 25455 - RNA, 19 nt, synthetic construct
  misc_feature 1..19: note = siRNA antisense sequence
  source 1..19: mol_type = other RNA
ccagtcagtgcttagtcat

SEQ ID NO: 25456 - RNA, 19 nt, synthetic construct
  misc_feature 1..19: note = siRNA sense sequence
  source 1..19: mol_type = other RNA
tgactaagcactgactggt

SEQ ID NO: 25457 - RNA, 19 nt, synthetic construct
  misc_feature 1..19: note = siRNA antisense sequence
  source 1..19: mol_type = other RNA
accagtcagtgcttagtca

SEQ ID NO: 25458 - RNA, 19 nt, synthetic construct
  misc_feature 1..19: note = siRNA sense sequence
  source 1..19: mol_type = other RNA
gactaagcactgactggtt

SEQ ID NO: 25459 - RNA, 19 nt, synthetic construct
  misc_feature 1..19: note = siRNA antisense sequence
  source 1..19: mol_type = other RNA
aaccagtcagtgcttagtc

SEQ ID NO: 25460 - RNA, 19 nt, synthetic construct
  misc_feature 1..19: note = siRNA sense sequence
  source 1..19: mol_type = other RNA
actaagcactgactggtta

SEQ ID NO: 25461 - RNA, 19 nt, synthetic construct
  misc_feature 1..19: note = siRNA antisense sequence
  source 1..19: mol_type = other RNA
taaccagtcagtgcttagt

SEQ ID NO: 25462 - RNA, 19 nt, synthetic construct
  misc_feature 1..19: note = siRNA sense sequence
  source 1..19: mol_type = other RNA
ctaagcactgactggttaa

SEQ ID NO: 25463 - RNA, 19 nt, synthetic construct
  misc_feature 1..19: note = siRNA antisense sequence
  source 1..19: mol_type = other RNA
ttaaccagtcagtgcttag

SEQ ID NO: 25464 - RNA, 19 nt, synthetic construct
  misc_feature 1..19: note = siRNA sense sequence
  source 1..19: mol_type = other RNA
taagcactgactggttaaa

SEQ ID NO: 25465 - RNA, 19 nt, synthetic construct
  misc_feature 1..19: note = siRNA antisense sequence
  source 1..19: mol_type = other RNA
tttaaccagtcagtgctta

SEQ ID NO: 25466 - RNA, 19 nt, synthetic construct
  misc_feature 1..19: note = siRNA sense sequence
  source 1..19: mol_type = other RNA
agcttagcttctttcgttt

SEQ ID NO: 25467 - RNA, 19 nt, synthetic construct
  misc_feature 1..19: note = siRNA antisense sequence
  source 1..19: mol_type = other RNA
aaacgaaagaagctaagct

SEQ ID NO: 25468 - RNA, 19 nt, synthetic construct
  misc_feature 1..19: note = siRNA sense sequence
  source 1..19: mol_type = other RNA
gcttagcttctttcgtttt

SEQ ID NO: 25469 - RNA, 19 nt, synthetic construct
  misc_feature 1..19: note = siRNA antisense sequence
  source 1..19: mol_type = other RNA
aaaacgaaagaagctaagc

SEQ ID NO: 25470 - RNA, 19 nt, synthetic construct
  misc_feature 1..19: note = siRNA sense sequence
  source 1..19: mol_type = other RNA
ccatagccattcctggaag

SEQ ID NO: 25471 - RNA, 19 nt, synthetic construct
  misc_feature 1..19: note = siRNA antisense sequence
  source 1..19: mol_type = other RNA
cttccaggaatggctatgg

SEQ ID NO: 25472 - RNA, 19 nt, synthetic construct
  misc_feature 1..19: note = siRNA sense sequence
  source 1..19: mol_type = other RNA
catagccattcctggaaga

SEQ ID NO: 25473 - RNA, 19 nt, synthetic construct
  misc_feature 1..19: note = siRNA antisense sequence
  source 1..19: mol_type = other RNA
tcttccaggaatggctatg

SEQ ID NO: 25474 - RNA, 19 nt, synthetic construct
  misc_feature 1..19: note = siRNA sense sequence
  source 1..19: mol_type = other RNA
atagccattcctggaagaa

SEQ ID NO: 25475 - RNA, 19 nt, synthetic construct
  misc_feature 1..19: note = siRNA antisense sequence
  source 1..19: mol_type = other RNA
ttcttccaggaatggctat

SEQ ID NO: 25476 - RNA, 19 nt, synthetic construct
  misc_feature 1..19: note = siRNA sense sequence
  source 1..19: mol_type = other RNA
aaagaatgtccaggattaa

SEQ ID NO: 25477 - RNA, 19 nt, synthetic construct
  misc_feature 1..19: note = siRNA antisense sequence
  source 1..19: mol_type = other RNA
ttaatcctggacattcttt

SEQ ID NO: 25478 - RNA, 19 nt, synthetic construct
  misc_feature 1..19: note = siRNA sense sequence
  source 1..19: mol_type = other RNA
aagaatgtccaggattaac

SEQ ID NO: 25479 - RNA, 19 nt, synthetic construct
  misc_feature 1..19: note = siRNA antisense sequence
  source 1..19: mol_type = other RNA
gttaatcctggacattctt

SEQ ID NO: 25480 - RNA, 19 nt, synthetic construct
  misc_feature 1..19: note = siRNA sense sequence
  source 1..19: mol_type = other RNA
agaatgtccaggattaact

SEQ ID NO: 25481 - RNA, 19 nt, synthetic construct
  misc_feature 1..19: note = siRNA antisense sequence
  source 1..19: mol_type = other RNA
agttaatcctggacattct

SEQ ID NO: 25482 - RNA, 19 nt, synthetic construct
  misc_feature 1..19: note = siRNA sense sequence
  source 1..19: mol_type = other RNA
caggattaactggttggtg

SEQ ID NO: 25483 - RNA, 19 nt, synthetic construct
  misc_feature 1..19: note = siRNA antisense sequence
  source 1..19: mol_type = other RNA
caccaaccagttaatcctg

SEQ ID NO: 25484 - RNA, 19 nt, synthetic construct
  misc_feature 1..19: note = siRNA sense sequence
  source 1..19: mol_type = other RNA
aggattaactggttggtgg

SEQ ID NO: 25485 - RNA, 19 nt, synthetic construct
  misc_feature 1..19: note = siRNA antisense sequence
  source 1..19: mol_type = other RNA
ccaccaaccagttaatcct

SEQ ID NO: 25486 - RNA, 19 nt, synthetic construct
  misc_feature 1..19: note = siRNA sense sequence
  source 1..19: mol_type = other RNA
gggactgaagtcaggaata

SEQ ID NO: 25487 - RNA, 19 nt, synthetic construct
  misc_feature 1..19: note = siRNA antisense sequence
  source 1..19: mol_type = other RNA
tattcctgacttcagtccc

SEQ ID NO: 25488 - RNA, 19 nt, synthetic construct
  misc_feature 1..19: note = siRNA sense sequence
  source 1..19: mol_type = other RNA
ggactgaagtcaggaataa

SEQ ID NO: 25489 - RNA, 19 nt, synthetic construct
  misc_feature 1..19: note = siRNA antisense sequence
  source 1..19: mol_type = other RNA
ttattcctgacttcagtcc

SEQ ID NO: 25490 - RNA, 19 nt, synthetic construct
  misc_feature 1..19: note = siRNA sense sequence
  source 1..19: mol_type = other RNA
gactgaagtcaggaataaa

SEQ ID NO: 25491 - RNA, 19 nt, synthetic construct
  misc_feature 1..19: note = siRNA antisense sequence
  source 1..19: mol_type = other RNA
tttattcctgacttcagtc

SEQ ID NO: 25492 - RNA, 19 nt, synthetic construct
  misc_feature 1..19: note = siRNA sense sequence
  source 1..19: mol_type = other RNA
actgaagtcaggaataaag

SEQ ID NO: 25493 - RNA, 19 nt, synthetic construct
  misc_feature 1..19: note = siRNA antisense sequence
  source 1..19: mol_type = other RNA
ctttattcctgacttcagt

SEQ ID NO: 25494 - RNA, 19 nt, synthetic construct
  misc_feature 1..19: note = siRNA sense sequence
  source 1..19: mol_type = other RNA
ctgaagtcaggaataaaga

SEQ ID NO: 25495 - RNA, 19 nt, synthetic construct
  misc_feature 1..19: note = siRNA antisense sequence
  source 1..19: mol_type = other RNA
tctttattcctgacttcag

SEQ ID NO: 25496 - RNA, 19 nt, synthetic construct
  misc_feature 1..19: note = siRNA sense sequence
  source 1..19: mol_type = other RNA
gtcaggaataaagaagtga

SEQ ID NO: 25497 - RNA, 19 nt, synthetic construct
  misc_feature 1..19: note = siRNA antisense sequence
  source 1..19: mol_type = other RNA
tcacttctttattcctgac

SEQ ID NO: 25498 - RNA, 19 nt, synthetic construct
  misc_feature 1..19: note = siRNA sense sequence
  source 1..19: mol_type = other RNA
cttctctcttaagttgttc

SEQ ID NO: 25499 - RNA, 19 nt, synthetic construct
  misc_feature 1..19: note = siRNA antisense sequence
  source 1..19: mol_type = other RNA
gaacaacttaagagagaag

SEQ ID NO: 25500 - RNA, 19 nt, synthetic construct
  misc_feature 1..19: note = siRNA sense sequence
  source 1..19: mol_type = other RNA
ttctctcttaagttgttca

SEQ ID NO: 25501 - RNA, 19 nt, synthetic construct
  misc_feature 1..19: note = siRNA antisense sequence
  source 1..19: mol_type = other RNA
tgaacaacttaagagagaa

SEQ ID NO: 25502 - RNA, 19 nt, synthetic construct
  misc_feature 1..19: note = siRNA sense sequence
  source 1..19: mol_type = other RNA
tctctcttaagttgttcat

SEQ ID NO: 25503 - RNA, 19 nt, synthetic construct
  misc_feature 1..19: note = siRNA antisense sequence
  source 1..19: mol_type = other RNA
atgaacaacttaagagaga

SEQ ID NO: 25504 - RNA, 19 nt, synthetic construct
  misc_feature 1..19: note = siRNA sense sequence
  source 1..19: mol_type = other RNA
ctctcttaagttgttcatt

SEQ ID NO: 25505 - RNA, 19 nt, synthetic construct
  misc_feature 1..19: note = siRNA antisense sequence
  source 1..19: mol_type = other RNA
aatgaacaacttaagagag

SEQ ID NO: 25506 - RNA, 19 nt, synthetic construct
  misc_feature 1..19: note = siRNA sense sequence
  source 1..19: mol_type = other RNA
caatctattttatgaggag

SEQ ID NO: 25507 - RNA, 19 nt, synthetic construct
  misc_feature 1..19: note = siRNA antisense sequence
  source 1..19: mol_type = other RNA
ctcctcataaaatagattg

SEQ ID NO: 25508 - RNA, 19 nt, synthetic construct
  misc_feature 1..19: note = siRNA sense sequence
  source 1..19: mol_type = other RNA
aatctattttatgaggagg

SEQ ID NO: 25509 - RNA, 19 nt, synthetic construct
  misc_feature 1..19: note = siRNA antisense sequence
  source 1..19: mol_type = other RNA
cctcctcataaaatagatt

SEQ ID NO: 25510 - RNA, 19 nt, synthetic construct
  misc_feature 1..19: note = siRNA sense sequence
  source 1..19: mol_type = other RNA
atctattttatgaggagga

SEQ ID NO: 25511 - RNA, 19 nt, synthetic construct
  misc_feature 1..19: note = siRNA antisense sequence
  source 1..19: mol_type = other RNA
tcctcctcataaaatagat

SEQ ID NO: 25512 - RNA, 19 nt, synthetic construct
  misc_feature 1..19: note = siRNA sense sequence
  source 1..19: mol_type = other RNA
tctgggaatagttctctga

SEQ ID NO: 25513 - RNA, 19 nt, synthetic construct
  misc_feature 1..19: note = siRNA antisense sequence
  source 1..19: mol_type = other RNA
tcagagaactattcccaga

SEQ ID NO: 25514 - RNA, 19 nt, synthetic construct
  misc_feature 1..19: note = siRNA sense sequence
  source 1..19: mol_type = other RNA
ctgggaatagttctctgac

SEQ ID NO: 25515 - RNA, 19 nt, synthetic construct
  misc_feature 1..19: note = siRNA antisense sequence
  source 1..19: mol_type = other RNA
gtcagagaactattcccag

SEQ ID NO: 25516 - RNA, 19 nt, synthetic construct
  misc_feature 1..19: note = siRNA sense sequence
  source 1..19: mol_type = other RNA
gaatagttctctgaccctt

SEQ ID NO: 25517 - RNA, 19 nt, synthetic construct
  misc_feature 1..19: note = siRNA antisense sequence
  source 1..19: mol_type = other RNA
aagggtcagagaactattc

SEQ ID NO: 25518 - RNA, 19 nt, synthetic construct
  misc_feature 1..19: note = siRNA sense sequence
  source 1..19: mol_type = other RNA
aatagttctctgacccttt

SEQ ID NO: 25519 - RNA, 19 nt, synthetic construct
  misc_feature 1..19: note = siRNA antisense sequence
  source 1..19: mol_type = other RNA
aaagggtcagagaactatt

SEQ ID NO: 25520 - RNA, 19 nt, synthetic construct
  misc_feature 1..19: note = siRNA sense sequence
  source 1..19: mol_type = other RNA
atagttctctgaccctttg

SEQ ID NO: 25521 - RNA, 19 nt, synthetic construct
  misc_feature 1..19: note = siRNA antisense sequence
  source 1..19: mol_type = other RNA
caaagggtcagagaactat

SEQ ID NO: 25522 - RNA, 19 nt, synthetic construct
  misc_feature 1..19: note = siRNA sense sequence
  source 1..19: mol_type = other RNA
tagttctctgaccctttgt

SEQ ID NO: 25523 - RNA, 19 nt, synthetic construct
  misc_feature 1..19: note = siRNA antisense sequence
  source 1..19: mol_type = other RNA
acaaagggtcagagaacta

SEQ ID NO: 25524 - RNA, 19 nt, synthetic construct
  misc_feature 1..19: note = siRNA sense sequence
  source 1..19: mol_type = other RNA
agttctctgaccctttgtg

SEQ ID NO: 25525 - RNA, 19 nt, synthetic construct
  misc_feature 1..19: note = siRNA antisense sequence
  source 1..19: mol_type = other RNA
cacaaagggtcagagaact

SEQ ID NO: 25526 - RNA, 19 nt, synthetic construct
  misc_feature 1..19: note = siRNA sense sequence
  source 1..19: mol_type = other RNA
gttctctgaccctttgtgt

SEQ ID NO: 25527 - RNA, 19 nt, synthetic construct
  misc_feature 1..19: note = siRNA antisense sequence
  source 1..19: mol_type = other RNA
acacaaagggtcagagaac

SEQ ID NO: 25528 - RNA, 19 nt, synthetic construct
  misc_feature 1..19: note = siRNA sense sequence
  source 1..19: mol_type = other RNA
gaccctttgtgtgtcagtg

SEQ ID NO: 25529 - RNA, 19 nt, synthetic construct
  misc_feature 1..19: note = siRNA antisense sequence
  source 1..19: mol_type = other RNA
cactgacacacaaagggtc

SEQ ID NO: 25530 - RNA, 19 nt, synthetic construct
  misc_feature 1..19: note = siRNA sense sequence
  source 1..19: mol_type = other RNA
accctttgtgtgtcagtgt

SEQ ID NO: 25531 - RNA, 19 nt, synthetic construct
  misc_feature 1..19: note = siRNA antisense sequence
  source 1..19: mol_type = other RNA
acactgacacacaaagggt

SEQ ID NO: 25532 - RNA, 19 nt, synthetic construct
  misc_feature 1..19: note = siRNA sense sequence
  source 1..19: mol_type = other RNA
ttgtgtgtcagtgtgttct

SEQ ID NO: 25533 - RNA, 19 nt, synthetic construct
  misc_feature 1..19: note = siRNA antisense sequence
  source 1..19: mol_type = other RNA
agaacacactgacacacaa

SEQ ID NO: 25534 - RNA, 19 nt, synthetic construct
  misc_feature 1..19: note = siRNA sense sequence
  source 1..19: mol_type = other RNA
aagactgatgcaaaattca

SEQ ID NO: 25535 - RNA, 19 nt, synthetic construct
  misc_feature 1..19: note = siRNA antisense sequence
  source 1..19: mol_type = other RNA
tgaattttgcatcagtctt

SEQ ID NO: 25536 - RNA, 19 nt, synthetic construct
  misc_feature 1..19: note = siRNA sense sequence
  source 1..19: mol_type = other RNA
ctgatgcaaaattcactat

SEQ ID NO: 25537 - RNA, 19 nt, synthetic construct
  misc_feature 1..19: note = siRNA antisense sequence
  source 1..19: mol_type = other RNA
atagtgaattttgcatcag

SEQ ID NO: 25538 - RNA, 19 nt, synthetic construct
  misc_feature 1..19: note = siRNA sense sequence
  source 1..19: mol_type = other RNA
tgatgcaaaattcactatc

SEQ ID NO: 25539 - RNA, 19 nt, synthetic construct
  misc_feature 1..19: note = siRNA antisense sequence
  source 1..19: mol_type = other RNA
gatagtgaattttgcatca

SEQ ID NO: 25540 - RNA, 19 nt, synthetic construct
  misc_feature 1..19: note = siRNA sense sequence
  source 1..19: mol_type = other RNA
gatgcaaaattcactatct

SEQ ID NO: 25541 - RNA, 19 nt, synthetic construct
  misc_feature 1..19: note = siRNA antisense sequence
  source 1..19: mol_type = other RNA
agatagtgaattttgcatc

SEQ ID NO: 25542 - RNA, 19 nt, synthetic construct
  misc_feature 1..19: note = siRNA sense sequence
  source 1..19: mol_type = other RNA
atgcaaaattcactatctg

SEQ ID NO: 25543 - RNA, 19 nt, synthetic construct
  misc_feature 1..19: note = siRNA antisense sequence
  source 1..19: mol_type = other RNA
cagatagtgaattttgcat

SEQ ID NO: 25544 - RNA, 19 nt, synthetic construct
  misc_feature 1..19: note = siRNA sense sequence
  source 1..19: mol_type = other RNA
tgcaaaattcactatctgc

SEQ ID NO: 25545 - RNA, 19 nt, synthetic construct
  misc_feature 1..19: note = siRNA antisense sequence
  source 1..19: mol_type = other RNA
gcagatagtgaattttgca

SEQ ID NO: 25546 - RNA, 19 nt, synthetic construct
  misc_feature 1..19: note = siRNA sense sequence
  source 1..19: mol_type = other RNA
gcaaaattcactatctgcc

SEQ ID NO: 25547 - RNA, 19 nt, synthetic construct
  misc_feature 1..19: note = siRNA antisense sequence
  source 1..19: mol_type = other RNA
ggcagatagtgaattttgc

SEQ ID NO: 25548 - RNA, 19 nt, synthetic construct
  misc_feature 1..19: note = siRNA sense sequence
  source 1..19: mol_type = other RNA
caaaattcactatctgcct

SEQ ID NO: 25549 - RNA, 19 nt, synthetic construct
  misc_feature 1..19: note = siRNA antisense sequence
  source 1..19: mol_type = other RNA
aggcagatagtgaattttg

SEQ ID NO: 25550 - RNA, 19 nt, synthetic construct
  misc_feature 1..19: note = siRNA sense sequence
  source 1..19: mol_type = other RNA
attcactatctgcctcatt

SEQ ID NO: 25551 - RNA, 19 nt, synthetic construct
  misc_feature 1..19: note = siRNA antisense sequence
  source 1..19: mol_type = other RNA
aatgaggcagatagtgaat

SEQ ID NO: 25552 - RNA, 19 nt, synthetic construct
  misc_feature 1..19: note = siRNA sense sequence
  source 1..19: mol_type = other RNA
ttcactatctgcctcatta

SEQ ID NO: 25553 - RNA, 19 nt, synthetic construct
  misc_feature 1..19: note = siRNA antisense sequence
  source 1..19: mol_type = other RNA
taatgaggcagatagtgaa

SEQ ID NO: 25554 - RNA, 19 nt, synthetic construct
  misc_feature 1..19: note = siRNA sense sequence
  source 1..19: mol_type = other RNA
cactatctgcctcattaaa

SEQ ID NO: 25555 - RNA, 19 nt, synthetic construct
  misc_feature 1..19: note = siRNA antisense sequence
  source 1..19: mol_type = other RNA
tttaatgaggcagatagtg

SEQ ID NO: 25556 - RNA, 19 nt, synthetic construct
  misc_feature 1..19: note = siRNA sense sequence
  source 1..19: mol_type = other RNA
actagtaggttttcaagag

SEQ ID NO: 25557 - RNA, 19 nt, synthetic construct
  misc_feature 1..19: note = siRNA antisense sequence
  source 1..19: mol_type = other RNA
ctcttgaaaacctactagt

SEQ ID NO: 25558 - RNA, 19 nt, synthetic construct
  misc_feature 1..19: note = siRNA sense sequence
  source 1..19: mol_type = other RNA
agaatgagtctgttatcac

SEQ ID NO: 25559 - RNA, 19 nt, synthetic construct
  misc_feature 1..19: note = siRNA antisense sequence
  source 1..19: mol_type = other RNA
gtgataacagactcattct

SEQ ID NO: 25560 - RNA, 19 nt, synthetic construct
  misc_feature 1..19: note = siRNA sense sequence
  source 1..19: mol_type = other RNA
aatgagtctgttatcacca

SEQ ID NO: 25561 - RNA, 19 nt, synthetic construct
  misc_feature 1..19: note = siRNA antisense sequence
  source 1..19: mol_type = other RNA
tggtgataacagactcatt

SEQ ID NO: 25562 - RNA, 19 nt, synthetic construct
  misc_feature 1..19: note = siRNA sense sequence
  source 1..19: mol_type = other RNA
atgagtctgttatcaccac

SEQ ID NO: 25563 - RNA, 19 nt, synthetic construct
  misc_feature 1..19: note = siRNA antisense sequence
  source 1..19: mol_type = other RNA
gtggtgataacagactcat

SEQ ID NO: 25564 - RNA, 19 nt, synthetic construct
  misc_feature 1..19: note = siRNA sense sequence
  source 1..19: mol_type = other RNA
tgagtctgttatcaccaca

SEQ ID NO: 25565 - RNA, 19 nt, synthetic construct
  misc_feature 1..19: note = siRNA antisense sequence
  source 1..19: mol_type = other RNA
tgtggtgataacagactca

SEQ ID NO: 25566 - RNA, 19 nt, synthetic construct
  misc_feature 1..19: note = siRNA sense sequence
  source 1..19: mol_type = other RNA
tgttatcaccacagtaaat

SEQ ID NO: 25567 - RNA, 19 nt, synthetic construct
  misc_feature 1..19: note = siRNA antisense sequence
  source 1..19: mol_type = other RNA
atttactgtggtgataaca

SEQ ID NO: 25568 - RNA, 19 nt, synthetic construct
  misc_feature 1..19: note = siRNA sense sequence
  source 1..19: mol_type = other RNA
gttatcaccacagtaaatt

SEQ ID NO: 25569 - RNA, 19 nt, synthetic construct
  misc_feature 1..19: note = siRNA antisense sequence
  source 1..19: mol_type = other RNA
aatttactgtggtgataac

SEQ ID NO: 25570 - RNA, 19 nt, synthetic construct
  misc_feature 1..19: note = siRNA sense sequence
  source 1..19: mol_type = other RNA
tatcaccacagtaaatttc

SEQ ID NO: 25571 - RNA, 19 nt, synthetic construct
  misc_feature 1..19: note = siRNA antisense sequence
  source 1..19: mol_type = other RNA
gaaatttactgtggtgata

SEQ ID NO: 25572 - RNA, 19 nt, synthetic construct
  misc_feature 1..19: note = siRNA sense sequence
  source 1..19: mol_type = other RNA
atcaccacagtaaatttct

SEQ ID NO: 25573 - RNA, 19 nt, synthetic construct
  misc_feature 1..19: note = siRNA antisense sequence
  source 1..19: mol_type = other RNA
agaaatttactgtggtgat

SEQ ID NO: 25574 - RNA, 19 nt, synthetic construct
  misc_feature 1..19: note = siRNA sense sequence
  source 1..19: mol_type = other RNA
ccacagtaaatttctcact

SEQ ID NO: 25575 - RNA, 19 nt, synthetic construct
  misc_feature 1..19: note = siRNA antisense sequence
  source 1..19: mol_type = other RNA
agtgagaaatttactgtgg

SEQ ID NO: 25576 - RNA, 19 nt, synthetic construct
  misc_feature 1..19: note = siRNA sense sequence
  source 1..19: mol_type = other RNA
cacagtaaatttctcactc

SEQ ID NO: 25577 - RNA, 19 nt, synthetic construct
  misc_feature 1..19: note = siRNA antisense sequence
  source 1..19: mol_type = other RNA
gagtgagaaatttactgtg

SEQ ID NO: 25578 - RNA, 19 nt, synthetic construct
  misc_feature 1..19: note = siRNA sense sequence
  source 1..19: mol_type = other RNA
acagtaaatttctcactct

SEQ ID NO: 25579 - RNA, 19 nt, synthetic construct
  misc_feature 1..19: note = siRNA antisense sequence
  source 1..19: mol_type = other RNA
agagtgagaaatttactgt

SEQ ID NO: 25580 - RNA, 19 nt, synthetic construct
  misc_feature 1..19: note = siRNA sense sequence
  source 1..19: mol_type = other RNA
taaatttctcactctgggc

SEQ ID NO: 25581 - RNA, 19 nt, synthetic construct
  misc_feature 1..19: note = siRNA antisense sequence
  source 1..19: mol_type = other RNA
gcccagagtgagaaattta

SEQ ID NO: 25582 - RNA, 19 nt, synthetic construct
  misc_feature 1..19: note = siRNA sense sequence
  source 1..19: mol_type = other RNA
atttctcactctgggccta

SEQ ID NO: 25583 - RNA, 19 nt, synthetic construct
  misc_feature 1..19: note = siRNA antisense sequence
  source 1..19: mol_type = other RNA
taggcccagagtgagaaat

SEQ ID NO: 25584 - RNA, 19 nt, synthetic construct
  misc_feature 1..19: note = siRNA sense sequence
  source 1..19: mol_type = other RNA
tttctcactctgggcctaa

SEQ ID NO: 25585 - RNA, 19 nt, synthetic construct
  misc_feature 1..19: note = siRNA antisense sequence
  source 1..19: mol_type = other RNA
ttaggcccagagtgagaaa

SEQ ID NO: 25586 - RNA, 19 nt, synthetic construct
  misc_feature 1..19: note = siRNA sense sequence
  source 1..19: mol_type = other RNA
ttctcactctgggcctaac

SEQ ID NO: 25587 - RNA, 19 nt, synthetic construct
  misc_feature 1..19: note = siRNA antisense sequence
  source 1..19: mol_type = other RNA
gttaggcccagagtgagaa

SEQ ID NO: 25588 - RNA, 19 nt, synthetic construct
  misc_feature 1..19: note = siRNA sense sequence
  source 1..19: mol_type = other RNA
tctcactctgggcctaact

SEQ ID NO: 25589 - RNA, 19 nt, synthetic construct
  misc_feature 1..19: note = siRNA antisense sequence
  source 1..19: mol_type = other RNA
agttaggcccagagtgaga

SEQ ID NO: 25590 - RNA, 19 nt, synthetic construct
  misc_feature 1..19: note = siRNA sense sequence
  source 1..19: mol_type = other RNA
ctcactctgggcctaactc

SEQ ID NO: 25591 - RNA, 19 nt, synthetic construct
  misc_feature 1..19: note = siRNA antisense sequence
  source 1..19: mol_type = other RNA
gagttaggcccagagtgag

SEQ ID NO: 25592 - RNA, 19 nt, synthetic construct
  misc_feature 1..19: note = siRNA sense sequence
  source 1..19: mol_type = other RNA
tcactctgggcctaactcc

SEQ ID NO: 25593 - RNA, 19 nt, synthetic construct
  misc_feature 1..19: note = siRNA antisense sequence
  source 1..19: mol_type = other RNA
ggagttaggcccagagtga

SEQ ID NO: 25594 - RNA, 19 nt, synthetic construct
  misc_feature 1..19: note = siRNA sense sequence
  source 1..19: mol_type = other RNA
cactctgggcctaactcct

SEQ ID NO: 25595 - RNA, 19 nt, synthetic construct
  misc_feature 1..19: note = siRNA antisense sequence
  source 1..19: mol_type = other RNA
aggagttaggcccagagtg

SEQ ID NO: 25596 - RNA, 19 nt, synthetic construct
  misc_feature 1..19: note = siRNA sense sequence
  source 1..19: mol_type = other RNA
tcctgtctttctgggaatc

SEQ ID NO: 25597 - RNA, 19 nt, synthetic construct
  misc_feature 1..19: note = siRNA antisense sequence
  source 1..19: mol_type = other RNA
gattcccagaaagacagga

SEQ ID NO: 25598 - RNA, 19 nt, synthetic construct
  misc_feature 1..19: note = siRNA sense sequence
  source 1..19: mol_type = other RNA
cctgtctttctgggaatca

SEQ ID NO: 25599 - RNA, 19 nt, synthetic construct
  misc_feature 1..19: note = siRNA antisense sequence
  source 1..19: mol_type = other RNA
tgattcccagaaagacagg

SEQ ID NO: 25600 - RNA, 19 nt, synthetic construct
  misc_feature 1..19: note = siRNA sense sequence
  source 1..19: mol_type = other RNA
ctgtctttctgggaatcat

SEQ ID NO: 25601 - RNA, 19 nt, synthetic construct
  misc_feature 1..19: note = siRNA antisense sequence
  source 1..19: mol_type = other RNA
atgattcccagaaagacag

SEQ ID NO: 25602 - RNA, 19 nt, synthetic construct
  misc_feature 1..19: note = siRNA sense sequence
  source 1..19: mol_type = other RNA
tgtctttctgggaatcatt

SEQ ID NO: 25603 - RNA, 19 nt, synthetic construct
  misc_feature 1..19: note = siRNA antisense sequence
  source 1..19: mol_type = other RNA
aatgattcccagaaagaca

SEQ ID NO: 25604 - RNA, 19 nt, synthetic construct
  misc_feature 1..19: note = siRNA sense sequence
  source 1..19: mol_type = other RNA
acctttatctctgatcctg

SEQ ID NO: 25605 - RNA, 19 nt, synthetic construct
  misc_feature 1..19: note = siRNA antisense sequence
  source 1..19: mol_type = other RNA
caggatcagagataaaggt

SEQ ID NO: 25606 - RNA, 19 nt, synthetic construct
  misc_feature 1..19: note = siRNA sense sequence
  source 1..19: mol_type = other RNA
cctttatctctgatcctgt

SEQ ID NO: 25607 - RNA, 19 nt, synthetic construct
  misc_feature 1..19: note = siRNA antisense sequence
  source 1..19: mol_type = other RNA
acaggatcagagataaagg

SEQ ID NO: 25608 - RNA, 19 nt, synthetic construct
  misc_feature 1..19: note = siRNA sense sequence
  source 1..19: mol_type = other RNA
ctttatctctgatcctgta

SEQ ID NO: 25609 - RNA, 19 nt, synthetic construct
  misc_feature 1..19: note = siRNA antisense sequence
  source 1..19: mol_type = other RNA
tacaggatcagagataaag

SEQ ID NO: 25610 - RNA, 19 nt, synthetic construct
  misc_feature 1..19: note = siRNA sense sequence
  source 1..19: mol_type = other RNA
tttatctctgatcctgtac

SEQ ID NO: 25611 - RNA, 19 nt, synthetic construct
  misc_feature 1..19: note = siRNA antisense sequence
  source 1..19: mol_type = other RNA
gtacaggatcagagataaa

SEQ ID NO: 25612 - RNA, 19 nt, synthetic construct
  misc_feature 1..19: note = siRNA sense sequence
  source 1..19: mol_type = other RNA
ttatctctgatcctgtact

SEQ ID NO: 25613 - RNA, 19 nt, synthetic construct
  misc_feature 1..19: note = siRNA antisense sequence
  source 1..19: mol_type = other RNA
agtacaggatcagagataa

SEQ ID NO: 25614 - RNA, 19 nt, synthetic construct
  misc_feature 1..19: note = siRNA sense sequence
  source 1..19: mol_type = other RNA
tatctctgatcctgtactt

SEQ ID NO: 25615 - RNA, 19 nt, synthetic construct
  misc_feature 1..19: note = siRNA antisense sequence
  source 1..19: mol_type = other RNA
aagtacaggatcagagata

SEQ ID NO: 25616 - RNA, 19 nt, synthetic construct
  misc_feature 1..19: note = siRNA sense sequence
  source 1..19: mol_type = other RNA
atctctgatcctgtacttt

SEQ ID NO: 25617 - RNA, 19 nt, synthetic construct
  misc_feature 1..19: note = siRNA antisense sequence
  source 1..19: mol_type = other RNA
aaagtacaggatcagagat

SEQ ID NO: 25618 - RNA, 19 nt, synthetic construct
  misc_feature 1..19: note = siRNA sense sequence
  source 1..19: mol_type = other RNA
gatcctgtactttccctag

SEQ ID NO: 25619 - RNA, 19 nt, synthetic construct
  misc_feature 1..19: note = siRNA antisense sequence
  source 1..19: mol_type = other RNA
ctagggaaagtacaggatc

SEQ ID NO: 25620 - RNA, 19 nt, synthetic construct
  misc_feature 1..19: note = siRNA sense sequence
  source 1..19: mol_type = other RNA
atcctgtactttccctagg

SEQ ID NO: 25621 - RNA, 19 nt, synthetic construct
  misc_feature 1..19: note = siRNA antisense sequence
  source 1..19: mol_type = other RNA
cctagggaaagtacaggat

SEQ ID NO: 25622 - RNA, 19 nt, synthetic construct
  misc_feature 1..19: note = siRNA sense sequence
  source 1..19: mol_type = other RNA
tcctgtactttccctaggt

SEQ ID NO: 25623 - RNA, 19 nt, synthetic construct
  misc_feature 1..19: note = siRNA antisense sequence
  source 1..19: mol_type = other RNA
acctagggaaagtacagga

SEQ ID NO: 25624 - RNA, 19 nt, synthetic construct
  misc_feature 1..19: note = siRNA sense sequence
  source 1..19: mol_type = other RNA
cctgtactttccctaggtc

SEQ ID NO: 25625 - RNA, 19 nt, synthetic construct
  misc_feature 1..19: note = siRNA antisense sequence
  source 1..19: mol_type = other RNA
gacctagggaaagtacagg

SEQ ID NO: 25626 - RNA, 19 nt, synthetic construct
  misc_feature 1..19: note = siRNA sense sequence
  source 1..19: mol_type = other RNA
tttccctaggtcagagtaa

SEQ ID NO: 25627 - RNA, 19 nt, synthetic construct
  misc_feature 1..19: note = siRNA antisense sequence
  source 1..19: mol_type = other RNA
ttactctgacctagggaaa

SEQ ID NO: 25628 - RNA, 19 nt, synthetic construct
  misc_feature 1..19: note = siRNA sense sequence
  source 1..19: mol_type = other RNA
ttccctaggtcagagtaaa

SEQ ID NO: 25629 - RNA, 19 nt, synthetic construct
  misc_feature 1..19: note = siRNA antisense sequence
  source 1..19: mol_type = other RNA
tttactctgacctagggaa

SEQ ID NO: 25630 - RNA, 19 nt, synthetic construct
  misc_feature 1..19: note = siRNA sense sequence
  source 1..19: mol_type = other RNA
tccctaggtcagagtaaaa

SEQ ID NO: 25631 - RNA, 19 nt, synthetic construct
  misc_feature 1..19: note = siRNA antisense sequence
  source 1..19: mol_type = other RNA
ttttactctgacctaggga

SEQ ID NO: 25632 - RNA, 19 nt, synthetic construct
  misc_feature 1..19: note = siRNA sense sequence
  source 1..19: mol_type = other RNA
ccctaggtcagagtaaaat

SEQ ID NO: 25633 - RNA, 19 nt, synthetic construct
  misc_feature 1..19: note = siRNA antisense sequence
  source 1..19: mol_type = other RNA
attttactctgacctaggg

SEQ ID NO: 25634 - RNA, 19 nt, synthetic construct
  misc_feature 1..19: note = siRNA sense sequence
  source 1..19: mol_type = other RNA
cctaggtcagagtaaaata

SEQ ID NO: 25635 - RNA, 19 nt, synthetic construct
  misc_feature 1..19: note = siRNA antisense sequence
  source 1..19: mol_type = other RNA
tattttactctgacctagg

SEQ ID NO: 25636 - RNA, 19 nt, synthetic construct
  misc_feature 1..19: note = siRNA sense sequence
  source 1..19: mol_type = other RNA
ctaggtcagagtaaaatat

SEQ ID NO: 25637 - RNA, 19 nt, synthetic construct
  misc_feature 1..19: note = siRNA antisense sequence
  source 1..19: mol_type = other RNA
atattttactctgacctag

SEQ ID NO: 25638 - RNA, 19 nt, synthetic construct
  misc_feature 1..19: note = siRNA sense sequence
  source 1..19: mol_type = other RNA
cagagtaaaatataatggg

SEQ ID NO: 25639 - RNA, 19 nt, synthetic construct
  misc_feature 1..19: note = siRNA antisense sequence
  source 1..19: mol_type = other RNA
cccattatattttactctg

SEQ ID NO: 25640 - RNA, 19 nt, synthetic construct
  misc_feature 1..19: note = siRNA sense sequence
  source 1..19: mol_type = other RNA
ttgtgaggatcaataaagt

SEQ ID NO: 25641 - RNA, 19 nt, synthetic construct
  misc_feature 1..19: note = siRNA antisense sequence
  source 1..19: mol_type = other RNA
actttattgatcctcacaa

SEQ ID NO: 25642 - RNA, 19 nt, synthetic construct
  misc_feature 1..19: note = siRNA sense sequence
  source 1..19: mol_type = other RNA
gtgaggatcaataaagtag

SEQ ID NO: 25643 - RNA, 19 nt, synthetic construct
  misc_feature 1..19: note = siRNA antisense sequence
  source 1..19: mol_type = other RNA
ctactttattgatcctcac

SEQ ID NO: 25644 - RNA, 19 nt, synthetic construct
  misc_feature 1..19: note = siRNA sense sequence
  source 1..19: mol_type = other RNA
aatttaggactttgcaaag

SEQ ID NO: 25645 - RNA, 19 nt, synthetic construct
  misc_feature 1..19: note = siRNA antisense sequence
  source 1..19: mol_type = other RNA
ctttgcaaagtcctaaatt

SEQ ID NO: 25646 - RNA, 19 nt, synthetic construct
  misc_feature 1..19: note = siRNA sense sequence
  source 1..19: mol_type = other RNA
atttaggactttgcaaagg

SEQ ID NO: 25647 - RNA, 19 nt, synthetic construct
  misc_feature 1..19: note = siRNA antisense sequence
  source 1..19: mol_type = other RNA
cctttgcaaagtcctaaat

SEQ ID NO: 25648 - RNA, 19 nt, synthetic construct
  misc_feature 1..19: note = siRNA sense sequence
  source 1..19: mol_type = other RNA
tttaggactttgcaaagga

SEQ ID NO: 25649 - RNA, 19 nt, synthetic construct
  misc_feature 1..19: note = siRNA antisense sequence
  source 1..19: mol_type = other RNA
tcctttgcaaagtcctaaa

SEQ ID NO: 25650 - RNA, 19 nt, synthetic construct
  misc_feature 1..19: note = siRNA sense sequence
  source 1..19: mol_type = other RNA
ggactttgcaaaggatgtt

SEQ ID NO: 25651 - RNA, 19 nt, synthetic construct
  misc_feature 1..19: note = siRNA antisense sequence
  source 1..19: mol_type = other RNA
aacatcctttgcaaagtcc

SEQ ID NO: 25652 - RNA, 19 nt, synthetic construct
  misc_feature 1..19: note = siRNA sense sequence
  source 1..19: mol_type = other RNA
gactttgcaaaggatgttg

SEQ ID NO: 25653 - RNA, 19 nt, synthetic construct
  misc_feature 1..19: note = siRNA antisense sequence
  source 1..19: mol_type = other RNA
caacatcctttgcaaagtc

SEQ ID NO: 25654 - RNA, 19 nt, synthetic construct
  misc_feature 1..19: note = siRNA sense sequence
  source 1..19: mol_type = other RNA
aaggatgttgcacaccaaa

SEQ ID NO: 25655 - RNA, 19 nt, synthetic construct
  misc_feature 1..19: note = siRNA antisense sequence
  source 1..19: mol_type = other RNA
tttggtgtgcaacatcctt

SEQ ID NO: 25656 - RNA, 19 nt, synthetic construct
  misc_feature 1..19: note = siRNA sense sequence
  source 1..19: mol_type = other RNA
aggatgttgcacaccaaaa

SEQ ID NO: 25657 - RNA, 19 nt, synthetic construct
  misc_feature 1..19: note = siRNA antisense sequence
  source 1..19: mol_type = other RNA
ttttggtgtgcaacatcct

SEQ ID NO: 25658 - RNA, 19 nt, synthetic construct
  misc_feature 1..19: note = siRNA sense sequence
  source 1..19: mol_type = other RNA
ttcaacgattatttgctac

SEQ ID NO: 25659 - RNA, 19 nt, synthetic construct
  misc_feature 1..19: note = siRNA antisense sequence
  source 1..19: mol_type = other RNA
gtagcaaataatcgttgaa

SEQ ID NO: 25660 - RNA, 19 nt, synthetic construct
  misc_feature 1..19: note = siRNA sense sequence
  source 1..19: mol_type = other RNA
tcaacgattatttgctaca

SEQ ID NO: 25661 - RNA, 19 nt, synthetic construct
  misc_feature 1..19: note = siRNA antisense sequence
  source 1..19: mol_type = other RNA
tgtagcaaataatcgttga

SEQ ID NO: 25662 - RNA, 19 nt, synthetic construct
  misc_feature 1..19: note = siRNA sense sequence
  source 1..19: mol_type = other RNA
caacgattatttgctacag

SEQ ID NO: 25663 - RNA, 19 nt, synthetic construct
  misc_feature 1..19: note = siRNA antisense sequence
  source 1..19: mol_type = other RNA
ctgtagcaaataatcgttg

SEQ ID NO: 25664 - RNA, 19 nt, synthetic construct
  misc_feature 1..19: note = siRNA sense sequence
  source 1..19: mol_type = other RNA
aacgattatttgctacagt

SEQ ID NO: 25665 - RNA, 19 nt, synthetic construct
  misc_feature 1..19: note = siRNA antisense sequence
  source 1..19: mol_type = other RNA
actgtagcaaataatcgtt

SEQ ID NO: 25666 - RNA, 19 nt, synthetic construct
  misc_feature 1..19: note = siRNA sense sequence
  source 1..19: mol_type = other RNA
acgattatttgctacagtt

SEQ ID NO: 25667 - RNA, 19 nt, synthetic construct
  misc_feature 1..19: note = siRNA antisense sequence
  source 1..19: mol_type = other RNA
aactgtagcaaataatcgt

SEQ ID NO: 25668 - RNA, 19 nt, synthetic construct
  misc_feature 1..19: note = siRNA sense sequence
  source 1..19: mol_type = other RNA
cgattatttgctacagtta

SEQ ID NO: 25669 - RNA, 19 nt, synthetic construct
  misc_feature 1..19: note = siRNA antisense sequence
  source 1..19: mol_type = other RNA
taactgtagcaaataatcg

SEQ ID NO: 25670 - RNA, 19 nt, synthetic construct
  misc_feature 1..19: note = siRNA sense sequence
  source 1..19: mol_type = other RNA
gattatttgctacagttac

SEQ ID NO: 25671 - RNA, 19 nt, synthetic construct
  misc_feature 1..19: note = siRNA antisense sequence
  source 1..19: mol_type = other RNA
gtaactgtagcaaataatc

SEQ ID NO: 25672 - RNA, 19 nt, synthetic construct
  misc_feature 1..19: note = siRNA sense sequence
  source 1..19: mol_type = other RNA
ttatttgctacagttacca

SEQ ID NO: 25673 - RNA, 19 nt, synthetic construct
  misc_feature 1..19: note = siRNA antisense sequence
  source 1..19: mol_type = other RNA
tggtaactgtagcaaataa

SEQ ID NO: 25674 - RNA, 19 nt, synthetic construct
  misc_feature 1..19: note = siRNA sense sequence
  source 1..19: mol_type = other RNA
tatttgctacagttaccaa

SEQ ID NO: 25675 - RNA, 19 nt, synthetic construct
  misc_feature 1..19: note = siRNA antisense sequence
  source 1..19: mol_type = other RNA
ttggtaactgtagcaaata

SEQ ID NO: 25676 - RNA, 19 nt, synthetic construct
  misc_feature 1..19: note = siRNA sense sequence
  source 1..19: mol_type = other RNA
gctacagttaccaaagatt

SEQ ID NO: 25677 - RNA, 19 nt, synthetic construct
  misc_feature 1..19: note = siRNA antisense sequence
  source 1..19: mol_type = other RNA
aatctttggtaactgtagc

SEQ ID NO: 25678 - RNA, 19 nt, synthetic construct
  misc_feature 1..19: note = siRNA sense sequence
  source 1..19: mol_type = other RNA
ctacagttaccaaagatta

SEQ ID NO: 25679 - RNA, 19 nt, synthetic construct
  misc_feature 1..19: note = siRNA antisense sequence
  source 1..19: mol_type = other RNA
taatctttggtaactgtag

SEQ ID NO: 25680 - RNA, 19 nt, synthetic construct
  misc_feature 1..19: note = siRNA sense sequence
  source 1..19: mol_type = other RNA
attgcatttgtgaataacc

SEQ ID NO: 25681 - RNA, 19 nt, synthetic construct
  misc_feature 1..19: note = siRNA antisense sequence
  source 1..19: mol_type = other RNA
ggttattcacaaatgcaat

SEQ ID NO: 25682 - RNA, 19 nt, synthetic construct
  misc_feature 1..19: note = siRNA sense sequence
  source 1..19: mol_type = other RNA
ttgcatttgtgaataacca

SEQ ID NO: 25683 - RNA, 19 nt, synthetic construct
  misc_feature 1..19: note = siRNA antisense sequence
  source 1..19: mol_type = other RNA
tggttattcacaaatgcaa

SEQ ID NO: 25684 - RNA, 19 nt, synthetic construct
  misc_feature 1..19: note = siRNA sense sequence
  source 1..19: mol_type = other RNA
tgcatttgtgaataaccaa

SEQ ID NO: 25685 - RNA, 19 nt, synthetic construct
  misc_feature 1..19: note = siRNA antisense sequence
  source 1..19: mol_type = other RNA
ttggttattcacaaatgca

SEQ ID NO: 25686 - RNA, 19 nt, synthetic construct
  misc_feature 1..19: note = siRNA sense sequence
  source 1..19: mol_type = other RNA
gcatttgtgaataaccaag

SEQ ID NO: 25687 - RNA, 19 nt, synthetic construct
  misc_feature 1..19: note = siRNA antisense sequence
  source 1..19: mol_type = other RNA
cttggttattcacaaatgc

SEQ ID NO: 25688 - RNA, 19 nt, synthetic construct
  misc_feature 1..19: note = siRNA sense sequence
  source 1..19: mol_type = other RNA
catttgtgaataaccaagt

SEQ ID NO: 25689 - RNA, 19 nt, synthetic construct
  misc_feature 1..19: note = siRNA antisense sequence
  source 1..19: mol_type = other RNA
acttggttattcacaaatg

SEQ ID NO: 25690 - RNA, 19 nt, synthetic construct
  misc_feature 1..19: note = siRNA sense sequence
  source 1..19: mol_type = other RNA
ttgtgaataaccaagtatg

SEQ ID NO: 25691 - RNA, 19 nt, synthetic construct
  misc_feature 1..19: note = siRNA antisense sequence
  source 1..19: mol_type = other RNA
catacttggttattcacaa

SEQ ID NO: 25692 - RNA, 19 nt, synthetic construct
  misc_feature 1..19: note = siRNA sense sequence
  source 1..19: mol_type = other RNA
tgtgaataaccaagtatga

SEQ ID NO: 25693 - RNA, 19 nt, synthetic construct
  misc_feature 1..19: note = siRNA antisense sequence
  source 1..19: mol_type = other RNA
tcatacttggttattcaca

SEQ ID NO: 25694 - RNA, 19 nt, synthetic construct
  misc_feature 1..19: note = siRNA sense sequence
  source 1..19: mol_type = other RNA
aaatcatccatgtcattct

SEQ ID NO: 25695 - RNA, 19 nt, synthetic construct
  misc_feature 1..19: note = siRNA antisense sequence
  source 1..19: mol_type = other RNA
agaatgacatggatgattt

SEQ ID NO: 25696 - RNA, 19 nt, synthetic construct
  misc_feature 1..19: note = siRNA sense sequence
  source 1..19: mol_type = other RNA
agaggatatggtgtaagaa

SEQ ID NO: 25697 - RNA, 19 nt, synthetic construct
  misc_feature 1..19: note = siRNA antisense sequence
  source 1..19: mol_type = other RNA
ttcttacaccatatcctct

SEQ ID NO: 25698 - RNA, 19 nt, synthetic construct
  misc_feature 1..19: note = siRNA sense sequence
  source 1..19: mol_type = other RNA
atgactcatgacaccaggc

SEQ ID NO: 25699 - RNA, 19 nt, synthetic construct
  misc_feature 1..19: note = siRNA antisense sequence
  source 1..19: mol_type = other RNA
gcctggtgtcatgagtcat

SEQ ID NO: 25700 - RNA, 19 nt, synthetic construct
  misc_feature 1..19: note = siRNA sense sequence
  source 1..19: mol_type = other RNA
tgactcatgacaccaggcc

SEQ ID NO: 25701 - RNA, 19 nt, synthetic construct
  misc_feature 1..19: note = siRNA antisense sequence
  source 1..19: mol_type = other RNA
ggcctggtgtcatgagtca

SEQ ID NO: 25702 - RNA, 19 nt, synthetic construct
  misc_feature 1..19: note = siRNA sense sequence
  source 1..19: mol_type = other RNA
gactcatgacaccaggccc

SEQ ID NO: 25703 - RNA, 19 nt, synthetic construct
  misc_feature 1..19: note = siRNA antisense sequence
  source 1..19: mol_type = other RNA
gggcctggtgtcatgagtc

SEQ ID NO: 25704 - RNA, 19 nt, synthetic construct
  misc_feature 1..19: note = siRNA sense sequence
  source 1..19: mol_type = other RNA
actcatgacaccaggccct

SEQ ID NO: 25705 - RNA, 19 nt, synthetic construct
  misc_feature 1..19: note = siRNA antisense sequence
  source 1..19: mol_type = other RNA
agggcctggtgtcatgagt

SEQ ID NO: 25706 - RNA, 19 nt, synthetic construct
  misc_feature 1..19: note = siRNA sense sequence
  source 1..19: mol_type = other RNA
acaccaggccctgccacta

SEQ ID NO: 25707 - RNA, 19 nt, synthetic construct
  misc_feature 1..19: note = siRNA antisense sequence
  source 1..19: mol_type = other RNA
tagtggcagggcctggtgt

SEQ ID NO: 25708 - RNA, 19 nt, synthetic construct
  misc_feature 1..19: note = siRNA sense sequence
  source 1..19: mol_type = other RNA
caggccctgccactaggtt

SEQ ID NO: 25709 - RNA, 19 nt, synthetic construct
  misc_feature 1..19: note = siRNA antisense sequence
  source 1..19: mol_type = other RNA
aacctagtggcagggcctg

SEQ ID NO: 25710 - RNA, 19 nt, synthetic construct
  misc_feature 1..19: note = siRNA sense sequence
  source 1..19: mol_type = other RNA
aggccctgccactaggttg

SEQ ID NO: 25711 - RNA, 19 nt, synthetic construct
  misc_feature 1..19: note = siRNA antisense sequence
  source 1..19: mol_type = other RNA
caacctagtggcagggcct

SEQ ID NO: 25712 - RNA, 19 nt, synthetic construct
  misc_feature 1..19: note = siRNA sense sequence
  source 1..19: mol_type = other RNA
ggccctgccactaggttgt

SEQ ID NO: 25713 - RNA, 19 nt, synthetic construct
  misc_feature 1..19: note = siRNA antisense sequence
  source 1..19: mol_type = other RNA
acaacctagtggcagggcc

SEQ ID NO: 25714 - RNA, 19 nt, synthetic construct
  misc_feature 1..19: note = siRNA sense sequence
  source 1..19: mol_type = other RNA
gccctgccactaggttgtg

SEQ ID NO: 25715 - RNA, 19 nt, synthetic construct
  misc_feature 1..19: note = siRNA antisense sequence
  source 1..19: mol_type = other RNA
cacaacctagtggcagggc

SEQ ID NO: 25716 - RNA, 19 nt, synthetic construct
  misc_feature 1..19: note = siRNA sense sequence
  source 1..19: mol_type = other RNA
ccctgccactaggttgtgt

SEQ ID NO: 25717 - RNA, 19 nt, synthetic construct
  misc_feature 1..19: note = siRNA antisense sequence
  source 1..19: mol_type = other RNA
acacaacctagtggcaggg

SEQ ID NO: 25718 - RNA, 19 nt, synthetic construct
  misc_feature 1..19: note = siRNA sense sequence
  source 1..19: mol_type = other RNA
cctgccactaggttgtgtg

SEQ ID NO: 25719 - RNA, 19 nt, synthetic construct
  misc_feature 1..19: note = siRNA antisense sequence
  source 1..19: mol_type = other RNA
cacacaacctagtggcagg

SEQ ID NO: 25720 - RNA, 19 nt, synthetic construct
  misc_feature 1..19: note = siRNA sense sequence
  source 1..19: mol_type = other RNA
ctgccactaggttgtgtga

SEQ ID NO: 25721 - RNA, 19 nt, synthetic construct
  misc_feature 1..19: note = siRNA antisense sequence
  source 1..19: mol_type = other RNA
tcacacaacctagtggcag

SEQ ID NO: 25722 - RNA, 19 nt, synthetic construct
  misc_feature 1..19: note = siRNA sense sequence
  source 1..19: mol_type = other RNA
tgccactaggttgtgtgac

SEQ ID NO: 25723 - RNA, 19 nt, synthetic construct
  misc_feature 1..19: note = siRNA antisense sequence
  source 1..19: mol_type = other RNA
gtcacacaacctagtggca

SEQ ID NO: 25724 - RNA, 19 nt, synthetic construct
  misc_feature 1..19: note = siRNA sense sequence
  source 1..19: mol_type = other RNA
gccactaggttgtgtgact

SEQ ID NO: 25725 - RNA, 19 nt, synthetic construct
  misc_feature 1..19: note = siRNA antisense sequence
  source 1..19: mol_type = other RNA
agtcacacaacctagtggc

SEQ ID NO: 25726 - RNA, 19 nt, synthetic construct
  misc_feature 1..19: note = siRNA sense sequence
  source 1..19: mol_type = other RNA
ccactaggttgtgtgactt

SEQ ID NO: 25727 - RNA, 19 nt, synthetic construct
  misc_feature 1..19: note = siRNA antisense sequence
  source 1..19: mol_type = other RNA
aagtcacacaacctagtgg

SEQ ID NO: 25728 - RNA, 19 nt, synthetic construct
  misc_feature 1..19: note = siRNA sense sequence
  source 1..19: mol_type = other RNA
aggttgtgtgacttgagga

SEQ ID NO: 25729 - RNA, 19 nt, synthetic construct
  misc_feature 1..19: note = siRNA antisense sequence
  source 1..19: mol_type = other RNA
tcctcaagtcacacaacct

SEQ ID NO: 25730 - RNA, 19 nt, synthetic construct
  misc_feature 1..19: note = siRNA sense sequence
  source 1..19: mol_type = other RNA
agagttggtttcttcatct

SEQ ID NO: 25731 - RNA, 19 nt, synthetic construct
  misc_feature 1..19: note = siRNA antisense sequence
  source 1..19: mol_type = other RNA
agatgaagaaaccaactct

SEQ ID NO: 25732 - RNA, 19 nt, synthetic construct
  misc_feature 1..19: note = siRNA sense sequence
  source 1..19: mol_type = other RNA
gagttggtttcttcatctg

SEQ ID NO: 25733 - RNA, 19 nt, synthetic construct
  misc_feature 1..19: note = siRNA antisense sequence
  source 1..19: mol_type = other RNA
cagatgaagaaaccaactc

SEQ ID NO: 25734 - RNA, 19 nt, synthetic construct
  misc_feature 1..19: note = siRNA sense sequence
  source 1..19: mol_type = other RNA
agttggtttcttcatctgc

SEQ ID NO: 25735 - RNA, 19 nt, synthetic construct
  misc_feature 1..19: note = siRNA antisense sequence
  source 1..19: mol_type = other RNA
gcagatgaagaaaccaact

SEQ ID NO: 25736 - RNA, 19 nt, synthetic construct
  misc_feature 1..19: note = siRNA sense sequence
  source 1..19: mol_type = other RNA
atctgcagaatgagcaaag

SEQ ID NO: 25737 - RNA, 19 nt, synthetic construct
  misc_feature 1..19: note = siRNA antisense sequence
  source 1..19: mol_type = other RNA
ctttgctcattctgcagat

SEQ ID NO: 25738 - RNA, 19 nt, synthetic construct
  misc_feature 1..19: note = siRNA sense sequence
  source 1..19: mol_type = other RNA
tctgcagaatgagcaaaga

SEQ ID NO: 25739 - RNA, 19 nt, synthetic construct
  misc_feature 1..19: note = siRNA antisense sequence
  source 1..19: mol_type = other RNA
tctttgctcattctgcaga

SEQ ID NO: 25740 - RNA, 19 nt, synthetic construct
  misc_feature 1..19: note = siRNA sense sequence
  source 1..19: mol_type = other RNA
ctgcagaatgagcaaagaa

SEQ ID NO: 25741 - RNA, 19 nt, synthetic construct
  misc_feature 1..19: note = siRNA antisense sequence
  source 1..19: mol_type = other RNA
ttctttgctcattctgcag

SEQ ID NO: 25742 - RNA, 19 nt, synthetic construct
  misc_feature 1..19: note = siRNA sense sequence
  source 1..19: mol_type = other RNA
tgagcaaagaagggtggct

SEQ ID NO: 25743 - RNA, 19 nt, synthetic construct
  misc_feature 1..19: note = siRNA antisense sequence
  source 1..19: mol_type = other RNA
agccacccttctttgctca

SEQ ID NO: 25744 - RNA, 19 nt, synthetic construct
  misc_feature 1..19: note = siRNA sense sequence
  source 1..19: mol_type = other RNA
agcaaagaagggtggctct

SEQ ID NO: 25745 - RNA, 19 nt, synthetic construct
  misc_feature 1..19: note = siRNA antisense sequence
  source 1..19: mol_type = other RNA
agagccacccttctttgct

SEQ ID NO: 25746 - RNA, 19 nt, synthetic construct
  misc_feature 1..19: note = siRNA sense sequence
  source 1..19: mol_type = other RNA
agaagggtggctcttgact

SEQ ID NO: 25747 - RNA, 19 nt, synthetic construct
  misc_feature 1..19: note = siRNA antisense sequence
  source 1..19: mol_type = other RNA
agtcaagagccacccttct

SEQ ID NO: 25748 - RNA, 19 nt, synthetic construct
  misc_feature 1..19: note = siRNA sense sequence
  source 1..19: mol_type = other RNA
gaagggtggctcttgactt

SEQ ID NO: 25749 - RNA, 19 nt, synthetic construct
  misc_feature 1..19: note = siRNA antisense sequence
  source 1..19: mol_type = other RNA
aagtcaagagccacccttc

SEQ ID NO: 25750 - RNA, 19 nt, synthetic construct
  misc_feature 1..19: note = siRNA sense sequence
  source 1..19: mol_type = other RNA
aagggtggctcttgacttc

SEQ ID NO: 25751 - RNA, 19 nt, synthetic construct
  misc_feature 1..19: note = siRNA antisense sequence
  source 1..19: mol_type = other RNA
gaagtcaagagccaccctt

SEQ ID NO: 25752 - RNA, 19 nt, synthetic construct
  misc_feature 1..19: note = siRNA sense sequence
  source 1..19: mol_type = other RNA
agggtggctcttgacttca

SEQ ID NO: 25753 - RNA, 19 nt, synthetic construct
  misc_feature 1..19: note = siRNA antisense sequence
  source 1..19: mol_type = other RNA
tgaagtcaagagccaccct

SEQ ID NO: 25754 - RNA, 19 nt, synthetic construct
  misc_feature 1..19: note = siRNA sense sequence
  source 1..19: mol_type = other RNA
gggtggctcttgacttcat

SEQ ID NO: 25755 - RNA, 19 nt, synthetic construct
  misc_feature 1..19: note = siRNA antisense sequence
  source 1..19: mol_type = other RNA
atgaagtcaagagccaccc

SEQ ID NO: 25756 - RNA, 19 nt, synthetic construct
  misc_feature 1..19: note = siRNA sense sequence
  source 1..19: mol_type = other RNA
ggtggctcttgacttcata

SEQ ID NO: 25757 - RNA, 19 nt, synthetic construct
  misc_feature 1..19: note = siRNA antisense sequence
  source 1..19: mol_type = other RNA
tatgaagtcaagagccacc

SEQ ID NO: 25758 - RNA, 19 nt, synthetic construct
  misc_feature 1..19: note = siRNA sense sequence
  source 1..19: mol_type = other RNA
gtggctcttgacttcataa

SEQ ID NO: 25759 - RNA, 19 nt, synthetic construct
  misc_feature 1..19: note = siRNA antisense sequence
  source 1..19: mol_type = other RNA
ttatgaagtcaagagccac

SEQ ID NO: 25760 - RNA, 19 nt, synthetic construct
  misc_feature 1..19: note = siRNA sense sequence
  source 1..19: mol_type = other RNA
tggctcttgacttcataat

SEQ ID NO: 25761 - RNA, 19 nt, synthetic construct
  misc_feature 1..19: note = siRNA antisense sequence
  source 1..19: mol_type = other RNA
attatgaagtcaagagcca

SEQ ID NO: 25762 - RNA, 19 nt, synthetic construct
  misc_feature 1..19: note = siRNA sense sequence
  source 1..19: mol_type = other RNA
ggctcttgacttcataatc

SEQ ID NO: 25763 - RNA, 19 nt, synthetic construct
  misc_feature 1..19: note = siRNA antisense sequence
  source 1..19: mol_type = other RNA
gattatgaagtcaagagcc

SEQ ID NO: 25764 - RNA, 19 nt, synthetic construct
  misc_feature 1..19: note = siRNA sense sequence
  source 1..19: mol_type = other RNA
ctcttgacttcataatctc

SEQ ID NO: 25765 - RNA, 19 nt, synthetic construct
  misc_feature 1..19: note = siRNA antisense sequence
  source 1..19: mol_type = other RNA
gagattatgaagtcaagag

SEQ ID NO: 25766 - RNA, 19 nt, synthetic construct
  misc_feature 1..19: note = siRNA sense sequence
  source 1..19: mol_type = other RNA
tcttgacttcataatctct

SEQ ID NO: 25767 - RNA, 19 nt, synthetic construct
  misc_feature 1..19: note = siRNA antisense sequence
  source 1..19: mol_type = other RNA
agagattatgaagtcaaga

SEQ ID NO: 25768 - RNA, 19 nt, synthetic construct
  misc_feature 1..19: note = siRNA sense sequence
  source 1..19: mol_type = other RNA
cttgacttcataatctctc

SEQ ID NO: 25769 - RNA, 19 nt, synthetic construct
  misc_feature 1..19: note = siRNA antisense sequence
  source 1..19: mol_type = other RNA
gagagattatgaagtcaag

SEQ ID NO: 25770 - RNA, 19 nt, synthetic construct
  misc_feature 1..19: note = siRNA sense sequence
  source 1..19: mol_type = other RNA
ttgacttcataatctctct

SEQ ID NO: 25771 - RNA, 19 nt, synthetic construct
  misc_feature 1..19: note = siRNA antisense sequence
  source 1..19: mol_type = other RNA
agagagattatgaagtcaa

SEQ ID NO: 25772 - RNA, 19 nt, synthetic construct
  misc_feature 1..19: note = siRNA sense sequence
  source 1..19: mol_type = other RNA
tgacttcataatctctctt

SEQ ID NO: 25773 - RNA, 19 nt, synthetic construct
  misc_feature 1..19: note = siRNA antisense sequence
  source 1..19: mol_type = other RNA
aagagagattatgaagtca

SEQ ID NO: 25774 - RNA, 19 nt, synthetic construct
  misc_feature 1..19: note = siRNA sense sequence
  source 1..19: mol_type = other RNA
ttcataatctctcttgcag

SEQ ID NO: 25775 - RNA, 19 nt, synthetic construct
  misc_feature 1..19: note = siRNA antisense sequence
  source 1..19: mol_type = other RNA
ctgcaagagagattatgaa

SEQ ID NO: 25776 - RNA, 19 nt, synthetic construct
  misc_feature 1..19: note = siRNA sense sequence
  source 1..19: mol_type = other RNA
tcataatctctcttgcaga

SEQ ID NO: 25777 - RNA, 19 nt, synthetic construct
  misc_feature 1..19: note = siRNA antisense sequence
  source 1..19: mol_type = other RNA
tctgcaagagagattatga

SEQ ID NO: 25778 - RNA, 19 nt, synthetic construct
  misc_feature 1..19: note = siRNA sense sequence
  source 1..19: mol_type = other RNA
ctctcttgcagatatctga

SEQ ID NO: 25779 - RNA, 19 nt, synthetic construct
  misc_feature 1..19: note = siRNA antisense sequence
  source 1..19: mol_type = other RNA
tcagatatctgcaagagag

SEQ ID NO: 25780 - RNA, 19 nt, synthetic construct
  misc_feature 1..19: note = siRNA sense sequence
  source 1..19: mol_type = other RNA
ctcttgcagatatctgatt

SEQ ID NO: 25781 - RNA, 19 nt, synthetic construct
  misc_feature 1..19: note = siRNA antisense sequence
  source 1..19: mol_type = other RNA
aatcagatatctgcaagag

SEQ ID NO: 25782 - RNA, 19 nt, synthetic construct
  misc_feature 1..19: note = siRNA sense sequence
  source 1..19: mol_type = other RNA
tgcagatatctgattctac

SEQ ID NO: 25783 - RNA, 19 nt, synthetic construct
  misc_feature 1..19: note = siRNA antisense sequence
  source 1..19: mol_type = other RNA
gtagaatcagatatctgca

SEQ ID NO: 25784 - RNA, 19 nt, synthetic construct
  misc_feature 1..19: note = siRNA sense sequence
  source 1..19: mol_type = other RNA
gatatctgattctacttgg

SEQ ID NO: 25785 - RNA, 19 nt, synthetic construct
  misc_feature 1..19: note = siRNA antisense sequence
  source 1..19: mol_type = other RNA
ccaagtagaatcagatatc

SEQ ID NO: 25786 - RNA, 19 nt, synthetic construct
  misc_feature 1..19: note = siRNA sense sequence
  source 1..19: mol_type = other RNA
atatctgattctacttggt

SEQ ID NO: 25787 - RNA, 19 nt, synthetic construct
  misc_feature 1..19: note = siRNA antisense sequence
  source 1..19: mol_type = other RNA
accaagtagaatcagatat

SEQ ID NO: 25788 - RNA, 19 nt, synthetic construct
  misc_feature 1..19: note = siRNA sense sequence
  source 1..19: mol_type = other RNA
tatctgattctacttggtg

SEQ ID NO: 25789 - RNA, 19 nt, synthetic construct
  misc_feature 1..19: note = siRNA antisense sequence
  source 1..19: mol_type = other RNA
caccaagtagaatcagata

SEQ ID NO: 25790 - RNA, 19 nt, synthetic construct
  misc_feature 1..19: note = siRNA sense sequence
  source 1..19: mol_type = other RNA
ttgcgatcatgtctttcca

SEQ ID NO: 25791 - RNA, 19 nt, synthetic construct
  misc_feature 1..19: note = siRNA antisense sequence
  source 1..19: mol_type = other RNA
tggaaagacatgatcgcaa

SEQ ID NO: 25792 - RNA, 19 nt, synthetic construct
  misc_feature 1..19: note = siRNA sense sequence
  source 1..19: mol_type = other RNA
tgcgatcatgtctttccag

SEQ ID NO: 25793 - RNA, 19 nt, synthetic construct
  misc_feature 1..19: note = siRNA antisense sequence
  source 1..19: mol_type = other RNA
ctggaaagacatgatcgca

SEQ ID NO: 25794 - RNA, 19 nt, synthetic construct
  misc_feature 1..19: note = siRNA sense sequence
  source 1..19: mol_type = other RNA
gcgatcatgtctttccagt

SEQ ID NO: 25795 - RNA, 19 nt, synthetic construct
  misc_feature 1..19: note = siRNA antisense sequence
  source 1..19: mol_type = other RNA
actggaaagacatgatcgc

SEQ ID NO: 25796 - RNA, 19 nt, synthetic construct
  misc_feature 1..19: note = siRNA sense sequence
  source 1..19: mol_type = other RNA
cgatcatgtctttccagta

SEQ ID NO: 25797 - RNA, 19 nt, synthetic construct
  misc_feature 1..19: note = siRNA antisense sequence
  source 1..19: mol_type = other RNA
tactggaaagacatgatcg

SEQ ID NO: 25798 - RNA, 19 nt, synthetic construct
  misc_feature 1..19: note = siRNA sense sequence
  source 1..19: mol_type = other RNA
tcatgtctttccagtaaaa

SEQ ID NO: 25799 - RNA, 19 nt, synthetic construct
  misc_feature 1..19: note = siRNA antisense sequence
  source 1..19: mol_type = other RNA
ttttactggaaagacatga

SEQ ID NO: 25800 - RNA, 19 nt, synthetic construct
  misc_feature 1..19: note = siRNA sense sequence
  source 1..19: mol_type = other RNA
catgtctttccagtaaaat

SEQ ID NO: 25801 - RNA, 19 nt, synthetic construct
  misc_feature 1..19: note = siRNA antisense sequence
  source 1..19: mol_type = other RNA
attttactggaaagacatg

SEQ ID NO: 25802 - RNA, 19 nt, synthetic construct
  misc_feature 1..19: note = siRNA sense sequence
  source 1..19: mol_type = other RNA
taaatctttagtgactctc

SEQ ID NO: 25803 - RNA, 19 nt, synthetic construct
  misc_feature 1..19: note = siRNA antisense sequence
  source 1..19: mol_type = other RNA
gagagtcactaaagattta

SEQ ID NO: 25804 - RNA, 19 nt, synthetic construct
  misc_feature 1..19: note = siRNA sense sequence
  source 1..19: mol_type = other RNA
aaatctttagtgactctca

SEQ ID NO: 25805 - RNA, 19 nt, synthetic construct
  misc_feature 1..19: note = siRNA antisense sequence
  source 1..19: mol_type = other RNA
tgagagtcactaaagattt

SEQ ID NO: 25806 - RNA, 19 nt, synthetic construct
  misc_feature 1..19: note = siRNA sense sequence
  source 1..19: mol_type = other RNA
aatctttagtgactctcag

SEQ ID NO: 25807 - RNA, 19 nt, synthetic construct
  misc_feature 1..19: note = siRNA antisense sequence
  source 1..19: mol_type = other RNA
ctgagagtcactaaagatt

SEQ ID NO: 25808 - RNA, 19 nt, synthetic construct
  misc_feature 1..19: note = siRNA sense sequence
  source 1..19: mol_type = other RNA
atctttagtgactctcagg

SEQ ID NO: 25809 - RNA, 19 nt, synthetic construct
  misc_feature 1..19: note = siRNA antisense sequence
  source 1..19: mol_type = other RNA
cctgagagtcactaaagat

SEQ ID NO: 25810 - RNA, 19 nt, synthetic construct
  misc_feature 1..19: note = siRNA sense sequence
  source 1..19: mol_type = other RNA
tctttagtgactctcaggt

SEQ ID NO: 25811 - RNA, 19 nt, synthetic construct
  misc_feature 1..19: note = siRNA antisense sequence
  source 1..19: mol_type = other RNA
acctgagagtcactaaaga

SEQ ID NO: 25812 - RNA, 19 nt, synthetic construct
  misc_feature 1..19: note = siRNA sense sequence
  source 1..19: mol_type = other RNA
tagtgactctcaggtttaa

SEQ ID NO: 25813 - RNA, 19 nt, synthetic construct
  misc_feature 1..19: note = siRNA antisense sequence
  source 1..19: mol_type = other RNA
ttaaacctgagagtcacta

SEQ ID NO: 25814 - RNA, 19 nt, synthetic construct
  misc_feature 1..19: note = siRNA sense sequence
  source 1..19: mol_type = other RNA
agtgactctcaggtttaaa

SEQ ID NO: 25815 - RNA, 19 nt, synthetic construct
  misc_feature 1..19: note = siRNA antisense sequence
  source 1..19: mol_type = other RNA
tttaaacctgagagtcact

SEQ ID NO: 25816 - RNA, 19 nt, synthetic construct
  misc_feature 1..19: note = siRNA sense sequence
  source 1..19: mol_type = other RNA
ctattttaaaagctgccag

SEQ ID NO: 25817 - RNA, 19 nt, synthetic construct
  misc_feature 1..19: note = siRNA antisense sequence
  source 1..19: mol_type = other RNA
ctggcagcttttaaaatag

SEQ ID NO: 25818 - RNA, 19 nt, synthetic construct
  misc_feature 1..19: note = siRNA sense sequence
  source 1..19: mol_type = other RNA
ttttaaaagctgccagatt

SEQ ID NO: 25819 - RNA, 19 nt, synthetic construct
  misc_feature 1..19: note = siRNA antisense sequence
  source 1..19: mol_type = other RNA
aatctggcagcttttaaaa

SEQ ID NO: 25820 - RNA, 19 nt, synthetic construct
  misc_feature 1..19: note = siRNA sense sequence
  source 1..19: mol_type = other RNA
tttaaaagctgccagattt

SEQ ID NO: 25821 - RNA, 19 nt, synthetic construct
  misc_feature 1..19: note = siRNA antisense sequence
  source 1..19: mol_type = other RNA
aaatctggcagcttttaaa

SEQ ID NO: 25822 - RNA, 19 nt, synthetic construct
  misc_feature 1..19: note = siRNA sense sequence
  source 1..19: mol_type = other RNA
ttaaaagctgccagatttg

SEQ ID NO: 25823 - RNA, 19 nt, synthetic construct
  misc_feature 1..19: note = siRNA antisense sequence
  source 1..19: mol_type = other RNA
caaatctggcagcttttaa

SEQ ID NO: 25824 - RNA, 19 nt, synthetic construct
  misc_feature 1..19: note = siRNA sense sequence
  source 1..19: mol_type = other RNA
ggtttggctgactactaag

SEQ ID NO: 25825 - RNA, 19 nt, synthetic construct
  misc_feature 1..19: note = siRNA antisense sequence
  source 1..19: mol_type = other RNA
cttagtagtcagccaaacc

SEQ ID NO: 25826 - RNA, 19 nt, synthetic construct
  misc_feature 1..19: note = siRNA sense sequence
  source 1..19: mol_type = other RNA
gtttggctgactactaagg

SEQ ID NO: 25827 - RNA, 19 nt, synthetic construct
  misc_feature 1..19: note = siRNA antisense sequence
  source 1..19: mol_type = other RNA
ccttagtagtcagccaaac

SEQ ID NO: 25828 - RNA, 19 nt, synthetic construct
  misc_feature 1..19: note = siRNA sense sequence
  source 1..19: mol_type = other RNA
tttggctgactactaagga

SEQ ID NO: 25829 - RNA, 19 nt, synthetic construct
  misc_feature 1..19: note = siRNA antisense sequence
  source 1..19: mol_type = other RNA
tccttagtagtcagccaaa

SEQ ID NO: 25830 - RNA, 19 nt, synthetic construct
  misc_feature 1..19: note = siRNA sense sequence
  source 1..19: mol_type = other RNA
ttggctgactactaaggag

SEQ ID NO: 25831 - RNA, 19 nt, synthetic construct
  misc_feature 1..19: note = siRNA antisense sequence
  source 1..19: mol_type = other RNA
ctccttagtagtcagccaa

SEQ ID NO: 25832 - RNA, 19 nt, synthetic construct
  misc_feature 1..19: note = siRNA sense sequence
  source 1..19: mol_type = other RNA
gctagaaggagcaaattcc

SEQ ID NO: 25833 - RNA, 19 nt, synthetic construct
  misc_feature 1..19: note = siRNA antisense sequence
  source 1..19: mol_type = other RNA
ggaatttgctccttctagc

SEQ ID NO: 25834 - RNA, 19 nt, synthetic construct
  misc_feature 1..19: note = siRNA sense sequence
  source 1..19: mol_type = other RNA
agcaaattccagagctgag

SEQ ID NO: 25835 - RNA, 19 nt, synthetic construct
  misc_feature 1..19: note = siRNA antisense sequence
  source 1..19: mol_type = other RNA
ctcagctctggaatttgct

SEQ ID NO: 25836 - RNA, 19 nt, synthetic construct
  misc_feature 1..19: note = siRNA sense sequence
  source 1..19: mol_type = other RNA
gcaaattccagagctgagg

SEQ ID NO: 25837 - RNA, 19 nt, synthetic construct
  misc_feature 1..19: note = siRNA antisense sequence
  source 1..19: mol_type = other RNA
cctcagctctggaatttgc

SEQ ID NO: 25838 - RNA, 19 nt, synthetic construct
  misc_feature 1..19: note = siRNA sense sequence
  source 1..19: mol_type = other RNA
caaattccagagctgaggg

SEQ ID NO: 25839 - RNA, 19 nt, synthetic construct
  misc_feature 1..19: note = siRNA antisense sequence
  source 1..19: mol_type = other RNA
ccctcagctctggaatttg

SEQ ID NO: 25840 - RNA, 19 nt, synthetic construct
  misc_feature 1..19: note = siRNA sense sequence
  source 1..19: mol_type = other RNA
tccagagctgagggtcatt

SEQ ID NO: 25841 - RNA, 19 nt, synthetic construct
  misc_feature 1..19: note = siRNA antisense sequence
  source 1..19: mol_type = other RNA
aatgaccctcagctctgga

SEQ ID NO: 25842 - RNA, 19 nt, synthetic construct
  misc_feature 1..19: note = siRNA sense sequence
  source 1..19: mol_type = other RNA
ccagagctgagggtcattt

SEQ ID NO: 25843 - RNA, 19 nt, synthetic construct
  misc_feature 1..19: note = siRNA antisense sequence
  source 1..19: mol_type = other RNA
aaatgaccctcagctctgg

SEQ ID NO: 25844 - RNA, 19 nt, synthetic construct
  misc_feature 1..19: note = siRNA sense sequence
  source 1..19: mol_type = other RNA
cagagctgagggtcattta

SEQ ID NO: 25845 - RNA, 19 nt, synthetic construct
  misc_feature 1..19: note = siRNA antisense sequence
  source 1..19: mol_type = other RNA
taaatgaccctcagctctg

SEQ ID NO: 25846 - RNA, 19 nt, synthetic construct
  misc_feature 1..19: note = siRNA sense sequence
  source 1..19: mol_type = other RNA
agagctgagggtcatttat

SEQ ID NO: 25847 - RNA, 19 nt, synthetic construct
  misc_feature 1..19: note = siRNA antisense sequence
  source 1..19: mol_type = other RNA
ataaatgaccctcagctct

SEQ ID NO: 25848 - RNA, 19 nt, synthetic construct
  misc_feature 1..19: note = siRNA sense sequence
  source 1..19: mol_type = other RNA
gagctgagggtcatttatt

SEQ ID NO: 25849 - RNA, 19 nt, synthetic construct
  misc_feature 1..19: note = siRNA antisense sequence
  source 1..19: mol_type = other RNA
aataaatgaccctcagctc

SEQ ID NO: 25850 - RNA, 19 nt, synthetic construct
  misc_feature 1..19: note = siRNA sense sequence
  source 1..19: mol_type = other RNA
ctgagggtcatttatttgg

SEQ ID NO: 25851 - RNA, 19 nt, synthetic construct
  misc_feature 1..19: note = siRNA antisense sequence
  source 1..19: mol_type = other RNA
ccaaataaatgaccctcag

SEQ ID NO: 25852 - RNA, 19 nt, synthetic construct
  misc_feature 1..19: note = siRNA sense sequence
  source 1..19: mol_type = other RNA
tgagggtcatttatttgga

SEQ ID NO: 25853 - RNA, 19 nt, synthetic construct
  misc_feature 1..19: note = siRNA antisense sequence
  source 1..19: mol_type = other RNA
tccaaataaatgaccctca

SEQ ID NO: 25854 - RNA, 19 nt, synthetic construct
  misc_feature 1..19: note = siRNA sense sequence
  source 1..19: mol_type = other RNA
gagggtcatttatttggaa

SEQ ID NO: 25855 - RNA, 19 nt, synthetic construct
  misc_feature 1..19: note = siRNA antisense sequence
  source 1..19: mol_type = other RNA
ttccaaataaatgaccctc

SEQ ID NO: 25856 - RNA, 19 nt, synthetic construct
  misc_feature 1..19: note = siRNA sense sequence
  source 1..19: mol_type = other RNA
agggtcatttatttggaat

SEQ ID NO: 25857 - RNA, 19 nt, synthetic construct
  misc_feature 1..19: note = siRNA antisense sequence
  source 1..19: mol_type = other RNA
attccaaataaatgaccct

SEQ ID NO: 25858 - RNA, 19 nt, synthetic construct
  misc_feature 1..19: note = siRNA sense sequence
  source 1..19: mol_type = other RNA
acttgaatatagggtggta

SEQ ID NO: 25859 - RNA, 19 nt, synthetic construct
  misc_feature 1..19: note = siRNA antisense sequence
  source 1..19: mol_type = other RNA
taccaccctatattcaagt

SEQ ID NO: 25860 - RNA, 19 nt, synthetic construct
  misc_feature 1..19: note = siRNA sense sequence
  source 1..19: mol_type = other RNA
cttgaatatagggtggtag

SEQ ID NO: 25861 - RNA, 19 nt, synthetic construct
  misc_feature 1..19: note = siRNA antisense sequence
  source 1..19: mol_type = other RNA
ctaccaccctatattcaag

SEQ ID NO: 25862 - RNA, 19 nt, synthetic construct
  misc_feature 1..19: note = siRNA sense sequence
  source 1..19: mol_type = other RNA
ttgaatatagggtggtagg

SEQ ID NO: 25863 - RNA, 19 nt, synthetic construct
  misc_feature 1..19: note = siRNA antisense sequence
  source 1..19: mol_type = other RNA
cctaccaccctatattcaa

SEQ ID NO: 25864 - RNA, 19 nt, synthetic construct
  misc_feature 1..19: note = siRNA sense sequence
  source 1..19: mol_type = other RNA
taatagtttgccacatttc

SEQ ID NO: 25865 - RNA, 19 nt, synthetic construct
  misc_feature 1..19: note = siRNA antisense sequence
  source 1..19: mol_type = other RNA
gaaatgtggcaaactatta

SEQ ID NO: 25866 - RNA, 19 nt, synthetic construct
  misc_feature 1..19: note = siRNA sense sequence
  source 1..19: mol_type = other RNA
agtttgccacatttcaatg

SEQ ID NO: 25867 - RNA, 19 nt, synthetic construct
  misc_feature 1..19: note = siRNA antisense sequence
  source 1..19: mol_type = other RNA
cattgaaatgtggcaaact

SEQ ID NO: 25868 - RNA, 19 nt, synthetic construct
  misc_feature 1..19: note = siRNA sense sequence
  source 1..19: mol_type = other RNA
gtttgccacatttcaatgg

SEQ ID NO: 25869 - RNA, 19 nt, synthetic construct
  misc_feature 1..19: note = siRNA antisense sequence
  source 1..19: mol_type = other RNA
ccattgaaatgtggcaaac

SEQ ID NO: 25870 - RNA, 19 nt, synthetic construct
  misc_feature 1..19: note = siRNA sense sequence
  source 1..19: mol_type = other RNA
catttcaatggcatgtcaa

SEQ ID NO: 25871 - RNA, 19 nt, synthetic construct
  misc_feature 1..19: note = siRNA antisense sequence
  source 1..19: mol_type = other RNA
ttgacatgccattgaaatg

SEQ ID NO: 25872 - RNA, 19 nt, synthetic construct
  misc_feature 1..19: note = siRNA sense sequence
  source 1..19: mol_type = other RNA
atttcaatggcatgtcaag

SEQ ID NO: 25873 - RNA, 19 nt, synthetic construct
  misc_feature 1..19: note = siRNA antisense sequence
  source 1..19: mol_type = other RNA
cttgacatgccattgaaat

SEQ ID NO: 25874 - RNA, 19 nt, synthetic construct
  misc_feature 1..19: note = siRNA sense sequence
  source 1..19: mol_type = other RNA
tttcaatggcatgtcaagt

SEQ ID NO: 25875 - RNA, 19 nt, synthetic construct
  misc_feature 1..19: note = siRNA antisense sequence
  source 1..19: mol_type = other RNA
acttgacatgccattgaaa

SEQ ID NO: 25876 - RNA, 19 nt, synthetic construct
  misc_feature 1..19: note = siRNA sense sequence
  source 1..19: mol_type = other RNA
ttcaatggcatgtcaagtt

SEQ ID NO: 25877 - RNA, 19 nt, synthetic construct
  misc_feature 1..19: note = siRNA antisense sequence
  source 1..19: mol_type = other RNA
aacttgacatgccattgaa

SEQ ID NO: 25878 - RNA, 19 nt, synthetic construct
  misc_feature 1..19: note = siRNA sense sequence
  source 1..19: mol_type = other RNA
tcaatggcatgtcaagttg

SEQ ID NO: 25879 - RNA, 19 nt, synthetic construct
  misc_feature 1..19: note = siRNA antisense sequence
  source 1..19: mol_type = other RNA
caacttgacatgccattga

SEQ ID NO: 25880 - RNA, 19 nt, synthetic construct
  misc_feature 1..19: note = siRNA sense sequence
  source 1..19: mol_type = other RNA
caatggcatgtcaagttgc

SEQ ID NO: 25881 - RNA, 19 nt, synthetic construct
  misc_feature 1..19: note = siRNA antisense sequence
  source 1..19: mol_type = other RNA
gcaacttgacatgccattg

SEQ ID NO: 25882 - RNA, 19 nt, synthetic construct
  misc_feature 1..19: note = siRNA sense sequence
  source 1..19: mol_type = other RNA
aatggcatgtcaagttgca

SEQ ID NO: 25883 - RNA, 19 nt, synthetic construct
  misc_feature 1..19: note = siRNA antisense sequence
  source 1..19: mol_type = other RNA
tgcaacttgacatgccatt

SEQ ID NO: 25884 - RNA, 19 nt, synthetic construct
  misc_feature 1..19: note = siRNA sense sequence
  source 1..19: mol_type = other RNA
atggcatgtcaagttgcag

SEQ ID NO: 25885 - RNA, 19 nt, synthetic construct
  misc_feature 1..19: note = siRNA antisense sequence
  source 1..19: mol_type = other RNA
ctgcaacttgacatgccat

SEQ ID NO: 25886 - RNA, 19 nt, synthetic construct
  misc_feature 1..19: note = siRNA sense sequence
  source 1..19: mol_type = other RNA
tggcatgtcaagttgcagg

SEQ ID NO: 25887 - RNA, 19 nt, synthetic construct
  misc_feature 1..19: note = siRNA antisense sequence
  source 1..19: mol_type = other RNA
cctgcaacttgacatgcca

SEQ ID NO: 25888 - RNA, 19 nt, synthetic construct
  misc_feature 1..19: note = siRNA sense sequence
  source 1..19: mol_type = other RNA
ggcatgtcaagttgcaggg

SEQ ID NO: 25889 - RNA, 19 nt, synthetic construct
  misc_feature 1..19: note = siRNA antisense sequence
  source 1..19: mol_type = other RNA
ccctgcaacttgacatgcc

SEQ ID NO: 25890 - RNA, 19 nt, synthetic construct
  misc_feature 1..19: note = siRNA sense sequence
  source 1..19: mol_type = other RNA
gggtcctgccacttttctt

SEQ ID NO: 25891 - RNA, 19 nt, synthetic construct
  misc_feature 1..19: note = siRNA antisense sequence
  source 1..19: mol_type = other RNA
aagaaaagtggcaggaccc

SEQ ID NO: 25892 - RNA, 19 nt, synthetic construct
  misc_feature 1..19: note = siRNA sense sequence
  source 1..19: mol_type = other RNA
ggtcctgccacttttcttc

SEQ ID NO: 25893 - RNA, 19 nt, synthetic construct
  misc_feature 1..19: note = siRNA antisense sequence
  source 1..19: mol_type = other RNA
gaagaaaagtggcaggacc

SEQ ID NO: 25894 - RNA, 19 nt, synthetic construct
  misc_feature 1..19: note = siRNA sense sequence
  source 1..19: mol_type = other RNA
gtcctgccacttttcttct

SEQ ID NO: 25895 - RNA, 19 nt, synthetic construct
  misc_feature 1..19: note = siRNA antisense sequence
  source 1..19: mol_type = other RNA
agaagaaaagtggcaggac

SEQ ID NO: 25896 - RNA, 19 nt, synthetic construct
  misc_feature 1..19: note = siRNA sense sequence
  source 1..19: mol_type = other RNA
tcctgccacttttcttctt

SEQ ID NO: 25897 - RNA, 19 nt, synthetic construct
  misc_feature 1..19: note = siRNA antisense sequence
  source 1..19: mol_type = other RNA
aagaagaaaagtggcagga

SEQ ID NO: 25898 - RNA, 19 nt, synthetic construct
  misc_feature 1..19: note = siRNA sense sequence
  source 1..19: mol_type = other RNA
cctgccacttttcttcttg

SEQ ID NO: 25899 - RNA, 19 nt, synthetic construct
  misc_feature 1..19: note = siRNA antisense sequence
  source 1..19: mol_type = other RNA
caagaagaaaagtggcagg

SEQ ID NO: 25900 - RNA, 19 nt, synthetic construct
  misc_feature 1..19: note = siRNA sense sequence
  source 1..19: mol_type = other RNA
ctgccacttttcttcttgt

SEQ ID NO: 25901 - RNA, 19 nt, synthetic construct
  misc_feature 1..19: note = siRNA antisense sequence
  source 1..19: mol_type = other RNA
acaagaagaaaagtggcag

SEQ ID NO: 25902 - RNA, 19 nt, synthetic construct
  misc_feature 1..19: note = siRNA sense sequence
  source 1..19: mol_type = other RNA
tgccacttttcttcttgtt

SEQ ID NO: 25903 - RNA, 19 nt, synthetic construct
  misc_feature 1..19: note = siRNA antisense sequence
  source 1..19: mol_type = other RNA
aacaagaagaaaagtggca

SEQ ID NO: 25904 - RNA, 19 nt, synthetic construct
  misc_feature 1..19: note = siRNA sense sequence
  source 1..19: mol_type = other RNA
gccacttttcttcttgtta

SEQ ID NO: 25905 - RNA, 19 nt, synthetic construct
  misc_feature 1..19: note = siRNA antisense sequence
  source 1..19: mol_type = other RNA
taacaagaagaaaagtggc

SEQ ID NO: 25906 - RNA, 19 nt, synthetic construct
  misc_feature 1..19: note = siRNA sense sequence
  source 1..19: mol_type = other RNA
tcttgttattttcctcttc

SEQ ID NO: 25907 - RNA, 19 nt, synthetic construct
  misc_feature 1..19: note = siRNA antisense sequence
  source 1..19: mol_type = other RNA
gaagaggaaaataacaaga

SEQ ID NO: 25908 - RNA, 19 nt, synthetic construct
  misc_feature 1..19: note = siRNA sense sequence
  source 1..19: mol_type = other RNA
gttattttcctcttctatc

SEQ ID NO: 25909 - RNA, 19 nt, synthetic construct
  misc_feature 1..19: note = siRNA antisense sequence
  source 1..19: mol_type = other RNA
gatagaagaggaaaataac

SEQ ID NO: 25910 - RNA, 19 nt, synthetic construct
  misc_feature 1..19: note = siRNA sense sequence
  source 1..19: mol_type = other RNA
attttcctcttctatcaac

SEQ ID NO: 25911 - RNA, 19 nt, synthetic construct
  misc_feature 1..19: note = siRNA antisense sequence
  source 1..19: mol_type = other RNA
gttgatagaagaggaaaat

SEQ ID NO: 25912 - RNA, 19 nt, synthetic construct
  misc_feature 1..19: note = siRNA sense sequence
  source 1..19: mol_type = other RNA
ttttcctcttctatcaact

SEQ ID NO: 25913 - RNA, 19 nt, synthetic construct
  misc_feature 1..19: note = siRNA antisense sequence
  source 1..19: mol_type = other RNA
agttgatagaagaggaaaa

SEQ ID NO: 25914 - RNA, 19 nt, synthetic construct
  misc_feature 1..19: note = siRNA sense sequence
  source 1..19: mol_type = other RNA
cctcttctatcaactttgc

SEQ ID NO: 25915 - RNA, 19 nt, synthetic construct
  misc_feature 1..19: note = siRNA antisense sequence
  source 1..19: mol_type = other RNA
gcaaagttgatagaagagg

SEQ ID NO: 25916 - RNA, 19 nt, synthetic construct
  misc_feature 1..19: note = siRNA sense sequence
  source 1..19: mol_type = other RNA
ctcttctatcaactttgct

SEQ ID NO: 25917 - RNA, 19 nt, synthetic construct
  misc_feature 1..19: note = siRNA antisense sequence
  source 1..19: mol_type = other RNA
agcaaagttgatagaagag

SEQ ID NO: 25918 - RNA, 19 nt, synthetic construct
  misc_feature 1..19: note = siRNA sense sequence
  source 1..19: mol_type = other RNA
tcttctatcaactttgctc

SEQ ID NO: 25919 - RNA, 19 nt, synthetic construct
  misc_feature 1..19: note = siRNA antisense sequence
  source 1..19: mol_type = other RNA
gagcaaagttgatagaaga

SEQ ID NO: 25920 - RNA, 19 nt, synthetic construct
  misc_feature 1..19: note = siRNA sense sequence
  source 1..19: mol_type = other RNA
cttctatcaactttgctca

SEQ ID NO: 25921 - RNA, 19 nt, synthetic construct
  misc_feature 1..19: note = siRNA antisense sequence
  source 1..19: mol_type = other RNA
tgagcaaagttgatagaag

SEQ ID NO: 25922 - RNA, 19 nt, synthetic construct
  misc_feature 1..19: note = siRNA sense sequence
  source 1..19: mol_type = other RNA
ttctatcaactttgctcac

SEQ ID NO: 25923 - RNA, 19 nt, synthetic construct
  misc_feature 1..19: note = siRNA antisense sequence
  source 1..19: mol_type = other RNA
gtgagcaaagttgatagaa

SEQ ID NO: 25924 - RNA, 19 nt, synthetic construct
  misc_feature 1..19: note = siRNA sense sequence
  source 1..19: mol_type = other RNA
tctatcaactttgctcact

SEQ ID NO: 25925 - RNA, 19 nt, synthetic construct
  misc_feature 1..19: note = siRNA antisense sequence
  source 1..19: mol_type = other RNA
agtgagcaaagttgataga

SEQ ID NO: 25926 - RNA, 19 nt, synthetic construct
  misc_feature 1..19: note = siRNA sense sequence
  source 1..19: mol_type = other RNA
ctatcaactttgctcactc

SEQ ID NO: 25927 - RNA, 19 nt, synthetic construct
  misc_feature 1..19: note = siRNA antisense sequence
  source 1..19: mol_type = other RNA
gagtgagcaaagttgatag

SEQ ID NO: 25928 - RNA, 19 nt, synthetic construct
  misc_feature 1..19: note = siRNA sense sequence
  source 1..19: mol_type = other RNA
tatcaactttgctcactct

SEQ ID NO: 25929 - RNA, 19 nt, synthetic construct
  misc_feature 1..19: note = siRNA antisense sequence
  source 1..19: mol_type = other RNA
agagtgagcaaagttgata

SEQ ID NO: 25930 - RNA, 19 nt, synthetic construct
  misc_feature 1..19: note = siRNA sense sequence
  source 1..19: mol_type = other RNA
atcaactttgctcactctc

SEQ ID NO: 25931 - RNA, 19 nt, synthetic construct
  misc_feature 1..19: note = siRNA antisense sequence
  source 1..19: mol_type = other RNA
gagagtgagcaaagttgat

SEQ ID NO: 25932 - RNA, 19 nt, synthetic construct
  misc_feature 1..19: note = siRNA sense sequence
  source 1..19: mol_type = other RNA
tgctctttccatttggcta

SEQ ID NO: 25933 - RNA, 19 nt, synthetic construct
  misc_feature 1..19: note = siRNA antisense sequence
  source 1..19: mol_type = other RNA
tagccaaatggaaagagca

SEQ ID NO: 25934 - RNA, 19 nt, synthetic construct
  misc_feature 1..19: note = siRNA sense sequence
  source 1..19: mol_type = other RNA
gctctttccatttggctag

SEQ ID NO: 25935 - RNA, 19 nt, synthetic construct
  misc_feature 1..19: note = siRNA antisense sequence
  source 1..19: mol_type = other RNA
ctagccaaatggaaagagc

SEQ ID NO: 25936 - RNA, 19 nt, synthetic construct
  misc_feature 1..19: note = siRNA sense sequence
  source 1..19: mol_type = other RNA
tttccatttggctagaggt

SEQ ID NO: 25937 - RNA, 19 nt, synthetic construct
  misc_feature 1..19: note = siRNA antisense sequence
  source 1..19: mol_type = other RNA
acctctagccaaatggaaa

SEQ ID NO: 25938 - RNA, 19 nt, synthetic construct
  misc_feature 1..19: note = siRNA sense sequence
  source 1..19: mol_type = other RNA
ttccatttggctagaggtt

SEQ ID NO: 25939 - RNA, 19 nt, synthetic construct
  misc_feature 1..19: note = siRNA antisense sequence
  source 1..19: mol_type = other RNA
aacctctagccaaatggaa

SEQ ID NO: 25940 - RNA, 19 nt, synthetic construct
  misc_feature 1..19: note = siRNA sense sequence
  source 1..19: mol_type = other RNA
tccatttggctagaggttt

SEQ ID NO: 25941 - RNA, 19 nt, synthetic construct
  misc_feature 1..19: note = siRNA antisense sequence
  source 1..19: mol_type = other RNA
aaacctctagccaaatgga

SEQ ID NO: 25942 - RNA, 19 nt, synthetic construct
  misc_feature 1..19: note = siRNA sense sequence
  source 1..19: mol_type = other RNA
ccatttggctagaggtttc

SEQ ID NO: 25943 - RNA, 19 nt, synthetic construct
  misc_feature 1..19: note = siRNA antisense sequence
  source 1..19: mol_type = other RNA
gaaacctctagccaaatgg

SEQ ID NO: 25944 - RNA, 19 nt, synthetic construct
  misc_feature 1..19: note = siRNA sense sequence
  source 1..19: mol_type = other RNA
catttggctagaggtttct

SEQ ID NO: 25945 - RNA, 19 nt, synthetic construct
  misc_feature 1..19: note = siRNA antisense sequence
  source 1..19: mol_type = other RNA
agaaacctctagccaaatg

SEQ ID NO: 25946 - RNA, 19 nt, synthetic construct
  misc_feature 1..19: note = siRNA sense sequence
  source 1..19: mol_type = other RNA
gcggcaccaatcacctagg

SEQ ID NO: 25947 - RNA, 19 nt, synthetic construct
  misc_feature 1..19: note = siRNA antisense sequence
  source 1..19: mol_type = other RNA
cctaggtgattggtgccgc

SEQ ID NO: 25948 - RNA, 19 nt, synthetic construct
  misc_feature 1..19: note = siRNA sense sequence
  source 1..19: mol_type = other RNA
cggcaccaatcacctaggg

SEQ ID NO: 25949 - RNA, 19 nt, synthetic construct
  misc_feature 1..19: note = siRNA antisense sequence
  source 1..19: mol_type = other RNA
ccctaggtgattggtgccg

SEQ ID NO: 25950 - RNA, 19 nt, synthetic construct
  misc_feature 1..19: note = siRNA sense sequence
  source 1..19: mol_type = other RNA
ggcaccaatcacctaggga

SEQ ID NO: 25951 - RNA, 19 nt, synthetic construct
  misc_feature 1..19: note = siRNA antisense sequence
  source 1..19: mol_type = other RNA
tccctaggtgattggtgcc

SEQ ID NO: 25952 - RNA, 19 nt, synthetic construct
  misc_feature 1..19: note = siRNA sense sequence
  source 1..19: mol_type = other RNA
ccaatcacctagggagttt

SEQ ID NO: 25953 - RNA, 19 nt, synthetic construct
  misc_feature 1..19: note = siRNA antisense sequence
  source 1..19: mol_type = other RNA
aaactccctaggtgattgg

SEQ ID NO: 25954 - RNA, 19 nt, synthetic construct
  misc_feature 1..19: note = siRNA sense sequence
  source 1..19: mol_type = other RNA
acctagggagttttaaaat

SEQ ID NO: 25955 - RNA, 19 nt, synthetic construct
  misc_feature 1..19: note = siRNA antisense sequence
  source 1..19: mol_type = other RNA
attttaaaactccctaggt

SEQ ID NO: 25956 - RNA, 19 nt, synthetic construct
  misc_feature 1..19: note = siRNA sense sequence
  source 1..19: mol_type = other RNA
cctagggagttttaaaatc

SEQ ID NO: 25957 - RNA, 19 nt, synthetic construct
  misc_feature 1..19: note = siRNA antisense sequence
  source 1..19: mol_type = other RNA
gattttaaaactccctagg

SEQ ID NO: 25958 - RNA, 19 nt, synthetic construct
  misc_feature 1..19: note = siRNA sense sequence
  source 1..19: mol_type = other RNA
ctagggagttttaaaatca

SEQ ID NO: 25959 - RNA, 19 nt, synthetic construct
  misc_feature 1..19: note = siRNA antisense sequence
  source 1..19: mol_type = other RNA
tgattttaaaactccctag

SEQ ID NO: 25960 - RNA, 19 nt, synthetic construct
  misc_feature 1..19: note = siRNA sense sequence
  source 1..19: mol_type = other RNA
agggagttttaaaatcatg

SEQ ID NO: 25961 - RNA, 19 nt, synthetic construct
  misc_feature 1..19: note = siRNA antisense sequence
  source 1..19: mol_type = other RNA
catgattttaaaactccct

SEQ ID NO: 25962 - RNA, 19 nt, synthetic construct
  misc_feature 1..19: note = siRNA sense sequence
  source 1..19: mol_type = other RNA
gggagttttaaaatcatgg

SEQ ID NO: 25963 - RNA, 19 nt, synthetic construct
  misc_feature 1..19: note = siRNA antisense sequence
  source 1..19: mol_type = other RNA
ccatgattttaaaactccc

SEQ ID NO: 25964 - RNA, 19 nt, synthetic construct
  misc_feature 1..19: note = siRNA sense sequence
  source 1..19: mol_type = other RNA
ggagttttaaaatcatggt

SEQ ID NO: 25965 - RNA, 19 nt, synthetic construct
  misc_feature 1..19: note = siRNA antisense sequence
  source 1..19: mol_type = other RNA
accatgattttaaaactcc

SEQ ID NO: 25966 - RNA, 19 nt, synthetic construct
  misc_feature 1..19: note = siRNA sense sequence
  source 1..19: mol_type = other RNA
gagttttaaaatcatggtg

SEQ ID NO: 25967 - RNA, 19 nt, synthetic construct
  misc_feature 1..19: note = siRNA antisense sequence
  source 1..19: mol_type = other RNA
caccatgattttaaaactc

SEQ ID NO: 25968 - RNA, 19 nt, synthetic construct
  misc_feature 1..19: note = siRNA sense sequence
  source 1..19: mol_type = other RNA
gagccctacctcaactaag

SEQ ID NO: 25969 - RNA, 19 nt, synthetic construct
  misc_feature 1..19: note = siRNA antisense sequence
  source 1..19: mol_type = other RNA
cttagttgaggtagggctc

SEQ ID NO: 25970 - RNA, 19 nt, synthetic construct
  misc_feature 1..19: note = siRNA sense sequence
  source 1..19: mol_type = other RNA
agccctacctcaactaagt

SEQ ID NO: 25971 - RNA, 19 nt, synthetic construct
  misc_feature 1..19: note = siRNA antisense sequence
  source 1..19: mol_type = other RNA
acttagttgaggtagggct

SEQ ID NO: 25972 - RNA, 19 nt, synthetic construct
  misc_feature 1..19: note = siRNA sense sequence
  source 1..19: mol_type = other RNA
gccctacctcaactaagtc

SEQ ID NO: 25973 - RNA, 19 nt, synthetic construct
  misc_feature 1..19: note = siRNA antisense sequence
  source 1..19: mol_type = other RNA
gacttagttgaggtagggc

SEQ ID NO: 25974 - RNA, 19 nt, synthetic construct
  misc_feature 1..19: note = siRNA sense sequence
  source 1..19: mol_type = other RNA
ccctacctcaactaagtca

SEQ ID NO: 25975 - RNA, 19 nt, synthetic construct
  misc_feature 1..19: note = siRNA antisense sequence
  source 1..19: mol_type = other RNA
tgacttagttgaggtaggg

SEQ ID NO: 25976 - RNA, 19 nt, synthetic construct
  misc_feature 1..19: note = siRNA sense sequence
  source 1..19: mol_type = other RNA
acctcaactaagtcagaat

SEQ ID NO: 25977 - RNA, 19 nt, synthetic construct
  misc_feature 1..19: note = siRNA antisense sequence
  source 1..19: mol_type = other RNA
attctgacttagttgaggt

SEQ ID NO: 25978 - RNA, 19 nt, synthetic construct
  misc_feature 1..19: note = siRNA sense sequence
  source 1..19: mol_type = other RNA
cctcaactaagtcagaata

SEQ ID NO: 25979 - RNA, 19 nt, synthetic construct
  misc_feature 1..19: note = siRNA antisense sequence
  source 1..19: mol_type = other RNA
tattctgacttagttgagg

SEQ ID NO: 25980 - RNA, 19 nt, synthetic construct
  misc_feature 1..19: note = siRNA sense sequence
  source 1..19: mol_type = other RNA
ctcaactaagtcagaatat

SEQ ID NO: 25981 - RNA, 19 nt, synthetic construct
  misc_feature 1..19: note = siRNA antisense sequence
  source 1..19: mol_type = other RNA
atattctgacttagttgag

SEQ ID NO: 25982 - RNA, 19 nt, synthetic construct
  misc_feature 1..19: note = siRNA sense sequence
  source 1..19: mol_type = other RNA
actaagtcagaatatttgg

SEQ ID NO: 25983 - RNA, 19 nt, synthetic construct
  misc_feature 1..19: note = siRNA antisense sequence
  source 1..19: mol_type = other RNA
ccaaatattctgacttagt

SEQ ID NO: 25984 - RNA, 19 nt, synthetic construct
  misc_feature 1..19: note = siRNA sense sequence
  source 1..19: mol_type = other RNA
ctaagtcagaatatttggg

SEQ ID NO: 25985 - RNA, 19 nt, synthetic construct
  misc_feature 1..19: note = siRNA antisense sequence
  source 1..19: mol_type = other RNA
cccaaatattctgacttag

SEQ ID NO: 25986 - RNA, 19 nt, synthetic construct
  misc_feature 1..19: note = siRNA sense sequence
  source 1..19: mol_type = other RNA
taagtcagaatatttggga

SEQ ID NO: 25987 - RNA, 19 nt, synthetic construct
  misc_feature 1..19: note = siRNA antisense sequence
  source 1..19: mol_type = other RNA
tcccaaatattctgactta

SEQ ID NO: 25988 - RNA, 19 nt, synthetic construct
  misc_feature 1..19: note = siRNA sense sequence
  source 1..19: mol_type = other RNA
aagtcagaatatttgggaa

SEQ ID NO: 25989 - RNA, 19 nt, synthetic construct
  misc_feature 1..19: note = siRNA antisense sequence
  source 1..19: mol_type = other RNA
ttcccaaatattctgactt

SEQ ID NO: 25990 - RNA, 19 nt, synthetic construct
  misc_feature 1..19: note = siRNA sense sequence
  source 1..19: mol_type = other RNA
ctcctcaggtgcttcttat

SEQ ID NO: 25991 - RNA, 19 nt, synthetic construct
  misc_feature 1..19: note = siRNA antisense sequence
  source 1..19: mol_type = other RNA
ataagaagcacctgaggag

SEQ ID NO: 25992 - RNA, 19 nt, synthetic construct
  misc_feature 1..19: note = siRNA sense sequence
  source 1..19: mol_type = other RNA
tcctcaggtgcttcttatc

SEQ ID NO: 25993 - RNA, 19 nt, synthetic construct
  misc_feature 1..19: note = siRNA antisense sequence
  source 1..19: mol_type = other RNA
gataagaagcacctgagga

SEQ ID NO: 25994 - RNA, 19 nt, synthetic construct
  misc_feature 1..19: note = siRNA sense sequence
  source 1..19: mol_type = other RNA
cctcaggtgcttcttatct

SEQ ID NO: 25995 - RNA, 19 nt, synthetic construct
  misc_feature 1..19: note = siRNA antisense sequence
  source 1..19: mol_type = other RNA
agataagaagcacctgagg

SEQ ID NO: 25996 - RNA, 19 nt, synthetic construct
  misc_feature 1..19: note = siRNA sense sequence
  source 1..19: mol_type = other RNA
ctcaggtgcttcttatctg

SEQ ID NO: 25997 - RNA, 19 nt, synthetic construct
  misc_feature 1..19: note = siRNA antisense sequence
  source 1..19: mol_type = other RNA
cagataagaagcacctgag

SEQ ID NO: 25998 - RNA, 19 nt, synthetic construct
  misc_feature 1..19: note = siRNA sense sequence
  source 1..19: mol_type = other RNA
tcaggtgcttcttatctgc

SEQ ID NO: 25999 - RNA, 19 nt, synthetic construct
  misc_feature 1..19: note = siRNA antisense sequence
  source 1..19: mol_type = other RNA
gcagataagaagcacctga

SEQ ID NO: 26000 - RNA, 19 nt, synthetic construct
  misc_feature 1..19: note = siRNA sense sequence
  source 1..19: mol_type = other RNA
caggtgcttcttatctgca

SEQ ID NO: 26001 - RNA, 19 nt, synthetic construct
  misc_feature 1..19: note = siRNA antisense sequence
  source 1..19: mol_type = other RNA
tgcagataagaagcacctg

SEQ ID NO: 26002 - RNA, 19 nt, synthetic construct
  misc_feature 1..19: note = siRNA sense sequence
  source 1..19: mol_type = other RNA
tatctgcagccaggttaaa

SEQ ID NO: 26003 - RNA, 19 nt, synthetic construct
  misc_feature 1..19: note = siRNA antisense sequence
  source 1..19: mol_type = other RNA
tttaacctggctgcagata

SEQ ID NO: 26004 - RNA, 19 nt, synthetic construct
  misc_feature 1..19: note = siRNA sense sequence
  source 1..19: mol_type = other RNA
catcactgagtaggactat

SEQ ID NO: 26005 - RNA, 19 nt, synthetic construct
  misc_feature 1..19: note = siRNA antisense sequence
  source 1..19: mol_type = other RNA
atagtcctactcagtgatg

SEQ ID NO: 26006 - RNA, 19 nt, synthetic construct
  misc_feature 1..19: note = siRNA sense sequence
  source 1..19: mol_type = other RNA
atcactgagtaggactatt

SEQ ID NO: 26007 - RNA, 19 nt, synthetic construct
  misc_feature 1..19: note = siRNA antisense sequence
  source 1..19: mol_type = other RNA
aatagtcctactcagtgat

SEQ ID NO: 26008 - RNA, 19 nt, synthetic construct
  misc_feature 1..19: note = siRNA sense sequence
  source 1..19: mol_type = other RNA
tcactgagtaggactatta

SEQ ID NO: 26009 - RNA, 19 nt, synthetic construct
  misc_feature 1..19: note = siRNA antisense sequence
  source 1..19: mol_type = other RNA
taatagtcctactcagtga

SEQ ID NO: 26010 - RNA, 19 nt, synthetic construct
  misc_feature 1..19: note = siRNA sense sequence
  source 1..19: mol_type = other RNA
cactgagtaggactattag

SEQ ID NO: 26011 - RNA, 19 nt, synthetic construct
  misc_feature 1..19: note = siRNA antisense sequence
  source 1..19: mol_type = other RNA
ctaatagtcctactcagtg

SEQ ID NO: 26012 - RNA, 19 nt, synthetic construct
  misc_feature 1..19: note = siRNA sense sequence
  source 1..19: mol_type = other RNA
actgagtaggactattagc

SEQ ID NO: 26013 - RNA, 19 nt, synthetic construct
  misc_feature 1..19: note = siRNA antisense sequence
  source 1..19: mol_type = other RNA
gctaatagtcctactcagt

SEQ ID NO: 26014 - RNA, 19 nt, synthetic construct
  misc_feature 1..19: note = siRNA sense sequence
  source 1..19: mol_type = other RNA
ctgagtaggactattagct

SEQ ID NO: 26015 - RNA, 19 nt, synthetic construct
  misc_feature 1..19: note = siRNA antisense sequence
  source 1..19: mol_type = other RNA
agctaatagtcctactcag

SEQ ID NO: 26016 - RNA, 19 nt, synthetic construct
  misc_feature 1..19: note = siRNA sense sequence
  source 1..19: mol_type = other RNA
tgagtaggactattagctt

SEQ ID NO: 26017 - RNA, 19 nt, synthetic construct
  misc_feature 1..19: note = siRNA antisense sequence
  source 1..19: mol_type = other RNA
aagctaatagtcctactca

SEQ ID NO: 26018 - RNA, 19 nt, synthetic construct
  misc_feature 1..19: note = siRNA sense sequence
  source 1..19: mol_type = other RNA
ttagctttaatgtgtcctg

SEQ ID NO: 26019 - RNA, 19 nt, synthetic construct
  misc_feature 1..19: note = siRNA antisense sequence
  source 1..19: mol_type = other RNA
caggacacattaaagctaa

SEQ ID NO: 26020 - RNA, 19 nt, synthetic construct
  misc_feature 1..19: note = siRNA sense sequence
  source 1..19: mol_type = other RNA
tagctttaatgtgtcctgt

SEQ ID NO: 26021 - RNA, 19 nt, synthetic construct
  misc_feature 1..19: note = siRNA antisense sequence
  source 1..19: mol_type = other RNA
acaggacacattaaagcta

SEQ ID NO: 26022 - RNA, 19 nt, synthetic construct
  misc_feature 1..19: note = siRNA sense sequence
  source 1..19: mol_type = other RNA
agctttaatgtgtcctgtg

SEQ ID NO: 26023 - RNA, 19 nt, synthetic construct
  misc_feature 1..19: note = siRNA antisense sequence
  source 1..19: mol_type = other RNA
cacaggacacattaaagct

SEQ ID NO: 26024 - RNA, 19 nt, synthetic construct
  misc_feature 1..19: note = siRNA sense sequence
  source 1..19: mol_type = other RNA
ttaatgtgtcctgtgacca

SEQ ID NO: 26025 - RNA, 19 nt, synthetic construct
  misc_feature 1..19: note = siRNA antisense sequence
  source 1..19: mol_type = other RNA
tggtcacaggacacattaa

SEQ ID NO: 26026 - RNA, 19 nt, synthetic construct
  misc_feature 1..19: note = siRNA sense sequence
  source 1..19: mol_type = other RNA
caataccaatcagctctct

SEQ ID NO: 26027 - RNA, 19 nt, synthetic construct
  misc_feature 1..19: note = siRNA antisense sequence
  source 1..19: mol_type = other RNA
agagagctgattggtattg

SEQ ID NO: 26028 - RNA, 19 nt, synthetic construct
  misc_feature 1..19: note = siRNA sense sequence
  source 1..19: mol_type = other RNA
ccaatcagctctctggtta

SEQ ID NO: 26029 - RNA, 19 nt, synthetic construct
  misc_feature 1..19: note = siRNA antisense sequence
  source 1..19: mol_type = other RNA
taaccagagagctgattgg

SEQ ID NO: 26030 - RNA, 19 nt, synthetic construct
  misc_feature 1..19: note = siRNA sense sequence
  source 1..19: mol_type = other RNA
atcagctctctggttaaga

SEQ ID NO: 26031 - RNA, 19 nt, synthetic construct
  misc_feature 1..19: note = siRNA antisense sequence
  source 1..19: mol_type = other RNA
tcttaaccagagagctgat

SEQ ID NO: 26032 - RNA, 19 nt, synthetic construct
  misc_feature 1..19: note = siRNA sense sequence
  source 1..19: mol_type = other RNA
tcagctctctggttaagaa

SEQ ID NO: 26033 - RNA, 19 nt, synthetic construct
  misc_feature 1..19: note = siRNA antisense sequence
  source 1..19: mol_type = other RNA
ttcttaaccagagagctga

SEQ ID NO: 26034 - RNA, 19 nt, synthetic construct
  misc_feature 1..19: note = siRNA sense sequence
  source 1..19: mol_type = other RNA
gggaatgtatttctttagc

SEQ ID NO: 26035 - RNA, 19 nt, synthetic construct
  misc_feature 1..19: note = siRNA antisense sequence
  source 1..19: mol_type = other RNA
gctaaagaaatacattccc

SEQ ID NO: 26036 - RNA, 19 nt, synthetic construct
  misc_feature 1..19: note = siRNA sense sequence
  source 1..19: mol_type = other RNA
tttctttagctttaatgcc

SEQ ID NO: 26037 - RNA, 19 nt, synthetic construct
  misc_feature 1..19: note = siRNA antisense sequence
  source 1..19: mol_type = other RNA
ggcattaaagctaaagaaa

SEQ ID NO: 26038 - RNA, 19 nt, synthetic construct
  misc_feature 1..19: note = siRNA sense sequence
  source 1..19: mol_type = other RNA
ttctttagctttaatgcct

SEQ ID NO: 26039 - RNA, 19 nt, synthetic construct
  misc_feature 1..19: note = siRNA antisense sequence
  source 1..19: mol_type = other RNA
aggcattaaagctaaagaa

SEQ ID NO: 26040 - RNA, 19 nt, synthetic construct
  misc_feature 1..19: note = siRNA sense sequence
  source 1..19: mol_type = other RNA
ttagctttaatgcctcact

SEQ ID NO: 26041 - RNA, 19 nt, synthetic construct
  misc_feature 1..19: note = siRNA antisense sequence
  source 1..19: mol_type = other RNA
agtgaggcattaaagctaa

SEQ ID NO: 26042 - RNA, 19 nt, synthetic construct
  misc_feature 1..19: note = siRNA sense sequence
  source 1..19: mol_type = other RNA
tagctttaatgcctcactg

SEQ ID NO: 26043 - RNA, 19 nt, synthetic construct
  misc_feature 1..19: note = siRNA antisense sequence
  source 1..19: mol_type = other RNA
cagtgaggcattaaagcta

SEQ ID NO: 26044 - RNA, 19 nt, synthetic construct
  misc_feature 1..19: note = siRNA sense sequence
  source 1..19: mol_type = other RNA
agctttaatgcctcactgt

SEQ ID NO: 26045 - RNA, 19 nt, synthetic construct
  misc_feature 1..19: note = siRNA antisense sequence
  source 1..19: mol_type = other RNA
acagtgaggcattaaagct

SEQ ID NO: 26046 - RNA, 19 nt, synthetic construct
  misc_feature 1..19: note = siRNA sense sequence
  source 1..19: mol_type = other RNA
tgccatttacatgcatatg

SEQ ID NO: 26047 - RNA, 19 nt, synthetic construct
  misc_feature 1..19: note = siRNA antisense sequence
  source 1..19: mol_type = other RNA
catatgcatgtaaatggca

SEQ ID NO: 26048 - RNA, 19 nt, synthetic construct
  misc_feature 1..19: note = siRNA sense sequence
  source 1..19: mol_type = other RNA
catgcatatgtgttgctaa

SEQ ID NO: 26049 - RNA, 19 nt, synthetic construct
  misc_feature 1..19: note = siRNA antisense sequence
  source 1..19: mol_type = other RNA
ttagcaacacatatgcatg

SEQ ID NO: 26050 - RNA, 19 nt, synthetic construct
  misc_feature 1..19: note = siRNA sense sequence
  source 1..19: mol_type = other RNA
atgcatatgtgttgctaaa

SEQ ID NO: 26051 - RNA, 19 nt, synthetic construct
  misc_feature 1..19: note = siRNA antisense sequence
  source 1..19: mol_type = other RNA
tttagcaacacatatgcat

SEQ ID NO: 26052 - RNA, 19 nt, synthetic construct
  misc_feature 1..19: note = siRNA sense sequence
  source 1..19: mol_type = other RNA
tgcatatgtgttgctaaat

SEQ ID NO: 26053 - RNA, 19 nt, synthetic construct
  misc_feature 1..19: note = siRNA antisense sequence
  source 1..19: mol_type = other RNA
atttagcaacacatatgca

SEQ ID NO: 26054 - RNA, 19 nt, synthetic construct
  misc_feature 1..19: note = siRNA sense sequence
  source 1..19: mol_type = other RNA
gcatatgtgttgctaaata

SEQ ID NO: 26055 - RNA, 19 nt, synthetic construct
  misc_feature 1..19: note = siRNA antisense sequence
  source 1..19: mol_type = other RNA
tatttagcaacacatatgc

SEQ ID NO: 26056 - RNA, 19 nt, synthetic construct
  misc_feature 1..19: note = siRNA sense sequence
  source 1..19: mol_type = other RNA
catatgtgttgctaaatac

SEQ ID NO: 26057 - RNA, 19 nt, synthetic construct
  misc_feature 1..19: note = siRNA antisense sequence
  source 1..19: mol_type = other RNA
gtatttagcaacacatatg

SEQ ID NO: 26058 - RNA, 19 nt, synthetic construct
  misc_feature 1..19: note = siRNA sense sequence
  source 1..19: mol_type = other RNA
acccagatcccacccactt

SEQ ID NO: 26059 - RNA, 19 nt, synthetic construct
  misc_feature 1..19: note = siRNA antisense sequence
  source 1..19: mol_type = other RNA
aagtgggtgggatctgggt

SEQ ID NO: 26060 - RNA, 19 nt, synthetic construct
  misc_feature 1..19: note = siRNA sense sequence
  source 1..19: mol_type = other RNA
cccagatcccacccacttc

SEQ ID NO: 26061 - RNA, 19 nt, synthetic construct
  misc_feature 1..19: note = siRNA antisense sequence
  source 1..19: mol_type = other RNA
gaagtgggtgggatctggg

SEQ ID NO: 26062 - RNA, 19 nt, synthetic construct
  misc_feature 1..19: note = siRNA sense sequence
  source 1..19: mol_type = other RNA
ccagatcccacccacttct

SEQ ID NO: 26063 - RNA, 19 nt, synthetic construct
  misc_feature 1..19: note = siRNA antisense sequence
  source 1..19: mol_type = other RNA
agaagtgggtgggatctgg

SEQ ID NO: 26064 - RNA, 19 nt, synthetic construct
  misc_feature 1..19: note = siRNA sense sequence
  source 1..19: mol_type = other RNA
cagatcccacccacttctt

SEQ ID NO: 26065 - RNA, 19 nt, synthetic construct
  misc_feature 1..19: note = siRNA antisense sequence
  source 1..19: mol_type = other RNA
aagaagtgggtgggatctg

SEQ ID NO: 26066 - RNA, 19 nt, synthetic construct
  misc_feature 1..19: note = siRNA sense sequence
  source 1..19: mol_type = other RNA
agatcccacccacttcttg

SEQ ID NO: 26067 - RNA, 19 nt, synthetic construct
  misc_feature 1..19: note = siRNA antisense sequence
  source 1..19: mol_type = other RNA
caagaagtgggtgggatct

SEQ ID NO: 26068 - RNA, 19 nt, synthetic construct
  misc_feature 1..19: note = siRNA sense sequence
  source 1..19: mol_type = other RNA
gatcccacccacttcttga

SEQ ID NO: 26069 - RNA, 19 nt, synthetic construct
  misc_feature 1..19: note = siRNA antisense sequence
  source 1..19: mol_type = other RNA
tcaagaagtgggtgggatc

SEQ ID NO: 26070 - RNA, 19 nt, synthetic construct
  misc_feature 1..19: note = siRNA sense sequence
  source 1..19: mol_type = other RNA
atcccacccacttcttgaa

SEQ ID NO: 26071 - RNA, 19 nt, synthetic construct
  misc_feature 1..19: note = siRNA antisense sequence
  source 1..19: mol_type = other RNA
ttcaagaagtgggtgggat

SEQ ID NO: 26072 - RNA, 19 nt, synthetic construct
  misc_feature 1..19: note = siRNA sense sequence
  source 1..19: mol_type = other RNA
tcccacccacttcttgaag

SEQ ID NO: 26073 - RNA, 19 nt, synthetic construct
  misc_feature 1..19: note = siRNA antisense sequence
  source 1..19: mol_type = other RNA
cttcaagaagtgggtggga

SEQ ID NO: 26074 - RNA, 19 nt, synthetic construct
  misc_feature 1..19: note = siRNA sense sequence
  source 1..19: mol_type = other RNA
cccacccacttcttgaagc

SEQ ID NO: 26075 - RNA, 19 nt, synthetic construct
  misc_feature 1..19: note = siRNA antisense sequence
  source 1..19: mol_type = other RNA
gcttcaagaagtgggtggg

SEQ ID NO: 26076 - RNA, 19 nt, synthetic construct
  misc_feature 1..19: note = siRNA sense sequence
  source 1..19: mol_type = other RNA
ccacccacttcttgaagct

SEQ ID NO: 26077 - RNA, 19 nt, synthetic construct
  misc_feature 1..19: note = siRNA antisense sequence
  source 1..19: mol_type = other RNA
agcttcaagaagtgggtgg

SEQ ID NO: 26078 - RNA, 19 nt, synthetic construct
  misc_feature 1..19: note = siRNA sense sequence
  source 1..19: mol_type = other RNA
cacccacttcttgaagctt

SEQ ID NO: 26079 - RNA, 19 nt, synthetic construct
  misc_feature 1..19: note = siRNA antisense sequence
  source 1..19: mol_type = other RNA
aagcttcaagaagtgggtg

SEQ ID NO: 26080 - RNA, 19 nt, synthetic construct
  misc_feature 1..19: note = siRNA sense sequence
  source 1..19: mol_type = other RNA
acccacttcttgaagctta

SEQ ID NO: 26081 - RNA, 19 nt, synthetic construct
  misc_feature 1..19: note = siRNA antisense sequence
  source 1..19: mol_type = other RNA
taagcttcaagaagtgggt

SEQ ID NO: 26082 - RNA, 19 nt, synthetic construct
  misc_feature 1..19: note = siRNA sense sequence
  source 1..19: mol_type = other RNA
cccacttcttgaagcttat

SEQ ID NO: 26083 - RNA, 19 nt, synthetic construct
  misc_feature 1..19: note = siRNA antisense sequence
  source 1..19: mol_type = other RNA
ataagcttcaagaagtggg

SEQ ID NO: 26084 - RNA, 19 nt, synthetic construct
  misc_feature 1..19: note = siRNA sense sequence
  source 1..19: mol_type = other RNA
ccacttcttgaagcttata

SEQ ID NO: 26085 - RNA, 19 nt, synthetic construct
  misc_feature 1..19: note = siRNA antisense sequence
  source 1..19: mol_type = other RNA
tataagcttcaagaagtgg

SEQ ID NO: 26086 - RNA, 19 nt, synthetic construct
  misc_feature 1..19: note = siRNA sense sequence
  source 1..19: mol_type = other RNA
cacttcttgaagcttataa

SEQ ID NO: 26087 - RNA, 19 nt, synthetic construct
  misc_feature 1..19: note = siRNA antisense sequence
  source 1..19: mol_type = other RNA
ttataagcttcaagaagtg

SEQ ID NO: 26088 - RNA, 19 nt, synthetic construct
  misc_feature 1..19: note = siRNA sense sequence
  source 1..19: mol_type = other RNA
agcttataatcattttggg

SEQ ID NO: 26089 - RNA, 19 nt, synthetic construct
  misc_feature 1..19: note = siRNA antisense sequence
  source 1..19: mol_type = other RNA
cccaaaatgattataagct

SEQ ID NO: 26090 - RNA, 19 nt, synthetic construct
  misc_feature 1..19: note = siRNA sense sequence
  source 1..19: mol_type = other RNA
aaaagctaatatcactgag

SEQ ID NO: 26091 - RNA, 19 nt, synthetic construct
  misc_feature 1..19: note = siRNA antisense sequence
  source 1..19: mol_type = other RNA
ctcagtgatattagctttt

SEQ ID NO: 26092 - RNA, 19 nt, synthetic construct
  misc_feature 1..19: note = siRNA sense sequence
  source 1..19: mol_type = other RNA
caattggctagaatcacct

SEQ ID NO: 26093 - RNA, 19 nt, synthetic construct
  misc_feature 1..19: note = siRNA antisense sequence
  source 1..19: mol_type = other RNA
aggtgattctagccaattg

SEQ ID NO: 26094 - RNA, 19 nt, synthetic construct
  misc_feature 1..19: note = siRNA sense sequence
  source 1..19: mol_type = other RNA
aattggctagaatcacctc

SEQ ID NO: 26095 - RNA, 19 nt, synthetic construct
  misc_feature 1..19: note = siRNA antisense sequence
  source 1..19: mol_type = other RNA
gaggtgattctagccaatt

SEQ ID NO: 26096 - RNA, 19 nt, synthetic construct
  misc_feature 1..19: note = siRNA sense sequence
  source 1..19: mol_type = other RNA
attggctagaatcacctca

SEQ ID NO: 26097 - RNA, 19 nt, synthetic construct
  misc_feature 1..19: note = siRNA antisense sequence
  source 1..19: mol_type = other RNA
tgaggtgattctagccaat

SEQ ID NO: 26098 - RNA, 19 nt, synthetic construct
  misc_feature 1..19: note = siRNA sense sequence
  source 1..19: mol_type = other RNA
ttggctagaatcacctcag

SEQ ID NO: 26099 - RNA, 19 nt, synthetic construct
  misc_feature 1..19: note = siRNA antisense sequence
  source 1..19: mol_type = other RNA
ctgaggtgattctagccaa

SEQ ID NO: 26100 - RNA, 19 nt, synthetic construct
  misc_feature 1..19: note = siRNA sense sequence
  source 1..19: mol_type = other RNA
tggctagaatcacctcagg

SEQ ID NO: 26101 - RNA, 19 nt, synthetic construct
  misc_feature 1..19: note = siRNA antisense sequence
  source 1..19: mol_type = other RNA
cctgaggtgattctagcca

SEQ ID NO: 26102 - RNA, 19 nt, synthetic construct
  misc_feature 1..19: note = siRNA sense sequence
  source 1..19: mol_type = other RNA
tggtacttggatctgggca

SEQ ID NO: 26103 - RNA, 19 nt, synthetic construct
  misc_feature 1..19: note = siRNA antisense sequence
  source 1..19: mol_type = other RNA
tgcccagatccaagtacca

SEQ ID NO: 26104 - RNA, 19 nt, synthetic construct
  misc_feature 1..19: note = siRNA sense sequence
  source 1..19: mol_type = other RNA
ggtacttggatctgggcac

SEQ ID NO: 26105 - RNA, 19 nt, synthetic construct
  misc_feature 1..19: note = siRNA antisense sequence
  source 1..19: mol_type = other RNA
gtgcccagatccaagtacc

SEQ ID NO: 26106 - RNA, 19 nt, synthetic construct
  misc_feature 1..19: note = siRNA sense sequence
  source 1..19: mol_type = other RNA
gtacttggatctgggcacc

SEQ ID NO: 26107 - RNA, 19 nt, synthetic construct
  misc_feature 1..19: note = siRNA antisense sequence
  source 1..19: mol_type = other RNA
ggtgcccagatccaagtac

SEQ ID NO: 26108 - RNA, 19 nt, synthetic construct
  misc_feature 1..19: note = siRNA sense sequence
  source 1..19: mol_type = other RNA
tacttggatctgggcaccc

SEQ ID NO: 26109 - RNA, 19 nt, synthetic construct
  misc_feature 1..19: note = siRNA antisense sequence
  source 1..19: mol_type = other RNA
gggtgcccagatccaagta

SEQ ID NO: 26110 - RNA, 19 nt, synthetic construct
  misc_feature 1..19: note = siRNA sense sequence
  source 1..19: mol_type = other RNA
acttggatctgggcaccct

SEQ ID NO: 26111 - RNA, 19 nt, synthetic construct
  misc_feature 1..19: note = siRNA antisense sequence
  source 1..19: mol_type = other RNA
agggtgcccagatccaagt

SEQ ID NO: 26112 - RNA, 19 nt, synthetic construct
  misc_feature 1..19: note = siRNA sense sequence
  source 1..19: mol_type = other RNA
cttggatctgggcaccctt

SEQ ID NO: 26113 - RNA, 19 nt, synthetic construct
  misc_feature 1..19: note = siRNA antisense sequence
  source 1..19: mol_type = other RNA
aagggtgcccagatccaag

SEQ ID NO: 26114 - RNA, 19 nt, synthetic construct
  misc_feature 1..19: note = siRNA sense sequence
  source 1..19: mol_type = other RNA
ttggatctgggcacccttt

SEQ ID NO: 26115 - RNA, 19 nt, synthetic construct
  misc_feature 1..19: note = siRNA antisense sequence
  source 1..19: mol_type = other RNA
aaagggtgcccagatccaa

SEQ ID NO: 26116 - RNA, 19 nt, synthetic construct
  misc_feature 1..19: note = siRNA sense sequence
  source 1..19: mol_type = other RNA
tggatctgggcaccctttg

SEQ ID NO: 26117 - RNA, 19 nt, synthetic construct
  misc_feature 1..19: note = siRNA antisense sequence
  source 1..19: mol_type = other RNA
caaagggtgcccagatcca

SEQ ID NO: 26118 - RNA, 19 nt, synthetic construct
  misc_feature 1..19: note = siRNA sense sequence
  source 1..19: mol_type = other RNA
ggatctgggcaccctttga

SEQ ID NO: 26119 - RNA, 19 nt, synthetic construct
  misc_feature 1..19: note = siRNA antisense sequence
  source 1..19: mol_type = other RNA
tcaaagggtgcccagatcc

SEQ ID NO: 26120 - RNA, 19 nt, synthetic construct
  misc_feature 1..19: note = siRNA sense sequence
  source 1..19: mol_type = other RNA
gatctgggcaccctttgaa

SEQ ID NO: 26121 - RNA, 19 nt, synthetic construct
  misc_feature 1..19: note = siRNA antisense sequence
  source 1..19: mol_type = other RNA
ttcaaagggtgcccagatc

SEQ ID NO: 26122 - RNA, 19 nt, synthetic construct
  misc_feature 1..19: note = siRNA sense sequence
  source 1..19: mol_type = other RNA
atctgggcaccctttgaat

SEQ ID NO: 26123 - RNA, 19 nt, synthetic construct
  misc_feature 1..19: note = siRNA antisense sequence
  source 1..19: mol_type = other RNA
attcaaagggtgcccagat

SEQ ID NO: 26124 - RNA, 19 nt, synthetic construct
  misc_feature 1..19: note = siRNA sense sequence
  source 1..19: mol_type = other RNA
tctgggcaccctttgaatg

SEQ ID NO: 26125 - RNA, 19 nt, synthetic construct
  misc_feature 1..19: note = siRNA antisense sequence
  source 1..19: mol_type = other RNA
cattcaaagggtgcccaga

SEQ ID NO: 26126 - RNA, 19 nt, synthetic construct
  misc_feature 1..19: note = siRNA sense sequence
  source 1..19: mol_type = other RNA
ttttcacttatccggtagg

SEQ ID NO: 26127 - RNA, 19 nt, synthetic construct
  misc_feature 1..19: note = siRNA antisense sequence
  source 1..19: mol_type = other RNA
cctaccggataagtgaaaa

SEQ ID NO: 26128 - RNA, 19 nt, synthetic construct
  misc_feature 1..19: note = siRNA sense sequence
  source 1..19: mol_type = other RNA
tttcacttatccggtaggt

SEQ ID NO: 26129 - RNA, 19 nt, synthetic construct
  misc_feature 1..19: note = siRNA antisense sequence
  source 1..19: mol_type = other RNA
acctaccggataagtgaaa

SEQ ID NO: 26130 - RNA, 19 nt, synthetic construct
  misc_feature 1..19: note = siRNA sense sequence
  source 1..19: mol_type = other RNA
ttcacttatccggtaggta

SEQ ID NO: 26131 - RNA, 19 nt, synthetic construct
  misc_feature 1..19: note = siRNA antisense sequence
  source 1..19: mol_type = other RNA
tacctaccggataagtgaa

SEQ ID NO: 26132 - RNA, 19 nt, synthetic construct
  misc_feature 1..19: note = siRNA sense sequence
  source 1..19: mol_type = other RNA
tcacttatccggtaggtaa

SEQ ID NO: 26133 - RNA, 19 nt, synthetic construct
  misc_feature 1..19: note = siRNA antisense sequence
  source 1..19: mol_type = other RNA
ttacctaccggataagtga

SEQ ID NO: 26134 - RNA, 19 nt, synthetic construct
  misc_feature 1..19: note = siRNA sense sequence
  source 1..19: mol_type = other RNA
ttatccggtaggtaaggac

SEQ ID NO: 26135 - RNA, 19 nt, synthetic construct
  misc_feature 1..19: note = siRNA antisense sequence
  source 1..19: mol_type = other RNA
gtccttacctaccggataa

SEQ ID NO: 26136 - RNA, 19 nt, synthetic construct
  misc_feature 1..19: note = siRNA sense sequence
  source 1..19: mol_type = other RNA
tatccggtaggtaaggaca

SEQ ID NO: 26137 - RNA, 19 nt, synthetic construct
  misc_feature 1..19: note = siRNA antisense sequence
  source 1..19: mol_type = other RNA
tgtccttacctaccggata

SEQ ID NO: 26138 - RNA, 19 nt, synthetic construct
  misc_feature 1..19: note = siRNA sense sequence
  source 1..19: mol_type = other RNA
atccggtaggtaaggacat

SEQ ID NO: 26139 - RNA, 19 nt, synthetic construct
  misc_feature 1..19: note = siRNA antisense sequence
  source 1..19: mol_type = other RNA
atgtccttacctaccggat

SEQ ID NO: 26140 - RNA, 19 nt, synthetic construct
  misc_feature 1..19: note = siRNA sense sequence
  source 1..19: mol_type = other RNA
tccggtaggtaaggacatt

SEQ ID NO: 26141 - RNA, 19 nt, synthetic construct
  misc_feature 1..19: note = siRNA antisense sequence
  source 1..19: mol_type = other RNA
aatgtccttacctaccgga

SEQ ID NO: 26142 - RNA, 19 nt, synthetic construct
  misc_feature 1..19: note = siRNA sense sequence
  source 1..19: mol_type = other RNA
ccggtaggtaaggacatta

SEQ ID NO: 26143 - RNA, 19 nt, synthetic construct
  misc_feature 1..19: note = siRNA antisense sequence
  source 1..19: mol_type = other RNA
taatgtccttacctaccgg

SEQ ID NO: 26144 - RNA, 19 nt, synthetic construct
  misc_feature 1..19: note = siRNA sense sequence
  source 1..19: mol_type = other RNA
cggtaggtaaggacattag

SEQ ID NO: 26145 - RNA, 19 nt, synthetic construct
  misc_feature 1..19: note = siRNA antisense sequence
  source 1..19: mol_type = other RNA
ctaatgtccttacctaccg

SEQ ID NO: 26146 - RNA, 19 nt, synthetic construct
  misc_feature 1..19: note = siRNA sense sequence
  source 1..19: mol_type = other RNA
gtaggtaaggacattagct

SEQ ID NO: 26147 - RNA, 19 nt, synthetic construct
  misc_feature 1..19: note = siRNA antisense sequence
  source 1..19: mol_type = other RNA
agctaatgtccttacctac

SEQ ID NO: 26148 - RNA, 19 nt, synthetic construct
  misc_feature 1..19: note = siRNA sense sequence
  source 1..19: mol_type = other RNA
taggtaaggacattagctc

SEQ ID NO: 26149 - RNA, 19 nt, synthetic construct
  misc_feature 1..19: note = siRNA antisense sequence
  source 1..19: mol_type = other RNA
gagctaatgtccttaccta

SEQ ID NO: 26150 - RNA, 19 nt, synthetic construct
  misc_feature 1..19: note = siRNA sense sequence
  source 1..19: mol_type = other RNA
aggtaaggacattagctct

SEQ ID NO: 26151 - RNA, 19 nt, synthetic construct
  misc_feature 1..19: note = siRNA antisense sequence
  source 1..19: mol_type = other RNA
agagctaatgtccttacct

SEQ ID NO: 26152 - RNA, 19 nt, synthetic construct
  misc_feature 1..19: note = siRNA sense sequence
  source 1..19: mol_type = other RNA
ggtaaggacattagctctg

SEQ ID NO: 26153 - RNA, 19 nt, synthetic construct
  misc_feature 1..19: note = siRNA antisense sequence
  source 1..19: mol_type = other RNA
cagagctaatgtccttacc

SEQ ID NO: 26154 - RNA, 19 nt, synthetic construct
  misc_feature 1..19: note = siRNA sense sequence
  source 1..19: mol_type = other RNA
gtaaggacattagctctgg

SEQ ID NO: 26155 - RNA, 19 nt, synthetic construct
  misc_feature 1..19: note = siRNA antisense sequence
  source 1..19: mol_type = other RNA
ccagagctaatgtccttac

SEQ ID NO: 26156 - RNA, 19 nt, synthetic construct
  misc_feature 1..19: note = siRNA sense sequence
  source 1..19: mol_type = other RNA
taaggacattagctctgga

SEQ ID NO: 26157 - RNA, 19 nt, synthetic construct
  misc_feature 1..19: note = siRNA antisense sequence
  source 1..19: mol_type = other RNA
tccagagctaatgtcctta

SEQ ID NO: 26158 - RNA, 19 nt, synthetic construct
  misc_feature 1..19: note = siRNA sense sequence
  source 1..19: mol_type = other RNA
cttggatctcccacaggtg

SEQ ID NO: 26159 - RNA, 19 nt, synthetic construct
  misc_feature 1..19: note = siRNA antisense sequence
  source 1..19: mol_type = other RNA
cacctgtgggagatccaag

SEQ ID NO: 26160 - RNA, 19 nt, synthetic construct
  misc_feature 1..19: note = siRNA sense sequence
  source 1..19: mol_type = other RNA
ttggatctcccacaggtga

SEQ ID NO: 26161 - RNA, 19 nt, synthetic construct
  misc_feature 1..19: note = siRNA antisense sequence
  source 1..19: mol_type = other RNA
tcacctgtgggagatccaa

SEQ ID NO: 26162 - RNA, 19 nt, synthetic construct
  misc_feature 1..19: note = siRNA sense sequence
  source 1..19: mol_type = other RNA
tggatctcccacaggtgag

SEQ ID NO: 26163 - RNA, 19 nt, synthetic construct
  misc_feature 1..19: note = siRNA antisense sequence
  source 1..19: mol_type = other RNA
ctcacctgtgggagatcca

SEQ ID NO: 26164 - RNA, 19 nt, synthetic construct
  misc_feature 1..19: note = siRNA sense sequence
  source 1..19: mol_type = other RNA
gatctcccacaggtgagct

SEQ ID NO: 26165 - RNA, 19 nt, synthetic construct
  misc_feature 1..19: note = siRNA antisense sequence
  source 1..19: mol_type = other RNA
agctcacctgtgggagatc

SEQ ID NO: 26166 - RNA, 19 nt, synthetic construct
  misc_feature 1..19: note = siRNA sense sequence
  source 1..19: mol_type = other RNA
atctcccacaggtgagctc

SEQ ID NO: 26167 - RNA, 19 nt, synthetic construct
  misc_feature 1..19: note = siRNA antisense sequence
  source 1..19: mol_type = other RNA
gagctcacctgtgggagat

SEQ ID NO: 26168 - RNA, 19 nt, synthetic construct
  misc_feature 1..19: note = siRNA sense sequence
  source 1..19: mol_type = other RNA
tctcccacaggtgagctct

SEQ ID NO: 26169 - RNA, 19 nt, synthetic construct
  misc_feature 1..19: note = siRNA antisense sequence
  source 1..19: mol_type = other RNA
agagctcacctgtgggaga

SEQ ID NO: 26170 - RNA, 19 nt, synthetic construct
  misc_feature 1..19: note = siRNA sense sequence
  source 1..19: mol_type = other RNA
ctcccacaggtgagctctg

SEQ ID NO: 26171 - RNA, 19 nt, synthetic construct
  misc_feature 1..19: note = siRNA antisense sequence
  source 1..19: mol_type = other RNA
cagagctcacctgtgggag

SEQ ID NO: 26172 - RNA, 19 nt, synthetic construct
  misc_feature 1..19: note = siRNA sense sequence
  source 1..19: mol_type = other RNA
gcaagtaatgttaccttta

SEQ ID NO: 26173 - RNA, 19 nt, synthetic construct
  misc_feature 1..19: note = siRNA antisense sequence
  source 1..19: mol_type = other RNA
taaaggtaacattacttgc

SEQ ID NO: 26174 - RNA, 19 nt, synthetic construct
  misc_feature 1..19: note = siRNA sense sequence
  source 1..19: mol_type = other RNA
gttacctttatgattctca

SEQ ID NO: 26175 - RNA, 19 nt, synthetic construct
  misc_feature 1..19: note = siRNA antisense sequence
  source 1..19: mol_type = other RNA
tgagaatcataaaggtaac

SEQ ID NO: 26176 - RNA, 19 nt, synthetic construct
  misc_feature 1..19: note = siRNA sense sequence
  source 1..19: mol_type = other RNA
gctttgtgagcttcaattt

SEQ ID NO: 26177 - RNA, 19 nt, synthetic construct
  misc_feature 1..19: note = siRNA antisense sequence
  source 1..19: mol_type = other RNA
aaattgaagctcacaaagc

SEQ ID NO: 26178 - RNA, 19 nt, synthetic construct
  misc_feature 1..19: note = siRNA sense sequence
  source 1..19: mol_type = other RNA
ctttgtgagcttcaatttg

SEQ ID NO: 26179 - RNA, 19 nt, synthetic construct
  misc_feature 1..19: note = siRNA antisense sequence
  source 1..19: mol_type = other RNA
caaattgaagctcacaaag

SEQ ID NO: 26180 - RNA, 19 nt, synthetic construct
  misc_feature 1..19: note = siRNA sense sequence
  source 1..19: mol_type = other RNA
tttgtgagcttcaatttgt

SEQ ID NO: 26181 - RNA, 19 nt, synthetic construct
  misc_feature 1..19: note = siRNA antisense sequence
  source 1..19: mol_type = other RNA
acaaattgaagctcacaaa

SEQ ID NO: 26182 - RNA, 19 nt, synthetic construct
  misc_feature 1..19: note = siRNA sense sequence
  source 1..19: mol_type = other RNA
ttgtgagcttcaatttgta

SEQ ID NO: 26183 - RNA, 19 nt, synthetic construct
  misc_feature 1..19: note = siRNA antisense sequence
  source 1..19: mol_type = other RNA
tacaaattgaagctcacaa

SEQ ID NO: 26184 - RNA, 19 nt, synthetic construct
  misc_feature 1..19: note = siRNA sense sequence
  source 1..19: mol_type = other RNA
gtgagcttcaatttgtaaa

SEQ ID NO: 26185 - RNA, 19 nt, synthetic construct
  misc_feature 1..19: note = siRNA antisense sequence
  source 1..19: mol_type = other RNA
tttacaaattgaagctcac

SEQ ID NO: 26186 - RNA, 19 nt, synthetic construct
  misc_feature 1..19: note = siRNA sense sequence
  source 1..19: mol_type = other RNA
tctcatagagttgcaagga

SEQ ID NO: 26187 - RNA, 19 nt, synthetic construct
  misc_feature 1..19: note = siRNA antisense sequence
  source 1..19: mol_type = other RNA
tccttgcaactctatgaga

SEQ ID NO: 26188 - RNA, 19 nt, synthetic construct
  misc_feature 1..19: note = siRNA sense sequence
  source 1..19: mol_type = other RNA
ctcatagagttgcaaggaa

SEQ ID NO: 26189 - RNA, 19 nt, synthetic construct
  misc_feature 1..19: note = siRNA antisense sequence
  source 1..19: mol_type = other RNA
ttccttgcaactctatgag

SEQ ID NO: 26190 - RNA, 19 nt, synthetic construct
  misc_feature 1..19: note = siRNA sense sequence
  source 1..19: mol_type = other RNA
tcatagagttgcaaggaat

SEQ ID NO: 26191 - RNA, 19 nt, synthetic construct
  misc_feature 1..19: note = siRNA antisense sequence
  source 1..19: mol_type = other RNA
attccttgcaactctatga

SEQ ID NO: 26192 - RNA, 19 nt, synthetic construct
  misc_feature 1..19: note = siRNA sense sequence
  source 1..19: mol_type = other RNA
catagagttgcaaggaata

SEQ ID NO: 26193 - RNA, 19 nt, synthetic construct
  misc_feature 1..19: note = siRNA antisense sequence
  source 1..19: mol_type = other RNA
tattccttgcaactctatg

SEQ ID NO: 26194 - RNA, 19 nt, synthetic construct
  misc_feature 1..19: note = siRNA sense sequence
  source 1..19: mol_type = other RNA
atagagttgcaaggaataa

SEQ ID NO: 26195 - RNA, 19 nt, synthetic construct
  misc_feature 1..19: note = siRNA antisense sequence
  source 1..19: mol_type = other RNA
ttattccttgcaactctat

SEQ ID NO: 26196 - RNA, 19 nt, synthetic construct
  misc_feature 1..19: note = siRNA sense sequence
  source 1..19: mol_type = other RNA
agagttgcaaggaataaat

SEQ ID NO: 26197 - RNA, 19 nt, synthetic construct
  misc_feature 1..19: note = siRNA antisense sequence
  source 1..19: mol_type = other RNA
atttattccttgcaactct

SEQ ID NO: 26198 - RNA, 19 nt, synthetic construct
  misc_feature 1..19: note = siRNA sense sequence
  source 1..19: mol_type = other RNA
gagttgcaaggaataaatg

SEQ ID NO: 26199 - RNA, 19 nt, synthetic construct
  misc_feature 1..19: note = siRNA antisense sequence
  source 1..19: mol_type = other RNA
catttattccttgcaactc

SEQ ID NO: 26200 - RNA, 19 nt, synthetic construct
  misc_feature 1..19: note = siRNA sense sequence
  source 1..19: mol_type = other RNA
aaaattcctaagagcgcaa

SEQ ID NO: 26201 - RNA, 19 nt, synthetic construct
  misc_feature 1..19: note = siRNA antisense sequence
  source 1..19: mol_type = other RNA
ttgcgctcttaggaatttt

SEQ ID NO: 26202 - RNA, 19 nt, synthetic construct
  misc_feature 1..19: note = siRNA sense sequence
  source 1..19: mol_type = other RNA
aaattcctaagagcgcaat

SEQ ID NO: 26203 - RNA, 19 nt, synthetic construct
  misc_feature 1..19: note = siRNA antisense sequence
  source 1..19: mol_type = other RNA
attgcgctcttaggaattt

SEQ ID NO: 26204 - RNA, 19 nt, synthetic construct
  misc_feature 1..19: note = siRNA sense sequence
  source 1..19: mol_type = other RNA
attcctaagagcgcaattt

SEQ ID NO: 26205 - RNA, 19 nt, synthetic construct
  misc_feature 1..19: note = siRNA antisense sequence
  source 1..19: mol_type = other RNA
aaattgcgctcttaggaat

SEQ ID NO: 26206 - RNA, 19 nt, synthetic construct
  misc_feature 1..19: note = siRNA sense sequence
  source 1..19: mol_type = other RNA
ttcctaagagcgcaattta

SEQ ID NO: 26207 - RNA, 19 nt, synthetic construct
  misc_feature 1..19: note = siRNA antisense sequence
  source 1..19: mol_type = other RNA
taaattgcgctcttaggaa

SEQ ID NO: 26208 - RNA, 19 nt, synthetic construct
  misc_feature 1..19: note = siRNA sense sequence
  source 1..19: mol_type = other RNA
tcctaagagcgcaatttaa

SEQ ID NO: 26209 - RNA, 19 nt, synthetic construct
  misc_feature 1..19: note = siRNA antisense sequence
  source 1..19: mol_type = other RNA
ttaaattgcgctcttagga

SEQ ID NO: 26210 - RNA, 19 nt, synthetic construct
  misc_feature 1..19: note = siRNA sense sequence
  source 1..19: mol_type = other RNA
cctaagagcgcaatttaag

SEQ ID NO: 26211 - RNA, 19 nt, synthetic construct
  misc_feature 1..19: note = siRNA antisense sequence
  source 1..19: mol_type = other RNA
cttaaattgcgctcttagg

SEQ ID NO: 26212 - RNA, 19 nt, synthetic construct
  misc_feature 1..19: note = siRNA sense sequence
  source 1..19: mol_type = other RNA
ctaagagcgcaatttaagt

SEQ ID NO: 26213 - RNA, 19 nt, synthetic construct
  misc_feature 1..19: note = siRNA antisense sequence
  source 1..19: mol_type = other RNA
acttaaattgcgctcttag

SEQ ID NO: 26214 - RNA, 19 nt, synthetic construct
  misc_feature 1..19: note = siRNA sense sequence
  source 1..19: mol_type = other RNA
taagagcgcaatttaagtt

SEQ ID NO: 26215 - RNA, 19 nt, synthetic construct
  misc_feature 1..19: note = siRNA antisense sequence
  source 1..19: mol_type = other RNA
aacttaaattgcgctctta

SEQ ID NO: 26216 - RNA, 19 nt, synthetic construct
  misc_feature 1..19: note = siRNA sense sequence
  source 1..19: mol_type = other RNA
aagagcgcaatttaagttc

SEQ ID NO: 26217 - RNA, 19 nt, synthetic construct
  misc_feature 1..19: note = siRNA antisense sequence
  source 1..19: mol_type = other RNA
gaacttaaattgcgctctt

SEQ ID NO: 26218 - RNA, 19 nt, synthetic construct
  misc_feature 1..19: note = siRNA sense sequence
  source 1..19: mol_type = other RNA
gcgcaatttaagttcattt

SEQ ID NO: 26219 - RNA, 19 nt, synthetic construct
  misc_feature 1..19: note = siRNA antisense sequence
  source 1..19: mol_type = other RNA
aaatgaacttaaattgcgc

SEQ ID NO: 26220 - RNA, 19 nt, synthetic construct
  misc_feature 1..19: note = siRNA sense sequence
  source 1..19: mol_type = other RNA
caaatacaccacttgggca

SEQ ID NO: 26221 - RNA, 19 nt, synthetic construct
  misc_feature 1..19: note = siRNA antisense sequence
  source 1..19: mol_type = other RNA
tgcccaagtggtgtatttg

SEQ ID NO: 26222 - RNA, 19 nt, synthetic construct
  misc_feature 1..19: note = siRNA sense sequence
  source 1..19: mol_type = other RNA
aatacaccacttgggcaac

SEQ ID NO: 26223 - RNA, 19 nt, synthetic construct
  misc_feature 1..19: note = siRNA antisense sequence
  source 1..19: mol_type = other RNA
gttgcccaagtggtgtatt

SEQ ID NO: 26224 - RNA, 19 nt, synthetic construct
  misc_feature 1..19: note = siRNA sense sequence
  source 1..19: mol_type = other RNA
aaatatgatgcagaagatc

SEQ ID NO: 26225 - RNA, 19 nt, synthetic construct
  misc_feature 1..19: note = siRNA antisense sequence
  source 1..19: mol_type = other RNA
gatcttctgcatcatattt

SEQ ID NO: 26226 - RNA, 19 nt, synthetic construct
  misc_feature 1..19: note = siRNA sense sequence
  source 1..19: mol_type = other RNA
aatatgatgcagaagatct

SEQ ID NO: 26227 - RNA, 19 nt, synthetic construct
  misc_feature 1..19: note = siRNA antisense sequence
  source 1..19: mol_type = other RNA
agatcttctgcatcatatt

SEQ ID NO: 26228 - RNA, 19 nt, synthetic construct
  misc_feature 1..19: note = siRNA sense sequence
  source 1..19: mol_type = other RNA
agaagatctgcctcatgcc

SEQ ID NO: 26229 - RNA, 19 nt, synthetic construct
  misc_feature 1..19: note = siRNA antisense sequence
  source 1..19: mol_type = other RNA
ggcatgaggcagatcttct

SEQ ID NO: 26230 - RNA, 19 nt, synthetic construct
  misc_feature 1..19: note = siRNA sense sequence
  source 1..19: mol_type = other RNA
gaagatctgcctcatgcct

SEQ ID NO: 26231 - RNA, 19 nt, synthetic construct
  misc_feature 1..19: note = siRNA antisense sequence
  source 1..19: mol_type = other RNA
aggcatgaggcagatcttc

SEQ ID NO: 26232 - RNA, 19 nt, synthetic construct
  misc_feature 1..19: note = siRNA sense sequence
  source 1..19: mol_type = other RNA
agatctgcctcatgcctgt

SEQ ID NO: 26233 - RNA, 19 nt, synthetic construct
  misc_feature 1..19: note = siRNA antisense sequence
  source 1..19: mol_type = other RNA
acaggcatgaggcagatct

SEQ ID NO: 26234 - RNA, 19 nt, synthetic construct
  misc_feature 1..19: note = siRNA sense sequence
  source 1..19: mol_type = other RNA
gatctgcctcatgcctgtt

SEQ ID NO: 26235 - RNA, 19 nt, synthetic construct
  misc_feature 1..19: note = siRNA antisense sequence
  source 1..19: mol_type = other RNA
aacaggcatgaggcagatc

SEQ ID NO: 26236 - RNA, 19 nt, synthetic construct
  misc_feature 1..19: note = siRNA sense sequence
  source 1..19: mol_type = other RNA
atctgcctcatgcctgttc

SEQ ID NO: 26237 - RNA, 19 nt, synthetic construct
  misc_feature 1..19: note = siRNA antisense sequence
  source 1..19: mol_type = other RNA
gaacaggcatgaggcagat

SEQ ID NO: 26238 - RNA, 19 nt, synthetic construct
  misc_feature 1..19: note = siRNA sense sequence
  source 1..19: mol_type = other RNA
tctgcctcatgcctgttcc

SEQ ID NO: 26239 - RNA, 19 nt, synthetic construct
  misc_feature 1..19: note = siRNA antisense sequence
  source 1..19: mol_type = other RNA
ggaacaggcatgaggcaga

SEQ ID NO: 26240 - RNA, 19 nt, synthetic construct
  misc_feature 1..19: note = siRNA sense sequence
  source 1..19: mol_type = other RNA
tgcctcatgcctgttccta

SEQ ID NO: 26241 - RNA, 19 nt, synthetic construct
  misc_feature 1..19: note = siRNA antisense sequence
  source 1..19: mol_type = other RNA
taggaacaggcatgaggca

SEQ ID NO: 26242 - RNA, 19 nt, synthetic construct
  misc_feature 1..19: note = siRNA sense sequence
  source 1..19: mol_type = other RNA
gcctcatgcctgttcctaa

SEQ ID NO: 26243 - RNA, 19 nt, synthetic construct
  misc_feature 1..19: note = siRNA antisense sequence
  source 1..19: mol_type = other RNA
ttaggaacaggcatgaggc

SEQ ID NO: 26244 - RNA, 19 nt, synthetic construct
  misc_feature 1..19: note = siRNA sense sequence
  source 1..19: mol_type = other RNA
cctcatgcctgttcctaac

SEQ ID NO: 26245 - RNA, 19 nt, synthetic construct
  misc_feature 1..19: note = siRNA antisense sequence
  source 1..19: mol_type = other RNA
gttaggaacaggcatgagg

SEQ ID NO: 26246 - RNA, 19 nt, synthetic construct
  misc_feature 1..19: note = siRNA sense sequence
  source 1..19: mol_type = other RNA
taaatctctctctaccaaa

SEQ ID NO: 26247 - RNA, 19 nt, synthetic construct
  misc_feature 1..19: note = siRNA antisense sequence
  source 1..19: mol_type = other RNA
tttggtagagagagattta

SEQ ID NO: 26248 - RNA, 19 nt, synthetic construct
  misc_feature 1..19: note = siRNA sense sequence
  source 1..19: mol_type = other RNA
tctctctaccaaagctgtc

SEQ ID NO: 26249 - RNA, 19 nt, synthetic construct
  misc_feature 1..19: note = siRNA antisense sequence
  source 1..19: mol_type = other RNA
gacagctttggtagagaga

SEQ ID NO: 26250 - RNA, 19 nt, synthetic construct
  misc_feature 1..19: note = siRNA sense sequence
  source 1..19: mol_type = other RNA
ctctctaccaaagctgtct

SEQ ID NO: 26251 - RNA, 19 nt, synthetic construct
  misc_feature 1..19: note = siRNA antisense sequence
  source 1..19: mol_type = other RNA
agacagctttggtagagag

SEQ ID NO: 26252 - RNA, 19 nt, synthetic construct
  misc_feature 1..19: note = siRNA sense sequence
  source 1..19: mol_type = other RNA
tctctaccaaagctgtctg

SEQ ID NO: 26253 - RNA, 19 nt, synthetic construct
  misc_feature 1..19: note = siRNA antisense sequence
  source 1..19: mol_type = other RNA
cagacagctttggtagaga

SEQ ID NO: 26254 - RNA, 19 nt, synthetic construct
  misc_feature 1..19: note = siRNA sense sequence
  source 1..19: mol_type = other RNA
ctctaccaaagctgtctgt

SEQ ID NO: 26255 - RNA, 19 nt, synthetic construct
  misc_feature 1..19: note = siRNA antisense sequence
  source 1..19: mol_type = other RNA
acagacagctttggtagag

SEQ ID NO: 26256 - RNA, 19 nt, synthetic construct
  misc_feature 1..19: note = siRNA sense sequence
  source 1..19: mol_type = other RNA
tctaccaaagctgtctgtc

SEQ ID NO: 26257 - RNA, 19 nt, synthetic construct
  misc_feature 1..19: note = siRNA antisense sequence
  source 1..19: mol_type = other RNA
gacagacagctttggtaga

SEQ ID NO: 26258 - RNA, 19 nt, synthetic construct
  misc_feature 1..19: note = siRNA sense sequence
  source 1..19: mol_type = other RNA
ctaccaaagctgtctgtca

SEQ ID NO: 26259 - RNA, 19 nt, synthetic construct
  misc_feature 1..19: note = siRNA antisense sequence
  source 1..19: mol_type = other RNA
tgacagacagctttggtag

SEQ ID NO: 26260 - RNA, 19 nt, synthetic construct
  misc_feature 1..19: note = siRNA sense sequence
  source 1..19: mol_type = other RNA
taccaaagctgtctgtcag

SEQ ID NO: 26261 - RNA, 19 nt, synthetic construct
  misc_feature 1..19: note = siRNA antisense sequence
  source 1..19: mol_type = other RNA
ctgacagacagctttggta

SEQ ID NO: 26262 - RNA, 19 nt, synthetic construct
  misc_feature 1..19: note = siRNA sense sequence
  source 1..19: mol_type = other RNA
ctcagtccagagttaccct

SEQ ID NO: 26263 - RNA, 19 nt, synthetic construct
  misc_feature 1..19: note = siRNA antisense sequence
  source 1..19: mol_type = other RNA
agggtaactctggactgag

SEQ ID NO: 26264 - RNA, 19 nt, synthetic construct
  misc_feature 1..19: note = siRNA sense sequence
  source 1..19: mol_type = other RNA
tcagtccagagttaccctc

SEQ ID NO: 26265 - RNA, 19 nt, synthetic construct
  misc_feature 1..19: note = siRNA antisense sequence
  source 1..19: mol_type = other RNA
gagggtaactctggactga

SEQ ID NO: 26266 - RNA, 19 nt, synthetic construct
  misc_feature 1..19: note = siRNA sense sequence
  source 1..19: mol_type = other RNA
agtccagagttaccctcaa

SEQ ID NO: 26267 - RNA, 19 nt, synthetic construct
  misc_feature 1..19: note = siRNA antisense sequence
  source 1..19: mol_type = other RNA
ttgagggtaactctggact

SEQ ID NO: 26268 - RNA, 19 nt, synthetic construct
  misc_feature 1..19: note = siRNA sense sequence
  source 1..19: mol_type = other RNA
gtccagagttaccctcaac

SEQ ID NO: 26269 - RNA, 19 nt, synthetic construct
  misc_feature 1..19: note = siRNA antisense sequence
  source 1..19: mol_type = other RNA
gttgagggtaactctggac

SEQ ID NO: 26270 - RNA, 19 nt, synthetic construct
  misc_feature 1..19: note = siRNA sense sequence
  source 1..19: mol_type = other RNA
acttttgtgagttttacac

SEQ ID NO: 26271 - RNA, 19 nt, synthetic construct
  misc_feature 1..19: note = siRNA antisense sequence
  source 1..19: mol_type = other RNA
gtgtaaaactcacaaaagt

SEQ ID NO: 26272 - RNA, 19 nt, synthetic construct
  misc_feature 1..19: note = siRNA sense sequence
  source 1..19: mol_type = other RNA
caaatgaagaggagtacag

SEQ ID NO: 26273 - RNA, 19 nt, synthetic construct
  misc_feature 1..19: note = siRNA antisense sequence
  source 1..19: mol_type = other RNA
ctgtactcctcttcatttg

SEQ ID NO: 26274 - RNA, 19 nt, synthetic construct
  misc_feature 1..19: note = siRNA sense sequence
  source 1..19: mol_type = other RNA
aatgaagaggagtacagaa

SEQ ID NO: 26275 - RNA, 19 nt, synthetic construct
  misc_feature 1..19: note = siRNA antisense sequence
  source 1..19: mol_type = other RNA
ttctgtactcctcttcatt

SEQ ID NO: 26276 - RNA, 19 nt, synthetic construct
  misc_feature 1..19: note = siRNA sense sequence
  source 1..19: mol_type = other RNA
atgaagaggagtacagaag

SEQ ID NO: 26277 - RNA, 19 nt, synthetic construct
  misc_feature 1..19: note = siRNA antisense sequence
  source 1..19: mol_type = other RNA
cttctgtactcctcttcat

SEQ ID NO: 26278 - RNA, 19 nt, synthetic construct
  misc_feature 1..19: note = siRNA sense sequence
  source 1..19: mol_type = other RNA
tgaagaggagtacagaaga

SEQ ID NO: 26279 - RNA, 19 nt, synthetic construct
  misc_feature 1..19: note = siRNA antisense sequence
  source 1..19: mol_type = other RNA
tcttctgtactcctcttca

SEQ ID NO: 26280 - RNA, 19 nt, synthetic construct
  misc_feature 1..19: note = siRNA sense sequence
  source 1..19: mol_type = other RNA
gaagaggagtacagaagag

SEQ ID NO: 26281 - RNA, 19 nt, synthetic construct
  misc_feature 1..19: note = siRNA antisense sequence
  source 1..19: mol_type = other RNA
ctcttctgtactcctcttc

SEQ ID NO: 26282 - RNA, 19 nt, synthetic construct
  misc_feature 1..19: note = siRNA sense sequence
  source 1..19: mol_type = other RNA
agaggagtacagaagagca

SEQ ID NO: 26283 - RNA, 19 nt, synthetic construct
  misc_feature 1..19: note = siRNA antisense sequence
  source 1..19: mol_type = other RNA
tgctcttctgtactcctct

SEQ ID NO: 26284 - RNA, 19 nt, synthetic construct
  misc_feature 1..19: note = siRNA sense sequence
  source 1..19: mol_type = other RNA
gaggagtacagaagagcac

SEQ ID NO: 26285 - RNA, 19 nt, synthetic construct
  misc_feature 1..19: note = siRNA antisense sequence
  source 1..19: mol_type = other RNA
gtgctcttctgtactcctc

SEQ ID NO: 26286 - RNA, 19 nt, synthetic construct
  misc_feature 1..19: note = siRNA sense sequence
  source 1..19: mol_type = other RNA
gtacagaagagcacatttc

SEQ ID NO: 26287 - RNA, 19 nt, synthetic construct
  misc_feature 1..19: note = siRNA antisense sequence
  source 1..19: mol_type = other RNA
gaaatgtgctcttctgtac

SEQ ID NO: 26288 - RNA, 19 nt, synthetic construct
  misc_feature 1..19: note = siRNA sense sequence
  source 1..19: mol_type = other RNA
taatgttcatgccaggaat

SEQ ID NO: 26289 - RNA, 19 nt, synthetic construct
  misc_feature 1..19: note = siRNA antisense sequence
  source 1..19: mol_type = other RNA
attcctggcatgaacatta

SEQ ID NO: 26290 - RNA, 19 nt, synthetic construct
  misc_feature 1..19: note = siRNA sense sequence
  source 1..19: mol_type = other RNA
aatgttcatgccaggaata

SEQ ID NO: 26291 - RNA, 19 nt, synthetic construct
  misc_feature 1..19: note = siRNA antisense sequence
  source 1..19: mol_type = other RNA
tattcctggcatgaacatt

SEQ ID NO: 26292 - RNA, 19 nt, synthetic construct
  misc_feature 1..19: note = siRNA sense sequence
  source 1..19: mol_type = other RNA
ttcatgccaggaatagtaa

SEQ ID NO: 26293 - RNA, 19 nt, synthetic construct
  misc_feature 1..19: note = siRNA antisense sequence
  source 1..19: mol_type = other RNA
ttactattcctggcatgaa

SEQ ID NO: 26294 - RNA, 19 nt, synthetic construct
  misc_feature 1..19: note = siRNA sense sequence
  source 1..19: mol_type = other RNA
tcatgccaggaatagtaac

SEQ ID NO: 26295 - RNA, 19 nt, synthetic construct
  misc_feature 1..19: note = siRNA antisense sequence
  source 1..19: mol_type = other RNA
gttactattcctggcatga

SEQ ID NO: 26296 - RNA, 19 nt, synthetic construct
  misc_feature 1..19: note = siRNA sense sequence
  source 1..19: mol_type = other RNA
caggaatagtaacctcttc

SEQ ID NO: 26297 - RNA, 19 nt, synthetic construct
  misc_feature 1..19: note = siRNA antisense sequence
  source 1..19: mol_type = other RNA
gaagaggttactattcctg

SEQ ID NO: 26298 - RNA, 19 nt, synthetic construct
  misc_feature 1..19: note = siRNA sense sequence
  source 1..19: mol_type = other RNA
aatagtaacctcttcaagg

SEQ ID NO: 26299 - RNA, 19 nt, synthetic construct
  misc_feature 1..19: note = siRNA antisense sequence
  source 1..19: mol_type = other RNA
ccttgaagaggttactatt

SEQ ID NO: 26300 - RNA, 19 nt, synthetic construct
  misc_feature 1..19: note = siRNA sense sequence
  source 1..19: mol_type = other RNA
atagtaacctcttcaagga

SEQ ID NO: 26301 - RNA, 19 nt, synthetic construct
  misc_feature 1..19: note = siRNA antisense sequence
  source 1..19: mol_type = other RNA
tccttgaagaggttactat

SEQ ID NO: 26302 - RNA, 19 nt, synthetic construct
  misc_feature 1..19: note = siRNA sense sequence
  source 1..19: mol_type = other RNA
taacctcttcaaggatacc

SEQ ID NO: 26303 - RNA, 19 nt, synthetic construct
  misc_feature 1..19: note = siRNA antisense sequence
  source 1..19: mol_type = other RNA
ggtatccttgaagaggtta

SEQ ID NO: 26304 - RNA, 19 nt, synthetic construct
  misc_feature 1..19: note = siRNA sense sequence
  source 1..19: mol_type = other RNA
aacctcttcaaggatacca

SEQ ID NO: 26305 - RNA, 19 nt, synthetic construct
  misc_feature 1..19: note = siRNA antisense sequence
  source 1..19: mol_type = other RNA
tggtatccttgaagaggtt

SEQ ID NO: 26306 - RNA, 19 nt, synthetic construct
  misc_feature 1..19: note = siRNA sense sequence
  source 1..19: mol_type = other RNA
acctcttcaaggataccac

SEQ ID NO: 26307 - RNA, 19 nt, synthetic construct
  misc_feature 1..19: note = siRNA antisense sequence
  source 1..19: mol_type = other RNA
gtggtatccttgaagaggt

SEQ ID NO: 26308 - RNA, 19 nt, synthetic construct
  misc_feature 1..19: note = siRNA sense sequence
  source 1..19: mol_type = other RNA
aaggataccactgagtgca

SEQ ID NO: 26309 - RNA, 19 nt, synthetic construct
  misc_feature 1..19: note = siRNA antisense sequence
  source 1..19: mol_type = other RNA
tgcactcagtggtatcctt

SEQ ID NO: 26310 - RNA, 19 nt, synthetic construct
  misc_feature 1..19: note = siRNA sense sequence
  source 1..19: mol_type = other RNA
aggataccactgagtgcac

SEQ ID NO: 26311 - RNA, 19 nt, synthetic construct
  misc_feature 1..19: note = siRNA antisense sequence
  source 1..19: mol_type = other RNA
gtgcactcagtggtatcct

SEQ ID NO: 26312 - RNA, 19 nt, synthetic construct
  misc_feature 1..19: note = siRNA sense sequence
  source 1..19: mol_type = other RNA
ggataccactgagtgcaca

SEQ ID NO: 26313 - RNA, 19 nt, synthetic construct
  misc_feature 1..19: note = siRNA antisense sequence
  source 1..19: mol_type = other RNA
tgtgcactcagtggtatcc

SEQ ID NO: 26314 - RNA, 19 nt, synthetic construct
  misc_feature 1..19: note = siRNA sense sequence
  source 1..19: mol_type = other RNA
gataccactgagtgcacac

SEQ ID NO: 26315 - RNA, 19 nt, synthetic construct
  misc_feature 1..19: note = siRNA antisense sequence
  source 1..19: mol_type = other RNA
gtgtgcactcagtggtatc

SEQ ID NO: 26316 - RNA, 19 nt, synthetic construct
  misc_feature 1..19: note = siRNA sense sequence
  source 1..19: mol_type = other RNA
cacagaatgctgggaggtc

SEQ ID NO: 26317 - RNA, 19 nt, synthetic construct
  misc_feature 1..19: note = siRNA antisense sequence
  source 1..19: mol_type = other RNA
gacctcccagcattctgtg

SEQ ID NO: 26318 - RNA, 19 nt, synthetic construct
  misc_feature 1..19: note = siRNA sense sequence
  source 1..19: mol_type = other RNA
acagaatgctgggaggtcc

SEQ ID NO: 26319 - RNA, 19 nt, synthetic construct
  misc_feature 1..19: note = siRNA antisense sequence
  source 1..19: mol_type = other RNA
ggacctcccagcattctgt

SEQ ID NO: 26320 - RNA, 19 nt, synthetic construct
  misc_feature 1..19: note = siRNA sense sequence
  source 1..19: mol_type = other RNA
agaatgctgggaggtcctg

SEQ ID NO: 26321 - RNA, 19 nt, synthetic construct
  misc_feature 1..19: note = siRNA antisense sequence
  source 1..19: mol_type = other RNA
caggacctcccagcattct

SEQ ID NO: 26322 - RNA, 19 nt, synthetic construct
  misc_feature 1..19: note = siRNA sense sequence
  source 1..19: mol_type = other RNA
gaatgctgggaggtcctga

SEQ ID NO: 26323 - RNA, 19 nt, synthetic construct
  misc_feature 1..19: note = siRNA antisense sequence
  source 1..19: mol_type = other RNA
tcaggacctcccagcattc

SEQ ID NO: 26324 - RNA, 19 nt, synthetic construct
  misc_feature 1..19: note = siRNA sense sequence
  source 1..19: mol_type = other RNA
aatgctgggaggtcctgac

SEQ ID NO: 26325 - RNA, 19 nt, synthetic construct
  misc_feature 1..19: note = siRNA antisense sequence
  source 1..19: mol_type = other RNA
gtcaggacctcccagcatt

SEQ ID NO: 26326 - RNA, 19 nt, synthetic construct
  misc_feature 1..19: note = siRNA sense sequence
  source 1..19: mol_type = other RNA
atgctgggaggtcctgact

SEQ ID NO: 26327 - RNA, 19 nt, synthetic construct
  misc_feature 1..19: note = siRNA antisense sequence
  source 1..19: mol_type = other RNA
agtcaggacctcccagcat

SEQ ID NO: 26328 - RNA, 19 nt, synthetic construct
  misc_feature 1..19: note = siRNA sense sequence
  source 1..19: mol_type = other RNA
tgctgggaggtcctgactc

SEQ ID NO: 26329 - RNA, 19 nt, synthetic construct
  misc_feature 1..19: note = siRNA antisense sequence
  source 1..19: mol_type = other RNA
gagtcaggacctcccagca

SEQ ID NO: 26330 - RNA, 19 nt, synthetic construct
  misc_feature 1..19: note = siRNA sense sequence
  source 1..19: mol_type = other RNA
gctgggaggtcctgactct

SEQ ID NO: 26331 - RNA, 19 nt, synthetic construct
  misc_feature 1..19: note = siRNA antisense sequence
  source 1..19: mol_type = other RNA
agagtcaggacctcccagc

SEQ ID NO: 26332 - RNA, 19 nt, synthetic construct
  misc_feature 1..19: note = siRNA sense sequence
  source 1..19: mol_type = other RNA
gaggtcctgactctgctta

SEQ ID NO: 26333 - RNA, 19 nt, synthetic construct
  misc_feature 1..19: note = siRNA antisense sequence
  source 1..19: mol_type = other RNA
taagcagagtcaggacctc

SEQ ID NO: 26334 - RNA, 19 nt, synthetic construct
  misc_feature 1..19: note = siRNA sense sequence
  source 1..19: mol_type = other RNA
aggtcctgactctgcttat

SEQ ID NO: 26335 - RNA, 19 nt, synthetic construct
  misc_feature 1..19: note = siRNA antisense sequence
  source 1..19: mol_type = other RNA
ataagcagagtcaggacct

SEQ ID NO: 26336 - RNA, 19 nt, synthetic construct
  misc_feature 1..19: note = siRNA sense sequence
  source 1..19: mol_type = other RNA
ggtcctgactctgcttatg

SEQ ID NO: 26337 - RNA, 19 nt, synthetic construct
  misc_feature 1..19: note = siRNA antisense sequence
  source 1..19: mol_type = other RNA
cataagcagagtcaggacc

SEQ ID NO: 26338 - RNA, 19 nt, synthetic construct
  misc_feature 1..19: note = siRNA sense sequence
  source 1..19: mol_type = other RNA
gtcctgactctgcttatgg

SEQ ID NO: 26339 - RNA, 19 nt, synthetic construct
  misc_feature 1..19: note = siRNA antisense sequence
  source 1..19: mol_type = other RNA
ccataagcagagtcaggac

SEQ ID NO: 26340 - RNA, 19 nt, synthetic construct
  misc_feature 1..19: note = siRNA sense sequence
  source 1..19: mol_type = other RNA
tcctgactctgcttatgga

SEQ ID NO: 26341 - RNA, 19 nt, synthetic construct
  misc_feature 1..19: note = siRNA antisense sequence
  source 1..19: mol_type = other RNA
tccataagcagagtcagga

SEQ ID NO: 26342 - RNA, 19 nt, synthetic construct
  misc_feature 1..19: note = siRNA sense sequence
  source 1..19: mol_type = other RNA
cctgactctgcttatggaa

SEQ ID NO: 26343 - RNA, 19 nt, synthetic construct
  misc_feature 1..19: note = siRNA antisense sequence
  source 1..19: mol_type = other RNA
ttccataagcagagtcagg

SEQ ID NO: 26344 - RNA, 19 nt, synthetic construct
  misc_feature 1..19: note = siRNA sense sequence
  source 1..19: mol_type = other RNA
gttctatagcagccatgac

SEQ ID NO: 26345 - RNA, 19 nt, synthetic construct
  misc_feature 1..19: note = siRNA antisense sequence
  source 1..19: mol_type = other RNA
gtcatggctgctatagaac

SEQ ID NO: 26346 - RNA, 19 nt, synthetic construct
  misc_feature 1..19: note = siRNA sense sequence
  source 1..19: mol_type = other RNA
ttctatagcagccatgacc

SEQ ID NO: 26347 - RNA, 19 nt, synthetic construct
  misc_feature 1..19: note = siRNA antisense sequence
  source 1..19: mol_type = other RNA
ggtcatggctgctatagaa

SEQ ID NO: 26348 - RNA, 19 nt, synthetic construct
  misc_feature 1..19: note = siRNA sense sequence
  source 1..19: mol_type = other RNA
tctatagcagccatgaccc

SEQ ID NO: 26349 - RNA, 19 nt, synthetic construct
  misc_feature 1..19: note = siRNA antisense sequence
  source 1..19: mol_type = other RNA
gggtcatggctgctataga

SEQ ID NO: 26350 - RNA, 19 nt, synthetic construct
  misc_feature 1..19: note = siRNA sense sequence
  source 1..19: mol_type = other RNA
ctatagcagccatgaccct

SEQ ID NO: 26351 - RNA, 19 nt, synthetic construct
  misc_feature 1..19: note = siRNA antisense sequence
  source 1..19: mol_type = other RNA
agggtcatggctgctatag

SEQ ID NO: 26352 - RNA, 19 nt, synthetic construct
  misc_feature 1..19: note = siRNA sense sequence
  source 1..19: mol_type = other RNA
tatagcagccatgaccctc

SEQ ID NO: 26353 - RNA, 19 nt, synthetic construct
  misc_feature 1..19: note = siRNA antisense sequence
  source 1..19: mol_type = other RNA
gagggtcatggctgctata

SEQ ID NO: 26354 - RNA, 19 nt, synthetic construct
  misc_feature 1..19: note = siRNA sense sequence
  source 1..19: mol_type = other RNA
atagcagccatgaccctca

SEQ ID NO: 26355 - RNA, 19 nt, synthetic construct
  misc_feature 1..19: note = siRNA antisense sequence
  source 1..19: mol_type = other RNA
tgagggtcatggctgctat

SEQ ID NO: 26356 - RNA, 19 nt, synthetic construct
  misc_feature 1..19: note = siRNA sense sequence
  source 1..19: mol_type = other RNA
ttagctattaggttagatg

SEQ ID NO: 26357 - RNA, 19 nt, synthetic construct
  misc_feature 1..19: note = siRNA antisense sequence
  source 1..19: mol_type = other RNA
catctaacctaatagctaa

SEQ ID NO: 26358 - RNA, 19 nt, synthetic construct
  misc_feature 1..19: note = siRNA sense sequence
  source 1..19: mol_type = other RNA
tagctattaggttagatgt

SEQ ID NO: 26359 - RNA, 19 nt, synthetic construct
  misc_feature 1..19: note = siRNA antisense sequence
  source 1..19: mol_type = other RNA
acatctaacctaatagcta

SEQ ID NO: 26360 - RNA, 19 nt, synthetic construct
  misc_feature 1..19: note = siRNA sense sequence
  source 1..19: mol_type = other RNA
agctattaggttagatgtt

SEQ ID NO: 26361 - RNA, 19 nt, synthetic construct
  misc_feature 1..19: note = siRNA antisense sequence
  source 1..19: mol_type = other RNA
aacatctaacctaatagct

SEQ ID NO: 26362 - RNA, 19 nt, synthetic construct
  misc_feature 1..19: note = siRNA sense sequence
  source 1..19: mol_type = other RNA
gctattaggttagatgtta

SEQ ID NO: 26363 - RNA, 19 nt, synthetic construct
  misc_feature 1..19: note = siRNA antisense sequence
  source 1..19: mol_type = other RNA
taacatctaacctaatagc

SEQ ID NO: 26364 - RNA, 19 nt, synthetic construct
  misc_feature 1..19: note = siRNA sense sequence
  source 1..19: mol_type = other RNA
ttgtctttgcctccattta

SEQ ID NO: 26365 - RNA, 19 nt, synthetic construct
  misc_feature 1..19: note = siRNA antisense sequence
  source 1..19: mol_type = other RNA
taaatggaggcaaagacaa

SEQ ID NO: 26366 - RNA, 19 nt, synthetic construct
  misc_feature 1..19: note = siRNA sense sequence
  source 1..19: mol_type = other RNA
tgtctttgcctccatttaa

SEQ ID NO: 26367 - RNA, 19 nt, synthetic construct
  misc_feature 1..19: note = siRNA antisense sequence
  source 1..19: mol_type = other RNA
ttaaatggaggcaaagaca

SEQ ID NO: 26368 - RNA, 19 nt, synthetic construct
  misc_feature 1..19: note = siRNA sense sequence
  source 1..19: mol_type = other RNA
gtctttgcctccatttaat

SEQ ID NO: 26369 - RNA, 19 nt, synthetic construct
  misc_feature 1..19: note = siRNA antisense sequence
  source 1..19: mol_type = other RNA
attaaatggaggcaaagac

SEQ ID NO: 26370 - RNA, 19 nt, synthetic construct
  misc_feature 1..19: note = siRNA sense sequence
  source 1..19: mol_type = other RNA
ttgcctccatttaatcatc

SEQ ID NO: 26371 - RNA, 19 nt, synthetic construct
  misc_feature 1..19: note = siRNA antisense sequence
  source 1..19: mol_type = other RNA
gatgattaaatggaggcaa

SEQ ID NO: 26372 - RNA, 19 nt, synthetic construct
  misc_feature 1..19: note = siRNA sense sequence
  source 1..19: mol_type = other RNA
tgcctccatttaatcatct

SEQ ID NO: 26373 - RNA, 19 nt, synthetic construct
  misc_feature 1..19: note = siRNA antisense sequence
  source 1..19: mol_type = other RNA
agatgattaaatggaggca

SEQ ID NO: 26374 - RNA, 19 nt, synthetic construct
  misc_feature 1..19: note = siRNA sense sequence
  source 1..19: mol_type = other RNA
ctccatttaatcatcttac

SEQ ID NO: 26375 - RNA, 19 nt, synthetic construct
  misc_feature 1..19: note = siRNA antisense sequence
  source 1..19: mol_type = other RNA
gtaagatgattaaatggag

SEQ ID NO: 26376 - RNA, 19 nt, synthetic construct
  misc_feature 1..19: note = siRNA sense sequence
  source 1..19: mol_type = other RNA
aatcatcttacttcctatg

SEQ ID NO: 26377 - RNA, 19 nt, synthetic construct
  misc_feature 1..19: note = siRNA antisense sequence
  source 1..19: mol_type = other RNA
cataggaagtaagatgatt

SEQ ID NO: 26378 - RNA, 19 nt, synthetic construct
  misc_feature 1..19: note = siRNA sense sequence
  source 1..19: mol_type = other RNA
catcttacttcctatggta

SEQ ID NO: 26379 - RNA, 19 nt, synthetic construct
  misc_feature 1..19: note = siRNA antisense sequence
  source 1..19: mol_type = other RNA
taccataggaagtaagatg

SEQ ID NO: 26380 - RNA, 19 nt, synthetic construct
  misc_feature 1..19: note = siRNA sense sequence
  source 1..19: mol_type = other RNA
atcttacttcctatggtac

SEQ ID NO: 26381 - RNA, 19 nt, synthetic construct
  misc_feature 1..19: note = siRNA antisense sequence
  source 1..19: mol_type = other RNA
gtaccataggaagtaagat

SEQ ID NO: 26382 - RNA, 19 nt, synthetic construct
  misc_feature 1..19: note = siRNA sense sequence
  source 1..19: mol_type = other RNA
tcttacttcctatggtacc

SEQ ID NO: 26383 - RNA, 19 nt, synthetic construct
  misc_feature 1..19: note = siRNA antisense sequence
  source 1..19: mol_type = other RNA
ggtaccataggaagtaaga

SEQ ID NO: 26384 - RNA, 19 nt, synthetic construct
  misc_feature 1..19: note = siRNA sense sequence
  source 1..19: mol_type = other RNA
ttacttcctatggtacctg

SEQ ID NO: 26385 - RNA, 19 nt, synthetic construct
  misc_feature 1..19: note = siRNA antisense sequence
  source 1..19: mol_type = other RNA
caggtaccataggaagtaa

SEQ ID NO: 26386 - RNA, 19 nt, synthetic construct
  misc_feature 1..19: note = siRNA sense sequence
  source 1..19: mol_type = other RNA
tacttcctatggtacctgt

SEQ ID NO: 26387 - RNA, 19 nt, synthetic construct
  misc_feature 1..19: note = siRNA antisense sequence
  source 1..19: mol_type = other RNA
acaggtaccataggaagta

SEQ ID NO: 26388 - RNA, 19 nt, synthetic construct
  misc_feature 1..19: note = siRNA sense sequence
  source 1..19: mol_type = other RNA
acttcctatggtacctgtt

SEQ ID NO: 26389 - RNA, 19 nt, synthetic construct
  misc_feature 1..19: note = siRNA antisense sequence
  source 1..19: mol_type = other RNA
aacaggtaccataggaagt

SEQ ID NO: 26390 - RNA, 19 nt, synthetic construct
  misc_feature 1..19: note = siRNA sense sequence
  source 1..19: mol_type = other RNA
cttcctatggtacctgtta

SEQ ID NO: 26391 - RNA, 19 nt, synthetic construct
  misc_feature 1..19: note = siRNA antisense sequence
  source 1..19: mol_type = other RNA
taacaggtaccataggaag

SEQ ID NO: 26392 - RNA, 19 nt, synthetic construct
  misc_feature 1..19: note = siRNA sense sequence
  source 1..19: mol_type = other RNA
ttcctatggtacctgttaa

SEQ ID NO: 26393 - RNA, 19 nt, synthetic construct
  misc_feature 1..19: note = siRNA antisense sequence
  source 1..19: mol_type = other RNA
ttaacaggtaccataggaa

SEQ ID NO: 26394 - RNA, 19 nt, synthetic construct
  misc_feature 1..19: note = siRNA sense sequence
  source 1..19: mol_type = other RNA
tcctatggtacctgttaat

SEQ ID NO: 26395 - RNA, 19 nt, synthetic construct
  misc_feature 1..19: note = siRNA antisense sequence
  source 1..19: mol_type = other RNA
attaacaggtaccatagga

SEQ ID NO: 26396 - RNA, 19 nt, synthetic construct
  misc_feature 1..19: note = siRNA sense sequence
  source 1..19: mol_type = other RNA
cctatggtacctgttaatt

SEQ ID NO: 26397 - RNA, 19 nt, synthetic construct
  misc_feature 1..19: note = siRNA antisense sequence
  source 1..19: mol_type = other RNA
aattaacaggtaccatagg

SEQ ID NO: 26398 - RNA, 19 nt, synthetic construct
  misc_feature 1..19: note = siRNA sense sequence
  source 1..19: mol_type = other RNA
ctatggtacctgttaatta

SEQ ID NO: 26399 - RNA, 19 nt, synthetic construct
  misc_feature 1..19: note = siRNA antisense sequence
  source 1..19: mol_type = other RNA
taattaacaggtaccatag

SEQ ID NO: 26400 - RNA, 19 nt, synthetic construct
  misc_feature 1..19: note = siRNA sense sequence
  source 1..19: mol_type = other RNA
atggtacctgttaattatg

SEQ ID NO: 26401 - RNA, 19 nt, synthetic construct
  misc_feature 1..19: note = siRNA antisense sequence
  source 1..19: mol_type = other RNA
cataattaacaggtaccat

SEQ ID NO: 26402 - RNA, 19 nt, synthetic construct
  misc_feature 1..19: note = siRNA sense sequence
  source 1..19: mol_type = other RNA
tggtacctgttaattatga

SEQ ID NO: 26403 - RNA, 19 nt, synthetic construct
  misc_feature 1..19: note = siRNA antisense sequence
  source 1..19: mol_type = other RNA
tcataattaacaggtacca

SEQ ID NO: 26404 - RNA, 19 nt, synthetic construct
  misc_feature 1..19: note = siRNA sense sequence
  source 1..19: mol_type = other RNA
tgatttgaatctccttaac

SEQ ID NO: 26405 - RNA, 19 nt, synthetic construct
  misc_feature 1..19: note = siRNA antisense sequence
  source 1..19: mol_type = other RNA
gttaaggagattcaaatca

SEQ ID NO: 26406 - RNA, 19 nt, synthetic construct
  misc_feature 1..19: note = siRNA sense sequence
  source 1..19: mol_type = other RNA
gatttgaatctccttaact

SEQ ID NO: 26407 - RNA, 19 nt, synthetic construct
  misc_feature 1..19: note = siRNA antisense sequence
  source 1..19: mol_type = other RNA
agttaaggagattcaaatc

SEQ ID NO: 26408 - RNA, 19 nt, synthetic construct
  misc_feature 1..19: note = siRNA sense sequence
  source 1..19: mol_type = other RNA
tgaatctccttaactgctc

SEQ ID NO: 26409 - RNA, 19 nt, synthetic construct
  misc_feature 1..19: note = siRNA antisense sequence
  source 1..19: mol_type = other RNA
gagcagttaaggagattca

SEQ ID NO: 26410 - RNA, 19 nt, synthetic construct
  misc_feature 1..19: note = siRNA sense sequence
  source 1..19: mol_type = other RNA
gaatctccttaactgctca

SEQ ID NO: 26411 - RNA, 19 nt, synthetic construct
  misc_feature 1..19: note = siRNA antisense sequence
  source 1..19: mol_type = other RNA
tgagcagttaaggagattc

SEQ ID NO: 26412 - RNA, 19 nt, synthetic construct
  misc_feature 1..19: note = siRNA sense sequence
  source 1..19: mol_type = other RNA
aatctccttaactgctcag

SEQ ID NO: 26413 - RNA, 19 nt, synthetic construct
  misc_feature 1..19: note = siRNA antisense sequence
  source 1..19: mol_type = other RNA
ctgagcagttaaggagatt

SEQ ID NO: 26414 - RNA, 19 nt, synthetic construct
  misc_feature 1..19: note = siRNA sense sequence
  source 1..19: mol_type = other RNA
ttaactgctcagcctgggt

SEQ ID NO: 26415 - RNA, 19 nt, synthetic construct
  misc_feature 1..19: note = siRNA antisense sequence
  source 1..19: mol_type = other RNA
acccaggctgagcagttaa

SEQ ID NO: 26416 - RNA, 19 nt, synthetic construct
  misc_feature 1..19: note = siRNA sense sequence
  source 1..19: mol_type = other RNA
aactgctcagcctgggtgt

SEQ ID NO: 26417 - RNA, 19 nt, synthetic construct
  misc_feature 1..19: note = siRNA antisense sequence
  source 1..19: mol_type = other RNA
acacccaggctgagcagtt

SEQ ID NO: 26418 - RNA, 19 nt, synthetic construct
  misc_feature 1..19: note = siRNA sense sequence
  source 1..19: mol_type = other RNA
actgctcagcctgggtgtt

SEQ ID NO: 26419 - RNA, 19 nt, synthetic construct
  misc_feature 1..19: note = siRNA antisense sequence
  source 1..19: mol_type = other RNA
aacacccaggctgagcagt

SEQ ID NO: 26420 - RNA, 19 nt, synthetic construct
  misc_feature 1..19: note = siRNA sense sequence
  source 1..19: mol_type = other RNA
cagcctgggtgtttcagcc

SEQ ID NO: 26421 - RNA, 19 nt, synthetic construct
  misc_feature 1..19: note = siRNA antisense sequence
  source 1..19: mol_type = other RNA
ggctgaaacacccaggctg

SEQ ID NO: 26422 - RNA, 19 nt, synthetic construct
  misc_feature 1..19: note = siRNA sense sequence
  source 1..19: mol_type = other RNA
tgggtgtttcagccatata

SEQ ID NO: 26423 - RNA, 19 nt, synthetic construct
  misc_feature 1..19: note = siRNA antisense sequence
  source 1..19: mol_type = other RNA
tatatggctgaaacaccca

SEQ ID NO: 26424 - RNA, 19 nt, synthetic construct
  misc_feature 1..19: note = siRNA sense sequence
  source 1..19: mol_type = other RNA
gggtgtttcagccatatat

SEQ ID NO: 26425 - RNA, 19 nt, synthetic construct
  misc_feature 1..19: note = siRNA antisense sequence
  source 1..19: mol_type = other RNA
atatatggctgaaacaccc

SEQ ID NO: 26426 - RNA, 19 nt, synthetic construct
  misc_feature 1..19: note = siRNA sense sequence
  source 1..19: mol_type = other RNA
ggtgtttcagccatatata

SEQ ID NO: 26427 - RNA, 19 nt, synthetic construct
  misc_feature 1..19: note = siRNA antisense sequence
  source 1..19: mol_type = other RNA
tatatatggctgaaacacc

SEQ ID NO: 26428 - RNA, 19 nt, synthetic construct
  misc_feature 1..19: note = siRNA sense sequence
  source 1..19: mol_type = other RNA
gtgtttcagccatatataa

SEQ ID NO: 26429 - RNA, 19 nt, synthetic construct
  misc_feature 1..19: note = siRNA antisense sequence
  source 1..19: mol_type = other RNA
ttatatatggctgaaacac

SEQ ID NO: 26430 - RNA, 19 nt, synthetic construct
  misc_feature 1..19: note = siRNA sense sequence
  source 1..19: mol_type = other RNA
tgtttcagccatatataag

SEQ ID NO: 26431 - RNA, 19 nt, synthetic construct
  misc_feature 1..19: note = siRNA antisense sequence
  source 1..19: mol_type = other RNA
cttatatatggctgaaaca

SEQ ID NO: 26432 - RNA, 19 nt, synthetic construct
  misc_feature 1..19: note = siRNA sense sequence
  source 1..19: mol_type = other RNA
tttcagccatatataagtc

SEQ ID NO: 26433 - RNA, 19 nt, synthetic construct
  misc_feature 1..19: note = siRNA antisense sequence
  source 1..19: mol_type = other RNA
gacttatatatggctgaaa

SEQ ID NO: 26434 - RNA, 19 nt, synthetic construct
  misc_feature 1..19: note = siRNA sense sequence
  source 1..19: mol_type = other RNA
ttcagccatatataagtca

SEQ ID NO: 26435 - RNA, 19 nt, synthetic construct
  misc_feature 1..19: note = siRNA antisense sequence
  source 1..19: mol_type = other RNA
tgacttatatatggctgaa

SEQ ID NO: 26436 - RNA, 19 nt, synthetic construct
  misc_feature 1..19: note = siRNA sense sequence
  source 1..19: mol_type = other RNA
tcagccatatataagtcat

SEQ ID NO: 26437 - RNA, 19 nt, synthetic construct
  misc_feature 1..19: note = siRNA antisense sequence
  source 1..19: mol_type = other RNA
atgacttatatatggctga

SEQ ID NO: 26438 - RNA, 19 nt, synthetic construct
  misc_feature 1..19: note = siRNA sense sequence
  source 1..19: mol_type = other RNA
cagccatatataagtcata

SEQ ID NO: 26439 - RNA, 19 nt, synthetic construct
  misc_feature 1..19: note = siRNA antisense sequence
  source 1..19: mol_type = other RNA
tatgacttatatatggctg

SEQ ID NO: 26440 - RNA, 19 nt, synthetic construct
  misc_feature 1..19: note = siRNA sense sequence
  source 1..19: mol_type = other RNA
ctatttctcagttacttgc

SEQ ID NO: 26441 - RNA, 19 nt, synthetic construct
  misc_feature 1..19: note = siRNA antisense sequence
  source 1..19: mol_type = other RNA
gcaagtaactgagaaatag

SEQ ID NO: 26442 - RNA, 19 nt, synthetic construct
  misc_feature 1..19: note = siRNA sense sequence
  source 1..19: mol_type = other RNA
tatttctcagttacttgca

SEQ ID NO: 26443 - RNA, 19 nt, synthetic construct
  misc_feature 1..19: note = siRNA antisense sequence
  source 1..19: mol_type = other RNA
tgcaagtaactgagaaata

SEQ ID NO: 26444 - RNA, 19 nt, synthetic construct
  misc_feature 1..19: note = siRNA sense sequence
  source 1..19: mol_type = other RNA
atttctcagttacttgcaa

SEQ ID NO: 26445 - RNA, 19 nt, synthetic construct
  misc_feature 1..19: note = siRNA antisense sequence
  source 1..19: mol_type = other RNA
ttgcaagtaactgagaaat

SEQ ID NO: 26446 - RNA, 19 nt, synthetic construct
  misc_feature 1..19: note = siRNA sense sequence
  source 1..19: mol_type = other RNA
tttctcagttacttgcaaa

SEQ ID NO: 26447 - RNA, 19 nt, synthetic construct
  misc_feature 1..19: note = siRNA antisense sequence
  source 1..19: mol_type = other RNA
tttgcaagtaactgagaaa

SEQ ID NO: 26448 - RNA, 19 nt, synthetic construct
  misc_feature 1..19: note = siRNA sense sequence
  source 1..19: mol_type = other RNA
aaccaagtctgataataca

SEQ ID NO: 26449 - RNA, 19 nt, synthetic construct
  misc_feature 1..19: note = siRNA antisense sequence
  source 1..19: mol_type = other RNA
tgtattatcagacttggtt

SEQ ID NO: 26450 - RNA, 19 nt, synthetic construct
  misc_feature 1..19: note = siRNA sense sequence
  source 1..19: mol_type = other RNA
aagaaggcaaagaggctca

SEQ ID NO: 26451 - RNA, 19 nt, synthetic construct
  misc_feature 1..19: note = siRNA antisense sequence
  source 1..19: mol_type = other RNA
tgagcctctttgccttctt

SEQ ID NO: 26452 - RNA, 19 nt, synthetic construct
  misc_feature 1..19: note = siRNA sense sequence
  source 1..19: mol_type = other RNA
agaaggcaaagaggctcag

SEQ ID NO: 26453 - RNA, 19 nt, synthetic construct
  misc_feature 1..19: note = siRNA antisense sequence
  source 1..19: mol_type = other RNA
ctgagcctctttgccttct

SEQ ID NO: 26454 - RNA, 19 nt, synthetic construct
  misc_feature 1..19: note = siRNA sense sequence
  source 1..19: mol_type = other RNA
gaaggcaaagaggctcaga

SEQ ID NO: 26455 - RNA, 19 nt, synthetic construct
  misc_feature 1..19: note = siRNA antisense sequence
  source 1..19: mol_type = other RNA
tctgagcctctttgccttc

SEQ ID NO: 26456 - RNA, 19 nt, synthetic construct
  misc_feature 1..19: note = siRNA sense sequence
  source 1..19: mol_type = other RNA
aaggcaaagaggctcagat

SEQ ID NO: 26457 - RNA, 19 nt, synthetic construct
  misc_feature 1..19: note = siRNA antisense sequence
  source 1..19: mol_type = other RNA
atctgagcctctttgcctt

SEQ ID NO: 26458 - RNA, 19 nt, synthetic construct
  misc_feature 1..19: note = siRNA sense sequence
  source 1..19: mol_type = other RNA
aggcaaagaggctcagata

SEQ ID NO: 26459 - RNA, 19 nt, synthetic construct
  misc_feature 1..19: note = siRNA antisense sequence
  source 1..19: mol_type = other RNA
tatctgagcctctttgcct

SEQ ID NO: 26460 - RNA, 19 nt, synthetic construct
  misc_feature 1..19: note = siRNA sense sequence
  source 1..19: mol_type = other RNA
ggcaaagaggctcagatag

SEQ ID NO: 26461 - RNA, 19 nt, synthetic construct
  misc_feature 1..19: note = siRNA antisense sequence
  source 1..19: mol_type = other RNA
ctatctgagcctctttgcc

SEQ ID NO: 26462 - RNA, 19 nt, synthetic construct
  misc_feature 1..19: note = siRNA sense sequence
  source 1..19: mol_type = other RNA
gcaaagaggctcagatagg

SEQ ID NO: 26463 - RNA, 19 nt, synthetic construct
  misc_feature 1..19: note = siRNA antisense sequence
  source 1..19: mol_type = other RNA
cctatctgagcctctttgc

SEQ ID NO: 26464 - RNA, 19 nt, synthetic construct
  misc_feature 1..19: note = siRNA sense sequence
  source 1..19: mol_type = other RNA
aaatcacctgtgtaaggca

SEQ ID NO: 26465 - RNA, 19 nt, synthetic construct
  misc_feature 1..19: note = siRNA antisense sequence
  source 1..19: mol_type = other RNA
tgccttacacaggtgattt

SEQ ID NO: 26466 - RNA, 19 nt, synthetic construct
  misc_feature 1..19: note = siRNA sense sequence
  source 1..19: mol_type = other RNA
aatcacctgtgtaaggcaa

SEQ ID NO: 26467 - RNA, 19 nt, synthetic construct
  misc_feature 1..19: note = siRNA antisense sequence
  source 1..19: mol_type = other RNA
ttgccttacacaggtgatt

SEQ ID NO: 26468 - RNA, 19 nt, synthetic construct
  misc_feature 1..19: note = siRNA sense sequence
  source 1..19: mol_type = other RNA
atcacctgtgtaaggcaat

SEQ ID NO: 26469 - RNA, 19 nt, synthetic construct
  misc_feature 1..19: note = siRNA antisense sequence
  source 1..19: mol_type = other RNA
attgccttacacaggtgat

SEQ ID NO: 26470 - RNA, 19 nt, synthetic construct
  misc_feature 1..19: note = siRNA sense sequence
  source 1..19: mol_type = other RNA
tcacctgtgtaaggcaatg

SEQ ID NO: 26471 - RNA, 19 nt, synthetic construct
  misc_feature 1..19: note = siRNA antisense sequence
  source 1..19: mol_type = other RNA
cattgccttacacaggtga

SEQ ID NO: 26472 - RNA, 19 nt, synthetic construct
  misc_feature 1..19: note = siRNA sense sequence
  source 1..19: mol_type = other RNA
agctgatggaatagccacc

SEQ ID NO: 26473 - RNA, 19 nt, synthetic construct
  misc_feature 1..19: note = siRNA antisense sequence
  source 1..19: mol_type = other RNA
ggtggctattccatcagct

SEQ ID NO: 26474 - RNA, 19 nt, synthetic construct
  misc_feature 1..19: note = siRNA sense sequence
  source 1..19: mol_type = other RNA
agaataatctctgagtgtg

SEQ ID NO: 26475 - RNA, 19 nt, synthetic construct
  misc_feature 1..19: note = siRNA antisense sequence
  source 1..19: mol_type = other RNA
cacactcagagattattct

SEQ ID NO: 26476 - RNA, 19 nt, synthetic construct
  misc_feature 1..19: note = siRNA sense sequence
  source 1..19: mol_type = other RNA
aataatctctgagtgtgaa

SEQ ID NO: 26477 - RNA, 19 nt, synthetic construct
  misc_feature 1..19: note = siRNA antisense sequence
  source 1..19: mol_type = other RNA
ttcacactcagagattatt

SEQ ID NO: 26478 - RNA, 19 nt, synthetic construct
  misc_feature 1..19: note = siRNA sense sequence
  source 1..19: mol_type = other RNA
aaatcagattggctattga

SEQ ID NO: 26479 - RNA, 19 nt, synthetic construct
  misc_feature 1..19: note = siRNA antisense sequence
  source 1..19: mol_type = other RNA
tcaatagccaatctgattt

SEQ ID NO: 26480 - RNA, 19 nt, synthetic construct
  misc_feature 1..19: note = siRNA sense sequence
  source 1..19: mol_type = other RNA
aatcagattggctattgaa

SEQ ID NO: 26481 - RNA, 19 nt, synthetic construct
  misc_feature 1..19: note = siRNA antisense sequence
  source 1..19: mol_type = other RNA
ttcaatagccaatctgatt

SEQ ID NO: 26482 - RNA, 19 nt, synthetic construct
  misc_feature 1..19: note = siRNA sense sequence
  source 1..19: mol_type = other RNA
gactattctatatgcctac

SEQ ID NO: 26483 - RNA, 19 nt, synthetic construct
  misc_feature 1..19: note = siRNA antisense sequence
  source 1..19: mol_type = other RNA
gtaggcatatagaatagtc

SEQ ID NO: 26484 - RNA, 19 nt, synthetic construct
  misc_feature 1..19: note = siRNA sense sequence
  source 1..19: mol_type = other RNA
tatatgcctacatctcctc

SEQ ID NO: 26485 - RNA, 19 nt, synthetic construct
  misc_feature 1..19: note = siRNA antisense sequence
  source 1..19: mol_type = other RNA
gaggagatgtaggcatata

SEQ ID NO: 26486 - RNA, 19 nt, synthetic construct
  misc_feature 1..19: note = siRNA sense sequence
  source 1..19: mol_type = other RNA
gcctacatctcctcctctc

SEQ ID NO: 26487 - RNA, 19 nt, synthetic construct
  misc_feature 1..19: note = siRNA antisense sequence
  source 1..19: mol_type = other RNA
gagaggaggagatgtaggc

SEQ ID NO: 26488 - RNA, 19 nt, synthetic construct
  misc_feature 1..19: note = siRNA sense sequence
  source 1..19: mol_type = other RNA
cctacatctcctcctctca

SEQ ID NO: 26489 - RNA, 19 nt, synthetic construct
  misc_feature 1..19: note = siRNA antisense sequence
  source 1..19: mol_type = other RNA
tgagaggaggagatgtagg

SEQ ID NO: 26490 - RNA, 19 nt, synthetic construct
  misc_feature 1..19: note = siRNA sense sequence
  source 1..19: mol_type = other RNA
ctacatctcctcctctcat

SEQ ID NO: 26491 - RNA, 19 nt, synthetic construct
  misc_feature 1..19: note = siRNA antisense sequence
  source 1..19: mol_type = other RNA
atgagaggaggagatgtag

SEQ ID NO: 26492 - RNA, 19 nt, synthetic construct
  misc_feature 1..19: note = siRNA sense sequence
  source 1..19: mol_type = other RNA
tacatctcctcctctcatt

SEQ ID NO: 26493 - RNA, 19 nt, synthetic construct
  misc_feature 1..19: note = siRNA antisense sequence
  source 1..19: mol_type = other RNA
aatgagaggaggagatgta

SEQ ID NO: 26494 - RNA, 19 nt, synthetic construct
  misc_feature 1..19: note = siRNA sense sequence
  source 1..19: mol_type = other RNA
acatctcctcctctcattc

SEQ ID NO: 26495 - RNA, 19 nt, synthetic construct
  misc_feature 1..19: note = siRNA antisense sequence
  source 1..19: mol_type = other RNA
gaatgagaggaggagatgt

SEQ ID NO: 26496 - RNA, 19 nt, synthetic construct
  misc_feature 1..19: note = siRNA sense sequence
  source 1..19: mol_type = other RNA
catctcctcctctcattca

SEQ ID NO: 26497 - RNA, 19 nt, synthetic construct
  misc_feature 1..19: note = siRNA antisense sequence
  source 1..19: mol_type = other RNA
tgaatgagaggaggagatg

SEQ ID NO: 26498 - RNA, 19 nt, synthetic construct
  misc_feature 1..19: note = siRNA sense sequence
  source 1..19: mol_type = other RNA
tcctcctctcattcacatc

SEQ ID NO: 26499 - RNA, 19 nt, synthetic construct
  misc_feature 1..19: note = siRNA antisense sequence
  source 1..19: mol_type = other RNA
gatgtgaatgagaggagga

SEQ ID NO: 26500 - RNA, 19 nt, synthetic construct
  misc_feature 1..19: note = siRNA sense sequence
  source 1..19: mol_type = other RNA
cctcctctcattcacatct

SEQ ID NO: 26501 - RNA, 19 nt, synthetic construct
  misc_feature 1..19: note = siRNA antisense sequence
  source 1..19: mol_type = other RNA
agatgtgaatgagaggagg

SEQ ID NO: 26502 - RNA, 19 nt, synthetic construct
  misc_feature 1..19: note = siRNA sense sequence
  source 1..19: mol_type = other RNA
tctcattcacatctcctat

SEQ ID NO: 26503 - RNA, 19 nt, synthetic construct
  misc_feature 1..19: note = siRNA antisense sequence
  source 1..19: mol_type = other RNA
ataggagatgtgaatgaga

SEQ ID NO: 26504 - RNA, 19 nt, synthetic construct
  misc_feature 1..19: note = siRNA sense sequence
  source 1..19: mol_type = other RNA
ctcattcacatctcctatg

SEQ ID NO: 26505 - RNA, 19 nt, synthetic construct
  misc_feature 1..19: note = siRNA antisense sequence
  source 1..19: mol_type = other RNA
cataggagatgtgaatgag

SEQ ID NO: 26506 - RNA, 19 nt, synthetic construct
  misc_feature 1..19: note = siRNA sense sequence
  source 1..19: mol_type = other RNA
ccaggaggaatttgtggat

SEQ ID NO: 26507 - RNA, 19 nt, synthetic construct
  misc_feature 1..19: note = siRNA antisense sequence
  source 1..19: mol_type = other RNA
atccacaaattcctcctgg

SEQ ID NO: 26508 - RNA, 19 nt, synthetic construct
  misc_feature 1..19: note = siRNA sense sequence
  source 1..19: mol_type = other RNA
aatttgtggattctaggta

SEQ ID NO: 26509 - RNA, 19 nt, synthetic construct
  misc_feature 1..19: note = siRNA antisense sequence
  source 1..19: mol_type = other RNA
tacctagaatccacaaatt

SEQ ID NO: 26510 - RNA, 19 nt, synthetic construct
  misc_feature 1..19: note = siRNA sense sequence
  source 1..19: mol_type = other RNA
atttgtggattctaggtag

SEQ ID NO: 26511 - RNA, 19 nt, synthetic construct
  misc_feature 1..19: note = siRNA antisense sequence
  source 1..19: mol_type = other RNA
ctacctagaatccacaaat

SEQ ID NO: 26512 - RNA, 19 nt, synthetic construct
  misc_feature 1..19: note = siRNA sense sequence
  source 1..19: mol_type = other RNA
tttgtggattctaggtagc

SEQ ID NO: 26513 - RNA, 19 nt, synthetic construct
  misc_feature 1..19: note = siRNA antisense sequence
  source 1..19: mol_type = other RNA
gctacctagaatccacaaa

SEQ ID NO: 26514 - RNA, 19 nt, synthetic construct
  misc_feature 1..19: note = siRNA sense sequence
  source 1..19: mol_type = other RNA
gtggattctaggtagccaa

SEQ ID NO: 26515 - RNA, 19 nt, synthetic construct
  misc_feature 1..19: note = siRNA antisense sequence
  source 1..19: mol_type = other RNA
ttggctacctagaatccac

SEQ ID NO: 26516 - RNA, 19 nt, synthetic construct
  misc_feature 1..19: note = siRNA sense sequence
  source 1..19: mol_type = other RNA
tggattctaggtagccaaa

SEQ ID NO: 26517 - RNA, 19 nt, synthetic construct
  misc_feature 1..19: note = siRNA antisense sequence
  source 1..19: mol_type = other RNA
tttggctacctagaatcca

SEQ ID NO: 26518 - RNA, 19 nt, synthetic construct
  misc_feature 1..19: note = siRNA sense sequence
  source 1..19: mol_type = other RNA
ggattctaggtagccaaaa

SEQ ID NO: 26519 - RNA, 19 nt, synthetic construct
  misc_feature 1..19: note = siRNA antisense sequence
  source 1..19: mol_type = other RNA
ttttggctacctagaatcc

SEQ ID NO: 26520 - RNA, 19 nt, synthetic construct
  misc_feature 1..19: note = siRNA sense sequence
  source 1..19: mol_type = other RNA
aaagaagttgaagtaagag

SEQ ID NO: 26521 - RNA, 19 nt, synthetic construct
  misc_feature 1..19: note = siRNA antisense sequence
  source 1..19: mol_type = other RNA
ctcttacttcaacttcttt

SEQ ID NO: 26522 - RNA, 19 nt, synthetic construct
  misc_feature 1..19: note = siRNA sense sequence
  source 1..19: mol_type = other RNA
ttaccaaataccttgcaaa

SEQ ID NO: 26523 - RNA, 19 nt, synthetic construct
  misc_feature 1..19: note = siRNA antisense sequence
  source 1..19: mol_type = other RNA
tttgcaaggtatttggtaa

SEQ ID NO: 26524 - RNA, 19 nt, synthetic construct
  misc_feature 1..19: note = siRNA sense sequence
  source 1..19: mol_type = other RNA
taccaaataccttgcaaag

SEQ ID NO: 26525 - RNA, 19 nt, synthetic construct
  misc_feature 1..19: note = siRNA antisense sequence
  source 1..19: mol_type = other RNA
ctttgcaaggtatttggta

SEQ ID NO: 26526 - RNA, 19 nt, synthetic construct
  misc_feature 1..19: note = siRNA sense sequence
  source 1..19: mol_type = other RNA
accaaataccttgcaaagc

SEQ ID NO: 26527 - RNA, 19 nt, synthetic construct
  misc_feature 1..19: note = siRNA antisense sequence
  source 1..19: mol_type = other RNA
gctttgcaaggtatttggt

SEQ ID NO: 26528 - RNA, 19 nt, synthetic construct
  misc_feature 1..19: note = siRNA sense sequence
  source 1..19: mol_type = other RNA
ccaaataccttgcaaagcc

SEQ ID NO: 26529 - RNA, 19 nt, synthetic construct
  misc_feature 1..19: note = siRNA antisense sequence
  source 1..19: mol_type = other RNA
ggctttgcaaggtatttgg

SEQ ID NO: 26530 - RNA, 19 nt, synthetic construct
  misc_feature 1..19: note = siRNA sense sequence
  source 1..19: mol_type = other RNA
caaataccttgcaaagcca

SEQ ID NO: 26531 - RNA, 19 nt, synthetic construct
  misc_feature 1..19: note = siRNA antisense sequence
  source 1..19: mol_type = other RNA
tggctttgcaaggtatttg

SEQ ID NO: 26532 - RNA, 19 nt, synthetic construct
  misc_feature 1..19: note = siRNA sense sequence
  source 1..19: mol_type = other RNA
caaagccagccattgcatt

SEQ ID NO: 26533 - RNA, 19 nt, synthetic construct
  misc_feature 1..19: note = siRNA antisense sequence
  source 1..19: mol_type = other RNA
aatgcaatggctggctttg

SEQ ID NO: 26534 - RNA, 19 nt, synthetic construct
  misc_feature 1..19: note = siRNA sense sequence
  source 1..19: mol_type = other RNA
aaagccagccattgcattg

SEQ ID NO: 26535 - RNA, 19 nt, synthetic construct
  misc_feature 1..19: note = siRNA antisense sequence
  source 1..19: mol_type = other RNA
caatgcaatggctggcttt

SEQ ID NO: 26536 - RNA, 19 nt, synthetic construct
  misc_feature 1..19: note = siRNA sense sequence
  source 1..19: mol_type = other RNA
aagccagccattgcattgg

SEQ ID NO: 26537 - RNA, 19 nt, synthetic construct
  misc_feature 1..19: note = siRNA antisense sequence
  source 1..19: mol_type = other RNA
ccaatgcaatggctggctt

SEQ ID NO: 26538 - RNA, 19 nt, synthetic construct
  misc_feature 1..19: note = siRNA sense sequence
  source 1..19: mol_type = other RNA
agccagccattgcattggt

SEQ ID NO: 26539 - RNA, 19 nt, synthetic construct
  misc_feature 1..19: note = siRNA antisense sequence
  source 1..19: mol_type = other RNA
accaatgcaatggctggct

SEQ ID NO: 26540 - RNA, 19 nt, synthetic construct
  misc_feature 1..19: note = siRNA sense sequence
  source 1..19: mol_type = other RNA
gccagccattgcattggta

SEQ ID NO: 26541 - RNA, 19 nt, synthetic construct
  misc_feature 1..19: note = siRNA antisense sequence
  source 1..19: mol_type = other RNA
taccaatgcaatggctggc

SEQ ID NO: 26542 - RNA, 19 nt, synthetic construct
  misc_feature 1..19: note = siRNA sense sequence
  source 1..19: mol_type = other RNA
ccagccattgcattggtat

SEQ ID NO: 26543 - RNA, 19 nt, synthetic construct
  misc_feature 1..19: note = siRNA antisense sequence
  source 1..19: mol_type = other RNA
ataccaatgcaatggctgg

SEQ ID NO: 26544 - RNA, 19 nt, synthetic construct
  misc_feature 1..19: note = siRNA sense sequence
  source 1..19: mol_type = other RNA
cagccattgcattggtatt

SEQ ID NO: 26545 - RNA, 19 nt, synthetic construct
  misc_feature 1..19: note = siRNA antisense sequence
  source 1..19: mol_type = other RNA
aataccaatgcaatggctg

SEQ ID NO: 26546 - RNA, 19 nt, synthetic construct
  misc_feature 1..19: note = siRNA sense sequence
  source 1..19: mol_type = other RNA
agccattgcattggtatta

SEQ ID NO: 26547 - RNA, 19 nt, synthetic construct
  misc_feature 1..19: note = siRNA antisense sequence
  source 1..19: mol_type = other RNA
taataccaatgcaatggct

SEQ ID NO: 26548 - RNA, 19 nt, synthetic construct
  misc_feature 1..19: note = siRNA sense sequence
  source 1..19: mol_type = other RNA
gccattgcattggtattag

SEQ ID NO: 26549 - RNA, 19 nt, synthetic construct
  misc_feature 1..19: note = siRNA antisense sequence
  source 1..19: mol_type = other RNA
ctaataccaatgcaatggc

SEQ ID NO: 26550 - RNA, 19 nt, synthetic construct
  misc_feature 1..19: note = siRNA sense sequence
  source 1..19: mol_type = other RNA
ccattgcattggtattagg

SEQ ID NO: 26551 - RNA, 19 nt, synthetic construct
  misc_feature 1..19: note = siRNA antisense sequence
  source 1..19: mol_type = other RNA
cctaataccaatgcaatgg

SEQ ID NO: 26552 - RNA, 19 nt, synthetic construct
  misc_feature 1..19: note = siRNA sense sequence
  source 1..19: mol_type = other RNA
cattgcattggtattaggg

SEQ ID NO: 26553 - RNA, 19 nt, synthetic construct
  misc_feature 1..19: note = siRNA antisense sequence
  source 1..19: mol_type = other RNA
ccctaataccaatgcaatg

SEQ ID NO: 26554 - RNA, 19 nt, synthetic construct
  misc_feature 1..19: note = siRNA sense sequence
  source 1..19: mol_type = other RNA
actgtgctgttattagtac

SEQ ID NO: 26555 - RNA, 19 nt, synthetic construct
  misc_feature 1..19: note = siRNA antisense sequence
  source 1..19: mol_type = other RNA
gtactaataacagcacagt

SEQ ID NO: 26556 - RNA, 19 nt, synthetic construct
  misc_feature 1..19: note = siRNA sense sequence
  source 1..19: mol_type = other RNA
ctgtgctgttattagtacc

SEQ ID NO: 26557 - RNA, 19 nt, synthetic construct
  misc_feature 1..19: note = siRNA antisense sequence
  source 1..19: mol_type = other RNA
ggtactaataacagcacag

SEQ ID NO: 26558 - RNA, 19 nt, synthetic construct
  misc_feature 1..19: note = siRNA sense sequence
  source 1..19: mol_type = other RNA
tgctgttattagtaccttg

SEQ ID NO: 26559 - RNA, 19 nt, synthetic construct
  misc_feature 1..19: note = siRNA antisense sequence
  source 1..19: mol_type = other RNA
caaggtactaataacagca

SEQ ID NO: 26560 - RNA, 19 nt, synthetic construct
  misc_feature 1..19: note = siRNA sense sequence
  source 1..19: mol_type = other RNA
agtcagactggcattgttc

SEQ ID NO: 26561 - RNA, 19 nt, synthetic construct
  misc_feature 1..19: note = siRNA antisense sequence
  source 1..19: mol_type = other RNA
gaacaatgccagtctgact

SEQ ID NO: 26562 - RNA, 19 nt, synthetic construct
  misc_feature 1..19: note = siRNA sense sequence
  source 1..19: mol_type = other RNA
gtcagactggcattgttca

SEQ ID NO: 26563 - RNA, 19 nt, synthetic construct
  misc_feature 1..19: note = siRNA antisense sequence
  source 1..19: mol_type = other RNA
tgaacaatgccagtctgac

SEQ ID NO: 26564 - RNA, 19 nt, synthetic construct
  misc_feature 1..19: note = siRNA sense sequence
  source 1..19: mol_type = other RNA
tcagactggcattgttcaa

SEQ ID NO: 26565 - RNA, 19 nt, synthetic construct
  misc_feature 1..19: note = siRNA antisense sequence
  source 1..19: mol_type = other RNA
ttgaacaatgccagtctga

SEQ ID NO: 26566 - RNA, 19 nt, synthetic construct
  misc_feature 1..19: note = siRNA sense sequence
  source 1..19: mol_type = other RNA
cagactggcattgttcaaa

SEQ ID NO: 26567 - RNA, 19 nt, synthetic construct
  misc_feature 1..19: note = siRNA antisense sequence
  source 1..19: mol_type = other RNA
tttgaacaatgccagtctg

SEQ ID NO: 26568 - RNA, 19 nt, synthetic construct
  misc_feature 1..19: note = siRNA sense sequence
  source 1..19: mol_type = other RNA
agactggcattgttcaaat

SEQ ID NO: 26569 - RNA, 19 nt, synthetic construct
  misc_feature 1..19: note = siRNA antisense sequence
  source 1..19: mol_type = other RNA
atttgaacaatgccagtct

SEQ ID NO: 26570 - RNA, 19 nt, synthetic construct
  misc_feature 1..19: note = siRNA sense sequence
  source 1..19: mol_type = other RNA
gactggcattgttcaaatc

SEQ ID NO: 26571 - RNA, 19 nt, synthetic construct
  misc_feature 1..19: note = siRNA antisense sequence
  source 1..19: mol_type = other RNA
gatttgaacaatgccagtc

SEQ ID NO: 26572 - RNA, 19 nt, synthetic construct
  misc_feature 1..19: note = siRNA sense sequence
  source 1..19: mol_type = other RNA
tgctgagcctggactggca

SEQ ID NO: 26573 - RNA, 19 nt, synthetic construct
  misc_feature 1..19: note = siRNA antisense sequence
  source 1..19: mol_type = other RNA
tgccagtccaggctcagca

SEQ ID NO: 26574 - RNA, 19 nt, synthetic construct
  misc_feature 1..19: note = siRNA sense sequence
  source 1..19: mol_type = other RNA
ggactccagatcctgatga

SEQ ID NO: 26575 - RNA, 19 nt, synthetic construct
  misc_feature 1..19: note = siRNA antisense sequence
  source 1..19: mol_type = other RNA
tcatcaggatctggagtcc

SEQ ID NO: 26576 - RNA, 19 nt, synthetic construct
  misc_feature 1..19: note = siRNA sense sequence
  source 1..19: mol_type = other RNA
gactccagatcctgatgac

SEQ ID NO: 26577 - RNA, 19 nt, synthetic construct
  misc_feature 1..19: note = siRNA antisense sequence
  source 1..19: mol_type = other RNA
gtcatcaggatctggagtc

SEQ ID NO: 26578 - RNA, 19 nt, synthetic construct
  misc_feature 1..19: note = siRNA sense sequence
  source 1..19: mol_type = other RNA
actccagatcctgatgaca

SEQ ID NO: 26579 - RNA, 19 nt, synthetic construct
  misc_feature 1..19: note = siRNA antisense sequence
  source 1..19: mol_type = other RNA
tgtcatcaggatctggagt

SEQ ID NO: 26580 - RNA, 19 nt, synthetic construct
  misc_feature 1..19: note = siRNA sense sequence
  source 1..19: mol_type = other RNA
ctccagatcctgatgacat

SEQ ID NO: 26581 - RNA, 19 nt, synthetic construct
  misc_feature 1..19: note = siRNA antisense sequence
  source 1..19: mol_type = other RNA
atgtcatcaggatctggag

SEQ ID NO: 26582 - RNA, 19 nt, synthetic construct
  misc_feature 1..19: note = siRNA sense sequence
  source 1..19: mol_type = other RNA
tccagatcctgatgacata

SEQ ID NO: 26583 - RNA, 19 nt, synthetic construct
  misc_feature 1..19: note = siRNA antisense sequence
  source 1..19: mol_type = other RNA
tatgtcatcaggatctgga

SEQ ID NO: 26584 - RNA, 19 nt, synthetic construct
  misc_feature 1..19: note = siRNA sense sequence
  source 1..19: mol_type = other RNA
ccagatcctgatgacatat

SEQ ID NO: 26585 - RNA, 19 nt, synthetic construct
  misc_feature 1..19: note = siRNA antisense sequence
  source 1..19: mol_type = other RNA
atatgtcatcaggatctgg

SEQ ID NO: 26586 - RNA, 19 nt, synthetic construct
  misc_feature 1..19: note = siRNA sense sequence
  source 1..19: mol_type = other RNA
tagtctcaggatttaattc

SEQ ID NO: 26587 - RNA, 19 nt, synthetic construct
  misc_feature 1..19: note = siRNA antisense sequence
  source 1..19: mol_type = other RNA
gaattaaatcctgagacta

SEQ ID NO: 26588 - RNA, 19 nt, synthetic construct
  misc_feature 1..19: note = siRNA sense sequence
  source 1..19: mol_type = other RNA
agtctcaggatttaattca

SEQ ID NO: 26589 - RNA, 19 nt, synthetic construct
  misc_feature 1..19: note = siRNA antisense sequence
  source 1..19: mol_type = other RNA
tgaattaaatcctgagact

SEQ ID NO: 26590 - RNA, 19 nt, synthetic construct
  misc_feature 1..19: note = siRNA sense sequence
  source 1..19: mol_type = other RNA
agtctcgctctgtcaccca

SEQ ID NO: 26591 - RNA, 19 nt, synthetic construct
  misc_feature 1..19: note = siRNA antisense sequence
  source 1..19: mol_type = other RNA
tgggtgacagagcgagact

SEQ ID NO: 26592 - RNA, 19 nt, synthetic construct
  misc_feature 1..19: note = siRNA sense sequence
  source 1..19: mol_type = other RNA
gtctcgctctgtcacccag

SEQ ID NO: 26593 - RNA, 19 nt, synthetic construct
  misc_feature 1..19: note = siRNA antisense sequence
  source 1..19: mol_type = other RNA
ctgggtgacagagcgagac

SEQ ID NO: 26594 - RNA, 19 nt, synthetic construct
  misc_feature 1..19: note = siRNA sense sequence
  source 1..19: mol_type = other RNA
tctcgctctgtcacccagg

SEQ ID NO: 26595 - RNA, 19 nt, synthetic construct
  misc_feature 1..19: note = siRNA antisense sequence
  source 1..19: mol_type = other RNA
cctgggtgacagagcgaga

SEQ ID NO: 26596 - RNA, 19 nt, synthetic construct
  misc_feature 1..19: note = siRNA sense sequence
  source 1..19: mol_type = other RNA
tcgctctgtcacccaggct

SEQ ID NO: 26597 - RNA, 19 nt, synthetic construct
  misc_feature 1..19: note = siRNA antisense sequence
  source 1..19: mol_type = other RNA
agcctgggtgacagagcga

SEQ ID NO: 26598 - RNA, 19 nt, synthetic construct
  misc_feature 1..19: note = siRNA sense sequence
  source 1..19: mol_type = other RNA
ctctgtcacccaggctgga

SEQ ID NO: 26599 - RNA, 19 nt, synthetic construct
  misc_feature 1..19: note = siRNA antisense sequence
  source 1..19: mol_type = other RNA
tccagcctgggtgacagag

SEQ ID NO: 26600 - RNA, 19 nt, synthetic construct
  misc_feature 1..19: note = siRNA sense sequence
  source 1..19: mol_type = other RNA
tctgtcacccaggctggag

SEQ ID NO: 26601 - RNA, 19 nt, synthetic construct
  misc_feature 1..19: note = siRNA antisense sequence
  source 1..19: mol_type = other RNA
ctccagcctgggtgacaga

SEQ ID NO: 26602 - RNA, 19 nt, synthetic construct
  misc_feature 1..19: note = siRNA sense sequence
  source 1..19: mol_type = other RNA
tcacccaggctggagtgca

SEQ ID NO: 26603 - RNA, 19 nt, synthetic construct
  misc_feature 1..19: note = siRNA antisense sequence
  source 1..19: mol_type = other RNA
tgcactccagcctgggtga

SEQ ID NO: 26604 - RNA, 19 nt, synthetic construct
  misc_feature 1..19: note = siRNA sense sequence
  source 1..19: mol_type = other RNA
tcagcatcctgggttcaag

SEQ ID NO: 26605 - RNA, 19 nt, synthetic construct
  misc_feature 1..19: note = siRNA antisense sequence
  source 1..19: mol_type = other RNA
cttgaacccaggatgctga

SEQ ID NO: 26606 - RNA, 19 nt, synthetic construct
  misc_feature 1..19: note = siRNA sense sequence
  source 1..19: mol_type = other RNA
cagcatcctgggttcaagc

SEQ ID NO: 26607 - RNA, 19 nt, synthetic construct
  misc_feature 1..19: note = siRNA antisense sequence
  source 1..19: mol_type = other RNA
gcttgaacccaggatgctg

SEQ ID NO: 26608 - RNA, 19 nt, synthetic construct
  misc_feature 1..19: note = siRNA sense sequence
  source 1..19: mol_type = other RNA
ctgggaccacaggcatgca

SEQ ID NO: 26609 - RNA, 19 nt, synthetic construct
  misc_feature 1..19: note = siRNA antisense sequence
  source 1..19: mol_type = other RNA
tgcatgcctgtggtcccag

SEQ ID NO: 26610 - RNA, 19 nt, synthetic construct
  misc_feature 1..19: note = siRNA sense sequence
  source 1..19: mol_type = other RNA
gcgggttttcgccatgttg

SEQ ID NO: 26611 - RNA, 19 nt, synthetic construct
  misc_feature 1..19: note = siRNA antisense sequence
  source 1..19: mol_type = other RNA
caacatggcgaaaacccgc

SEQ ID NO: 26612 - RNA, 19 nt, synthetic construct
  misc_feature 1..19: note = siRNA sense sequence
  source 1..19: mol_type = other RNA
ccaaagtgctgggattaca

SEQ ID NO: 26613 - RNA, 19 nt, synthetic construct
  misc_feature 1..19: note = siRNA antisense sequence
  source 1..19: mol_type = other RNA
tgtaatcccagcactttgg

SEQ ID NO: 26614 - RNA, 19 nt, synthetic construct
  misc_feature 1..19: note = siRNA sense sequence
  source 1..19: mol_type = other RNA
caaagtgctgggattacag

SEQ ID NO: 26615 - RNA, 19 nt, synthetic construct
  misc_feature 1..19: note = siRNA antisense sequence
  source 1..19: mol_type = other RNA
ctgtaatcccagcactttg

SEQ ID NO: 26616 - RNA, 19 nt, synthetic construct
  misc_feature 1..19: note = siRNA sense sequence
  source 1..19: mol_type = other RNA
gtgctgggattacaggtgt

SEQ ID NO: 26617 - RNA, 19 nt, synthetic construct
  misc_feature 1..19: note = siRNA antisense sequence
  source 1..19: mol_type = other RNA
acacctgtaatcccagcac

SEQ ID NO: 26618 - RNA, 19 nt, synthetic construct
  misc_feature 1..19: note = siRNA sense sequence
  source 1..19: mol_type = other RNA
tgctgggattacaggtgtg

SEQ ID NO: 26619 - RNA, 19 nt, synthetic construct
  misc_feature 1..19: note = siRNA antisense sequence
  source 1..19: mol_type = other RNA
cacacctgtaatcccagca

SEQ ID NO: 26620 - RNA, 19 nt, synthetic construct
  misc_feature 1..19: note = siRNA sense sequence
  source 1..19: mol_type = other RNA
gctgggattacaggtgtga

SEQ ID NO: 26621 - RNA, 19 nt, synthetic construct
  misc_feature 1..19: note = siRNA antisense sequence
  source 1..19: mol_type = other RNA
tcacacctgtaatcccagc

SEQ ID NO: 26622 - RNA, 19 nt, synthetic construct
  misc_feature 1..19: note = siRNA sense sequence
  source 1..19: mol_type = other RNA
ggattacaggtgtgagcac

SEQ ID NO: 26623 - RNA, 19 nt, synthetic construct
  misc_feature 1..19: note = siRNA antisense sequence
  source 1..19: mol_type = other RNA
gtgctcacacctgtaatcc

SEQ ID NO: 26624 - RNA, 19 nt, synthetic construct
  misc_feature 1..19: note = siRNA sense sequence
  source 1..19: mol_type = other RNA
aggtgtgagcactgtgcga

SEQ ID NO: 26625 - RNA, 19 nt, synthetic construct
  misc_feature 1..19: note = siRNA antisense sequence
  source 1..19: mol_type = other RNA
tcgcacagtgctcacacct

SEQ ID NO: 26626 - RNA, 19 nt, synthetic construct
  misc_feature 1..19: note = siRNA sense sequence
  source 1..19: mol_type = other RNA
ggtgtgagcactgtgcgag

SEQ ID NO: 26627 - RNA, 19 nt, synthetic construct
  misc_feature 1..19: note = siRNA antisense sequence
  source 1..19: mol_type = other RNA
ctcgcacagtgctcacacc

SEQ ID NO: 26628 - RNA, 19 nt, synthetic construct
  misc_feature 1..19: note = siRNA sense sequence
  source 1..19: mol_type = other RNA
gtgtgagcactgtgcgagc

SEQ ID NO: 26629 - RNA, 19 nt, synthetic construct
  misc_feature 1..19: note = siRNA antisense sequence
  source 1..19: mol_type = other RNA
gctcgcacagtgctcacac

SEQ ID NO: 26630 - RNA, 19 nt, synthetic construct
  misc_feature 1..19: note = siRNA sense sequence
  source 1..19: mol_type = other RNA
tgtgagcactgtgcgagcc

SEQ ID NO: 26631 - RNA, 19 nt, synthetic construct
  misc_feature 1..19: note = siRNA antisense sequence
  source 1..19: mol_type = other RNA
ggctcgcacagtgctcaca

SEQ ID NO: 26632 - RNA, 19 nt, synthetic construct
  misc_feature 1..19: note = siRNA sense sequence
  source 1..19: mol_type = other RNA
tgagcactgtgcgagccca

SEQ ID NO: 26633 - RNA, 19 nt, synthetic construct
  misc_feature 1..19: note = siRNA antisense sequence
  source 1..19: mol_type = other RNA
tgggctcgcacagtgctca

SEQ ID NO: 26634 - RNA, 19 nt, synthetic construct
  misc_feature 1..19: note = siRNA sense sequence
  source 1..19: mol_type = other RNA
cacttactgttcctcatca

SEQ ID NO: 26635 - RNA, 19 nt, synthetic construct
  misc_feature 1..19: note = siRNA antisense sequence
  source 1..19: mol_type = other RNA
tgatgaggaacagtaagtg

SEQ ID NO: 26636 - RNA, 19 nt, synthetic construct
  misc_feature 1..19: note = siRNA sense sequence
  source 1..19: mol_type = other RNA
agatgccaatttgttagga

SEQ ID NO: 26637 - RNA, 19 nt, synthetic construct
  misc_feature 1..19: note = siRNA antisense sequence
  source 1..19: mol_type = other RNA
tcctaacaaattggcatct

SEQ ID NO: 26638 - RNA, 19 nt, synthetic construct
  misc_feature 1..19: note = siRNA sense sequence
  source 1..19: mol_type = other RNA
aagtgcatccctttcaggc

SEQ ID NO: 26639 - RNA, 19 nt, synthetic construct
  misc_feature 1..19: note = siRNA antisense sequence
  source 1..19: mol_type = other RNA
gcctgaaagggatgcactt

SEQ ID NO: 26640 - RNA, 19 nt, synthetic construct
  misc_feature 1..19: note = siRNA sense sequence
  source 1..19: mol_type = other RNA
agtgcatccctttcaggct

SEQ ID NO: 26641 - RNA, 19 nt, synthetic construct
  misc_feature 1..19: note = siRNA antisense sequence
  source 1..19: mol_type = other RNA
agcctgaaagggatgcact

SEQ ID NO: 26642 - RNA, 19 nt, synthetic construct
  misc_feature 1..19: note = siRNA sense sequence
  source 1..19: mol_type = other RNA
gtgcatccctttcaggctt

SEQ ID NO: 26643 - RNA, 19 nt, synthetic construct
  misc_feature 1..19: note = siRNA antisense sequence
  source 1..19: mol_type = other RNA
aagcctgaaagggatgcac

SEQ ID NO: 26644 - RNA, 19 nt, synthetic construct
  misc_feature 1..19: note = siRNA sense sequence
  source 1..19: mol_type = other RNA
tgcatccctttcaggcttc

SEQ ID NO: 26645 - RNA, 19 nt, synthetic construct
  misc_feature 1..19: note = siRNA antisense sequence
  source 1..19: mol_type = other RNA
gaagcctgaaagggatgca

SEQ ID NO: 26646 - RNA, 19 nt, synthetic construct
  misc_feature 1..19: note = siRNA sense sequence
  source 1..19: mol_type = other RNA
tccctttcaggcttcatat

SEQ ID NO: 26647 - RNA, 19 nt, synthetic construct
  misc_feature 1..19: note = siRNA antisense sequence
  source 1..19: mol_type = other RNA
atatgaagcctgaaaggga

SEQ ID NO: 26648 - RNA, 19 nt, synthetic construct
  misc_feature 1..19: note = siRNA sense sequence
  source 1..19: mol_type = other RNA
tttcaggcttcatatctgc

SEQ ID NO: 26649 - RNA, 19 nt, synthetic construct
  misc_feature 1..19: note = siRNA antisense sequence
  source 1..19: mol_type = other RNA
gcagatatgaagcctgaaa

SEQ ID NO: 26650 - RNA, 19 nt, synthetic construct
  misc_feature 1..19: note = siRNA sense sequence
  source 1..19: mol_type = other RNA
caggcttcatatctgctta

SEQ ID NO: 26651 - RNA, 19 nt, synthetic construct
  misc_feature 1..19: note = siRNA antisense sequence
  source 1..19: mol_type = other RNA
taagcagatatgaagcctg

SEQ ID NO: 26652 - RNA, 19 nt, synthetic construct
  misc_feature 1..19: note = siRNA sense sequence
  source 1..19: mol_type = other RNA
aggcttcatatctgcttag

SEQ ID NO: 26653 - RNA, 19 nt, synthetic construct
  misc_feature 1..19: note = siRNA antisense sequence
  source 1..19: mol_type = other RNA
ctaagcagatatgaagcct

SEQ ID NO: 26654 - RNA, 19 nt, synthetic construct
  misc_feature 1..19: note = siRNA sense sequence
  source 1..19: mol_type = other RNA
ggcttcatatctgcttaga

SEQ ID NO: 26655 - RNA, 19 nt, synthetic construct
  misc_feature 1..19: note = siRNA antisense sequence
  source 1..19: mol_type = other RNA
tctaagcagatatgaagcc

SEQ ID NO: 26656 - RNA, 19 nt, synthetic construct
  misc_feature 1..19: note = siRNA sense sequence
  source 1..19: mol_type = other RNA
acctggcttcagtttgctc

SEQ ID NO: 26657 - RNA, 19 nt, synthetic construct
  misc_feature 1..19: note = siRNA antisense sequence
  source 1..19: mol_type = other RNA
gagcaaactgaagccaggt

SEQ ID NO: 26658 - RNA, 19 nt, synthetic construct
  misc_feature 1..19: note = siRNA sense sequence
  source 1..19: mol_type = other RNA
tggcttcagtttgctcata

SEQ ID NO: 26659 - RNA, 19 nt, synthetic construct
  misc_feature 1..19: note = siRNA antisense sequence
  source 1..19: mol_type = other RNA
tatgagcaaactgaagcca

SEQ ID NO: 26660 - RNA, 19 nt, synthetic construct
  misc_feature 1..19: note = siRNA sense sequence
  source 1..19: mol_type = other RNA
ggcttcagtttgctcataa

SEQ ID NO: 26661 - RNA, 19 nt, synthetic construct
  misc_feature 1..19: note = siRNA antisense sequence
  source 1..19: mol_type = other RNA
ttatgagcaaactgaagcc

SEQ ID NO: 26662 - RNA, 19 nt, synthetic construct
  misc_feature 1..19: note = siRNA sense sequence
  source 1..19: mol_type = other RNA
agtcctctgcaccttctga

SEQ ID NO: 26663 - RNA, 19 nt, synthetic construct
  misc_feature 1..19: note = siRNA antisense sequence
  source 1..19: mol_type = other RNA
tcagaaggtgcagaggact

SEQ ID NO: 26664 - RNA, 19 nt, synthetic construct
  misc_feature 1..19: note = siRNA sense sequence
  source 1..19: mol_type = other RNA
gtcctctgcaccttctgag

SEQ ID NO: 26665 - RNA, 19 nt, synthetic construct
  misc_feature 1..19: note = siRNA antisense sequence
  source 1..19: mol_type = other RNA
ctcagaaggtgcagaggac

SEQ ID NO: 26666 - RNA, 19 nt, synthetic construct
  misc_feature 1..19: note = siRNA sense sequence
  source 1..19: mol_type = other RNA
ggtagattttaaatggctc

SEQ ID NO: 26667 - RNA, 19 nt, synthetic construct
  misc_feature 1..19: note = siRNA antisense sequence
  source 1..19: mol_type = other RNA
gagccatttaaaatctacc

SEQ ID NO: 26668 - RNA, 19 nt, synthetic construct
  misc_feature 1..19: note = siRNA sense sequence
  source 1..19: mol_type = other RNA
tggctcatttaaatactac

SEQ ID NO: 26669 - RNA, 19 nt, synthetic construct
  misc_feature 1..19: note = siRNA antisense sequence
  source 1..19: mol_type = other RNA
gtagtatttaaatgagcca

SEQ ID NO: 26670 - RNA, 19 nt, synthetic construct
  misc_feature 1..19: note = siRNA sense sequence
  source 1..19: mol_type = other RNA
ggctcatttaaatactaca

SEQ ID NO: 26671 - RNA, 19 nt, synthetic construct
  misc_feature 1..19: note = siRNA antisense sequence
  source 1..19: mol_type = other RNA
tgtagtatttaaatgagcc

SEQ ID NO: 26672 - RNA, 19 nt, synthetic construct
  misc_feature 1..19: note = siRNA sense sequence
  source 1..19: mol_type = other RNA
cagtctctaaattttcagc

SEQ ID NO: 26673 - RNA, 19 nt, synthetic construct
  misc_feature 1..19: note = siRNA antisense sequence
  source 1..19: mol_type = other RNA
gctgaaaatttagagactg

SEQ ID NO: 26674 - RNA, 19 nt, synthetic construct
  misc_feature 1..19: note = siRNA sense sequence
  source 1..19: mol_type = other RNA
agtctctaaattttcagcc

SEQ ID NO: 26675 - RNA, 19 nt, synthetic construct
  misc_feature 1..19: note = siRNA antisense sequence
  source 1..19: mol_type = other RNA
ggctgaaaatttagagact

SEQ ID NO: 26676 - RNA, 19 nt, synthetic construct
  misc_feature 1..19: note = siRNA sense sequence
  source 1..19: mol_type = other RNA
tctaaattttcagcctagg

SEQ ID NO: 26677 - RNA, 19 nt, synthetic construct
  misc_feature 1..19: note = siRNA antisense sequence
  source 1..19: mol_type = other RNA
cctaggctgaaaatttaga

SEQ ID NO: 26678 - RNA, 19 nt, synthetic construct
  misc_feature 1..19: note = siRNA sense sequence
  source 1..19: mol_type = other RNA
ctaaattttcagcctagga

SEQ ID NO: 26679 - RNA, 19 nt, synthetic construct
  misc_feature 1..19: note = siRNA antisense sequence
  source 1..19: mol_type = other RNA
tcctaggctgaaaatttag

SEQ ID NO: 26680 - RNA, 19 nt, synthetic construct
  misc_feature 1..19: note = siRNA sense sequence
  source 1..19: mol_type = other RNA
ccaggaatttgatattagt

SEQ ID NO: 26681 - RNA, 19 nt, synthetic construct
  misc_feature 1..19: note = siRNA antisense sequence
  source 1..19: mol_type = other RNA
actaatatcaaattcctgg

SEQ ID NO: 26682 - RNA, 19 nt, synthetic construct
  misc_feature 1..19: note = siRNA sense sequence
  source 1..19: mol_type = other RNA
caggaatttgatattagtc

SEQ ID NO: 26683 - RNA, 19 nt, synthetic construct
  misc_feature 1..19: note = siRNA antisense sequence
  source 1..19: mol_type = other RNA
gactaatatcaaattcctg

SEQ ID NO: 26684 - RNA, 19 nt, synthetic construct
  misc_feature 1..19: note = siRNA sense sequence
  source 1..19: mol_type = other RNA
aggaatttgatattagtcc

SEQ ID NO: 26685 - RNA, 19 nt, synthetic construct
  misc_feature 1..19: note = siRNA antisense sequence
  source 1..19: mol_type = other RNA
ggactaatatcaaattcct

SEQ ID NO: 26686 - RNA, 19 nt, synthetic construct
  misc_feature 1..19: note = siRNA sense sequence
  source 1..19: mol_type = other RNA
ggaatttgatattagtcct

SEQ ID NO: 26687 - RNA, 19 nt, synthetic construct
  misc_feature 1..19: note = siRNA antisense sequence
  source 1..19: mol_type = other RNA
aggactaatatcaaattcc

SEQ ID NO: 26688 - RNA, 19 nt, synthetic construct
  misc_feature 1..19: note = siRNA sense sequence
  source 1..19: mol_type = other RNA
gaatttgatattagtcctg

SEQ ID NO: 26689 - RNA, 19 nt, synthetic construct
  misc_feature 1..19: note = siRNA antisense sequence
  source 1..19: mol_type = other RNA
caggactaatatcaaattc

SEQ ID NO: 26690 - RNA, 19 nt, synthetic construct
  misc_feature 1..19: note = siRNA sense sequence
  source 1..19: mol_type = other RNA
tttgatattagtcctgatg

SEQ ID NO: 26691 - RNA, 19 nt, synthetic construct
  misc_feature 1..19: note = siRNA antisense sequence
  source 1..19: mol_type = other RNA
catcaggactaatatcaaa

SEQ ID NO: 26692 - RNA, 19 nt, synthetic construct
  misc_feature 1..19: note = siRNA sense sequence
  source 1..19: mol_type = other RNA
tgatattagtcctgatgca

SEQ ID NO: 26693 - RNA, 19 nt, synthetic construct
  misc_feature 1..19: note = siRNA antisense sequence
  source 1..19: mol_type = other RNA
tgcatcaggactaatatca

SEQ ID NO: 26694 - RNA, 19 nt, synthetic construct
  misc_feature 1..19: note = siRNA sense sequence
  source 1..19: mol_type = other RNA
atattagtcctgatgcatc

SEQ ID NO: 26695 - RNA, 19 nt, synthetic construct
  misc_feature 1..19: note = siRNA antisense sequence
  source 1..19: mol_type = other RNA
gatgcatcaggactaatat

SEQ ID NO: 26696 - RNA, 19 nt, synthetic construct
  misc_feature 1..19: note = siRNA sense sequence
  source 1..19: mol_type = other RNA
tattagtcctgatgcatca

SEQ ID NO: 26697 - RNA, 19 nt, synthetic construct
  misc_feature 1..19: note = siRNA antisense sequence
  source 1..19: mol_type = other RNA
tgatgcatcaggactaata

SEQ ID NO: 26698 - RNA, 19 nt, synthetic construct
  misc_feature 1..19: note = siRNA sense sequence
  source 1..19: mol_type = other RNA
attagtcctgatgcatcac

SEQ ID NO: 26699 - RNA, 19 nt, synthetic construct
  misc_feature 1..19: note = siRNA antisense sequence
  source 1..19: mol_type = other RNA
gtgatgcatcaggactaat

SEQ ID NO: 26700 - RNA, 19 nt, synthetic construct
  misc_feature 1..19: note = siRNA sense sequence
  source 1..19: mol_type = other RNA
ttagtcctgatgcatcacg

SEQ ID NO: 26701 - RNA, 19 nt, synthetic construct
  misc_feature 1..19: note = siRNA antisense sequence
  source 1..19: mol_type = other RNA
cgtgatgcatcaggactaa

SEQ ID NO: 26702 - RNA, 19 nt, synthetic construct
  misc_feature 1..19: note = siRNA sense sequence
  source 1..19: mol_type = other RNA
aactcagtttctacagacc

SEQ ID NO: 26703 - RNA, 19 nt, synthetic construct
  misc_feature 1..19: note = siRNA antisense sequence
  source 1..19: mol_type = other RNA
ggtctgtagaaactgagtt

SEQ ID NO: 26704 - RNA, 19 nt, synthetic construct
  misc_feature 1..19: note = siRNA sense sequence
  source 1..19: mol_type = other RNA
cagtttctacagacccagg

SEQ ID NO: 26705 - RNA, 19 nt, synthetic construct
  misc_feature 1..19: note = siRNA antisense sequence
  source 1..19: mol_type = other RNA
cctgggtctgtagaaactg

SEQ ID NO: 26706 - RNA, 19 nt, synthetic construct
  misc_feature 1..19: note = siRNA sense sequence
  source 1..19: mol_type = other RNA
agtttctacagacccaggg

SEQ ID NO: 26707 - RNA, 19 nt, synthetic construct
  misc_feature 1..19: note = siRNA antisense sequence
  source 1..19: mol_type = other RNA
ccctgggtctgtagaaact

SEQ ID NO: 26708 - RNA, 19 nt, synthetic construct
  misc_feature 1..19: note = siRNA sense sequence
  source 1..19: mol_type = other RNA
gtttctacagacccagggc

SEQ ID NO: 26709 - RNA, 19 nt, synthetic construct
  misc_feature 1..19: note = siRNA antisense sequence
  source 1..19: mol_type = other RNA
gccctgggtctgtagaaac

SEQ ID NO: 26710 - RNA, 19 nt, synthetic construct
  misc_feature 1..19: note = siRNA sense sequence
  source 1..19: mol_type = other RNA
ctacagacccagggcttcc

SEQ ID NO: 26711 - RNA, 19 nt, synthetic construct
  misc_feature 1..19: note = siRNA antisense sequence
  source 1..19: mol_type = other RNA
ggaagccctgggtctgtag

SEQ ID NO: 26712 - RNA, 19 nt, synthetic construct
  misc_feature 1..19: note = siRNA sense sequence
  source 1..19: mol_type = other RNA
gggttacctcaggccactt

SEQ ID NO: 26713 - RNA, 19 nt, synthetic construct
  misc_feature 1..19: note = siRNA antisense sequence
  source 1..19: mol_type = other RNA
aagtggcctgaggtaaccc

SEQ ID NO: 26714 - RNA, 19 nt, synthetic construct
  misc_feature 1..19: note = siRNA sense sequence
  source 1..19: mol_type = other RNA
ggttacctcaggccactta

SEQ ID NO: 26715 - RNA, 19 nt, synthetic construct
  misc_feature 1..19: note = siRNA antisense sequence
  source 1..19: mol_type = other RNA
taagtggcctgaggtaacc

SEQ ID NO: 26716 - RNA, 19 nt, synthetic construct
  misc_feature 1..19: note = siRNA sense sequence
  source 1..19: mol_type = other RNA
gttacctcaggccacttat

SEQ ID NO: 26717 - RNA, 19 nt, synthetic construct
  misc_feature 1..19: note = siRNA antisense sequence
  source 1..19: mol_type = other RNA
ataagtggcctgaggtaac

SEQ ID NO: 26718 - RNA, 19 nt, synthetic construct
  misc_feature 1..19: note = siRNA sense sequence
  source 1..19: mol_type = other RNA
ttacctcaggccacttata

SEQ ID NO: 26719 - RNA, 19 nt, synthetic construct
  misc_feature 1..19: note = siRNA antisense sequence
  source 1..19: mol_type = other RNA
tataagtggcctgaggtaa

SEQ ID NO: 26720 - RNA, 19 nt, synthetic construct
  misc_feature 1..19: note = siRNA sense sequence
  source 1..19: mol_type = other RNA
ctcaggccacttatatctc

SEQ ID NO: 26721 - RNA, 19 nt, synthetic construct
  misc_feature 1..19: note = siRNA antisense sequence
  source 1..19: mol_type = other RNA
gagatataagtggcctgag

SEQ ID NO: 26722 - RNA, 19 nt, synthetic construct
  misc_feature 1..19: note = siRNA sense sequence
  source 1..19: mol_type = other RNA
tcaggccacttatatctct

SEQ ID NO: 26723 - RNA, 19 nt, synthetic construct
  misc_feature 1..19: note = siRNA antisense sequence
  source 1..19: mol_type = other RNA
agagatataagtggcctga

SEQ ID NO: 26724 - RNA, 19 nt, synthetic construct
  misc_feature 1..19: note = siRNA sense sequence
  source 1..19: mol_type = other RNA
caggccacttatatctctt

SEQ ID NO: 26725 - RNA, 19 nt, synthetic construct
  misc_feature 1..19: note = siRNA antisense sequence
  source 1..19: mol_type = other RNA
aagagatataagtggcctg

SEQ ID NO: 26726 - RNA, 19 nt, synthetic construct
  misc_feature 1..19: note = siRNA sense sequence
  source 1..19: mol_type = other RNA
aggccacttatatctctta

SEQ ID NO: 26727 - RNA, 19 nt, synthetic construct
  misc_feature 1..19: note = siRNA antisense sequence
  source 1..19: mol_type = other RNA
taagagatataagtggcct

SEQ ID NO: 26728 - RNA, 19 nt, synthetic construct
  misc_feature 1..19: note = siRNA sense sequence
  source 1..19: mol_type = other RNA
gccacttatatctcttatc

SEQ ID NO: 26729 - RNA, 19 nt, synthetic construct
  misc_feature 1..19: note = siRNA antisense sequence
  source 1..19: mol_type = other RNA
gataagagatataagtggc

SEQ ID NO: 26730 - RNA, 19 nt, synthetic construct
  misc_feature 1..19: note = siRNA sense sequence
  source 1..19: mol_type = other RNA
ccacttatatctcttatct

SEQ ID NO: 26731 - RNA, 19 nt, synthetic construct
  misc_feature 1..19: note = siRNA antisense sequence
  source 1..19: mol_type = other RNA
agataagagatataagtgg

SEQ ID NO: 26732 - RNA, 19 nt, synthetic construct
  misc_feature 1..19: note = siRNA sense sequence
  source 1..19: mol_type = other RNA
cacttatatctcttatctg

SEQ ID NO: 26733 - RNA, 19 nt, synthetic construct
  misc_feature 1..19: note = siRNA antisense sequence
  source 1..19: mol_type = other RNA
cagataagagatataagtg

SEQ ID NO: 26734 - RNA, 19 nt, synthetic construct
  misc_feature 1..19: note = siRNA sense sequence
  source 1..19: mol_type = other RNA
cttatatctcttatctgtg

SEQ ID NO: 26735 - RNA, 19 nt, synthetic construct
  misc_feature 1..19: note = siRNA antisense sequence
  source 1..19: mol_type = other RNA
cacagataagagatataag

SEQ ID NO: 26736 - RNA, 19 nt, synthetic construct
  misc_feature 1..19: note = siRNA sense sequence
  source 1..19: mol_type = other RNA
ttatatctcttatctgtgc

SEQ ID NO: 26737 - RNA, 19 nt, synthetic construct
  misc_feature 1..19: note = siRNA antisense sequence
  source 1..19: mol_type = other RNA
gcacagataagagatataa

SEQ ID NO: 26738 - RNA, 19 nt, synthetic construct
  misc_feature 1..19: note = siRNA sense sequence
  source 1..19: mol_type = other RNA
tatatctcttatctgtgct

SEQ ID NO: 26739 - RNA, 19 nt, synthetic construct
  misc_feature 1..19: note = siRNA antisense sequence
  source 1..19: mol_type = other RNA
agcacagataagagatata

SEQ ID NO: 26740 - RNA, 19 nt, synthetic construct
  misc_feature 1..19: note = siRNA sense sequence
  source 1..19: mol_type = other RNA
atatctcttatctgtgctt

SEQ ID NO: 26741 - RNA, 19 nt, synthetic construct
  misc_feature 1..19: note = siRNA antisense sequence
  source 1..19: mol_type = other RNA
aagcacagataagagatat

SEQ ID NO: 26742 - RNA, 19 nt, synthetic construct
  misc_feature 1..19: note = siRNA sense sequence
  source 1..19: mol_type = other RNA
tatctcttatctgtgcttt

SEQ ID NO: 26743 - RNA, 19 nt, synthetic construct
  misc_feature 1..19: note = siRNA antisense sequence
  source 1..19: mol_type = other RNA
aaagcacagataagagata

SEQ ID NO: 26744 - RNA, 19 nt, synthetic construct
  misc_feature 1..19: note = siRNA sense sequence
  source 1..19: mol_type = other RNA
atctcttatctgtgctttt

SEQ ID NO: 26745 - RNA, 19 nt, synthetic construct
  misc_feature 1..19: note = siRNA antisense sequence
  source 1..19: mol_type = other RNA
aaaagcacagataagagat

SEQ ID NO: 26746 - RNA, 19 nt, synthetic construct
  misc_feature 1..19: note = siRNA sense sequence
  source 1..19: mol_type = other RNA
tatctgtgcttttccttag

SEQ ID NO: 26747 - RNA, 19 nt, synthetic construct
  misc_feature 1..19: note = siRNA antisense sequence
  source 1..19: mol_type = other RNA
ctaaggaaaagcacagata

SEQ ID NO: 26748 - RNA, 19 nt, synthetic construct
  misc_feature 1..19: note = siRNA sense sequence
  source 1..19: mol_type = other RNA
atctgtgcttttccttagc

SEQ ID NO: 26749 - RNA, 19 nt, synthetic construct
  misc_feature 1..19: note = siRNA antisense sequence
  source 1..19: mol_type = other RNA
gctaaggaaaagcacagat

SEQ ID NO: 26750 - RNA, 19 nt, synthetic construct
  misc_feature 1..19: note = siRNA sense sequence
  source 1..19: mol_type = other RNA
ctgtgcttttccttagctg

SEQ ID NO: 26751 - RNA, 19 nt, synthetic construct
  misc_feature 1..19: note = siRNA antisense sequence
  source 1..19: mol_type = other RNA
cagctaaggaaaagcacag

SEQ ID NO: 26752 - RNA, 19 nt, synthetic construct
  misc_feature 1..19: note = siRNA sense sequence
  source 1..19: mol_type = other RNA
tgtgcttttccttagctga

SEQ ID NO: 26753 - RNA, 19 nt, synthetic construct
  misc_feature 1..19: note = siRNA antisense sequence
  source 1..19: mol_type = other RNA
tcagctaaggaaaagcaca

SEQ ID NO: 26754 - RNA, 19 nt, synthetic construct
  misc_feature 1..19: note = siRNA sense sequence
  source 1..19: mol_type = other RNA
gtgcttttccttagctgac

SEQ ID NO: 26755 - RNA, 19 nt, synthetic construct
  misc_feature 1..19: note = siRNA antisense sequence
  source 1..19: mol_type = other RNA
gtcagctaaggaaaagcac

SEQ ID NO: 26756 - RNA, 19 nt, synthetic construct
  misc_feature 1..19: note = siRNA sense sequence
  source 1..19: mol_type = other RNA
tgcttttccttagctgaca

SEQ ID NO: 26757 - RNA, 19 nt, synthetic construct
  misc_feature 1..19: note = siRNA antisense sequence
  source 1..19: mol_type = other RNA
tgtcagctaaggaaaagca

SEQ ID NO: 26758 - RNA, 19 nt, synthetic construct
  misc_feature 1..19: note = siRNA sense sequence
  source 1..19: mol_type = other RNA
gcttttccttagctgacat

SEQ ID NO: 26759 - RNA, 19 nt, synthetic construct
  misc_feature 1..19: note = siRNA antisense sequence
  source 1..19: mol_type = other RNA
atgtcagctaaggaaaagc

SEQ ID NO: 26760 - RNA, 19 nt, synthetic construct
  misc_feature 1..19: note = siRNA sense sequence
  source 1..19: mol_type = other RNA
cttttccttagctgacatt

SEQ ID NO: 26761 - RNA, 19 nt, synthetic construct
  misc_feature 1..19: note = siRNA antisense sequence
  source 1..19: mol_type = other RNA
aatgtcagctaaggaaaag

SEQ ID NO: 26762 - RNA, 19 nt, synthetic construct
  misc_feature 1..19: note = siRNA sense sequence
  source 1..19: mol_type = other RNA
ttttccttagctgacattt

SEQ ID NO: 26763 - RNA, 19 nt, synthetic construct
  misc_feature 1..19: note = siRNA antisense sequence
  source 1..19: mol_type = other RNA
aaatgtcagctaaggaaaa

SEQ ID NO: 26764 - RNA, 19 nt, synthetic construct
  misc_feature 1..19: note = siRNA sense sequence
  source 1..19: mol_type = other RNA
ttccttagctgacatttgg

SEQ ID NO: 26765 - RNA, 19 nt, synthetic construct
  misc_feature 1..19: note = siRNA antisense sequence
  source 1..19: mol_type = other RNA
ccaaatgtcagctaaggaa

SEQ ID NO: 26766 - RNA, 19 nt, synthetic construct
  misc_feature 1..19: note = siRNA sense sequence
  source 1..19: mol_type = other RNA
tccttagctgacatttggt

SEQ ID NO: 26767 - RNA, 19 nt, synthetic construct
  misc_feature 1..19: note = siRNA antisense sequence
  source 1..19: mol_type = other RNA
accaaatgtcagctaagga

SEQ ID NO: 26768 - RNA, 19 nt, synthetic construct
  misc_feature 1..19: note = siRNA sense sequence
  source 1..19: mol_type = other RNA
ccttagctgacatttggtt

SEQ ID NO: 26769 - RNA, 19 nt, synthetic construct
  misc_feature 1..19: note = siRNA antisense sequence
  source 1..19: mol_type = other RNA
aaccaaatgtcagctaagg

SEQ ID NO: 26770 - RNA, 19 nt, synthetic construct
  misc_feature 1..19: note = siRNA sense sequence
  source 1..19: mol_type = other RNA
cttagctgacatttggttc

SEQ ID NO: 26771 - RNA, 19 nt, synthetic construct
  misc_feature 1..19: note = siRNA antisense sequence
  source 1..19: mol_type = other RNA
gaaccaaatgtcagctaag

SEQ ID NO: 26772 - RNA, 19 nt, synthetic construct
  misc_feature 1..19: note = siRNA sense sequence
  source 1..19: mol_type = other RNA
ttagctgacatttggttct

SEQ ID NO: 26773 - RNA, 19 nt, synthetic construct
  misc_feature 1..19: note = siRNA antisense sequence
  source 1..19: mol_type = other RNA
agaaccaaatgtcagctaa

SEQ ID NO: 26774 - RNA, 19 nt, synthetic construct
  misc_feature 1..19: note = siRNA sense sequence
  source 1..19: mol_type = other RNA
tagctgacatttggttcta

SEQ ID NO: 26775 - RNA, 19 nt, synthetic construct
  misc_feature 1..19: note = siRNA antisense sequence
  source 1..19: mol_type = other RNA
tagaaccaaatgtcagcta

SEQ ID NO: 26776 - RNA, 19 nt, synthetic construct
  misc_feature 1..19: note = siRNA sense sequence
  source 1..19: mol_type = other RNA
agctgacatttggttctag

SEQ ID NO: 26777 - RNA, 19 nt, synthetic construct
  misc_feature 1..19: note = siRNA antisense sequence
  source 1..19: mol_type = other RNA
ctagaaccaaatgtcagct

SEQ ID NO: 26778 - RNA, 19 nt, synthetic construct
  misc_feature 1..19: note = siRNA sense sequence
  source 1..19: mol_type = other RNA
aaaatgatgatgtacttcc

SEQ ID NO: 26779 - RNA, 19 nt, synthetic construct
  misc_feature 1..19: note = siRNA antisense sequence
  source 1..19: mol_type = other RNA
ggaagtacatcatcatttt

SEQ ID NO: 26780 - RNA, 19 nt, synthetic construct
  misc_feature 1..19: note = siRNA sense sequence
  source 1..19: mol_type = other RNA
aaatgatgatgtacttccc

SEQ ID NO: 26781 - RNA, 19 nt, synthetic construct
  misc_feature 1..19: note = siRNA antisense sequence
  source 1..19: mol_type = other RNA
gggaagtacatcatcattt

SEQ ID NO: 26782 - RNA, 19 nt, synthetic construct
  misc_feature 1..19: note = siRNA sense sequence
  source 1..19: mol_type = other RNA
cacacttgtctttagccta

SEQ ID NO: 26783 - RNA, 19 nt, synthetic construct
  misc_feature 1..19: note = siRNA antisense sequence
  source 1..19: mol_type = other RNA
taggctaaagacaagtgtg

SEQ ID NO: 26784 - RNA, 19 nt, synthetic construct
  misc_feature 1..19: note = siRNA sense sequence
  source 1..19: mol_type = other RNA
acacttgtctttagcctaa

SEQ ID NO: 26785 - RNA, 19 nt, synthetic construct
  misc_feature 1..19: note = siRNA antisense sequence
  source 1..19: mol_type = other RNA
ttaggctaaagacaagtgt

SEQ ID NO: 26786 - RNA, 19 nt, synthetic construct
  misc_feature 1..19: note = siRNA sense sequence
  source 1..19: mol_type = other RNA
ttgttttccaatccagctg

SEQ ID NO: 26787 - RNA, 19 nt, synthetic construct
  misc_feature 1..19: note = siRNA antisense sequence
  source 1..19: mol_type = other RNA
cagctggattggaaaacaa

SEQ ID NO: 26788 - RNA, 19 nt, synthetic construct
  misc_feature 1..19: note = siRNA sense sequence
  source 1..19: mol_type = other RNA
ttttccaatccagctgtca

SEQ ID NO: 26789 - RNA, 19 nt, synthetic construct
  misc_feature 1..19: note = siRNA antisense sequence
  source 1..19: mol_type = other RNA
tgacagctggattggaaaa

SEQ ID NO: 26790 - RNA, 19 nt, synthetic construct
  misc_feature 1..19: note = siRNA sense sequence
  source 1..19: mol_type = other RNA
tttccaatccagctgtcaa

SEQ ID NO: 26791 - RNA, 19 nt, synthetic construct
  misc_feature 1..19: note = siRNA antisense sequence
  source 1..19: mol_type = other RNA
ttgacagctggattggaaa

SEQ ID NO: 26792 - RNA, 19 nt, synthetic construct
  misc_feature 1..19: note = siRNA sense sequence
  source 1..19: mol_type = other RNA
ttccaatccagctgtcaaa

SEQ ID NO: 26793 - RNA, 19 nt, synthetic construct
  misc_feature 1..19: note = siRNA antisense sequence
  source 1..19: mol_type = other RNA
tttgacagctggattggaa

SEQ ID NO: 26794 - RNA, 19 nt, synthetic construct
  misc_feature 1..19: note = siRNA sense sequence
  source 1..19: mol_type = other RNA
ttcaagtatggaagaggag

SEQ ID NO: 26795 - RNA, 19 nt, synthetic construct
  misc_feature 1..19: note = siRNA antisense sequence
  source 1..19: mol_type = other RNA
ctcctcttccatacttgaa

SEQ ID NO: 26796 - RNA, 19 nt, synthetic construct
  misc_feature 1..19: note = siRNA sense sequence
  source 1..19: mol_type = other RNA
tcaagtatggaagaggagg

SEQ ID NO: 26797 - RNA, 19 nt, synthetic construct
  misc_feature 1..19: note = siRNA antisense sequence
  source 1..19: mol_type = other RNA
cctcctcttccatacttga

SEQ ID NO: 26798 - RNA, 19 nt, synthetic construct
  misc_feature 1..19: note = siRNA sense sequence
  source 1..19: mol_type = other RNA
caagtatggaagaggagga

SEQ ID NO: 26799 - RNA, 19 nt, synthetic construct
  misc_feature 1..19: note = siRNA antisense sequence
  source 1..19: mol_type = other RNA
tcctcctcttccatacttg

SEQ ID NO: 26800 - RNA, 19 nt, synthetic construct
  misc_feature 1..19: note = siRNA sense sequence
  source 1..19: mol_type = other RNA
aagtatggaagaggaggag

SEQ ID NO: 26801 - RNA, 19 nt, synthetic construct
  misc_feature 1..19: note = siRNA antisense sequence
  source 1..19: mol_type = other RNA
ctcctcctcttccatactt

SEQ ID NO: 26802 - RNA, 19 nt, synthetic construct
  misc_feature 1..19: note = siRNA sense sequence
  source 1..19: mol_type = other RNA
atcagctagcaaatatatc

SEQ ID NO: 26803 - RNA, 19 nt, synthetic construct
  misc_feature 1..19: note = siRNA antisense sequence
  source 1..19: mol_type = other RNA
gatatatttgctagctgat

SEQ ID NO: 26804 - RNA, 19 nt, synthetic construct
  misc_feature 1..19: note = siRNA sense sequence
  source 1..19: mol_type = other RNA
tcagctagcaaatatatcc

SEQ ID NO: 26805 - RNA, 19 nt, synthetic construct
  misc_feature 1..19: note = siRNA antisense sequence
  source 1..19: mol_type = other RNA
ggatatatttgctagctga

SEQ ID NO: 26806 - RNA, 19 nt, synthetic construct
  misc_feature 1..19: note = siRNA sense sequence
  source 1..19: mol_type = other RNA
ctagcaaatatatccagat

SEQ ID NO: 26807 - RNA, 19 nt, synthetic construct
  misc_feature 1..19: note = siRNA antisense sequence
  source 1..19: mol_type = other RNA
atctggatatatttgctag

SEQ ID NO: 26808 - RNA, 19 nt, synthetic construct
  misc_feature 1..19: note = siRNA sense sequence
  source 1..19: mol_type = other RNA
agatttcctgctgggcacc

SEQ ID NO: 26809 - RNA, 19 nt, synthetic construct
  misc_feature 1..19: note = siRNA antisense sequence
  source 1..19: mol_type = other RNA
ggtgcccagcaggaaatct

SEQ ID NO: 26810 - RNA, 19 nt, synthetic construct
  misc_feature 1..19: note = siRNA sense sequence
  source 1..19: mol_type = other RNA
atttcctgctgggcaccaa

SEQ ID NO: 26811 - RNA, 19 nt, synthetic construct
  misc_feature 1..19: note = siRNA antisense sequence
  source 1..19: mol_type = other RNA
ttggtgcccagcaggaaat

SEQ ID NO: 26812 - RNA, 19 nt, synthetic construct
  misc_feature 1..19: note = siRNA sense sequence
  source 1..19: mol_type = other RNA
tgctaagcagggtaggcca

SEQ ID NO: 26813 - RNA, 19 nt, synthetic construct
  misc_feature 1..19: note = siRNA antisense sequence
  source 1..19: mol_type = other RNA
tggcctaccctgcttagca

SEQ ID NO: 26814 - RNA, 19 nt, synthetic construct
  misc_feature 1..19: note = siRNA sense sequence
  source 1..19: mol_type = other RNA
gctaagcagggtaggccaa

SEQ ID NO: 26815 - RNA, 19 nt, synthetic construct
  misc_feature 1..19: note = siRNA antisense sequence
  source 1..19: mol_type = other RNA
ttggcctaccctgcttagc

SEQ ID NO: 26816 - RNA, 19 nt, synthetic construct
  misc_feature 1..19: note = siRNA sense sequence
  source 1..19: mol_type = other RNA
ctaagcagggtaggccaaa

SEQ ID NO: 26817 - RNA, 19 nt, synthetic construct
  misc_feature 1..19: note = siRNA antisense sequence
  source 1..19: mol_type = other RNA
tttggcctaccctgcttag

SEQ ID NO: 26818 - RNA, 19 nt, synthetic construct
  misc_feature 1..19: note = siRNA sense sequence
  source 1..19: mol_type = other RNA
taagcagggtaggccaaaa

SEQ ID NO: 26819 - RNA, 19 nt, synthetic construct
  misc_feature 1..19: note = siRNA antisense sequence
  source 1..19: mol_type = other RNA
ttttggcctaccctgctta

SEQ ID NO: 26820 - RNA, 19 nt, synthetic construct
  misc_feature 1..19: note = siRNA sense sequence
  source 1..19: mol_type = other RNA
atataaatttggaggtgag

SEQ ID NO: 26821 - RNA, 19 nt, synthetic construct
  misc_feature 1..19: note = siRNA antisense sequence
  source 1..19: mol_type = other RNA
ctcacctccaaatttatat

SEQ ID NO: 26822 - RNA, 19 nt, synthetic construct
  misc_feature 1..19: note = siRNA sense sequence
  source 1..19: mol_type = other RNA
tggaggtgagccaaagtta

SEQ ID NO: 26823 - RNA, 19 nt, synthetic construct
  misc_feature 1..19: note = siRNA antisense sequence
  source 1..19: mol_type = other RNA
taactttggctcacctcca

SEQ ID NO: 26824 - RNA, 19 nt, synthetic construct
  misc_feature 1..19: note = siRNA sense sequence
  source 1..19: mol_type = other RNA
ggaggtgagccaaagttaa

SEQ ID NO: 26825 - RNA, 19 nt, synthetic construct
  misc_feature 1..19: note = siRNA antisense sequence
  source 1..19: mol_type = other RNA
ttaactttggctcacctcc

SEQ ID NO: 26826 - RNA, 19 nt, synthetic construct
  misc_feature 1..19: note = siRNA sense sequence
  source 1..19: mol_type = other RNA
gaggtgagccaaagttaaa

SEQ ID NO: 26827 - RNA, 19 nt, synthetic construct
  misc_feature 1..19: note = siRNA antisense sequence
  source 1..19: mol_type = other RNA
tttaactttggctcacctc

SEQ ID NO: 26828 - RNA, 19 nt, synthetic construct
  misc_feature 1..19: note = siRNA sense sequence
  source 1..19: mol_type = other RNA
aggtgagccaaagttaaaa

SEQ ID NO: 26829 - RNA, 19 nt, synthetic construct
  misc_feature 1..19: note = siRNA antisense sequence
  source 1..19: mol_type = other RNA
ttttaactttggctcacct

SEQ ID NO: 26830 - RNA, 19 nt, synthetic construct
  misc_feature 1..19: note = siRNA sense sequence
  source 1..19: mol_type = other RNA
tagggttgctaggttttgg

SEQ ID NO: 26831 - RNA, 19 nt, synthetic construct
  misc_feature 1..19: note = siRNA antisense sequence
  source 1..19: mol_type = other RNA
ccaaaacctagcaacccta

SEQ ID NO: 26832 - RNA, 19 nt, synthetic construct
  misc_feature 1..19: note = siRNA sense sequence
  source 1..19: mol_type = other RNA
agggttgctaggttttggg

SEQ ID NO: 26833 - RNA, 19 nt, synthetic construct
  misc_feature 1..19: note = siRNA antisense sequence
  source 1..19: mol_type = other RNA
cccaaaacctagcaaccct

SEQ ID NO: 26834 - RNA, 19 nt, synthetic construct
  misc_feature 1..19: note = siRNA sense sequence
  source 1..19: mol_type = other RNA
gggttgctaggttttggga

SEQ ID NO: 26835 - RNA, 19 nt, synthetic construct
  misc_feature 1..19: note = siRNA antisense sequence
  source 1..19: mol_type = other RNA
tcccaaaacctagcaaccc

SEQ ID NO: 26836 - RNA, 19 nt, synthetic construct
  misc_feature 1..19: note = siRNA sense sequence
  source 1..19: mol_type = other RNA
tgctaggttttgggagcct

SEQ ID NO: 26837 - RNA, 19 nt, synthetic construct
  misc_feature 1..19: note = siRNA antisense sequence
  source 1..19: mol_type = other RNA
aggctcccaaaacctagca

SEQ ID NO: 26838 - RNA, 19 nt, synthetic construct
  misc_feature 1..19: note = siRNA sense sequence
  source 1..19: mol_type = other RNA
aggttttgggagcctggga

SEQ ID NO: 26839 - RNA, 19 nt, synthetic construct
  misc_feature 1..19: note = siRNA antisense sequence
  source 1..19: mol_type = other RNA
tcccaggctcccaaaacct

SEQ ID NO: 26840 - RNA, 19 nt, synthetic construct
  misc_feature 1..19: note = siRNA sense sequence
  source 1..19: mol_type = other RNA
aaaatagtgaatgggacat

SEQ ID NO: 26841 - RNA, 19 nt, synthetic construct
  misc_feature 1..19: note = siRNA antisense sequence
  source 1..19: mol_type = other RNA
atgtcccattcactatttt

SEQ ID NO: 26842 - RNA, 19 nt, synthetic construct
  misc_feature 1..19: note = siRNA sense sequence
  source 1..19: mol_type = other RNA
aaatagtgaatgggacata

SEQ ID NO: 26843 - RNA, 19 nt, synthetic construct
  misc_feature 1..19: note = siRNA antisense sequence
  source 1..19: mol_type = other RNA
tatgtcccattcactattt

SEQ ID NO: 26844 - RNA, 19 nt, synthetic construct
  misc_feature 1..19: note = siRNA sense sequence
  source 1..19: mol_type = other RNA
aatagtgaatgggacatac

SEQ ID NO: 26845 - RNA, 19 nt, synthetic construct
  misc_feature 1..19: note = siRNA antisense sequence
  source 1..19: mol_type = other RNA
gtatgtcccattcactatt

SEQ ID NO: 26846 - RNA, 19 nt, synthetic construct
  misc_feature 1..19: note = siRNA sense sequence
  source 1..19: mol_type = other RNA
atagtgaatgggacatact

SEQ ID NO: 26847 - RNA, 19 nt, synthetic construct
  misc_feature 1..19: note = siRNA antisense sequence
  source 1..19: mol_type = other RNA
agtatgtcccattcactat

SEQ ID NO: 26848 - RNA, 19 nt, synthetic construct
  misc_feature 1..19: note = siRNA sense sequence
  source 1..19: mol_type = other RNA
tagtgaatgggacatactt

SEQ ID NO: 26849 - RNA, 19 nt, synthetic construct
  misc_feature 1..19: note = siRNA antisense sequence
  source 1..19: mol_type = other RNA
aagtatgtcccattcacta

SEQ ID NO: 26850 - RNA, 19 nt, synthetic construct
  misc_feature 1..19: note = siRNA sense sequence
  source 1..19: mol_type = other RNA
agtgaatgggacatactta

SEQ ID NO: 26851 - RNA, 19 nt, synthetic construct
  misc_feature 1..19: note = siRNA antisense sequence
  source 1..19: mol_type = other RNA
taagtatgtcccattcact

SEQ ID NO: 26852 - RNA, 19 nt, synthetic construct
  misc_feature 1..19: note = siRNA sense sequence
  source 1..19: mol_type = other RNA
gtgaatgggacatacttat

SEQ ID NO: 26853 - RNA, 19 nt, synthetic construct
  misc_feature 1..19: note = siRNA antisense sequence
  source 1..19: mol_type = other RNA
ataagtatgtcccattcac

SEQ ID NO: 26854 - RNA, 19 nt, synthetic construct
  misc_feature 1..19: note = siRNA sense sequence
  source 1..19: mol_type = other RNA
atgtaactgagtatctagc

SEQ ID NO: 26855 - RNA, 19 nt, synthetic construct
  misc_feature 1..19: note = siRNA antisense sequence
  source 1..19: mol_type = other RNA
gctagatactcagttacat

SEQ ID NO: 26856 - RNA, 19 nt, synthetic construct
  misc_feature 1..19: note = siRNA sense sequence
  source 1..19: mol_type = other RNA
tgtaactgagtatctagca

SEQ ID NO: 26857 - RNA, 19 nt, synthetic construct
  misc_feature 1..19: note = siRNA antisense sequence
  source 1..19: mol_type = other RNA
tgctagatactcagttaca

SEQ ID NO: 26858 - RNA, 19 nt, synthetic construct
  misc_feature 1..19: note = siRNA sense sequence
  source 1..19: mol_type = other RNA
gtaactgagtatctagcaa

SEQ ID NO: 26859 - RNA, 19 nt, synthetic construct
  misc_feature 1..19: note = siRNA antisense sequence
  source 1..19: mol_type = other RNA
ttgctagatactcagttac

SEQ ID NO: 26860 - RNA, 19 nt, synthetic construct
  misc_feature 1..19: note = siRNA sense sequence
  source 1..19: mol_type = other RNA
taactgagtatctagcaac

SEQ ID NO: 26861 - RNA, 19 nt, synthetic construct
  misc_feature 1..19: note = siRNA antisense sequence
  source 1..19: mol_type = other RNA
gttgctagatactcagtta

SEQ ID NO: 26862 - RNA, 19 nt, synthetic construct
  misc_feature 1..19: note = siRNA sense sequence
  source 1..19: mol_type = other RNA
aactgagtatctagcaacc

SEQ ID NO: 26863 - RNA, 19 nt, synthetic construct
  misc_feature 1..19: note = siRNA antisense sequence
  source 1..19: mol_type = other RNA
ggttgctagatactcagtt

SEQ ID NO: 26864 - RNA, 19 nt, synthetic construct
  misc_feature 1..19: note = siRNA sense sequence
  source 1..19: mol_type = other RNA
actgagtatctagcaaccc

SEQ ID NO: 26865 - RNA, 19 nt, synthetic construct
  misc_feature 1..19: note = siRNA antisense sequence
  source 1..19: mol_type = other RNA
gggttgctagatactcagt

SEQ ID NO: 26866 - RNA, 19 nt, synthetic construct
  misc_feature 1..19: note = siRNA sense sequence
  source 1..19: mol_type = other RNA
tcctgatattcaactttcc

SEQ ID NO: 26867 - RNA, 19 nt, synthetic construct
  misc_feature 1..19: note = siRNA antisense sequence
  source 1..19: mol_type = other RNA
ggaaagttgaatatcagga

SEQ ID NO: 26868 - RNA, 19 nt, synthetic construct
  misc_feature 1..19: note = siRNA sense sequence
  source 1..19: mol_type = other RNA
atattcaactttcctactc

SEQ ID NO: 26869 - RNA, 19 nt, synthetic construct
  misc_feature 1..19: note = siRNA antisense sequence
  source 1..19: mol_type = other RNA
gagtaggaaagttgaatat

SEQ ID NO: 26870 - RNA, 19 nt, synthetic construct
  misc_feature 1..19: note = siRNA sense sequence
  source 1..19: mol_type = other RNA
tattcaactttcctactcc

SEQ ID NO: 26871 - RNA, 19 nt, synthetic construct
  misc_feature 1..19: note = siRNA antisense sequence
  source 1..19: mol_type = other RNA
ggagtaggaaagttgaata

SEQ ID NO: 26872 - RNA, 19 nt, synthetic construct
  misc_feature 1..19: note = siRNA sense sequence
  source 1..19: mol_type = other RNA
attcaactttcctactccc

SEQ ID NO: 26873 - RNA, 19 nt, synthetic construct
  misc_feature 1..19: note = siRNA antisense sequence
  source 1..19: mol_type = other RNA
gggagtaggaaagttgaat

SEQ ID NO: 26874 - RNA, 19 nt, synthetic construct
  misc_feature 1..19: note = siRNA sense sequence
  source 1..19: mol_type = other RNA
agatctttgcctgggtaga

SEQ ID NO: 26875 - RNA, 19 nt, synthetic construct
  misc_feature 1..19: note = siRNA antisense sequence
  source 1..19: mol_type = other RNA
tctacccaggcaaagatct

SEQ ID NO: 26876 - RNA, 19 nt, synthetic construct
  misc_feature 1..19: note = siRNA sense sequence
  source 1..19: mol_type = other RNA
tctttgcctgggtagatgt

SEQ ID NO: 26877 - RNA, 19 nt, synthetic construct
  misc_feature 1..19: note = siRNA antisense sequence
  source 1..19: mol_type = other RNA
acatctacccaggcaaaga

SEQ ID NO: 26878 - RNA, 19 nt, synthetic construct
  misc_feature 1..19: note = siRNA sense sequence
  source 1..19: mol_type = other RNA
ctttgcctgggtagatgtt

SEQ ID NO: 26879 - RNA, 19 nt, synthetic construct
  misc_feature 1..19: note = siRNA antisense sequence
  source 1..19: mol_type = other RNA
aacatctacccaggcaaag

SEQ ID NO: 26880 - RNA, 19 nt, synthetic construct
  misc_feature 1..19: note = siRNA sense sequence
  source 1..19: mol_type = other RNA
tttgcctgggtagatgttg

SEQ ID NO: 26881 - RNA, 19 nt, synthetic construct
  misc_feature 1..19: note = siRNA antisense sequence
  source 1..19: mol_type = other RNA
caacatctacccaggcaaa

SEQ ID NO: 26882 - RNA, 19 nt, synthetic construct
  misc_feature 1..19: note = siRNA sense sequence
  source 1..19: mol_type = other RNA
ttgcctgggtagatgttgg

SEQ ID NO: 26883 - RNA, 19 nt, synthetic construct
  misc_feature 1..19: note = siRNA antisense sequence
  source 1..19: mol_type = other RNA
ccaacatctacccaggcaa

SEQ ID NO: 26884 - RNA, 19 nt, synthetic construct
  misc_feature 1..19: note = siRNA sense sequence
  source 1..19: mol_type = other RNA
tgcctgggtagatgttggg

SEQ ID NO: 26885 - RNA, 19 nt, synthetic construct
  misc_feature 1..19: note = siRNA antisense sequence
  source 1..19: mol_type = other RNA
cccaacatctacccaggca

SEQ ID NO: 26886 - RNA, 19 nt, synthetic construct
  misc_feature 1..19: note = siRNA sense sequence
  source 1..19: mol_type = other RNA
gcctgggtagatgttggga

SEQ ID NO: 26887 - RNA, 19 nt, synthetic construct
  misc_feature 1..19: note = siRNA antisense sequence
  source 1..19: mol_type = other RNA
tcccaacatctacccaggc

SEQ ID NO: 26888 - RNA, 19 nt, synthetic construct
  misc_feature 1..19: note = siRNA sense sequence
  source 1..19: mol_type = other RNA
gggtagatgttgggaggag

SEQ ID NO: 26889 - RNA, 19 nt, synthetic construct
  misc_feature 1..19: note = siRNA antisense sequence
  source 1..19: mol_type = other RNA
ctcctcccaacatctaccc

SEQ ID NO: 26890 - RNA, 19 nt, synthetic construct
  misc_feature 1..19: note = siRNA sense sequence
  source 1..19: mol_type = other RNA
ggtagatgttgggaggagc

SEQ ID NO: 26891 - RNA, 19 nt, synthetic construct
  misc_feature 1..19: note = siRNA antisense sequence
  source 1..19: mol_type = other RNA
gctcctcccaacatctacc

SEQ ID NO: 26892 - RNA, 19 nt, synthetic construct
  misc_feature 1..19: note = siRNA sense sequence
  source 1..19: mol_type = other RNA
gtagatgttgggaggagcc

SEQ ID NO: 26893 - RNA, 19 nt, synthetic construct
  misc_feature 1..19: note = siRNA antisense sequence
  source 1..19: mol_type = other RNA
ggctcctcccaacatctac

SEQ ID NO: 26894 - RNA, 19 nt, synthetic construct
  misc_feature 1..19: note = siRNA sense sequence
  source 1..19: mol_type = other RNA
tagatgttgggaggagcct

SEQ ID NO: 26895 - RNA, 19 nt, synthetic construct
  misc_feature 1..19: note = siRNA antisense sequence
  source 1..19: mol_type = other RNA
aggctcctcccaacatcta

SEQ ID NO: 26896 - RNA, 19 nt, synthetic construct
  misc_feature 1..19: note = siRNA sense sequence
  source 1..19: mol_type = other RNA
tgttgggaggagcctggtg

SEQ ID NO: 26897 - RNA, 19 nt, synthetic construct
  misc_feature 1..19: note = siRNA antisense sequence
  source 1..19: mol_type = other RNA
caccaggctcctcccaaca

SEQ ID NO: 26898 - RNA, 19 nt, synthetic construct
  misc_feature 1..19: note = siRNA sense sequence
  source 1..19: mol_type = other RNA
gttgggaggagcctggtga

SEQ ID NO: 26899 - RNA, 19 nt, synthetic construct
  misc_feature 1..19: note = siRNA antisense sequence
  source 1..19: mol_type = other RNA
tcaccaggctcctcccaac

SEQ ID NO: 26900 - RNA, 19 nt, synthetic construct
  misc_feature 1..19: note = siRNA sense sequence
  source 1..19: mol_type = other RNA
ttgggaggagcctggtgaa

SEQ ID NO: 26901 - RNA, 19 nt, synthetic construct
  misc_feature 1..19: note = siRNA antisense sequence
  source 1..19: mol_type = other RNA
ttcaccaggctcctcccaa

SEQ ID NO: 26902 - RNA, 19 nt, synthetic construct
  misc_feature 1..19: note = siRNA sense sequence
  source 1..19: mol_type = other RNA
ggagcctggtgaatgtatt

SEQ ID NO: 26903 - RNA, 19 nt, synthetic construct
  misc_feature 1..19: note = siRNA antisense sequence
  source 1..19: mol_type = other RNA
aatacattcaccaggctcc

SEQ ID NO: 26904 - RNA, 19 nt, synthetic construct
  misc_feature 1..19: note = siRNA sense sequence
  source 1..19: mol_type = other RNA
gagcctggtgaatgtattc

SEQ ID NO: 26905 - RNA, 19 nt, synthetic construct
  misc_feature 1..19: note = siRNA antisense sequence
  source 1..19: mol_type = other RNA
gaatacattcaccaggctc

SEQ ID NO: 26906 - RNA, 19 nt, synthetic construct
  misc_feature 1..19: note = siRNA sense sequence
  source 1..19: mol_type = other RNA
agcctggtgaatgtattcc

SEQ ID NO: 26907 - RNA, 19 nt, synthetic construct
  misc_feature 1..19: note = siRNA antisense sequence
  source 1..19: mol_type = other RNA
ggaatacattcaccaggct

SEQ ID NO: 26908 - RNA, 19 nt, synthetic construct
  misc_feature 1..19: note = siRNA sense sequence
  source 1..19: mol_type = other RNA
gcctggtgaatgtattcct

SEQ ID NO: 26909 - RNA, 19 nt, synthetic construct
  misc_feature 1..19: note = siRNA antisense sequence
  source 1..19: mol_type = other RNA
aggaatacattcaccaggc

SEQ ID NO: 26910 - RNA, 19 nt, synthetic construct
  misc_feature 1..19: note = siRNA sense sequence
  source 1..19: mol_type = other RNA
cctggtgaatgtattcctt

SEQ ID NO: 26911 - RNA, 19 nt, synthetic construct
  misc_feature 1..19: note = siRNA antisense sequence
  source 1..19: mol_type = other RNA
aaggaatacattcaccagg

SEQ ID NO: 26912 - RNA, 19 nt, synthetic construct
  misc_feature 1..19: note = siRNA sense sequence
  source 1..19: mol_type = other RNA
ctggtgaatgtattccttc

SEQ ID NO: 26913 - RNA, 19 nt, synthetic construct
  misc_feature 1..19: note = siRNA antisense sequence
  source 1..19: mol_type = other RNA
gaaggaatacattcaccag

SEQ ID NO: 26914 - RNA, 19 nt, synthetic construct
  misc_feature 1..19: note = siRNA sense sequence
  source 1..19: mol_type = other RNA
gtgaatgtattccttccca

SEQ ID NO: 26915 - RNA, 19 nt, synthetic construct
  misc_feature 1..19: note = siRNA antisense sequence
  source 1..19: mol_type = other RNA
tgggaaggaatacattcac

SEQ ID NO: 26916 - RNA, 19 nt, synthetic construct
  misc_feature 1..19: note = siRNA sense sequence
  source 1..19: mol_type = other RNA
ccttcccaggattggtctt

SEQ ID NO: 26917 - RNA, 19 nt, synthetic construct
  misc_feature 1..19: note = siRNA antisense sequence
  source 1..19: mol_type = other RNA
aagaccaatcctgggaagg

SEQ ID NO: 26918 - RNA, 19 nt, synthetic construct
  misc_feature 1..19: note = siRNA sense sequence
  source 1..19: mol_type = other RNA
cttcccaggattggtcttg

SEQ ID NO: 26919 - RNA, 19 nt, synthetic construct
  misc_feature 1..19: note = siRNA antisense sequence
  source 1..19: mol_type = other RNA
caagaccaatcctgggaag

SEQ ID NO: 26920 - RNA, 19 nt, synthetic construct
  misc_feature 1..19: note = siRNA sense sequence
  source 1..19: mol_type = other RNA
ttcccaggattggtcttgg

SEQ ID NO: 26921 - RNA, 19 nt, synthetic construct
  misc_feature 1..19: note = siRNA antisense sequence
  source 1..19: mol_type = other RNA
ccaagaccaatcctgggaa

SEQ ID NO: 26922 - RNA, 19 nt, synthetic construct
  misc_feature 1..19: note = siRNA sense sequence
  source 1..19: mol_type = other RNA
cccaggattggtcttggct

SEQ ID NO: 26923 - RNA, 19 nt, synthetic construct
  misc_feature 1..19: note = siRNA antisense sequence
  source 1..19: mol_type = other RNA
agccaagaccaatcctggg

SEQ ID NO: 26924 - RNA, 19 nt, synthetic construct
  misc_feature 1..19: note = siRNA sense sequence
  source 1..19: mol_type = other RNA
ccaggattggtcttggctc

SEQ ID NO: 26925 - RNA, 19 nt, synthetic construct
  misc_feature 1..19: note = siRNA antisense sequence
  source 1..19: mol_type = other RNA
gagccaagaccaatcctgg

SEQ ID NO: 26926 - RNA, 19 nt, synthetic construct
  misc_feature 1..19: note = siRNA sense sequence
  source 1..19: mol_type = other RNA
caggattggtcttggctct

SEQ ID NO: 26927 - RNA, 19 nt, synthetic construct
  misc_feature 1..19: note = siRNA antisense sequence
  source 1..19: mol_type = other RNA
agagccaagaccaatcctg

SEQ ID NO: 26928 - RNA, 19 nt, synthetic construct
  misc_feature 1..19: note = siRNA sense sequence
  source 1..19: mol_type = other RNA
aggattggtcttggctcta

SEQ ID NO: 26929 - RNA, 19 nt, synthetic construct
  misc_feature 1..19: note = siRNA antisense sequence
  source 1..19: mol_type = other RNA
tagagccaagaccaatcct

SEQ ID NO: 26930 - RNA, 19 nt, synthetic construct
  misc_feature 1..19: note = siRNA sense sequence
  source 1..19: mol_type = other RNA
ggattggtcttggctctag

SEQ ID NO: 26931 - RNA, 19 nt, synthetic construct
  misc_feature 1..19: note = siRNA antisense sequence
  source 1..19: mol_type = other RNA
ctagagccaagaccaatcc

SEQ ID NO: 26932 - RNA, 19 nt, synthetic construct
  misc_feature 1..19: note = siRNA sense sequence
  source 1..19: mol_type = other RNA
gtcttggctctagttctgg

SEQ ID NO: 26933 - RNA, 19 nt, synthetic construct
  misc_feature 1..19: note = siRNA antisense sequence
  source 1..19: mol_type = other RNA
ccagaactagagccaagac

SEQ ID NO: 26934 - RNA, 19 nt, synthetic construct
  misc_feature 1..19: note = siRNA sense sequence
  source 1..19: mol_type = other RNA
tcttggctctagttctgga

SEQ ID NO: 26935 - RNA, 19 nt, synthetic construct
  misc_feature 1..19: note = siRNA antisense sequence
  source 1..19: mol_type = other RNA
tccagaactagagccaaga

SEQ ID NO: 26936 - RNA, 19 nt, synthetic construct
  misc_feature 1..19: note = siRNA sense sequence
  source 1..19: mol_type = other RNA
cttggctctagttctggag

SEQ ID NO: 26937 - RNA, 19 nt, synthetic construct
  misc_feature 1..19: note = siRNA antisense sequence
  source 1..19: mol_type = other RNA
ctccagaactagagccaag

SEQ ID NO: 26938 - RNA, 19 nt, synthetic construct
  misc_feature 1..19: note = siRNA sense sequence
  source 1..19: mol_type = other RNA
ctagttctggagcctctgt

SEQ ID NO: 26939 - RNA, 19 nt, synthetic construct
  misc_feature 1..19: note = siRNA antisense sequence
  source 1..19: mol_type = other RNA
acagaggctccagaactag

SEQ ID NO: 26940 - RNA, 19 nt, synthetic construct
  misc_feature 1..19: note = siRNA sense sequence
  source 1..19: mol_type = other RNA
tagttctggagcctctgtt

SEQ ID NO: 26941 - RNA, 19 nt, synthetic construct
  misc_feature 1..19: note = siRNA antisense sequence
  source 1..19: mol_type = other RNA
aacagaggctccagaacta

SEQ ID NO: 26942 - RNA, 19 nt, synthetic construct
  misc_feature 1..19: note = siRNA sense sequence
  source 1..19: mol_type = other RNA
agttctggagcctctgttg

SEQ ID NO: 26943 - RNA, 19 nt, synthetic construct
  misc_feature 1..19: note = siRNA antisense sequence
  source 1..19: mol_type = other RNA
caacagaggctccagaact

SEQ ID NO: 26944 - RNA, 19 nt, synthetic construct
  misc_feature 1..19: note = siRNA sense sequence
  source 1..19: mol_type = other RNA
gttctggagcctctgttgg

SEQ ID NO: 26945 - RNA, 19 nt, synthetic construct
  misc_feature 1..19: note = siRNA antisense sequence
  source 1..19: mol_type = other RNA
ccaacagaggctccagaac

SEQ ID NO: 26946 - RNA, 19 nt, synthetic construct
  misc_feature 1..19: note = siRNA sense sequence
  source 1..19: mol_type = other RNA
ttctggagcctctgttgga

SEQ ID NO: 26947 - RNA, 19 nt, synthetic construct
  misc_feature 1..19: note = siRNA antisense sequence
  source 1..19: mol_type = other RNA
tccaacagaggctccagaa

SEQ ID NO: 26948 - RNA, 19 nt, synthetic construct
  misc_feature 1..19: note = siRNA sense sequence
  source 1..19: mol_type = other RNA
tctggagcctctgttggaa

SEQ ID NO: 26949 - RNA, 19 nt, synthetic construct
  misc_feature 1..19: note = siRNA antisense sequence
  source 1..19: mol_type = other RNA
ttccaacagaggctccaga

SEQ ID NO: 26950 - RNA, 19 nt, synthetic construct
  misc_feature 1..19: note = siRNA sense sequence
  source 1..19: mol_type = other RNA
ctggagcctctgttggaag

SEQ ID NO: 26951 - RNA, 19 nt, synthetic construct
  misc_feature 1..19: note = siRNA antisense sequence
  source 1..19: mol_type = other RNA
cttccaacagaggctccag

SEQ ID NO: 26952 - RNA, 19 nt, synthetic construct
  misc_feature 1..19: note = siRNA sense sequence
  source 1..19: mol_type = other RNA
ggagcctctgttggaagaa

SEQ ID NO: 26953 - RNA, 19 nt, synthetic construct
  misc_feature 1..19: note = siRNA antisense sequence
  source 1..19: mol_type = other RNA
ttcttccaacagaggctcc

SEQ ID NO: 26954 - RNA, 19 nt, synthetic construct
  misc_feature 1..19: note = siRNA sense sequence
  source 1..19: mol_type = other RNA
gagcctctgttggaagaat

SEQ ID NO: 26955 - RNA, 19 nt, synthetic construct
  misc_feature 1..19: note = siRNA antisense sequence
  source 1..19: mol_type = other RNA
attcttccaacagaggctc

SEQ ID NO: 26956 - RNA, 19 nt, synthetic construct
  misc_feature 1..19: note = siRNA sense sequence
  source 1..19: mol_type = other RNA
gcctctgttggaagaatgg

SEQ ID NO: 26957 - RNA, 19 nt, synthetic construct
  misc_feature 1..19: note = siRNA antisense sequence
  source 1..19: mol_type = other RNA
ccattcttccaacagaggc

SEQ ID NO: 26958 - RNA, 19 nt, synthetic construct
  misc_feature 1..19: note = siRNA sense sequence
  source 1..19: mol_type = other RNA
cctctgttggaagaatgga

SEQ ID NO: 26959 - RNA, 19 nt, synthetic construct
  misc_feature 1..19: note = siRNA antisense sequence
  source 1..19: mol_type = other RNA
tccattcttccaacagagg

SEQ ID NO: 26960 - RNA, 19 nt, synthetic construct
  misc_feature 1..19: note = siRNA sense sequence
  source 1..19: mol_type = other RNA
agaagggctccattccaaa

SEQ ID NO: 26961 - RNA, 19 nt, synthetic construct
  misc_feature 1..19: note = siRNA antisense sequence
  source 1..19: mol_type = other RNA
tttggaatggagcccttct

SEQ ID NO: 26962 - RNA, 19 nt, synthetic construct
  misc_feature 1..19: note = siRNA sense sequence
  source 1..19: mol_type = other RNA
gaagggctccattccaaaa

SEQ ID NO: 26963 - RNA, 19 nt, synthetic construct
  misc_feature 1..19: note = siRNA antisense sequence
  source 1..19: mol_type = other RNA
ttttggaatggagcccttc

SEQ ID NO: 26964 - RNA, 19 nt, synthetic construct
  misc_feature 1..19: note = siRNA sense sequence
  source 1..19: mol_type = other RNA
atggaatagggatctcctt

SEQ ID NO: 26965 - RNA, 19 nt, synthetic construct
  misc_feature 1..19: note = siRNA antisense sequence
  source 1..19: mol_type = other RNA
aaggagatccctattccat

SEQ ID NO: 26966 - RNA, 19 nt, synthetic construct
  misc_feature 1..19: note = siRNA sense sequence
  source 1..19: mol_type = other RNA
tggaatagggatctccttc

SEQ ID NO: 26967 - RNA, 19 nt, synthetic construct
  misc_feature 1..19: note = siRNA antisense sequence
  source 1..19: mol_type = other RNA
gaaggagatccctattcca

SEQ ID NO: 26968 - RNA, 19 nt, synthetic construct
  misc_feature 1..19: note = siRNA sense sequence
  source 1..19: mol_type = other RNA
atctccttccctatgtttg

SEQ ID NO: 26969 - RNA, 19 nt, synthetic construct
  misc_feature 1..19: note = siRNA antisense sequence
  source 1..19: mol_type = other RNA
caaacatagggaaggagat

SEQ ID NO: 26970 - RNA, 19 nt, synthetic construct
  misc_feature 1..19: note = siRNA sense sequence
  source 1..19: mol_type = other RNA
tctccttccctatgtttgg

SEQ ID NO: 26971 - RNA, 19 nt, synthetic construct
  misc_feature 1..19: note = siRNA antisense sequence
  source 1..19: mol_type = other RNA
ccaaacatagggaaggaga

SEQ ID NO: 26972 - RNA, 19 nt, synthetic construct
  misc_feature 1..19: note = siRNA sense sequence
  source 1..19: mol_type = other RNA
acactggtctaaggctttc

SEQ ID NO: 26973 - RNA, 19 nt, synthetic construct
  misc_feature 1..19: note = siRNA antisense sequence
  source 1..19: mol_type = other RNA
gaaagccttagaccagtgt

SEQ ID NO: 26974 - RNA, 19 nt, synthetic construct
  misc_feature 1..19: note = siRNA sense sequence
  source 1..19: mol_type = other RNA
aatgaatgtctacttagca

SEQ ID NO: 26975 - RNA, 19 nt, synthetic construct
  misc_feature 1..19: note = siRNA antisense sequence
  source 1..19: mol_type = other RNA
tgctaagtagacattcatt

SEQ ID NO: 26976 - RNA, 19 nt, synthetic construct
  misc_feature 1..19: note = siRNA sense sequence
  source 1..19: mol_type = other RNA
atgaatgtctacttagcaa

SEQ ID NO: 26977 - RNA, 19 nt, synthetic construct
  misc_feature 1..19: note = siRNA antisense sequence
  source 1..19: mol_type = other RNA
ttgctaagtagacattcat

SEQ ID NO: 26978 - RNA, 19 nt, synthetic construct
  misc_feature 1..19: note = siRNA sense sequence
  source 1..19: mol_type = other RNA
tgaatgtctacttagcaat

SEQ ID NO: 26979 - RNA, 19 nt, synthetic construct
  misc_feature 1..19: note = siRNA antisense sequence
  source 1..19: mol_type = other RNA
attgctaagtagacattca

SEQ ID NO: 26980 - RNA, 19 nt, synthetic construct
  misc_feature 1..19: note = siRNA sense sequence
  source 1..19: mol_type = other RNA
gaatgtctacttagcaatc

SEQ ID NO: 26981 - RNA, 19 nt, synthetic construct
  misc_feature 1..19: note = siRNA antisense sequence
  source 1..19: mol_type = other RNA
gattgctaagtagacattc

SEQ ID NO: 26982 - RNA, 19 nt, synthetic construct
  misc_feature 1..19: note = siRNA sense sequence
  source 1..19: mol_type = other RNA
aatgtctacttagcaatca

SEQ ID NO: 26983 - RNA, 19 nt, synthetic construct
  misc_feature 1..19: note = siRNA antisense sequence
  source 1..19: mol_type = other RNA
tgattgctaagtagacatt

SEQ ID NO: 26984 - RNA, 19 nt, synthetic construct
  misc_feature 1..19: note = siRNA sense sequence
  source 1..19: mol_type = other RNA
atgtctacttagcaatcat

SEQ ID NO: 26985 - RNA, 19 nt, synthetic construct
  misc_feature 1..19: note = siRNA antisense sequence
  source 1..19: mol_type = other RNA
atgattgctaagtagacat

SEQ ID NO: 26986 - RNA, 19 nt, synthetic construct
  misc_feature 1..19: note = siRNA sense sequence
  source 1..19: mol_type = other RNA
tgtctacttagcaatcatc

SEQ ID NO: 26987 - RNA, 19 nt, synthetic construct
  misc_feature 1..19: note = siRNA antisense sequence
  source 1..19: mol_type = other RNA
gatgattgctaagtagaca

SEQ ID NO: 26988 - RNA, 19 nt, synthetic construct
  misc_feature 1..19: note = siRNA sense sequence
  source 1..19: mol_type = other RNA
gtctacttagcaatcatct

SEQ ID NO: 26989 - RNA, 19 nt, synthetic construct
  misc_feature 1..19: note = siRNA antisense sequence
  source 1..19: mol_type = other RNA
agatgattgctaagtagac

SEQ ID NO: 26990 - RNA, 19 nt, synthetic construct
  misc_feature 1..19: note = siRNA sense sequence
  source 1..19: mol_type = other RNA
tctacttagcaatcatctt

SEQ ID NO: 26991 - RNA, 19 nt, synthetic construct
  misc_feature 1..19: note = siRNA antisense sequence
  source 1..19: mol_type = other RNA
aagatgattgctaagtaga

SEQ ID NO: 26992 - RNA, 19 nt, synthetic construct
  misc_feature 1..19: note = siRNA sense sequence
  source 1..19: mol_type = other RNA
ctacttagcaatcatcttt

SEQ ID NO: 26993 - RNA, 19 nt, synthetic construct
  misc_feature 1..19: note = siRNA antisense sequence
  source 1..19: mol_type = other RNA
aaagatgattgctaagtag

SEQ ID NO: 26994 - RNA, 19 nt, synthetic construct
  misc_feature 1..19: note = siRNA sense sequence
  source 1..19: mol_type = other RNA
acttagcaatcatcttttc

SEQ ID NO: 26995 - RNA, 19 nt, synthetic construct
  misc_feature 1..19: note = siRNA antisense sequence
  source 1..19: mol_type = other RNA
gaaaagatgattgctaagt

SEQ ID NO: 26996 - RNA, 19 nt, synthetic construct
  misc_feature 1..19: note = siRNA sense sequence
  source 1..19: mol_type = other RNA
cttagcaatcatcttttcc

SEQ ID NO: 26997 - RNA, 19 nt, synthetic construct
  misc_feature 1..19: note = siRNA antisense sequence
  source 1..19: mol_type = other RNA
ggaaaagatgattgctaag

SEQ ID NO: 26998 - RNA, 19 nt, synthetic construct
  misc_feature 1..19: note = siRNA sense sequence
  source 1..19: mol_type = other RNA
ttagcaatcatcttttcca

SEQ ID NO: 26999 - RNA, 19 nt, synthetic construct
  misc_feature 1..19: note = siRNA antisense sequence
  source 1..19: mol_type = other RNA
tggaaaagatgattgctaa

SEQ ID NO: 27000 - RNA, 19 nt, synthetic construct
  misc_feature 1..19: note = siRNA sense sequence
  source 1..19: mol_type = other RNA
tagcaatcatcttttccag

SEQ ID NO: 27001 - RNA, 19 nt, synthetic construct
  misc_feature 1..19: note = siRNA antisense sequence
  source 1..19: mol_type = other RNA
ctggaaaagatgattgcta

SEQ ID NO: 27002 - RNA, 19 nt, synthetic construct
  misc_feature 1..19: note = siRNA sense sequence
  source 1..19: mol_type = other RNA
agcaatcatcttttccaga

SEQ ID NO: 27003 - RNA, 19 nt, synthetic construct
  misc_feature 1..19: note = siRNA antisense sequence
  source 1..19: mol_type = other RNA
tctggaaaagatgattgct

SEQ ID NO: 27004 - RNA, 19 nt, synthetic construct
  misc_feature 1..19: note = siRNA sense sequence
  source 1..19: mol_type = other RNA
cttttccagatgattctta

SEQ ID NO: 27005 - RNA, 19 nt, synthetic construct
  misc_feature 1..19: note = siRNA antisense sequence
  source 1..19: mol_type = other RNA
taagaatcatctggaaaag

SEQ ID NO: 27006 - RNA, 19 nt, synthetic construct
  misc_feature 1..19: note = siRNA sense sequence
  source 1..19: mol_type = other RNA
tccagatgattcttatgtc

SEQ ID NO: 27007 - RNA, 19 nt, synthetic construct
  misc_feature 1..19: note = siRNA antisense sequence
  source 1..19: mol_type = other RNA
gacataagaatcatctgga

SEQ ID NO: 27008 - RNA, 19 nt, synthetic construct
  misc_feature 1..19: note = siRNA sense sequence
  source 1..19: mol_type = other RNA
ccagatgattcttatgtct

SEQ ID NO: 27009 - RNA, 19 nt, synthetic construct
  misc_feature 1..19: note = siRNA antisense sequence
  source 1..19: mol_type = other RNA
agacataagaatcatctgg

SEQ ID NO: 27010 - RNA, 19 nt, synthetic construct
  misc_feature 1..19: note = siRNA sense sequence
  source 1..19: mol_type = other RNA
cagatgattcttatgtctt

SEQ ID NO: 27011 - RNA, 19 nt, synthetic construct
  misc_feature 1..19: note = siRNA antisense sequence
  source 1..19: mol_type = other RNA
aagacataagaatcatctg

SEQ ID NO: 27012 - RNA, 19 nt, synthetic construct
  misc_feature 1..19: note = siRNA sense sequence
  source 1..19: mol_type = other RNA
cttacagtaatagtagttg

SEQ ID NO: 27013 - RNA, 19 nt, synthetic construct
  misc_feature 1..19: note = siRNA antisense sequence
  source 1..19: mol_type = other RNA
caactactattactgtaag

SEQ ID NO: 27014 - RNA, 19 nt, synthetic construct
  misc_feature 1..19: note = siRNA sense sequence
  source 1..19: mol_type = other RNA
ttacagtaatagtagttgg

SEQ ID NO: 27015 - RNA, 19 nt, synthetic construct
  misc_feature 1..19: note = siRNA antisense sequence
  source 1..19: mol_type = other RNA
ccaactactattactgtaa

SEQ ID NO: 27016 - RNA, 19 nt, synthetic construct
  misc_feature 1..19: note = siRNA sense sequence
  source 1..19: mol_type = other RNA
tacagtaatagtagttggg

SEQ ID NO: 27017 - RNA, 19 nt, synthetic construct
  misc_feature 1..19: note = siRNA antisense sequence
  source 1..19: mol_type = other RNA
cccaactactattactgta

SEQ ID NO: 27018 - RNA, 19 nt, synthetic construct
  misc_feature 1..19: note = siRNA sense sequence
  source 1..19: mol_type = other RNA
acagtaatagtagttgggt

SEQ ID NO: 27019 - RNA, 19 nt, synthetic construct
  misc_feature 1..19: note = siRNA antisense sequence
  source 1..19: mol_type = other RNA
acccaactactattactgt

SEQ ID NO: 27020 - RNA, 19 nt, synthetic construct
  misc_feature 1..19: note = siRNA sense sequence
  source 1..19: mol_type = other RNA
cagtaatagtagttgggtt

SEQ ID NO: 27021 - RNA, 19 nt, synthetic construct
  misc_feature 1..19: note = siRNA antisense sequence
  source 1..19: mol_type = other RNA
aacccaactactattactg

SEQ ID NO: 27022 - RNA, 19 nt, synthetic construct
  misc_feature 1..19: note = siRNA sense sequence
  source 1..19: mol_type = other RNA
agtaatagtagttgggttg

SEQ ID NO: 27023 - RNA, 19 nt, synthetic construct
  misc_feature 1..19: note = siRNA antisense sequence
  source 1..19: mol_type = other RNA
caacccaactactattact

SEQ ID NO: 27024 - RNA, 19 nt, synthetic construct
  misc_feature 1..19: note = siRNA sense sequence
  source 1..19: mol_type = other RNA
gtaatagtagttgggttgt

SEQ ID NO: 27025 - RNA, 19 nt, synthetic construct
  misc_feature 1..19: note = siRNA antisense sequence
  source 1..19: mol_type = other RNA
acaacccaactactattac

SEQ ID NO: 27026 - RNA, 19 nt, synthetic construct
  misc_feature 1..19: note = siRNA sense sequence
  source 1..19: mol_type = other RNA
taatagtagttgggttgtg

SEQ ID NO: 27027 - RNA, 19 nt, synthetic construct
  misc_feature 1..19: note = siRNA antisense sequence
  source 1..19: mol_type = other RNA
cacaacccaactactatta

SEQ ID NO: 27028 - RNA, 19 nt, synthetic construct
  misc_feature 1..19: note = siRNA sense sequence
  source 1..19: mol_type = other RNA
agtagttgggttgtgatgc

SEQ ID NO: 27029 - RNA, 19 nt, synthetic construct
  misc_feature 1..19: note = siRNA antisense sequence
  source 1..19: mol_type = other RNA
gcatcacaacccaactact

SEQ ID NO: 27030 - RNA, 19 nt, synthetic construct
  misc_feature 1..19: note = siRNA sense sequence
  source 1..19: mol_type = other RNA
gtagttgggttgtgatgca

SEQ ID NO: 27031 - RNA, 19 nt, synthetic construct
  misc_feature 1..19: note = siRNA antisense sequence
  source 1..19: mol_type = other RNA
tgcatcacaacccaactac

SEQ ID NO: 27032 - RNA, 19 nt, synthetic construct
  misc_feature 1..19: note = siRNA sense sequence
  source 1..19: mol_type = other RNA
tagttgggttgtgatgcaa

SEQ ID NO: 27033 - RNA, 19 nt, synthetic construct
  misc_feature 1..19: note = siRNA antisense sequence
  source 1..19: mol_type = other RNA
ttgcatcacaacccaacta

SEQ ID NO: 27034 - RNA, 19 nt, synthetic construct
  misc_feature 1..19: note = siRNA sense sequence
  source 1..19: mol_type = other RNA
tgggttgtgatgcaatttg

SEQ ID NO: 27035 - RNA, 19 nt, synthetic construct
  misc_feature 1..19: note = siRNA antisense sequence
  source 1..19: mol_type = other RNA
caaattgcatcacaaccca

SEQ ID NO: 27036 - RNA, 19 nt, synthetic construct
  misc_feature 1..19: note = siRNA sense sequence
  source 1..19: mol_type = other RNA
gggttgtgatgcaatttga

SEQ ID NO: 27037 - RNA, 19 nt, synthetic construct
  misc_feature 1..19: note = siRNA antisense sequence
  source 1..19: mol_type = other RNA
tcaaattgcatcacaaccc

SEQ ID NO: 27038 - RNA, 19 nt, synthetic construct
  misc_feature 1..19: note = siRNA sense sequence
  source 1..19: mol_type = other RNA
ggttgtgatgcaatttgat

SEQ ID NO: 27039 - RNA, 19 nt, synthetic construct
  misc_feature 1..19: note = siRNA antisense sequence
  source 1..19: mol_type = other RNA
atcaaattgcatcacaacc

SEQ ID NO: 27040 - RNA, 19 nt, synthetic construct
  misc_feature 1..19: note = siRNA sense sequence
  source 1..19: mol_type = other RNA
gttgtgatgcaatttgata

SEQ ID NO: 27041 - RNA, 19 nt, synthetic construct
  misc_feature 1..19: note = siRNA antisense sequence
  source 1..19: mol_type = other RNA
tatcaaattgcatcacaac

SEQ ID NO: 27042 - RNA, 19 nt, synthetic construct
  misc_feature 1..19: note = siRNA sense sequence
  source 1..19: mol_type = other RNA
gtgatgcaatttgataatg

SEQ ID NO: 27043 - RNA, 19 nt, synthetic construct
  misc_feature 1..19: note = siRNA antisense sequence
  source 1..19: mol_type = other RNA
cattatcaaattgcatcac

SEQ ID NO: 27044 - RNA, 19 nt, synthetic construct
  misc_feature 1..19: note = siRNA sense sequence
  source 1..19: mol_type = other RNA
agacagtagtaagtagtgg

SEQ ID NO: 27045 - RNA, 19 nt, synthetic construct
  misc_feature 1..19: note = siRNA antisense sequence
  source 1..19: mol_type = other RNA
ccactacttactactgtct

SEQ ID NO: 27046 - RNA, 19 nt, synthetic construct
  misc_feature 1..19: note = siRNA sense sequence
  source 1..19: mol_type = other RNA
agtagtaagtagtggctaa

SEQ ID NO: 27047 - RNA, 19 nt, synthetic construct
  misc_feature 1..19: note = siRNA antisense sequence
  source 1..19: mol_type = other RNA
ttagccactacttactact

SEQ ID NO: 27048 - RNA, 19 nt, synthetic construct
  misc_feature 1..19: note = siRNA sense sequence
  source 1..19: mol_type = other RNA
gtagtaagtagtggctaag

SEQ ID NO: 27049 - RNA, 19 nt, synthetic construct
  misc_feature 1..19: note = siRNA antisense sequence
  source 1..19: mol_type = other RNA
cttagccactacttactac

SEQ ID NO: 27050 - RNA, 19 nt, synthetic construct
  misc_feature 1..19: note = siRNA sense sequence
  source 1..19: mol_type = other RNA
tagtaagtagtggctaagg

SEQ ID NO: 27051 - RNA, 19 nt, synthetic construct
  misc_feature 1..19: note = siRNA antisense sequence
  source 1..19: mol_type = other RNA
ccttagccactacttacta

SEQ ID NO: 27052 - RNA, 19 nt, synthetic construct
  misc_feature 1..19: note = siRNA sense sequence
  source 1..19: mol_type = other RNA
agtaagtagtggctaaggg

SEQ ID NO: 27053 - RNA, 19 nt, synthetic construct
  misc_feature 1..19: note = siRNA antisense sequence
  source 1..19: mol_type = other RNA
cccttagccactacttact

SEQ ID NO: 27054 - RNA, 19 nt, synthetic construct
  misc_feature 1..19: note = siRNA sense sequence
  source 1..19: mol_type = other RNA
aaaggctgtggaattacac

SEQ ID NO: 27055 - RNA, 19 nt, synthetic construct
  misc_feature 1..19: note = siRNA antisense sequence
  source 1..19: mol_type = other RNA
gtgtaattccacagccttt

SEQ ID NO: 27056 - RNA, 19 nt, synthetic construct
  misc_feature 1..19: note = siRNA sense sequence
  source 1..19: mol_type = other RNA
aaggctgtggaattacacc

SEQ ID NO: 27057 - RNA, 19 nt, synthetic construct
  misc_feature 1..19: note = siRNA antisense sequence
  source 1..19: mol_type = other RNA
ggtgtaattccacagcctt

SEQ ID NO: 27058 - RNA, 19 nt, synthetic construct
  misc_feature 1..19: note = siRNA sense sequence
  source 1..19: mol_type = other RNA
aggctgtggaattacacca

SEQ ID NO: 27059 - RNA, 19 nt, synthetic construct
  misc_feature 1..19: note = siRNA antisense sequence
  source 1..19: mol_type = other RNA
tggtgtaattccacagcct

SEQ ID NO: 27060 - RNA, 19 nt, synthetic construct
  misc_feature 1..19: note = siRNA sense sequence
  source 1..19: mol_type = other RNA
acaccacctgagtctaata

SEQ ID NO: 27061 - RNA, 19 nt, synthetic construct
  misc_feature 1..19: note = siRNA antisense sequence
  source 1..19: mol_type = other RNA
tattagactcaggtggtgt

SEQ ID NO: 27062 - RNA, 19 nt, synthetic construct
  misc_feature 1..19: note = siRNA sense sequence
  source 1..19: mol_type = other RNA
caccacctgagtctaatat

SEQ ID NO: 27063 - RNA, 19 nt, synthetic construct
  misc_feature 1..19: note = siRNA antisense sequence
  source 1..19: mol_type = other RNA
atattagactcaggtggtg

SEQ ID NO: 27064 - RNA, 19 nt, synthetic construct
  misc_feature 1..19: note = siRNA sense sequence
  source 1..19: mol_type = other RNA
accacctgagtctaatatc

SEQ ID NO: 27065 - RNA, 19 nt, synthetic construct
  misc_feature 1..19: note = siRNA antisense sequence
  source 1..19: mol_type = other RNA
gatattagactcaggtggt

SEQ ID NO: 27066 - RNA, 19 nt, synthetic construct
  misc_feature 1..19: note = siRNA sense sequence
  source 1..19: mol_type = other RNA
ccacctgagtctaatatct

SEQ ID NO: 27067 - RNA, 19 nt, synthetic construct
  misc_feature 1..19: note = siRNA antisense sequence
  source 1..19: mol_type = other RNA
agatattagactcaggtgg

SEQ ID NO: 27068 - RNA, 19 nt, synthetic construct
  misc_feature 1..19: note = siRNA sense sequence
  source 1..19: mol_type = other RNA
cacctgagtctaatatcta

SEQ ID NO: 27069 - RNA, 19 nt, synthetic construct
  misc_feature 1..19: note = siRNA antisense sequence
  source 1..19: mol_type = other RNA
tagatattagactcaggtg

SEQ ID NO: 27070 - RNA, 19 nt, synthetic construct
  misc_feature 1..19: note = siRNA sense sequence
  source 1..19: mol_type = other RNA
acctgagtctaatatctaa

SEQ ID NO: 27071 - RNA, 19 nt, synthetic construct
  misc_feature 1..19: note = siRNA antisense sequence
  source 1..19: mol_type = other RNA
ttagatattagactcaggt

SEQ ID NO: 27072 - RNA, 19 nt, synthetic construct
  misc_feature 1..19: note = siRNA sense sequence
  source 1..19: mol_type = other RNA
cctgagtctaatatctaac

SEQ ID NO: 27073 - RNA, 19 nt, synthetic construct
  misc_feature 1..19: note = siRNA antisense sequence
  source 1..19: mol_type = other RNA
gttagatattagactcagg

SEQ ID NO: 27074 - RNA, 19 nt, synthetic construct
  misc_feature 1..19: note = siRNA sense sequence
  source 1..19: mol_type = other RNA
acactgattattgaggtga

SEQ ID NO: 27075 - RNA, 19 nt, synthetic construct
  misc_feature 1..19: note = siRNA antisense sequence
  source 1..19: mol_type = other RNA
tcacctcaataatcagtgt

SEQ ID NO: 27076 - RNA, 19 nt, synthetic construct
  misc_feature 1..19: note = siRNA sense sequence
  source 1..19: mol_type = other RNA
cactgattattgaggtgac

SEQ ID NO: 27077 - RNA, 19 nt, synthetic construct
  misc_feature 1..19: note = siRNA antisense sequence
  source 1..19: mol_type = other RNA
gtcacctcaataatcagtg

SEQ ID NO: 27078 - RNA, 19 nt, synthetic construct
  misc_feature 1..19: note = siRNA sense sequence
  source 1..19: mol_type = other RNA
actgattattgaggtgact

SEQ ID NO: 27079 - RNA, 19 nt, synthetic construct
  misc_feature 1..19: note = siRNA antisense sequence
  source 1..19: mol_type = other RNA
agtcacctcaataatcagt

SEQ ID NO: 27080 - RNA, 19 nt, synthetic construct
  misc_feature 1..19: note = siRNA sense sequence
  source 1..19: mol_type = other RNA
ctgattattgaggtgactt

SEQ ID NO: 27081 - RNA, 19 nt, synthetic construct
  misc_feature 1..19: note = siRNA antisense sequence
  source 1..19: mol_type = other RNA
aagtcacctcaataatcag

SEQ ID NO: 27082 - RNA, 19 nt, synthetic construct
  misc_feature 1..19: note = siRNA sense sequence
  source 1..19: mol_type = other RNA
tgattattgaggtgactta

SEQ ID NO: 27083 - RNA, 19 nt, synthetic construct
  misc_feature 1..19: note = siRNA antisense sequence
  source 1..19: mol_type = other RNA
taagtcacctcaataatca

SEQ ID NO: 27084 - RNA, 19 nt, synthetic construct
  misc_feature 1..19: note = siRNA sense sequence
  source 1..19: mol_type = other RNA
gattattgaggtgacttac

SEQ ID NO: 27085 - RNA, 19 nt, synthetic construct
  misc_feature 1..19: note = siRNA antisense sequence
  source 1..19: mol_type = other RNA
gtaagtcacctcaataatc

SEQ ID NO: 27086 - RNA, 19 nt, synthetic construct
  misc_feature 1..19: note = siRNA sense sequence
  source 1..19: mol_type = other RNA
attattgaggtgacttact

SEQ ID NO: 27087 - RNA, 19 nt, synthetic construct
  misc_feature 1..19: note = siRNA antisense sequence
  source 1..19: mol_type = other RNA
agtaagtcacctcaataat

SEQ ID NO: 27088 - RNA, 19 nt, synthetic construct
  misc_feature 1..19: note = siRNA sense sequence
  source 1..19: mol_type = other RNA
ttgaggtgacttactgaag

SEQ ID NO: 27089 - RNA, 19 nt, synthetic construct
  misc_feature 1..19: note = siRNA antisense sequence
  source 1..19: mol_type = other RNA
cttcagtaagtcacctcaa

SEQ ID NO: 27090 - RNA, 19 nt, synthetic construct
  misc_feature 1..19: note = siRNA sense sequence
  source 1..19: mol_type = other RNA
gaagtttcctcacctgcaa

SEQ ID NO: 27091 - RNA, 19 nt, synthetic construct
  misc_feature 1..19: note = siRNA antisense sequence
  source 1..19: mol_type = other RNA
ttgcaggtgaggaaacttc

SEQ ID NO: 27092 - RNA, 19 nt, synthetic construct
  misc_feature 1..19: note = siRNA sense sequence
  source 1..19: mol_type = other RNA
ttttataatgcctggtcca

SEQ ID NO: 27093 - RNA, 19 nt, synthetic construct
  misc_feature 1..19: note = siRNA antisense sequence
  source 1..19: mol_type = other RNA
tggaccaggcattataaaa

SEQ ID NO: 27094 - RNA, 19 nt, synthetic construct
  misc_feature 1..19: note = siRNA sense sequence
  source 1..19: mol_type = other RNA
gcctggtccagagtaatgc

SEQ ID NO: 27095 - RNA, 19 nt, synthetic construct
  misc_feature 1..19: note = siRNA antisense sequence
  source 1..19: mol_type = other RNA
gcattactctggaccaggc

SEQ ID NO: 27096 - RNA, 19 nt, synthetic construct
  misc_feature 1..19: note = siRNA sense sequence
  source 1..19: mol_type = other RNA
cctggtccagagtaatgct

SEQ ID NO: 27097 - RNA, 19 nt, synthetic construct
  misc_feature 1..19: note = siRNA antisense sequence
  source 1..19: mol_type = other RNA
agcattactctggaccagg

SEQ ID NO: 27098 - RNA, 19 nt, synthetic construct
  misc_feature 1..19: note = siRNA sense sequence
  source 1..19: mol_type = other RNA
ctggtccagagtaatgctc

SEQ ID NO: 27099 - RNA, 19 nt, synthetic construct
  misc_feature 1..19: note = siRNA antisense sequence
  source 1..19: mol_type = other RNA
gagcattactctggaccag

SEQ ID NO: 27100 - RNA, 19 nt, synthetic construct
  misc_feature 1..19: note = siRNA sense sequence
  source 1..19: mol_type = other RNA
tggtccagagtaatgctcc

SEQ ID NO: 27101 - RNA, 19 nt, synthetic construct
  misc_feature 1..19: note = siRNA antisense sequence
  source 1..19: mol_type = other RNA
ggagcattactctggacca

SEQ ID NO: 27102 - RNA, 19 nt, synthetic construct
  misc_feature 1..19: note = siRNA sense sequence
  source 1..19: mol_type = other RNA
ggtccagagtaatgctcca

SEQ ID NO: 27103 - RNA, 19 nt, synthetic construct
  misc_feature 1..19: note = siRNA antisense sequence
  source 1..19: mol_type = other RNA
tggagcattactctggacc

SEQ ID NO: 27104 - RNA, 19 nt, synthetic construct
  misc_feature 1..19: note = siRNA sense sequence
  source 1..19: mol_type = other RNA
gtccagagtaatgctccaa

SEQ ID NO: 27105 - RNA, 19 nt, synthetic construct
  misc_feature 1..19: note = siRNA antisense sequence
  source 1..19: mol_type = other RNA
ttggagcattactctggac

SEQ ID NO: 27106 - RNA, 19 nt, synthetic construct
  misc_feature 1..19: note = siRNA sense sequence
  source 1..19: mol_type = other RNA
tccagagtaatgctccaaa

SEQ ID NO: 27107 - RNA, 19 nt, synthetic construct
  misc_feature 1..19: note = siRNA antisense sequence
  source 1..19: mol_type = other RNA
tttggagcattactctgga

SEQ ID NO: 27108 - RNA, 19 nt, synthetic construct
  misc_feature 1..19: note = siRNA sense sequence
  source 1..19: mol_type = other RNA
tgggacttaatatatatcc

SEQ ID NO: 27109 - RNA, 19 nt, synthetic construct
  misc_feature 1..19: note = siRNA antisense sequence
  source 1..19: mol_type = other RNA
ggatatatattaagtccca

SEQ ID NO: 27110 - RNA, 19 nt, synthetic construct
  misc_feature 1..19: note = siRNA sense sequence
  source 1..19: mol_type = other RNA
atatatccatgcacatcga

SEQ ID NO: 27111 - RNA, 19 nt, synthetic construct
  misc_feature 1..19: note = siRNA antisense sequence
  source 1..19: mol_type = other RNA
tcgatgtgcatggatatat

SEQ ID NO: 27112 - RNA, 19 nt, synthetic construct
  misc_feature 1..19: note = siRNA sense sequence
  source 1..19: mol_type = other RNA
tatatccatgcacatcgag

SEQ ID NO: 27113 - RNA, 19 nt, synthetic construct
  misc_feature 1..19: note = siRNA antisense sequence
  source 1..19: mol_type = other RNA
ctcgatgtgcatggatata

SEQ ID NO: 27114 - RNA, 19 nt, synthetic construct
  misc_feature 1..19: note = siRNA sense sequence
  source 1..19: mol_type = other RNA
atatccatgcacatcgagc

SEQ ID NO: 27115 - RNA, 19 nt, synthetic construct
  misc_feature 1..19: note = siRNA antisense sequence
  source 1..19: mol_type = other RNA
gctcgatgtgcatggatat

SEQ ID NO: 27116 - RNA, 19 nt, synthetic construct
  misc_feature 1..19: note = siRNA sense sequence
  source 1..19: mol_type = other RNA
tatccatgcacatcgagca

SEQ ID NO: 27117 - RNA, 19 nt, synthetic construct
  misc_feature 1..19: note = siRNA antisense sequence
  source 1..19: mol_type = other RNA
tgctcgatgtgcatggata

SEQ ID NO: 27118 - RNA, 19 nt, synthetic construct
  misc_feature 1..19: note = siRNA sense sequence
  source 1..19: mol_type = other RNA
tgcacatcgagcatatttt

SEQ ID NO: 27119 - RNA, 19 nt, synthetic construct
  misc_feature 1..19: note = siRNA antisense sequence
  source 1..19: mol_type = other RNA
aaaatatgctcgatgtgca

SEQ ID NO: 27120 - RNA, 19 nt, synthetic construct
  misc_feature 1..19: note = siRNA sense sequence
  source 1..19: mol_type = other RNA
gcacatcgagcatatttta

SEQ ID NO: 27121 - RNA, 19 nt, synthetic construct
  misc_feature 1..19: note = siRNA antisense sequence
  source 1..19: mol_type = other RNA
taaaatatgctcgatgtgc

SEQ ID NO: 27122 - RNA, 19 nt, synthetic construct
  misc_feature 1..19: note = siRNA sense sequence
  source 1..19: mol_type = other RNA
cacatcgagcatattttaa

SEQ ID NO: 27123 - RNA, 19 nt, synthetic construct
  misc_feature 1..19: note = siRNA antisense sequence
  source 1..19: mol_type = other RNA
ttaaaatatgctcgatgtg

SEQ ID NO: 27124 - RNA, 19 nt, synthetic construct
  misc_feature 1..19: note = siRNA sense sequence
  source 1..19: mol_type = other RNA
tgttagccactcacagtca

SEQ ID NO: 27125 - RNA, 19 nt, synthetic construct
  misc_feature 1..19: note = siRNA antisense sequence
  source 1..19: mol_type = other RNA
tgactgtgagtggctaaca

SEQ ID NO: 27126 - RNA, 19 nt, synthetic construct
  misc_feature 1..19: note = siRNA sense sequence
  source 1..19: mol_type = other RNA
gccactcacagtcacaggt

SEQ ID NO: 27127 - RNA, 19 nt, synthetic construct
  misc_feature 1..19: note = siRNA antisense sequence
  source 1..19: mol_type = other RNA
acctgtgactgtgagtggc

SEQ ID NO: 27128 - RNA, 19 nt, synthetic construct
  misc_feature 1..19: note = siRNA sense sequence
  source 1..19: mol_type = other RNA
tcacagtcacaggtttaaa

SEQ ID NO: 27129 - RNA, 19 nt, synthetic construct
  misc_feature 1..19: note = siRNA antisense sequence
  source 1..19: mol_type = other RNA
tttaaacctgtgactgtga

SEQ ID NO: 27130 - RNA, 19 nt, synthetic construct
  misc_feature 1..19: note = siRNA sense sequence
  source 1..19: mol_type = other RNA
ccgtgaagttagtgtttat

SEQ ID NO: 27131 - RNA, 19 nt, synthetic construct
  misc_feature 1..19: note = siRNA antisense sequence
  source 1..19: mol_type = other RNA
ataaacactaacttcacgg

SEQ ID NO: 27132 - RNA, 19 nt, synthetic construct
  misc_feature 1..19: note = siRNA sense sequence
  source 1..19: mol_type = other RNA
aattgttcccagccatggc

SEQ ID NO: 27133 - RNA, 19 nt, synthetic construct
  misc_feature 1..19: note = siRNA antisense sequence
  source 1..19: mol_type = other RNA
gccatggctgggaacaatt

SEQ ID NO: 27134 - RNA, 19 nt, synthetic construct
  misc_feature 1..19: note = siRNA sense sequence
  source 1..19: mol_type = other RNA
attgttcccagccatggca

SEQ ID NO: 27135 - RNA, 19 nt, synthetic construct
  misc_feature 1..19: note = siRNA antisense sequence
  source 1..19: mol_type = other RNA
tgccatggctgggaacaat

SEQ ID NO: 27136 - RNA, 19 nt, synthetic construct
  misc_feature 1..19: note = siRNA sense sequence
  source 1..19: mol_type = other RNA
ttgttcccagccatggcat

SEQ ID NO: 27137 - RNA, 19 nt, synthetic construct
  misc_feature 1..19: note = siRNA antisense sequence
  source 1..19: mol_type = other RNA
atgccatggctgggaacaa

SEQ ID NO: 27138 - RNA, 19 nt, synthetic construct
  misc_feature 1..19: note = siRNA sense sequence
  source 1..19: mol_type = other RNA
tgttcccagccatggcatg

SEQ ID NO: 27139 - RNA, 19 nt, synthetic construct
  misc_feature 1..19: note = siRNA antisense sequence
  source 1..19: mol_type = other RNA
catgccatggctgggaaca

SEQ ID NO: 27140 - RNA, 19 nt, synthetic construct
  misc_feature 1..19: note = siRNA sense sequence
  source 1..19: mol_type = other RNA
gttcccagccatggcatga

SEQ ID NO: 27141 - RNA, 19 nt, synthetic construct
  misc_feature 1..19: note = siRNA antisense sequence
  source 1..19: mol_type = other RNA
tcatgccatggctgggaac

SEQ ID NO: 27142 - RNA, 19 nt, synthetic construct
  misc_feature 1..19: note = siRNA sense sequence
  source 1..19: mol_type = other RNA
ttcccagccatggcatgaa

SEQ ID NO: 27143 - RNA, 19 nt, synthetic construct
  misc_feature 1..19: note = siRNA antisense sequence
  source 1..19: mol_type = other RNA
ttcatgccatggctgggaa

SEQ ID NO: 27144 - RNA, 19 nt, synthetic construct
  misc_feature 1..19: note = siRNA sense sequence
  source 1..19: mol_type = other RNA
tcccagccatggcatgaag

SEQ ID NO: 27145 - RNA, 19 nt, synthetic construct
  misc_feature 1..19: note = siRNA antisense sequence
  source 1..19: mol_type = other RNA
cttcatgccatggctggga

SEQ ID NO: 27146 - RNA, 19 nt, synthetic construct
  misc_feature 1..19: note = siRNA sense sequence
  source 1..19: mol_type = other RNA
cccagccatggcatgaagt

SEQ ID NO: 27147 - RNA, 19 nt, synthetic construct
  misc_feature 1..19: note = siRNA antisense sequence
  source 1..19: mol_type = other RNA
acttcatgccatggctggg

SEQ ID NO: 27148 - RNA, 19 nt, synthetic construct
  misc_feature 1..19: note = siRNA sense sequence
  source 1..19: mol_type = other RNA
ccagccatggcatgaagtc

SEQ ID NO: 27149 - RNA, 19 nt, synthetic construct
  misc_feature 1..19: note = siRNA antisense sequence
  source 1..19: mol_type = other RNA
gacttcatgccatggctgg

SEQ ID NO: 27150 - RNA, 19 nt, synthetic construct
  misc_feature 1..19: note = siRNA sense sequence
  source 1..19: mol_type = other RNA
cagccatggcatgaagtct

SEQ ID NO: 27151 - RNA, 19 nt, synthetic construct
  misc_feature 1..19: note = siRNA antisense sequence
  source 1..19: mol_type = other RNA
agacttcatgccatggctg

SEQ ID NO: 27152 - RNA, 19 nt, synthetic construct
  misc_feature 1..19: note = siRNA sense sequence
  source 1..19: mol_type = other RNA
agccatggcatgaagtctt

SEQ ID NO: 27153 - RNA, 19 nt, synthetic construct
  misc_feature 1..19: note = siRNA antisense sequence
  source 1..19: mol_type = other RNA
aagacttcatgccatggct

SEQ ID NO: 27154 - RNA, 19 nt, synthetic construct
  misc_feature 1..19: note = siRNA sense sequence
  source 1..19: mol_type = other RNA
gccatggcatgaagtcttc

SEQ ID NO: 27155 - RNA, 19 nt, synthetic construct
  misc_feature 1..19: note = siRNA antisense sequence
  source 1..19: mol_type = other RNA
gaagacttcatgccatggc

SEQ ID NO: 27156 - RNA, 19 nt, synthetic construct
  misc_feature 1..19: note = siRNA sense sequence
  source 1..19: mol_type = other RNA
tttcattcttagggaggga

SEQ ID NO: 27157 - RNA, 19 nt, synthetic construct
  misc_feature 1..19: note = siRNA antisense sequence
  source 1..19: mol_type = other RNA
tccctccctaagaatgaaa

SEQ ID NO: 27158 - RNA, 19 nt, synthetic construct
  misc_feature 1..19: note = siRNA sense sequence
  source 1..19: mol_type = other RNA
attcttagggagggatagg

SEQ ID NO: 27159 - RNA, 19 nt, synthetic construct
  misc_feature 1..19: note = siRNA antisense sequence
  source 1..19: mol_type = other RNA
cctatccctccctaagaat

SEQ ID NO: 27160 - RNA, 19 nt, synthetic construct
  misc_feature 1..19: note = siRNA sense sequence
  source 1..19: mol_type = other RNA
ttcttagggagggataggg

SEQ ID NO: 27161 - RNA, 19 nt, synthetic construct
  misc_feature 1..19: note = siRNA antisense sequence
  source 1..19: mol_type = other RNA
ccctatccctccctaagaa

SEQ ID NO: 27162 - RNA, 19 nt, synthetic construct
  misc_feature 1..19: note = siRNA sense sequence
  source 1..19: mol_type = other RNA
tcttagggagggataggga

SEQ ID NO: 27163 - RNA, 19 nt, synthetic construct
  misc_feature 1..19: note = siRNA antisense sequence
  source 1..19: mol_type = other RNA
tccctatccctccctaaga

SEQ ID NO: 27164 - RNA, 19 nt, synthetic construct
  misc_feature 1..19: note = siRNA sense sequence
  source 1..19: mol_type = other RNA
agggagggatagggaggct

SEQ ID NO: 27165 - RNA, 19 nt, synthetic construct
  misc_feature 1..19: note = siRNA antisense sequence
  source 1..19: mol_type = other RNA
agcctccctatccctccct

SEQ ID NO: 27166 - RNA, 19 nt, synthetic construct
  misc_feature 1..19: note = siRNA sense sequence
  source 1..19: mol_type = other RNA
gggctactgaatggacatt

SEQ ID NO: 27167 - RNA, 19 nt, synthetic construct
  misc_feature 1..19: note = siRNA antisense sequence
  source 1..19: mol_type = other RNA
aatgtccattcagtagccc

SEQ ID NO: 27168 - RNA, 19 nt, synthetic construct
  misc_feature 1..19: note = siRNA sense sequence
  source 1..19: mol_type = other RNA
ggctactgaatggacattt

SEQ ID NO: 27169 - RNA, 19 nt, synthetic construct
  misc_feature 1..19: note = siRNA antisense sequence
  source 1..19: mol_type = other RNA
aaatgtccattcagtagcc

SEQ ID NO: 27170 - RNA, 19 nt, synthetic construct
  misc_feature 1..19: note = siRNA sense sequence
  source 1..19: mol_type = other RNA
gctactgaatggacatttt

SEQ ID NO: 27171 - RNA, 19 nt, synthetic construct
  misc_feature 1..19: note = siRNA antisense sequence
  source 1..19: mol_type = other RNA
aaaatgtccattcagtagc

SEQ ID NO: 27172 - RNA, 19 nt, synthetic construct
  misc_feature 1..19: note = siRNA sense sequence
  source 1..19: mol_type = other RNA
ctactgaatggacattttg

SEQ ID NO: 27173 - RNA, 19 nt, synthetic construct
  misc_feature 1..19: note = siRNA antisense sequence
  source 1..19: mol_type = other RNA
caaaatgtccattcagtag

SEQ ID NO: 27174 - RNA, 19 nt, synthetic construct
  misc_feature 1..19: note = siRNA sense sequence
  source 1..19: mol_type = other RNA
tactgaatggacattttgt

SEQ ID NO: 27175 - RNA, 19 nt, synthetic construct
  misc_feature 1..19: note = siRNA antisense sequence
  source 1..19: mol_type = other RNA
acaaaatgtccattcagta

SEQ ID NO: 27176 - RNA, 19 nt, synthetic construct
  misc_feature 1..19: note = siRNA sense sequence
  source 1..19: mol_type = other RNA
gaatggacattttgttagt

SEQ ID NO: 27177 - RNA, 19 nt, synthetic construct
  misc_feature 1..19: note = siRNA antisense sequence
  source 1..19: mol_type = other RNA
actaacaaaatgtccattc

SEQ ID NO: 27178 - RNA, 19 nt, synthetic construct
  misc_feature 1..19: note = siRNA sense sequence
  source 1..19: mol_type = other RNA
ggacattttgttagttaag

SEQ ID NO: 27179 - RNA, 19 nt, synthetic construct
  misc_feature 1..19: note = siRNA antisense sequence
  source 1..19: mol_type = other RNA
cttaactaacaaaatgtcc

SEQ ID NO: 27180 - RNA, 19 nt, synthetic construct
  misc_feature 1..19: note = siRNA sense sequence
  source 1..19: mol_type = other RNA
cattttgttagttaagagc

SEQ ID NO: 27181 - RNA, 19 nt, synthetic construct
  misc_feature 1..19: note = siRNA antisense sequence
  source 1..19: mol_type = other RNA
gctcttaactaacaaaatg

SEQ ID NO: 27182 - RNA, 19 nt, synthetic construct
  misc_feature 1..19: note = siRNA sense sequence
  source 1..19: mol_type = other RNA
ttttgttagttaagagctc

SEQ ID NO: 27183 - RNA, 19 nt, synthetic construct
  misc_feature 1..19: note = siRNA antisense sequence
  source 1..19: mol_type = other RNA
gagctcttaactaacaaaa

SEQ ID NO: 27184 - RNA, 19 nt, synthetic construct
  misc_feature 1..19: note = siRNA sense sequence
  source 1..19: mol_type = other RNA
tttgttagttaagagctca

SEQ ID NO: 27185 - RNA, 19 nt, synthetic construct
  misc_feature 1..19: note = siRNA antisense sequence
  source 1..19: mol_type = other RNA
tgagctcttaactaacaaa

SEQ ID NO: 27186 - RNA, 19 nt, synthetic construct
  misc_feature 1..19: note = siRNA sense sequence
  source 1..19: mol_type = other RNA
ttgttagttaagagctcac

SEQ ID NO: 27187 - RNA, 19 nt, synthetic construct
  misc_feature 1..19: note = siRNA antisense sequence
  source 1..19: mol_type = other RNA
gtgagctcttaactaacaa

SEQ ID NO: 27188 - RNA, 19 nt, synthetic construct
  misc_feature 1..19: note = siRNA sense sequence
  source 1..19: mol_type = other RNA
tgttagttaagagctcact

SEQ ID NO: 27189 - RNA, 19 nt, synthetic construct
  misc_feature 1..19: note = siRNA antisense sequence
  source 1..19: mol_type = other RNA
agtgagctcttaactaaca

SEQ ID NO: 27190 - RNA, 19 nt, synthetic construct
  misc_feature 1..19: note = siRNA sense sequence
  source 1..19: mol_type = other RNA
gttagttaagagctcactc

SEQ ID NO: 27191 - RNA, 19 nt, synthetic construct
  misc_feature 1..19: note = siRNA antisense sequence
  source 1..19: mol_type = other RNA
gagtgagctcttaactaac

SEQ ID NO: 27192 - RNA, 19 nt, synthetic construct
  misc_feature 1..19: note = siRNA sense sequence
  source 1..19: mol_type = other RNA
gttaagagctcactcacag

SEQ ID NO: 27193 - RNA, 19 nt, synthetic construct
  misc_feature 1..19: note = siRNA antisense sequence
  source 1..19: mol_type = other RNA
ctgtgagtgagctcttaac

SEQ ID NO: 27194 - RNA, 19 nt, synthetic construct
  misc_feature 1..19: note = siRNA sense sequence
  source 1..19: mol_type = other RNA
ttaagagctcactcacagg

SEQ ID NO: 27195 - RNA, 19 nt, synthetic construct
  misc_feature 1..19: note = siRNA antisense sequence
  source 1..19: mol_type = other RNA
cctgtgagtgagctcttaa

SEQ ID NO: 27196 - RNA, 19 nt, synthetic construct
  misc_feature 1..19: note = siRNA sense sequence
  source 1..19: mol_type = other RNA
taagagctcactcacaggc

SEQ ID NO: 27197 - RNA, 19 nt, synthetic construct
  misc_feature 1..19: note = siRNA antisense sequence
  source 1..19: mol_type = other RNA
gcctgtgagtgagctctta

SEQ ID NO: 27198 - RNA, 19 nt, synthetic construct
  misc_feature 1..19: note = siRNA sense sequence
  source 1..19: mol_type = other RNA
aagagctcactcacaggct

SEQ ID NO: 27199 - RNA, 19 nt, synthetic construct
  misc_feature 1..19: note = siRNA antisense sequence
  source 1..19: mol_type = other RNA
agcctgtgagtgagctctt

SEQ ID NO: 27200 - RNA, 19 nt, synthetic construct
  misc_feature 1..19: note = siRNA sense sequence
  source 1..19: mol_type = other RNA
agagctcactcacaggctg

SEQ ID NO: 27201 - RNA, 19 nt, synthetic construct
  misc_feature 1..19: note = siRNA antisense sequence
  source 1..19: mol_type = other RNA
cagcctgtgagtgagctct

SEQ ID NO: 27202 - RNA, 19 nt, synthetic construct
  misc_feature 1..19: note = siRNA sense sequence
  source 1..19: mol_type = other RNA
gagctcactcacaggctga

SEQ ID NO: 27203 - RNA, 19 nt, synthetic construct
  misc_feature 1..19: note = siRNA antisense sequence
  source 1..19: mol_type = other RNA
tcagcctgtgagtgagctc

SEQ ID NO: 27204 - RNA, 19 nt, synthetic construct
  misc_feature 1..19: note = siRNA sense sequence
  source 1..19: mol_type = other RNA
agctcactcacaggctgaa

SEQ ID NO: 27205 - RNA, 19 nt, synthetic construct
  misc_feature 1..19: note = siRNA antisense sequence
  source 1..19: mol_type = other RNA
ttcagcctgtgagtgagct

SEQ ID NO: 27206 - RNA, 19 nt, synthetic construct
  misc_feature 1..19: note = siRNA sense sequence
  source 1..19: mol_type = other RNA
gctcactcacaggctgaag

SEQ ID NO: 27207 - RNA, 19 nt, synthetic construct
  misc_feature 1..19: note = siRNA antisense sequence
  source 1..19: mol_type = other RNA
cttcagcctgtgagtgagc

SEQ ID NO: 27208 - RNA, 19 nt, synthetic construct
  misc_feature 1..19: note = siRNA sense sequence
  source 1..19: mol_type = other RNA
ctcacaggctgaaggagtg

SEQ ID NO: 27209 - RNA, 19 nt, synthetic construct
  misc_feature 1..19: note = siRNA antisense sequence
  source 1..19: mol_type = other RNA
cactccttcagcctgtgag

SEQ ID NO: 27210 - RNA, 19 nt, synthetic construct
  misc_feature 1..19: note = siRNA sense sequence
  source 1..19: mol_type = other RNA
tcacaggctgaaggagtgt

SEQ ID NO: 27211 - RNA, 19 nt, synthetic construct
  misc_feature 1..19: note = siRNA antisense sequence
  source 1..19: mol_type = other RNA
acactccttcagcctgtga

SEQ ID NO: 27212 - RNA, 19 nt, synthetic construct
  misc_feature 1..19: note = siRNA sense sequence
  source 1..19: mol_type = other RNA
acaggctgaaggagtgtgg

SEQ ID NO: 27213 - RNA, 19 nt, synthetic construct
  misc_feature 1..19: note = siRNA antisense sequence
  source 1..19: mol_type = other RNA
ccacactccttcagcctgt

SEQ ID NO: 27214 - RNA, 19 nt, synthetic construct
  misc_feature 1..19: note = siRNA sense sequence
  source 1..19: mol_type = other RNA
caggctgaaggagtgtgga

SEQ ID NO: 27215 - RNA, 19 nt, synthetic construct
  misc_feature 1..19: note = siRNA antisense sequence
  source 1..19: mol_type = other RNA
tccacactccttcagcctg

SEQ ID NO: 27216 - RNA, 19 nt, synthetic construct
  misc_feature 1..19: note = siRNA sense sequence
  source 1..19: mol_type = other RNA
aggctgaaggagtgtggaa

SEQ ID NO: 27217 - RNA, 19 nt, synthetic construct
  misc_feature 1..19: note = siRNA antisense sequence
  source 1..19: mol_type = other RNA
ttccacactccttcagcct

SEQ ID NO: 27218 - RNA, 19 nt, synthetic construct
  misc_feature 1..19: note = siRNA sense sequence
  source 1..19: mol_type = other RNA
gctgaaggagtgtggaata

SEQ ID NO: 27219 - RNA, 19 nt, synthetic construct
  misc_feature 1..19: note = siRNA antisense sequence
  source 1..19: mol_type = other RNA
tattccacactccttcagc

SEQ ID NO: 27220 - RNA, 19 nt, synthetic construct
  misc_feature 1..19: note = siRNA sense sequence
  source 1..19: mol_type = other RNA
aaggagtgtggaataggtc

SEQ ID NO: 27221 - RNA, 19 nt, synthetic construct
  misc_feature 1..19: note = siRNA antisense sequence
  source 1..19: mol_type = other RNA
gacctattccacactcctt

SEQ ID NO: 27222 - RNA, 19 nt, synthetic construct
  misc_feature 1..19: note = siRNA sense sequence
  source 1..19: mol_type = other RNA
aggagtgtggaataggtcc

SEQ ID NO: 27223 - RNA, 19 nt, synthetic construct
  misc_feature 1..19: note = siRNA antisense sequence
  source 1..19: mol_type = other RNA
ggacctattccacactcct

SEQ ID NO: 27224 - RNA, 19 nt, synthetic construct
  misc_feature 1..19: note = siRNA sense sequence
  source 1..19: mol_type = other RNA
ggaataggtccaccattag

SEQ ID NO: 27225 - RNA, 19 nt, synthetic construct
  misc_feature 1..19: note = siRNA antisense sequence
  source 1..19: mol_type = other RNA
ctaatggtggacctattcc

SEQ ID NO: 27226 - RNA, 19 nt, synthetic construct
  misc_feature 1..19: note = siRNA sense sequence
  source 1..19: mol_type = other RNA
gaataggtccaccattagc

SEQ ID NO: 27227 - RNA, 19 nt, synthetic construct
  misc_feature 1..19: note = siRNA antisense sequence
  source 1..19: mol_type = other RNA
gctaatggtggacctattc

SEQ ID NO: 27228 - RNA, 19 nt, synthetic construct
  misc_feature 1..19: note = siRNA sense sequence
  source 1..19: mol_type = other RNA
aataggtccaccattagct

SEQ ID NO: 27229 - RNA, 19 nt, synthetic construct
  misc_feature 1..19: note = siRNA antisense sequence
  source 1..19: mol_type = other RNA
agctaatggtggacctatt

SEQ ID NO: 27230 - RNA, 19 nt, synthetic construct
  misc_feature 1..19: note = siRNA sense sequence
  source 1..19: mol_type = other RNA
ataggtccaccattagcta

SEQ ID NO: 27231 - RNA, 19 nt, synthetic construct
  misc_feature 1..19: note = siRNA antisense sequence
  source 1..19: mol_type = other RNA
tagctaatggtggacctat

SEQ ID NO: 27232 - RNA, 19 nt, synthetic construct
  misc_feature 1..19: note = siRNA sense sequence
  source 1..19: mol_type = other RNA
taggtccaccattagctat

SEQ ID NO: 27233 - RNA, 19 nt, synthetic construct
  misc_feature 1..19: note = siRNA antisense sequence
  source 1..19: mol_type = other RNA
atagctaatggtggaccta

SEQ ID NO: 27234 - RNA, 19 nt, synthetic construct
  misc_feature 1..19: note = siRNA sense sequence
  source 1..19: mol_type = other RNA
aggtccaccattagctatt

SEQ ID NO: 27235 - RNA, 19 nt, synthetic construct
  misc_feature 1..19: note = siRNA antisense sequence
  source 1..19: mol_type = other RNA
aatagctaatggtggacct

SEQ ID NO: 27236 - RNA, 19 nt, synthetic construct
  misc_feature 1..19: note = siRNA sense sequence
  source 1..19: mol_type = other RNA
ggtccaccattagctattc

SEQ ID NO: 27237 - RNA, 19 nt, synthetic construct
  misc_feature 1..19: note = siRNA antisense sequence
  source 1..19: mol_type = other RNA
gaatagctaatggtggacc

SEQ ID NO: 27238 - RNA, 19 nt, synthetic construct
  misc_feature 1..19: note = siRNA sense sequence
  source 1..19: mol_type = other RNA
gtccaccattagctattct

SEQ ID NO: 27239 - RNA, 19 nt, synthetic construct
  misc_feature 1..19: note = siRNA antisense sequence
  source 1..19: mol_type = other RNA
agaatagctaatggtggac

SEQ ID NO: 27240 - RNA, 19 nt, synthetic construct
  misc_feature 1..19: note = siRNA sense sequence
  source 1..19: mol_type = other RNA
tccaccattagctattctg

SEQ ID NO: 27241 - RNA, 19 nt, synthetic construct
  misc_feature 1..19: note = siRNA antisense sequence
  source 1..19: mol_type = other RNA
cagaatagctaatggtgga

SEQ ID NO: 27242 - RNA, 19 nt, synthetic construct
  misc_feature 1..19: note = siRNA sense sequence
  source 1..19: mol_type = other RNA
ccaccattagctattctgg

SEQ ID NO: 27243 - RNA, 19 nt, synthetic construct
  misc_feature 1..19: note = siRNA antisense sequence
  source 1..19: mol_type = other RNA
ccagaatagctaatggtgg

SEQ ID NO: 27244 - RNA, 19 nt, synthetic construct
  misc_feature 1..19: note = siRNA sense sequence
  source 1..19: mol_type = other RNA
caccattagctattctggc

SEQ ID NO: 27245 - RNA, 19 nt, synthetic construct
  misc_feature 1..19: note = siRNA antisense sequence
  source 1..19: mol_type = other RNA
gccagaatagctaatggtg

SEQ ID NO: 27246 - RNA, 19 nt, synthetic construct
  misc_feature 1..19: note = siRNA sense sequence
  source 1..19: mol_type = other RNA
accattagctattctggcc

SEQ ID NO: 27247 - RNA, 19 nt, synthetic construct
  misc_feature 1..19: note = siRNA antisense sequence
  source 1..19: mol_type = other RNA
ggccagaatagctaatggt

SEQ ID NO: 27248 - RNA, 19 nt, synthetic construct
  misc_feature 1..19: note = siRNA sense sequence
  source 1..19: mol_type = other RNA
ccattagctattctggcca

SEQ ID NO: 27249 - RNA, 19 nt, synthetic construct
  misc_feature 1..19: note = siRNA antisense sequence
  source 1..19: mol_type = other RNA
tggccagaatagctaatgg

SEQ ID NO: 27250 - RNA, 19 nt, synthetic construct
  misc_feature 1..19: note = siRNA sense sequence
  source 1..19: mol_type = other RNA
cattagctattctggccat

SEQ ID NO: 27251 - RNA, 19 nt, synthetic construct
  misc_feature 1..19: note = siRNA antisense sequence
  source 1..19: mol_type = other RNA
atggccagaatagctaatg

SEQ ID NO: 27252 - RNA, 19 nt, synthetic construct
  misc_feature 1..19: note = siRNA sense sequence
  source 1..19: mol_type = other RNA
attagctattctggccata

SEQ ID NO: 27253 - RNA, 19 nt, synthetic construct
  misc_feature 1..19: note = siRNA antisense sequence
  source 1..19: mol_type = other RNA
tatggccagaatagctaat

SEQ ID NO: 27254 - RNA, 19 nt, synthetic construct
  misc_feature 1..19: note = siRNA sense sequence
  source 1..19: mol_type = other RNA
ttagctattctggccatac

SEQ ID NO: 27255 - RNA, 19 nt, synthetic construct
  misc_feature 1..19: note = siRNA antisense sequence
  source 1..19: mol_type = other RNA
gtatggccagaatagctaa

SEQ ID NO: 27256 - RNA, 19 nt, synthetic construct
  misc_feature 1..19: note = siRNA sense sequence
  source 1..19: mol_type = other RNA
tagctattctggccatacc

SEQ ID NO: 27257 - RNA, 19 nt, synthetic construct
  misc_feature 1..19: note = siRNA antisense sequence
  source 1..19: mol_type = other RNA
ggtatggccagaatagcta

SEQ ID NO: 27258 - RNA, 19 nt, synthetic construct
  misc_feature 1..19: note = siRNA sense sequence
  source 1..19: mol_type = other RNA
agctattctggccatacct

SEQ ID NO: 27259 - RNA, 19 nt, synthetic construct
  misc_feature 1..19: note = siRNA antisense sequence
  source 1..19: mol_type = other RNA
aggtatggccagaatagct

SEQ ID NO: 27260 - RNA, 19 nt, synthetic construct
  misc_feature 1..19: note = siRNA sense sequence
  source 1..19: mol_type = other RNA
attctggccatacctctct

SEQ ID NO: 27261 - RNA, 19 nt, synthetic construct
  misc_feature 1..19: note = siRNA antisense sequence
  source 1..19: mol_type = other RNA
agagaggtatggccagaat

SEQ ID NO: 27262 - RNA, 19 nt, synthetic construct
  misc_feature 1..19: note = siRNA sense sequence
  source 1..19: mol_type = other RNA
ttctggccatacctctctt

SEQ ID NO: 27263 - RNA, 19 nt, synthetic construct
  misc_feature 1..19: note = siRNA antisense sequence
  source 1..19: mol_type = other RNA
aagagaggtatggccagaa

SEQ ID NO: 27264 - RNA, 19 nt, synthetic construct
  misc_feature 1..19: note = siRNA sense sequence
  source 1..19: mol_type = other RNA
tctggccatacctctctta

SEQ ID NO: 27265 - RNA, 19 nt, synthetic construct
  misc_feature 1..19: note = siRNA antisense sequence
  source 1..19: mol_type = other RNA
taagagaggtatggccaga

SEQ ID NO: 27266 - RNA, 19 nt, synthetic construct
  misc_feature 1..19: note = siRNA sense sequence
  source 1..19: mol_type = other RNA
ctggccatacctctcttag

SEQ ID NO: 27267 - RNA, 19 nt, synthetic construct
  misc_feature 1..19: note = siRNA antisense sequence
  source 1..19: mol_type = other RNA
ctaagagaggtatggccag

SEQ ID NO: 27268 - RNA, 19 nt, synthetic construct
  misc_feature 1..19: note = siRNA sense sequence
  source 1..19: mol_type = other RNA
tggccatacctctcttaga

SEQ ID NO: 27269 - RNA, 19 nt, synthetic construct
  misc_feature 1..19: note = siRNA antisense sequence
  source 1..19: mol_type = other RNA
tctaagagaggtatggcca

SEQ ID NO: 27270 - RNA, 19 nt, synthetic construct
  misc_feature 1..19: note = siRNA sense sequence
  source 1..19: mol_type = other RNA
gtggccatatccagagggt

SEQ ID NO: 27271 - RNA, 19 nt, synthetic construct
  misc_feature 1..19: note = siRNA antisense sequence
  source 1..19: mol_type = other RNA
accctctggatatggccac

SEQ ID NO: 27272 - RNA, 19 nt, synthetic construct
  misc_feature 1..19: note = siRNA sense sequence
  source 1..19: mol_type = other RNA
tggccatatccagagggtt

SEQ ID NO: 27273 - RNA, 19 nt, synthetic construct
  misc_feature 1..19: note = siRNA antisense sequence
  source 1..19: mol_type = other RNA
aaccctctggatatggcca

SEQ ID NO: 27274 - RNA, 19 nt, synthetic construct
  misc_feature 1..19: note = siRNA sense sequence
  source 1..19: mol_type = other RNA
ggccatatccagagggttg

SEQ ID NO: 27275 - RNA, 19 nt, synthetic construct
  misc_feature 1..19: note = siRNA antisense sequence
  source 1..19: mol_type = other RNA
caaccctctggatatggcc

SEQ ID NO: 27276 - RNA, 19 nt, synthetic construct
  misc_feature 1..19: note = siRNA sense sequence
  source 1..19: mol_type = other RNA
gccatatccagagggttgg

SEQ ID NO: 27277 - RNA, 19 nt, synthetic construct
  misc_feature 1..19: note = siRNA antisense sequence
  source 1..19: mol_type = other RNA
ccaaccctctggatatggc

SEQ ID NO: 27278 - RNA, 19 nt, synthetic construct
  misc_feature 1..19: note = siRNA sense sequence
  source 1..19: mol_type = other RNA
agagggttggagcaggtct

SEQ ID NO: 27279 - RNA, 19 nt, synthetic construct
  misc_feature 1..19: note = siRNA antisense sequence
  source 1..19: mol_type = other RNA
agacctgctccaaccctct

SEQ ID NO: 27280 - RNA, 19 nt, synthetic construct
  misc_feature 1..19: note = siRNA sense sequence
  source 1..19: mol_type = other RNA
gagggttggagcaggtctc

SEQ ID NO: 27281 - RNA, 19 nt, synthetic construct
  misc_feature 1..19: note = siRNA antisense sequence
  source 1..19: mol_type = other RNA
gagacctgctccaaccctc

SEQ ID NO: 27282 - RNA, 19 nt, synthetic construct
  misc_feature 1..19: note = siRNA sense sequence
  source 1..19: mol_type = other RNA
agggttggagcaggtctca

SEQ ID NO: 27283 - RNA, 19 nt, synthetic construct
  misc_feature 1..19: note = siRNA antisense sequence
  source 1..19: mol_type = other RNA
tgagacctgctccaaccct

SEQ ID NO: 27284 - RNA, 19 nt, synthetic construct
  misc_feature 1..19: note = siRNA sense sequence
  source 1..19: mol_type = other RNA
gggttggagcaggtctcag

SEQ ID NO: 27285 - RNA, 19 nt, synthetic construct
  misc_feature 1..19: note = siRNA antisense sequence
  source 1..19: mol_type = other RNA
ctgagacctgctccaaccc

SEQ ID NO: 27286 - RNA, 19 nt, synthetic construct
  misc_feature 1..19: note = siRNA sense sequence
  source 1..19: mol_type = other RNA
ggttggagcaggtctcagg

SEQ ID NO: 27287 - RNA, 19 nt, synthetic construct
  misc_feature 1..19: note = siRNA antisense sequence
  source 1..19: mol_type = other RNA
cctgagacctgctccaacc

SEQ ID NO: 27288 - RNA, 19 nt, synthetic construct
  misc_feature 1..19: note = siRNA sense sequence
  source 1..19: mol_type = other RNA
cattgcctggcacacctcc

SEQ ID NO: 27289 - RNA, 19 nt, synthetic construct
  misc_feature 1..19: note = siRNA antisense sequence
  source 1..19: mol_type = other RNA
ggaggtgtgccaggcaatg

SEQ ID NO: 27290 - RNA, 19 nt, synthetic construct
  misc_feature 1..19: note = siRNA sense sequence
  source 1..19: mol_type = other RNA
gcacacctcctcccagaat

SEQ ID NO: 27291 - RNA, 19 nt, synthetic construct
  misc_feature 1..19: note = siRNA antisense sequence
  source 1..19: mol_type = other RNA
attctgggaggaggtgtgc

SEQ ID NO: 27292 - RNA, 19 nt, synthetic construct
  misc_feature 1..19: note = siRNA sense sequence
  source 1..19: mol_type = other RNA
acacctcctcccagaattc

SEQ ID NO: 27293 - RNA, 19 nt, synthetic construct
  misc_feature 1..19: note = siRNA antisense sequence
  source 1..19: mol_type = other RNA
gaattctgggaggaggtgt

SEQ ID NO: 27294 - RNA, 19 nt, synthetic construct
  misc_feature 1..19: note = siRNA sense sequence
  source 1..19: mol_type = other RNA
cacctcctcccagaattcc

SEQ ID NO: 27295 - RNA, 19 nt, synthetic construct
  misc_feature 1..19: note = siRNA antisense sequence
  source 1..19: mol_type = other RNA
ggaattctgggaggaggtg

SEQ ID NO: 27296 - RNA, 19 nt, synthetic construct
  misc_feature 1..19: note = siRNA sense sequence
  source 1..19: mol_type = other RNA
acctcctcccagaattcct

SEQ ID NO: 27297 - RNA, 19 nt, synthetic construct
  misc_feature 1..19: note = siRNA antisense sequence
  source 1..19: mol_type = other RNA
aggaattctgggaggaggt

SEQ ID NO: 27298 - RNA, 19 nt, synthetic construct
  misc_feature 1..19: note = siRNA sense sequence
  source 1..19: mol_type = other RNA
ctcccagaattcctgaggt

SEQ ID NO: 27299 - RNA, 19 nt, synthetic construct
  misc_feature 1..19: note = siRNA antisense sequence
  source 1..19: mol_type = other RNA
acctcaggaattctgggag

SEQ ID NO: 27300 - RNA, 19 nt, synthetic construct
  misc_feature 1..19: note = siRNA sense sequence
  source 1..19: mol_type = other RNA
tcccagaattcctgaggta

SEQ ID NO: 27301 - RNA, 19 nt, synthetic construct
  misc_feature 1..19: note = siRNA antisense sequence
  source 1..19: mol_type = other RNA
tacctcaggaattctggga

SEQ ID NO: 27302 - RNA, 19 nt, synthetic construct
  misc_feature 1..19: note = siRNA sense sequence
  source 1..19: mol_type = other RNA
gaattcctgaggtataacc

SEQ ID NO: 27303 - RNA, 19 nt, synthetic construct
  misc_feature 1..19: note = siRNA antisense sequence
  source 1..19: mol_type = other RNA
ggttatacctcaggaattc

SEQ ID NO: 27304 - RNA, 19 nt, synthetic construct
  misc_feature 1..19: note = siRNA sense sequence
  source 1..19: mol_type = other RNA
ttctcaggaagatagcaga

SEQ ID NO: 27305 - RNA, 19 nt, synthetic construct
  misc_feature 1..19: note = siRNA antisense sequence
  source 1..19: mol_type = other RNA
tctgctatcttcctgagaa

SEQ ID NO: 27306 - RNA, 19 nt, synthetic construct
  misc_feature 1..19: note = siRNA sense sequence
  source 1..19: mol_type = other RNA
tctcaggaagatagcagag

SEQ ID NO: 27307 - RNA, 19 nt, synthetic construct
  misc_feature 1..19: note = siRNA antisense sequence
  source 1..19: mol_type = other RNA
ctctgctatcttcctgaga

SEQ ID NO: 27308 - RNA, 19 nt, synthetic construct
  misc_feature 1..19: note = siRNA sense sequence
  source 1..19: mol_type = other RNA
ctcaggaagatagcagagc

SEQ ID NO: 27309 - RNA, 19 nt, synthetic construct
  misc_feature 1..19: note = siRNA antisense sequence
  source 1..19: mol_type = other RNA
gctctgctatcttcctgag

SEQ ID NO: 27310 - RNA, 19 nt, synthetic construct
  misc_feature 1..19: note = siRNA sense sequence
  source 1..19: mol_type = other RNA
tcaggaagatagcagagct

SEQ ID NO: 27311 - RNA, 19 nt, synthetic construct
  misc_feature 1..19: note = siRNA antisense sequence
  source 1..19: mol_type = other RNA
agctctgctatcttcctga

SEQ ID NO: 27312 - RNA, 19 nt, synthetic construct
  misc_feature 1..19: note = siRNA sense sequence
  source 1..19: mol_type = other RNA
caggaagatagcagagctc

SEQ ID NO: 27313 - RNA, 19 nt, synthetic construct
  misc_feature 1..19: note = siRNA antisense sequence
  source 1..19: mol_type = other RNA
gagctctgctatcttcctg

SEQ ID NO: 27314 - RNA, 19 nt, synthetic construct
  misc_feature 1..19: note = siRNA sense sequence
  source 1..19: mol_type = other RNA
aggaagatagcagagctct

SEQ ID NO: 27315 - RNA, 19 nt, synthetic construct
  misc_feature 1..19: note = siRNA antisense sequence
  source 1..19: mol_type = other RNA
agagctctgctatcttcct

SEQ ID NO: 27316 - RNA, 19 nt, synthetic construct
  misc_feature 1..19: note = siRNA sense sequence
  source 1..19: mol_type = other RNA
agatagcagagctcttttc

SEQ ID NO: 27317 - RNA, 19 nt, synthetic construct
  misc_feature 1..19: note = siRNA antisense sequence
  source 1..19: mol_type = other RNA
gaaaagagctctgctatct

SEQ ID NO: 27318 - RNA, 19 nt, synthetic construct
  misc_feature 1..19: note = siRNA sense sequence
  source 1..19: mol_type = other RNA
gatagcagagctcttttct

SEQ ID NO: 27319 - RNA, 19 nt, synthetic construct
  misc_feature 1..19: note = siRNA antisense sequence
  source 1..19: mol_type = other RNA
agaaaagagctctgctatc

SEQ ID NO: 27320 - RNA, 19 nt, synthetic construct
  misc_feature 1..19: note = siRNA sense sequence
  source 1..19: mol_type = other RNA
atagcagagctcttttcta

SEQ ID NO: 27321 - RNA, 19 nt, synthetic construct
  misc_feature 1..19: note = siRNA antisense sequence
  source 1..19: mol_type = other RNA
tagaaaagagctctgctat

SEQ ID NO: 27322 - RNA, 19 nt, synthetic construct
  misc_feature 1..19: note = siRNA sense sequence
  source 1..19: mol_type = other RNA
tagcagagctcttttctaa

SEQ ID NO: 27323 - RNA, 19 nt, synthetic construct
  misc_feature 1..19: note = siRNA antisense sequence
  source 1..19: mol_type = other RNA
ttagaaaagagctctgcta

SEQ ID NO: 27324 - RNA, 19 nt, synthetic construct
  misc_feature 1..19: note = siRNA sense sequence
  source 1..19: mol_type = other RNA
agcagagctcttttctaac

SEQ ID NO: 27325 - RNA, 19 nt, synthetic construct
  misc_feature 1..19: note = siRNA antisense sequence
  source 1..19: mol_type = other RNA
gttagaaaagagctctgct

SEQ ID NO: 27326 - RNA, 19 nt, synthetic construct
  misc_feature 1..19: note = siRNA sense sequence
  source 1..19: mol_type = other RNA
agagtagtgagtatattcc

SEQ ID NO: 27327 - RNA, 19 nt, synthetic construct
  misc_feature 1..19: note = siRNA antisense sequence
  source 1..19: mol_type = other RNA
ggaatatactcactactct

SEQ ID NO: 27328 - RNA, 19 nt, synthetic construct
  misc_feature 1..19: note = siRNA sense sequence
  source 1..19: mol_type = other RNA
gagtagtgagtatattccc

SEQ ID NO: 27329 - RNA, 19 nt, synthetic construct
  misc_feature 1..19: note = siRNA antisense sequence
  source 1..19: mol_type = other RNA
gggaatatactcactactc

SEQ ID NO: 27330 - RNA, 19 nt, synthetic construct
  misc_feature 1..19: note = siRNA sense sequence
  source 1..19: mol_type = other RNA
ccctccaggccttttcact

SEQ ID NO: 27331 - RNA, 19 nt, synthetic construct
  misc_feature 1..19: note = siRNA antisense sequence
  source 1..19: mol_type = other RNA
agtgaaaaggcctggaggg

SEQ ID NO: 27332 - RNA, 19 nt, synthetic construct
  misc_feature 1..19: note = siRNA sense sequence
  source 1..19: mol_type = other RNA
cctccaggccttttcactt

SEQ ID NO: 27333 - RNA, 19 nt, synthetic construct
  misc_feature 1..19: note = siRNA antisense sequence
  source 1..19: mol_type = other RNA
aagtgaaaaggcctggagg

SEQ ID NO: 27334 - RNA, 19 nt, synthetic construct
  misc_feature 1..19: note = siRNA sense sequence
  source 1..19: mol_type = other RNA
caggccttttcacttttat

SEQ ID NO: 27335 - RNA, 19 nt, synthetic construct
  misc_feature 1..19: note = siRNA antisense sequence
  source 1..19: mol_type = other RNA
ataaaagtgaaaaggcctg

SEQ ID NO: 27336 - RNA, 19 nt, synthetic construct
  misc_feature 1..19: note = siRNA sense sequence
  source 1..19: mol_type = other RNA
aggccttttcacttttatt

SEQ ID NO: 27337 - RNA, 19 nt, synthetic construct
  misc_feature 1..19: note = siRNA antisense sequence
  source 1..19: mol_type = other RNA
aataaaagtgaaaaggcct

SEQ ID NO: 27338 - RNA, 19 nt, synthetic construct
  misc_feature 1..19: note = siRNA sense sequence
  source 1..19: mol_type = other RNA
agtctgtctgtattatgac

SEQ ID NO: 27339 - RNA, 19 nt, synthetic construct
  misc_feature 1..19: note = siRNA antisense sequence
  source 1..19: mol_type = other RNA
gtcataatacagacagact

SEQ ID NO: 27340 - RNA, 19 nt, synthetic construct
  misc_feature 1..19: note = siRNA sense sequence
  source 1..19: mol_type = other RNA
gtctgtctgtattatgact

SEQ ID NO: 27341 - RNA, 19 nt, synthetic construct
  misc_feature 1..19: note = siRNA antisense sequence
  source 1..19: mol_type = other RNA
agtcataatacagacagac

SEQ ID NO: 27342 - RNA, 19 nt, synthetic construct
  misc_feature 1..19: note = siRNA sense sequence
  source 1..19: mol_type = other RNA
gggttttctttgcagtaat

SEQ ID NO: 27343 - RNA, 19 nt, synthetic construct
  misc_feature 1..19: note = siRNA antisense sequence
  source 1..19: mol_type = other RNA
attactgcaaagaaaaccc

SEQ ID NO: 27344 - RNA, 19 nt, synthetic construct
  misc_feature 1..19: note = siRNA sense sequence
  source 1..19: mol_type = other RNA
cagtaatattttcaagtgg

SEQ ID NO: 27345 - RNA, 19 nt, synthetic construct
  misc_feature 1..19: note = siRNA antisense sequence
  source 1..19: mol_type = other RNA
ccacttgaaaatattactg

SEQ ID NO: 27346 - RNA, 19 nt, synthetic construct
  misc_feature 1..19: note = siRNA sense sequence
  source 1..19: mol_type = other RNA
tattttcaagtggtatcac

SEQ ID NO: 27347 - RNA, 19 nt, synthetic construct
  misc_feature 1..19: note = siRNA antisense sequence
  source 1..19: mol_type = other RNA
gtgataccacttgaaaata

SEQ ID NO: 27348 - RNA, 19 nt, synthetic construct
  misc_feature 1..19: note = siRNA sense sequence
  source 1..19: mol_type = other RNA
attttcaagtggtatcacc

SEQ ID NO: 27349 - RNA, 19 nt, synthetic construct
  misc_feature 1..19: note = siRNA antisense sequence
  source 1..19: mol_type = other RNA
ggtgataccacttgaaaat

SEQ ID NO: 27350 - RNA, 19 nt, synthetic construct
  misc_feature 1..19: note = siRNA sense sequence
  source 1..19: mol_type = other RNA
ttttcaagtggtatcacct

SEQ ID NO: 27351 - RNA, 19 nt, synthetic construct
  misc_feature 1..19: note = siRNA antisense sequence
  source 1..19: mol_type = other RNA
aggtgataccacttgaaaa

SEQ ID NO: 27352 - RNA, 19 nt, synthetic construct
  misc_feature 1..19: note = siRNA sense sequence
  source 1..19: mol_type = other RNA
tttcaagtggtatcaccta

SEQ ID NO: 27353 - RNA, 19 nt, synthetic construct
  misc_feature 1..19: note = siRNA antisense sequence
  source 1..19: mol_type = other RNA
taggtgataccacttgaaa

SEQ ID NO: 27354 - RNA, 19 nt, synthetic construct
  misc_feature 1..19: note = siRNA sense sequence
  source 1..19: mol_type = other RNA
ttcaagtggtatcacctag

SEQ ID NO: 27355 - RNA, 19 nt, synthetic construct
  misc_feature 1..19: note = siRNA antisense sequence
  source 1..19: mol_type = other RNA
ctaggtgataccacttgaa

SEQ ID NO: 27356 - RNA, 19 nt, synthetic construct
  misc_feature 1..19: note = siRNA sense sequence
  source 1..19: mol_type = other RNA
tcaagtggtatcacctagc

SEQ ID NO: 27357 - RNA, 19 nt, synthetic construct
  misc_feature 1..19: note = siRNA antisense sequence
  source 1..19: mol_type = other RNA
gctaggtgataccacttga

SEQ ID NO: 27358 - RNA, 19 nt, synthetic construct
  misc_feature 1..19: note = siRNA sense sequence
  source 1..19: mol_type = other RNA
caagtggtatcacctagca

SEQ ID NO: 27359 - RNA, 19 nt, synthetic construct
  misc_feature 1..19: note = siRNA antisense sequence
  source 1..19: mol_type = other RNA
tgctaggtgataccacttg

SEQ ID NO: 27360 - RNA, 19 nt, synthetic construct
  misc_feature 1..19: note = siRNA sense sequence
  source 1..19: mol_type = other RNA
aagtggtatcacctagcag

SEQ ID NO: 27361 - RNA, 19 nt, synthetic construct
  misc_feature 1..19: note = siRNA antisense sequence
  source 1..19: mol_type = other RNA
ctgctaggtgataccactt

SEQ ID NO: 27362 - RNA, 19 nt, synthetic construct
  misc_feature 1..19: note = siRNA sense sequence
  source 1..19: mol_type = other RNA
agtggtatcacctagcagc

SEQ ID NO: 27363 - RNA, 19 nt, synthetic construct
  misc_feature 1..19: note = siRNA antisense sequence
  source 1..19: mol_type = other RNA
gctgctaggtgataccact

SEQ ID NO: 27364 - RNA, 19 nt, synthetic construct
  misc_feature 1..19: note = siRNA sense sequence
  source 1..19: mol_type = other RNA
gtatcacctagcagctgga

SEQ ID NO: 27365 - RNA, 19 nt, synthetic construct
  misc_feature 1..19: note = siRNA antisense sequence
  source 1..19: mol_type = other RNA
tccagctgctaggtgatac

SEQ ID NO: 27366 - RNA, 19 nt, synthetic construct
  misc_feature 1..19: note = siRNA sense sequence
  source 1..19: mol_type = other RNA
cacctagcagctggattcc

SEQ ID NO: 27367 - RNA, 19 nt, synthetic construct
  misc_feature 1..19: note = siRNA antisense sequence
  source 1..19: mol_type = other RNA
ggaatccagctgctaggtg

SEQ ID NO: 27368 - RNA, 19 nt, synthetic construct
  misc_feature 1..19: note = siRNA sense sequence
  source 1..19: mol_type = other RNA
acctagcagctggattcct

SEQ ID NO: 27369 - RNA, 19 nt, synthetic construct
  misc_feature 1..19: note = siRNA antisense sequence
  source 1..19: mol_type = other RNA
aggaatccagctgctaggt

SEQ ID NO: 27370 - RNA, 19 nt, synthetic construct
  misc_feature 1..19: note = siRNA sense sequence
  source 1..19: mol_type = other RNA
cctagcagctggattcctt

SEQ ID NO: 27371 - RNA, 19 nt, synthetic construct
  misc_feature 1..19: note = siRNA antisense sequence
  source 1..19: mol_type = other RNA
aaggaatccagctgctagg

SEQ ID NO: 27372 - RNA, 19 nt, synthetic construct
  misc_feature 1..19: note = siRNA sense sequence
  source 1..19: mol_type = other RNA
ctagcagctggattccttt

SEQ ID NO: 27373 - RNA, 19 nt, synthetic construct
  misc_feature 1..19: note = siRNA antisense sequence
  source 1..19: mol_type = other RNA
aaaggaatccagctgctag

SEQ ID NO: 27374 - RNA, 19 nt, synthetic construct
  misc_feature 1..19: note = siRNA sense sequence
  source 1..19: mol_type = other RNA
tagcagctggattcctttg

SEQ ID NO: 27375 - RNA, 19 nt, synthetic construct
  misc_feature 1..19: note = siRNA antisense sequence
  source 1..19: mol_type = other RNA
caaaggaatccagctgcta

SEQ ID NO: 27376 - RNA, 19 nt, synthetic construct
  misc_feature 1..19: note = siRNA sense sequence
  source 1..19: mol_type = other RNA
agcagctggattcctttgc

SEQ ID NO: 27377 - RNA, 19 nt, synthetic construct
  misc_feature 1..19: note = siRNA antisense sequence
  source 1..19: mol_type = other RNA
gcaaaggaatccagctgct

SEQ ID NO: 27378 - RNA, 19 nt, synthetic construct
  misc_feature 1..19: note = siRNA sense sequence
  source 1..19: mol_type = other RNA
gcagctggattcctttgcc

SEQ ID NO: 27379 - RNA, 19 nt, synthetic construct
  misc_feature 1..19: note = siRNA antisense sequence
  source 1..19: mol_type = other RNA
ggcaaaggaatccagctgc

SEQ ID NO: 27380 - RNA, 19 nt, synthetic construct
  misc_feature 1..19: note = siRNA sense sequence
  source 1..19: mol_type = other RNA
cagctggattcctttgcct

SEQ ID NO: 27381 - RNA, 19 nt, synthetic construct
  misc_feature 1..19: note = siRNA antisense sequence
  source 1..19: mol_type = other RNA
aggcaaaggaatccagctg

SEQ ID NO: 27382 - RNA, 19 nt, synthetic construct
  misc_feature 1..19: note = siRNA sense sequence
  source 1..19: mol_type = other RNA
tggattcctttgccttaac

SEQ ID NO: 27383 - RNA, 19 nt, synthetic construct
  misc_feature 1..19: note = siRNA antisense sequence
  source 1..19: mol_type = other RNA
gttaaggcaaaggaatcca

SEQ ID NO: 27384 - RNA, 19 nt, synthetic construct
  misc_feature 1..19: note = siRNA sense sequence
  source 1..19: mol_type = other RNA
attcaaaagctttcaatgc

SEQ ID NO: 27385 - RNA, 19 nt, synthetic construct
  misc_feature 1..19: note = siRNA antisense sequence
  source 1..19: mol_type = other RNA
gcattgaaagcttttgaat

SEQ ID NO: 27386 - RNA, 19 nt, synthetic construct
  misc_feature 1..19: note = siRNA sense sequence
  source 1..19: mol_type = other RNA
caaaagctttcaatgctat

SEQ ID NO: 27387 - RNA, 19 nt, synthetic construct
  misc_feature 1..19: note = siRNA antisense sequence
  source 1..19: mol_type = other RNA
atagcattgaaagcttttg

SEQ ID NO: 27388 - RNA, 19 nt, synthetic construct
  misc_feature 1..19: note = siRNA sense sequence
  source 1..19: mol_type = other RNA
aaaagctttcaatgctatc

SEQ ID NO: 27389 - RNA, 19 nt, synthetic construct
  misc_feature 1..19: note = siRNA antisense sequence
  source 1..19: mol_type = other RNA
gatagcattgaaagctttt

SEQ ID NO: 27390 - RNA, 19 nt, synthetic construct
  misc_feature 1..19: note = siRNA sense sequence
  source 1..19: mol_type = other RNA
aaagctttcaatgctatcc

SEQ ID NO: 27391 - RNA, 19 nt, synthetic construct
  misc_feature 1..19: note = siRNA antisense sequence
  source 1..19: mol_type = other RNA
ggatagcattgaaagcttt

SEQ ID NO: 27392 - RNA, 19 nt, synthetic construct
  misc_feature 1..19: note = siRNA sense sequence
  source 1..19: mol_type = other RNA
ctttcaatgctatccacta

SEQ ID NO: 27393 - RNA, 19 nt, synthetic construct
  misc_feature 1..19: note = siRNA antisense sequence
  source 1..19: mol_type = other RNA
tagtggatagcattgaaag

SEQ ID NO: 27394 - RNA, 19 nt, synthetic construct
  misc_feature 1..19: note = siRNA sense sequence
  source 1..19: mol_type = other RNA
tttcaatgctatccactaa

SEQ ID NO: 27395 - RNA, 19 nt, synthetic construct
  misc_feature 1..19: note = siRNA antisense sequence
  source 1..19: mol_type = other RNA
ttagtggatagcattgaaa

SEQ ID NO: 27396 - RNA, 19 nt, synthetic construct
  misc_feature 1..19: note = siRNA sense sequence
  source 1..19: mol_type = other RNA
ttcaatgctatccactaag

SEQ ID NO: 27397 - RNA, 19 nt, synthetic construct
  misc_feature 1..19: note = siRNA antisense sequence
  source 1..19: mol_type = other RNA
cttagtggatagcattgaa

SEQ ID NO: 27398 - RNA, 19 nt, synthetic construct
  misc_feature 1..19: note = siRNA sense sequence
  source 1..19: mol_type = other RNA
tcaatgctatccactaaga

SEQ ID NO: 27399 - RNA, 19 nt, synthetic construct
  misc_feature 1..19: note = siRNA antisense sequence
  source 1..19: mol_type = other RNA
tcttagtggatagcattga

SEQ ID NO: 27400 - RNA, 19 nt, synthetic construct
  misc_feature 1..19: note = siRNA sense sequence
  source 1..19: mol_type = other RNA
tgtaaaagtcagttgagtt

SEQ ID NO: 27401 - RNA, 19 nt, synthetic construct
  misc_feature 1..19: note = siRNA antisense sequence
  source 1..19: mol_type = other RNA
aactcaactgacttttaca

SEQ ID NO: 27402 - RNA, 19 nt, synthetic construct
  misc_feature 1..19: note = siRNA sense sequence
  source 1..19: mol_type = other RNA
gtaaaagtcagttgagttt

SEQ ID NO: 27403 - RNA, 19 nt, synthetic construct
  misc_feature 1..19: note = siRNA antisense sequence
  source 1..19: mol_type = other RNA
aaactcaactgacttttac

SEQ ID NO: 27404 - RNA, 19 nt, synthetic construct
  misc_feature 1..19: note = siRNA sense sequence
  source 1..19: mol_type = other RNA
gaaggaagtgtcccaggct

SEQ ID NO: 27405 - RNA, 19 nt, synthetic construct
  misc_feature 1..19: note = siRNA antisense sequence
  source 1..19: mol_type = other RNA
agcctgggacacttccttc

SEQ ID NO: 27406 - RNA, 19 nt, synthetic construct
  misc_feature 1..19: note = siRNA sense sequence
  source 1..19: mol_type = other RNA
aaggaagtgtcccaggctt

SEQ ID NO: 27407 - RNA, 19 nt, synthetic construct
  misc_feature 1..19: note = siRNA antisense sequence
  source 1..19: mol_type = other RNA
aagcctgggacacttcctt

SEQ ID NO: 27408 - RNA, 19 nt, synthetic construct
  misc_feature 1..19: note = siRNA sense sequence
  source 1..19: mol_type = other RNA
aggaagtgtcccaggcttg

SEQ ID NO: 27409 - RNA, 19 nt, synthetic construct
  misc_feature 1..19: note = siRNA antisense sequence
  source 1..19: mol_type = other RNA
caagcctgggacacttcct

SEQ ID NO: 27410 - RNA, 19 nt, synthetic construct
  misc_feature 1..19: note = siRNA sense sequence
  source 1..19: mol_type = other RNA
ggaagtgtcccaggcttgg

SEQ ID NO: 27411 - RNA, 19 nt, synthetic construct
  misc_feature 1..19: note = siRNA antisense sequence
  source 1..19: mol_type = other RNA
ccaagcctgggacacttcc

SEQ ID NO: 27412 - RNA, 19 nt, synthetic construct
  misc_feature 1..19: note = siRNA sense sequence
  source 1..19: mol_type = other RNA
gaagtgtcccaggcttggt

SEQ ID NO: 27413 - RNA, 19 nt, synthetic construct
  misc_feature 1..19: note = siRNA antisense sequence
  source 1..19: mol_type = other RNA
accaagcctgggacacttc

SEQ ID NO: 27414 - RNA, 19 nt, synthetic construct
  misc_feature 1..19: note = siRNA sense sequence
  source 1..19: mol_type = other RNA
gtgtcccaggcttggtttc

SEQ ID NO: 27415 - RNA, 19 nt, synthetic construct
  misc_feature 1..19: note = siRNA antisense sequence
  source 1..19: mol_type = other RNA
gaaaccaagcctgggacac

SEQ ID NO: 27416 - RNA, 19 nt, synthetic construct
  misc_feature 1..19: note = siRNA sense sequence
  source 1..19: mol_type = other RNA
gtcccaggcttggtttcaa

SEQ ID NO: 27417 - RNA, 19 nt, synthetic construct
  misc_feature 1..19: note = siRNA antisense sequence
  source 1..19: mol_type = other RNA
ttgaaaccaagcctgggac

SEQ ID NO: 27418 - RNA, 19 nt, synthetic construct
  misc_feature 1..19: note = siRNA sense sequence
  source 1..19: mol_type = other RNA
caactaggtcctggattct

SEQ ID NO: 27419 - RNA, 19 nt, synthetic construct
  misc_feature 1..19: note = siRNA antisense sequence
  source 1..19: mol_type = other RNA
agaatccaggacctagttg

SEQ ID NO: 27420 - RNA, 19 nt, synthetic construct
  misc_feature 1..19: note = siRNA sense sequence
  source 1..19: mol_type = other RNA
aactaggtcctggattcta

SEQ ID NO: 27421 - RNA, 19 nt, synthetic construct
  misc_feature 1..19: note = siRNA antisense sequence
  source 1..19: mol_type = other RNA
tagaatccaggacctagtt

SEQ ID NO: 27422 - RNA, 19 nt, synthetic construct
  misc_feature 1..19: note = siRNA sense sequence
  source 1..19: mol_type = other RNA
actaggtcctggattctac

SEQ ID NO: 27423 - RNA, 19 nt, synthetic construct
  misc_feature 1..19: note = siRNA antisense sequence
  source 1..19: mol_type = other RNA
gtagaatccaggacctagt

SEQ ID NO: 27424 - RNA, 19 nt, synthetic construct
  misc_feature 1..19: note = siRNA sense sequence
  source 1..19: mol_type = other RNA
ctaggtcctggattctaca

SEQ ID NO: 27425 - RNA, 19 nt, synthetic construct
  misc_feature 1..19: note = siRNA antisense sequence
  source 1..19: mol_type = other RNA
tgtagaatccaggacctag

SEQ ID NO: 27426 - RNA, 19 nt, synthetic construct
  misc_feature 1..19: note = siRNA sense sequence
  source 1..19: mol_type = other RNA
gtgattttgtgaccttgag

SEQ ID NO: 27427 - RNA, 19 nt, synthetic construct
  misc_feature 1..19: note = siRNA antisense sequence
  source 1..19: mol_type = other RNA
ctcaaggtcacaaaatcac

SEQ ID NO: 27428 - RNA, 19 nt, synthetic construct
  misc_feature 1..19: note = siRNA sense sequence
  source 1..19: mol_type = other RNA
ttttgtgaccttgagcatt

SEQ ID NO: 27429 - RNA, 19 nt, synthetic construct
  misc_feature 1..19: note = siRNA antisense sequence
  source 1..19: mol_type = other RNA
aatgctcaaggtcacaaaa

SEQ ID NO: 27430 - RNA, 19 nt, synthetic construct
  misc_feature 1..19: note = siRNA sense sequence
  source 1..19: mol_type = other RNA
gtgaccttgagcattacta

SEQ ID NO: 27431 - RNA, 19 nt, synthetic construct
  misc_feature 1..19: note = siRNA antisense sequence
  source 1..19: mol_type = other RNA
tagtaatgctcaaggtcac

SEQ ID NO: 27432 - RNA, 19 nt, synthetic construct
  misc_feature 1..19: note = siRNA sense sequence
  source 1..19: mol_type = other RNA
ccttgagcattactagcca

SEQ ID NO: 27433 - RNA, 19 nt, synthetic construct
  misc_feature 1..19: note = siRNA antisense sequence
  source 1..19: mol_type = other RNA
tggctagtaatgctcaagg

SEQ ID NO: 27434 - RNA, 19 nt, synthetic construct
  misc_feature 1..19: note = siRNA sense sequence
  source 1..19: mol_type = other RNA
gagcattactagccattgt

SEQ ID NO: 27435 - RNA, 19 nt, synthetic construct
  misc_feature 1..19: note = siRNA antisense sequence
  source 1..19: mol_type = other RNA
acaatggctagtaatgctc

SEQ ID NO: 27436 - RNA, 19 nt, synthetic construct
  misc_feature 1..19: note = siRNA sense sequence
  source 1..19: mol_type = other RNA
agcattactagccattgtg

SEQ ID NO: 27437 - RNA, 19 nt, synthetic construct
  misc_feature 1..19: note = siRNA antisense sequence
  source 1..19: mol_type = other RNA
cacaatggctagtaatgct

SEQ ID NO: 27438 - RNA, 19 nt, synthetic construct
  misc_feature 1..19: note = siRNA sense sequence
  source 1..19: mol_type = other RNA
agccattgtgagcctcatt

SEQ ID NO: 27439 - RNA, 19 nt, synthetic construct
  misc_feature 1..19: note = siRNA antisense sequence
  source 1..19: mol_type = other RNA
aatgaggctcacaatggct

SEQ ID NO: 27440 - RNA, 19 nt, synthetic construct
  misc_feature 1..19: note = siRNA sense sequence
  source 1..19: mol_type = other RNA
gccattgtgagcctcattt

SEQ ID NO: 27441 - RNA, 19 nt, synthetic construct
  misc_feature 1..19: note = siRNA antisense sequence
  source 1..19: mol_type = other RNA
aaatgaggctcacaatggc

SEQ ID NO: 27442 - RNA, 19 nt, synthetic construct
  misc_feature 1..19: note = siRNA sense sequence
  source 1..19: mol_type = other RNA
ccattgtgagcctcattta

SEQ ID NO: 27443 - RNA, 19 nt, synthetic construct
  misc_feature 1..19: note = siRNA antisense sequence
  source 1..19: mol_type = other RNA
taaatgaggctcacaatgg

SEQ ID NO: 27444 - RNA, 19 nt, synthetic construct
  misc_feature 1..19: note = siRNA sense sequence
  source 1..19: mol_type = other RNA
cattgtgagcctcatttat

SEQ ID NO: 27445 - RNA, 19 nt, synthetic construct
  misc_feature 1..19: note = siRNA antisense sequence
  source 1..19: mol_type = other RNA
ataaatgaggctcacaatg

SEQ ID NO: 27446 - RNA, 19 nt, synthetic construct
  misc_feature 1..19: note = siRNA sense sequence
  source 1..19: mol_type = other RNA
gtgagcctcatttataaag

SEQ ID NO: 27447 - RNA, 19 nt, synthetic construct
  misc_feature 1..19: note = siRNA antisense sequence
  source 1..19: mol_type = other RNA
ctttataaatgaggctcac

SEQ ID NO: 27448 - RNA, 19 nt, synthetic construct
  misc_feature 1..19: note = siRNA sense sequence
  source 1..19: mol_type = other RNA
gagcctcatttataaagga

SEQ ID NO: 27449 - RNA, 19 nt, synthetic construct
  misc_feature 1..19: note = siRNA antisense sequence
  source 1..19: mol_type = other RNA
tcctttataaatgaggctc

SEQ ID NO: 27450 - RNA, 19 nt, synthetic construct
  misc_feature 1..19: note = siRNA sense sequence
  source 1..19: mol_type = other RNA
agcctcatttataaaggag

SEQ ID NO: 27451 - RNA, 19 nt, synthetic construct
  misc_feature 1..19: note = siRNA antisense sequence
  source 1..19: mol_type = other RNA
ctcctttataaatgaggct

SEQ ID NO: 27452 - RNA, 19 nt, synthetic construct
  misc_feature 1..19: note = siRNA sense sequence
  source 1..19: mol_type = other RNA
tataaaggagggataaaga

SEQ ID NO: 27453 - RNA, 19 nt, synthetic construct
  misc_feature 1..19: note = siRNA antisense sequence
  source 1..19: mol_type = other RNA
tctttatccctcctttata

SEQ ID NO: 27454 - RNA, 19 nt, synthetic construct
  misc_feature 1..19: note = siRNA sense sequence
  source 1..19: mol_type = other RNA
taaaggagggataaagatt

SEQ ID NO: 27455 - RNA, 19 nt, synthetic construct
  misc_feature 1..19: note = siRNA antisense sequence
  source 1..19: mol_type = other RNA
aatctttatccctccttta

SEQ ID NO: 27456 - RNA, 19 nt, synthetic construct
  misc_feature 1..19: note = siRNA sense sequence
  source 1..19: mol_type = other RNA
aaggagggataaagattaa

SEQ ID NO: 27457 - RNA, 19 nt, synthetic construct
  misc_feature 1..19: note = siRNA antisense sequence
  source 1..19: mol_type = other RNA
ttaatctttatccctcctt

SEQ ID NO: 27458 - RNA, 19 nt, synthetic construct
  misc_feature 1..19: note = siRNA sense sequence
  source 1..19: mol_type = other RNA
aggagggataaagattaaa

SEQ ID NO: 27459 - RNA, 19 nt, synthetic construct
  misc_feature 1..19: note = siRNA antisense sequence
  source 1..19: mol_type = other RNA
tttaatctttatccctcct

SEQ ID NO: 27460 - RNA, 19 nt, synthetic construct
  misc_feature 1..19: note = siRNA sense sequence
  source 1..19: mol_type = other RNA
ggagggataaagattaaaa

SEQ ID NO: 27461 - RNA, 19 nt, synthetic construct
  misc_feature 1..19: note = siRNA antisense sequence
  source 1..19: mol_type = other RNA
ttttaatctttatccctcc

SEQ ID NO: 27462 - RNA, 19 nt, synthetic construct
  misc_feature 1..19: note = siRNA sense sequence
  source 1..19: mol_type = other RNA
ctttctgtaagtaattggc

SEQ ID NO: 27463 - RNA, 19 nt, synthetic construct
  misc_feature 1..19: note = siRNA antisense sequence
  source 1..19: mol_type = other RNA
gccaattacttacagaaag

SEQ ID NO: 27464 - RNA, 19 nt, synthetic construct
  misc_feature 1..19: note = siRNA sense sequence
  source 1..19: mol_type = other RNA
tttctgtaagtaattggca

SEQ ID NO: 27465 - RNA, 19 nt, synthetic construct
  misc_feature 1..19: note = siRNA antisense sequence
  source 1..19: mol_type = other RNA
tgccaattacttacagaaa

SEQ ID NO: 27466 - RNA, 19 nt, synthetic construct
  misc_feature 1..19: note = siRNA sense sequence
  source 1..19: mol_type = other RNA
ttctgtaagtaattggcac

SEQ ID NO: 27467 - RNA, 19 nt, synthetic construct
  misc_feature 1..19: note = siRNA antisense sequence
  source 1..19: mol_type = other RNA
gtgccaattacttacagaa

SEQ ID NO: 27468 - RNA, 19 nt, synthetic construct
  misc_feature 1..19: note = siRNA sense sequence
  source 1..19: mol_type = other RNA
tctgtaagtaattggcaca

SEQ ID NO: 27469 - RNA, 19 nt, synthetic construct
  misc_feature 1..19: note = siRNA antisense sequence
  source 1..19: mol_type = other RNA
tgtgccaattacttacaga

SEQ ID NO: 27470 - RNA, 19 nt, synthetic construct
  misc_feature 1..19: note = siRNA sense sequence
  source 1..19: mol_type = other RNA
ctgtaagtaattggcacac

SEQ ID NO: 27471 - RNA, 19 nt, synthetic construct
  misc_feature 1..19: note = siRNA antisense sequence
  source 1..19: mol_type = other RNA
gtgtgccaattacttacag

SEQ ID NO: 27472 - RNA, 19 nt, synthetic construct
  misc_feature 1..19: note = siRNA sense sequence
  source 1..19: mol_type = other RNA
atgttaactctgtagccta

SEQ ID NO: 27473 - RNA, 19 nt, synthetic construct
  misc_feature 1..19: note = siRNA antisense sequence
  source 1..19: mol_type = other RNA
taggctacagagttaacat

SEQ ID NO: 27474 - RNA, 19 nt, synthetic construct
  misc_feature 1..19: note = siRNA sense sequence
  source 1..19: mol_type = other RNA
tgttaactctgtagcctag

SEQ ID NO: 27475 - RNA, 19 nt, synthetic construct
  misc_feature 1..19: note = siRNA antisense sequence
  source 1..19: mol_type = other RNA
ctaggctacagagttaaca

SEQ ID NO: 27476 - RNA, 19 nt, synthetic construct
  misc_feature 1..19: note = siRNA sense sequence
  source 1..19: mol_type = other RNA
gttaactctgtagcctagg

SEQ ID NO: 27477 - RNA, 19 nt, synthetic construct
  misc_feature 1..19: note = siRNA antisense sequence
  source 1..19: mol_type = other RNA
cctaggctacagagttaac

SEQ ID NO: 27478 - RNA, 19 nt, synthetic construct
  misc_feature 1..19: note = siRNA sense sequence
  source 1..19: mol_type = other RNA
taactctgtagcctaggag

SEQ ID NO: 27479 - RNA, 19 nt, synthetic construct
  misc_feature 1..19: note = siRNA antisense sequence
  source 1..19: mol_type = other RNA
ctcctaggctacagagtta

SEQ ID NO: 27480 - RNA, 19 nt, synthetic construct
  misc_feature 1..19: note = siRNA sense sequence
  source 1..19: mol_type = other RNA
gtagcctaggagtgatctg

SEQ ID NO: 27481 - RNA, 19 nt, synthetic construct
  misc_feature 1..19: note = siRNA antisense sequence
  source 1..19: mol_type = other RNA
cagatcactcctaggctac

SEQ ID NO: 27482 - RNA, 19 nt, synthetic construct
  misc_feature 1..19: note = siRNA sense sequence
  source 1..19: mol_type = other RNA
cctaggagtgatctggtta

SEQ ID NO: 27483 - RNA, 19 nt, synthetic construct
  misc_feature 1..19: note = siRNA antisense sequence
  source 1..19: mol_type = other RNA
taaccagatcactcctagg

SEQ ID NO: 27484 - RNA, 19 nt, synthetic construct
  misc_feature 1..19: note = siRNA sense sequence
  source 1..19: mol_type = other RNA
ctaggagtgatctggttac

SEQ ID NO: 27485 - RNA, 19 nt, synthetic construct
  misc_feature 1..19: note = siRNA antisense sequence
  source 1..19: mol_type = other RNA
gtaaccagatcactcctag

SEQ ID NO: 27486 - RNA, 19 nt, synthetic construct
  misc_feature 1..19: note = siRNA sense sequence
  source 1..19: mol_type = other RNA
taggagtgatctggttaca

SEQ ID NO: 27487 - RNA, 19 nt, synthetic construct
  misc_feature 1..19: note = siRNA antisense sequence
  source 1..19: mol_type = other RNA
tgtaaccagatcactccta

SEQ ID NO: 27488 - RNA, 19 nt, synthetic construct
  misc_feature 1..19: note = siRNA sense sequence
  source 1..19: mol_type = other RNA
taaattggtactgtcaaag

SEQ ID NO: 27489 - RNA, 19 nt, synthetic construct
  misc_feature 1..19: note = siRNA antisense sequence
  source 1..19: mol_type = other RNA
ctttgacagtaccaattta

SEQ ID NO: 27490 - RNA, 19 nt, synthetic construct
  misc_feature 1..19: note = siRNA sense sequence
  source 1..19: mol_type = other RNA
aaattggtactgtcaaagc

SEQ ID NO: 27491 - RNA, 19 nt, synthetic construct
  misc_feature 1..19: note = siRNA antisense sequence
  source 1..19: mol_type = other RNA
gctttgacagtaccaattt

SEQ ID NO: 27492 - RNA, 19 nt, synthetic construct
  misc_feature 1..19: note = siRNA sense sequence
  source 1..19: mol_type = other RNA
gtactgtcaaagcttttat

SEQ ID NO: 27493 - RNA, 19 nt, synthetic construct
  misc_feature 1..19: note = siRNA antisense sequence
  source 1..19: mol_type = other RNA
ataaaagctttgacagtac

SEQ ID NO: 27494 - RNA, 19 nt, synthetic construct
  misc_feature 1..19: note = siRNA sense sequence
  source 1..19: mol_type = other RNA
tactgtcaaagcttttatg

SEQ ID NO: 27495 - RNA, 19 nt, synthetic construct
  misc_feature 1..19: note = siRNA antisense sequence
  source 1..19: mol_type = other RNA
cataaaagctttgacagta

SEQ ID NO: 27496 - RNA, 19 nt, synthetic construct
  misc_feature 1..19: note = siRNA sense sequence
  source 1..19: mol_type = other RNA
ctgtcaaagcttttatgcc

SEQ ID NO: 27497 - RNA, 19 nt, synthetic construct
  misc_feature 1..19: note = siRNA antisense sequence
  source 1..19: mol_type = other RNA
ggcataaaagctttgacag

SEQ ID NO: 27498 - RNA, 19 nt, synthetic construct
  misc_feature 1..19: note = siRNA sense sequence
  source 1..19: mol_type = other RNA
tgtcaaagcttttatgccc

SEQ ID NO: 27499 - RNA, 19 nt, synthetic construct
  misc_feature 1..19: note = siRNA antisense sequence
  source 1..19: mol_type = other RNA
gggcataaaagctttgaca

SEQ ID NO: 27500 - RNA, 19 nt, synthetic construct
  misc_feature 1..19: note = siRNA sense sequence
  source 1..19: mol_type = other RNA
gtcaaagcttttatgccca

SEQ ID NO: 27501 - RNA, 19 nt, synthetic construct
  misc_feature 1..19: note = siRNA antisense sequence
  source 1..19: mol_type = other RNA
tgggcataaaagctttgac

SEQ ID NO: 27502 - RNA, 19 nt, synthetic construct
  misc_feature 1..19: note = siRNA sense sequence
  source 1..19: mol_type = other RNA
tcaaagcttttatgcccag

SEQ ID NO: 27503 - RNA, 19 nt, synthetic construct
  misc_feature 1..19: note = siRNA antisense sequence
  source 1..19: mol_type = other RNA
ctgggcataaaagctttga

SEQ ID NO: 27504 - RNA, 19 nt, synthetic construct
  misc_feature 1..19: note = siRNA sense sequence
  source 1..19: mol_type = other RNA
caaagcttttatgcccagg

SEQ ID NO: 27505 - RNA, 19 nt, synthetic construct
  misc_feature 1..19: note = siRNA antisense sequence
  source 1..19: mol_type = other RNA
cctgggcataaaagctttg

SEQ ID NO: 27506 - RNA, 19 nt, synthetic construct
  misc_feature 1..19: note = siRNA sense sequence
  source 1..19: mol_type = other RNA
aaagcttttatgcccaggc

SEQ ID NO: 27507 - RNA, 19 nt, synthetic construct
  misc_feature 1..19: note = siRNA antisense sequence
  source 1..19: mol_type = other RNA
gcctgggcataaaagcttt

SEQ ID NO: 27508 - RNA, 19 nt, synthetic construct
  misc_feature 1..19: note = siRNA sense sequence
  source 1..19: mol_type = other RNA
aagcttttatgcccaggcc

SEQ ID NO: 27509 - RNA, 19 nt, synthetic construct
  misc_feature 1..19: note = siRNA antisense sequence
  source 1..19: mol_type = other RNA
ggcctgggcataaaagctt

SEQ ID NO: 27510 - RNA, 19 nt, synthetic construct
  misc_feature 1..19: note = siRNA sense sequence
  source 1..19: mol_type = other RNA
agcttttatgcccaggcca

SEQ ID NO: 27511 - RNA, 19 nt, synthetic construct
  misc_feature 1..19: note = siRNA antisense sequence
  source 1..19: mol_type = other RNA
tggcctgggcataaaagct

SEQ ID NO: 27512 - RNA, 19 nt, synthetic construct
  misc_feature 1..19: note = siRNA sense sequence
  source 1..19: mol_type = other RNA
cttttatgcccaggccatg

SEQ ID NO: 27513 - RNA, 19 nt, synthetic construct
  misc_feature 1..19: note = siRNA antisense sequence
  source 1..19: mol_type = other RNA
catggcctgggcataaaag

SEQ ID NO: 27514 - RNA, 19 nt, synthetic construct
  misc_feature 1..19: note = siRNA sense sequence
  source 1..19: mol_type = other RNA
ttttatgcccaggccatgt

SEQ ID NO: 27515 - RNA, 19 nt, synthetic construct
  misc_feature 1..19: note = siRNA antisense sequence
  source 1..19: mol_type = other RNA
acatggcctgggcataaaa

SEQ ID NO: 27516 - RNA, 19 nt, synthetic construct
  misc_feature 1..19: note = siRNA sense sequence
  source 1..19: mol_type = other RNA
tttatgcccaggccatgta

SEQ ID NO: 27517 - RNA, 19 nt, synthetic construct
  misc_feature 1..19: note = siRNA antisense sequence
  source 1..19: mol_type = other RNA
tacatggcctgggcataaa

SEQ ID NO: 27518 - RNA, 19 nt, synthetic construct
  misc_feature 1..19: note = siRNA sense sequence
  source 1..19: mol_type = other RNA
ttatgcccaggccatgtag

SEQ ID NO: 27519 - RNA, 19 nt, synthetic construct
  misc_feature 1..19: note = siRNA antisense sequence
  source 1..19: mol_type = other RNA
ctacatggcctgggcataa

SEQ ID NO: 27520 - RNA, 19 nt, synthetic construct
  misc_feature 1..19: note = siRNA sense sequence
  source 1..19: mol_type = other RNA
tatgcccaggccatgtaga

SEQ ID NO: 27521 - RNA, 19 nt, synthetic construct
  misc_feature 1..19: note = siRNA antisense sequence
  source 1..19: mol_type = other RNA
tctacatggcctgggcata

SEQ ID NO: 27522 - RNA, 19 nt, synthetic construct
  misc_feature 1..19: note = siRNA sense sequence
  source 1..19: mol_type = other RNA
agattatcttccttccaaa

SEQ ID NO: 27523 - RNA, 19 nt, synthetic construct
  misc_feature 1..19: note = siRNA antisense sequence
  source 1..19: mol_type = other RNA
tttggaaggaagataatct

SEQ ID NO: 27524 - RNA, 19 nt, synthetic construct
  misc_feature 1..19: note = siRNA sense sequence
  source 1..19: mol_type = other RNA
aaaggctagaagtctgcaa

SEQ ID NO: 27525 - RNA, 19 nt, synthetic construct
  misc_feature 1..19: note = siRNA antisense sequence
  source 1..19: mol_type = other RNA
ttgcagacttctagccttt

SEQ ID NO: 27526 - RNA, 19 nt, synthetic construct
  misc_feature 1..19: note = siRNA sense sequence
  source 1..19: mol_type = other RNA
aaggctagaagtctgcaaa

SEQ ID NO: 27527 - RNA, 19 nt, synthetic construct
  misc_feature 1..19: note = siRNA antisense sequence
  source 1..19: mol_type = other RNA
tttgcagacttctagcctt

SEQ ID NO: 27528 - RNA, 19 nt, synthetic construct
  misc_feature 1..19: note = siRNA sense sequence
  source 1..19: mol_type = other RNA
aggctagaagtctgcaaaa

SEQ ID NO: 27529 - RNA, 19 nt, synthetic construct
  misc_feature 1..19: note = siRNA antisense sequence
  source 1..19: mol_type = other RNA
ttttgcagacttctagcct

SEQ ID NO: 27530 - RNA, 19 nt, synthetic construct
  misc_feature 1..19: note = siRNA sense sequence
  source 1..19: mol_type = other RNA
ctagaagtctgcaaaatta

SEQ ID NO: 27531 - RNA, 19 nt, synthetic construct
  misc_feature 1..19: note = siRNA antisense sequence
  source 1..19: mol_type = other RNA
taattttgcagacttctag

SEQ ID NO: 27532 - RNA, 19 nt, synthetic construct
  misc_feature 1..19: note = siRNA sense sequence
  source 1..19: mol_type = other RNA
caattgtactttagtgcac

SEQ ID NO: 27533 - RNA, 19 nt, synthetic construct
  misc_feature 1..19: note = siRNA antisense sequence
  source 1..19: mol_type = other RNA
gtgcactaaagtacaattg

SEQ ID NO: 27534 - RNA, 19 nt, synthetic construct
  misc_feature 1..19: note = siRNA sense sequence
  source 1..19: mol_type = other RNA
aattgtactttagtgcacc

SEQ ID NO: 27535 - RNA, 19 nt, synthetic construct
  misc_feature 1..19: note = siRNA antisense sequence
  source 1..19: mol_type = other RNA
ggtgcactaaagtacaatt

SEQ ID NO: 27536 - RNA, 19 nt, synthetic construct
  misc_feature 1..19: note = siRNA sense sequence
  source 1..19: mol_type = other RNA
attgtactttagtgcacca

SEQ ID NO: 27537 - RNA, 19 nt, synthetic construct
  misc_feature 1..19: note = siRNA antisense sequence
  source 1..19: mol_type = other RNA
tggtgcactaaagtacaat

SEQ ID NO: 27538 - RNA, 19 nt, synthetic construct
  misc_feature 1..19: note = siRNA sense sequence
  source 1..19: mol_type = other RNA
ttgtactttagtgcaccaa

SEQ ID NO: 27539 - RNA, 19 nt, synthetic construct
  misc_feature 1..19: note = siRNA antisense sequence
  source 1..19: mol_type = other RNA
ttggtgcactaaagtacaa

SEQ ID NO: 27540 - RNA, 19 nt, synthetic construct
  misc_feature 1..19: note = siRNA sense sequence
  source 1..19: mol_type = other RNA
tgtactttagtgcaccaaa

SEQ ID NO: 27541 - RNA, 19 nt, synthetic construct
  misc_feature 1..19: note = siRNA antisense sequence
  source 1..19: mol_type = other RNA
tttggtgcactaaagtaca

SEQ ID NO: 27542 - RNA, 19 nt, synthetic construct
  misc_feature 1..19: note = siRNA sense sequence
  source 1..19: mol_type = other RNA
tttagtgcaccaaagatta

SEQ ID NO: 27543 - RNA, 19 nt, synthetic construct
  misc_feature 1..19: note = siRNA antisense sequence
  source 1..19: mol_type = other RNA
taatctttggtgcactaaa

SEQ ID NO: 27544 - RNA, 19 nt, synthetic construct
  misc_feature 1..19: note = siRNA sense sequence
  source 1..19: mol_type = other RNA
ttagtgcaccaaagattaa

SEQ ID NO: 27545 - RNA, 19 nt, synthetic construct
  misc_feature 1..19: note = siRNA antisense sequence
  source 1..19: mol_type = other RNA
ttaatctttggtgcactaa

SEQ ID NO: 27546 - RNA, 19 nt, synthetic construct
  misc_feature 1..19: note = siRNA sense sequence
  source 1..19: mol_type = other RNA
tagtgcaccaaagattaaa

SEQ ID NO: 27547 - RNA, 19 nt, synthetic construct
  misc_feature 1..19: note = siRNA antisense sequence
  source 1..19: mol_type = other RNA
tttaatctttggtgcacta

SEQ ID NO: 27548 - RNA, 19 nt, synthetic construct
  misc_feature 1..19: note = siRNA sense sequence
  source 1..19: mol_type = other RNA
agtgcaccaaagattaaaa

SEQ ID NO: 27549 - RNA, 19 nt, synthetic construct
  misc_feature 1..19: note = siRNA antisense sequence
  source 1..19: mol_type = other RNA
ttttaatctttggtgcact

SEQ ID NO: 27550 - RNA, 19 nt, synthetic construct
  misc_feature 1..19: note = siRNA sense sequence
  source 1..19: mol_type = other RNA
ccctatttcttgcctttga

SEQ ID NO: 27551 - RNA, 19 nt, synthetic construct
  misc_feature 1..19: note = siRNA antisense sequence
  source 1..19: mol_type = other RNA
tcaaaggcaagaaataggg

SEQ ID NO: 27552 - RNA, 19 nt, synthetic construct
  misc_feature 1..19: note = siRNA sense sequence
  source 1..19: mol_type = other RNA
ctatttcttgcctttgatt

SEQ ID NO: 27553 - RNA, 19 nt, synthetic construct
  misc_feature 1..19: note = siRNA antisense sequence
  source 1..19: mol_type = other RNA
aatcaaaggcaagaaatag

SEQ ID NO: 27554 - RNA, 19 nt, synthetic construct
  misc_feature 1..19: note = siRNA sense sequence
  source 1..19: mol_type = other RNA
tttcttgcctttgattagt

SEQ ID NO: 27555 - RNA, 19 nt, synthetic construct
  misc_feature 1..19: note = siRNA antisense sequence
  source 1..19: mol_type = other RNA
actaatcaaaggcaagaaa

SEQ ID NO: 27556 - RNA, 19 nt, synthetic construct
  misc_feature 1..19: note = siRNA sense sequence
  source 1..19: mol_type = other RNA
ttcttgcctttgattagtt

SEQ ID NO: 27557 - RNA, 19 nt, synthetic construct
  misc_feature 1..19: note = siRNA antisense sequence
  source 1..19: mol_type = other RNA
aactaatcaaaggcaagaa

SEQ ID NO: 27558 - RNA, 19 nt, synthetic construct
  misc_feature 1..19: note = siRNA sense sequence
  source 1..19: mol_type = other RNA
tcttgcctttgattagttt

SEQ ID NO: 27559 - RNA, 19 nt, synthetic construct
  misc_feature 1..19: note = siRNA antisense sequence
  source 1..19: mol_type = other RNA
aaactaatcaaaggcaaga

SEQ ID NO: 27560 - RNA, 19 nt, synthetic construct
  misc_feature 1..19: note = siRNA sense sequence
  source 1..19: mol_type = other RNA
cttgcctttgattagttta

SEQ ID NO: 27561 - RNA, 19 nt, synthetic construct
  misc_feature 1..19: note = siRNA antisense sequence
  source 1..19: mol_type = other RNA
taaactaatcaaaggcaag

SEQ ID NO: 27562 - RNA, 19 nt, synthetic construct
  misc_feature 1..19: note = siRNA sense sequence
  source 1..19: mol_type = other RNA
tgcctttgattagtttaag

SEQ ID NO: 27563 - RNA, 19 nt, synthetic construct
  misc_feature 1..19: note = siRNA antisense sequence
  source 1..19: mol_type = other RNA
cttaaactaatcaaaggca

SEQ ID NO: 27564 - RNA, 19 nt, synthetic construct
  misc_feature 1..19: note = siRNA sense sequence
  source 1..19: mol_type = other RNA
gcctttgattagtttaaga

SEQ ID NO: 27565 - RNA, 19 nt, synthetic construct
  misc_feature 1..19: note = siRNA antisense sequence
  source 1..19: mol_type = other RNA
tcttaaactaatcaaaggc

SEQ ID NO: 27566 - RNA, 19 nt, synthetic construct
  misc_feature 1..19: note = siRNA sense sequence
  source 1..19: mol_type = other RNA
aatttagagcatgagcaga

SEQ ID NO: 27567 - RNA, 19 nt, synthetic construct
  misc_feature 1..19: note = siRNA antisense sequence
  source 1..19: mol_type = other RNA
tctgctcatgctctaaatt

SEQ ID NO: 27568 - RNA, 19 nt, synthetic construct
  misc_feature 1..19: note = siRNA sense sequence
  source 1..19: mol_type = other RNA
ttttagcttttgctggcca

SEQ ID NO: 27569 - RNA, 19 nt, synthetic construct
  misc_feature 1..19: note = siRNA antisense sequence
  source 1..19: mol_type = other RNA
tggccagcaaaagctaaaa

SEQ ID NO: 27570 - RNA, 19 nt, synthetic construct
  misc_feature 1..19: note = siRNA sense sequence
  source 1..19: mol_type = other RNA
tttagcttttgctggccac

SEQ ID NO: 27571 - RNA, 19 nt, synthetic construct
  misc_feature 1..19: note = siRNA antisense sequence
  source 1..19: mol_type = other RNA
gtggccagcaaaagctaaa

SEQ ID NO: 27572 - RNA, 19 nt, synthetic construct
  misc_feature 1..19: note = siRNA sense sequence
  source 1..19: mol_type = other RNA
ttagcttttgctggccaca

SEQ ID NO: 27573 - RNA, 19 nt, synthetic construct
  misc_feature 1..19: note = siRNA antisense sequence
  source 1..19: mol_type = other RNA
tgtggccagcaaaagctaa

SEQ ID NO: 27574 - RNA, 19 nt, synthetic construct
  misc_feature 1..19: note = siRNA sense sequence
  source 1..19: mol_type = other RNA
tagcttttgctggccacac

SEQ ID NO: 27575 - RNA, 19 nt, synthetic construct
  misc_feature 1..19: note = siRNA antisense sequence
  source 1..19: mol_type = other RNA
gtgtggccagcaaaagcta

SEQ ID NO: 27576 - RNA, 19 nt, synthetic construct
  misc_feature 1..19: note = siRNA sense sequence
  source 1..19: mol_type = other RNA
tagtgactacttgactcta

SEQ ID NO: 27577 - RNA, 19 nt, synthetic construct
  misc_feature 1..19: note = siRNA antisense sequence
  source 1..19: mol_type = other RNA
tagagtcaagtagtcacta

SEQ ID NO: 27578 - RNA, 19 nt, synthetic construct
  misc_feature 1..19: note = siRNA sense sequence
  source 1..19: mol_type = other RNA
agtgactacttgactctat

SEQ ID NO: 27579 - RNA, 19 nt, synthetic construct
  misc_feature 1..19: note = siRNA antisense sequence
  source 1..19: mol_type = other RNA
atagagtcaagtagtcact

SEQ ID NO: 27580 - RNA, 19 nt, synthetic construct
  misc_feature 1..19: note = siRNA sense sequence
  source 1..19: mol_type = other RNA
gtgactacttgactctatc

SEQ ID NO: 27581 - RNA, 19 nt, synthetic construct
  misc_feature 1..19: note = siRNA antisense sequence
  source 1..19: mol_type = other RNA
gatagagtcaagtagtcac

SEQ ID NO: 27582 - RNA, 19 nt, synthetic construct
  misc_feature 1..19: note = siRNA sense sequence
  source 1..19: mol_type = other RNA
tgactacttgactctatca

SEQ ID NO: 27583 - RNA, 19 nt, synthetic construct
  misc_feature 1..19: note = siRNA antisense sequence
  source 1..19: mol_type = other RNA
tgatagagtcaagtagtca

SEQ ID NO: 27584 - RNA, 19 nt, synthetic construct
  misc_feature 1..19: note = siRNA sense sequence
  source 1..19: mol_type = other RNA
gactacttgactctatcat

SEQ ID NO: 27585 - RNA, 19 nt, synthetic construct
  misc_feature 1..19: note = siRNA antisense sequence
  source 1..19: mol_type = other RNA
atgatagagtcaagtagtc

SEQ ID NO: 27586 - RNA, 19 nt, synthetic construct
  misc_feature 1..19: note = siRNA sense sequence
  source 1..19: mol_type = other RNA
actacttgactctatcatg

SEQ ID NO: 27587 - RNA, 19 nt, synthetic construct
  misc_feature 1..19: note = siRNA antisense sequence
  source 1..19: mol_type = other RNA
catgatagagtcaagtagt

SEQ ID NO: 27588 - RNA, 19 nt, synthetic construct
  misc_feature 1..19: note = siRNA sense sequence
  source 1..19: mol_type = other RNA
ctacttgactctatcatgg

SEQ ID NO: 27589 - RNA, 19 nt, synthetic construct
  misc_feature 1..19: note = siRNA antisense sequence
  source 1..19: mol_type = other RNA
ccatgatagagtcaagtag

SEQ ID NO: 27590 - RNA, 19 nt, synthetic construct
  misc_feature 1..19: note = siRNA sense sequence
  source 1..19: mol_type = other RNA
tacttgactctatcatggt

SEQ ID NO: 27591 - RNA, 19 nt, synthetic construct
  misc_feature 1..19: note = siRNA antisense sequence
  source 1..19: mol_type = other RNA
accatgatagagtcaagta

SEQ ID NO: 27592 - RNA, 19 nt, synthetic construct
  misc_feature 1..19: note = siRNA sense sequence
  source 1..19: mol_type = other RNA
acttgactctatcatggta

SEQ ID NO: 27593 - RNA, 19 nt, synthetic construct
  misc_feature 1..19: note = siRNA antisense sequence
  source 1..19: mol_type = other RNA
taccatgatagagtcaagt

SEQ ID NO: 27594 - RNA, 19 nt, synthetic construct
  misc_feature 1..19: note = siRNA sense sequence
  source 1..19: mol_type = other RNA
cttgactctatcatggtat

SEQ ID NO: 27595 - RNA, 19 nt, synthetic construct
  misc_feature 1..19: note = siRNA antisense sequence
  source 1..19: mol_type = other RNA
ataccatgatagagtcaag

SEQ ID NO: 27596 - RNA, 19 nt, synthetic construct
  misc_feature 1..19: note = siRNA sense sequence
  source 1..19: mol_type = other RNA
ttgactctatcatggtatg

SEQ ID NO: 27597 - RNA, 19 nt, synthetic construct
  misc_feature 1..19: note = siRNA antisense sequence
  source 1..19: mol_type = other RNA
cataccatgatagagtcaa

SEQ ID NO: 27598 - RNA, 19 nt, synthetic construct
  misc_feature 1..19: note = siRNA sense sequence
  source 1..19: mol_type = other RNA
tgactctatcatggtatgg

SEQ ID NO: 27599 - RNA, 19 nt, synthetic construct
  misc_feature 1..19: note = siRNA antisense sequence
  source 1..19: mol_type = other RNA
ccataccatgatagagtca

SEQ ID NO: 27600 - RNA, 19 nt, synthetic construct
  misc_feature 1..19: note = siRNA sense sequence
  source 1..19: mol_type = other RNA
gactctatcatggtatggc

SEQ ID NO: 27601 - RNA, 19 nt, synthetic construct
  misc_feature 1..19: note = siRNA antisense sequence
  source 1..19: mol_type = other RNA
gccataccatgatagagtc

SEQ ID NO: 27602 - RNA, 19 nt, synthetic construct
  misc_feature 1..19: note = siRNA sense sequence
  source 1..19: mol_type = other RNA
actctatcatggtatggca

SEQ ID NO: 27603 - RNA, 19 nt, synthetic construct
  misc_feature 1..19: note = siRNA antisense sequence
  source 1..19: mol_type = other RNA
tgccataccatgatagagt

SEQ ID NO: 27604 - RNA, 19 nt, synthetic construct
  misc_feature 1..19: note = siRNA sense sequence
  source 1..19: mol_type = other RNA
ctctatcatggtatggcaa

SEQ ID NO: 27605 - RNA, 19 nt, synthetic construct
  misc_feature 1..19: note = siRNA antisense sequence
  source 1..19: mol_type = other RNA
ttgccataccatgatagag

SEQ ID NO: 27606 - RNA, 19 nt, synthetic construct
  misc_feature 1..19: note = siRNA sense sequence
  source 1..19: mol_type = other RNA
tctatcatggtatggcaaa

SEQ ID NO: 27607 - RNA, 19 nt, synthetic construct
  misc_feature 1..19: note = siRNA antisense sequence
  source 1..19: mol_type = other RNA
tttgccataccatgataga

SEQ ID NO: 27608 - RNA, 19 nt, synthetic construct
  misc_feature 1..19: note = siRNA sense sequence
  source 1..19: mol_type = other RNA
ctatcatggtatggcaaaa

SEQ ID NO: 27609 - RNA, 19 nt, synthetic construct
  misc_feature 1..19: note = siRNA antisense sequence
  source 1..19: mol_type = other RNA
ttttgccataccatgatag

SEQ ID NO: 27610 - RNA, 19 nt, synthetic construct
  misc_feature 1..19: note = siRNA sense sequence
  source 1..19: mol_type = other RNA
tatcatggtatggcaaaag

SEQ ID NO: 27611 - RNA, 19 nt, synthetic construct
  misc_feature 1..19: note = siRNA antisense sequence
  source 1..19: mol_type = other RNA
cttttgccataccatgata

SEQ ID NO: 27612 - RNA, 19 nt, synthetic construct
  misc_feature 1..19: note = siRNA sense sequence
  source 1..19: mol_type = other RNA
atcatggtatggcaaaagc

SEQ ID NO: 27613 - RNA, 19 nt, synthetic construct
  misc_feature 1..19: note = siRNA antisense sequence
  source 1..19: mol_type = other RNA
gcttttgccataccatgat

SEQ ID NO: 27614 - RNA, 19 nt, synthetic construct
  misc_feature 1..19: note = siRNA sense sequence
  source 1..19: mol_type = other RNA
tcatggtatggcaaaagca

SEQ ID NO: 27615 - RNA, 19 nt, synthetic construct
  misc_feature 1..19: note = siRNA antisense sequence
  source 1..19: mol_type = other RNA
tgcttttgccataccatga

SEQ ID NO: 27616 - RNA, 19 nt, synthetic construct
  misc_feature 1..19: note = siRNA sense sequence
  source 1..19: mol_type = other RNA
gtatggcaaaagcaggtct

SEQ ID NO: 27617 - RNA, 19 nt, synthetic construct
  misc_feature 1..19: note = siRNA antisense sequence
  source 1..19: mol_type = other RNA
agacctgcttttgccatac

SEQ ID NO: 27618 - RNA, 19 nt, synthetic construct
  misc_feature 1..19: note = siRNA sense sequence
  source 1..19: mol_type = other RNA
tatggcaaaagcaggtctc

SEQ ID NO: 27619 - RNA, 19 nt, synthetic construct
  misc_feature 1..19: note = siRNA antisense sequence
  source 1..19: mol_type = other RNA
gagacctgcttttgccata

SEQ ID NO: 27620 - RNA, 19 nt, synthetic construct
  misc_feature 1..19: note = siRNA sense sequence
  source 1..19: mol_type = other RNA
atggcaaaagcaggtctca

SEQ ID NO: 27621 - RNA, 19 nt, synthetic construct
  misc_feature 1..19: note = siRNA antisense sequence
  source 1..19: mol_type = other RNA
tgagacctgcttttgccat

SEQ ID NO: 27622 - RNA, 19 nt, synthetic construct
  misc_feature 1..19: note = siRNA sense sequence
  source 1..19: mol_type = other RNA
ggcaaaagcaggtctcagg

SEQ ID NO: 27623 - RNA, 19 nt, synthetic construct
  misc_feature 1..19: note = siRNA antisense sequence
  source 1..19: mol_type = other RNA
cctgagacctgcttttgcc

SEQ ID NO: 27624 - RNA, 19 nt, synthetic construct
  misc_feature 1..19: note = siRNA sense sequence
  source 1..19: mol_type = other RNA
tatttacataagcaggtag

SEQ ID NO: 27625 - RNA, 19 nt, synthetic construct
  misc_feature 1..19: note = siRNA antisense sequence
  source 1..19: mol_type = other RNA
ctacctgcttatgtaaata

SEQ ID NO: 27626 - RNA, 19 nt, synthetic construct
  misc_feature 1..19: note = siRNA sense sequence
  source 1..19: mol_type = other RNA
atttacataagcaggtagt

SEQ ID NO: 27627 - RNA, 19 nt, synthetic construct
  misc_feature 1..19: note = siRNA antisense sequence
  source 1..19: mol_type = other RNA
actacctgcttatgtaaat

SEQ ID NO: 27628 - RNA, 19 nt, synthetic construct
  misc_feature 1..19: note = siRNA sense sequence
  source 1..19: mol_type = other RNA
tttacataagcaggtagtg

SEQ ID NO: 27629 - RNA, 19 nt, synthetic construct
  misc_feature 1..19: note = siRNA antisense sequence
  source 1..19: mol_type = other RNA
cactacctgcttatgtaaa

SEQ ID NO: 27630 - RNA, 19 nt, synthetic construct
  misc_feature 1..19: note = siRNA sense sequence
  source 1..19: mol_type = other RNA
ttacataagcaggtagtgg

SEQ ID NO: 27631 - RNA, 19 nt, synthetic construct
  misc_feature 1..19: note = siRNA antisense sequence
  source 1..19: mol_type = other RNA
ccactacctgcttatgtaa

SEQ ID NO: 27632 - RNA, 19 nt, synthetic construct
  misc_feature 1..19: note = siRNA sense sequence
  source 1..19: mol_type = other RNA
tacataagcaggtagtggg

SEQ ID NO: 27633 - RNA, 19 nt, synthetic construct
  misc_feature 1..19: note = siRNA antisense sequence
  source 1..19: mol_type = other RNA
cccactacctgcttatgta

SEQ ID NO: 27634 - RNA, 19 nt, synthetic construct
  misc_feature 1..19: note = siRNA sense sequence
  source 1..19: mol_type = other RNA
acataagcaggtagtgggc

SEQ ID NO: 27635 - RNA, 19 nt, synthetic construct
  misc_feature 1..19: note = siRNA antisense sequence
  source 1..19: mol_type = other RNA
gcccactacctgcttatgt

SEQ ID NO: 27636 - RNA, 19 nt, synthetic construct
  misc_feature 1..19: note = siRNA sense sequence
  source 1..19: mol_type = other RNA
cataagcaggtagtgggca

SEQ ID NO: 27637 - RNA, 19 nt, synthetic construct
  misc_feature 1..19: note = siRNA antisense sequence
  source 1..19: mol_type = other RNA
tgcccactacctgcttatg

SEQ ID NO: 27638 - RNA, 19 nt, synthetic construct
  misc_feature 1..19: note = siRNA sense sequence
  source 1..19: mol_type = other RNA
agcaggtagtgggcaggat

SEQ ID NO: 27639 - RNA, 19 nt, synthetic construct
  misc_feature 1..19: note = siRNA antisense sequence
  source 1..19: mol_type = other RNA
atcctgcccactacctgct

SEQ ID NO: 27640 - RNA, 19 nt, synthetic construct
  misc_feature 1..19: note = siRNA sense sequence
  source 1..19: mol_type = other RNA
gcaggtagtgggcaggatt

SEQ ID NO: 27641 - RNA, 19 nt, synthetic construct
  misc_feature 1..19: note = siRNA antisense sequence
  source 1..19: mol_type = other RNA
aatcctgcccactacctgc

SEQ ID NO: 27642 - RNA, 19 nt, synthetic construct
  misc_feature 1..19: note = siRNA sense sequence
  source 1..19: mol_type = other RNA
ggtagtgggcaggatttgg

SEQ ID NO: 27643 - RNA, 19 nt, synthetic construct
  misc_feature 1..19: note = siRNA antisense sequence
  source 1..19: mol_type = other RNA
ccaaatcctgcccactacc

SEQ ID NO: 27644 - RNA, 19 nt, synthetic construct
  misc_feature 1..19: note = siRNA sense sequence
  source 1..19: mol_type = other RNA
tagtgggcaggatttggtc

SEQ ID NO: 27645 - RNA, 19 nt, synthetic construct
  misc_feature 1..19: note = siRNA antisense sequence
  source 1..19: mol_type = other RNA
gaccaaatcctgcccacta

SEQ ID NO: 27646 - RNA, 19 nt, synthetic construct
  misc_feature 1..19: note = siRNA sense sequence
  source 1..19: mol_type = other RNA
agtgggcaggatttggtct

SEQ ID NO: 27647 - RNA, 19 nt, synthetic construct
  misc_feature 1..19: note = siRNA antisense sequence
  source 1..19: mol_type = other RNA
agaccaaatcctgcccact

SEQ ID NO: 27648 - RNA, 19 nt, synthetic construct
  misc_feature 1..19: note = siRNA sense sequence
  source 1..19: mol_type = other RNA
gtgggcaggatttggtctg

SEQ ID NO: 27649 - RNA, 19 nt, synthetic construct
  misc_feature 1..19: note = siRNA antisense sequence
  source 1..19: mol_type = other RNA
cagaccaaatcctgcccac

SEQ ID NO: 27650 - RNA, 19 nt, synthetic construct
  misc_feature 1..19: note = siRNA sense sequence
  source 1..19: mol_type = other RNA
tgggcaggatttggtctgt

SEQ ID NO: 27651 - RNA, 19 nt, synthetic construct
  misc_feature 1..19: note = siRNA antisense sequence
  source 1..19: mol_type = other RNA
acagaccaaatcctgccca

SEQ ID NO: 27652 - RNA, 19 nt, synthetic construct
  misc_feature 1..19: note = siRNA sense sequence
  source 1..19: mol_type = other RNA
gatttggtctgtaggacac

SEQ ID NO: 27653 - RNA, 19 nt, synthetic construct
  misc_feature 1..19: note = siRNA antisense sequence
  source 1..19: mol_type = other RNA
gtgtcctacagaccaaatc

SEQ ID NO: 27654 - RNA, 19 nt, synthetic construct
  misc_feature 1..19: note = siRNA sense sequence
  source 1..19: mol_type = other RNA
aaccctggcctagagcatg

SEQ ID NO: 27655 - RNA, 19 nt, synthetic construct
  misc_feature 1..19: note = siRNA antisense sequence
  source 1..19: mol_type = other RNA
catgctctaggccagggtt

SEQ ID NO: 27656 - RNA, 19 nt, synthetic construct
  misc_feature 1..19: note = siRNA sense sequence
  source 1..19: mol_type = other RNA
accctggcctagagcatga

SEQ ID NO: 27657 - RNA, 19 nt, synthetic construct
  misc_feature 1..19: note = siRNA antisense sequence
  source 1..19: mol_type = other RNA
tcatgctctaggccagggt

SEQ ID NO: 27658 - RNA, 19 nt, synthetic construct
  misc_feature 1..19: note = siRNA sense sequence
  source 1..19: mol_type = other RNA
ccctggcctagagcatgat

SEQ ID NO: 27659 - RNA, 19 nt, synthetic construct
  misc_feature 1..19: note = siRNA antisense sequence
  source 1..19: mol_type = other RNA
atcatgctctaggccaggg

SEQ ID NO: 27660 - RNA, 19 nt, synthetic construct
  misc_feature 1..19: note = siRNA sense sequence
  source 1..19: mol_type = other RNA
cctggcctagagcatgata

SEQ ID NO: 27661 - RNA, 19 nt, synthetic construct
  misc_feature 1..19: note = siRNA antisense sequence
  source 1..19: mol_type = other RNA
tatcatgctctaggccagg

SEQ ID NO: 27662 - RNA, 19 nt, synthetic construct
  misc_feature 1..19: note = siRNA sense sequence
  source 1..19: mol_type = other RNA
gcctagagcatgatataga

SEQ ID NO: 27663 - RNA, 19 nt, synthetic construct
  misc_feature 1..19: note = siRNA antisense sequence
  source 1..19: mol_type = other RNA
tctatatcatgctctaggc

SEQ ID NO: 27664 - RNA, 19 nt, synthetic construct
  misc_feature 1..19: note = siRNA sense sequence
  source 1..19: mol_type = other RNA
ctagagcatgatatagagt

SEQ ID NO: 27665 - RNA, 19 nt, synthetic construct
  misc_feature 1..19: note = siRNA antisense sequence
  source 1..19: mol_type = other RNA
actctatatcatgctctag

SEQ ID NO: 27666 - RNA, 19 nt, synthetic construct
  misc_feature 1..19: note = siRNA sense sequence
  source 1..19: mol_type = other RNA
tagagcatgatatagagta

SEQ ID NO: 27667 - RNA, 19 nt, synthetic construct
  misc_feature 1..19: note = siRNA antisense sequence
  source 1..19: mol_type = other RNA
tactctatatcatgctcta

SEQ ID NO: 27668 - RNA, 19 nt, synthetic construct
  misc_feature 1..19: note = siRNA sense sequence
  source 1..19: mol_type = other RNA
agagcatgatatagagtat

SEQ ID NO: 27669 - RNA, 19 nt, synthetic construct
  misc_feature 1..19: note = siRNA antisense sequence
  source 1..19: mol_type = other RNA
atactctatatcatgctct

SEQ ID NO: 27670 - RNA, 19 nt, synthetic construct
  misc_feature 1..19: note = siRNA sense sequence
  source 1..19: mol_type = other RNA
gagcatgatatagagtatg

SEQ ID NO: 27671 - RNA, 19 nt, synthetic construct
  misc_feature 1..19: note = siRNA antisense sequence
  source 1..19: mol_type = other RNA
catactctatatcatgctc

SEQ ID NO: 27672 - RNA, 19 nt, synthetic construct
  misc_feature 1..19: note = siRNA sense sequence
  source 1..19: mol_type = other RNA
catgatatagagtatgctt

SEQ ID NO: 27673 - RNA, 19 nt, synthetic construct
  misc_feature 1..19: note = siRNA antisense sequence
  source 1..19: mol_type = other RNA
aagcatactctatatcatg

SEQ ID NO: 27674 - RNA, 19 nt, synthetic construct
  misc_feature 1..19: note = siRNA sense sequence
  source 1..19: mol_type = other RNA
tgatatagagtatgcttac

SEQ ID NO: 27675 - RNA, 19 nt, synthetic construct
  misc_feature 1..19: note = siRNA antisense sequence
  source 1..19: mol_type = other RNA
gtaagcatactctatatca

SEQ ID NO: 27676 - RNA, 19 nt, synthetic construct
  misc_feature 1..19: note = siRNA sense sequence
  source 1..19: mol_type = other RNA
gatatagagtatgcttaca

SEQ ID NO: 27677 - RNA, 19 nt, synthetic construct
  misc_feature 1..19: note = siRNA antisense sequence
  source 1..19: mol_type = other RNA
tgtaagcatactctatatc

SEQ ID NO: 27678 - RNA, 19 nt, synthetic construct
  misc_feature 1..19: note = siRNA sense sequence
  source 1..19: mol_type = other RNA
aagataactattctagagg

SEQ ID NO: 27679 - RNA, 19 nt, synthetic construct
  misc_feature 1..19: note = siRNA antisense sequence
  source 1..19: mol_type = other RNA
cctctagaatagttatctt

SEQ ID NO: 27680 - RNA, 19 nt, synthetic construct
  misc_feature 1..19: note = siRNA sense sequence
  source 1..19: mol_type = other RNA
agattaactcagcaattac

SEQ ID NO: 27681 - RNA, 19 nt, synthetic construct
  misc_feature 1..19: note = siRNA antisense sequence
  source 1..19: mol_type = other RNA
gtaattgctgagttaatct

SEQ ID NO: 27682 - RNA, 19 nt, synthetic construct
  misc_feature 1..19: note = siRNA sense sequence
  source 1..19: mol_type = other RNA
gattaactcagcaattaca

SEQ ID NO: 27683 - RNA, 19 nt, synthetic construct
  misc_feature 1..19: note = siRNA antisense sequence
  source 1..19: mol_type = other RNA
tgtaattgctgagttaatc

SEQ ID NO: 27684 - RNA, 19 nt, synthetic construct
  misc_feature 1..19: note = siRNA sense sequence
  source 1..19: mol_type = other RNA
caaggcttgctgagttgaa

SEQ ID NO: 27685 - RNA, 19 nt, synthetic construct
  misc_feature 1..19: note = siRNA antisense sequence
  source 1..19: mol_type = other RNA
ttcaactcagcaagccttg

SEQ ID NO: 27686 - RNA, 19 nt, synthetic construct
  misc_feature 1..19: note = siRNA sense sequence
  source 1..19: mol_type = other RNA
aaatggtatggttctctaa

SEQ ID NO: 27687 - RNA, 19 nt, synthetic construct
  misc_feature 1..19: note = siRNA antisense sequence
  source 1..19: mol_type = other RNA
ttagagaaccataccattt

SEQ ID NO: 27688 - RNA, 19 nt, synthetic construct
  misc_feature 1..19: note = siRNA sense sequence
  source 1..19: mol_type = other RNA
aatggtatggttctctaac

SEQ ID NO: 27689 - RNA, 19 nt, synthetic construct
  misc_feature 1..19: note = siRNA antisense sequence
  source 1..19: mol_type = other RNA
gttagagaaccataccatt

SEQ ID NO: 27690 - RNA, 19 nt, synthetic construct
  misc_feature 1..19: note = siRNA sense sequence
  source 1..19: mol_type = other RNA
atggtatggttctctaact

SEQ ID NO: 27691 - RNA, 19 nt, synthetic construct
  misc_feature 1..19: note = siRNA antisense sequence
  source 1..19: mol_type = other RNA
agttagagaaccataccat

SEQ ID NO: 27692 - RNA, 19 nt, synthetic construct
  misc_feature 1..19: note = siRNA sense sequence
  source 1..19: mol_type = other RNA
tggtatggttctctaacta

SEQ ID NO: 27693 - RNA, 19 nt, synthetic construct
  misc_feature 1..19: note = siRNA antisense sequence
  source 1..19: mol_type = other RNA
tagttagagaaccatacca

SEQ ID NO: 27694 - RNA, 19 nt, synthetic construct
  misc_feature 1..19: note = siRNA sense sequence
  source 1..19: mol_type = other RNA
ggtatggttctctaactat

SEQ ID NO: 27695 - RNA, 19 nt, synthetic construct
  misc_feature 1..19: note = siRNA antisense sequence
  source 1..19: mol_type = other RNA
atagttagagaaccatacc

SEQ ID NO: 27696 - RNA, 19 nt, synthetic construct
  misc_feature 1..19: note = siRNA sense sequence
  source 1..19: mol_type = other RNA
gtatggttctctaactata

SEQ ID NO: 27697 - RNA, 19 nt, synthetic construct
  misc_feature 1..19: note = siRNA antisense sequence
  source 1..19: mol_type = other RNA
tatagttagagaaccatac

SEQ ID NO: 27698 - RNA, 19 nt, synthetic construct
  misc_feature 1..19: note = siRNA sense sequence
  source 1..19: mol_type = other RNA
tggttctctaactatattc

SEQ ID NO: 27699 - RNA, 19 nt, synthetic construct
  misc_feature 1..19: note = siRNA antisense sequence
  source 1..19: mol_type = other RNA
gaatatagttagagaacca

SEQ ID NO: 27700 - RNA, 19 nt, synthetic construct
  misc_feature 1..19: note = siRNA sense sequence
  source 1..19: mol_type = other RNA
ggttctctaactatattct

SEQ ID NO: 27701 - RNA, 19 nt, synthetic construct
  misc_feature 1..19: note = siRNA antisense sequence
  source 1..19: mol_type = other RNA
agaatatagttagagaacc

SEQ ID NO: 27702 - RNA, 19 nt, synthetic construct
  misc_feature 1..19: note = siRNA sense sequence
  source 1..19: mol_type = other RNA
gttctctaactatattctg

SEQ ID NO: 27703 - RNA, 19 nt, synthetic construct
  misc_feature 1..19: note = siRNA antisense sequence
  source 1..19: mol_type = other RNA
cagaatatagttagagaac

SEQ ID NO: 27704 - RNA, 19 nt, synthetic construct
  misc_feature 1..19: note = siRNA sense sequence
  source 1..19: mol_type = other RNA
actatattctgttgagttg

SEQ ID NO: 27705 - RNA, 19 nt, synthetic construct
  misc_feature 1..19: note = siRNA antisense sequence
  source 1..19: mol_type = other RNA
caactcaacagaatatagt

SEQ ID NO: 27706 - RNA, 19 nt, synthetic construct
  misc_feature 1..19: note = siRNA sense sequence
  source 1..19: mol_type = other RNA
ctatattctgttgagttgc

SEQ ID NO: 27707 - RNA, 19 nt, synthetic construct
  misc_feature 1..19: note = siRNA antisense sequence
  source 1..19: mol_type = other RNA
gcaactcaacagaatatag

SEQ ID NO: 27708 - RNA, 19 nt, synthetic construct
  misc_feature 1..19: note = siRNA sense sequence
  source 1..19: mol_type = other RNA
tatattctgttgagttgct

SEQ ID NO: 27709 - RNA, 19 nt, synthetic construct
  misc_feature 1..19: note = siRNA antisense sequence
  source 1..19: mol_type = other RNA
agcaactcaacagaatata

SEQ ID NO: 27710 - RNA, 19 nt, synthetic construct
  misc_feature 1..19: note = siRNA sense sequence
  source 1..19: mol_type = other RNA
atattctgttgagttgctg

SEQ ID NO: 27711 - RNA, 19 nt, synthetic construct
  misc_feature 1..19: note = siRNA antisense sequence
  source 1..19: mol_type = other RNA
cagcaactcaacagaatat

SEQ ID NO: 27712 - RNA, 19 nt, synthetic construct
  misc_feature 1..19: note = siRNA sense sequence
  source 1..19: mol_type = other RNA
tgagttgctggtgtgtaaa

SEQ ID NO: 27713 - RNA, 19 nt, synthetic construct
  misc_feature 1..19: note = siRNA antisense sequence
  source 1..19: mol_type = other RNA
tttacacaccagcaactca

SEQ ID NO: 27714 - RNA, 19 nt, synthetic construct
  misc_feature 1..19: note = siRNA sense sequence
  source 1..19: mol_type = other RNA
gttgctggtgtgtaaatca

SEQ ID NO: 27715 - RNA, 19 nt, synthetic construct
  misc_feature 1..19: note = siRNA antisense sequence
  source 1..19: mol_type = other RNA
tgatttacacaccagcaac

SEQ ID NO: 27716 - RNA, 19 nt, synthetic construct
  misc_feature 1..19: note = siRNA sense sequence
  source 1..19: mol_type = other RNA
ttgctggtgtgtaaatcac

SEQ ID NO: 27717 - RNA, 19 nt, synthetic construct
  misc_feature 1..19: note = siRNA antisense sequence
  source 1..19: mol_type = other RNA
gtgatttacacaccagcaa

SEQ ID NO: 27718 - RNA, 19 nt, synthetic construct
  misc_feature 1..19: note = siRNA sense sequence
  source 1..19: mol_type = other RNA
gtgtaaatcacattgtaac

SEQ ID NO: 27719 - RNA, 19 nt, synthetic construct
  misc_feature 1..19: note = siRNA antisense sequence
  source 1..19: mol_type = other RNA
gttacaatgtgatttacac

SEQ ID NO: 27720 - RNA, 19 nt, synthetic construct
  misc_feature 1..19: note = siRNA sense sequence
  source 1..19: mol_type = other RNA
aatcacattgtaactggcc

SEQ ID NO: 27721 - RNA, 19 nt, synthetic construct
  misc_feature 1..19: note = siRNA antisense sequence
  source 1..19: mol_type = other RNA
ggccagttacaatgtgatt

SEQ ID NO: 27722 - RNA, 19 nt, synthetic construct
  misc_feature 1..19: note = siRNA sense sequence
  source 1..19: mol_type = other RNA
atcacattgtaactggcca

SEQ ID NO: 27723 - RNA, 19 nt, synthetic construct
  misc_feature 1..19: note = siRNA antisense sequence
  source 1..19: mol_type = other RNA
tggccagttacaatgtgat

SEQ ID NO: 27724 - RNA, 19 nt, synthetic construct
  misc_feature 1..19: note = siRNA sense sequence
  source 1..19: mol_type = other RNA
tcacattgtaactggccac

SEQ ID NO: 27725 - RNA, 19 nt, synthetic construct
  misc_feature 1..19: note = siRNA antisense sequence
  source 1..19: mol_type = other RNA
gtggccagttacaatgtga

SEQ ID NO: 27726 - RNA, 19 nt, synthetic construct
  misc_feature 1..19: note = siRNA sense sequence
  source 1..19: mol_type = other RNA
cacattgtaactggccact

SEQ ID NO: 27727 - RNA, 19 nt, synthetic construct
  misc_feature 1..19: note = siRNA antisense sequence
  source 1..19: mol_type = other RNA
agtggccagttacaatgtg

SEQ ID NO: 27728 - RNA, 19 nt, synthetic construct
  misc_feature 1..19: note = siRNA sense sequence
  source 1..19: mol_type = other RNA
acattgtaactggccacta

SEQ ID NO: 27729 - RNA, 19 nt, synthetic construct
  misc_feature 1..19: note = siRNA antisense sequence
  source 1..19: mol_type = other RNA
tagtggccagttacaatgt

SEQ ID NO: 27730 - RNA, 19 nt, synthetic construct
  misc_feature 1..19: note = siRNA sense sequence
  source 1..19: mol_type = other RNA
cattgtaactggccactat

SEQ ID NO: 27731 - RNA, 19 nt, synthetic construct
  misc_feature 1..19: note = siRNA antisense sequence
  source 1..19: mol_type = other RNA
atagtggccagttacaatg

SEQ ID NO: 27732 - RNA, 19 nt, synthetic construct
  misc_feature 1..19: note = siRNA sense sequence
  source 1..19: mol_type = other RNA
attgtaactggccactatt

SEQ ID NO: 27733 - RNA, 19 nt, synthetic construct
  misc_feature 1..19: note = siRNA antisense sequence
  source 1..19: mol_type = other RNA
aatagtggccagttacaat

SEQ ID NO: 27734 - RNA, 19 nt, synthetic construct
  misc_feature 1..19: note = siRNA sense sequence
  source 1..19: mol_type = other RNA
ttgtaactggccactatta

SEQ ID NO: 27735 - RNA, 19 nt, synthetic construct
  misc_feature 1..19: note = siRNA antisense sequence
  source 1..19: mol_type = other RNA
taatagtggccagttacaa

SEQ ID NO: 27736 - RNA, 19 nt, synthetic construct
  misc_feature 1..19: note = siRNA sense sequence
  source 1..19: mol_type = other RNA
taactggccactattactt

SEQ ID NO: 27737 - RNA, 19 nt, synthetic construct
  misc_feature 1..19: note = siRNA antisense sequence
  source 1..19: mol_type = other RNA
aagtaatagtggccagtta

SEQ ID NO: 27738 - RNA, 19 nt, synthetic construct
  misc_feature 1..19: note = siRNA sense sequence
  source 1..19: mol_type = other RNA
aactggccactattacttt

SEQ ID NO: 27739 - RNA, 19 nt, synthetic construct
  misc_feature 1..19: note = siRNA antisense sequence
  source 1..19: mol_type = other RNA
aaagtaatagtggccagtt

SEQ ID NO: 27740 - RNA, 19 nt, synthetic construct
  misc_feature 1..19: note = siRNA sense sequence
  source 1..19: mol_type = other RNA
actggccactattactttt

SEQ ID NO: 27741 - RNA, 19 nt, synthetic construct
  misc_feature 1..19: note = siRNA antisense sequence
  source 1..19: mol_type = other RNA
aaaagtaatagtggccagt

SEQ ID NO: 27742 - RNA, 19 nt, synthetic construct
  misc_feature 1..19: note = siRNA sense sequence
  source 1..19: mol_type = other RNA
atgcttatttgcacattag

SEQ ID NO: 27743 - RNA, 19 nt, synthetic construct
  misc_feature 1..19: note = siRNA antisense sequence
  source 1..19: mol_type = other RNA
ctaatgtgcaaataagcat

SEQ ID NO: 27744 - RNA, 19 nt, synthetic construct
  misc_feature 1..19: note = siRNA sense sequence
  source 1..19: mol_type = other RNA
tgcttatttgcacattagg

SEQ ID NO: 27745 - RNA, 19 nt, synthetic construct
  misc_feature 1..19: note = siRNA antisense sequence
  source 1..19: mol_type = other RNA
cctaatgtgcaaataagca

SEQ ID NO: 27746 - RNA, 19 nt, synthetic construct
  misc_feature 1..19: note = siRNA sense sequence
  source 1..19: mol_type = other RNA
gcttatttgcacattaggg

SEQ ID NO: 27747 - RNA, 19 nt, synthetic construct
  misc_feature 1..19: note = siRNA antisense sequence
  source 1..19: mol_type = other RNA
ccctaatgtgcaaataagc

SEQ ID NO: 27748 - RNA, 19 nt, synthetic construct
  misc_feature 1..19: note = siRNA sense sequence
  source 1..19: mol_type = other RNA
cttatttgcacattagggt

SEQ ID NO: 27749 - RNA, 19 nt, synthetic construct
  misc_feature 1..19: note = siRNA antisense sequence
  source 1..19: mol_type = other RNA
accctaatgtgcaaataag

SEQ ID NO: 27750 - RNA, 19 nt, synthetic construct
  misc_feature 1..19: note = siRNA sense sequence
  source 1..19: mol_type = other RNA
ttatttgcacattagggtt

SEQ ID NO: 27751 - RNA, 19 nt, synthetic construct
  misc_feature 1..19: note = siRNA antisense sequence
  source 1..19: mol_type = other RNA
aaccctaatgtgcaaataa

SEQ ID NO: 27752 - RNA, 19 nt, synthetic construct
  misc_feature 1..19: note = siRNA sense sequence
  source 1..19: mol_type = other RNA
atttgcacattagggttta

SEQ ID NO: 27753 - RNA, 19 nt, synthetic construct
  misc_feature 1..19: note = siRNA antisense sequence
  source 1..19: mol_type = other RNA
taaaccctaatgtgcaaat

SEQ ID NO: 27754 - RNA, 19 nt, synthetic construct
  misc_feature 1..19: note = siRNA sense sequence
  source 1..19: mol_type = other RNA
tttgattcagatccattac

SEQ ID NO: 27755 - RNA, 19 nt, synthetic construct
  misc_feature 1..19: note = siRNA antisense sequence
  source 1..19: mol_type = other RNA
gtaatggatctgaatcaaa

SEQ ID NO: 27756 - RNA, 19 nt, synthetic construct
  misc_feature 1..19: note = siRNA sense sequence
  source 1..19: mol_type = other RNA
ttgattcagatccattaca

SEQ ID NO: 27757 - RNA, 19 nt, synthetic construct
  misc_feature 1..19: note = siRNA antisense sequence
  source 1..19: mol_type = other RNA
tgtaatggatctgaatcaa

SEQ ID NO: 27758 - RNA, 19 nt, synthetic construct
  misc_feature 1..19: note = siRNA sense sequence
  source 1..19: mol_type = other RNA
tgattcagatccattacac

SEQ ID NO: 27759 - RNA, 19 nt, synthetic construct
  misc_feature 1..19: note = siRNA antisense sequence
  source 1..19: mol_type = other RNA
gtgtaatggatctgaatca

SEQ ID NO: 27760 - RNA, 19 nt, synthetic construct
  misc_feature 1..19: note = siRNA sense sequence
  source 1..19: mol_type = other RNA
tgtgaatttcctgggaagt

SEQ ID NO: 27761 - RNA, 19 nt, synthetic construct
  misc_feature 1..19: note = siRNA antisense sequence
  source 1..19: mol_type = other RNA
acttcccaggaaattcaca

SEQ ID NO: 27762 - RNA, 19 nt, synthetic construct
  misc_feature 1..19: note = siRNA sense sequence
  source 1..19: mol_type = other RNA
gtgaatttcctgggaagta

SEQ ID NO: 27763 - RNA, 19 nt, synthetic construct
  misc_feature 1..19: note = siRNA antisense sequence
  source 1..19: mol_type = other RNA
tacttcccaggaaattcac

SEQ ID NO: 27764 - RNA, 19 nt, synthetic construct
  misc_feature 1..19: note = siRNA sense sequence
  source 1..19: mol_type = other RNA
tgaatttcctgggaagtat

SEQ ID NO: 27765 - RNA, 19 nt, synthetic construct
  misc_feature 1..19: note = siRNA antisense sequence
  source 1..19: mol_type = other RNA
atacttcccaggaaattca

SEQ ID NO: 27766 - RNA, 19 nt, synthetic construct
  misc_feature 1..19: note = siRNA sense sequence
  source 1..19: mol_type = other RNA
gaatttcctgggaagtata

SEQ ID NO: 27767 - RNA, 19 nt, synthetic construct
  misc_feature 1..19: note = siRNA antisense sequence
  source 1..19: mol_type = other RNA
tatacttcccaggaaattc

SEQ ID NO: 27768 - RNA, 19 nt, synthetic construct
  misc_feature 1..19: note = siRNA sense sequence
  source 1..19: mol_type = other RNA
aatttcctgggaagtatat

SEQ ID NO: 27769 - RNA, 19 nt, synthetic construct
  misc_feature 1..19: note = siRNA antisense sequence
  source 1..19: mol_type = other RNA
atatacttcccaggaaatt

SEQ ID NO: 27770 - RNA, 19 nt, synthetic construct
  misc_feature 1..19: note = siRNA sense sequence
  source 1..19: mol_type = other RNA
agtatcacttacctgacag

SEQ ID NO: 27771 - RNA, 19 nt, synthetic construct
  misc_feature 1..19: note = siRNA antisense sequence
  source 1..19: mol_type = other RNA
ctgtcaggtaagtgatact

SEQ ID NO: 27772 - RNA, 19 nt, synthetic construct
  misc_feature 1..19: note = siRNA sense sequence
  source 1..19: mol_type = other RNA
gtatcacttacctgacagc

SEQ ID NO: 27773 - RNA, 19 nt, synthetic construct
  misc_feature 1..19: note = siRNA antisense sequence
  source 1..19: mol_type = other RNA
gctgtcaggtaagtgatac

SEQ ID NO: 27774 - RNA, 19 nt, synthetic construct
  misc_feature 1..19: note = siRNA sense sequence
  source 1..19: mol_type = other RNA
tatcacttacctgacagca

SEQ ID NO: 27775 - RNA, 19 nt, synthetic construct
  misc_feature 1..19: note = siRNA antisense sequence
  source 1..19: mol_type = other RNA
tgctgtcaggtaagtgata

SEQ ID NO: 27776 - RNA, 19 nt, synthetic construct
  misc_feature 1..19: note = siRNA sense sequence
  source 1..19: mol_type = other RNA
atcacttacctgacagcat

SEQ ID NO: 27777 - RNA, 19 nt, synthetic construct
  misc_feature 1..19: note = siRNA antisense sequence
  source 1..19: mol_type = other RNA
atgctgtcaggtaagtgat

SEQ ID NO: 27778 - RNA, 19 nt, synthetic construct
  misc_feature 1..19: note = siRNA sense sequence
  source 1..19: mol_type = other RNA
tcacttacctgacagcatc

SEQ ID NO: 27779 - RNA, 19 nt, synthetic construct
  misc_feature 1..19: note = siRNA antisense sequence
  source 1..19: mol_type = other RNA
gatgctgtcaggtaagtga

SEQ ID NO: 27780 - RNA, 19 nt, synthetic construct
  misc_feature 1..19: note = siRNA sense sequence
  source 1..19: mol_type = other RNA
acttacctgacagcatctg

SEQ ID NO: 27781 - RNA, 19 nt, synthetic construct
  misc_feature 1..19: note = siRNA antisense sequence
  source 1..19: mol_type = other RNA
cagatgctgtcaggtaagt

SEQ ID NO: 27782 - RNA, 19 nt, synthetic construct
  misc_feature 1..19: note = siRNA sense sequence
  source 1..19: mol_type = other RNA
cttacctgacagcatctga

SEQ ID NO: 27783 - RNA, 19 nt, synthetic construct
  misc_feature 1..19: note = siRNA antisense sequence
  source 1..19: mol_type = other RNA
tcagatgctgtcaggtaag

SEQ ID NO: 27784 - RNA, 19 nt, synthetic construct
  misc_feature 1..19: note = siRNA sense sequence
  source 1..19: mol_type = other RNA
ttacctgacagcatctgag

SEQ ID NO: 27785 - RNA, 19 nt, synthetic construct
  misc_feature 1..19: note = siRNA antisense sequence
  source 1..19: mol_type = other RNA
ctcagatgctgtcaggtaa

SEQ ID NO: 27786 - RNA, 19 nt, synthetic construct
  misc_feature 1..19: note = siRNA sense sequence
  source 1..19: mol_type = other RNA
tacctgacagcatctgagc

SEQ ID NO: 27787 - RNA, 19 nt, synthetic construct
  misc_feature 1..19: note = siRNA antisense sequence
  source 1..19: mol_type = other RNA
gctcagatgctgtcaggta

SEQ ID NO: 27788 - RNA, 19 nt, synthetic construct
  misc_feature 1..19: note = siRNA sense sequence
  source 1..19: mol_type = other RNA
acagcatctgagccattgt

SEQ ID NO: 27789 - RNA, 19 nt, synthetic construct
  misc_feature 1..19: note = siRNA antisense sequence
  source 1..19: mol_type = other RNA
acaatggctcagatgctgt

SEQ ID NO: 27790 - RNA, 19 nt, synthetic construct
  misc_feature 1..19: note = siRNA sense sequence
  source 1..19: mol_type = other RNA
cagcatctgagccattgtg

SEQ ID NO: 27791 - RNA, 19 nt, synthetic construct
  misc_feature 1..19: note = siRNA antisense sequence
  source 1..19: mol_type = other RNA
cacaatggctcagatgctg

SEQ ID NO: 27792 - RNA, 19 nt, synthetic construct
  misc_feature 1..19: note = siRNA sense sequence
  source 1..19: mol_type = other RNA
agcatctgagccattgtgt

SEQ ID NO: 27793 - RNA, 19 nt, synthetic construct
  misc_feature 1..19: note = siRNA antisense sequence
  source 1..19: mol_type = other RNA
acacaatggctcagatgct

SEQ ID NO: 27794 - RNA, 19 nt, synthetic construct
  misc_feature 1..19: note = siRNA sense sequence
  source 1..19: mol_type = other RNA
gcatctgagccattgtgtt

SEQ ID NO: 27795 - RNA, 19 nt, synthetic construct
  misc_feature 1..19: note = siRNA antisense sequence
  source 1..19: mol_type = other RNA
aacacaatggctcagatgc

SEQ ID NO: 27796 - RNA, 19 nt, synthetic construct
  misc_feature 1..19: note = siRNA sense sequence
  source 1..19: mol_type = other RNA
catctgagccattgtgtta

SEQ ID NO: 27797 - RNA, 19 nt, synthetic construct
  misc_feature 1..19: note = siRNA antisense sequence
  source 1..19: mol_type = other RNA
taacacaatggctcagatg

SEQ ID NO: 27798 - RNA, 19 nt, synthetic construct
  misc_feature 1..19: note = siRNA sense sequence
  source 1..19: mol_type = other RNA
atctgagccattgtgttat

SEQ ID NO: 27799 - RNA, 19 nt, synthetic construct
  misc_feature 1..19: note = siRNA antisense sequence
  source 1..19: mol_type = other RNA
ataacacaatggctcagat

SEQ ID NO: 27800 - RNA, 19 nt, synthetic construct
  misc_feature 1..19: note = siRNA sense sequence
  source 1..19: mol_type = other RNA
tctgagccattgtgttata

SEQ ID NO: 27801 - RNA, 19 nt, synthetic construct
  misc_feature 1..19: note = siRNA antisense sequence
  source 1..19: mol_type = other RNA
tataacacaatggctcaga

SEQ ID NO: 27802 - RNA, 19 nt, synthetic construct
  misc_feature 1..19: note = siRNA sense sequence
  source 1..19: mol_type = other RNA
tgagccattgtgttataag

SEQ ID NO: 27803 - RNA, 19 nt, synthetic construct
  misc_feature 1..19: note = siRNA antisense sequence
  source 1..19: mol_type = other RNA
cttataacacaatggctca

SEQ ID NO: 27804 - RNA, 19 nt, synthetic construct
  misc_feature 1..19: note = siRNA sense sequence
  source 1..19: mol_type = other RNA
gagccattgtgttataagg

SEQ ID NO: 27805 - RNA, 19 nt, synthetic construct
  misc_feature 1..19: note = siRNA antisense sequence
  source 1..19: mol_type = other RNA
ccttataacacaatggctc

SEQ ID NO: 27806 - RNA, 19 nt, synthetic construct
  misc_feature 1..19: note = siRNA sense sequence
  source 1..19: mol_type = other RNA
agccattgtgttataagga

SEQ ID NO: 27807 - RNA, 19 nt, synthetic construct
  misc_feature 1..19: note = siRNA antisense sequence
  source 1..19: mol_type = other RNA
tccttataacacaatggct

SEQ ID NO: 27808 - RNA, 19 nt, synthetic construct
  misc_feature 1..19: note = siRNA sense sequence
  source 1..19: mol_type = other RNA
gccattgtgttataaggaa

SEQ ID NO: 27809 - RNA, 19 nt, synthetic construct
  misc_feature 1..19: note = siRNA antisense sequence
  source 1..19: mol_type = other RNA
ttccttataacacaatggc

SEQ ID NO: 27810 - RNA, 19 nt, synthetic construct
  misc_feature 1..19: note = siRNA sense sequence
  source 1..19: mol_type = other RNA
aatttcctgcagggattga

SEQ ID NO: 27811 - RNA, 19 nt, synthetic construct
  misc_feature 1..19: note = siRNA antisense sequence
  source 1..19: mol_type = other RNA
tcaatccctgcaggaaatt

SEQ ID NO: 27812 - RNA, 19 nt, synthetic construct
  misc_feature 1..19: note = siRNA sense sequence
  source 1..19: mol_type = other RNA
atttcctgcagggattgaa

SEQ ID NO: 27813 - RNA, 19 nt, synthetic construct
  misc_feature 1..19: note = siRNA antisense sequence
  source 1..19: mol_type = other RNA
ttcaatccctgcaggaaat

SEQ ID NO: 27814 - RNA, 19 nt, synthetic construct
  misc_feature 1..19: note = siRNA sense sequence
  source 1..19: mol_type = other RNA
tttcctgcagggattgaat

SEQ ID NO: 27815 - RNA, 19 nt, synthetic construct
  misc_feature 1..19: note = siRNA antisense sequence
  source 1..19: mol_type = other RNA
attcaatccctgcaggaaa

SEQ ID NO: 27816 - RNA, 19 nt, synthetic construct
  misc_feature 1..19: note = siRNA sense sequence
  source 1..19: mol_type = other RNA
gttaggcttagccctcagt

SEQ ID NO: 27817 - RNA, 19 nt, synthetic construct
  misc_feature 1..19: note = siRNA antisense sequence
  source 1..19: mol_type = other RNA
actgagggctaagcctaac

SEQ ID NO: 27818 - RNA, 19 nt, synthetic construct
  misc_feature 1..19: note = siRNA sense sequence
  source 1..19: mol_type = other RNA
taggcttagccctcagtgg

SEQ ID NO: 27819 - RNA, 19 nt, synthetic construct
  misc_feature 1..19: note = siRNA antisense sequence
  source 1..19: mol_type = other RNA
ccactgagggctaagccta

SEQ ID NO: 27820 - RNA, 19 nt, synthetic construct
  misc_feature 1..19: note = siRNA sense sequence
  source 1..19: mol_type = other RNA
aggcttagccctcagtggt

SEQ ID NO: 27821 - RNA, 19 nt, synthetic construct
  misc_feature 1..19: note = siRNA antisense sequence
  source 1..19: mol_type = other RNA
accactgagggctaagcct

SEQ ID NO: 27822 - RNA, 19 nt, synthetic construct
  misc_feature 1..19: note = siRNA sense sequence
  source 1..19: mol_type = other RNA
ggcttagccctcagtggtt

SEQ ID NO: 27823 - RNA, 19 nt, synthetic construct
  misc_feature 1..19: note = siRNA antisense sequence
  source 1..19: mol_type = other RNA
aaccactgagggctaagcc

SEQ ID NO: 27824 - RNA, 19 nt, synthetic construct
  misc_feature 1..19: note = siRNA sense sequence
  source 1..19: mol_type = other RNA
gcttagccctcagtggttt

SEQ ID NO: 27825 - RNA, 19 nt, synthetic construct
  misc_feature 1..19: note = siRNA antisense sequence
  source 1..19: mol_type = other RNA
aaaccactgagggctaagc

SEQ ID NO: 27826 - RNA, 19 nt, synthetic construct
  misc_feature 1..19: note = siRNA sense sequence
  source 1..19: mol_type = other RNA
cttagccctcagtggtttt

SEQ ID NO: 27827 - RNA, 19 nt, synthetic construct
  misc_feature 1..19: note = siRNA antisense sequence
  source 1..19: mol_type = other RNA
aaaaccactgagggctaag

SEQ ID NO: 27828 - RNA, 19 nt, synthetic construct
  misc_feature 1..19: note = siRNA sense sequence
  source 1..19: mol_type = other RNA
ttagccctcagtggttttg

SEQ ID NO: 27829 - RNA, 19 nt, synthetic construct
  misc_feature 1..19: note = siRNA antisense sequence
  source 1..19: mol_type = other RNA
caaaaccactgagggctaa

SEQ ID NO: 27830 - RNA, 19 nt, synthetic construct
  misc_feature 1..19: note = siRNA sense sequence
  source 1..19: mol_type = other RNA
tagccctcagtggttttgt

SEQ ID NO: 27831 - RNA, 19 nt, synthetic construct
  misc_feature 1..19: note = siRNA antisense sequence
  source 1..19: mol_type = other RNA
acaaaaccactgagggcta

SEQ ID NO: 27832 - RNA, 19 nt, synthetic construct
  misc_feature 1..19: note = siRNA sense sequence
  source 1..19: mol_type = other RNA
agccctcagtggttttgta

SEQ ID NO: 27833 - RNA, 19 nt, synthetic construct
  misc_feature 1..19: note = siRNA antisense sequence
  source 1..19: mol_type = other RNA
tacaaaaccactgagggct

SEQ ID NO: 27834 - RNA, 19 nt, synthetic construct
  misc_feature 1..19: note = siRNA sense sequence
  source 1..19: mol_type = other RNA
gccctcagtggttttgtaa

SEQ ID NO: 27835 - RNA, 19 nt, synthetic construct
  misc_feature 1..19: note = siRNA antisense sequence
  source 1..19: mol_type = other RNA
ttacaaaaccactgagggc

SEQ ID NO: 27836 - RNA, 19 nt, synthetic construct
  misc_feature 1..19: note = siRNA sense sequence
  source 1..19: mol_type = other RNA
ccctcagtggttttgtaac

SEQ ID NO: 27837 - RNA, 19 nt, synthetic construct
  misc_feature 1..19: note = siRNA antisense sequence
  source 1..19: mol_type = other RNA
gttacaaaaccactgaggg

SEQ ID NO: 27838 - RNA, 19 nt, synthetic construct
  misc_feature 1..19: note = siRNA sense sequence
  source 1..19: mol_type = other RNA
caatgccttttagaagtgg

SEQ ID NO: 27839 - RNA, 19 nt, synthetic construct
  misc_feature 1..19: note = siRNA antisense sequence
  source 1..19: mol_type = other RNA
ccacttctaaaaggcattg

SEQ ID NO: 27840 - RNA, 19 nt, synthetic construct
  misc_feature 1..19: note = siRNA sense sequence
  source 1..19: mol_type = other RNA
aatgccttttagaagtggt

SEQ ID NO: 27841 - RNA, 19 nt, synthetic construct
  misc_feature 1..19: note = siRNA antisense sequence
  source 1..19: mol_type = other RNA
accacttctaaaaggcatt

SEQ ID NO: 27842 - RNA, 19 nt, synthetic construct
  misc_feature 1..19: note = siRNA sense sequence
  source 1..19: mol_type = other RNA
atgccttttagaagtggtt

SEQ ID NO: 27843 - RNA, 19 nt, synthetic construct
  misc_feature 1..19: note = siRNA antisense sequence
  source 1..19: mol_type = other RNA
aaccacttctaaaaggcat

SEQ ID NO: 27844 - RNA, 19 nt, synthetic construct
  misc_feature 1..19: note = siRNA sense sequence
  source 1..19: mol_type = other RNA
tgccttttagaagtggttt

SEQ ID NO: 27845 - RNA, 19 nt, synthetic construct
  misc_feature 1..19: note = siRNA antisense sequence
  source 1..19: mol_type = other RNA
aaaccacttctaaaaggca

SEQ ID NO: 27846 - RNA, 19 nt, synthetic construct
  misc_feature 1..19: note = siRNA sense sequence
  source 1..19: mol_type = other RNA
gccttttagaagtggtttt

SEQ ID NO: 27847 - RNA, 19 nt, synthetic construct
  misc_feature 1..19: note = siRNA antisense sequence
  source 1..19: mol_type = other RNA
aaaaccacttctaaaaggc

SEQ ID NO: 27848 - RNA, 19 nt, synthetic construct
  misc_feature 1..19: note = siRNA sense sequence
  source 1..19: mol_type = other RNA
cagagcaagccaacttaat

SEQ ID NO: 27849 - RNA, 19 nt, synthetic construct
  misc_feature 1..19: note = siRNA antisense sequence
  source 1..19: mol_type = other RNA
attaagttggcttgctctg

SEQ ID NO: 27850 - RNA, 19 nt, synthetic construct
  misc_feature 1..19: note = siRNA sense sequence
  source 1..19: mol_type = other RNA
agagcaagccaacttaatc

SEQ ID NO: 27851 - RNA, 19 nt, synthetic construct
  misc_feature 1..19: note = siRNA antisense sequence
  source 1..19: mol_type = other RNA
gattaagttggcttgctct

SEQ ID NO: 27852 - RNA, 19 nt, synthetic construct
  misc_feature 1..19: note = siRNA sense sequence
  source 1..19: mol_type = other RNA
gagcaagccaacttaatca

SEQ ID NO: 27853 - RNA, 19 nt, synthetic construct
  misc_feature 1..19: note = siRNA antisense sequence
  source 1..19: mol_type = other RNA
tgattaagttggcttgctc

SEQ ID NO: 27854 - RNA, 19 nt, synthetic construct
  misc_feature 1..19: note = siRNA sense sequence
  source 1..19: mol_type = other RNA
aagccaacttaatcagtgc

SEQ ID NO: 27855 - RNA, 19 nt, synthetic construct
  misc_feature 1..19: note = siRNA antisense sequence
  source 1..19: mol_type = other RNA
gcactgattaagttggctt

SEQ ID NO: 27856 - RNA, 19 nt, synthetic construct
  misc_feature 1..19: note = siRNA sense sequence
  source 1..19: mol_type = other RNA
agccaacttaatcagtgcc

SEQ ID NO: 27857 - RNA, 19 nt, synthetic construct
  misc_feature 1..19: note = siRNA antisense sequence
  source 1..19: mol_type = other RNA
ggcactgattaagttggct

SEQ ID NO: 27858 - RNA, 19 nt, synthetic construct
  misc_feature 1..19: note = siRNA sense sequence
  source 1..19: mol_type = other RNA
gccaacttaatcagtgccc

SEQ ID NO: 27859 - RNA, 19 nt, synthetic construct
  misc_feature 1..19: note = siRNA antisense sequence
  source 1..19: mol_type = other RNA
gggcactgattaagttggc

SEQ ID NO: 27860 - RNA, 19 nt, synthetic construct
  misc_feature 1..19: note = siRNA sense sequence
  source 1..19: mol_type = other RNA
ccaacttaatcagtgccct

SEQ ID NO: 27861 - RNA, 19 nt, synthetic construct
  misc_feature 1..19: note = siRNA antisense sequence
  source 1..19: mol_type = other RNA
agggcactgattaagttgg

SEQ ID NO: 27862 - RNA, 19 nt, synthetic construct
  misc_feature 1..19: note = siRNA sense sequence
  source 1..19: mol_type = other RNA
caacttaatcagtgccctg

SEQ ID NO: 27863 - RNA, 19 nt, synthetic construct
  misc_feature 1..19: note = siRNA antisense sequence
  source 1..19: mol_type = other RNA
cagggcactgattaagttg

SEQ ID NO: 27864 - RNA, 19 nt, synthetic construct
  misc_feature 1..19: note = siRNA sense sequence
  source 1..19: mol_type = other RNA
acactattacctagcttaa

SEQ ID NO: 27865 - RNA, 19 nt, synthetic construct
  misc_feature 1..19: note = siRNA antisense sequence
  source 1..19: mol_type = other RNA
ttaagctaggtaatagtgt

SEQ ID NO: 27866 - RNA, 19 nt, synthetic construct
  misc_feature 1..19: note = siRNA sense sequence
  source 1..19: mol_type = other RNA
cactattacctagcttaag

SEQ ID NO: 27867 - RNA, 19 nt, synthetic construct
  misc_feature 1..19: note = siRNA antisense sequence
  source 1..19: mol_type = other RNA
cttaagctaggtaatagtg

SEQ ID NO: 27868 - RNA, 19 nt, synthetic construct
  misc_feature 1..19: note = siRNA sense sequence
  source 1..19: mol_type = other RNA
actattacctagcttaaga

SEQ ID NO: 27869 - RNA, 19 nt, synthetic construct
  misc_feature 1..19: note = siRNA antisense sequence
  source 1..19: mol_type = other RNA
tcttaagctaggtaatagt

SEQ ID NO: 27870 - RNA, 19 nt, synthetic construct
  misc_feature 1..19: note = siRNA sense sequence
  source 1..19: mol_type = other RNA
ctattacctagcttaagag

SEQ ID NO: 27871 - RNA, 19 nt, synthetic construct
  misc_feature 1..19: note = siRNA antisense sequence
  source 1..19: mol_type = other RNA
ctcttaagctaggtaatag

SEQ ID NO: 27872 - RNA, 19 nt, synthetic construct
  misc_feature 1..19: note = siRNA sense sequence
  source 1..19: mol_type = other RNA
agaccctaaaatgtcagtg

SEQ ID NO: 27873 - RNA, 19 nt, synthetic construct
  misc_feature 1..19: note = siRNA antisense sequence
  source 1..19: mol_type = other RNA
cactgacattttagggtct

SEQ ID NO: 27874 - RNA, 19 nt, synthetic construct
  misc_feature 1..19: note = siRNA sense sequence
  source 1..19: mol_type = other RNA
aatgtcagtgacttcatac

SEQ ID NO: 27875 - RNA, 19 nt, synthetic construct
  misc_feature 1..19: note = siRNA antisense sequence
  source 1..19: mol_type = other RNA
gtatgaagtcactgacatt

SEQ ID NO: 27876 - RNA, 19 nt, synthetic construct
  misc_feature 1..19: note = siRNA sense sequence
  source 1..19: mol_type = other RNA
gtcagtgacttcataccac

SEQ ID NO: 27877 - RNA, 19 nt, synthetic construct
  misc_feature 1..19: note = siRNA antisense sequence
  source 1..19: mol_type = other RNA
gtggtatgaagtcactgac

SEQ ID NO: 27878 - RNA, 19 nt, synthetic construct
  misc_feature 1..19: note = siRNA sense sequence
  source 1..19: mol_type = other RNA
gtatctcattcctgtgtga

SEQ ID NO: 27879 - RNA, 19 nt, synthetic construct
  misc_feature 1..19: note = siRNA antisense sequence
  source 1..19: mol_type = other RNA
tcacacaggaatgagatac

SEQ ID NO: 27880 - RNA, 19 nt, synthetic construct
  misc_feature 1..19: note = siRNA sense sequence
  source 1..19: mol_type = other RNA
tcattcctgtgtgagttag

SEQ ID NO: 27881 - RNA, 19 nt, synthetic construct
  misc_feature 1..19: note = siRNA antisense sequence
  source 1..19: mol_type = other RNA
ctaactcacacaggaatga

SEQ ID NO: 27882 - RNA, 19 nt, synthetic construct
  misc_feature 1..19: note = siRNA sense sequence
  source 1..19: mol_type = other RNA
cattcctgtgtgagttaga

SEQ ID NO: 27883 - RNA, 19 nt, synthetic construct
  misc_feature 1..19: note = siRNA antisense sequence
  source 1..19: mol_type = other RNA
tctaactcacacaggaatg

SEQ ID NO: 27884 - RNA, 19 nt, synthetic construct
  misc_feature 1..19: note = siRNA sense sequence
  source 1..19: mol_type = other RNA
attcctgtgtgagttagat

SEQ ID NO: 27885 - RNA, 19 nt, synthetic construct
  misc_feature 1..19: note = siRNA antisense sequence
  source 1..19: mol_type = other RNA
atctaactcacacaggaat

SEQ ID NO: 27886 - RNA, 19 nt, synthetic construct
  misc_feature 1..19: note = siRNA sense sequence
  source 1..19: mol_type = other RNA
ttcctgtgtgagttagatg

SEQ ID NO: 27887 - RNA, 19 nt, synthetic construct
  misc_feature 1..19: note = siRNA antisense sequence
  source 1..19: mol_type = other RNA
catctaactcacacaggaa

SEQ ID NO: 27888 - RNA, 19 nt, synthetic construct
  misc_feature 1..19: note = siRNA sense sequence
  source 1..19: mol_type = other RNA
tcctgtgtgagttagatga

SEQ ID NO: 27889 - RNA, 19 nt, synthetic construct
  misc_feature 1..19: note = siRNA antisense sequence
  source 1..19: mol_type = other RNA
tcatctaactcacacagga

SEQ ID NO: 27890 - RNA, 19 nt, synthetic construct
  misc_feature 1..19: note = siRNA sense sequence
  source 1..19: mol_type = other RNA
cctgtgtgagttagatgac

SEQ ID NO: 27891 - RNA, 19 nt, synthetic construct
  misc_feature 1..19: note = siRNA antisense sequence
  source 1..19: mol_type = other RNA
gtcatctaactcacacagg

SEQ ID NO: 27892 - RNA, 19 nt, synthetic construct
  misc_feature 1..19: note = siRNA sense sequence
  source 1..19: mol_type = other RNA
ctgtgtgagttagatgacc

SEQ ID NO: 27893 - RNA, 19 nt, synthetic construct
  misc_feature 1..19: note = siRNA antisense sequence
  source 1..19: mol_type = other RNA
ggtcatctaactcacacag

SEQ ID NO: 27894 - RNA, 19 nt, synthetic construct
  misc_feature 1..19: note = siRNA sense sequence
  source 1..19: mol_type = other RNA
tgtgtgagttagatgaccc

SEQ ID NO: 27895 - RNA, 19 nt, synthetic construct
  misc_feature 1..19: note = siRNA antisense sequence
  source 1..19: mol_type = other RNA
gggtcatctaactcacaca

SEQ ID NO: 27896 - RNA, 19 nt, synthetic construct
  misc_feature 1..19: note = siRNA sense sequence
  source 1..19: mol_type = other RNA
cctcctgtactatgccctt

SEQ ID NO: 27897 - RNA, 19 nt, synthetic construct
  misc_feature 1..19: note = siRNA antisense sequence
  source 1..19: mol_type = other RNA
aagggcatagtacaggagg

SEQ ID NO: 27898 - RNA, 19 nt, synthetic construct
  misc_feature 1..19: note = siRNA sense sequence
  source 1..19: mol_type = other RNA
ctcctgtactatgcccttg

SEQ ID NO: 27899 - RNA, 19 nt, synthetic construct
  misc_feature 1..19: note = siRNA antisense sequence
  source 1..19: mol_type = other RNA
caagggcatagtacaggag

SEQ ID NO: 27900 - RNA, 19 nt, synthetic construct
  misc_feature 1..19: note = siRNA sense sequence
  source 1..19: mol_type = other RNA
tcctgtactatgcccttgg

SEQ ID NO: 27901 - RNA, 19 nt, synthetic construct
  misc_feature 1..19: note = siRNA antisense sequence
  source 1..19: mol_type = other RNA
ccaagggcatagtacagga

SEQ ID NO: 27902 - RNA, 19 nt, synthetic construct
  misc_feature 1..19: note = siRNA sense sequence
  source 1..19: mol_type = other RNA
cctgtactatgcccttggg

SEQ ID NO: 27903 - RNA, 19 nt, synthetic construct
  misc_feature 1..19: note = siRNA antisense sequence
  source 1..19: mol_type = other RNA
cccaagggcatagtacagg

SEQ ID NO: 27904 - RNA, 19 nt, synthetic construct
  misc_feature 1..19: note = siRNA sense sequence
  source 1..19: mol_type = other RNA
ctgtactatgcccttggga

SEQ ID NO: 27905 - RNA, 19 nt, synthetic construct
  misc_feature 1..19: note = siRNA antisense sequence
  source 1..19: mol_type = other RNA
tcccaagggcatagtacag

SEQ ID NO: 27906 - RNA, 19 nt, synthetic construct
  misc_feature 1..19: note = siRNA sense sequence
  source 1..19: mol_type = other RNA
tgtactatgcccttgggaa

SEQ ID NO: 27907 - RNA, 19 nt, synthetic construct
  misc_feature 1..19: note = siRNA antisense sequence
  source 1..19: mol_type = other RNA
ttcccaagggcatagtaca

SEQ ID NO: 27908 - RNA, 19 nt, synthetic construct
  misc_feature 1..19: note = siRNA sense sequence
  source 1..19: mol_type = other RNA
cacatctctatggttacag

SEQ ID NO: 27909 - RNA, 19 nt, synthetic construct
  misc_feature 1..19: note = siRNA antisense sequence
  source 1..19: mol_type = other RNA
ctgtaaccatagagatgtg

SEQ ID NO: 27910 - RNA, 19 nt, synthetic construct
  misc_feature 1..19: note = siRNA sense sequence
  source 1..19: mol_type = other RNA
acatctctatggttacagt

SEQ ID NO: 27911 - RNA, 19 nt, synthetic construct
  misc_feature 1..19: note = siRNA antisense sequence
  source 1..19: mol_type = other RNA
actgtaaccatagagatgt

SEQ ID NO: 27912 - RNA, 19 nt, synthetic construct
  misc_feature 1..19: note = siRNA sense sequence
  source 1..19: mol_type = other RNA
catctctatggttacagtc

SEQ ID NO: 27913 - RNA, 19 nt, synthetic construct
  misc_feature 1..19: note = siRNA antisense sequence
  source 1..19: mol_type = other RNA
gactgtaaccatagagatg

SEQ ID NO: 27914 - RNA, 19 nt, synthetic construct
  misc_feature 1..19: note = siRNA sense sequence
  source 1..19: mol_type = other RNA
atctctatggttacagtca

SEQ ID NO: 27915 - RNA, 19 nt, synthetic construct
  misc_feature 1..19: note = siRNA antisense sequence
  source 1..19: mol_type = other RNA
tgactgtaaccatagagat

SEQ ID NO: 27916 - RNA, 19 nt, synthetic construct
  misc_feature 1..19: note = siRNA sense sequence
  source 1..19: mol_type = other RNA
tctctatggttacagtcaa

SEQ ID NO: 27917 - RNA, 19 nt, synthetic construct
  misc_feature 1..19: note = siRNA antisense sequence
  source 1..19: mol_type = other RNA
ttgactgtaaccatagaga

SEQ ID NO: 27918 - RNA, 19 nt, synthetic construct
  misc_feature 1..19: note = siRNA sense sequence
  source 1..19: mol_type = other RNA
ctctatggttacagtcaaa

SEQ ID NO: 27919 - RNA, 19 nt, synthetic construct
  misc_feature 1..19: note = siRNA antisense sequence
  source 1..19: mol_type = other RNA
tttgactgtaaccatagag

SEQ ID NO: 27920 - RNA, 19 nt, synthetic construct
  misc_feature 1..19: note = siRNA sense sequence
  source 1..19: mol_type = other RNA
atggttacagtcaaaggag

SEQ ID NO: 27921 - RNA, 19 nt, synthetic construct
  misc_feature 1..19: note = siRNA antisense sequence
  source 1..19: mol_type = other RNA
ctcctttgactgtaaccat

SEQ ID NO: 27922 - RNA, 19 nt, synthetic construct
  misc_feature 1..19: note = siRNA sense sequence
  source 1..19: mol_type = other RNA
aacggcacacttccaagtc

SEQ ID NO: 27923 - RNA, 19 nt, synthetic construct
  misc_feature 1..19: note = siRNA antisense sequence
  source 1..19: mol_type = other RNA
gacttggaagtgtgccgtt

SEQ ID NO: 27924 - RNA, 19 nt, synthetic construct
  misc_feature 1..19: note = siRNA sense sequence
  source 1..19: mol_type = other RNA
acggcacacttccaagtct

SEQ ID NO: 27925 - RNA, 19 nt, synthetic construct
  misc_feature 1..19: note = siRNA antisense sequence
  source 1..19: mol_type = other RNA
agacttggaagtgtgccgt

SEQ ID NO: 27926 - RNA, 19 nt, synthetic construct
  misc_feature 1..19: note = siRNA sense sequence
  source 1..19: mol_type = other RNA
cggcacacttccaagtctt

SEQ ID NO: 27927 - RNA, 19 nt, synthetic construct
  misc_feature 1..19: note = siRNA antisense sequence
  source 1..19: mol_type = other RNA
aagacttggaagtgtgccg

SEQ ID NO: 27928 - RNA, 19 nt, synthetic construct
  misc_feature 1..19: note = siRNA sense sequence
  source 1..19: mol_type = other RNA
acacttccaagtctttgct

SEQ ID NO: 27929 - RNA, 19 nt, synthetic construct
  misc_feature 1..19: note = siRNA antisense sequence
  source 1..19: mol_type = other RNA
agcaaagacttggaagtgt

SEQ ID NO: 27930 - RNA, 19 nt, synthetic construct
  misc_feature 1..19: note = siRNA sense sequence
  source 1..19: mol_type = other RNA
cacttccaagtctttgcta

SEQ ID NO: 27931 - RNA, 19 nt, synthetic construct
  misc_feature 1..19: note = siRNA antisense sequence
  source 1..19: mol_type = other RNA
tagcaaagacttggaagtg

SEQ ID NO: 27932 - RNA, 19 nt, synthetic construct
  misc_feature 1..19: note = siRNA sense sequence
  source 1..19: mol_type = other RNA
acttccaagtctttgctat

SEQ ID NO: 27933 - RNA, 19 nt, synthetic construct
  misc_feature 1..19: note = siRNA antisense sequence
  source 1..19: mol_type = other RNA
atagcaaagacttggaagt

SEQ ID NO: 27934 - RNA, 19 nt, synthetic construct
  misc_feature 1..19: note = siRNA sense sequence
  source 1..19: mol_type = other RNA
cttccaagtctttgctatt

SEQ ID NO: 27935 - RNA, 19 nt, synthetic construct
  misc_feature 1..19: note = siRNA antisense sequence
  source 1..19: mol_type = other RNA
aatagcaaagacttggaag

SEQ ID NO: 27936 - RNA, 19 nt, synthetic construct
  misc_feature 1..19: note = siRNA sense sequence
  source 1..19: mol_type = other RNA
ttccaagtctttgctattg

SEQ ID NO: 27937 - RNA, 19 nt, synthetic construct
  misc_feature 1..19: note = siRNA antisense sequence
  source 1..19: mol_type = other RNA
caatagcaaagacttggaa

SEQ ID NO: 27938 - RNA, 19 nt, synthetic construct
  misc_feature 1..19: note = siRNA sense sequence
  source 1..19: mol_type = other RNA
attgtgaatagtgccgcaa

SEQ ID NO: 27939 - RNA, 19 nt, synthetic construct
  misc_feature 1..19: note = siRNA antisense sequence
  source 1..19: mol_type = other RNA
ttgcggcactattcacaat

SEQ ID NO: 27940 - RNA, 19 nt, synthetic construct
  misc_feature 1..19: note = siRNA sense sequence
  source 1..19: mol_type = other RNA
tgcatgtgtctttatagca

SEQ ID NO: 27941 - RNA, 19 nt, synthetic construct
  misc_feature 1..19: note = siRNA antisense sequence
  source 1..19: mol_type = other RNA
tgctataaagacacatgca

SEQ ID NO: 27942 - RNA, 19 nt, synthetic construct
  misc_feature 1..19: note = siRNA sense sequence
  source 1..19: mol_type = other RNA
gcatgtgtctttatagcag

SEQ ID NO: 27943 - RNA, 19 nt, synthetic construct
  misc_feature 1..19: note = siRNA antisense sequence
  source 1..19: mol_type = other RNA
ctgctataaagacacatgc

SEQ ID NO: 27944 - RNA, 19 nt, synthetic construct
  misc_feature 1..19: note = siRNA sense sequence
  source 1..19: mol_type = other RNA
catgtgtctttatagcagc

SEQ ID NO: 27945 - RNA, 19 nt, synthetic construct
  misc_feature 1..19: note = siRNA antisense sequence
  source 1..19: mol_type = other RNA
gctgctataaagacacatg

SEQ ID NO: 27946 - RNA, 19 nt, synthetic construct
  misc_feature 1..19: note = siRNA sense sequence
  source 1..19: mol_type = other RNA
atgtgtctttatagcagca

SEQ ID NO: 27947 - RNA, 19 nt, synthetic construct
  misc_feature 1..19: note = siRNA antisense sequence
  source 1..19: mol_type = other RNA
tgctgctataaagacacat

SEQ ID NO: 27948 - RNA, 19 nt, synthetic construct
  misc_feature 1..19: note = siRNA sense sequence
  source 1..19: mol_type = other RNA
tctttatagcagcatgatt

SEQ ID NO: 27949 - RNA, 19 nt, synthetic construct
  misc_feature 1..19: note = siRNA antisense sequence
  source 1..19: mol_type = other RNA
aatcatgctgctataaaga

SEQ ID NO: 27950 - RNA, 19 nt, synthetic construct
  misc_feature 1..19: note = siRNA sense sequence
  source 1..19: mol_type = other RNA
taatcctttgggtatatac

SEQ ID NO: 27951 - RNA, 19 nt, synthetic construct
  misc_feature 1..19: note = siRNA antisense sequence
  source 1..19: mol_type = other RNA
gtatatacccaaaggatta

SEQ ID NO: 27952 - RNA, 19 nt, synthetic construct
  misc_feature 1..19: note = siRNA sense sequence
  source 1..19: mol_type = other RNA
aatcctttgggtatatacc

SEQ ID NO: 27953 - RNA, 19 nt, synthetic construct
  misc_feature 1..19: note = siRNA antisense sequence
  source 1..19: mol_type = other RNA
ggtatatacccaaaggatt

SEQ ID NO: 27954 - RNA, 19 nt, synthetic construct
  misc_feature 1..19: note = siRNA sense sequence
  source 1..19: mol_type = other RNA
ggtatatacccagtaatgg

SEQ ID NO: 27955 - RNA, 19 nt, synthetic construct
  misc_feature 1..19: note = siRNA antisense sequence
  source 1..19: mol_type = other RNA
ccattactgggtatatacc

SEQ ID NO: 27956 - RNA, 19 nt, synthetic construct
  misc_feature 1..19: note = siRNA sense sequence
  source 1..19: mol_type = other RNA
atggtatttctagttctag

SEQ ID NO: 27957 - RNA, 19 nt, synthetic construct
  misc_feature 1..19: note = siRNA antisense sequence
  source 1..19: mol_type = other RNA
ctagaactagaaataccat

SEQ ID NO: 27958 - RNA, 19 nt, synthetic construct
  misc_feature 1..19: note = siRNA sense sequence
  source 1..19: mol_type = other RNA
gtaaaagtgttcctatttc

SEQ ID NO: 27959 - RNA, 19 nt, synthetic construct
  misc_feature 1..19: note = siRNA antisense sequence
  source 1..19: mol_type = other RNA
gaaataggaacacttttac

SEQ ID NO: 27960 - RNA, 19 nt, synthetic construct
  misc_feature 1..19: note = siRNA sense sequence
  source 1..19: mol_type = other RNA
agtgttcctatttctccac

SEQ ID NO: 27961 - RNA, 19 nt, synthetic construct
  misc_feature 1..19: note = siRNA antisense sequence
  source 1..19: mol_type = other RNA
gtggagaaataggaacact

SEQ ID NO: 27962 - RNA, 19 nt, synthetic construct
  misc_feature 1..19: note = siRNA sense sequence
  source 1..19: mol_type = other RNA
gtgttcctatttctccaca

SEQ ID NO: 27963 - RNA, 19 nt, synthetic construct
  misc_feature 1..19: note = siRNA antisense sequence
  source 1..19: mol_type = other RNA
tgtggagaaataggaacac

SEQ ID NO: 27964 - RNA, 19 nt, synthetic construct
  misc_feature 1..19: note = siRNA sense sequence
  source 1..19: mol_type = other RNA
tcctatttctccacatcct

SEQ ID NO: 27965 - RNA, 19 nt, synthetic construct
  misc_feature 1..19: note = siRNA antisense sequence
  source 1..19: mol_type = other RNA
aggatgtggagaaatagga

SEQ ID NO: 27966 - RNA, 19 nt, synthetic construct
  misc_feature 1..19: note = siRNA sense sequence
  source 1..19: mol_type = other RNA
cctatttctccacatcctc

SEQ ID NO: 27967 - RNA, 19 nt, synthetic construct
  misc_feature 1..19: note = siRNA antisense sequence
  source 1..19: mol_type = other RNA
gaggatgtggagaaatagg

SEQ ID NO: 27968 - RNA, 19 nt, synthetic construct
  misc_feature 1..19: note = siRNA sense sequence
  source 1..19: mol_type = other RNA
ctatttctccacatcctct

SEQ ID NO: 27969 - RNA, 19 nt, synthetic construct
  misc_feature 1..19: note = siRNA antisense sequence
  source 1..19: mol_type = other RNA
agaggatgtggagaaatag

SEQ ID NO: 27970 - RNA, 19 nt, synthetic construct
  misc_feature 1..19: note = siRNA sense sequence
  source 1..19: mol_type = other RNA
tatttctccacatcctctc

SEQ ID NO: 27971 - RNA, 19 nt, synthetic construct
  misc_feature 1..19: note = siRNA antisense sequence
  source 1..19: mol_type = other RNA
gagaggatgtggagaaata

SEQ ID NO: 27972 - RNA, 19 nt, synthetic construct
  misc_feature 1..19: note = siRNA sense sequence
  source 1..19: mol_type = other RNA
tctccacatcctctccagc

SEQ ID NO: 27973 - RNA, 19 nt, synthetic construct
  misc_feature 1..19: note = siRNA antisense sequence
  source 1..19: mol_type = other RNA
gctggagaggatgtggaga

SEQ ID NO: 27974 - RNA, 19 nt, synthetic construct
  misc_feature 1..19: note = siRNA sense sequence
  source 1..19: mol_type = other RNA
ctccacatcctctccagca

SEQ ID NO: 27975 - RNA, 19 nt, synthetic construct
  misc_feature 1..19: note = siRNA antisense sequence
  source 1..19: mol_type = other RNA
tgctggagaggatgtggag

SEQ ID NO: 27976 - RNA, 19 nt, synthetic construct
  misc_feature 1..19: note = siRNA sense sequence
  source 1..19: mol_type = other RNA
tccacatcctctccagcac

SEQ ID NO: 27977 - RNA, 19 nt, synthetic construct
  misc_feature 1..19: note = siRNA antisense sequence
  source 1..19: mol_type = other RNA
gtgctggagaggatgtgga

SEQ ID NO: 27978 - RNA, 19 nt, synthetic construct
  misc_feature 1..19: note = siRNA sense sequence
  source 1..19: mol_type = other RNA
cacctgttgtttcctgact

SEQ ID NO: 27979 - RNA, 19 nt, synthetic construct
  misc_feature 1..19: note = siRNA antisense sequence
  source 1..19: mol_type = other RNA
agtcaggaaacaacaggtg

SEQ ID NO: 27980 - RNA, 19 nt, synthetic construct
  misc_feature 1..19: note = siRNA sense sequence
  source 1..19: mol_type = other RNA
acctgttgtttcctgactt

SEQ ID NO: 27981 - RNA, 19 nt, synthetic construct
  misc_feature 1..19: note = siRNA antisense sequence
  source 1..19: mol_type = other RNA
aagtcaggaaacaacaggt

SEQ ID NO: 27982 - RNA, 19 nt, synthetic construct
  misc_feature 1..19: note = siRNA sense sequence
  source 1..19: mol_type = other RNA
cctgttgtttcctgacttt

SEQ ID NO: 27983 - RNA, 19 nt, synthetic construct
  misc_feature 1..19: note = siRNA antisense sequence
  source 1..19: mol_type = other RNA
aaagtcaggaaacaacagg

SEQ ID NO: 27984 - RNA, 19 nt, synthetic construct
  misc_feature 1..19: note = siRNA sense sequence
  source 1..19: mol_type = other RNA
ctgttgtttcctgactttt

SEQ ID NO: 27985 - RNA, 19 nt, synthetic construct
  misc_feature 1..19: note = siRNA antisense sequence
  source 1..19: mol_type = other RNA
aaaagtcaggaaacaacag

SEQ ID NO: 27986 - RNA, 19 nt, synthetic construct
  misc_feature 1..19: note = siRNA sense sequence
  source 1..19: mol_type = other RNA
ttgatttgcatttctctga

SEQ ID NO: 27987 - RNA, 19 nt, synthetic construct
  misc_feature 1..19: note = siRNA antisense sequence
  source 1..19: mol_type = other RNA
tcagagaaatgcaaatcaa

SEQ ID NO: 27988 - RNA, 19 nt, synthetic construct
  misc_feature 1..19: note = siRNA sense sequence
  source 1..19: mol_type = other RNA
tgatttgcatttctctgat

SEQ ID NO: 27989 - RNA, 19 nt, synthetic construct
  misc_feature 1..19: note = siRNA antisense sequence
  source 1..19: mol_type = other RNA
atcagagaaatgcaaatca

SEQ ID NO: 27990 - RNA, 19 nt, synthetic construct
  misc_feature 1..19: note = siRNA sense sequence
  source 1..19: mol_type = other RNA
gatttgcatttctctgatg

SEQ ID NO: 27991 - RNA, 19 nt, synthetic construct
  misc_feature 1..19: note = siRNA antisense sequence
  source 1..19: mol_type = other RNA
catcagagaaatgcaaatc

SEQ ID NO: 27992 - RNA, 19 nt, synthetic construct
  misc_feature 1..19: note = siRNA sense sequence
  source 1..19: mol_type = other RNA
atttgcatttctctgatgg

SEQ ID NO: 27993 - RNA, 19 nt, synthetic construct
  misc_feature 1..19: note = siRNA antisense sequence
  source 1..19: mol_type = other RNA
ccatcagagaaatgcaaat

SEQ ID NO: 27994 - RNA, 19 nt, synthetic construct
  misc_feature 1..19: note = siRNA sense sequence
  source 1..19: mol_type = other RNA
tttgcatttctctgatggc

SEQ ID NO: 27995 - RNA, 19 nt, synthetic construct
  misc_feature 1..19: note = siRNA antisense sequence
  source 1..19: mol_type = other RNA
gccatcagagaaatgcaaa

SEQ ID NO: 27996 - RNA, 19 nt, synthetic construct
  misc_feature 1..19: note = siRNA sense sequence
  source 1..19: mol_type = other RNA
ttgcatttctctgatggcc

SEQ ID NO: 27997 - RNA, 19 nt, synthetic construct
  misc_feature 1..19: note = siRNA antisense sequence
  source 1..19: mol_type = other RNA
ggccatcagagaaatgcaa

SEQ ID NO: 27998 - RNA, 19 nt, synthetic construct
  misc_feature 1..19: note = siRNA sense sequence
  source 1..19: mol_type = other RNA
tgcatttctctgatggcca

SEQ ID NO: 27999 - RNA, 19 nt, synthetic construct
  misc_feature 1..19: note = siRNA antisense sequence
  source 1..19: mol_type = other RNA
tggccatcagagaaatgca

SEQ ID NO: 28000 - RNA, 19 nt, synthetic construct
  misc_feature 1..19: note = siRNA sense sequence
  source 1..19: mol_type = other RNA
gcatttctctgatggccag

SEQ ID NO: 28001 - RNA, 19 nt, synthetic construct
  misc_feature 1..19: note = siRNA antisense sequence
  source 1..19: mol_type = other RNA
ctggccatcagagaaatgc

SEQ ID NO: 28002 - RNA, 19 nt, synthetic construct
  misc_feature 1..19: note = siRNA sense sequence
  source 1..19: mol_type = other RNA
ttggctgcataaatgtctt

SEQ ID NO: 28003 - RNA, 19 nt, synthetic construct
  misc_feature 1..19: note = siRNA antisense sequence
  source 1..19: mol_type = other RNA
aagacatttatgcagccaa

SEQ ID NO: 28004 - RNA, 19 nt, synthetic construct
  misc_feature 1..19: note = siRNA sense sequence
  source 1..19: mol_type = other RNA
tggctgcataaatgtcttc

SEQ ID NO: 28005 - RNA, 19 nt, synthetic construct
  misc_feature 1..19: note = siRNA antisense sequence
  source 1..19: mol_type = other RNA
gaagacatttatgcagcca

SEQ ID NO: 28006 - RNA, 19 nt, synthetic construct
  misc_feature 1..19: note = siRNA sense sequence
  source 1..19: mol_type = other RNA
ggctgcataaatgtcttct

SEQ ID NO: 28007 - RNA, 19 nt, synthetic construct
  misc_feature 1..19: note = siRNA antisense sequence
  source 1..19: mol_type = other RNA
agaagacatttatgcagcc

SEQ ID NO: 28008 - RNA, 19 nt, synthetic construct
  misc_feature 1..19: note = siRNA sense sequence
  source 1..19: mol_type = other RNA
gctgcataaatgtcttctt

SEQ ID NO: 28009 - RNA, 19 nt, synthetic construct
  misc_feature 1..19: note = siRNA antisense sequence
  source 1..19: mol_type = other RNA
aagaagacatttatgcagc

SEQ ID NO: 28010 - RNA, 19 nt, synthetic construct
  misc_feature 1..19: note = siRNA sense sequence
  source 1..19: mol_type = other RNA
atagattctggatattagc

SEQ ID NO: 28011 - RNA, 19 nt, synthetic construct
  misc_feature 1..19: note = siRNA antisense sequence
  source 1..19: mol_type = other RNA
gctaatatccagaatctat

SEQ ID NO: 28012 - RNA, 19 nt, synthetic construct
  misc_feature 1..19: note = siRNA sense sequence
  source 1..19: mol_type = other RNA
tagattctggatattagcc

SEQ ID NO: 28013 - RNA, 19 nt, synthetic construct
  misc_feature 1..19: note = siRNA antisense sequence
  source 1..19: mol_type = other RNA
ggctaatatccagaatcta

SEQ ID NO: 28014 - RNA, 19 nt, synthetic construct
  misc_feature 1..19: note = siRNA sense sequence
  source 1..19: mol_type = other RNA
agattctggatattagccc

SEQ ID NO: 28015 - RNA, 19 nt, synthetic construct
  misc_feature 1..19: note = siRNA antisense sequence
  source 1..19: mol_type = other RNA
gggctaatatccagaatct

SEQ ID NO: 28016 - RNA, 19 nt, synthetic construct
  misc_feature 1..19: note = siRNA sense sequence
  source 1..19: mol_type = other RNA
gattctggatattagccct

SEQ ID NO: 28017 - RNA, 19 nt, synthetic construct
  misc_feature 1..19: note = siRNA antisense sequence
  source 1..19: mol_type = other RNA
agggctaatatccagaatc

SEQ ID NO: 28018 - RNA, 19 nt, synthetic construct
  misc_feature 1..19: note = siRNA sense sequence
  source 1..19: mol_type = other RNA
attctggatattagccctt

SEQ ID NO: 28019 - RNA, 19 nt, synthetic construct
  misc_feature 1..19: note = siRNA antisense sequence
  source 1..19: mol_type = other RNA
aagggctaatatccagaat

SEQ ID NO: 28020 - RNA, 19 nt, synthetic construct
  misc_feature 1..19: note = siRNA sense sequence
  source 1..19: mol_type = other RNA
attcactctgatggtagtt

SEQ ID NO: 28021 - RNA, 19 nt, synthetic construct
  misc_feature 1..19: note = siRNA antisense sequence
  source 1..19: mol_type = other RNA
aactaccatcagagtgaat

SEQ ID NO: 28022 - RNA, 19 nt, synthetic construct
  misc_feature 1..19: note = siRNA sense sequence
  source 1..19: mol_type = other RNA
ttcactctgatggtagttt

SEQ ID NO: 28023 - RNA, 19 nt, synthetic construct
  misc_feature 1..19: note = siRNA antisense sequence
  source 1..19: mol_type = other RNA
aaactaccatcagagtgaa

SEQ ID NO: 28024 - RNA, 19 nt, synthetic construct
  misc_feature 1..19: note = siRNA sense sequence
  source 1..19: mol_type = other RNA
tcactctgatggtagtttc

SEQ ID NO: 28025 - RNA, 19 nt, synthetic construct
  misc_feature 1..19: note = siRNA antisense sequence
  source 1..19: mol_type = other RNA
gaaactaccatcagagtga

SEQ ID NO: 28026 - RNA, 19 nt, synthetic construct
  misc_feature 1..19: note = siRNA sense sequence
  source 1..19: mol_type = other RNA
cactctgatggtagtttct

SEQ ID NO: 28027 - RNA, 19 nt, synthetic construct
  misc_feature 1..19: note = siRNA antisense sequence
  source 1..19: mol_type = other RNA
agaaactaccatcagagtg

SEQ ID NO: 28028 - RNA, 19 nt, synthetic construct
  misc_feature 1..19: note = siRNA sense sequence
  source 1..19: mol_type = other RNA
actctgatggtagtttctt

SEQ ID NO: 28029 - RNA, 19 nt, synthetic construct
  misc_feature 1..19: note = siRNA antisense sequence
  source 1..19: mol_type = other RNA
aagaaactaccatcagagt

SEQ ID NO: 28030 - RNA, 19 nt, synthetic construct
  misc_feature 1..19: note = siRNA sense sequence
  source 1..19: mol_type = other RNA
tgatggtagtttcttttgc

SEQ ID NO: 28031 - RNA, 19 nt, synthetic construct
  misc_feature 1..19: note = siRNA antisense sequence
  source 1..19: mol_type = other RNA
gcaaaagaaactaccatca

SEQ ID NO: 28032 - RNA, 19 nt, synthetic construct
  misc_feature 1..19: note = siRNA sense sequence
  source 1..19: mol_type = other RNA
gatggtagtttcttttgct

SEQ ID NO: 28033 - RNA, 19 nt, synthetic construct
  misc_feature 1..19: note = siRNA antisense sequence
  source 1..19: mol_type = other RNA
agcaaaagaaactaccatc

SEQ ID NO: 28034 - RNA, 19 nt, synthetic construct
  misc_feature 1..19: note = siRNA sense sequence
  source 1..19: mol_type = other RNA
atggtagtttcttttgctg

SEQ ID NO: 28035 - RNA, 19 nt, synthetic construct
  misc_feature 1..19: note = siRNA antisense sequence
  source 1..19: mol_type = other RNA
cagcaaaagaaactaccat

SEQ ID NO: 28036 - RNA, 19 nt, synthetic construct
  misc_feature 1..19: note = siRNA sense sequence
  source 1..19: mol_type = other RNA
tggtagtttcttttgctgt

SEQ ID NO: 28037 - RNA, 19 nt, synthetic construct
  misc_feature 1..19: note = siRNA antisense sequence
  source 1..19: mol_type = other RNA
acagcaaaagaaactacca

SEQ ID NO: 28038 - RNA, 19 nt, synthetic construct
  misc_feature 1..19: note = siRNA sense sequence
  source 1..19: mol_type = other RNA
ggtagtttcttttgctgtg

SEQ ID NO: 28039 - RNA, 19 nt, synthetic construct
  misc_feature 1..19: note = siRNA antisense sequence
  source 1..19: mol_type = other RNA
cacagcaaaagaaactacc

SEQ ID NO: 28040 - RNA, 19 nt, synthetic construct
  misc_feature 1..19: note = siRNA sense sequence
  source 1..19: mol_type = other RNA
gtagtttcttttgctgtgc

SEQ ID NO: 28041 - RNA, 19 nt, synthetic construct
  misc_feature 1..19: note = siRNA antisense sequence
  source 1..19: mol_type = other RNA
gcacagcaaaagaaactac

SEQ ID NO: 28042 - RNA, 19 nt, synthetic construct
  misc_feature 1..19: note = siRNA sense sequence
  source 1..19: mol_type = other RNA
tagtttcttttgctgtgca

SEQ ID NO: 28043 - RNA, 19 nt, synthetic construct
  misc_feature 1..19: note = siRNA antisense sequence
  source 1..19: mol_type = other RNA
tgcacagcaaaagaaacta

SEQ ID NO: 28044 - RNA, 19 nt, synthetic construct
  misc_feature 1..19: note = siRNA sense sequence
  source 1..19: mol_type = other RNA
cttttgctgtgcagaagtt

SEQ ID NO: 28045 - RNA, 19 nt, synthetic construct
  misc_feature 1..19: note = siRNA antisense sequence
  source 1..19: mol_type = other RNA
aacttctgcacagcaaaag

SEQ ID NO: 28046 - RNA, 19 nt, synthetic construct
  misc_feature 1..19: note = siRNA sense sequence
  source 1..19: mol_type = other RNA
ttttgctgtgcagaagttc

SEQ ID NO: 28047 - RNA, 19 nt, synthetic construct
  misc_feature 1..19: note = siRNA antisense sequence
  source 1..19: mol_type = other RNA
gaacttctgcacagcaaaa

SEQ ID NO: 28048 - RNA, 19 nt, synthetic construct
  misc_feature 1..19: note = siRNA sense sequence
  source 1..19: mol_type = other RNA
tttgctgtgcagaagttct

SEQ ID NO: 28049 - RNA, 19 nt, synthetic construct
  misc_feature 1..19: note = siRNA antisense sequence
  source 1..19: mol_type = other RNA
agaacttctgcacagcaaa

SEQ ID NO: 28050 - RNA, 19 nt, synthetic construct
  misc_feature 1..19: note = siRNA sense sequence
  source 1..19: mol_type = other RNA
ttgctgtgcagaagttctt

SEQ ID NO: 28051 - RNA, 19 nt, synthetic construct
  misc_feature 1..19: note = siRNA antisense sequence
  source 1..19: mol_type = other RNA
aagaacttctgcacagcaa

SEQ ID NO: 28052 - RNA, 19 nt, synthetic construct
  misc_feature 1..19: note = siRNA sense sequence
  source 1..19: mol_type = other RNA
taattagatcccatttgtc

SEQ ID NO: 28053 - RNA, 19 nt, synthetic construct
  misc_feature 1..19: note = siRNA antisense sequence
  source 1..19: mol_type = other RNA
gacaaatgggatctaatta

SEQ ID NO: 28054 - RNA, 19 nt, synthetic construct
  misc_feature 1..19: note = siRNA sense sequence
  source 1..19: mol_type = other RNA
aattagatcccatttgtca

SEQ ID NO: 28055 - RNA, 19 nt, synthetic construct
  misc_feature 1..19: note = siRNA antisense sequence
  source 1..19: mol_type = other RNA
tgacaaatgggatctaatt

SEQ ID NO: 28056 - RNA, 19 nt, synthetic construct
  misc_feature 1..19: note = siRNA sense sequence
  source 1..19: mol_type = other RNA
attagatcccatttgtcaa

SEQ ID NO: 28057 - RNA, 19 nt, synthetic construct
  misc_feature 1..19: note = siRNA antisense sequence
  source 1..19: mol_type = other RNA
ttgacaaatgggatctaat

SEQ ID NO: 28058 - RNA, 19 nt, synthetic construct
  misc_feature 1..19: note = siRNA sense sequence
  source 1..19: mol_type = other RNA
ttagatcccatttgtcaat

SEQ ID NO: 28059 - RNA, 19 nt, synthetic construct
  misc_feature 1..19: note = siRNA antisense sequence
  source 1..19: mol_type = other RNA
attgacaaatgggatctaa

SEQ ID NO: 28060 - RNA, 19 nt, synthetic construct
  misc_feature 1..19: note = siRNA sense sequence
  source 1..19: mol_type = other RNA
aggttttcttctagggttt

SEQ ID NO: 28061 - RNA, 19 nt, synthetic construct
  misc_feature 1..19: note = siRNA antisense sequence
  source 1..19: mol_type = other RNA
aaaccctagaagaaaacct

SEQ ID NO: 28062 - RNA, 19 nt, synthetic construct
  misc_feature 1..19: note = siRNA sense sequence
  source 1..19: mol_type = other RNA
ggttttcttctagggtttt

SEQ ID NO: 28063 - RNA, 19 nt, synthetic construct
  misc_feature 1..19: note = siRNA antisense sequence
  source 1..19: mol_type = other RNA
aaaaccctagaagaaaacc

SEQ ID NO: 28064 - RNA, 19 nt, synthetic construct
  misc_feature 1..19: note = siRNA sense sequence
  source 1..19: mol_type = other RNA
tggttttagatctgacatt

SEQ ID NO: 28065 - RNA, 19 nt, synthetic construct
  misc_feature 1..19: note = siRNA antisense sequence
  source 1..19: mol_type = other RNA
aatgtcagatctaaaacca

SEQ ID NO: 28066 - RNA, 19 nt, synthetic construct
  misc_feature 1..19: note = siRNA sense sequence
  source 1..19: mol_type = other RNA
tagatctgacatttaagtc

SEQ ID NO: 28067 - RNA, 19 nt, synthetic construct
  misc_feature 1..19: note = siRNA antisense sequence
  source 1..19: mol_type = other RNA
gacttaaatgtcagatcta

SEQ ID NO: 28068 - RNA, 19 nt, synthetic construct
  misc_feature 1..19: note = siRNA sense sequence
  source 1..19: mol_type = other RNA
aagtctttaatccatcttg

SEQ ID NO: 28069 - RNA, 19 nt, synthetic construct
  misc_feature 1..19: note = siRNA antisense sequence
  source 1..19: mol_type = other RNA
caagatggattaaagactt

SEQ ID NO: 28070 - RNA, 19 nt, synthetic construct
  misc_feature 1..19: note = siRNA sense sequence
  source 1..19: mol_type = other RNA
agtctttaatccatcttga

SEQ ID NO: 28071 - RNA, 19 nt, synthetic construct
  misc_feature 1..19: note = siRNA antisense sequence
  source 1..19: mol_type = other RNA
tcaagatggattaaagact

SEQ ID NO: 28072 - RNA, 19 nt, synthetic construct
  misc_feature 1..19: note = siRNA sense sequence
  source 1..19: mol_type = other RNA
gtctttaatccatcttgaa

SEQ ID NO: 28073 - RNA, 19 nt, synthetic construct
  misc_feature 1..19: note = siRNA antisense sequence
  source 1..19: mol_type = other RNA
ttcaagatggattaaagac

SEQ ID NO: 28074 - RNA, 19 nt, synthetic construct
  misc_feature 1..19: note = siRNA sense sequence
  source 1..19: mol_type = other RNA
tagccagttttcccagcac

SEQ ID NO: 28075 - RNA, 19 nt, synthetic construct
  misc_feature 1..19: note = siRNA antisense sequence
  source 1..19: mol_type = other RNA
gtgctgggaaaactggcta

SEQ ID NO: 28076 - RNA, 19 nt, synthetic construct
  misc_feature 1..19: note = siRNA sense sequence
  source 1..19: mol_type = other RNA
cagttttcccagcaccatt

SEQ ID NO: 28077 - RNA, 19 nt, synthetic construct
  misc_feature 1..19: note = siRNA antisense sequence
  source 1..19: mol_type = other RNA
aatggtgctgggaaaactg

SEQ ID NO: 28078 - RNA, 19 nt, synthetic construct
  misc_feature 1..19: note = siRNA sense sequence
  source 1..19: mol_type = other RNA
agttttcccagcaccattt

SEQ ID NO: 28079 - RNA, 19 nt, synthetic construct
  misc_feature 1..19: note = siRNA antisense sequence
  source 1..19: mol_type = other RNA
aaatggtgctgggaaaact

SEQ ID NO: 28080 - RNA, 19 nt, synthetic construct
  misc_feature 1..19: note = siRNA sense sequence
  source 1..19: mol_type = other RNA
gttttcccagcaccattta

SEQ ID NO: 28081 - RNA, 19 nt, synthetic construct
  misc_feature 1..19: note = siRNA antisense sequence
  source 1..19: mol_type = other RNA
taaatggtgctgggaaaac

SEQ ID NO: 28082 - RNA, 19 nt, synthetic construct
  misc_feature 1..19: note = siRNA sense sequence
  source 1..19: mol_type = other RNA
ttttcccagcaccatttat

SEQ ID NO: 28083 - RNA, 19 nt, synthetic construct
  misc_feature 1..19: note = siRNA antisense sequence
  source 1..19: mol_type = other RNA
ataaatggtgctgggaaaa

SEQ ID NO: 28084 - RNA, 19 nt, synthetic construct
  misc_feature 1..19: note = siRNA sense sequence
  source 1..19: mol_type = other RNA
tttcccagcaccatttatt

SEQ ID NO: 28085 - RNA, 19 nt, synthetic construct
  misc_feature 1..19: note = siRNA antisense sequence
  source 1..19: mol_type = other RNA
aataaatggtgctgggaaa

SEQ ID NO: 28086 - RNA, 19 nt, synthetic construct
  misc_feature 1..19: note = siRNA sense sequence
  source 1..19: mol_type = other RNA
ttcccagcaccatttatta

SEQ ID NO: 28087 - RNA, 19 nt, synthetic construct
  misc_feature 1..19: note = siRNA antisense sequence
  source 1..19: mol_type = other RNA
taataaatggtgctgggaa

SEQ ID NO: 28088 - RNA, 19 nt, synthetic construct
  misc_feature 1..19: note = siRNA sense sequence
  source 1..19: mol_type = other RNA
tcccagcaccatttattaa

SEQ ID NO: 28089 - RNA, 19 nt, synthetic construct
  misc_feature 1..19: note = siRNA antisense sequence
  source 1..19: mol_type = other RNA
ttaataaatggtgctggga

SEQ ID NO: 28090 - RNA, 19 nt, synthetic construct
  misc_feature 1..19: note = siRNA sense sequence
  source 1..19: mol_type = other RNA
cccagcaccatttattaaa

SEQ ID NO: 28091 - RNA, 19 nt, synthetic construct
  misc_feature 1..19: note = siRNA antisense sequence
  source 1..19: mol_type = other RNA
tttaataaatggtgctggg

SEQ ID NO: 28092 - RNA, 19 nt, synthetic construct
  misc_feature 1..19: note = siRNA sense sequence
  source 1..19: mol_type = other RNA
tcaggtttgtcaaagatca

SEQ ID NO: 28093 - RNA, 19 nt, synthetic construct
  misc_feature 1..19: note = siRNA antisense sequence
  source 1..19: mol_type = other RNA
tgatctttgacaaacctga

SEQ ID NO: 28094 - RNA, 19 nt, synthetic construct
  misc_feature 1..19: note = siRNA sense sequence
  source 1..19: mol_type = other RNA
gtttgtcaaagatcagatg

SEQ ID NO: 28095 - RNA, 19 nt, synthetic construct
  misc_feature 1..19: note = siRNA antisense sequence
  source 1..19: mol_type = other RNA
catctgatctttgacaaac

SEQ ID NO: 28096 - RNA, 19 nt, synthetic construct
  misc_feature 1..19: note = siRNA sense sequence
  source 1..19: mol_type = other RNA
tttgtcaaagatcagatgg

SEQ ID NO: 28097 - RNA, 19 nt, synthetic construct
  misc_feature 1..19: note = siRNA antisense sequence
  source 1..19: mol_type = other RNA
ccatctgatctttgacaaa

SEQ ID NO: 28098 - RNA, 19 nt, synthetic construct
  misc_feature 1..19: note = siRNA sense sequence
  source 1..19: mol_type = other RNA
ttgtcaaagatcagatggt

SEQ ID NO: 28099 - RNA, 19 nt, synthetic construct
  misc_feature 1..19: note = siRNA antisense sequence
  source 1..19: mol_type = other RNA
accatctgatctttgacaa

SEQ ID NO: 28100 - RNA, 19 nt, synthetic construct
  misc_feature 1..19: note = siRNA sense sequence
  source 1..19: mol_type = other RNA
tgtcaaagatcagatggtt

SEQ ID NO: 28101 - RNA, 19 nt, synthetic construct
  misc_feature 1..19: note = siRNA antisense sequence
  source 1..19: mol_type = other RNA
aaccatctgatctttgaca

SEQ ID NO: 28102 - RNA, 19 nt, synthetic construct
  misc_feature 1..19: note = siRNA sense sequence
  source 1..19: mol_type = other RNA
gtcaaagatcagatggtta

SEQ ID NO: 28103 - RNA, 19 nt, synthetic construct
  misc_feature 1..19: note = siRNA antisense sequence
  source 1..19: mol_type = other RNA
taaccatctgatctttgac

SEQ ID NO: 28104 - RNA, 19 nt, synthetic construct
  misc_feature 1..19: note = siRNA sense sequence
  source 1..19: mol_type = other RNA
tcaaagatcagatggttag

SEQ ID NO: 28105 - RNA, 19 nt, synthetic construct
  misc_feature 1..19: note = siRNA antisense sequence
  source 1..19: mol_type = other RNA
ctaaccatctgatctttga

SEQ ID NO: 28106 - RNA, 19 nt, synthetic construct
  misc_feature 1..19: note = siRNA sense sequence
  source 1..19: mol_type = other RNA
caaagatcagatggttaga

SEQ ID NO: 28107 - RNA, 19 nt, synthetic construct
  misc_feature 1..19: note = siRNA antisense sequence
  source 1..19: mol_type = other RNA
tctaaccatctgatctttg

SEQ ID NO: 28108 - RNA, 19 nt, synthetic construct
  misc_feature 1..19: note = siRNA sense sequence
  source 1..19: mol_type = other RNA
atcagatggttagatatgt

SEQ ID NO: 28109 - RNA, 19 nt, synthetic construct
  misc_feature 1..19: note = siRNA antisense sequence
  source 1..19: mol_type = other RNA
acatatctaaccatctgat

SEQ ID NO: 28110 - RNA, 19 nt, synthetic construct
  misc_feature 1..19: note = siRNA sense sequence
  source 1..19: mol_type = other RNA
cagatggttagatatgtgg

SEQ ID NO: 28111 - RNA, 19 nt, synthetic construct
  misc_feature 1..19: note = siRNA antisense sequence
  source 1..19: mol_type = other RNA
ccacatatctaaccatctg

SEQ ID NO: 28112 - RNA, 19 nt, synthetic construct
  misc_feature 1..19: note = siRNA sense sequence
  source 1..19: mol_type = other RNA
agatggttagatatgtggc

SEQ ID NO: 28113 - RNA, 19 nt, synthetic construct
  misc_feature 1..19: note = siRNA antisense sequence
  source 1..19: mol_type = other RNA
gccacatatctaaccatct

SEQ ID NO: 28114 - RNA, 19 nt, synthetic construct
  misc_feature 1..19: note = siRNA sense sequence
  source 1..19: mol_type = other RNA
gatggttagatatgtggca

SEQ ID NO: 28115 - RNA, 19 nt, synthetic construct
  misc_feature 1..19: note = siRNA antisense sequence
  source 1..19: mol_type = other RNA
tgccacatatctaaccatc

SEQ ID NO: 28116 - RNA, 19 nt, synthetic construct
  misc_feature 1..19: note = siRNA sense sequence
  source 1..19: mol_type = other RNA
atggttagatatgtggcat

SEQ ID NO: 28117 - RNA, 19 nt, synthetic construct
  misc_feature 1..19: note = siRNA antisense sequence
  source 1..19: mol_type = other RNA
atgccacatatctaaccat

SEQ ID NO: 28118 - RNA, 19 nt, synthetic construct
  misc_feature 1..19: note = siRNA sense sequence
  source 1..19: mol_type = other RNA
gtaccagtaccatgctgtt

SEQ ID NO: 28119 - RNA, 19 nt, synthetic construct
  misc_feature 1..19: note = siRNA antisense sequence
  source 1..19: mol_type = other RNA
aacagcatggtactggtac

SEQ ID NO: 28120 - RNA, 19 nt, synthetic construct
  misc_feature 1..19: note = siRNA sense sequence
  source 1..19: mol_type = other RNA
taccagtaccatgctgttt

SEQ ID NO: 28121 - RNA, 19 nt, synthetic construct
  misc_feature 1..19: note = siRNA antisense sequence
  source 1..19: mol_type = other RNA
aaacagcatggtactggta

SEQ ID NO: 28122 - RNA, 19 nt, synthetic construct
  misc_feature 1..19: note = siRNA sense sequence
  source 1..19: mol_type = other RNA
accagtaccatgctgtttt

SEQ ID NO: 28123 - RNA, 19 nt, synthetic construct
  misc_feature 1..19: note = siRNA antisense sequence
  source 1..19: mol_type = other RNA
aaaacagcatggtactggt

SEQ ID NO: 28124 - RNA, 19 nt, synthetic construct
  misc_feature 1..19: note = siRNA sense sequence
  source 1..19: mol_type = other RNA
ccagtaccatgctgttttg

SEQ ID NO: 28125 - RNA, 19 nt, synthetic construct
  misc_feature 1..19: note = siRNA antisense sequence
  source 1..19: mol_type = other RNA
caaaacagcatggtactgg

SEQ ID NO: 28126 - RNA, 19 nt, synthetic construct
  misc_feature 1..19: note = siRNA sense sequence
  source 1..19: mol_type = other RNA
cagtaccatgctgttttgg

SEQ ID NO: 28127 - RNA, 19 nt, synthetic construct
  misc_feature 1..19: note = siRNA antisense sequence
  source 1..19: mol_type = other RNA
ccaaaacagcatggtactg

SEQ ID NO: 28128 - RNA, 19 nt, synthetic construct
  misc_feature 1..19: note = siRNA sense sequence
  source 1..19: mol_type = other RNA
ccatgctgttttggttact

SEQ ID NO: 28129 - RNA, 19 nt, synthetic construct
  misc_feature 1..19: note = siRNA antisense sequence
  source 1..19: mol_type = other RNA
agtaaccaaaacagcatgg

SEQ ID NO: 28130 - RNA, 19 nt, synthetic construct
  misc_feature 1..19: note = siRNA sense sequence
  source 1..19: mol_type = other RNA
tgcctccagctttgttctt

SEQ ID NO: 28131 - RNA, 19 nt, synthetic construct
  misc_feature 1..19: note = siRNA antisense sequence
  source 1..19: mol_type = other RNA
aagaacaaagctggaggca

SEQ ID NO: 28132 - RNA, 19 nt, synthetic construct
  misc_feature 1..19: note = siRNA sense sequence
  source 1..19: mol_type = other RNA
tgtggcacatatacaccat

SEQ ID NO: 28133 - RNA, 19 nt, synthetic construct
  misc_feature 1..19: note = siRNA antisense sequence
  source 1..19: mol_type = other RNA
atggtgtatatgtgccaca

SEQ ID NO: 28134 - RNA, 19 nt, synthetic construct
  misc_feature 1..19: note = siRNA sense sequence
  source 1..19: mol_type = other RNA
gtggcacatatacaccatg

SEQ ID NO: 28135 - RNA, 19 nt, synthetic construct
  misc_feature 1..19: note = siRNA antisense sequence
  source 1..19: mol_type = other RNA
catggtgtatatgtgccac

SEQ ID NO: 28136 - RNA, 19 nt, synthetic construct
  misc_feature 1..19: note = siRNA sense sequence
  source 1..19: mol_type = other RNA
tggcacatatacaccatgg

SEQ ID NO: 28137 - RNA, 19 nt, synthetic construct
  misc_feature 1..19: note = siRNA antisense sequence
  source 1..19: mol_type = other RNA
ccatggtgtatatgtgcca

SEQ ID NO: 28138 - RNA, 19 nt, synthetic construct
  misc_feature 1..19: note = siRNA sense sequence
  source 1..19: mol_type = other RNA
ggcacatatacaccatgga

SEQ ID NO: 28139 - RNA, 19 nt, synthetic construct
  misc_feature 1..19: note = siRNA antisense sequence
  source 1..19: mol_type = other RNA
tccatggtgtatatgtgcc

SEQ ID NO: 28140 - RNA, 19 nt, synthetic construct
  misc_feature 1..19: note = siRNA sense sequence
  source 1..19: mol_type = other RNA
gcacatatacaccatggaa

SEQ ID NO: 28141 - RNA, 19 nt, synthetic construct
  misc_feature 1..19: note = siRNA antisense sequence
  source 1..19: mol_type = other RNA
ttccatggtgtatatgtgc

SEQ ID NO: 28142 - RNA, 19 nt, synthetic construct
  misc_feature 1..19: note = siRNA sense sequence
  source 1..19: mol_type = other RNA
cacatatacaccatggaat

SEQ ID NO: 28143 - RNA, 19 nt, synthetic construct
  misc_feature 1..19: note = siRNA antisense sequence
  source 1..19: mol_type = other RNA
attccatggtgtatatgtg

SEQ ID NO: 28144 - RNA, 19 nt, synthetic construct
  misc_feature 1..19: note = siRNA sense sequence
  source 1..19: mol_type = other RNA
acatatacaccatggaata

SEQ ID NO: 28145 - RNA, 19 nt, synthetic construct
  misc_feature 1..19: note = siRNA antisense sequence
  source 1..19: mol_type = other RNA
tattccatggtgtatatgt

SEQ ID NO: 28146 - RNA, 19 nt, synthetic construct
  misc_feature 1..19: note = siRNA sense sequence
  source 1..19: mol_type = other RNA
catatacaccatggaatac

SEQ ID NO: 28147 - RNA, 19 nt, synthetic construct
  misc_feature 1..19: note = siRNA antisense sequence
  source 1..19: mol_type = other RNA
gtattccatggtgtatatg

SEQ ID NO: 28148 - RNA, 19 nt, synthetic construct
  misc_feature 1..19: note = siRNA sense sequence
  source 1..19: mol_type = other RNA
atatacaccatggaatact

SEQ ID NO: 28149 - RNA, 19 nt, synthetic construct
  misc_feature 1..19: note = siRNA antisense sequence
  source 1..19: mol_type = other RNA
agtattccatggtgtatat

SEQ ID NO: 28150 - RNA, 19 nt, synthetic construct
  misc_feature 1..19: note = siRNA sense sequence
  source 1..19: mol_type = other RNA
tatacaccatggaatacta

SEQ ID NO: 28151 - RNA, 19 nt, synthetic construct
  misc_feature 1..19: note = siRNA antisense sequence
  source 1..19: mol_type = other RNA
tagtattccatggtgtata

SEQ ID NO: 28152 - RNA, 19 nt, synthetic construct
  misc_feature 1..19: note = siRNA sense sequence
  source 1..19: mol_type = other RNA
atacaccatggaatactat

SEQ ID NO: 28153 - RNA, 19 nt, synthetic construct
  misc_feature 1..19: note = siRNA antisense sequence
  source 1..19: mol_type = other RNA
atagtattccatggtgtat

SEQ ID NO: 28154 - RNA, 19 nt, synthetic construct
  misc_feature 1..19: note = siRNA sense sequence
  source 1..19: mol_type = other RNA
tacaccatggaatactatg

SEQ ID NO: 28155 - RNA, 19 nt, synthetic construct
  misc_feature 1..19: note = siRNA antisense sequence
  source 1..19: mol_type = other RNA
catagtattccatggtgta

SEQ ID NO: 28156 - RNA, 19 nt, synthetic construct
  misc_feature 1..19: note = siRNA sense sequence
  source 1..19: mol_type = other RNA
acaccatggaatactatgc

SEQ ID NO: 28157 - RNA, 19 nt, synthetic construct
  misc_feature 1..19: note = siRNA antisense sequence
  source 1..19: mol_type = other RNA
gcatagtattccatggtgt

SEQ ID NO: 28158 - RNA, 19 nt, synthetic construct
  misc_feature 1..19: note = siRNA sense sequence
  source 1..19: mol_type = other RNA
tggaatactatgcagtcat

SEQ ID NO: 28159 - RNA, 19 nt, synthetic construct
  misc_feature 1..19: note = siRNA antisense sequence
  source 1..19: mol_type = other RNA
atgactgcatagtattcca

SEQ ID NO: 28160 - RNA, 19 nt, synthetic construct
  misc_feature 1..19: note = siRNA sense sequence
  source 1..19: mol_type = other RNA
tgatgagttcatgtccttt

SEQ ID NO: 28161 - RNA, 19 nt, synthetic construct
  misc_feature 1..19: note = siRNA antisense sequence
  source 1..19: mol_type = other RNA
aaaggacatgaactcatca

SEQ ID NO: 28162 - RNA, 19 nt, synthetic construct
  misc_feature 1..19: note = siRNA sense sequence
  source 1..19: mol_type = other RNA
gatgagttcatgtcctttg

SEQ ID NO: 28163 - RNA, 19 nt, synthetic construct
  misc_feature 1..19: note = siRNA antisense sequence
  source 1..19: mol_type = other RNA
caaaggacatgaactcatc

SEQ ID NO: 28164 - RNA, 19 nt, synthetic construct
  misc_feature 1..19: note = siRNA sense sequence
  source 1..19: mol_type = other RNA
atgagttcatgtcctttgt

SEQ ID NO: 28165 - RNA, 19 nt, synthetic construct
  misc_feature 1..19: note = siRNA antisense sequence
  source 1..19: mol_type = other RNA
acaaaggacatgaactcat

SEQ ID NO: 28166 - RNA, 19 nt, synthetic construct
  misc_feature 1..19: note = siRNA sense sequence
  source 1..19: mol_type = other RNA
tgagttcatgtcctttgta

SEQ ID NO: 28167 - RNA, 19 nt, synthetic construct
  misc_feature 1..19: note = siRNA antisense sequence
  source 1..19: mol_type = other RNA
tacaaaggacatgaactca

SEQ ID NO: 28168 - RNA, 19 nt, synthetic construct
  misc_feature 1..19: note = siRNA sense sequence
  source 1..19: mol_type = other RNA
gagttcatgtcctttgtag

SEQ ID NO: 28169 - RNA, 19 nt, synthetic construct
  misc_feature 1..19: note = siRNA antisense sequence
  source 1..19: mol_type = other RNA
ctacaaaggacatgaactc

SEQ ID NO: 28170 - RNA, 19 nt, synthetic construct
  misc_feature 1..19: note = siRNA sense sequence
  source 1..19: mol_type = other RNA
agttcatgtcctttgtagg

SEQ ID NO: 28171 - RNA, 19 nt, synthetic construct
  misc_feature 1..19: note = siRNA antisense sequence
  source 1..19: mol_type = other RNA
cctacaaaggacatgaact

SEQ ID NO: 28172 - RNA, 19 nt, synthetic construct
  misc_feature 1..19: note = siRNA sense sequence
  source 1..19: mol_type = other RNA
gttcatgtcctttgtaggg

SEQ ID NO: 28173 - RNA, 19 nt, synthetic construct
  misc_feature 1..19: note = siRNA antisense sequence
  source 1..19: mol_type = other RNA
ccctacaaaggacatgaac

SEQ ID NO: 28174 - RNA, 19 nt, synthetic construct
  misc_feature 1..19: note = siRNA sense sequence
  source 1..19: mol_type = other RNA
ttcatgtcctttgtaggga

SEQ ID NO: 28175 - RNA, 19 nt, synthetic construct
  misc_feature 1..19: note = siRNA antisense sequence
  source 1..19: mol_type = other RNA
tccctacaaaggacatgaa

SEQ ID NO: 28176 - RNA, 19 nt, synthetic construct
  misc_feature 1..19: note = siRNA sense sequence
  source 1..19: mol_type = other RNA
ctttgtagggacatggatg

SEQ ID NO: 28177 - RNA, 19 nt, synthetic construct
  misc_feature 1..19: note = siRNA antisense sequence
  source 1..19: mol_type = other RNA
catccatgtccctacaaag

SEQ ID NO: 28178 - RNA, 19 nt, synthetic construct
  misc_feature 1..19: note = siRNA sense sequence
  source 1..19: mol_type = other RNA
tttgtagggacatggatga

SEQ ID NO: 28179 - RNA, 19 nt, synthetic construct
  misc_feature 1..19: note = siRNA antisense sequence
  source 1..19: mol_type = other RNA
tcatccatgtccctacaaa

SEQ ID NO: 28180 - RNA, 19 nt, synthetic construct
  misc_feature 1..19: note = siRNA sense sequence
  source 1..19: mol_type = other RNA
ttgtagggacatggatgaa

SEQ ID NO: 28181 - RNA, 19 nt, synthetic construct
  misc_feature 1..19: note = siRNA antisense sequence
  source 1..19: mol_type = other RNA
ttcatccatgtccctacaa

SEQ ID NO: 28182 - RNA, 19 nt, synthetic construct
  misc_feature 1..19: note = siRNA sense sequence
  source 1..19: mol_type = other RNA
tgtagggacatggatgaag

SEQ ID NO: 28183 - RNA, 19 nt, synthetic construct
  misc_feature 1..19: note = siRNA antisense sequence
  source 1..19: mol_type = other RNA
cttcatccatgtccctaca

SEQ ID NO: 28184 - RNA, 19 nt, synthetic construct
  misc_feature 1..19: note = siRNA sense sequence
  source 1..19: mol_type = other RNA
gtagggacatggatgaagc

SEQ ID NO: 28185 - RNA, 19 nt, synthetic construct
  misc_feature 1..19: note = siRNA antisense sequence
  source 1..19: mol_type = other RNA
gcttcatccatgtccctac

SEQ ID NO: 28186 - RNA, 19 nt, synthetic construct
  misc_feature 1..19: note = siRNA sense sequence
  source 1..19: mol_type = other RNA
tagggacatggatgaagct

SEQ ID NO: 28187 - RNA, 19 nt, synthetic construct
  misc_feature 1..19: note = siRNA antisense sequence
  source 1..19: mol_type = other RNA
agcttcatccatgtcccta

SEQ ID NO: 28188 - RNA, 19 nt, synthetic construct
  misc_feature 1..19: note = siRNA sense sequence
  source 1..19: mol_type = other RNA
agggacatggatgaagctg

SEQ ID NO: 28189 - RNA, 19 nt, synthetic construct
  misc_feature 1..19: note = siRNA antisense sequence
  source 1..19: mol_type = other RNA
cagcttcatccatgtccct

SEQ ID NO: 28190 - RNA, 19 nt, synthetic construct
  misc_feature 1..19: note = siRNA sense sequence
  source 1..19: mol_type = other RNA
gggacatggatgaagctgg

SEQ ID NO: 28191 - RNA, 19 nt, synthetic construct
  misc_feature 1..19: note = siRNA antisense sequence
  source 1..19: mol_type = other RNA
ccagcttcatccatgtccc

SEQ ID NO: 28192 - RNA, 19 nt, synthetic construct
  misc_feature 1..19: note = siRNA sense sequence
  source 1..19: mol_type = other RNA
ggacatggatgaagctgga

SEQ ID NO: 28193 - RNA, 19 nt, synthetic construct
  misc_feature 1..19: note = siRNA antisense sequence
  source 1..19: mol_type = other RNA
tccagcttcatccatgtcc

SEQ ID NO: 28194 - RNA, 19 nt, synthetic construct
  misc_feature 1..19: note = siRNA sense sequence
  source 1..19: mol_type = other RNA
gacatggatgaagctggaa

SEQ ID NO: 28195 - RNA, 19 nt, synthetic construct
  misc_feature 1..19: note = siRNA antisense sequence
  source 1..19: mol_type = other RNA
ttccagcttcatccatgtc

SEQ ID NO: 28196 - RNA, 19 nt, synthetic construct
  misc_feature 1..19: note = siRNA sense sequence
  source 1..19: mol_type = other RNA
cacatgttctcactcatag

SEQ ID NO: 28197 - RNA, 19 nt, synthetic construct
  misc_feature 1..19: note = siRNA antisense sequence
  source 1..19: mol_type = other RNA
ctatgagtgagaacatgtg

SEQ ID NO: 28198 - RNA, 19 nt, synthetic construct
  misc_feature 1..19: note = siRNA sense sequence
  source 1..19: mol_type = other RNA
acatgttctcactcatagg

SEQ ID NO: 28199 - RNA, 19 nt, synthetic construct
  misc_feature 1..19: note = siRNA antisense sequence
  source 1..19: mol_type = other RNA
cctatgagtgagaacatgt

SEQ ID NO: 28200 - RNA, 19 nt, synthetic construct
  misc_feature 1..19: note = siRNA sense sequence
  source 1..19: mol_type = other RNA
catgttctcactcataggt

SEQ ID NO: 28201 - RNA, 19 nt, synthetic construct
  misc_feature 1..19: note = siRNA antisense sequence
  source 1..19: mol_type = other RNA
acctatgagtgagaacatg

SEQ ID NO: 28202 - RNA, 19 nt, synthetic construct
  misc_feature 1..19: note = siRNA sense sequence
  source 1..19: mol_type = other RNA
atgttctcactcataggtg

SEQ ID NO: 28203 - RNA, 19 nt, synthetic construct
  misc_feature 1..19: note = siRNA antisense sequence
  source 1..19: mol_type = other RNA
cacctatgagtgagaacat

SEQ ID NO: 28204 - RNA, 19 nt, synthetic construct
  misc_feature 1..19: note = siRNA sense sequence
  source 1..19: mol_type = other RNA
tgttctcactcataggtgg

SEQ ID NO: 28205 - RNA, 19 nt, synthetic construct
  misc_feature 1..19: note = siRNA antisense sequence
  source 1..19: mol_type = other RNA
ccacctatgagtgagaaca

SEQ ID NO: 28206 - RNA, 19 nt, synthetic construct
  misc_feature 1..19: note = siRNA sense sequence
  source 1..19: mol_type = other RNA
gttctcactcataggtggg

SEQ ID NO: 28207 - RNA, 19 nt, synthetic construct
  misc_feature 1..19: note = siRNA antisense sequence
  source 1..19: mol_type = other RNA
cccacctatgagtgagaac

SEQ ID NO: 28208 - RNA, 19 nt, synthetic construct
  misc_feature 1..19: note = siRNA sense sequence
  source 1..19: mol_type = other RNA
tcactcataggtgggaatt

SEQ ID NO: 28209 - RNA, 19 nt, synthetic construct
  misc_feature 1..19: note = siRNA antisense sequence
  source 1..19: mol_type = other RNA
aattcccacctatgagtga

SEQ ID NO: 28210 - RNA, 19 nt, synthetic construct
  misc_feature 1..19: note = siRNA sense sequence
  source 1..19: mol_type = other RNA
cactcataggtgggaatta

SEQ ID NO: 28211 - RNA, 19 nt, synthetic construct
  misc_feature 1..19: note = siRNA antisense sequence
  source 1..19: mol_type = other RNA
taattcccacctatgagtg

SEQ ID NO: 28212 - RNA, 19 nt, synthetic construct
  misc_feature 1..19: note = siRNA sense sequence
  source 1..19: mol_type = other RNA
actcataggtgggaattaa

SEQ ID NO: 28213 - RNA, 19 nt, synthetic construct
  misc_feature 1..19: note = siRNA antisense sequence
  source 1..19: mol_type = other RNA
ttaattcccacctatgagt

SEQ ID NO: 28214 - RNA, 19 nt, synthetic construct
  misc_feature 1..19: note = siRNA sense sequence
  source 1..19: mol_type = other RNA
ctcataggtgggaattaaa

SEQ ID NO: 28215 - RNA, 19 nt, synthetic construct
  misc_feature 1..19: note = siRNA antisense sequence
  source 1..19: mol_type = other RNA
tttaattcccacctatgag

SEQ ID NO: 28216 - RNA, 19 nt, synthetic construct
  misc_feature 1..19: note = siRNA sense sequence
  source 1..19: mol_type = other RNA
gggagggatagcattagga

SEQ ID NO: 28217 - RNA, 19 nt, synthetic construct
  misc_feature 1..19: note = siRNA antisense sequence
  source 1..19: mol_type = other RNA
tcctaatgctatccctccc

SEQ ID NO: 28218 - RNA, 19 nt, synthetic construct
  misc_feature 1..19: note = siRNA sense sequence
  source 1..19: mol_type = other RNA
ggagggatagcattaggag

SEQ ID NO: 28219 - RNA, 19 nt, synthetic construct
  misc_feature 1..19: note = siRNA antisense sequence
  source 1..19: mol_type = other RNA
ctcctaatgctatccctcc

SEQ ID NO: 28220 - RNA, 19 nt, synthetic construct
  misc_feature 1..19: note = siRNA sense sequence
  source 1..19: mol_type = other RNA
atggcacatgtatacatat

SEQ ID NO: 28221 - RNA, 19 nt, synthetic construct
  misc_feature 1..19: note = siRNA antisense sequence
  source 1..19: mol_type = other RNA
atatgtatacatgtgccat

SEQ ID NO: 28222 - RNA, 19 nt, synthetic construct
  misc_feature 1..19: note = siRNA sense sequence
  source 1..19: mol_type = other RNA
tggcacatgtatacatatg

SEQ ID NO: 28223 - RNA, 19 nt, synthetic construct
  misc_feature 1..19: note = siRNA antisense sequence
  source 1..19: mol_type = other RNA
catatgtatacatgtgcca

SEQ ID NO: 28224 - RNA, 19 nt, synthetic construct
  misc_feature 1..19: note = siRNA sense sequence
  source 1..19: mol_type = other RNA
gttgtgcacatgtacccta

SEQ ID NO: 28225 - RNA, 19 nt, synthetic construct
  misc_feature 1..19: note = siRNA antisense sequence
  source 1..19: mol_type = other RNA
tagggtacatgtgcacaac

SEQ ID NO: 28226 - RNA, 19 nt, synthetic construct
  misc_feature 1..19: note = siRNA sense sequence
  source 1..19: mol_type = other RNA
ttgtgcacatgtaccctaa

SEQ ID NO: 28227 - RNA, 19 nt, synthetic construct
  misc_feature 1..19: note = siRNA antisense sequence
  source 1..19: mol_type = other RNA
ttagggtacatgtgcacaa

SEQ ID NO: 28228 - RNA, 19 nt, synthetic construct
  misc_feature 1..19: note = siRNA sense sequence
  source 1..19: mol_type = other RNA
tgtgcacatgtaccctaaa

SEQ ID NO: 28229 - RNA, 19 nt, synthetic construct
  misc_feature 1..19: note = siRNA antisense sequence
  source 1..19: mol_type = other RNA
tttagggtacatgtgcaca

SEQ ID NO: 28230 - RNA, 19 nt, synthetic construct
  misc_feature 1..19: note = siRNA sense sequence
  source 1..19: mol_type = other RNA
gtgcacatgtaccctaaaa

SEQ ID NO: 28231 - RNA, 19 nt, synthetic construct
  misc_feature 1..19: note = siRNA antisense sequence
  source 1..19: mol_type = other RNA
ttttagggtacatgtgcac

SEQ ID NO: 28232 - RNA, 19 nt, synthetic construct
  misc_feature 1..19: note = siRNA sense sequence
  source 1..19: mol_type = other RNA
aaaatggcacacttgctct

SEQ ID NO: 28233 - RNA, 19 nt, synthetic construct
  misc_feature 1..19: note = siRNA antisense sequence
  source 1..19: mol_type = other RNA
agagcaagtgtgccatttt

SEQ ID NO: 28234 - RNA, 19 nt, synthetic construct
  misc_feature 1..19: note = siRNA sense sequence
  source 1..19: mol_type = other RNA
aaatggcacacttgctctt

SEQ ID NO: 28235 - RNA, 19 nt, synthetic construct
  misc_feature 1..19: note = siRNA antisense sequence
  source 1..19: mol_type = other RNA
aagagcaagtgtgccattt

SEQ ID NO: 28236 - RNA, 19 nt, synthetic construct
  misc_feature 1..19: note = siRNA sense sequence
  source 1..19: mol_type = other RNA
ggcacacttgctcttgact

SEQ ID NO: 28237 - RNA, 19 nt, synthetic construct
  misc_feature 1..19: note = siRNA antisense sequence
  source 1..19: mol_type = other RNA
agtcaagagcaagtgtgcc

SEQ ID NO: 28238 - RNA, 19 nt, synthetic construct
  misc_feature 1..19: note = siRNA sense sequence
  source 1..19: mol_type = other RNA
gcacacttgctcttgactc

SEQ ID NO: 28239 - RNA, 19 nt, synthetic construct
  misc_feature 1..19: note = siRNA antisense sequence
  source 1..19: mol_type = other RNA
gagtcaagagcaagtgtgc

SEQ ID NO: 28240 - RNA, 19 nt, synthetic construct
  misc_feature 1..19: note = siRNA sense sequence
  source 1..19: mol_type = other RNA
cacacttgctcttgactcc

SEQ ID NO: 28241 - RNA, 19 nt, synthetic construct
  misc_feature 1..19: note = siRNA antisense sequence
  source 1..19: mol_type = other RNA
ggagtcaagagcaagtgtg

SEQ ID NO: 28242 - RNA, 19 nt, synthetic construct
  misc_feature 1..19: note = siRNA sense sequence
  source 1..19: mol_type = other RNA
acacttgctcttgactccc

SEQ ID NO: 28243 - RNA, 19 nt, synthetic construct
  misc_feature 1..19: note = siRNA antisense sequence
  source 1..19: mol_type = other RNA
gggagtcaagagcaagtgt

SEQ ID NO: 28244 - RNA, 19 nt, synthetic construct
  misc_feature 1..19: note = siRNA sense sequence
  source 1..19: mol_type = other RNA
cacttgctcttgactccct

SEQ ID NO: 28245 - RNA, 19 nt, synthetic construct
  misc_feature 1..19: note = siRNA antisense sequence
  source 1..19: mol_type = other RNA
agggagtcaagagcaagtg

SEQ ID NO: 28246 - RNA, 19 nt, synthetic construct
  misc_feature 1..19: note = siRNA sense sequence
  source 1..19: mol_type = other RNA
acttgctcttgactccctt

SEQ ID NO: 28247 - RNA, 19 nt, synthetic construct
  misc_feature 1..19: note = siRNA antisense sequence
  source 1..19: mol_type = other RNA
aagggagtcaagagcaagt

SEQ ID NO: 28248 - RNA, 19 nt, synthetic construct
  misc_feature 1..19: note = siRNA sense sequence
  source 1..19: mol_type = other RNA
cttgctcttgactcccttg

SEQ ID NO: 28249 - RNA, 19 nt, synthetic construct
  misc_feature 1..19: note = siRNA antisense sequence
  source 1..19: mol_type = other RNA
caagggagtcaagagcaag

SEQ ID NO: 28250 - RNA, 19 nt, synthetic construct
  misc_feature 1..19: note = siRNA sense sequence
  source 1..19: mol_type = other RNA
ttgctcttgactcccttgg

SEQ ID NO: 28251 - RNA, 19 nt, synthetic construct
  misc_feature 1..19: note = siRNA antisense sequence
  source 1..19: mol_type = other RNA
ccaagggagtcaagagcaa

SEQ ID NO: 28252 - RNA, 19 nt, synthetic construct
  misc_feature 1..19: note = siRNA sense sequence
  source 1..19: mol_type = other RNA
tgctcttgactcccttggc

SEQ ID NO: 28253 - RNA, 19 nt, synthetic construct
  misc_feature 1..19: note = siRNA antisense sequence
  source 1..19: mol_type = other RNA
gccaagggagtcaagagca

SEQ ID NO: 28254 - RNA, 19 nt, synthetic construct
  misc_feature 1..19: note = siRNA sense sequence
  source 1..19: mol_type = other RNA
gctcttgactcccttggcc

SEQ ID NO: 28255 - RNA, 19 nt, synthetic construct
  misc_feature 1..19: note = siRNA antisense sequence
  source 1..19: mol_type = other RNA
ggccaagggagtcaagagc

SEQ ID NO: 28256 - RNA, 19 nt, synthetic construct
  misc_feature 1..19: note = siRNA sense sequence
  source 1..19: mol_type = other RNA
ctcttgactcccttggccg

SEQ ID NO: 28257 - RNA, 19 nt, synthetic construct
  misc_feature 1..19: note = siRNA antisense sequence
  source 1..19: mol_type = other RNA
cggccaagggagtcaagag

SEQ ID NO: 28258 - RNA, 19 nt, synthetic construct
  misc_feature 1..19: note = siRNA sense sequence
  source 1..19: mol_type = other RNA
gccggaggtggaggtaata

SEQ ID NO: 28259 - RNA, 19 nt, synthetic construct
  misc_feature 1..19: note = siRNA antisense sequence
  source 1..19: mol_type = other RNA
tattacctccacctccggc

SEQ ID NO: 28260 - RNA, 19 nt, synthetic construct
  misc_feature 1..19: note = siRNA sense sequence
  source 1..19: mol_type = other RNA
ccggaggtggaggtaatac

SEQ ID NO: 28261 - RNA, 19 nt, synthetic construct
  misc_feature 1..19: note = siRNA antisense sequence
  source 1..19: mol_type = other RNA
gtattacctccacctccgg

SEQ ID NO: 28262 - RNA, 19 nt, synthetic construct
  misc_feature 1..19: note = siRNA sense sequence
  source 1..19: mol_type = other RNA
cggaggtggaggtaataca

SEQ ID NO: 28263 - RNA, 19 nt, synthetic construct
  misc_feature 1..19: note = siRNA antisense sequence
  source 1..19: mol_type = other RNA
tgtattacctccacctccg

SEQ ID NO: 28264 - RNA, 19 nt, synthetic construct
  misc_feature 1..19: note = siRNA sense sequence
  source 1..19: mol_type = other RNA
ggaggtggaggtaatacat

SEQ ID NO: 28265 - RNA, 19 nt, synthetic construct
  misc_feature 1..19: note = siRNA antisense sequence
  source 1..19: mol_type = other RNA
atgtattacctccacctcc

SEQ ID NO: 28266 - RNA, 19 nt, synthetic construct
  misc_feature 1..19: note = siRNA sense sequence
  source 1..19: mol_type = other RNA
gaggtggaggtaatacatt

SEQ ID NO: 28267 - RNA, 19 nt, synthetic construct
  misc_feature 1..19: note = siRNA antisense sequence
  source 1..19: mol_type = other RNA
aatgtattacctccacctc

SEQ ID NO: 28268 - RNA, 19 nt, synthetic construct
  misc_feature 1..19: note = siRNA sense sequence
  source 1..19: mol_type = other RNA
aggtggaggtaatacattg

SEQ ID NO: 28269 - RNA, 19 nt, synthetic construct
  misc_feature 1..19: note = siRNA antisense sequence
  source 1..19: mol_type = other RNA
caatgtattacctccacct

SEQ ID NO: 28270 - RNA, 19 nt, synthetic construct
  misc_feature 1..19: note = siRNA sense sequence
  source 1..19: mol_type = other RNA
ggtggaggtaatacattgt

SEQ ID NO: 28271 - RNA, 19 nt, synthetic construct
  misc_feature 1..19: note = siRNA antisense sequence
  source 1..19: mol_type = other RNA
acaatgtattacctccacc

SEQ ID NO: 28272 - RNA, 19 nt, synthetic construct
  misc_feature 1..19: note = siRNA sense sequence
  source 1..19: mol_type = other RNA
gtggaggtaatacattgtt

SEQ ID NO: 28273 - RNA, 19 nt, synthetic construct
  misc_feature 1..19: note = siRNA antisense sequence
  source 1..19: mol_type = other RNA
aacaatgtattacctccac

SEQ ID NO: 28274 - RNA, 19 nt, synthetic construct
  misc_feature 1..19: note = siRNA sense sequence
  source 1..19: mol_type = other RNA
tggaggtaatacattgtta

SEQ ID NO: 28275 - RNA, 19 nt, synthetic construct
  misc_feature 1..19: note = siRNA antisense sequence
  source 1..19: mol_type = other RNA
taacaatgtattacctcca

SEQ ID NO: 28276 - RNA, 19 nt, synthetic construct
  misc_feature 1..19: note = siRNA sense sequence
  source 1..19: mol_type = other RNA
ggaggtaatacattgttag

SEQ ID NO: 28277 - RNA, 19 nt, synthetic construct
  misc_feature 1..19: note = siRNA antisense sequence
  source 1..19: mol_type = other RNA
ctaacaatgtattacctcc

SEQ ID NO: 28278 - RNA, 19 nt, synthetic construct
  misc_feature 1..19: note = siRNA sense sequence
  source 1..19: mol_type = other RNA
gaggtaatacattgttagt

SEQ ID NO: 28279 - RNA, 19 nt, synthetic construct
  misc_feature 1..19: note = siRNA antisense sequence
  source 1..19: mol_type = other RNA
actaacaatgtattacctc

SEQ ID NO: 28280 - RNA, 19 nt, synthetic construct
  misc_feature 1..19: note = siRNA sense sequence
  source 1..19: mol_type = other RNA
ggtaatacattgttagttc

SEQ ID NO: 28281 - RNA, 19 nt, synthetic construct
  misc_feature 1..19: note = siRNA antisense sequence
  source 1..19: mol_type = other RNA
gaactaacaatgtattacc

SEQ ID NO: 28282 - RNA, 19 nt, synthetic construct
  misc_feature 1..19: note = siRNA sense sequence
  source 1..19: mol_type = other RNA
attgttagttctgatcctt

SEQ ID NO: 28283 - RNA, 19 nt, synthetic construct
  misc_feature 1..19: note = siRNA antisense sequence
  source 1..19: mol_type = other RNA
aaggatcagaactaacaat

SEQ ID NO: 28284 - RNA, 19 nt, synthetic construct
  misc_feature 1..19: note = siRNA sense sequence
  source 1..19: mol_type = other RNA
ttgttagttctgatccttg

SEQ ID NO: 28285 - RNA, 19 nt, synthetic construct
  misc_feature 1..19: note = siRNA antisense sequence
  source 1..19: mol_type = other RNA
caaggatcagaactaacaa

SEQ ID NO: 28286 - RNA, 19 nt, synthetic construct
  misc_feature 1..19: note = siRNA sense sequence
  source 1..19: mol_type = other RNA
tgttagttctgatccttgt

SEQ ID NO: 28287 - RNA, 19 nt, synthetic construct
  misc_feature 1..19: note = siRNA antisense sequence
  source 1..19: mol_type = other RNA
acaaggatcagaactaaca

SEQ ID NO: 28288 - RNA, 19 nt, synthetic construct
  misc_feature 1..19: note = siRNA sense sequence
  source 1..19: mol_type = other RNA
gttagttctgatccttgtt

SEQ ID NO: 28289 - RNA, 19 nt, synthetic construct
  misc_feature 1..19: note = siRNA antisense sequence
  source 1..19: mol_type = other RNA
aacaaggatcagaactaac

SEQ ID NO: 28290 - RNA, 19 nt, synthetic construct
  misc_feature 1..19: note = siRNA sense sequence
  source 1..19: mol_type = other RNA
tagttctgatccttgttca

SEQ ID NO: 28291 - RNA, 19 nt, synthetic construct
  misc_feature 1..19: note = siRNA antisense sequence
  source 1..19: mol_type = other RNA
tgaacaaggatcagaacta

SEQ ID NO: 28292 - RNA, 19 nt, synthetic construct
  misc_feature 1..19: note = siRNA sense sequence
  source 1..19: mol_type = other RNA
agttctgatccttgttcat

SEQ ID NO: 28293 - RNA, 19 nt, synthetic construct
  misc_feature 1..19: note = siRNA antisense sequence
  source 1..19: mol_type = other RNA
atgaacaaggatcagaact

SEQ ID NO: 28294 - RNA, 19 nt, synthetic construct
  misc_feature 1..19: note = siRNA sense sequence
  source 1..19: mol_type = other RNA
gttctgatccttgttcatt

SEQ ID NO: 28295 - RNA, 19 nt, synthetic construct
  misc_feature 1..19: note = siRNA antisense sequence
  source 1..19: mol_type = other RNA
aatgaacaaggatcagaac

SEQ ID NO: 28296 - RNA, 19 nt, synthetic construct
  misc_feature 1..19: note = siRNA sense sequence
  source 1..19: mol_type = other RNA
ttctgatccttgttcattg

SEQ ID NO: 28297 - RNA, 19 nt, synthetic construct
  misc_feature 1..19: note = siRNA antisense sequence
  source 1..19: mol_type = other RNA
caatgaacaaggatcagaa

SEQ ID NO: 28298 - RNA, 19 nt, synthetic construct
  misc_feature 1..19: note = siRNA sense sequence
  source 1..19: mol_type = other RNA
tctgatccttgttcattga

SEQ ID NO: 28299 - RNA, 19 nt, synthetic construct
  misc_feature 1..19: note = siRNA antisense sequence
  source 1..19: mol_type = other RNA
tcaatgaacaaggatcaga

SEQ ID NO: 28300 - RNA, 19 nt, synthetic construct
  misc_feature 1..19: note = siRNA sense sequence
  source 1..19: mol_type = other RNA
ctgatccttgttcattgat

SEQ ID NO: 28301 - RNA, 19 nt, synthetic construct
  misc_feature 1..19: note = siRNA antisense sequence
  source 1..19: mol_type = other RNA
atcaatgaacaaggatcag

SEQ ID NO: 28302 - RNA, 19 nt, synthetic construct
  misc_feature 1..19: note = siRNA sense sequence
  source 1..19: mol_type = other RNA
tgatccttgttcattgatg

SEQ ID NO: 28303 - RNA, 19 nt, synthetic construct
  misc_feature 1..19: note = siRNA antisense sequence
  source 1..19: mol_type = other RNA
catcaatgaacaaggatca

SEQ ID NO: 28304 - RNA, 19 nt, synthetic construct
  misc_feature 1..19: note = siRNA sense sequence
  source 1..19: mol_type = other RNA
gatccttgttcattgatga

SEQ ID NO: 28305 - RNA, 19 nt, synthetic construct
  misc_feature 1..19: note = siRNA antisense sequence
  source 1..19: mol_type = other RNA
tcatcaatgaacaaggatc

SEQ ID NO: 28306 - RNA, 19 nt, synthetic construct
  misc_feature 1..19: note = siRNA sense sequence
  source 1..19: mol_type = other RNA
gcccacatggcttccacct

SEQ ID NO: 28307 - RNA, 19 nt, synthetic construct
  misc_feature 1..19: note = siRNA antisense sequence
  source 1..19: mol_type = other RNA
aggtggaagccatgtgggc

SEQ ID NO: 28308 - RNA, 19 nt, synthetic construct
  misc_feature 1..19: note = siRNA sense sequence
  source 1..19: mol_type = other RNA
cccacatggcttccaccta

SEQ ID NO: 28309 - RNA, 19 nt, synthetic construct
  misc_feature 1..19: note = siRNA antisense sequence
  source 1..19: mol_type = other RNA
taggtggaagccatgtggg

SEQ ID NO: 28310 - RNA, 19 nt, synthetic construct
  misc_feature 1..19: note = siRNA sense sequence
  source 1..19: mol_type = other RNA
ccacatggcttccacctac

SEQ ID NO: 28311 - RNA, 19 nt, synthetic construct
  misc_feature 1..19: note = siRNA antisense sequence
  source 1..19: mol_type = other RNA
gtaggtggaagccatgtgg

SEQ ID NO: 28312 - RNA, 19 nt, synthetic construct
  misc_feature 1..19: note = siRNA sense sequence
  source 1..19: mol_type = other RNA
cacatggcttccacctact

SEQ ID NO: 28313 - RNA, 19 nt, synthetic construct
  misc_feature 1..19: note = siRNA antisense sequence
  source 1..19: mol_type = other RNA
agtaggtggaagccatgtg

SEQ ID NO: 28314 - RNA, 19 nt, synthetic construct
  misc_feature 1..19: note = siRNA sense sequence
  source 1..19: mol_type = other RNA
tggcttccacctactgcta

SEQ ID NO: 28315 - RNA, 19 nt, synthetic construct
  misc_feature 1..19: note = siRNA antisense sequence
  source 1..19: mol_type = other RNA
tagcagtaggtggaagcca

SEQ ID NO: 28316 - RNA, 19 nt, synthetic construct
  misc_feature 1..19: note = siRNA sense sequence
  source 1..19: mol_type = other RNA
ggcttccacctactgctag

SEQ ID NO: 28317 - RNA, 19 nt, synthetic construct
  misc_feature 1..19: note = siRNA antisense sequence
  source 1..19: mol_type = other RNA
ctagcagtaggtggaagcc

SEQ ID NO: 28318 - RNA, 19 nt, synthetic construct
  misc_feature 1..19: note = siRNA sense sequence
  source 1..19: mol_type = other RNA
actgctagggactctggga

SEQ ID NO: 28319 - RNA, 19 nt, synthetic construct
  misc_feature 1..19: note = siRNA antisense sequence
  source 1..19: mol_type = other RNA
tcccagagtccctagcagt

SEQ ID NO: 28320 - RNA, 19 nt, synthetic construct
  misc_feature 1..19: note = siRNA sense sequence
  source 1..19: mol_type = other RNA
ctgctagggactctgggac

SEQ ID NO: 28321 - RNA, 19 nt, synthetic construct
  misc_feature 1..19: note = siRNA antisense sequence
  source 1..19: mol_type = other RNA
gtcccagagtccctagcag

SEQ ID NO: 28322 - RNA, 19 nt, synthetic construct
  misc_feature 1..19: note = siRNA sense sequence
  source 1..19: mol_type = other RNA
tgctagggactctgggaca

SEQ ID NO: 28323 - RNA, 19 nt, synthetic construct
  misc_feature 1..19: note = siRNA antisense sequence
  source 1..19: mol_type = other RNA
tgtcccagagtccctagca

SEQ ID NO: 28324 - RNA, 19 nt, synthetic construct
  misc_feature 1..19: note = siRNA sense sequence
  source 1..19: mol_type = other RNA
gctagggactctgggacat

SEQ ID NO: 28325 - RNA, 19 nt, synthetic construct
  misc_feature 1..19: note = siRNA antisense sequence
  source 1..19: mol_type = other RNA
atgtcccagagtccctagc

SEQ ID NO: 28326 - RNA, 19 nt, synthetic construct
  misc_feature 1..19: note = siRNA sense sequence
  source 1..19: mol_type = other RNA
ctagggactctgggacata

SEQ ID NO: 28327 - RNA, 19 nt, synthetic construct
  misc_feature 1..19: note = siRNA antisense sequence
  source 1..19: mol_type = other RNA
tatgtcccagagtccctag

SEQ ID NO: 28328 - RNA, 19 nt, synthetic construct
  misc_feature 1..19: note = siRNA sense sequence
  source 1..19: mol_type = other RNA
tagggactctgggacatac

SEQ ID NO: 28329 - RNA, 19 nt, synthetic construct
  misc_feature 1..19: note = siRNA antisense sequence
  source 1..19: mol_type = other RNA
gtatgtcccagagtcccta

SEQ ID NO: 28330 - RNA, 19 nt, synthetic construct
  misc_feature 1..19: note = siRNA sense sequence
  source 1..19: mol_type = other RNA
caagcacataattatttgg

SEQ ID NO: 28331 - RNA, 19 nt, synthetic construct
  misc_feature 1..19: note = siRNA antisense sequence
  source 1..19: mol_type = other RNA
ccaaataattatgtgcttg

SEQ ID NO: 28332 - RNA, 19 nt, synthetic construct
  misc_feature 1..19: note = siRNA sense sequence
  source 1..19: mol_type = other RNA
agcacataattatttggtg

SEQ ID NO: 28333 - RNA, 19 nt, synthetic construct
  misc_feature 1..19: note = siRNA antisense sequence
  source 1..19: mol_type = other RNA
caccaaataattatgtgct

SEQ ID NO: 28334 - RNA, 19 nt, synthetic construct
  misc_feature 1..19: note = siRNA sense sequence
  source 1..19: mol_type = other RNA
tatttggtgatatttggtg

SEQ ID NO: 28335 - RNA, 19 nt, synthetic construct
  misc_feature 1..19: note = siRNA antisense sequence
  source 1..19: mol_type = other RNA
caccaaatatcaccaaata

SEQ ID NO: 28336 - RNA, 19 nt, synthetic construct
  misc_feature 1..19: note = siRNA sense sequence
  source 1..19: mol_type = other RNA
atttggtgatatttggtga

SEQ ID NO: 28337 - RNA, 19 nt, synthetic construct
  misc_feature 1..19: note = siRNA antisense sequence
  source 1..19: mol_type = other RNA
tcaccaaatatcaccaaat

SEQ ID NO: 28338 - RNA, 19 nt, synthetic construct
  misc_feature 1..19: note = siRNA sense sequence
  source 1..19: mol_type = other RNA
tttggtgatatttggtgag

SEQ ID NO: 28339 - RNA, 19 nt, synthetic construct
  misc_feature 1..19: note = siRNA antisense sequence
  source 1..19: mol_type = other RNA
ctcaccaaatatcaccaaa

SEQ ID NO: 28340 - RNA, 19 nt, synthetic construct
  misc_feature 1..19: note = siRNA sense sequence
  source 1..19: mol_type = other RNA
ttggtgatatttggtgagc

SEQ ID NO: 28341 - RNA, 19 nt, synthetic construct
  misc_feature 1..19: note = siRNA antisense sequence
  source 1..19: mol_type = other RNA
gctcaccaaatatcaccaa

SEQ ID NO: 28342 - RNA, 19 nt, synthetic construct
  misc_feature 1..19: note = siRNA sense sequence
  source 1..19: mol_type = other RNA
tgatatttggtgagcccta

SEQ ID NO: 28343 - RNA, 19 nt, synthetic construct
  misc_feature 1..19: note = siRNA antisense sequence
  source 1..19: mol_type = other RNA
tagggctcaccaaatatca

SEQ ID NO: 28344 - RNA, 19 nt, synthetic construct
  misc_feature 1..19: note = siRNA sense sequence
  source 1..19: mol_type = other RNA
gatatttggtgagccctaa

SEQ ID NO: 28345 - RNA, 19 nt, synthetic construct
  misc_feature 1..19: note = siRNA antisense sequence
  source 1..19: mol_type = other RNA
ttagggctcaccaaatatc

SEQ ID NO: 28346 - RNA, 19 nt, synthetic construct
  misc_feature 1..19: note = siRNA sense sequence
  source 1..19: mol_type = other RNA
tatttggtgagccctaact

SEQ ID NO: 28347 - RNA, 19 nt, synthetic construct
  misc_feature 1..19: note = siRNA antisense sequence
  source 1..19: mol_type = other RNA
agttagggctcaccaaata

SEQ ID NO: 28348 - RNA, 19 nt, synthetic construct
  misc_feature 1..19: note = siRNA sense sequence
  source 1..19: mol_type = other RNA
cttttgaagcatttagttc

SEQ ID NO: 28349 - RNA, 19 nt, synthetic construct
  misc_feature 1..19: note = siRNA antisense sequence
  source 1..19: mol_type = other RNA
gaactaaatgcttcaaaag

SEQ ID NO: 28350 - RNA, 19 nt, synthetic construct
  misc_feature 1..19: note = siRNA sense sequence
  source 1..19: mol_type = other RNA
gagcatatgctgggaggat

SEQ ID NO: 28351 - RNA, 19 nt, synthetic construct
  misc_feature 1..19: note = siRNA antisense sequence
  source 1..19: mol_type = other RNA
atcctcccagcatatgctc

SEQ ID NO: 28352 - RNA, 19 nt, synthetic construct
  misc_feature 1..19: note = siRNA sense sequence
  source 1..19: mol_type = other RNA
agcatatgctgggaggata

SEQ ID NO: 28353 - RNA, 19 nt, synthetic construct
  misc_feature 1..19: note = siRNA antisense sequence
  source 1..19: mol_type = other RNA
tatcctcccagcatatgct

SEQ ID NO: 28354 - RNA, 19 nt, synthetic construct
  misc_feature 1..19: note = siRNA sense sequence
  source 1..19: mol_type = other RNA
tatgctgggaggatatttg

SEQ ID NO: 28355 - RNA, 19 nt, synthetic construct
  misc_feature 1..19: note = siRNA antisense sequence
  source 1..19: mol_type = other RNA
caaatatcctcccagcata

SEQ ID NO: 28356 - RNA, 19 nt, synthetic construct
  misc_feature 1..19: note = siRNA sense sequence
  source 1..19: mol_type = other RNA
atgctgggaggatatttgc

SEQ ID NO: 28357 - RNA, 19 nt, synthetic construct
  misc_feature 1..19: note = siRNA antisense sequence
  source 1..19: mol_type = other RNA
gcaaatatcctcccagcat

SEQ ID NO: 28358 - RNA, 19 nt, synthetic construct
  misc_feature 1..19: note = siRNA sense sequence
  source 1..19: mol_type = other RNA
tgctgggaggatatttgct

SEQ ID NO: 28359 - RNA, 19 nt, synthetic construct
  misc_feature 1..19: note = siRNA antisense sequence
  source 1..19: mol_type = other RNA
agcaaatatcctcccagca

SEQ ID NO: 28360 - RNA, 19 nt, synthetic construct
  misc_feature 1..19: note = siRNA sense sequence
  source 1..19: mol_type = other RNA
gctgggaggatatttgcta

SEQ ID NO: 28361 - RNA, 19 nt, synthetic construct
  misc_feature 1..19: note = siRNA antisense sequence
  source 1..19: mol_type = other RNA
tagcaaatatcctcccagc

SEQ ID NO: 28362 - RNA, 19 nt, synthetic construct
  misc_feature 1..19: note = siRNA sense sequence
  source 1..19: mol_type = other RNA
ctgggaggatatttgctat

SEQ ID NO: 28363 - RNA, 19 nt, synthetic construct
  misc_feature 1..19: note = siRNA antisense sequence
  source 1..19: mol_type = other RNA
atagcaaatatcctcccag

SEQ ID NO: 28364 - RNA, 19 nt, synthetic construct
  misc_feature 1..19: note = siRNA sense sequence
  source 1..19: mol_type = other RNA
tgggaggatatttgctata

SEQ ID NO: 28365 - RNA, 19 nt, synthetic construct
  misc_feature 1..19: note = siRNA antisense sequence
  source 1..19: mol_type = other RNA
tatagcaaatatcctccca

SEQ ID NO: 28366 - RNA, 19 nt, synthetic construct
  misc_feature 1..19: note = siRNA sense sequence
  source 1..19: mol_type = other RNA
atttgctatattctgctag

SEQ ID NO: 28367 - RNA, 19 nt, synthetic construct
  misc_feature 1..19: note = siRNA antisense sequence
  source 1..19: mol_type = other RNA
ctagcagaatatagcaaat

SEQ ID NO: 28368 - RNA, 19 nt, synthetic construct
  misc_feature 1..19: note = siRNA sense sequence
  source 1..19: mol_type = other RNA
tttgctatattctgctagt

SEQ ID NO: 28369 - RNA, 19 nt, synthetic construct
  misc_feature 1..19: note = siRNA antisense sequence
  source 1..19: mol_type = other RNA
actagcagaatatagcaaa

SEQ ID NO: 28370 - RNA, 19 nt, synthetic construct
  misc_feature 1..19: note = siRNA sense sequence
  source 1..19: mol_type = other RNA
ctatattctgctagtttcc

SEQ ID NO: 28371 - RNA, 19 nt, synthetic construct
  misc_feature 1..19: note = siRNA antisense sequence
  source 1..19: mol_type = other RNA
ggaaactagcagaatatag

SEQ ID NO: 28372 - RNA, 19 nt, synthetic construct
  misc_feature 1..19: note = siRNA sense sequence
  source 1..19: mol_type = other RNA
cccaatttaaggttgtctg

SEQ ID NO: 28373 - RNA, 19 nt, synthetic construct
  misc_feature 1..19: note = siRNA antisense sequence
  source 1..19: mol_type = other RNA
cagacaaccttaaattggg

SEQ ID NO: 28374 - RNA, 19 nt, synthetic construct
  misc_feature 1..19: note = siRNA sense sequence
  source 1..19: mol_type = other RNA
ccaatttaaggttgtctgt

SEQ ID NO: 28375 - RNA, 19 nt, synthetic construct
  misc_feature 1..19: note = siRNA antisense sequence
  source 1..19: mol_type = other RNA
acagacaaccttaaattgg

SEQ ID NO: 28376 - RNA, 19 nt, synthetic construct
  misc_feature 1..19: note = siRNA sense sequence
  source 1..19: mol_type = other RNA
tttaaggttgtctgttttg

SEQ ID NO: 28377 - RNA, 19 nt, synthetic construct
  misc_feature 1..19: note = siRNA antisense sequence
  source 1..19: mol_type = other RNA
caaaacagacaaccttaaa

SEQ ID NO: 28378 - RNA, 19 nt, synthetic construct
  misc_feature 1..19: note = siRNA sense sequence
  source 1..19: mol_type = other RNA
taaggttgtctgttttgat

SEQ ID NO: 28379 - RNA, 19 nt, synthetic construct
  misc_feature 1..19: note = siRNA antisense sequence
  source 1..19: mol_type = other RNA
atcaaaacagacaacctta

SEQ ID NO: 28380 - RNA, 19 nt, synthetic construct
  misc_feature 1..19: note = siRNA sense sequence
  source 1..19: mol_type = other RNA
aaggttgtctgttttgatt

SEQ ID NO: 28381 - RNA, 19 nt, synthetic construct
  misc_feature 1..19: note = siRNA antisense sequence
  source 1..19: mol_type = other RNA
aatcaaaacagacaacctt

SEQ ID NO: 28382 - RNA, 19 nt, synthetic construct
  misc_feature 1..19: note = siRNA sense sequence
  source 1..19: mol_type = other RNA
aggttgtctgttttgatta

SEQ ID NO: 28383 - RNA, 19 nt, synthetic construct
  misc_feature 1..19: note = siRNA antisense sequence
  source 1..19: mol_type = other RNA
taatcaaaacagacaacct

SEQ ID NO: 28384 - RNA, 19 nt, synthetic construct
  misc_feature 1..19: note = siRNA sense sequence
  source 1..19: mol_type = other RNA
ggttgtctgttttgattaa

SEQ ID NO: 28385 - RNA, 19 nt, synthetic construct
  misc_feature 1..19: note = siRNA antisense sequence
  source 1..19: mol_type = other RNA
ttaatcaaaacagacaacc

SEQ ID NO: 28386 - RNA, 19 nt, synthetic construct
  misc_feature 1..19: note = siRNA sense sequence
  source 1..19: mol_type = other RNA
aactctcatctatttagtc

SEQ ID NO: 28387 - RNA, 19 nt, synthetic construct
  misc_feature 1..19: note = siRNA antisense sequence
  source 1..19: mol_type = other RNA
gactaaatagatgagagtt

SEQ ID NO: 28388 - RNA, 19 nt, synthetic construct
  misc_feature 1..19: note = siRNA sense sequence
  source 1..19: mol_type = other RNA
actctcatctatttagtcc

SEQ ID NO: 28389 - RNA, 19 nt, synthetic construct
  misc_feature 1..19: note = siRNA antisense sequence
  source 1..19: mol_type = other RNA
ggactaaatagatgagagt

SEQ ID NO: 28390 - RNA, 19 nt, synthetic construct
  misc_feature 1..19: note = siRNA sense sequence
  source 1..19: mol_type = other RNA
ctctcatctatttagtcct

SEQ ID NO: 28391 - RNA, 19 nt, synthetic construct
  misc_feature 1..19: note = siRNA antisense sequence
  source 1..19: mol_type = other RNA
aggactaaatagatgagag

SEQ ID NO: 28392 - RNA, 19 nt, synthetic construct
  misc_feature 1..19: note = siRNA sense sequence
  source 1..19: mol_type = other RNA
tctcatctatttagtcctt

SEQ ID NO: 28393 - RNA, 19 nt, synthetic construct
  misc_feature 1..19: note = siRNA antisense sequence
  source 1..19: mol_type = other RNA
aaggactaaatagatgaga

SEQ ID NO: 28394 - RNA, 19 nt, synthetic construct
  misc_feature 1..19: note = siRNA sense sequence
  source 1..19: mol_type = other RNA
ctcatctatttagtcctta

SEQ ID NO: 28395 - RNA, 19 nt, synthetic construct
  misc_feature 1..19: note = siRNA antisense sequence
  source 1..19: mol_type = other RNA
taaggactaaatagatgag

SEQ ID NO: 28396 - RNA, 19 nt, synthetic construct
  misc_feature 1..19: note = siRNA sense sequence
  source 1..19: mol_type = other RNA
agtccttaatatctctatc

SEQ ID NO: 28397 - RNA, 19 nt, synthetic construct
  misc_feature 1..19: note = siRNA antisense sequence
  source 1..19: mol_type = other RNA
gatagagatattaaggact

SEQ ID NO: 28398 - RNA, 19 nt, synthetic construct
  misc_feature 1..19: note = siRNA sense sequence
  source 1..19: mol_type = other RNA
gtccttaatatctctatca

SEQ ID NO: 28399 - RNA, 19 nt, synthetic construct
  misc_feature 1..19: note = siRNA antisense sequence
  source 1..19: mol_type = other RNA
tgatagagatattaaggac

SEQ ID NO: 28400 - RNA, 19 nt, synthetic construct
  misc_feature 1..19: note = siRNA sense sequence
  source 1..19: mol_type = other RNA
tccttaatatctctatcac

SEQ ID NO: 28401 - RNA, 19 nt, synthetic construct
  misc_feature 1..19: note = siRNA antisense sequence
  source 1..19: mol_type = other RNA
gtgatagagatattaagga

SEQ ID NO: 28402 - RNA, 19 nt, synthetic construct
  misc_feature 1..19: note = siRNA sense sequence
  source 1..19: mol_type = other RNA
ccttaatatctctatcact

SEQ ID NO: 28403 - RNA, 19 nt, synthetic construct
  misc_feature 1..19: note = siRNA antisense sequence
  source 1..19: mol_type = other RNA
agtgatagagatattaagg

SEQ ID NO: 28404 - RNA, 19 nt, synthetic construct
  misc_feature 1..19: note = siRNA sense sequence
  source 1..19: mol_type = other RNA
tatctctatcactaaatgg

SEQ ID NO: 28405 - RNA, 19 nt, synthetic construct
  misc_feature 1..19: note = siRNA antisense sequence
  source 1..19: mol_type = other RNA
ccatttagtgatagagata

SEQ ID NO: 28406 - RNA, 19 nt, synthetic construct
  misc_feature 1..19: note = siRNA sense sequence
  source 1..19: mol_type = other RNA
atctctatcactaaatgga

SEQ ID NO: 28407 - RNA, 19 nt, synthetic construct
  misc_feature 1..19: note = siRNA antisense sequence
  source 1..19: mol_type = other RNA
tccatttagtgatagagat

SEQ ID NO: 28408 - RNA, 19 nt, synthetic construct
  misc_feature 1..19: note = siRNA sense sequence
  source 1..19: mol_type = other RNA
tctctatcactaaatggat

SEQ ID NO: 28409 - RNA, 19 nt, synthetic construct
  misc_feature 1..19: note = siRNA antisense sequence
  source 1..19: mol_type = other RNA
atccatttagtgatagaga

SEQ ID NO: 28410 - RNA, 19 nt, synthetic construct
  misc_feature 1..19: note = siRNA sense sequence
  source 1..19: mol_type = other RNA
atcactaaatggataggtt

SEQ ID NO: 28411 - RNA, 19 nt, synthetic construct
  misc_feature 1..19: note = siRNA antisense sequence
  source 1..19: mol_type = other RNA
aacctatccatttagtgat

SEQ ID NO: 28412 - RNA, 19 nt, synthetic construct
  misc_feature 1..19: note = siRNA sense sequence
  source 1..19: mol_type = other RNA
tcactaaatggataggttt

SEQ ID NO: 28413 - RNA, 19 nt, synthetic construct
  misc_feature 1..19: note = siRNA antisense sequence
  source 1..19: mol_type = other RNA
aaacctatccatttagtga

SEQ ID NO: 28414 - RNA, 19 nt, synthetic construct
  misc_feature 1..19: note = siRNA sense sequence
  source 1..19: mol_type = other RNA
cactaaatggataggtttc

SEQ ID NO: 28415 - RNA, 19 nt, synthetic construct
  misc_feature 1..19: note = siRNA antisense sequence
  source 1..19: mol_type = other RNA
gaaacctatccatttagtg

SEQ ID NO: 28416 - RNA, 19 nt, synthetic construct
  misc_feature 1..19: note = siRNA sense sequence
  source 1..19: mol_type = other RNA
actaaatggataggtttca

SEQ ID NO: 28417 - RNA, 19 nt, synthetic construct
  misc_feature 1..19: note = siRNA antisense sequence
  source 1..19: mol_type = other RNA
tgaaacctatccatttagt

SEQ ID NO: 28418 - RNA, 19 nt, synthetic construct
  misc_feature 1..19: note = siRNA sense sequence
  source 1..19: mol_type = other RNA
atggataggtttcatgtac

SEQ ID NO: 28419 - RNA, 19 nt, synthetic construct
  misc_feature 1..19: note = siRNA antisense sequence
  source 1..19: mol_type = other RNA
gtacatgaaacctatccat

SEQ ID NO: 28420 - RNA, 19 nt, synthetic construct
  misc_feature 1..19: note = siRNA sense sequence
  source 1..19: mol_type = other RNA
tggataggtttcatgtact

SEQ ID NO: 28421 - RNA, 19 nt, synthetic construct
  misc_feature 1..19: note = siRNA antisense sequence
  source 1..19: mol_type = other RNA
agtacatgaaacctatcca

SEQ ID NO: 28422 - RNA, 19 nt, synthetic construct
  misc_feature 1..19: note = siRNA sense sequence
  source 1..19: mol_type = other RNA
ggataggtttcatgtactc

SEQ ID NO: 28423 - RNA, 19 nt, synthetic construct
  misc_feature 1..19: note = siRNA antisense sequence
  source 1..19: mol_type = other RNA
gagtacatgaaacctatcc

SEQ ID NO: 28424 - RNA, 19 nt, synthetic construct
  misc_feature 1..19: note = siRNA sense sequence
  source 1..19: mol_type = other RNA
taggtttcatgtactcttc

SEQ ID NO: 28425 - RNA, 19 nt, synthetic construct
  misc_feature 1..19: note = siRNA antisense sequence
  source 1..19: mol_type = other RNA
gaagagtacatgaaaccta

SEQ ID NO: 28426 - RNA, 19 nt, synthetic construct
  misc_feature 1..19: note = siRNA sense sequence
  source 1..19: mol_type = other RNA
ctaagtgtgtgtgtgtatg

SEQ ID NO: 28427 - RNA, 19 nt, synthetic construct
  misc_feature 1..19: note = siRNA antisense sequence
  source 1..19: mol_type = other RNA
catacacacacacacttag

SEQ ID NO: 28428 - RNA, 19 nt, synthetic construct
  misc_feature 1..19: note = siRNA sense sequence
  source 1..19: mol_type = other RNA
taagtgtgtgtgtgtatgt

SEQ ID NO: 28429 - RNA, 19 nt, synthetic construct
  misc_feature 1..19: note = siRNA antisense sequence
  source 1..19: mol_type = other RNA
acatacacacacacactta

SEQ ID NO: 28430 - RNA, 19 nt, synthetic construct
  misc_feature 1..19: note = siRNA sense sequence
  source 1..19: mol_type = other RNA
aagtgtgtgtgtgtatgtg

SEQ ID NO: 28431 - RNA, 19 nt, synthetic construct
  misc_feature 1..19: note = siRNA antisense sequence
  source 1..19: mol_type = other RNA
cacatacacacacacactt

SEQ ID NO: 28432 - RNA, 19 nt, synthetic construct
  misc_feature 1..19: note = siRNA sense sequence
  source 1..19: mol_type = other RNA
agtgtgtgtgtgtatgtgc

SEQ ID NO: 28433 - RNA, 19 nt, synthetic construct
  misc_feature 1..19: note = siRNA antisense sequence
  source 1..19: mol_type = other RNA
gcacatacacacacacact

SEQ ID NO: 28434 - RNA, 19 nt, synthetic construct
  misc_feature 1..19: note = siRNA sense sequence
  source 1..19: mol_type = other RNA
gtgtgtgtgtgtatgtgca

SEQ ID NO: 28435 - RNA, 19 nt, synthetic construct
  misc_feature 1..19: note = siRNA antisense sequence
  source 1..19: mol_type = other RNA
tgcacatacacacacacac

SEQ ID NO: 28436 - RNA, 19 nt, synthetic construct
  misc_feature 1..19: note = siRNA sense sequence
  source 1..19: mol_type = other RNA
atgtgcatgtgtttctgcc

SEQ ID NO: 28437 - RNA, 19 nt, synthetic construct
  misc_feature 1..19: note = siRNA antisense sequence
  source 1..19: mol_type = other RNA
ggcagaaacacatgcacat

SEQ ID NO: 28438 - RNA, 19 nt, synthetic construct
  misc_feature 1..19: note = siRNA sense sequence
  source 1..19: mol_type = other RNA
tgtgcatgtgtttctgcca

SEQ ID NO: 28439 - RNA, 19 nt, synthetic construct
  misc_feature 1..19: note = siRNA antisense sequence
  source 1..19: mol_type = other RNA
tggcagaaacacatgcaca

SEQ ID NO: 28440 - RNA, 19 nt, synthetic construct
  misc_feature 1..19: note = siRNA sense sequence
  source 1..19: mol_type = other RNA
ctagcacagatttatctat

SEQ ID NO: 28441 - RNA, 19 nt, synthetic construct
  misc_feature 1..19: note = siRNA antisense sequence
  source 1..19: mol_type = other RNA
atagataaatctgtgctag

SEQ ID NO: 28442 - RNA, 19 nt, synthetic construct
  misc_feature 1..19: note = siRNA sense sequence
  source 1..19: mol_type = other RNA
gattaatagataaaggcac

SEQ ID NO: 28443 - RNA, 19 nt, synthetic construct
  misc_feature 1..19: note = siRNA antisense sequence
  source 1..19: mol_type = other RNA
gtgcctttatctattaatc

SEQ ID NO: 28444 - RNA, 19 nt, synthetic construct
  misc_feature 1..19: note = siRNA sense sequence
  source 1..19: mol_type = other RNA
attaatagataaaggcacg

SEQ ID NO: 28445 - RNA, 19 nt, synthetic construct
  misc_feature 1..19: note = siRNA antisense sequence
  source 1..19: mol_type = other RNA
cgtgcctttatctattaat

SEQ ID NO: 28446 - RNA, 19 nt, synthetic construct
  misc_feature 1..19: note = siRNA sense sequence
  source 1..19: mol_type = other RNA
ttaatagataaaggcacgt

SEQ ID NO: 28447 - RNA, 19 nt, synthetic construct
  misc_feature 1..19: note = siRNA antisense sequence
  source 1..19: mol_type = other RNA
acgtgcctttatctattaa

SEQ ID NO: 28448 - RNA, 19 nt, synthetic construct
  misc_feature 1..19: note = siRNA sense sequence
  source 1..19: mol_type = other RNA
taatagataaaggcacgtt

SEQ ID NO: 28449 - RNA, 19 nt, synthetic construct
  misc_feature 1..19: note = siRNA antisense sequence
  source 1..19: mol_type = other RNA
aacgtgcctttatctatta

SEQ ID NO: 28450 - RNA, 19 nt, synthetic construct
  misc_feature 1..19: note = siRNA sense sequence
  source 1..19: mol_type = other RNA
aatagataaaggcacgttt

SEQ ID NO: 28451 - RNA, 19 nt, synthetic construct
  misc_feature 1..19: note = siRNA antisense sequence
  source 1..19: mol_type = other RNA
aaacgtgcctttatctatt

SEQ ID NO: 28452 - RNA, 19 nt, synthetic construct
  misc_feature 1..19: note = siRNA sense sequence
  source 1..19: mol_type = other RNA
aaggcacgtttatatatac

SEQ ID NO: 28453 - RNA, 19 nt, synthetic construct
  misc_feature 1..19: note = siRNA antisense sequence
  source 1..19: mol_type = other RNA
gtatatataaacgtgcctt

SEQ ID NO: 28454 - RNA, 19 nt, synthetic construct
  misc_feature 1..19: note = siRNA sense sequence
  source 1..19: mol_type = other RNA
aggcacgtttatatatacc

SEQ ID NO: 28455 - RNA, 19 nt, synthetic construct
  misc_feature 1..19: note = siRNA antisense sequence
  source 1..19: mol_type = other RNA
ggtatatataaacgtgcct

SEQ ID NO: 28456 - RNA, 19 nt, synthetic construct
  misc_feature 1..19: note = siRNA sense sequence
  source 1..19: mol_type = other RNA
ggcacgtttatatatacca

SEQ ID NO: 28457 - RNA, 19 nt, synthetic construct
  misc_feature 1..19: note = siRNA antisense sequence
  source 1..19: mol_type = other RNA
tggtatatataaacgtgcc

SEQ ID NO: 28458 - RNA, 19 nt, synthetic construct
  misc_feature 1..19: note = siRNA sense sequence
  source 1..19: mol_type = other RNA
gcacgtttatatataccag

SEQ ID NO: 28459 - RNA, 19 nt, synthetic construct
  misc_feature 1..19: note = siRNA antisense sequence
  source 1..19: mol_type = other RNA
ctggtatatataaacgtgc

SEQ ID NO: 28460 - RNA, 19 nt, synthetic construct
  misc_feature 1..19: note = siRNA sense sequence
  source 1..19: mol_type = other RNA
atatataccagcaaatacg

SEQ ID NO: 28461 - RNA, 19 nt, synthetic construct
  misc_feature 1..19: note = siRNA antisense sequence
  source 1..19: mol_type = other RNA
cgtatttgctggtatatat

SEQ ID NO: 28462 - RNA, 19 nt, synthetic construct
  misc_feature 1..19: note = siRNA sense sequence
  source 1..19: mol_type = other RNA
tatataccagcaaatacga

SEQ ID NO: 28463 - RNA, 19 nt, synthetic construct
  misc_feature 1..19: note = siRNA antisense sequence
  source 1..19: mol_type = other RNA
tcgtatttgctggtatata

SEQ ID NO: 28464 - RNA, 19 nt, synthetic construct
  misc_feature 1..19: note = siRNA sense sequence
  source 1..19: mol_type = other RNA
atataccagcaaatacgaa

SEQ ID NO: 28465 - RNA, 19 nt, synthetic construct
  misc_feature 1..19: note = siRNA antisense sequence
  source 1..19: mol_type = other RNA
ttcgtatttgctggtatat

SEQ ID NO: 28466 - RNA, 19 nt, synthetic construct
  misc_feature 1..19: note = siRNA sense sequence
  source 1..19: mol_type = other RNA
tataccagcaaatacgaag

SEQ ID NO: 28467 - RNA, 19 nt, synthetic construct
  misc_feature 1..19: note = siRNA antisense sequence
  source 1..19: mol_type = other RNA
cttcgtatttgctggtata

SEQ ID NO: 28468 - RNA, 19 nt, synthetic construct
  misc_feature 1..19: note = siRNA sense sequence
  source 1..19: mol_type = other RNA
ataccagcaaatacgaaga

SEQ ID NO: 28469 - RNA, 19 nt, synthetic construct
  misc_feature 1..19: note = siRNA antisense sequence
  source 1..19: mol_type = other RNA
tcttcgtatttgctggtat

SEQ ID NO: 28470 - RNA, 19 nt, synthetic construct
  misc_feature 1..19: note = siRNA sense sequence
  source 1..19: mol_type = other RNA
taccagcaaatacgaagac

SEQ ID NO: 28471 - RNA, 19 nt, synthetic construct
  misc_feature 1..19: note = siRNA antisense sequence
  source 1..19: mol_type = other RNA
gtcttcgtatttgctggta

SEQ ID NO: 28472 - RNA, 19 nt, synthetic construct
  misc_feature 1..19: note = siRNA sense sequence
  source 1..19: mol_type = other RNA
accagcaaatacgaagact

SEQ ID NO: 28473 - RNA, 19 nt, synthetic construct
  misc_feature 1..19: note = siRNA antisense sequence
  source 1..19: mol_type = other RNA
agtcttcgtatttgctggt

SEQ ID NO: 28474 - RNA, 19 nt, synthetic construct
  misc_feature 1..19: note = siRNA sense sequence
  source 1..19: mol_type = other RNA
ccagcaaatacgaagactt

SEQ ID NO: 28475 - RNA, 19 nt, synthetic construct
  misc_feature 1..19: note = siRNA antisense sequence
  source 1..19: mol_type = other RNA
aagtcttcgtatttgctgg

SEQ ID NO: 28476 - RNA, 19 nt, synthetic construct
  misc_feature 1..19: note = siRNA sense sequence
  source 1..19: mol_type = other RNA
caaatacgaagacttggat

SEQ ID NO: 28477 - RNA, 19 nt, synthetic construct
  misc_feature 1..19: note = siRNA antisense sequence
  source 1..19: mol_type = other RNA
atccaagtcttcgtatttg

SEQ ID NO: 28478 - RNA, 19 nt, synthetic construct
  misc_feature 1..19: note = siRNA sense sequence
  source 1..19: mol_type = other RNA
aaatacgaagacttggatt

SEQ ID NO: 28479 - RNA, 19 nt, synthetic construct
  misc_feature 1..19: note = siRNA antisense sequence
  source 1..19: mol_type = other RNA
aatccaagtcttcgtattt

SEQ ID NO: 28480 - RNA, 19 nt, synthetic construct
  misc_feature 1..19: note = siRNA sense sequence
  source 1..19: mol_type = other RNA
aatacgaagacttggattc

SEQ ID NO: 28481 - RNA, 19 nt, synthetic construct
  misc_feature 1..19: note = siRNA antisense sequence
  source 1..19: mol_type = other RNA
gaatccaagtcttcgtatt

SEQ ID NO: 28482 - RNA, 19 nt, synthetic construct
  misc_feature 1..19: note = siRNA sense sequence
  source 1..19: mol_type = other RNA
atacgaagacttggattca

SEQ ID NO: 28483 - RNA, 19 nt, synthetic construct
  misc_feature 1..19: note = siRNA antisense sequence
  source 1..19: mol_type = other RNA
tgaatccaagtcttcgtat

SEQ ID NO: 28484 - RNA, 19 nt, synthetic construct
  misc_feature 1..19: note = siRNA sense sequence
  source 1..19: mol_type = other RNA
tacgaagacttggattcag

SEQ ID NO: 28485 - RNA, 19 nt, synthetic construct
  misc_feature 1..19: note = siRNA antisense sequence
  source 1..19: mol_type = other RNA
ctgaatccaagtcttcgta

SEQ ID NO: 28486 - RNA, 19 nt, synthetic construct
  misc_feature 1..19: note = siRNA sense sequence
  source 1..19: mol_type = other RNA
acgaagacttggattcagt

SEQ ID NO: 28487 - RNA, 19 nt, synthetic construct
  misc_feature 1..19: note = siRNA antisense sequence
  source 1..19: mol_type = other RNA
actgaatccaagtcttcgt

SEQ ID NO: 28488 - RNA, 19 nt, synthetic construct
  misc_feature 1..19: note = siRNA sense sequence
  source 1..19: mol_type = other RNA
cgaagacttggattcagta

SEQ ID NO: 28489 - RNA, 19 nt, synthetic construct
  misc_feature 1..19: note = siRNA antisense sequence
  source 1..19: mol_type = other RNA
tactgaatccaagtcttcg

SEQ ID NO: 28490 - RNA, 19 nt, synthetic construct
  misc_feature 1..19: note = siRNA sense sequence
  source 1..19: mol_type = other RNA
gaagacttggattcagtaa

SEQ ID NO: 28491 - RNA, 19 nt, synthetic construct
  misc_feature 1..19: note = siRNA antisense sequence
  source 1..19: mol_type = other RNA
ttactgaatccaagtcttc

SEQ ID NO: 28492 - RNA, 19 nt, synthetic construct
  misc_feature 1..19: note = siRNA sense sequence
  source 1..19: mol_type = other RNA
agacttggattcagtaaag

SEQ ID NO: 28493 - RNA, 19 nt, synthetic construct
  misc_feature 1..19: note = siRNA antisense sequence
  source 1..19: mol_type = other RNA
ctttactgaatccaagtct

SEQ ID NO: 28494 - RNA, 19 nt, synthetic construct
  misc_feature 1..19: note = siRNA sense sequence
  source 1..19: mol_type = other RNA
ttggattcagtaaagtttg

SEQ ID NO: 28495 - RNA, 19 nt, synthetic construct
  misc_feature 1..19: note = siRNA antisense sequence
  source 1..19: mol_type = other RNA
caaactttactgaatccaa

SEQ ID NO: 28496 - RNA, 19 nt, synthetic construct
  misc_feature 1..19: note = siRNA sense sequence
  source 1..19: mol_type = other RNA
ggattcagtaaagtttgat

SEQ ID NO: 28497 - RNA, 19 nt, synthetic construct
  misc_feature 1..19: note = siRNA antisense sequence
  source 1..19: mol_type = other RNA
atcaaactttactgaatcc

SEQ ID NO: 28498 - RNA, 19 nt, synthetic construct
  misc_feature 1..19: note = siRNA sense sequence
  source 1..19: mol_type = other RNA
ttcagtaaagtttgatacc

SEQ ID NO: 28499 - RNA, 19 nt, synthetic construct
  misc_feature 1..19: note = siRNA antisense sequence
  source 1..19: mol_type = other RNA
ggtatcaaactttactgaa

SEQ ID NO: 28500 - RNA, 19 nt, synthetic construct
  misc_feature 1..19: note = siRNA sense sequence
  source 1..19: mol_type = other RNA
tcagtaaagtttgatacca

SEQ ID NO: 28501 - RNA, 19 nt, synthetic construct
  misc_feature 1..19: note = siRNA antisense sequence
  source 1..19: mol_type = other RNA
tggtatcaaactttactga

SEQ ID NO: 28502 - RNA, 19 nt, synthetic construct
  misc_feature 1..19: note = siRNA sense sequence
  source 1..19: mol_type = other RNA
cagtaaagtttgataccat

SEQ ID NO: 28503 - RNA, 19 nt, synthetic construct
  misc_feature 1..19: note = siRNA antisense sequence
  source 1..19: mol_type = other RNA
atggtatcaaactttactg

SEQ ID NO: 28504 - RNA, 19 nt, synthetic construct
  misc_feature 1..19: note = siRNA sense sequence
  source 1..19: mol_type = other RNA
tgataccattcaatagcat

SEQ ID NO: 28505 - RNA, 19 nt, synthetic construct
  misc_feature 1..19: note = siRNA antisense sequence
  source 1..19: mol_type = other RNA
atgctattgaatggtatca

SEQ ID NO: 28506 - RNA, 19 nt, synthetic construct
  misc_feature 1..19: note = siRNA sense sequence
  source 1..19: mol_type = other RNA
gataccattcaatagcatt

SEQ ID NO: 28507 - RNA, 19 nt, synthetic construct
  misc_feature 1..19: note = siRNA antisense sequence
  source 1..19: mol_type = other RNA
aatgctattgaatggtatc

SEQ ID NO: 28508 - RNA, 19 nt, synthetic construct
  misc_feature 1..19: note = siRNA sense sequence
  source 1..19: mol_type = other RNA
ccattcaatagcattaaga

SEQ ID NO: 28509 - RNA, 19 nt, synthetic construct
  misc_feature 1..19: note = siRNA antisense sequence
  source 1..19: mol_type = other RNA
tcttaatgctattgaatgg

SEQ ID NO: 28510 - RNA, 19 nt, synthetic construct
  misc_feature 1..19: note = siRNA sense sequence
  source 1..19: mol_type = other RNA
cattaagattaaggatgac

SEQ ID NO: 28511 - RNA, 19 nt, synthetic construct
  misc_feature 1..19: note = siRNA antisense sequence
  source 1..19: mol_type = other RNA
gtcatccttaatcttaatg

SEQ ID NO: 28512 - RNA, 19 nt, synthetic construct
  misc_feature 1..19: note = siRNA sense sequence
  source 1..19: mol_type = other RNA
ttaagattaaggatgactg

SEQ ID NO: 28513 - RNA, 19 nt, synthetic construct
  misc_feature 1..19: note = siRNA antisense sequence
  source 1..19: mol_type = other RNA
cagtcatccttaatcttaa

SEQ ID NO: 28514 - RNA, 19 nt, synthetic construct
  misc_feature 1..19: note = siRNA sense sequence
  source 1..19: mol_type = other RNA
tttagactgcttaatttgg

SEQ ID NO: 28515 - RNA, 19 nt, synthetic construct
  misc_feature 1..19: note = siRNA antisense sequence
  source 1..19: mol_type = other RNA
ccaaattaagcagtctaaa

SEQ ID NO: 28516 - RNA, 19 nt, synthetic construct
  misc_feature 1..19: note = siRNA sense sequence
  source 1..19: mol_type = other RNA
ttagactgcttaatttggg

SEQ ID NO: 28517 - RNA, 19 nt, synthetic construct
  misc_feature 1..19: note = siRNA antisense sequence
  source 1..19: mol_type = other RNA
cccaaattaagcagtctaa

SEQ ID NO: 28518 - RNA, 19 nt, synthetic construct
  misc_feature 1..19: note = siRNA sense sequence
  source 1..19: mol_type = other RNA
tgtttctcaaagttatctc

SEQ ID NO: 28519 - RNA, 19 nt, synthetic construct
  misc_feature 1..19: note = siRNA antisense sequence
  source 1..19: mol_type = other RNA
gagataactttgagaaaca

SEQ ID NO: 28520 - RNA, 19 nt, synthetic construct
  misc_feature 1..19: note = siRNA sense sequence
  source 1..19: mol_type = other RNA
gtttctcaaagttatctcc

SEQ ID NO: 28521 - RNA, 19 nt, synthetic construct
  misc_feature 1..19: note = siRNA antisense sequence
  source 1..19: mol_type = other RNA
ggagataactttgagaaac

SEQ ID NO: 28522 - RNA, 19 nt, synthetic construct
  misc_feature 1..19: note = siRNA sense sequence
  source 1..19: mol_type = other RNA
tttctcaaagttatctcca

SEQ ID NO: 28523 - RNA, 19 nt, synthetic construct
  misc_feature 1..19: note = siRNA antisense sequence
  source 1..19: mol_type = other RNA
tggagataactttgagaaa

SEQ ID NO: 28524 - RNA, 19 nt, synthetic construct
  misc_feature 1..19: note = siRNA sense sequence
  source 1..19: mol_type = other RNA
ttctcaaagttatctccag

SEQ ID NO: 28525 - RNA, 19 nt, synthetic construct
  misc_feature 1..19: note = siRNA antisense sequence
  source 1..19: mol_type = other RNA
ctggagataactttgagaa

SEQ ID NO: 28526 - RNA, 19 nt, synthetic construct
  misc_feature 1..19: note = siRNA sense sequence
  source 1..19: mol_type = other RNA
tctcaaagttatctccagt

SEQ ID NO: 28527 - RNA, 19 nt, synthetic construct
  misc_feature 1..19: note = siRNA antisense sequence
  source 1..19: mol_type = other RNA
actggagataactttgaga

SEQ ID NO: 28528 - RNA, 19 nt, synthetic construct
  misc_feature 1..19: note = siRNA sense sequence
  source 1..19: mol_type = other RNA
ctcaaagttatctccagtg

SEQ ID NO: 28529 - RNA, 19 nt, synthetic construct
  misc_feature 1..19: note = siRNA antisense sequence
  source 1..19: mol_type = other RNA
cactggagataactttgag

SEQ ID NO: 28530 - RNA, 19 nt, synthetic construct
  misc_feature 1..19: note = siRNA sense sequence
  source 1..19: mol_type = other RNA
tcaaagttatctccagtgg

SEQ ID NO: 28531 - RNA, 19 nt, synthetic construct
  misc_feature 1..19: note = siRNA antisense sequence
  source 1..19: mol_type = other RNA
ccactggagataactttga

SEQ ID NO: 28532 - RNA, 19 nt, synthetic construct
  misc_feature 1..19: note = siRNA sense sequence
  source 1..19: mol_type = other RNA
caaagttatctccagtggt

SEQ ID NO: 28533 - RNA, 19 nt, synthetic construct
  misc_feature 1..19: note = siRNA antisense sequence
  source 1..19: mol_type = other RNA
accactggagataactttg

SEQ ID NO: 28534 - RNA, 19 nt, synthetic construct
  misc_feature 1..19: note = siRNA sense sequence
  source 1..19: mol_type = other RNA
agaatattccctcccaatg

SEQ ID NO: 28535 - RNA, 19 nt, synthetic construct
  misc_feature 1..19: note = siRNA antisense sequence
  source 1..19: mol_type = other RNA
cattgggagggaatattct

SEQ ID NO: 28536 - RNA, 19 nt, synthetic construct
  misc_feature 1..19: note = siRNA sense sequence
  source 1..19: mol_type = other RNA
gaatattccctcccaatga

SEQ ID NO: 28537 - RNA, 19 nt, synthetic construct
  misc_feature 1..19: note = siRNA antisense sequence
  source 1..19: mol_type = other RNA
tcattgggagggaatattc

SEQ ID NO: 28538 - RNA, 19 nt, synthetic construct
  misc_feature 1..19: note = siRNA sense sequence
  source 1..19: mol_type = other RNA
aatattccctcccaatgaa

SEQ ID NO: 28539 - RNA, 19 nt, synthetic construct
  misc_feature 1..19: note = siRNA antisense sequence
  source 1..19: mol_type = other RNA
ttcattgggagggaatatt

SEQ ID NO: 28540 - RNA, 19 nt, synthetic construct
  misc_feature 1..19: note = siRNA sense sequence
  source 1..19: mol_type = other RNA
cctcccaatgaatgttgct

SEQ ID NO: 28541 - RNA, 19 nt, synthetic construct
  misc_feature 1..19: note = siRNA antisense sequence
  source 1..19: mol_type = other RNA
agcaacattcattgggagg

SEQ ID NO: 28542 - RNA, 19 nt, synthetic construct
  misc_feature 1..19: note = siRNA sense sequence
  source 1..19: mol_type = other RNA
ctcccaatgaatgttgcta

SEQ ID NO: 28543 - RNA, 19 nt, synthetic construct
  misc_feature 1..19: note = siRNA antisense sequence
  source 1..19: mol_type = other RNA
tagcaacattcattgggag

SEQ ID NO: 28544 - RNA, 19 nt, synthetic construct
  misc_feature 1..19: note = siRNA sense sequence
  source 1..19: mol_type = other RNA
tcccaatgaatgttgctat

SEQ ID NO: 28545 - RNA, 19 nt, synthetic construct
  misc_feature 1..19: note = siRNA antisense sequence
  source 1..19: mol_type = other RNA
atagcaacattcattggga

SEQ ID NO: 28546 - RNA, 19 nt, synthetic construct
  misc_feature 1..19: note = siRNA sense sequence
  source 1..19: mol_type = other RNA
cccaatgaatgttgctata

SEQ ID NO: 28547 - RNA, 19 nt, synthetic construct
  misc_feature 1..19: note = siRNA antisense sequence
  source 1..19: mol_type = other RNA
tatagcaacattcattggg

SEQ ID NO: 28548 - RNA, 19 nt, synthetic construct
  misc_feature 1..19: note = siRNA sense sequence
  source 1..19: mol_type = other RNA
ccaatgaatgttgctataa

SEQ ID NO: 28549 - RNA, 19 nt, synthetic construct
  misc_feature 1..19: note = siRNA antisense sequence
  source 1..19: mol_type = other RNA
ttatagcaacattcattgg

SEQ ID NO: 28550 - RNA, 19 nt, synthetic construct
  misc_feature 1..19: note = siRNA sense sequence
  source 1..19: mol_type = other RNA
caatgaatgttgctataag

SEQ ID NO: 28551 - RNA, 19 nt, synthetic construct
  misc_feature 1..19: note = siRNA antisense sequence
  source 1..19: mol_type = other RNA
cttatagcaacattcattg

SEQ ID NO: 28552 - RNA, 19 nt, synthetic construct
  misc_feature 1..19: note = siRNA sense sequence
  source 1..19: mol_type = other RNA
aatgaatgttgctataagg

SEQ ID NO: 28553 - RNA, 19 nt, synthetic construct
  misc_feature 1..19: note = siRNA antisense sequence
  source 1..19: mol_type = other RNA
ccttatagcaacattcatt

SEQ ID NO: 28554 - RNA, 19 nt, synthetic construct
  misc_feature 1..19: note = siRNA sense sequence
  source 1..19: mol_type = other RNA
atgaatgttgctataagga

SEQ ID NO: 28555 - RNA, 19 nt, synthetic construct
  misc_feature 1..19: note = siRNA antisense sequence
  source 1..19: mol_type = other RNA
tccttatagcaacattcat

SEQ ID NO: 28556 - RNA, 19 nt, synthetic construct
  misc_feature 1..19: note = siRNA sense sequence
  source 1..19: mol_type = other RNA
tgaatgttgctataaggaa

SEQ ID NO: 28557 - RNA, 19 nt, synthetic construct
  misc_feature 1..19: note = siRNA antisense sequence
  source 1..19: mol_type = other RNA
ttccttatagcaacattca

SEQ ID NO: 28558 - RNA, 19 nt, synthetic construct
  misc_feature 1..19: note = siRNA sense sequence
  source 1..19: mol_type = other RNA
tttgctcatacagaattgg

SEQ ID NO: 28559 - RNA, 19 nt, synthetic construct
  misc_feature 1..19: note = siRNA antisense sequence
  source 1..19: mol_type = other RNA
ccaattctgtatgagcaaa

SEQ ID NO: 28560 - RNA, 19 nt, synthetic construct
  misc_feature 1..19: note = siRNA sense sequence
  source 1..19: mol_type = other RNA
tgctcatacagaattggta

SEQ ID NO: 28561 - RNA, 19 nt, synthetic construct
  misc_feature 1..19: note = siRNA antisense sequence
  source 1..19: mol_type = other RNA
taccaattctgtatgagca

SEQ ID NO: 28562 - RNA, 19 nt, synthetic construct
  misc_feature 1..19: note = siRNA sense sequence
  source 1..19: mol_type = other RNA
gctcatacagaattggtaa

SEQ ID NO: 28563 - RNA, 19 nt, synthetic construct
  misc_feature 1..19: note = siRNA antisense sequence
  source 1..19: mol_type = other RNA
ttaccaattctgtatgagc

SEQ ID NO: 28564 - RNA, 19 nt, synthetic construct
  misc_feature 1..19: note = siRNA sense sequence
  source 1..19: mol_type = other RNA
ctcatacagaattggtaaa

SEQ ID NO: 28565 - RNA, 19 nt, synthetic construct
  misc_feature 1..19: note = siRNA antisense sequence
  source 1..19: mol_type = other RNA
tttaccaattctgtatgag

SEQ ID NO: 28566 - RNA, 19 nt, synthetic construct
  misc_feature 1..19: note = siRNA sense sequence
  source 1..19: mol_type = other RNA
catacagaattggtaaatg

SEQ ID NO: 28567 - RNA, 19 nt, synthetic construct
  misc_feature 1..19: note = siRNA antisense sequence
  source 1..19: mol_type = other RNA
catttaccaattctgtatg

SEQ ID NO: 28568 - RNA, 19 nt, synthetic construct
  misc_feature 1..19: note = siRNA sense sequence
  source 1..19: mol_type = other RNA
atacagaattggtaaatgg

SEQ ID NO: 28569 - RNA, 19 nt, synthetic construct
  misc_feature 1..19: note = siRNA antisense sequence
  source 1..19: mol_type = other RNA
ccatttaccaattctgtat

SEQ ID NO: 28570 - RNA, 19 nt, synthetic construct
  misc_feature 1..19: note = siRNA sense sequence
  source 1..19: mol_type = other RNA
tacagaattggtaaatgga

SEQ ID NO: 28571 - RNA, 19 nt, synthetic construct
  misc_feature 1..19: note = siRNA antisense sequence
  source 1..19: mol_type = other RNA
tccatttaccaattctgta

SEQ ID NO: 28572 - RNA, 19 nt, synthetic construct
  misc_feature 1..19: note = siRNA sense sequence
  source 1..19: mol_type = other RNA
acagaattggtaaatggaa

SEQ ID NO: 28573 - RNA, 19 nt, synthetic construct
  misc_feature 1..19: note = siRNA antisense sequence
  source 1..19: mol_type = other RNA
ttccatttaccaattctgt

SEQ ID NO: 28574 - RNA, 19 nt, synthetic construct
  misc_feature 1..19: note = siRNA sense sequence
  source 1..19: mol_type = other RNA
cactataattcagttttcc

SEQ ID NO: 28575 - RNA, 19 nt, synthetic construct
  misc_feature 1..19: note = siRNA antisense sequence
  source 1..19: mol_type = other RNA
ggaaaactgaattatagtg

SEQ ID NO: 28576 - RNA, 19 nt, synthetic construct
  misc_feature 1..19: note = siRNA sense sequence
  source 1..19: mol_type = other RNA
ataattcagttttccctag

SEQ ID NO: 28577 - RNA, 19 nt, synthetic construct
  misc_feature 1..19: note = siRNA antisense sequence
  source 1..19: mol_type = other RNA
ctagggaaaactgaattat

SEQ ID NO: 28578 - RNA, 19 nt, synthetic construct
  misc_feature 1..19: note = siRNA sense sequence
  source 1..19: mol_type = other RNA
taattcagttttccctagc

SEQ ID NO: 28579 - RNA, 19 nt, synthetic construct
  misc_feature 1..19: note = siRNA antisense sequence
  source 1..19: mol_type = other RNA
gctagggaaaactgaatta

SEQ ID NO: 28580 - RNA, 19 nt, synthetic construct
  misc_feature 1..19: note = siRNA sense sequence
  source 1..19: mol_type = other RNA
aattcagttttccctagca

SEQ ID NO: 28581 - RNA, 19 nt, synthetic construct
  misc_feature 1..19: note = siRNA antisense sequence
  source 1..19: mol_type = other RNA
tgctagggaaaactgaatt

SEQ ID NO: 28582 - RNA, 19 nt, synthetic construct
  misc_feature 1..19: note = siRNA sense sequence
  source 1..19: mol_type = other RNA
attcagttttccctagcac

SEQ ID NO: 28583 - RNA, 19 nt, synthetic construct
  misc_feature 1..19: note = siRNA antisense sequence
  source 1..19: mol_type = other RNA
gtgctagggaaaactgaat

SEQ ID NO: 28584 - RNA, 19 nt, synthetic construct
  misc_feature 1..19: note = siRNA sense sequence
  source 1..19: mol_type = other RNA
ttttccctagcaccttaat

SEQ ID NO: 28585 - RNA, 19 nt, synthetic construct
  misc_feature 1..19: note = siRNA antisense sequence
  source 1..19: mol_type = other RNA
attaaggtgctagggaaaa

SEQ ID NO: 28586 - RNA, 19 nt, synthetic construct
  misc_feature 1..19: note = siRNA sense sequence
  source 1..19: mol_type = other RNA
tttccctagcaccttaatg

SEQ ID NO: 28587 - RNA, 19 nt, synthetic construct
  misc_feature 1..19: note = siRNA antisense sequence
  source 1..19: mol_type = other RNA
cattaaggtgctagggaaa

SEQ ID NO: 28588 - RNA, 19 nt, synthetic construct
  misc_feature 1..19: note = siRNA sense sequence
  source 1..19: mol_type = other RNA
ctagcaccttaatgtttat

SEQ ID NO: 28589 - RNA, 19 nt, synthetic construct
  misc_feature 1..19: note = siRNA antisense sequence
  source 1..19: mol_type = other RNA
ataaacattaaggtgctag

SEQ ID NO: 28590 - RNA, 19 nt, synthetic construct
  misc_feature 1..19: note = siRNA sense sequence
  source 1..19: mol_type = other RNA
ccttaatgtttatactacc

SEQ ID NO: 28591 - RNA, 19 nt, synthetic construct
  misc_feature 1..19: note = siRNA antisense sequence
  source 1..19: mol_type = other RNA
ggtagtataaacattaagg

SEQ ID NO: 28592 - RNA, 19 nt, synthetic construct
  misc_feature 1..19: note = siRNA sense sequence
  source 1..19: mol_type = other RNA
atgtttatactaccaatgc

SEQ ID NO: 28593 - RNA, 19 nt, synthetic construct
  misc_feature 1..19: note = siRNA antisense sequence
  source 1..19: mol_type = other RNA
gcattggtagtataaacat

SEQ ID NO: 28594 - RNA, 19 nt, synthetic construct
  misc_feature 1..19: note = siRNA sense sequence
  source 1..19: mol_type = other RNA
tgtttatactaccaatgcc

SEQ ID NO: 28595 - RNA, 19 nt, synthetic construct
  misc_feature 1..19: note = siRNA antisense sequence
  source 1..19: mol_type = other RNA
ggcattggtagtataaaca

SEQ ID NO: 28596 - RNA, 19 nt, synthetic construct
  misc_feature 1..19: note = siRNA sense sequence
  source 1..19: mol_type = other RNA
gtttatactaccaatgcca

SEQ ID NO: 28597 - RNA, 19 nt, synthetic construct
  misc_feature 1..19: note = siRNA antisense sequence
  source 1..19: mol_type = other RNA
tggcattggtagtataaac

SEQ ID NO: 28598 - RNA, 19 nt, synthetic construct
  misc_feature 1..19: note = siRNA sense sequence
  source 1..19: mol_type = other RNA
tttatactaccaatgccac

SEQ ID NO: 28599 - RNA, 19 nt, synthetic construct
  misc_feature 1..19: note = siRNA antisense sequence
  source 1..19: mol_type = other RNA
gtggcattggtagtataaa

SEQ ID NO: 28600 - RNA, 19 nt, synthetic construct
  misc_feature 1..19: note = siRNA sense sequence
  source 1..19: mol_type = other RNA
ttatactaccaatgccacc

SEQ ID NO: 28601 - RNA, 19 nt, synthetic construct
  misc_feature 1..19: note = siRNA antisense sequence
  source 1..19: mol_type = other RNA
ggtggcattggtagtataa

SEQ ID NO: 28602 - RNA, 19 nt, synthetic construct
  misc_feature 1..19: note = siRNA sense sequence
  source 1..19: mol_type = other RNA
tatactaccaatgccacca

SEQ ID NO: 28603 - RNA, 19 nt, synthetic construct
  misc_feature 1..19: note = siRNA antisense sequence
  source 1..19: mol_type = other RNA
tggtggcattggtagtata

SEQ ID NO: 28604 - RNA, 19 nt, synthetic construct
  misc_feature 1..19: note = siRNA sense sequence
  source 1..19: mol_type = other RNA
atactaccaatgccaccac

SEQ ID NO: 28605 - RNA, 19 nt, synthetic construct
  misc_feature 1..19: note = siRNA antisense sequence
  source 1..19: mol_type = other RNA
gtggtggcattggtagtat

SEQ ID NO: 28606 - RNA, 19 nt, synthetic construct
  misc_feature 1..19: note = siRNA sense sequence
  source 1..19: mol_type = other RNA
caatgccaccacttgaatg

SEQ ID NO: 28607 - RNA, 19 nt, synthetic construct
  misc_feature 1..19: note = siRNA antisense sequence
  source 1..19: mol_type = other RNA
cattcaagtggtggcattg

SEQ ID NO: 28608 - RNA, 19 nt, synthetic construct
  misc_feature 1..19: note = siRNA sense sequence
  source 1..19: mol_type = other RNA
atgccaccacttgaatgcc

SEQ ID NO: 28609 - RNA, 19 nt, synthetic construct
  misc_feature 1..19: note = siRNA antisense sequence
  source 1..19: mol_type = other RNA
ggcattcaagtggtggcat

SEQ ID NO: 28610 - RNA, 19 nt, synthetic construct
  misc_feature 1..19: note = siRNA sense sequence
  source 1..19: mol_type = other RNA
tgccaccacttgaatgcca

SEQ ID NO: 28611 - RNA, 19 nt, synthetic construct
  misc_feature 1..19: note = siRNA antisense sequence
  source 1..19: mol_type = other RNA
tggcattcaagtggtggca

SEQ ID NO: 28612 - RNA, 19 nt, synthetic construct
  misc_feature 1..19: note = siRNA sense sequence
  source 1..19: mol_type = other RNA
ccacttgaatgccaaatac

SEQ ID NO: 28613 - RNA, 19 nt, synthetic construct
  misc_feature 1..19: note = siRNA antisense sequence
  source 1..19: mol_type = other RNA
gtatttggcattcaagtgg

SEQ ID NO: 28614 - RNA, 19 nt, synthetic construct
  misc_feature 1..19: note = siRNA sense sequence
  source 1..19: mol_type = other RNA
cacttgaatgccaaataca

SEQ ID NO: 28615 - RNA, 19 nt, synthetic construct
  misc_feature 1..19: note = siRNA antisense sequence
  source 1..19: mol_type = other RNA
tgtatttggcattcaagtg

SEQ ID NO: 28616 - RNA, 19 nt, synthetic construct
  misc_feature 1..19: note = siRNA sense sequence
  source 1..19: mol_type = other RNA
tgaatgccaaatacactaa

SEQ ID NO: 28617 - RNA, 19 nt, synthetic construct
  misc_feature 1..19: note = siRNA antisense sequence
  source 1..19: mol_type = other RNA
ttagtgtatttggcattca

SEQ ID NO: 28618 - RNA, 19 nt, synthetic construct
  misc_feature 1..19: note = siRNA sense sequence
  source 1..19: mol_type = other RNA
aatgccaaatacactaaga

SEQ ID NO: 28619 - RNA, 19 nt, synthetic construct
  misc_feature 1..19: note = siRNA antisense sequence
  source 1..19: mol_type = other RNA
tcttagtgtatttggcatt

SEQ ID NO: 28620 - RNA, 19 nt, synthetic construct
  misc_feature 1..19: note = siRNA sense sequence
  source 1..19: mol_type = other RNA
atgccaaatacactaagag

SEQ ID NO: 28621 - RNA, 19 nt, synthetic construct
  misc_feature 1..19: note = siRNA antisense sequence
  source 1..19: mol_type = other RNA
ctcttagtgtatttggcat

SEQ ID NO: 28622 - RNA, 19 nt, synthetic construct
  misc_feature 1..19: note = siRNA sense sequence
  source 1..19: mol_type = other RNA
tgccaaatacactaagagt

SEQ ID NO: 28623 - RNA, 19 nt, synthetic construct
  misc_feature 1..19: note = siRNA antisense sequence
  source 1..19: mol_type = other RNA
actcttagtgtatttggca

SEQ ID NO: 28624 - RNA, 19 nt, synthetic construct
  misc_feature 1..19: note = siRNA sense sequence
  source 1..19: mol_type = other RNA
gccaaatacactaagagtt

SEQ ID NO: 28625 - RNA, 19 nt, synthetic construct
  misc_feature 1..19: note = siRNA antisense sequence
  source 1..19: mol_type = other RNA
aactcttagtgtatttggc

SEQ ID NO: 28626 - RNA, 19 nt, synthetic construct
  misc_feature 1..19: note = siRNA sense sequence
  source 1..19: mol_type = other RNA
ccaaatacactaagagttg

SEQ ID NO: 28627 - RNA, 19 nt, synthetic construct
  misc_feature 1..19: note = siRNA antisense sequence
  source 1..19: mol_type = other RNA
caactcttagtgtatttgg

SEQ ID NO: 28628 - RNA, 19 nt, synthetic construct
  misc_feature 1..19: note = siRNA sense sequence
  source 1..19: mol_type = other RNA
caaatacactaagagttgg

SEQ ID NO: 28629 - RNA, 19 nt, synthetic construct
  misc_feature 1..19: note = siRNA antisense sequence
  source 1..19: mol_type = other RNA
ccaactcttagtgtatttg

SEQ ID NO: 28630 - RNA, 19 nt, synthetic construct
  misc_feature 1..19: note = siRNA sense sequence
  source 1..19: mol_type = other RNA
aaatacactaagagttgga

SEQ ID NO: 28631 - RNA, 19 nt, synthetic construct
  misc_feature 1..19: note = siRNA antisense sequence
  source 1..19: mol_type = other RNA
tccaactcttagtgtattt

SEQ ID NO: 28632 - RNA, 19 nt, synthetic construct
  misc_feature 1..19: note = siRNA sense sequence
  source 1..19: mol_type = other RNA
aatacactaagagttggac

SEQ ID NO: 28633 - RNA, 19 nt, synthetic construct
  misc_feature 1..19: note = siRNA antisense sequence
  source 1..19: mol_type = other RNA
gtccaactcttagtgtatt

SEQ ID NO: 28634 - RNA, 19 nt, synthetic construct
  misc_feature 1..19: note = siRNA sense sequence
  source 1..19: mol_type = other RNA
atacactaagagttggaca

SEQ ID NO: 28635 - RNA, 19 nt, synthetic construct
  misc_feature 1..19: note = siRNA antisense sequence
  source 1..19: mol_type = other RNA
tgtccaactcttagtgtat

SEQ ID NO: 28636 - RNA, 19 nt, synthetic construct
  misc_feature 1..19: note = siRNA sense sequence
  source 1..19: mol_type = other RNA
tacactaagagttggacac

SEQ ID NO: 28637 - RNA, 19 nt, synthetic construct
  misc_feature 1..19: note = siRNA antisense sequence
  source 1..19: mol_type = other RNA
gtgtccaactcttagtgta

SEQ ID NO: 28638 - RNA, 19 nt, synthetic construct
  misc_feature 1..19: note = siRNA sense sequence
  source 1..19: mol_type = other RNA
acagtattgtaaggaattc

SEQ ID NO: 28639 - RNA, 19 nt, synthetic construct
  misc_feature 1..19: note = siRNA antisense sequence
  source 1..19: mol_type = other RNA
gaattccttacaatactgt

SEQ ID NO: 28640 - RNA, 19 nt, synthetic construct
  misc_feature 1..19: note = siRNA sense sequence
  source 1..19: mol_type = other RNA
cagtattgtaaggaattcc

SEQ ID NO: 28641 - RNA, 19 nt, synthetic construct
  misc_feature 1..19: note = siRNA antisense sequence
  source 1..19: mol_type = other RNA
ggaattccttacaatactg

SEQ ID NO: 28642 - RNA, 19 nt, synthetic construct
  misc_feature 1..19: note = siRNA sense sequence
  source 1..19: mol_type = other RNA
agtattgtaaggaattccc

SEQ ID NO: 28643 - RNA, 19 nt, synthetic construct
  misc_feature 1..19: note = siRNA antisense sequence
  source 1..19: mol_type = other RNA
gggaattccttacaatact

SEQ ID NO: 28644 - RNA, 19 nt, synthetic construct
  misc_feature 1..19: note = siRNA sense sequence
  source 1..19: mol_type = other RNA
gtattgtaaggaattccca

SEQ ID NO: 28645 - RNA, 19 nt, synthetic construct
  misc_feature 1..19: note = siRNA antisense sequence
  source 1..19: mol_type = other RNA
tgggaattccttacaatac

SEQ ID NO: 28646 - RNA, 19 nt, synthetic construct
  misc_feature 1..19: note = siRNA sense sequence
  source 1..19: mol_type = other RNA
tattgtaaggaattcccat

SEQ ID NO: 28647 - RNA, 19 nt, synthetic construct
  misc_feature 1..19: note = siRNA antisense sequence
  source 1..19: mol_type = other RNA
atgggaattccttacaata

SEQ ID NO: 28648 - RNA, 19 nt, synthetic construct
  misc_feature 1..19: note = siRNA sense sequence
  source 1..19: mol_type = other RNA
attgtaaggaattcccatt

SEQ ID NO: 28649 - RNA, 19 nt, synthetic construct
  misc_feature 1..19: note = siRNA antisense sequence
  source 1..19: mol_type = other RNA
aatgggaattccttacaat

SEQ ID NO: 28650 - RNA, 19 nt, synthetic construct
  misc_feature 1..19: note = siRNA sense sequence
  source 1..19: mol_type = other RNA
cccattctccttgtattct

SEQ ID NO: 28651 - RNA, 19 nt, synthetic construct
  misc_feature 1..19: note = siRNA antisense sequence
  source 1..19: mol_type = other RNA
agaatacaaggagaatggg

SEQ ID NO: 28652 - RNA, 19 nt, synthetic construct
  misc_feature 1..19: note = siRNA sense sequence
  source 1..19: mol_type = other RNA
ccattctccttgtattctt

SEQ ID NO: 28653 - RNA, 19 nt, synthetic construct
  misc_feature 1..19: note = siRNA antisense sequence
  source 1..19: mol_type = other RNA
aagaatacaaggagaatgg

SEQ ID NO: 28654 - RNA, 19 nt, synthetic construct
  misc_feature 1..19: note = siRNA sense sequence
  source 1..19: mol_type = other RNA
cattctccttgtattcttc

SEQ ID NO: 28655 - RNA, 19 nt, synthetic construct
  misc_feature 1..19: note = siRNA antisense sequence
  source 1..19: mol_type = other RNA
gaagaatacaaggagaatg

SEQ ID NO: 28656 - RNA, 19 nt, synthetic construct
  misc_feature 1..19: note = siRNA sense sequence
  source 1..19: mol_type = other RNA
ccttgtattcttcctcttt

SEQ ID NO: 28657 - RNA, 19 nt, synthetic construct
  misc_feature 1..19: note = siRNA antisense sequence
  source 1..19: mol_type = other RNA
aaagaggaagaatacaagg

SEQ ID NO: 28658 - RNA, 19 nt, synthetic construct
  misc_feature 1..19: note = siRNA sense sequence
  source 1..19: mol_type = other RNA
attcttcctctttgcctag

SEQ ID NO: 28659 - RNA, 19 nt, synthetic construct
  misc_feature 1..19: note = siRNA antisense sequence
  source 1..19: mol_type = other RNA
ctaggcaaagaggaagaat

SEQ ID NO: 28660 - RNA, 19 nt, synthetic construct
  misc_feature 1..19: note = siRNA sense sequence
  source 1..19: mol_type = other RNA
ttcttcctctttgcctagt

SEQ ID NO: 28661 - RNA, 19 nt, synthetic construct
  misc_feature 1..19: note = siRNA antisense sequence
  source 1..19: mol_type = other RNA
actaggcaaagaggaagaa

SEQ ID NO: 28662 - RNA, 19 nt, synthetic construct
  misc_feature 1..19: note = siRNA sense sequence
  source 1..19: mol_type = other RNA
tcctctttgcctagttttg

SEQ ID NO: 28663 - RNA, 19 nt, synthetic construct
  misc_feature 1..19: note = siRNA antisense sequence
  source 1..19: mol_type = other RNA
caaaactaggcaaagagga

SEQ ID NO: 28664 - RNA, 19 nt, synthetic construct
  misc_feature 1..19: note = siRNA sense sequence
  source 1..19: mol_type = other RNA
cctctttgcctagttttgc

SEQ ID NO: 28665 - RNA, 19 nt, synthetic construct
  misc_feature 1..19: note = siRNA antisense sequence
  source 1..19: mol_type = other RNA
gcaaaactaggcaaagagg

SEQ ID NO: 28666 - RNA, 19 nt, synthetic construct
  misc_feature 1..19: note = siRNA sense sequence
  source 1..19: mol_type = other RNA
tctttgcctagttttgctg

SEQ ID NO: 28667 - RNA, 19 nt, synthetic construct
  misc_feature 1..19: note = siRNA antisense sequence
  source 1..19: mol_type = other RNA
cagcaaaactaggcaaaga

SEQ ID NO: 28668 - RNA, 19 nt, synthetic construct
  misc_feature 1..19: note = siRNA sense sequence
  source 1..19: mol_type = other RNA
ctttgcctagttttgctgt

SEQ ID NO: 28669 - RNA, 19 nt, synthetic construct
  misc_feature 1..19: note = siRNA antisense sequence
  source 1..19: mol_type = other RNA
acagcaaaactaggcaaag

SEQ ID NO: 28670 - RNA, 19 nt, synthetic construct
  misc_feature 1..19: note = siRNA sense sequence
  source 1..19: mol_type = other RNA
ttgcctagttttgctgtgt

SEQ ID NO: 28671 - RNA, 19 nt, synthetic construct
  misc_feature 1..19: note = siRNA antisense sequence
  source 1..19: mol_type = other RNA
acacagcaaaactaggcaa

SEQ ID NO: 28672 - RNA, 19 nt, synthetic construct
  misc_feature 1..19: note = siRNA sense sequence
  source 1..19: mol_type = other RNA
tgcctagttttgctgtgtg

SEQ ID NO: 28673 - RNA, 19 nt, synthetic construct
  misc_feature 1..19: note = siRNA antisense sequence
  source 1..19: mol_type = other RNA
cacacagcaaaactaggca

SEQ ID NO: 28674 - RNA, 19 nt, synthetic construct
  misc_feature 1..19: note = siRNA sense sequence
  source 1..19: mol_type = other RNA
tagttttgctgtgtgtgat

SEQ ID NO: 28675 - RNA, 19 nt, synthetic construct
  misc_feature 1..19: note = siRNA antisense sequence
  source 1..19: mol_type = other RNA
atcacacacagcaaaacta

SEQ ID NO: 28676 - RNA, 19 nt, synthetic construct
  misc_feature 1..19: note = siRNA sense sequence
  source 1..19: mol_type = other RNA
agttttgctgtgtgtgatt

SEQ ID NO: 28677 - RNA, 19 nt, synthetic construct
  misc_feature 1..19: note = siRNA antisense sequence
  source 1..19: mol_type = other RNA
aatcacacacagcaaaact

SEQ ID NO: 28678 - RNA, 19 nt, synthetic construct
  misc_feature 1..19: note = siRNA sense sequence
  source 1..19: mol_type = other RNA
ttgctgtgtgtgatttctt

SEQ ID NO: 28679 - RNA, 19 nt, synthetic construct
  misc_feature 1..19: note = siRNA antisense sequence
  source 1..19: mol_type = other RNA
aagaaatcacacacagcaa

SEQ ID NO: 28680 - RNA, 19 nt, synthetic construct
  misc_feature 1..19: note = siRNA sense sequence
  source 1..19: mol_type = other RNA
tgctgtgtgtgatttcttg

SEQ ID NO: 28681 - RNA, 19 nt, synthetic construct
  misc_feature 1..19: note = siRNA antisense sequence
  source 1..19: mol_type = other RNA
caagaaatcacacacagca

SEQ ID NO: 28682 - RNA, 19 nt, synthetic construct
  misc_feature 1..19: note = siRNA sense sequence
  source 1..19: mol_type = other RNA
gctgtgtgtgatttcttgg

SEQ ID NO: 28683 - RNA, 19 nt, synthetic construct
  misc_feature 1..19: note = siRNA antisense sequence
  source 1..19: mol_type = other RNA
ccaagaaatcacacacagc

SEQ ID NO: 28684 - RNA, 19 nt, synthetic construct
  misc_feature 1..19: note = siRNA sense sequence
  source 1..19: mol_type = other RNA
ctgtgtgtgatttcttgga

SEQ ID NO: 28685 - RNA, 19 nt, synthetic construct
  misc_feature 1..19: note = siRNA antisense sequence
  source 1..19: mol_type = other RNA
tccaagaaatcacacacag

SEQ ID NO: 28686 - RNA, 19 nt, synthetic construct
  misc_feature 1..19: note = siRNA sense sequence
  source 1..19: mol_type = other RNA
tgtgtgtgatttcttggaa

SEQ ID NO: 28687 - RNA, 19 nt, synthetic construct
  misc_feature 1..19: note = siRNA antisense sequence
  source 1..19: mol_type = other RNA
ttccaagaaatcacacaca

SEQ ID NO: 28688 - RNA, 19 nt, synthetic construct
  misc_feature 1..19: note = siRNA sense sequence
  source 1..19: mol_type = other RNA
gtgtgtgatttcttggaag

SEQ ID NO: 28689 - RNA, 19 nt, synthetic construct
  misc_feature 1..19: note = siRNA antisense sequence
  source 1..19: mol_type = other RNA
cttccaagaaatcacacac

SEQ ID NO: 28690 - RNA, 19 nt, synthetic construct
  misc_feature 1..19: note = siRNA sense sequence
  source 1..19: mol_type = other RNA
tgtgtgatttcttggaagg

SEQ ID NO: 28691 - RNA, 19 nt, synthetic construct
  misc_feature 1..19: note = siRNA antisense sequence
  source 1..19: mol_type = other RNA
ccttccaagaaatcacaca

SEQ ID NO: 28692 - RNA, 19 nt, synthetic construct
  misc_feature 1..19: note = siRNA sense sequence
  source 1..19: mol_type = other RNA
gtgtgatttcttggaaggg

SEQ ID NO: 28693 - RNA, 19 nt, synthetic construct
  misc_feature 1..19: note = siRNA antisense sequence
  source 1..19: mol_type = other RNA
cccttccaagaaatcacac

SEQ ID NO: 28694 - RNA, 19 nt, synthetic construct
  misc_feature 1..19: note = siRNA sense sequence
  source 1..19: mol_type = other RNA
atttcttggaagggcttat

SEQ ID NO: 28695 - RNA, 19 nt, synthetic construct
  misc_feature 1..19: note = siRNA antisense sequence
  source 1..19: mol_type = other RNA
ataagcccttccaagaaat

SEQ ID NO: 28696 - RNA, 19 nt, synthetic construct
  misc_feature 1..19: note = siRNA sense sequence
  source 1..19: mol_type = other RNA
tttcttggaagggcttata

SEQ ID NO: 28697 - RNA, 19 nt, synthetic construct
  misc_feature 1..19: note = siRNA antisense sequence
  source 1..19: mol_type = other RNA
tataagcccttccaagaaa

SEQ ID NO: 28698 - RNA, 19 nt, synthetic construct
  misc_feature 1..19: note = siRNA sense sequence
  source 1..19: mol_type = other RNA
ttggaagggcttatataat

SEQ ID NO: 28699 - RNA, 19 nt, synthetic construct
  misc_feature 1..19: note = siRNA antisense sequence
  source 1..19: mol_type = other RNA
attatataagcccttccaa

SEQ ID NO: 28700 - RNA, 19 nt, synthetic construct
  misc_feature 1..19: note = siRNA sense sequence
  source 1..19: mol_type = other RNA
tggaagggcttatataatt

SEQ ID NO: 28701 - RNA, 19 nt, synthetic construct
  misc_feature 1..19: note = siRNA antisense sequence
  source 1..19: mol_type = other RNA
aattatataagcccttcca

SEQ ID NO: 28702 - RNA, 19 nt, synthetic construct
  misc_feature 1..19: note = siRNA sense sequence
  source 1..19: mol_type = other RNA
ggaagggcttatataattg

SEQ ID NO: 28703 - RNA, 19 nt, synthetic construct
  misc_feature 1..19: note = siRNA antisense sequence
  source 1..19: mol_type = other RNA
caattatataagcccttcc

SEQ ID NO: 28704 - RNA, 19 nt, synthetic construct
  misc_feature 1..19: note = siRNA sense sequence
  source 1..19: mol_type = other RNA
gaagggcttatataattgg

SEQ ID NO: 28705 - RNA, 19 nt, synthetic construct
  misc_feature 1..19: note = siRNA antisense sequence
  source 1..19: mol_type = other RNA
ccaattatataagcccttc

SEQ ID NO: 28706 - RNA, 19 nt, synthetic construct
  misc_feature 1..19: note = siRNA sense sequence
  source 1..19: mol_type = other RNA
aagggcttatataattggc

SEQ ID NO: 28707 - RNA, 19 nt, synthetic construct
  misc_feature 1..19: note = siRNA antisense sequence
  source 1..19: mol_type = other RNA
gccaattatataagccctt

SEQ ID NO: 28708 - RNA, 19 nt, synthetic construct
  misc_feature 1..19: note = siRNA sense sequence
  source 1..19: mol_type = other RNA
agggcttatataattggcc

SEQ ID NO: 28709 - RNA, 19 nt, synthetic construct
  misc_feature 1..19: note = siRNA antisense sequence
  source 1..19: mol_type = other RNA
ggccaattatataagccct

SEQ ID NO: 28710 - RNA, 19 nt, synthetic construct
  misc_feature 1..19: note = siRNA sense sequence
  source 1..19: mol_type = other RNA
tttcttacttcattccact

SEQ ID NO: 28711 - RNA, 19 nt, synthetic construct
  misc_feature 1..19: note = siRNA antisense sequence
  source 1..19: mol_type = other RNA
agtggaatgaagtaagaaa

SEQ ID NO: 28712 - RNA, 19 nt, synthetic construct
  misc_feature 1..19: note = siRNA sense sequence
  source 1..19: mol_type = other RNA
tacttcattccactgtaat

SEQ ID NO: 28713 - RNA, 19 nt, synthetic construct
  misc_feature 1..19: note = siRNA antisense sequence
  source 1..19: mol_type = other RNA
attacagtggaatgaagta

SEQ ID NO: 28714 - RNA, 19 nt, synthetic construct
  misc_feature 1..19: note = siRNA sense sequence
  source 1..19: mol_type = other RNA
acttcattccactgtaatc

SEQ ID NO: 28715 - RNA, 19 nt, synthetic construct
  misc_feature 1..19: note = siRNA antisense sequence
  source 1..19: mol_type = other RNA
gattacagtggaatgaagt

SEQ ID NO: 28716 - RNA, 19 nt, synthetic construct
  misc_feature 1..19: note = siRNA sense sequence
  source 1..19: mol_type = other RNA
tatttgagttgtttcgact

SEQ ID NO: 28717 - RNA, 19 nt, synthetic construct
  misc_feature 1..19: note = siRNA antisense sequence
  source 1..19: mol_type = other RNA
agtcgaaacaactcaaata

SEQ ID NO: 28718 - RNA, 19 nt, synthetic construct
  misc_feature 1..19: note = siRNA sense sequence
  source 1..19: mol_type = other RNA
ttgagttgtttcgacttta

SEQ ID NO: 28719 - RNA, 19 nt, synthetic construct
  misc_feature 1..19: note = siRNA antisense sequence
  source 1..19: mol_type = other RNA
taaagtcgaaacaactcaa

SEQ ID NO: 28720 - RNA, 19 nt, synthetic construct
  misc_feature 1..19: note = siRNA sense sequence
  source 1..19: mol_type = other RNA
gttgtttcgactttatgtt

SEQ ID NO: 28721 - RNA, 19 nt, synthetic construct
  misc_feature 1..19: note = siRNA antisense sequence
  source 1..19: mol_type = other RNA
aacataaagtcgaaacaac

SEQ ID NO: 28722 - RNA, 19 nt, synthetic construct
  misc_feature 1..19: note = siRNA sense sequence
  source 1..19: mol_type = other RNA
ttcgactttatgttttagc

SEQ ID NO: 28723 - RNA, 19 nt, synthetic construct
  misc_feature 1..19: note = siRNA antisense sequence
  source 1..19: mol_type = other RNA
gctaaaacataaagtcgaa

SEQ ID NO: 28724 - RNA, 19 nt, synthetic construct
  misc_feature 1..19: note = siRNA sense sequence
  source 1..19: mol_type = other RNA
tcgactttatgttttagct

SEQ ID NO: 28725 - RNA, 19 nt, synthetic construct
  misc_feature 1..19: note = siRNA antisense sequence
  source 1..19: mol_type = other RNA
agctaaaacataaagtcga

SEQ ID NO: 28726 - RNA, 19 nt, synthetic construct
  misc_feature 1..19: note = siRNA sense sequence
  source 1..19: mol_type = other RNA
gtgtatggactttgagttg

SEQ ID NO: 28727 - RNA, 19 nt, synthetic construct
  misc_feature 1..19: note = siRNA antisense sequence
  source 1..19: mol_type = other RNA
caactcaaagtccatacac

SEQ ID NO: 28728 - RNA, 19 nt, synthetic construct
  misc_feature 1..19: note = siRNA sense sequence
  source 1..19: mol_type = other RNA
tgtatggactttgagttga

SEQ ID NO: 28729 - RNA, 19 nt, synthetic construct
  misc_feature 1..19: note = siRNA antisense sequence
  source 1..19: mol_type = other RNA
tcaactcaaagtccataca

SEQ ID NO: 28730 - RNA, 19 nt, synthetic construct
  misc_feature 1..19: note = siRNA sense sequence
  source 1..19: mol_type = other RNA
gtatggactttgagttgac

SEQ ID NO: 28731 - RNA, 19 nt, synthetic construct
  misc_feature 1..19: note = siRNA antisense sequence
  source 1..19: mol_type = other RNA
gtcaactcaaagtccatac

SEQ ID NO: 28732 - RNA, 19 nt, synthetic construct
  misc_feature 1..19: note = siRNA sense sequence
  source 1..19: mol_type = other RNA
tatggactttgagttgact

SEQ ID NO: 28733 - RNA, 19 nt, synthetic construct
  misc_feature 1..19: note = siRNA antisense sequence
  source 1..19: mol_type = other RNA
agtcaactcaaagtccata

SEQ ID NO: 28734 - RNA, 19 nt, synthetic construct
  misc_feature 1..19: note = siRNA sense sequence
  source 1..19: mol_type = other RNA
atggactttgagttgactg

SEQ ID NO: 28735 - RNA, 19 nt, synthetic construct
  misc_feature 1..19: note = siRNA antisense sequence
  source 1..19: mol_type = other RNA
cagtcaactcaaagtccat

SEQ ID NO: 28736 - RNA, 19 nt, synthetic construct
  misc_feature 1..19: note = siRNA sense sequence
  source 1..19: mol_type = other RNA
tggactttgagttgactgc

SEQ ID NO: 28737 - RNA, 19 nt, synthetic construct
  misc_feature 1..19: note = siRNA antisense sequence
  source 1..19: mol_type = other RNA
gcagtcaactcaaagtcca

SEQ ID NO: 28738 - RNA, 19 nt, synthetic construct
  misc_feature 1..19: note = siRNA sense sequence
  source 1..19: mol_type = other RNA
atatctgttttcttgcaac

SEQ ID NO: 28739 - RNA, 19 nt, synthetic construct
  misc_feature 1..19: note = siRNA antisense sequence
  source 1..19: mol_type = other RNA
gttgcaagaaaacagatat

SEQ ID NO: 28740 - RNA, 19 nt, synthetic construct
  misc_feature 1..19: note = siRNA sense sequence
  source 1..19: mol_type = other RNA
tgaatggaagaatgtcaac

SEQ ID NO: 28741 - RNA, 19 nt, synthetic construct
  misc_feature 1..19: note = siRNA antisense sequence
  source 1..19: mol_type = other RNA
gttgacattcttccattca

SEQ ID NO: 28742 - RNA, 19 nt, synthetic construct
  misc_feature 1..19: note = siRNA sense sequence
  source 1..19: mol_type = other RNA
gaatttgccatgtggaggc

SEQ ID NO: 28743 - RNA, 19 nt, synthetic construct
  misc_feature 1..19: note = siRNA antisense sequence
  source 1..19: mol_type = other RNA
gcctccacatggcaaattc

SEQ ID NO: 28744 - RNA, 19 nt, synthetic construct
  misc_feature 1..19: note = siRNA sense sequence
  source 1..19: mol_type = other RNA
gtttcctgaccttttatcc

SEQ ID NO: 28745 - RNA, 19 nt, synthetic construct
  misc_feature 1..19: note = siRNA antisense sequence
  source 1..19: mol_type = other RNA
ggataaaaggtcaggaaac

SEQ ID NO: 28746 - RNA, 19 nt, synthetic construct
  misc_feature 1..19: note = siRNA sense sequence
  source 1..19: mol_type = other RNA
tttcctgaccttttatcct

SEQ ID NO: 28747 - RNA, 19 nt, synthetic construct
  misc_feature 1..19: note = siRNA antisense sequence
  source 1..19: mol_type = other RNA
aggataaaaggtcaggaaa

SEQ ID NO: 28748 - RNA, 19 nt, synthetic construct
  misc_feature 1..19: note = siRNA sense sequence
  source 1..19: mol_type = other RNA
ttcctgaccttttatcctt

SEQ ID NO: 28749 - RNA, 19 nt, synthetic construct
  misc_feature 1..19: note = siRNA antisense sequence
  source 1..19: mol_type = other RNA
aaggataaaaggtcaggaa

SEQ ID NO: 28750 - RNA, 19 nt, synthetic construct
  misc_feature 1..19: note = siRNA sense sequence
  source 1..19: mol_type = other RNA
tcctttatatgctagagtg

SEQ ID NO: 28751 - RNA, 19 nt, synthetic construct
  misc_feature 1..19: note = siRNA antisense sequence
  source 1..19: mol_type = other RNA
cactctagcatataaagga

SEQ ID NO: 28752 - RNA, 19 nt, synthetic construct
  misc_feature 1..19: note = siRNA sense sequence
  source 1..19: mol_type = other RNA
cctttatatgctagagtgc

SEQ ID NO: 28753 - RNA, 19 nt, synthetic construct
  misc_feature 1..19: note = siRNA antisense sequence
  source 1..19: mol_type = other RNA
gcactctagcatataaagg

SEQ ID NO: 28754 - RNA, 19 nt, synthetic construct
  misc_feature 1..19: note = siRNA sense sequence
  source 1..19: mol_type = other RNA
ctttatatgctagagtgct

SEQ ID NO: 28755 - RNA, 19 nt, synthetic construct
  misc_feature 1..19: note = siRNA antisense sequence
  source 1..19: mol_type = other RNA
agcactctagcatataaag

SEQ ID NO: 28756 - RNA, 19 nt, synthetic construct
  misc_feature 1..19: note = siRNA sense sequence
  source 1..19: mol_type = other RNA
tttatatgctagagtgctt

SEQ ID NO: 28757 - RNA, 19 nt, synthetic construct
  misc_feature 1..19: note = siRNA antisense sequence
  source 1..19: mol_type = other RNA
aagcactctagcatataaa

SEQ ID NO: 28758 - RNA, 19 nt, synthetic construct
  misc_feature 1..19: note = siRNA sense sequence
  source 1..19: mol_type = other RNA
ttatatgctagagtgcttt

SEQ ID NO: 28759 - RNA, 19 nt, synthetic construct
  misc_feature 1..19: note = siRNA antisense sequence
  source 1..19: mol_type = other RNA
aaagcactctagcatataa

SEQ ID NO: 28760 - RNA, 19 nt, synthetic construct
  misc_feature 1..19: note = siRNA sense sequence
  source 1..19: mol_type = other RNA
atgctagagtgctttagag

SEQ ID NO: 28761 - RNA, 19 nt, synthetic construct
  misc_feature 1..19: note = siRNA antisense sequence
  source 1..19: mol_type = other RNA
ctctaaagcactctagcat

SEQ ID NO: 28762 - RNA, 19 nt, synthetic construct
  misc_feature 1..19: note = siRNA sense sequence
  source 1..19: mol_type = other RNA
tgctagagtgctttagagt

SEQ ID NO: 28763 - RNA, 19 nt, synthetic construct
  misc_feature 1..19: note = siRNA antisense sequence
  source 1..19: mol_type = other RNA
actctaaagcactctagca

SEQ ID NO: 28764 - RNA, 19 nt, synthetic construct
  misc_feature 1..19: note = siRNA sense sequence
  source 1..19: mol_type = other RNA
gctagagtgctttagagtt

SEQ ID NO: 28765 - RNA, 19 nt, synthetic construct
  misc_feature 1..19: note = siRNA antisense sequence
  source 1..19: mol_type = other RNA
aactctaaagcactctagc

SEQ ID NO: 28766 - RNA, 19 nt, synthetic construct
  misc_feature 1..19: note = siRNA sense sequence
  source 1..19: mol_type = other RNA
ccaaatggtgttcatatgt

SEQ ID NO: 28767 - RNA, 19 nt, synthetic construct
  misc_feature 1..19: note = siRNA antisense sequence
  source 1..19: mol_type = other RNA
acatatgaacaccatttgg

SEQ ID NO: 28768 - RNA, 19 nt, synthetic construct
  misc_feature 1..19: note = siRNA sense sequence
  source 1..19: mol_type = other RNA
ctacttgatagacttggaa

SEQ ID NO: 28769 - RNA, 19 nt, synthetic construct
  misc_feature 1..19: note = siRNA antisense sequence
  source 1..19: mol_type = other RNA
ttccaagtctatcaagtag

SEQ ID NO: 28770 - RNA, 19 nt, synthetic construct
  misc_feature 1..19: note = siRNA sense sequence
  source 1..19: mol_type = other RNA
aaatgttttgcctacagta

SEQ ID NO: 28771 - RNA, 19 nt, synthetic construct
  misc_feature 1..19: note = siRNA antisense sequence
  source 1..19: mol_type = other RNA
tactgtaggcaaaacattt

SEQ ID NO: 28772 - RNA, 19 nt, synthetic construct
  misc_feature 1..19: note = siRNA sense sequence
  source 1..19: mol_type = other RNA
aatgttttgcctacagtag

SEQ ID NO: 28773 - RNA, 19 nt, synthetic construct
  misc_feature 1..19: note = siRNA antisense sequence
  source 1..19: mol_type = other RNA
ctactgtaggcaaaacatt

SEQ ID NO: 28774 - RNA, 19 nt, synthetic construct
  misc_feature 1..19: note = siRNA sense sequence
  source 1..19: mol_type = other RNA
atgttttgcctacagtaga

SEQ ID NO: 28775 - RNA, 19 nt, synthetic construct
  misc_feature 1..19: note = siRNA antisense sequence
  source 1..19: mol_type = other RNA
tctactgtaggcaaaacat

SEQ ID NO: 28776 - RNA, 19 nt, synthetic construct
  misc_feature 1..19: note = siRNA sense sequence
  source 1..19: mol_type = other RNA
tgttttgcctacagtagat

SEQ ID NO: 28777 - RNA, 19 nt, synthetic construct
  misc_feature 1..19: note = siRNA antisense sequence
  source 1..19: mol_type = other RNA
atctactgtaggcaaaaca

SEQ ID NO: 28778 - RNA, 19 nt, synthetic construct
  misc_feature 1..19: note = siRNA sense sequence
  source 1..19: mol_type = other RNA
gttttgcctacagtagatt

SEQ ID NO: 28779 - RNA, 19 nt, synthetic construct
  misc_feature 1..19: note = siRNA antisense sequence
  source 1..19: mol_type = other RNA
aatctactgtaggcaaaac

SEQ ID NO: 28780 - RNA, 19 nt, synthetic construct
  misc_feature 1..19: note = siRNA sense sequence
  source 1..19: mol_type = other RNA
ttttgcctacagtagattg

SEQ ID NO: 28781 - RNA, 19 nt, synthetic construct
  misc_feature 1..19: note = siRNA antisense sequence
  source 1..19: mol_type = other RNA
caatctactgtaggcaaaa

SEQ ID NO: 28782 - RNA, 19 nt, synthetic construct
  misc_feature 1..19: note = siRNA sense sequence
  source 1..19: mol_type = other RNA
tttgcctacagtagattgg

SEQ ID NO: 28783 - RNA, 19 nt, synthetic construct
  misc_feature 1..19: note = siRNA antisense sequence
  source 1..19: mol_type = other RNA
ccaatctactgtaggcaaa

SEQ ID NO: 28784 - RNA, 19 nt, synthetic construct
  misc_feature 1..19: note = siRNA sense sequence
  source 1..19: mol_type = other RNA
ttgcctacagtagattggt

SEQ ID NO: 28785 - RNA, 19 nt, synthetic construct
  misc_feature 1..19: note = siRNA antisense sequence
  source 1..19: mol_type = other RNA
accaatctactgtaggcaa

SEQ ID NO: 28786 - RNA, 19 nt, synthetic construct
  misc_feature 1..19: note = siRNA sense sequence
  source 1..19: mol_type = other RNA
tgcctacagtagattggtg

SEQ ID NO: 28787 - RNA, 19 nt, synthetic construct
  misc_feature 1..19: note = siRNA antisense sequence
  source 1..19: mol_type = other RNA
caccaatctactgtaggca

SEQ ID NO: 28788 - RNA, 19 nt, synthetic construct
  misc_feature 1..19: note = siRNA sense sequence
  source 1..19: mol_type = other RNA
gcctacagtagattggtga

SEQ ID NO: 28789 - RNA, 19 nt, synthetic construct
  misc_feature 1..19: note = siRNA antisense sequence
  source 1..19: mol_type = other RNA
tcaccaatctactgtaggc

SEQ ID NO: 28790 - RNA, 19 nt, synthetic construct
  misc_feature 1..19: note = siRNA sense sequence
  source 1..19: mol_type = other RNA
cctacagtagattggtgac

SEQ ID NO: 28791 - RNA, 19 nt, synthetic construct
  misc_feature 1..19: note = siRNA antisense sequence
  source 1..19: mol_type = other RNA
gtcaccaatctactgtagg

SEQ ID NO: 28792 - RNA, 19 nt, synthetic construct
  misc_feature 1..19: note = siRNA sense sequence
  source 1..19: mol_type = other RNA
ctacagtagattggtgaca

SEQ ID NO: 28793 - RNA, 19 nt, synthetic construct
  misc_feature 1..19: note = siRNA antisense sequence
  source 1..19: mol_type = other RNA
tgtcaccaatctactgtag

SEQ ID NO: 28794 - RNA, 19 nt, synthetic construct
  misc_feature 1..19: note = siRNA sense sequence
  source 1..19: mol_type = other RNA
acattctggctataattag

SEQ ID NO: 28795 - RNA, 19 nt, synthetic construct
  misc_feature 1..19: note = siRNA antisense sequence
  source 1..19: mol_type = other RNA
ctaattatagccagaatgt

SEQ ID NO: 28796 - RNA, 19 nt, synthetic construct
  misc_feature 1..19: note = siRNA sense sequence
  source 1..19: mol_type = other RNA
cattctggctataattagt

SEQ ID NO: 28797 - RNA, 19 nt, synthetic construct
  misc_feature 1..19: note = siRNA antisense sequence
  source 1..19: mol_type = other RNA
actaattatagccagaatg

SEQ ID NO: 28798 - RNA, 19 nt, synthetic construct
  misc_feature 1..19: note = siRNA sense sequence
  source 1..19: mol_type = other RNA
tctggctataattagttac

SEQ ID NO: 28799 - RNA, 19 nt, synthetic construct
  misc_feature 1..19: note = siRNA antisense sequence
  source 1..19: mol_type = other RNA
gtaactaattatagccaga

SEQ ID NO: 28800 - RNA, 19 nt, synthetic construct
  misc_feature 1..19: note = siRNA sense sequence
  source 1..19: mol_type = other RNA
ctggctataattagttact

SEQ ID NO: 28801 - RNA, 19 nt, synthetic construct
  misc_feature 1..19: note = siRNA antisense sequence
  source 1..19: mol_type = other RNA
agtaactaattatagccag

SEQ ID NO: 28802 - RNA, 19 nt, synthetic construct
  misc_feature 1..19: note = siRNA sense sequence
  source 1..19: mol_type = other RNA
tggctataattagttactc

SEQ ID NO: 28803 - RNA, 19 nt, synthetic construct
  misc_feature 1..19: note = siRNA antisense sequence
  source 1..19: mol_type = other RNA
gagtaactaattatagcca

SEQ ID NO: 28804 - RNA, 19 nt, synthetic construct
  misc_feature 1..19: note = siRNA sense sequence
  source 1..19: mol_type = other RNA
ggctataattagttactct

SEQ ID NO: 28805 - RNA, 19 nt, synthetic construct
  misc_feature 1..19: note = siRNA antisense sequence
  source 1..19: mol_type = other RNA
agagtaactaattatagcc

SEQ ID NO: 28806 - RNA, 19 nt, synthetic construct
  misc_feature 1..19: note = siRNA sense sequence
  source 1..19: mol_type = other RNA
acatatttgagcttcgatt

SEQ ID NO: 28807 - RNA, 19 nt, synthetic construct
  misc_feature 1..19: note = siRNA antisense sequence
  source 1..19: mol_type = other RNA
aatcgaagctcaaatatgt

SEQ ID NO: 28808 - RNA, 19 nt, synthetic construct
  misc_feature 1..19: note = siRNA sense sequence
  source 1..19: mol_type = other RNA
catatttgagcttcgattt

SEQ ID NO: 28809 - RNA, 19 nt, synthetic construct
  misc_feature 1..19: note = siRNA antisense sequence
  source 1..19: mol_type = other RNA
aaatcgaagctcaaatatg

SEQ ID NO: 28810 - RNA, 19 nt, synthetic construct
  misc_feature 1..19: note = siRNA sense sequence
  source 1..19: mol_type = other RNA
atttgagcttcgattttac

SEQ ID NO: 28811 - RNA, 19 nt, synthetic construct
  misc_feature 1..19: note = siRNA antisense sequence
  source 1..19: mol_type = other RNA
gtaaaatcgaagctcaaat

SEQ ID NO: 28812 - RNA, 19 nt, synthetic construct
  misc_feature 1..19: note = siRNA sense sequence
  source 1..19: mol_type = other RNA
tttgagcttcgattttact

SEQ ID NO: 28813 - RNA, 19 nt, synthetic construct
  misc_feature 1..19: note = siRNA antisense sequence
  source 1..19: mol_type = other RNA
agtaaaatcgaagctcaaa

SEQ ID NO: 28814 - RNA, 19 nt, synthetic construct
  misc_feature 1..19: note = siRNA sense sequence
  source 1..19: mol_type = other RNA
ttgagcttcgattttactt

SEQ ID NO: 28815 - RNA, 19 nt, synthetic construct
  misc_feature 1..19: note = siRNA antisense sequence
  source 1..19: mol_type = other RNA
aagtaaaatcgaagctcaa

SEQ ID NO: 28816 - RNA, 19 nt, synthetic construct
  misc_feature 1..19: note = siRNA sense sequence
  source 1..19: mol_type = other RNA
gagcttcgattttacttag

SEQ ID NO: 28817 - RNA, 19 nt, synthetic construct
  misc_feature 1..19: note = siRNA antisense sequence
  source 1..19: mol_type = other RNA
ctaagtaaaatcgaagctc

SEQ ID NO: 28818 - RNA, 19 nt, synthetic construct
  misc_feature 1..19: note = siRNA sense sequence
  source 1..19: mol_type = other RNA
agcttcgattttacttagg

SEQ ID NO: 28819 - RNA, 19 nt, synthetic construct
  misc_feature 1..19: note = siRNA antisense sequence
  source 1..19: mol_type = other RNA
cctaagtaaaatcgaagct

SEQ ID NO: 28820 - RNA, 19 nt, synthetic construct
  misc_feature 1..19: note = siRNA sense sequence
  source 1..19: mol_type = other RNA
gcttcgattttacttaggg

SEQ ID NO: 28821 - RNA, 19 nt, synthetic construct
  misc_feature 1..19: note = siRNA antisense sequence
  source 1..19: mol_type = other RNA
ccctaagtaaaatcgaagc

SEQ ID NO: 28822 - RNA, 19 nt, synthetic construct
  misc_feature 1..19: note = siRNA sense sequence
  source 1..19: mol_type = other RNA
cttcgattttacttagggc

SEQ ID NO: 28823 - RNA, 19 nt, synthetic construct
  misc_feature 1..19: note = siRNA antisense sequence
  source 1..19: mol_type = other RNA
gccctaagtaaaatcgaag

SEQ ID NO: 28824 - RNA, 19 nt, synthetic construct
  misc_feature 1..19: note = siRNA sense sequence
  source 1..19: mol_type = other RNA
aactcagtcctcatccaac

SEQ ID NO: 28825 - RNA, 19 nt, synthetic construct
  misc_feature 1..19: note = siRNA antisense sequence
  source 1..19: mol_type = other RNA
gttggatgaggactgagtt

SEQ ID NO: 28826 - RNA, 19 nt, synthetic construct
  misc_feature 1..19: note = siRNA sense sequence
  source 1..19: mol_type = other RNA
cagtcctcatccaaccagt

SEQ ID NO: 28827 - RNA, 19 nt, synthetic construct
  misc_feature 1..19: note = siRNA antisense sequence
  source 1..19: mol_type = other RNA
actggttggatgaggactg

SEQ ID NO: 28828 - RNA, 19 nt, synthetic construct
  misc_feature 1..19: note = siRNA sense sequence
  source 1..19: mol_type = other RNA
agtcctcatccaaccagtt

SEQ ID NO: 28829 - RNA, 19 nt, synthetic construct
  misc_feature 1..19: note = siRNA antisense sequence
  source 1..19: mol_type = other RNA
aactggttggatgaggact

SEQ ID NO: 28830 - RNA, 19 nt, synthetic construct
  misc_feature 1..19: note = siRNA sense sequence
  source 1..19: mol_type = other RNA
tcctcatccaaccagttgc

SEQ ID NO: 28831 - RNA, 19 nt, synthetic construct
  misc_feature 1..19: note = siRNA antisense sequence
  source 1..19: mol_type = other RNA
gcaactggttggatgagga

SEQ ID NO: 28832 - RNA, 19 nt, synthetic construct
  misc_feature 1..19: note = siRNA sense sequence
  source 1..19: mol_type = other RNA
cctcatccaaccagttgcc

SEQ ID NO: 28833 - RNA, 19 nt, synthetic construct
  misc_feature 1..19: note = siRNA antisense sequence
  source 1..19: mol_type = other RNA
ggcaactggttggatgagg

SEQ ID NO: 28834 - RNA, 19 nt, synthetic construct
  misc_feature 1..19: note = siRNA sense sequence
  source 1..19: mol_type = other RNA
ctcatccaaccagttgcct

SEQ ID NO: 28835 - RNA, 19 nt, synthetic construct
  misc_feature 1..19: note = siRNA antisense sequence
  source 1..19: mol_type = other RNA
aggcaactggttggatgag

SEQ ID NO: 28836 - RNA, 19 nt, synthetic construct
  misc_feature 1..19: note = siRNA sense sequence
  source 1..19: mol_type = other RNA
tccaaccagttgcctctct

SEQ ID NO: 28837 - RNA, 19 nt, synthetic construct
  misc_feature 1..19: note = siRNA antisense sequence
  source 1..19: mol_type = other RNA
agagaggcaactggttgga

SEQ ID NO: 28838 - RNA, 19 nt, synthetic construct
  misc_feature 1..19: note = siRNA sense sequence
  source 1..19: mol_type = other RNA
ccaaccagttgcctctctt

SEQ ID NO: 28839 - RNA, 19 nt, synthetic construct
  misc_feature 1..19: note = siRNA antisense sequence
  source 1..19: mol_type = other RNA
aagagaggcaactggttgg

SEQ ID NO: 28840 - RNA, 19 nt, synthetic construct
  misc_feature 1..19: note = siRNA sense sequence
  source 1..19: mol_type = other RNA
caaccagttgcctctcttc

SEQ ID NO: 28841 - RNA, 19 nt, synthetic construct
  misc_feature 1..19: note = siRNA antisense sequence
  source 1..19: mol_type = other RNA
gaagagaggcaactggttg

SEQ ID NO: 28842 - RNA, 19 nt, synthetic construct
  misc_feature 1..19: note = siRNA sense sequence
  source 1..19: mol_type = other RNA
aaccagttgcctctcttct

SEQ ID NO: 28843 - RNA, 19 nt, synthetic construct
  misc_feature 1..19: note = siRNA antisense sequence
  source 1..19: mol_type = other RNA
agaagagaggcaactggtt

SEQ ID NO: 28844 - RNA, 19 nt, synthetic construct
  misc_feature 1..19: note = siRNA sense sequence
  source 1..19: mol_type = other RNA
accagttgcctctcttctt

SEQ ID NO: 28845 - RNA, 19 nt, synthetic construct
  misc_feature 1..19: note = siRNA antisense sequence
  source 1..19: mol_type = other RNA
aagaagagaggcaactggt

SEQ ID NO: 28846 - RNA, 19 nt, synthetic construct
  misc_feature 1..19: note = siRNA sense sequence
  source 1..19: mol_type = other RNA
ccagttgcctctcttcttc

SEQ ID NO: 28847 - RNA, 19 nt, synthetic construct
  misc_feature 1..19: note = siRNA antisense sequence
  source 1..19: mol_type = other RNA
gaagaagagaggcaactgg

SEQ ID NO: 28848 - RNA, 19 nt, synthetic construct
  misc_feature 1..19: note = siRNA sense sequence
  source 1..19: mol_type = other RNA
cttcttcctcccactgatt

SEQ ID NO: 28849 - RNA, 19 nt, synthetic construct
  misc_feature 1..19: note = siRNA antisense sequence
  source 1..19: mol_type = other RNA
aatcagtgggaggaagaag

SEQ ID NO: 28850 - RNA, 19 nt, synthetic construct
  misc_feature 1..19: note = siRNA sense sequence
  source 1..19: mol_type = other RNA
ttcctcccactgattcagg

SEQ ID NO: 28851 - RNA, 19 nt, synthetic construct
  misc_feature 1..19: note = siRNA antisense sequence
  source 1..19: mol_type = other RNA
cctgaatcagtgggaggaa

SEQ ID NO: 28852 - RNA, 19 nt, synthetic construct
  misc_feature 1..19: note = siRNA sense sequence
  source 1..19: mol_type = other RNA
cccactgattcagggacac

SEQ ID NO: 28853 - RNA, 19 nt, synthetic construct
  misc_feature 1..19: note = siRNA antisense sequence
  source 1..19: mol_type = other RNA
gtgtccctgaatcagtggg

SEQ ID NO: 28854 - RNA, 19 nt, synthetic construct
  misc_feature 1..19: note = siRNA sense sequence
  source 1..19: mol_type = other RNA
ccactgattcagggacact

SEQ ID NO: 28855 - RNA, 19 nt, synthetic construct
  misc_feature 1..19: note = siRNA antisense sequence
  source 1..19: mol_type = other RNA
agtgtccctgaatcagtgg

SEQ ID NO: 28856 - RNA, 19 nt, synthetic construct
  misc_feature 1..19: note = siRNA sense sequence
  source 1..19: mol_type = other RNA
cactgattcagggacactt

SEQ ID NO: 28857 - RNA, 19 nt, synthetic construct
  misc_feature 1..19: note = siRNA antisense sequence
  source 1..19: mol_type = other RNA
aagtgtccctgaatcagtg

SEQ ID NO: 28858 - RNA, 19 nt, synthetic construct
  misc_feature 1..19: note = siRNA sense sequence
  source 1..19: mol_type = other RNA
actgattcagggacacttc

SEQ ID NO: 28859 - RNA, 19 nt, synthetic construct
  misc_feature 1..19: note = siRNA antisense sequence
  source 1..19: mol_type = other RNA
gaagtgtccctgaatcagt

SEQ ID NO: 28860 - RNA, 19 nt, synthetic construct
  misc_feature 1..19: note = siRNA sense sequence
  source 1..19: mol_type = other RNA
ctgattcagggacacttcc

SEQ ID NO: 28861 - RNA, 19 nt, synthetic construct
  misc_feature 1..19: note = siRNA antisense sequence
  source 1..19: mol_type = other RNA
ggaagtgtccctgaatcag

SEQ ID NO: 28862 - RNA, 19 nt, synthetic construct
  misc_feature 1..19: note = siRNA sense sequence
  source 1..19: mol_type = other RNA
tgattcagggacacttccg

SEQ ID NO: 28863 - RNA, 19 nt, synthetic construct
  misc_feature 1..19: note = siRNA antisense sequence
  source 1..19: mol_type = other RNA
cggaagtgtccctgaatca

SEQ ID NO: 28864 - RNA, 19 nt, synthetic construct
  misc_feature 1..19: note = siRNA sense sequence
  source 1..19: mol_type = other RNA
gattcagggacacttccgt

SEQ ID NO: 28865 - RNA, 19 nt, synthetic construct
  misc_feature 1..19: note = siRNA antisense sequence
  source 1..19: mol_type = other RNA
acggaagtgtccctgaatc

SEQ ID NO: 28866 - RNA, 19 nt, synthetic construct
  misc_feature 1..19: note = siRNA sense sequence
  source 1..19: mol_type = other RNA
cagggacacttccgtttgg

SEQ ID NO: 28867 - RNA, 19 nt, synthetic construct
  misc_feature 1..19: note = siRNA antisense sequence
  source 1..19: mol_type = other RNA
ccaaacggaagtgtccctg

SEQ ID NO: 28868 - RNA, 19 nt, synthetic construct
  misc_feature 1..19: note = siRNA sense sequence
  source 1..19: mol_type = other RNA
agggacacttccgtttgga

SEQ ID NO: 28869 - RNA, 19 nt, synthetic construct
  misc_feature 1..19: note = siRNA antisense sequence
  source 1..19: mol_type = other RNA
tccaaacggaagtgtccct

SEQ ID NO: 28870 - RNA, 19 nt, synthetic construct
  misc_feature 1..19: note = siRNA sense sequence
  source 1..19: mol_type = other RNA
gggacacttccgtttggac

SEQ ID NO: 28871 - RNA, 19 nt, synthetic construct
  misc_feature 1..19: note = siRNA antisense sequence
  source 1..19: mol_type = other RNA
gtccaaacggaagtgtccc

SEQ ID NO: 28872 - RNA, 19 nt, synthetic construct
  misc_feature 1..19: note = siRNA sense sequence
  source 1..19: mol_type = other RNA
ggacacttccgtttggact

SEQ ID NO: 28873 - RNA, 19 nt, synthetic construct
  misc_feature 1..19: note = siRNA antisense sequence
  source 1..19: mol_type = other RNA
agtccaaacggaagtgtcc

SEQ ID NO: 28874 - RNA, 19 nt, synthetic construct
  misc_feature 1..19: note = siRNA sense sequence
  source 1..19: mol_type = other RNA
acttccgtttggactgggc

SEQ ID NO: 28875 - RNA, 19 nt, synthetic construct
  misc_feature 1..19: note = siRNA antisense sequence
  source 1..19: mol_type = other RNA
gcccagtccaaacggaagt

SEQ ID NO: 28876 - RNA, 19 nt, synthetic construct
  misc_feature 1..19: note = siRNA sense sequence
  source 1..19: mol_type = other RNA
cttccgtttggactgggca

SEQ ID NO: 28877 - RNA, 19 nt, synthetic construct
  misc_feature 1..19: note = siRNA antisense sequence
  source 1..19: mol_type = other RNA
tgcccagtccaaacggaag

SEQ ID NO: 28878 - RNA, 19 nt, synthetic construct
  misc_feature 1..19: note = siRNA sense sequence
  source 1..19: mol_type = other RNA
tttggactgggcagagcta

SEQ ID NO: 28879 - RNA, 19 nt, synthetic construct
  misc_feature 1..19: note = siRNA antisense sequence
  source 1..19: mol_type = other RNA
tagctctgcccagtccaaa

SEQ ID NO: 28880 - RNA, 19 nt, synthetic construct
  misc_feature 1..19: note = siRNA sense sequence
  source 1..19: mol_type = other RNA
ttggactgggcagagctag

SEQ ID NO: 28881 - RNA, 19 nt, synthetic construct
  misc_feature 1..19: note = siRNA antisense sequence
  source 1..19: mol_type = other RNA
ctagctctgcccagtccaa

SEQ ID NO: 28882 - RNA, 19 nt, synthetic construct
  misc_feature 1..19: note = siRNA sense sequence
  source 1..19: mol_type = other RNA
aactcatagaggcatctgc

SEQ ID NO: 28883 - RNA, 19 nt, synthetic construct
  misc_feature 1..19: note = siRNA antisense sequence
  source 1..19: mol_type = other RNA
gcagatgcctctatgagtt

SEQ ID NO: 28884 - RNA, 19 nt, synthetic construct
  misc_feature 1..19: note = siRNA sense sequence
  source 1..19: mol_type = other RNA
actcatagaggcatctgca

SEQ ID NO: 28885 - RNA, 19 nt, synthetic construct
  misc_feature 1..19: note = siRNA antisense sequence
  source 1..19: mol_type = other RNA
tgcagatgcctctatgagt

SEQ ID NO: 28886 - RNA, 19 nt, synthetic construct
  misc_feature 1..19: note = siRNA sense sequence
  source 1..19: mol_type = other RNA
ctcatagaggcatctgcat

SEQ ID NO: 28887 - RNA, 19 nt, synthetic construct
  misc_feature 1..19: note = siRNA antisense sequence
  source 1..19: mol_type = other RNA
atgcagatgcctctatgag

SEQ ID NO: 28888 - RNA, 19 nt, synthetic construct
  misc_feature 1..19: note = siRNA sense sequence
  source 1..19: mol_type = other RNA
tcatagaggcatctgcatt

SEQ ID NO: 28889 - RNA, 19 nt, synthetic construct
  misc_feature 1..19: note = siRNA antisense sequence
  source 1..19: mol_type = other RNA
aatgcagatgcctctatga

SEQ ID NO: 28890 - RNA, 19 nt, synthetic construct
  misc_feature 1..19: note = siRNA sense sequence
  source 1..19: mol_type = other RNA
catagaggcatctgcattg

SEQ ID NO: 28891 - RNA, 19 nt, synthetic construct
  misc_feature 1..19: note = siRNA antisense sequence
  source 1..19: mol_type = other RNA
caatgcagatgcctctatg

SEQ ID NO: 28892 - RNA, 19 nt, synthetic construct
  misc_feature 1..19: note = siRNA sense sequence
  source 1..19: mol_type = other RNA
atagaggcatctgcattgc

SEQ ID NO: 28893 - RNA, 19 nt, synthetic construct
  misc_feature 1..19: note = siRNA antisense sequence
  source 1..19: mol_type = other RNA
gcaatgcagatgcctctat

SEQ ID NO: 28894 - RNA, 19 nt, synthetic construct
  misc_feature 1..19: note = siRNA sense sequence
  source 1..19: mol_type = other RNA
tagaggcatctgcattgct

SEQ ID NO: 28895 - RNA, 19 nt, synthetic construct
  misc_feature 1..19: note = siRNA antisense sequence
  source 1..19: mol_type = other RNA
agcaatgcagatgcctcta

SEQ ID NO: 28896 - RNA, 19 nt, synthetic construct
  misc_feature 1..19: note = siRNA sense sequence
  source 1..19: mol_type = other RNA
agaggcatctgcattgcta

SEQ ID NO: 28897 - RNA, 19 nt, synthetic construct
  misc_feature 1..19: note = siRNA antisense sequence
  source 1..19: mol_type = other RNA
tagcaatgcagatgcctct

SEQ ID NO: 28898 - RNA, 19 nt, synthetic construct
  misc_feature 1..19: note = siRNA sense sequence
  source 1..19: mol_type = other RNA
gaggcatctgcattgctag

SEQ ID NO: 28899 - RNA, 19 nt, synthetic construct
  misc_feature 1..19: note = siRNA antisense sequence
  source 1..19: mol_type = other RNA
ctagcaatgcagatgcctc

SEQ ID NO: 28900 - RNA, 19 nt, synthetic construct
  misc_feature 1..19: note = siRNA sense sequence
  source 1..19: mol_type = other RNA
aggcatctgcattgctagt

SEQ ID NO: 28901 - RNA, 19 nt, synthetic construct
  misc_feature 1..19: note = siRNA antisense sequence
  source 1..19: mol_type = other RNA
actagcaatgcagatgcct

SEQ ID NO: 28902 - RNA, 19 nt, synthetic construct
  misc_feature 1..19: note = siRNA sense sequence
  source 1..19: mol_type = other RNA
atctgcattgctagtttcc

SEQ ID NO: 28903 - RNA, 19 nt, synthetic construct
  misc_feature 1..19: note = siRNA antisense sequence
  source 1..19: mol_type = other RNA
ggaaactagcaatgcagat

SEQ ID NO: 28904 - RNA, 19 nt, synthetic construct
  misc_feature 1..19: note = siRNA sense sequence
  source 1..19: mol_type = other RNA
tagtttcctagaagagctg

SEQ ID NO: 28905 - RNA, 19 nt, synthetic construct
  misc_feature 1..19: note = siRNA antisense sequence
  source 1..19: mol_type = other RNA
cagctcttctaggaaacta

SEQ ID NO: 28906 - RNA, 19 nt, synthetic construct
  misc_feature 1..19: note = siRNA sense sequence
  source 1..19: mol_type = other RNA
agtttcctagaagagctgg

SEQ ID NO: 28907 - RNA, 19 nt, synthetic construct
  misc_feature 1..19: note = siRNA antisense sequence
  source 1..19: mol_type = other RNA
ccagctcttctaggaaact

SEQ ID NO: 28908 - RNA, 19 nt, synthetic construct
  misc_feature 1..19: note = siRNA sense sequence
  source 1..19: mol_type = other RNA
gtttcctagaagagctgga

SEQ ID NO: 28909 - RNA, 19 nt, synthetic construct
  misc_feature 1..19: note = siRNA antisense sequence
  source 1..19: mol_type = other RNA
tccagctcttctaggaaac

SEQ ID NO: 28910 - RNA, 19 nt, synthetic construct
  misc_feature 1..19: note = siRNA sense sequence
  source 1..19: mol_type = other RNA
tttcctagaagagctggag

SEQ ID NO: 28911 - RNA, 19 nt, synthetic construct
  misc_feature 1..19: note = siRNA antisense sequence
  source 1..19: mol_type = other RNA
ctccagctcttctaggaaa

SEQ ID NO: 28912 - RNA, 19 nt, synthetic construct
  misc_feature 1..19: note = siRNA sense sequence
  source 1..19: mol_type = other RNA
ttcctagaagagctggagg

SEQ ID NO: 28913 - RNA, 19 nt, synthetic construct
  misc_feature 1..19: note = siRNA antisense sequence
  source 1..19: mol_type = other RNA
cctccagctcttctaggaa

SEQ ID NO: 28914 - RNA, 19 nt, synthetic construct
  misc_feature 1..19: note = siRNA sense sequence
  source 1..19: mol_type = other RNA
tcctagaagagctggaggc

SEQ ID NO: 28915 - RNA, 19 nt, synthetic construct
  misc_feature 1..19: note = siRNA antisense sequence
  source 1..19: mol_type = other RNA
gcctccagctcttctagga

SEQ ID NO: 28916 - RNA, 19 nt, synthetic construct
  misc_feature 1..19: note = siRNA sense sequence
  source 1..19: mol_type = other RNA
cctagaagagctggaggct

SEQ ID NO: 28917 - RNA, 19 nt, synthetic construct
  misc_feature 1..19: note = siRNA antisense sequence
  source 1..19: mol_type = other RNA
agcctccagctcttctagg

SEQ ID NO: 28918 - RNA, 19 nt, synthetic construct
  misc_feature 1..19: note = siRNA sense sequence
  source 1..19: mol_type = other RNA
ctagaagagctggaggctg

SEQ ID NO: 28919 - RNA, 19 nt, synthetic construct
  misc_feature 1..19: note = siRNA antisense sequence
  source 1..19: mol_type = other RNA
cagcctccagctcttctag

SEQ ID NO: 28920 - RNA, 19 nt, synthetic construct
  misc_feature 1..19: note = siRNA sense sequence
  source 1..19: mol_type = other RNA
tagaagagctggaggctga

SEQ ID NO: 28921 - RNA, 19 nt, synthetic construct
  misc_feature 1..19: note = siRNA antisense sequence
  source 1..19: mol_type = other RNA
tcagcctccagctcttcta

SEQ ID NO: 28922 - RNA, 19 nt, synthetic construct
  misc_feature 1..19: note = siRNA sense sequence
  source 1..19: mol_type = other RNA
agaagagctggaggctgag

SEQ ID NO: 28923 - RNA, 19 nt, synthetic construct
  misc_feature 1..19: note = siRNA antisense sequence
  source 1..19: mol_type = other RNA
ctcagcctccagctcttct

SEQ ID NO: 28924 - RNA, 19 nt, synthetic construct
  misc_feature 1..19: note = siRNA sense sequence
  source 1..19: mol_type = other RNA
gagctggaggctgagtatc

SEQ ID NO: 28925 - RNA, 19 nt, synthetic construct
  misc_feature 1..19: note = siRNA antisense sequence
  source 1..19: mol_type = other RNA
gatactcagcctccagctc

SEQ ID NO: 28926 - RNA, 19 nt, synthetic construct
  misc_feature 1..19: note = siRNA sense sequence
  source 1..19: mol_type = other RNA
agctggaggctgagtatcc

SEQ ID NO: 28927 - RNA, 19 nt, synthetic construct
  misc_feature 1..19: note = siRNA antisense sequence
  source 1..19: mol_type = other RNA
ggatactcagcctccagct

SEQ ID NO: 28928 - RNA, 19 nt, synthetic construct
  misc_feature 1..19: note = siRNA sense sequence
  source 1..19: mol_type = other RNA
gggatatgggacacttagg

SEQ ID NO: 28929 - RNA, 19 nt, synthetic construct
  misc_feature 1..19: note = siRNA antisense sequence
  source 1..19: mol_type = other RNA
cctaagtgtcccatatccc

SEQ ID NO: 28930 - RNA, 19 nt, synthetic construct
  misc_feature 1..19: note = siRNA sense sequence
  source 1..19: mol_type = other RNA
ggatatgggacacttaggt

SEQ ID NO: 28931 - RNA, 19 nt, synthetic construct
  misc_feature 1..19: note = siRNA antisense sequence
  source 1..19: mol_type = other RNA
acctaagtgtcccatatcc

SEQ ID NO: 28932 - RNA, 19 nt, synthetic construct
  misc_feature 1..19: note = siRNA sense sequence
  source 1..19: mol_type = other RNA
gatatgggacacttaggtg

SEQ ID NO: 28933 - RNA, 19 nt, synthetic construct
  misc_feature 1..19: note = siRNA antisense sequence
  source 1..19: mol_type = other RNA
cacctaagtgtcccatatc

SEQ ID NO: 28934 - RNA, 19 nt, synthetic construct
  misc_feature 1..19: note = siRNA sense sequence
  source 1..19: mol_type = other RNA
atatgggacacttaggtgg

SEQ ID NO: 28935 - RNA, 19 nt, synthetic construct
  misc_feature 1..19: note = siRNA antisense sequence
  source 1..19: mol_type = other RNA
ccacctaagtgtcccatat

SEQ ID NO: 28936 - RNA, 19 nt, synthetic construct
  misc_feature 1..19: note = siRNA sense sequence
  source 1..19: mol_type = other RNA
tatgggacacttaggtggc

SEQ ID NO: 28937 - RNA, 19 nt, synthetic construct
  misc_feature 1..19: note = siRNA antisense sequence
  source 1..19: mol_type = other RNA
gccacctaagtgtcccata

SEQ ID NO: 28938 - RNA, 19 nt, synthetic construct
  misc_feature 1..19: note = siRNA sense sequence
  source 1..19: mol_type = other RNA
atgggacacttaggtggct

SEQ ID NO: 28939 - RNA, 19 nt, synthetic construct
  misc_feature 1..19: note = siRNA antisense sequence
  source 1..19: mol_type = other RNA
agccacctaagtgtcccat

SEQ ID NO: 28940 - RNA, 19 nt, synthetic construct
  misc_feature 1..19: note = siRNA sense sequence
  source 1..19: mol_type = other RNA
tgggacacttaggtggctc

SEQ ID NO: 28941 - RNA, 19 nt, synthetic construct
  misc_feature 1..19: note = siRNA antisense sequence
  source 1..19: mol_type = other RNA
gagccacctaagtgtccca

SEQ ID NO: 28942 - RNA, 19 nt, synthetic construct
  misc_feature 1..19: note = siRNA sense sequence
  source 1..19: mol_type = other RNA
aagtggcccaagcctgttg

SEQ ID NO: 28943 - RNA, 19 nt, synthetic construct
  misc_feature 1..19: note = siRNA antisense sequence
  source 1..19: mol_type = other RNA
caacaggcttgggccactt

SEQ ID NO: 28944 - RNA, 19 nt, synthetic construct
  misc_feature 1..19: note = siRNA sense sequence
  source 1..19: mol_type = other RNA
agtggcccaagcctgttgc

SEQ ID NO: 28945 - RNA, 19 nt, synthetic construct
  misc_feature 1..19: note = siRNA antisense sequence
  source 1..19: mol_type = other RNA
gcaacaggcttgggccact

SEQ ID NO: 28946 - RNA, 19 nt, synthetic construct
  misc_feature 1..19: note = siRNA sense sequence
  source 1..19: mol_type = other RNA
gtggcccaagcctgttgct

SEQ ID NO: 28947 - RNA, 19 nt, synthetic construct
  misc_feature 1..19: note = siRNA antisense sequence
  source 1..19: mol_type = other RNA
agcaacaggcttgggccac

SEQ ID NO: 28948 - RNA, 19 nt, synthetic construct
  misc_feature 1..19: note = siRNA sense sequence
  source 1..19: mol_type = other RNA
tggcccaagcctgttgctg

SEQ ID NO: 28949 - RNA, 19 nt, synthetic construct
  misc_feature 1..19: note = siRNA antisense sequence
  source 1..19: mol_type = other RNA
cagcaacaggcttgggcca

SEQ ID NO: 28950 - RNA, 19 nt, synthetic construct
  misc_feature 1..19: note = siRNA sense sequence
  source 1..19: mol_type = other RNA
ggcccaagcctgttgctga

SEQ ID NO: 28951 - RNA, 19 nt, synthetic construct
  misc_feature 1..19: note = siRNA antisense sequence
  source 1..19: mol_type = other RNA
tcagcaacaggcttgggcc

SEQ ID NO: 28952 - RNA, 19 nt, synthetic construct
  misc_feature 1..19: note = siRNA sense sequence
  source 1..19: mol_type = other RNA
gcccaagcctgttgctgac

SEQ ID NO: 28953 - RNA, 19 nt, synthetic construct
  misc_feature 1..19: note = siRNA antisense sequence
  source 1..19: mol_type = other RNA
gtcagcaacaggcttgggc

SEQ ID NO: 28954 - RNA, 19 nt, synthetic construct
  misc_feature 1..19: note = siRNA sense sequence
  source 1..19: mol_type = other RNA
cccaagcctgttgctgact

SEQ ID NO: 28955 - RNA, 19 nt, synthetic construct
  misc_feature 1..19: note = siRNA antisense sequence
  source 1..19: mol_type = other RNA
agtcagcaacaggcttggg

SEQ ID NO: 28956 - RNA, 19 nt, synthetic construct
  misc_feature 1..19: note = siRNA sense sequence
  source 1..19: mol_type = other RNA
ccaagcctgttgctgactg

SEQ ID NO: 28957 - RNA, 19 nt, synthetic construct
  misc_feature 1..19: note = siRNA antisense sequence
  source 1..19: mol_type = other RNA
cagtcagcaacaggcttgg

SEQ ID NO: 28958 - RNA, 19 nt, synthetic construct
  misc_feature 1..19: note = siRNA sense sequence
  source 1..19: mol_type = other RNA
caagcctgttgctgactgg

SEQ ID NO: 28959 - RNA, 19 nt, synthetic construct
  misc_feature 1..19: note = siRNA antisense sequence
  source 1..19: mol_type = other RNA
ccagtcagcaacaggcttg

SEQ ID NO: 28960 - RNA, 19 nt, synthetic construct
  misc_feature 1..19: note = siRNA sense sequence
  source 1..19: mol_type = other RNA
cctgttgctgactggaagt

SEQ ID NO: 28961 - RNA, 19 nt, synthetic construct
  misc_feature 1..19: note = siRNA antisense sequence
  source 1..19: mol_type = other RNA
acttccagtcagcaacagg

SEQ ID NO: 28962 - RNA, 19 nt, synthetic construct
  misc_feature 1..19: note = siRNA sense sequence
  source 1..19: mol_type = other RNA
tacccttgacactgtctca

SEQ ID NO: 28963 - RNA, 19 nt, synthetic construct
  misc_feature 1..19: note = siRNA antisense sequence
  source 1..19: mol_type = other RNA
tgagacagtgtcaagggta

SEQ ID NO: 28964 - RNA, 19 nt, synthetic construct
  misc_feature 1..19: note = siRNA sense sequence
  source 1..19: mol_type = other RNA
acccttgacactgtctcac

SEQ ID NO: 28965 - RNA, 19 nt, synthetic construct
  misc_feature 1..19: note = siRNA antisense sequence
  source 1..19: mol_type = other RNA
gtgagacagtgtcaagggt

SEQ ID NO: 28966 - RNA, 19 nt, synthetic construct
  misc_feature 1..19: note = siRNA sense sequence
  source 1..19: mol_type = other RNA
cccttgacactgtctcacc

SEQ ID NO: 28967 - RNA, 19 nt, synthetic construct
  misc_feature 1..19: note = siRNA antisense sequence
  source 1..19: mol_type = other RNA
ggtgagacagtgtcaaggg

SEQ ID NO: 28968 - RNA, 19 nt, synthetic construct
  misc_feature 1..19: note = siRNA sense sequence
  source 1..19: mol_type = other RNA
ccttgacactgtctcaccc

SEQ ID NO: 28969 - RNA, 19 nt, synthetic construct
  misc_feature 1..19: note = siRNA antisense sequence
  source 1..19: mol_type = other RNA
gggtgagacagtgtcaagg

SEQ ID NO: 28970 - RNA, 19 nt, synthetic construct
  misc_feature 1..19: note = siRNA sense sequence
  source 1..19: mol_type = other RNA
cttgacactgtctcaccca

SEQ ID NO: 28971 - RNA, 19 nt, synthetic construct
  misc_feature 1..19: note = siRNA antisense sequence
  source 1..19: mol_type = other RNA
tgggtgagacagtgtcaag

SEQ ID NO: 28972 - RNA, 19 nt, synthetic construct
  misc_feature 1..19: note = siRNA sense sequence
  source 1..19: mol_type = other RNA
ttgacactgtctcacccag

SEQ ID NO: 28973 - RNA, 19 nt, synthetic construct
  misc_feature 1..19: note = siRNA antisense sequence
  source 1..19: mol_type = other RNA
ctgggtgagacagtgtcaa

SEQ ID NO: 28974 - RNA, 19 nt, synthetic construct
  misc_feature 1..19: note = siRNA sense sequence
  source 1..19: mol_type = other RNA
caagagctgcagaaggcct

SEQ ID NO: 28975 - RNA, 19 nt, synthetic construct
  misc_feature 1..19: note = siRNA antisense sequence
  source 1..19: mol_type = other RNA
aggccttctgcagctcttg

SEQ ID NO: 28976 - RNA, 19 nt, synthetic construct
  misc_feature 1..19: note = siRNA sense sequence
  source 1..19: mol_type = other RNA
aagagctgcagaaggccta

SEQ ID NO: 28977 - RNA, 19 nt, synthetic construct
  misc_feature 1..19: note = siRNA antisense sequence
  source 1..19: mol_type = other RNA
taggccttctgcagctctt

SEQ ID NO: 28978 - RNA, 19 nt, synthetic construct
  misc_feature 1..19: note = siRNA sense sequence
  source 1..19: mol_type = other RNA
agagctgcagaaggcctat

SEQ ID NO: 28979 - RNA, 19 nt, synthetic construct
  misc_feature 1..19: note = siRNA antisense sequence
  source 1..19: mol_type = other RNA
ataggccttctgcagctct

SEQ ID NO: 28980 - RNA, 19 nt, synthetic construct
  misc_feature 1..19: note = siRNA sense sequence
  source 1..19: mol_type = other RNA
gagctgcagaaggcctatt

SEQ ID NO: 28981 - RNA, 19 nt, synthetic construct
  misc_feature 1..19: note = siRNA antisense sequence
  source 1..19: mol_type = other RNA
aataggccttctgcagctc

SEQ ID NO: 28982 - RNA, 19 nt, synthetic construct
  misc_feature 1..19: note = siRNA sense sequence
  source 1..19: mol_type = other RNA
agctgcagaaggcctatta

SEQ ID NO: 28983 - RNA, 19 nt, synthetic construct
  misc_feature 1..19: note = siRNA antisense sequence
  source 1..19: mol_type = other RNA
taataggccttctgcagct

SEQ ID NO: 28984 - RNA, 19 nt, synthetic construct
  misc_feature 1..19: note = siRNA sense sequence
  source 1..19: mol_type = other RNA
gctgcagaaggcctattac

SEQ ID NO: 28985 - RNA, 19 nt, synthetic construct
  misc_feature 1..19: note = siRNA antisense sequence
  source 1..19: mol_type = other RNA
gtaataggccttctgcagc

SEQ ID NO: 28986 - RNA, 19 nt, synthetic construct
  misc_feature 1..19: note = siRNA sense sequence
  source 1..19: mol_type = other RNA
ctgcagaaggcctattact

SEQ ID NO: 28987 - RNA, 19 nt, synthetic construct
  misc_feature 1..19: note = siRNA antisense sequence
  source 1..19: mol_type = other RNA
agtaataggccttctgcag

SEQ ID NO: 28988 - RNA, 19 nt, synthetic construct
  misc_feature 1..19: note = siRNA sense sequence
  source 1..19: mol_type = other RNA
tgcagaaggcctattactt

SEQ ID NO: 28989 - RNA, 19 nt, synthetic construct
  misc_feature 1..19: note = siRNA antisense sequence
  source 1..19: mol_type = other RNA
aagtaataggccttctgca

SEQ ID NO: 28990 - RNA, 19 nt, synthetic construct
  misc_feature 1..19: note = siRNA sense sequence
  source 1..19: mol_type = other RNA
ttacttctaatctttctgc

SEQ ID NO: 28991 - RNA, 19 nt, synthetic construct
  misc_feature 1..19: note = siRNA antisense sequence
  source 1..19: mol_type = other RNA
gcagaaagattagaagtaa

SEQ ID NO: 28992 - RNA, 19 nt, synthetic construct
  misc_feature 1..19: note = siRNA sense sequence
  source 1..19: mol_type = other RNA
acttctaatctttctgctt

SEQ ID NO: 28993 - RNA, 19 nt, synthetic construct
  misc_feature 1..19: note = siRNA antisense sequence
  source 1..19: mol_type = other RNA
aagcagaaagattagaagt

SEQ ID NO: 28994 - RNA, 19 nt, synthetic construct
  misc_feature 1..19: note = siRNA sense sequence
  source 1..19: mol_type = other RNA
cttctaatctttctgcttc

SEQ ID NO: 28995 - RNA, 19 nt, synthetic construct
  misc_feature 1..19: note = siRNA antisense sequence
  source 1..19: mol_type = other RNA
gaagcagaaagattagaag

SEQ ID NO: 28996 - RNA, 19 nt, synthetic construct
  misc_feature 1..19: note = siRNA sense sequence
  source 1..19: mol_type = other RNA
ttctaatctttctgcttcg

SEQ ID NO: 28997 - RNA, 19 nt, synthetic construct
  misc_feature 1..19: note = siRNA antisense sequence
  source 1..19: mol_type = other RNA
cgaagcagaaagattagaa

SEQ ID NO: 28998 - RNA, 19 nt, synthetic construct
  misc_feature 1..19: note = siRNA sense sequence
  source 1..19: mol_type = other RNA
tctaatctttctgcttcgt

SEQ ID NO: 28999 - RNA, 19 nt, synthetic construct
  misc_feature 1..19: note = siRNA antisense sequence
  source 1..19: mol_type = other RNA
acgaagcagaaagattaga

SEQ ID NO: 29000 - RNA, 19 nt, synthetic construct
  misc_feature 1..19: note = siRNA sense sequence
  source 1..19: mol_type = other RNA
ctaatctttctgcttcgta

SEQ ID NO: 29001 - RNA, 19 nt, synthetic construct
  misc_feature 1..19: note = siRNA antisense sequence
  source 1..19: mol_type = other RNA
tacgaagcagaaagattag

SEQ ID NO: 29002 - RNA, 19 nt, synthetic construct
  misc_feature 1..19: note = siRNA sense sequence
  source 1..19: mol_type = other RNA
taatctttctgcttcgtat

SEQ ID NO: 29003 - RNA, 19 nt, synthetic construct
  misc_feature 1..19: note = siRNA antisense sequence
  source 1..19: mol_type = other RNA
atacgaagcagaaagatta

SEQ ID NO: 29004 - RNA, 19 nt, synthetic construct
  misc_feature 1..19: note = siRNA sense sequence
  source 1..19: mol_type = other RNA
aatctttctgcttcgtatg

SEQ ID NO: 29005 - RNA, 19 nt, synthetic construct
  misc_feature 1..19: note = siRNA antisense sequence
  source 1..19: mol_type = other RNA
catacgaagcagaaagatt

SEQ ID NO: 29006 - RNA, 19 nt, synthetic construct
  misc_feature 1..19: note = siRNA sense sequence
  source 1..19: mol_type = other RNA
atctttctgcttcgtatga

SEQ ID NO: 29007 - RNA, 19 nt, synthetic construct
  misc_feature 1..19: note = siRNA antisense sequence
  source 1..19: mol_type = other RNA
tcatacgaagcagaaagat

SEQ ID NO: 29008 - RNA, 19 nt, synthetic construct
  misc_feature 1..19: note = siRNA sense sequence
  source 1..19: mol_type = other RNA
ttctgcttcgtatgatcgg

SEQ ID NO: 29009 - RNA, 19 nt, synthetic construct
  misc_feature 1..19: note = siRNA antisense sequence
  source 1..19: mol_type = other RNA
ccgatcatacgaagcagaa

SEQ ID NO: 29010 - RNA, 19 nt, synthetic construct
  misc_feature 1..19: note = siRNA sense sequence
  source 1..19: mol_type = other RNA
tctgcttcgtatgatcggt

SEQ ID NO: 29011 - RNA, 19 nt, synthetic construct
  misc_feature 1..19: note = siRNA antisense sequence
  source 1..19: mol_type = other RNA
accgatcatacgaagcaga

SEQ ID NO: 29012 - RNA, 19 nt, synthetic construct
  misc_feature 1..19: note = siRNA sense sequence
  source 1..19: mol_type = other RNA
ctgcttcgtatgatcggta

SEQ ID NO: 29013 - RNA, 19 nt, synthetic construct
  misc_feature 1..19: note = siRNA antisense sequence
  source 1..19: mol_type = other RNA
taccgatcatacgaagcag

SEQ ID NO: 29014 - RNA, 19 nt, synthetic construct
  misc_feature 1..19: note = siRNA sense sequence
  source 1..19: mol_type = other RNA
tgcttcgtatgatcggtaa

SEQ ID NO: 29015 - RNA, 19 nt, synthetic construct
  misc_feature 1..19: note = siRNA antisense sequence
  source 1..19: mol_type = other RNA
ttaccgatcatacgaagca

SEQ ID NO: 29016 - RNA, 19 nt, synthetic construct
  misc_feature 1..19: note = siRNA sense sequence
  source 1..19: mol_type = other RNA
gcttcgtatgatcggtaat

SEQ ID NO: 29017 - RNA, 19 nt, synthetic construct
  misc_feature 1..19: note = siRNA antisense sequence
  source 1..19: mol_type = other RNA
attaccgatcatacgaagc

SEQ ID NO: 29018 - RNA, 19 nt, synthetic construct
  misc_feature 1..19: note = siRNA sense sequence
  source 1..19: mol_type = other RNA
cttcgtatgatcggtaatt

SEQ ID NO: 29019 - RNA, 19 nt, synthetic construct
  misc_feature 1..19: note = siRNA antisense sequence
  source 1..19: mol_type = other RNA
aattaccgatcatacgaag

SEQ ID NO: 29020 - RNA, 19 nt, synthetic construct
  misc_feature 1..19: note = siRNA sense sequence
  source 1..19: mol_type = other RNA
ttcgtatgatcggtaatta

SEQ ID NO: 29021 - RNA, 19 nt, synthetic construct
  misc_feature 1..19: note = siRNA antisense sequence
  source 1..19: mol_type = other RNA
taattaccgatcatacgaa

SEQ ID NO: 29022 - RNA, 19 nt, synthetic construct
  misc_feature 1..19: note = siRNA sense sequence
  source 1..19: mol_type = other RNA
cacataatgaagatggttc

SEQ ID NO: 29023 - RNA, 19 nt, synthetic construct
  misc_feature 1..19: note = siRNA antisense sequence
  source 1..19: mol_type = other RNA
gaaccatcttcattatgtg

SEQ ID NO: 29024 - RNA, 19 nt, synthetic construct
  misc_feature 1..19: note = siRNA sense sequence
  source 1..19: mol_type = other RNA
atggttcatcactgctttt

SEQ ID NO: 29025 - RNA, 19 nt, synthetic construct
  misc_feature 1..19: note = siRNA antisense sequence
  source 1..19: mol_type = other RNA
aaaagcagtgatgaaccat

SEQ ID NO: 29026 - RNA, 19 nt, synthetic construct
  misc_feature 1..19: note = siRNA sense sequence
  source 1..19: mol_type = other RNA
aactagccacagtatatta

SEQ ID NO: 29027 - RNA, 19 nt, synthetic construct
  misc_feature 1..19: note = siRNA antisense sequence
  source 1..19: mol_type = other RNA
taatatactgtggctagtt

SEQ ID NO: 29028 - RNA, 19 nt, synthetic construct
  misc_feature 1..19: note = siRNA sense sequence
  source 1..19: mol_type = other RNA
actagccacagtatattag

SEQ ID NO: 29029 - RNA, 19 nt, synthetic construct
  misc_feature 1..19: note = siRNA antisense sequence
  source 1..19: mol_type = other RNA
ctaatatactgtggctagt

SEQ ID NO: 29030 - RNA, 19 nt, synthetic construct
  misc_feature 1..19: note = siRNA sense sequence
  source 1..19: mol_type = other RNA
ctagccacagtatattagg

SEQ ID NO: 29031 - RNA, 19 nt, synthetic construct
  misc_feature 1..19: note = siRNA antisense sequence
  source 1..19: mol_type = other RNA
cctaatatactgtggctag

SEQ ID NO: 29032 - RNA, 19 nt, synthetic construct
  misc_feature 1..19: note = siRNA sense sequence
  source 1..19: mol_type = other RNA
tagccacagtatattaggc

SEQ ID NO: 29033 - RNA, 19 nt, synthetic construct
  misc_feature 1..19: note = siRNA antisense sequence
  source 1..19: mol_type = other RNA
gcctaatatactgtggcta

SEQ ID NO: 29034 - RNA, 19 nt, synthetic construct
  misc_feature 1..19: note = siRNA sense sequence
  source 1..19: mol_type = other RNA
agccacagtatattaggca

SEQ ID NO: 29035 - RNA, 19 nt, synthetic construct
  misc_feature 1..19: note = siRNA antisense sequence
  source 1..19: mol_type = other RNA
tgcctaatatactgtggct

SEQ ID NO: 29036 - RNA, 19 nt, synthetic construct
  misc_feature 1..19: note = siRNA sense sequence
  source 1..19: mol_type = other RNA
gccacagtatattaggcaa

SEQ ID NO: 29037 - RNA, 19 nt, synthetic construct
  misc_feature 1..19: note = siRNA antisense sequence
  source 1..19: mol_type = other RNA
ttgcctaatatactgtggc

SEQ ID NO: 29038 - RNA, 19 nt, synthetic construct
  misc_feature 1..19: note = siRNA sense sequence
  source 1..19: mol_type = other RNA
ccacagtatattaggcaaa

SEQ ID NO: 29039 - RNA, 19 nt, synthetic construct
  misc_feature 1..19: note = siRNA antisense sequence
  source 1..19: mol_type = other RNA
tttgcctaatatactgtgg

SEQ ID NO: 29040 - RNA, 19 nt, synthetic construct
  misc_feature 1..19: note = siRNA sense sequence
  source 1..19: mol_type = other RNA
cacagtatattaggcaaaa

SEQ ID NO: 29041 - RNA, 19 nt, synthetic construct
  misc_feature 1..19: note = siRNA antisense sequence
  source 1..19: mol_type = other RNA
ttttgcctaatatactgtg

SEQ ID NO: 29042 - RNA, 19 nt, synthetic construct
  misc_feature 1..19: note = siRNA sense sequence
  source 1..19: mol_type = other RNA
aggcaaaatatttcaactg

SEQ ID NO: 29043 - RNA, 19 nt, synthetic construct
  misc_feature 1..19: note = siRNA antisense sequence
  source 1..19: mol_type = other RNA
cagttgaaatattttgcct

SEQ ID NO: 29044 - RNA, 19 nt, synthetic construct
  misc_feature 1..19: note = siRNA sense sequence
  source 1..19: mol_type = other RNA
ggcaaaatatttcaactgc

SEQ ID NO: 29045 - RNA, 19 nt, synthetic construct
  misc_feature 1..19: note = siRNA antisense sequence
  source 1..19: mol_type = other RNA
gcagttgaaatattttgcc

SEQ ID NO: 29046 - RNA, 19 nt, synthetic construct
  misc_feature 1..19: note = siRNA sense sequence
  source 1..19: mol_type = other RNA
gcaaaatatttcaactgct

SEQ ID NO: 29047 - RNA, 19 nt, synthetic construct
  misc_feature 1..19: note = siRNA antisense sequence
  source 1..19: mol_type = other RNA
agcagttgaaatattttgc

SEQ ID NO: 29048 - RNA, 19 nt, synthetic construct
  misc_feature 1..19: note = siRNA sense sequence
  source 1..19: mol_type = other RNA
aaatatttcaactgcttgg

SEQ ID NO: 29049 - RNA, 19 nt, synthetic construct
  misc_feature 1..19: note = siRNA antisense sequence
  source 1..19: mol_type = other RNA
ccaagcagttgaaatattt

SEQ ID NO: 29050 - RNA, 19 nt, synthetic construct
  misc_feature 1..19: note = siRNA sense sequence
  source 1..19: mol_type = other RNA
aatatttcaactgcttggg

SEQ ID NO: 29051 - RNA, 19 nt, synthetic construct
  misc_feature 1..19: note = siRNA antisense sequence
  source 1..19: mol_type = other RNA
cccaagcagttgaaatatt

SEQ ID NO: 29052 - RNA, 19 nt, synthetic construct
  misc_feature 1..19: note = siRNA sense sequence
  source 1..19: mol_type = other RNA
atatttcaactgcttgggc

SEQ ID NO: 29053 - RNA, 19 nt, synthetic construct
  misc_feature 1..19: note = siRNA antisense sequence
  source 1..19: mol_type = other RNA
gcccaagcagttgaaatat

SEQ ID NO: 29054 - RNA, 19 nt, synthetic construct
  misc_feature 1..19: note = siRNA sense sequence
  source 1..19: mol_type = other RNA
tatttcaactgcttgggca

SEQ ID NO: 29055 - RNA, 19 nt, synthetic construct
  misc_feature 1..19: note = siRNA antisense sequence
  source 1..19: mol_type = other RNA
tgcccaagcagttgaaata

SEQ ID NO: 29056 - RNA, 19 nt, synthetic construct
  misc_feature 1..19: note = siRNA sense sequence
  source 1..19: mol_type = other RNA
atttcaactgcttgggcat

SEQ ID NO: 29057 - RNA, 19 nt, synthetic construct
  misc_feature 1..19: note = siRNA antisense sequence
  source 1..19: mol_type = other RNA
atgcccaagcagttgaaat

SEQ ID NO: 29058 - RNA, 19 nt, synthetic construct
  misc_feature 1..19: note = siRNA sense sequence
  source 1..19: mol_type = other RNA
tttcaactgcttgggcatc

SEQ ID NO: 29059 - RNA, 19 nt, synthetic construct
  misc_feature 1..19: note = siRNA antisense sequence
  source 1..19: mol_type = other RNA
gatgcccaagcagttgaaa

SEQ ID NO: 29060 - RNA, 19 nt, synthetic construct
  misc_feature 1..19: note = siRNA sense sequence
  source 1..19: mol_type = other RNA
ttcaactgcttgggcatca

SEQ ID NO: 29061 - RNA, 19 nt, synthetic construct
  misc_feature 1..19: note = siRNA antisense sequence
  source 1..19: mol_type = other RNA
tgatgcccaagcagttgaa

SEQ ID NO: 29062 - RNA, 19 nt, synthetic construct
  misc_feature 1..19: note = siRNA sense sequence
  source 1..19: mol_type = other RNA
ggcatcagtgttctcatca

SEQ ID NO: 29063 - RNA, 19 nt, synthetic construct
  misc_feature 1..19: note = siRNA antisense sequence
  source 1..19: mol_type = other RNA
tgatgagaacactgatgcc

SEQ ID NO: 29064 - RNA, 19 nt, synthetic construct
  misc_feature 1..19: note = siRNA sense sequence
  source 1..19: mol_type = other RNA
gcatcagtgttctcatcat

SEQ ID NO: 29065 - RNA, 19 nt, synthetic construct
  misc_feature 1..19: note = siRNA antisense sequence
  source 1..19: mol_type = other RNA
atgatgagaacactgatgc

SEQ ID NO: 29066 - RNA, 19 nt, synthetic construct
  misc_feature 1..19: note = siRNA sense sequence
  source 1..19: mol_type = other RNA
atcagtgttctcatcattt

SEQ ID NO: 29067 - RNA, 19 nt, synthetic construct
  misc_feature 1..19: note = siRNA antisense sequence
  source 1..19: mol_type = other RNA
aaatgatgagaacactgat

SEQ ID NO: 29068 - RNA, 19 nt, synthetic construct
  misc_feature 1..19: note = siRNA sense sequence
  source 1..19: mol_type = other RNA
tcagtgttctcatcatttg

SEQ ID NO: 29069 - RNA, 19 nt, synthetic construct
  misc_feature 1..19: note = siRNA antisense sequence
  source 1..19: mol_type = other RNA
caaatgatgagaacactga

SEQ ID NO: 29070 - RNA, 19 nt, synthetic construct
  misc_feature 1..19: note = siRNA sense sequence
  source 1..19: mol_type = other RNA
cagtgttctcatcatttga

SEQ ID NO: 29071 - RNA, 19 nt, synthetic construct
  misc_feature 1..19: note = siRNA antisense sequence
  source 1..19: mol_type = other RNA
tcaaatgatgagaacactg

SEQ ID NO: 29072 - RNA, 19 nt, synthetic construct
  misc_feature 1..19: note = siRNA sense sequence
  source 1..19: mol_type = other RNA
tcatcatttgaggacactg

SEQ ID NO: 29073 - RNA, 19 nt, synthetic construct
  misc_feature 1..19: note = siRNA antisense sequence
  source 1..19: mol_type = other RNA
cagtgtcctcaaatgatga

SEQ ID NO: 29074 - RNA, 19 nt, synthetic construct
  misc_feature 1..19: note = siRNA sense sequence
  source 1..19: mol_type = other RNA
catcatttgaggacactgt

SEQ ID NO: 29075 - RNA, 19 nt, synthetic construct
  misc_feature 1..19: note = siRNA antisense sequence
  source 1..19: mol_type = other RNA
acagtgtcctcaaatgatg

SEQ ID NO: 29076 - RNA, 19 nt, synthetic construct
  misc_feature 1..19: note = siRNA sense sequence
  source 1..19: mol_type = other RNA
atcatttgaggacactgtc

SEQ ID NO: 29077 - RNA, 19 nt, synthetic construct
  misc_feature 1..19: note = siRNA antisense sequence
  source 1..19: mol_type = other RNA
gacagtgtcctcaaatgat

SEQ ID NO: 29078 - RNA, 19 nt, synthetic construct
  misc_feature 1..19: note = siRNA sense sequence
  source 1..19: mol_type = other RNA
tcatttgaggacactgtct

SEQ ID NO: 29079 - RNA, 19 nt, synthetic construct
  misc_feature 1..19: note = siRNA antisense sequence
  source 1..19: mol_type = other RNA
agacagtgtcctcaaatga

SEQ ID NO: 29080 - RNA, 19 nt, synthetic construct
  misc_feature 1..19: note = siRNA sense sequence
  source 1..19: mol_type = other RNA
catttgaggacactgtctc

SEQ ID NO: 29081 - RNA, 19 nt, synthetic construct
  misc_feature 1..19: note = siRNA antisense sequence
  source 1..19: mol_type = other RNA
gagacagtgtcctcaaatg

SEQ ID NO: 29082 - RNA, 19 nt, synthetic construct
  misc_feature 1..19: note = siRNA sense sequence
  source 1..19: mol_type = other RNA
gaggacactgtctcattag

SEQ ID NO: 29083 - RNA, 19 nt, synthetic construct
  misc_feature 1..19: note = siRNA antisense sequence
  source 1..19: mol_type = other RNA
ctaatgagacagtgtcctc

SEQ ID NO: 29084 - RNA, 19 nt, synthetic construct
  misc_feature 1..19: note = siRNA sense sequence
  source 1..19: mol_type = other RNA
aggacactgtctcattaga

SEQ ID NO: 29085 - RNA, 19 nt, synthetic construct
  misc_feature 1..19: note = siRNA antisense sequence
  source 1..19: mol_type = other RNA
tctaatgagacagtgtcct

SEQ ID NO: 29086 - RNA, 19 nt, synthetic construct
  misc_feature 1..19: note = siRNA sense sequence
  source 1..19: mol_type = other RNA
ggacactgtctcattagat

SEQ ID NO: 29087 - RNA, 19 nt, synthetic construct
  misc_feature 1..19: note = siRNA antisense sequence
  source 1..19: mol_type = other RNA
atctaatgagacagtgtcc

SEQ ID NO: 29088 - RNA, 19 nt, synthetic construct
  misc_feature 1..19: note = siRNA sense sequence
  source 1..19: mol_type = other RNA
gacactgtctcattagatg

SEQ ID NO: 29089 - RNA, 19 nt, synthetic construct
  misc_feature 1..19: note = siRNA antisense sequence
  source 1..19: mol_type = other RNA
catctaatgagacagtgtc

SEQ ID NO: 29090 - RNA, 19 nt, synthetic construct
  misc_feature 1..19: note = siRNA sense sequence
  source 1..19: mol_type = other RNA
acactgtctcattagatgg

SEQ ID NO: 29091 - RNA, 19 nt, synthetic construct
  misc_feature 1..19: note = siRNA antisense sequence
  source 1..19: mol_type = other RNA
ccatctaatgagacagtgt

SEQ ID NO: 29092 - RNA, 19 nt, synthetic construct
  misc_feature 1..19: note = siRNA sense sequence
  source 1..19: mol_type = other RNA
cactgtctcattagatggt

SEQ ID NO: 29093 - RNA, 19 nt, synthetic construct
  misc_feature 1..19: note = siRNA antisense sequence
  source 1..19: mol_type = other RNA
accatctaatgagacagtg

SEQ ID NO: 29094 - RNA, 19 nt, synthetic construct
  misc_feature 1..19: note = siRNA sense sequence
  source 1..19: mol_type = other RNA
actgtctcattagatggtc

SEQ ID NO: 29095 - RNA, 19 nt, synthetic construct
  misc_feature 1..19: note = siRNA antisense sequence
  source 1..19: mol_type = other RNA
gaccatctaatgagacagt

SEQ ID NO: 29096 - RNA, 19 nt, synthetic construct
  misc_feature 1..19: note = siRNA sense sequence
  source 1..19: mol_type = other RNA
ctgtctcattagatggtcg

SEQ ID NO: 29097 - RNA, 19 nt, synthetic construct
  misc_feature 1..19: note = siRNA antisense sequence
  source 1..19: mol_type = other RNA
cgaccatctaatgagacag

SEQ ID NO: 29098 - RNA, 19 nt, synthetic construct
  misc_feature 1..19: note = siRNA sense sequence
  source 1..19: mol_type = other RNA
tgtctcattagatggtcga

SEQ ID NO: 29099 - RNA, 19 nt, synthetic construct
  misc_feature 1..19: note = siRNA antisense sequence
  source 1..19: mol_type = other RNA
tcgaccatctaatgagaca

SEQ ID NO: 29100 - RNA, 19 nt, synthetic construct
  misc_feature 1..19: note = siRNA sense sequence
  source 1..19: mol_type = other RNA
gtctcattagatggtcgaa

SEQ ID NO: 29101 - RNA, 19 nt, synthetic construct
  misc_feature 1..19: note = siRNA antisense sequence
  source 1..19: mol_type = other RNA
ttcgaccatctaatgagac

SEQ ID NO: 29102 - RNA, 19 nt, synthetic construct
  misc_feature 1..19: note = siRNA sense sequence
  source 1..19: mol_type = other RNA
tctcattagatggtcgaat

SEQ ID NO: 29103 - RNA, 19 nt, synthetic construct
  misc_feature 1..19: note = siRNA antisense sequence
  source 1..19: mol_type = other RNA
attcgaccatctaatgaga

SEQ ID NO: 29104 - RNA, 19 nt, synthetic construct
  misc_feature 1..19: note = siRNA sense sequence
  source 1..19: mol_type = other RNA
ctcattagatggtcgaata

SEQ ID NO: 29105 - RNA, 19 nt, synthetic construct
  misc_feature 1..19: note = siRNA antisense sequence
  source 1..19: mol_type = other RNA
tattcgaccatctaatgag

SEQ ID NO: 29106 - RNA, 19 nt, synthetic construct
  misc_feature 1..19: note = siRNA sense sequence
  source 1..19: mol_type = other RNA
ttagatggtcgaataggga

SEQ ID NO: 29107 - RNA, 19 nt, synthetic construct
  misc_feature 1..19: note = siRNA antisense sequence
  source 1..19: mol_type = other RNA
tccctattcgaccatctaa

SEQ ID NO: 29108 - RNA, 19 nt, synthetic construct
  misc_feature 1..19: note = siRNA sense sequence
  source 1..19: mol_type = other RNA
tagatggtcgaatagggac

SEQ ID NO: 29109 - RNA, 19 nt, synthetic construct
  misc_feature 1..19: note = siRNA antisense sequence
  source 1..19: mol_type = other RNA
gtccctattcgaccatcta

SEQ ID NO: 29110 - RNA, 19 nt, synthetic construct
  misc_feature 1..19: note = siRNA sense sequence
  source 1..19: mol_type = other RNA
agatggtcgaatagggact

SEQ ID NO: 29111 - RNA, 19 nt, synthetic construct
  misc_feature 1..19: note = siRNA antisense sequence
  source 1..19: mol_type = other RNA
agtccctattcgaccatct

SEQ ID NO: 29112 - RNA, 19 nt, synthetic construct
  misc_feature 1..19: note = siRNA sense sequence
  source 1..19: mol_type = other RNA
gatggtcgaatagggactt

SEQ ID NO: 29113 - RNA, 19 nt, synthetic construct
  misc_feature 1..19: note = siRNA antisense sequence
  source 1..19: mol_type = other RNA
aagtccctattcgaccatc

SEQ ID NO: 29114 - RNA, 19 nt, synthetic construct
  misc_feature 1..19: note = siRNA sense sequence
  source 1..19: mol_type = other RNA
atggtcgaatagggacttt

SEQ ID NO: 29115 - RNA, 19 nt, synthetic construct
  misc_feature 1..19: note = siRNA antisense sequence
  source 1..19: mol_type = other RNA
aaagtccctattcgaccat

SEQ ID NO: 29116 - RNA, 19 nt, synthetic construct
  misc_feature 1..19: note = siRNA sense sequence
  source 1..19: mol_type = other RNA
tggtcgaatagggactttt

SEQ ID NO: 29117 - RNA, 19 nt, synthetic construct
  misc_feature 1..19: note = siRNA antisense sequence
  source 1..19: mol_type = other RNA
aaaagtccctattcgacca

SEQ ID NO: 29118 - RNA, 19 nt, synthetic construct
  misc_feature 1..19: note = siRNA sense sequence
  source 1..19: mol_type = other RNA
ggtcgaatagggacttttc

SEQ ID NO: 29119 - RNA, 19 nt, synthetic construct
  misc_feature 1..19: note = siRNA antisense sequence
  source 1..19: mol_type = other RNA
gaaaagtccctattcgacc

SEQ ID NO: 29120 - RNA, 19 nt, synthetic construct
  misc_feature 1..19: note = siRNA sense sequence
  source 1..19: mol_type = other RNA
gtcgaatagggacttttcc

SEQ ID NO: 29121 - RNA, 19 nt, synthetic construct
  misc_feature 1..19: note = siRNA antisense sequence
  source 1..19: mol_type = other RNA
ggaaaagtccctattcgac

SEQ ID NO: 29122 - RNA, 19 nt, synthetic construct
  misc_feature 1..19: note = siRNA sense sequence
  source 1..19: mol_type = other RNA
tcgaatagggacttttcca

SEQ ID NO: 29123 - RNA, 19 nt, synthetic construct
  misc_feature 1..19: note = siRNA antisense sequence
  source 1..19: mol_type = other RNA
tggaaaagtccctattcga

SEQ ID NO: 29124 - RNA, 19 nt, synthetic construct
  misc_feature 1..19: note = siRNA sense sequence
  source 1..19: mol_type = other RNA
cgaatagggacttttccag

SEQ ID NO: 29125 - RNA, 19 nt, synthetic construct
  misc_feature 1..19: note = siRNA antisense sequence
  source 1..19: mol_type = other RNA
ctggaaaagtccctattcg

SEQ ID NO: 29126 - RNA, 19 nt, synthetic construct
  misc_feature 1..19: note = siRNA sense sequence
  source 1..19: mol_type = other RNA
gaatagggacttttccagc

SEQ ID NO: 29127 - RNA, 19 nt, synthetic construct
  misc_feature 1..19: note = siRNA antisense sequence
  source 1..19: mol_type = other RNA
gctggaaaagtccctattc

SEQ ID NO: 29128 - RNA, 19 nt, synthetic construct
  misc_feature 1..19: note = siRNA sense sequence
  source 1..19: mol_type = other RNA
aatagggacttttccagct

SEQ ID NO: 29129 - RNA, 19 nt, synthetic construct
  misc_feature 1..19: note = siRNA antisense sequence
  source 1..19: mol_type = other RNA
agctggaaaagtccctatt

SEQ ID NO: 29130 - RNA, 19 nt, synthetic construct
  misc_feature 1..19: note = siRNA sense sequence
  source 1..19: mol_type = other RNA
atagggacttttccagcta

SEQ ID NO: 29131 - RNA, 19 nt, synthetic construct
  misc_feature 1..19: note = siRNA antisense sequence
  source 1..19: mol_type = other RNA
tagctggaaaagtccctat

SEQ ID NO: 29132 - RNA, 19 nt, synthetic construct
  misc_feature 1..19: note = siRNA sense sequence
  source 1..19: mol_type = other RNA
tagggacttttccagctat

SEQ ID NO: 29133 - RNA, 19 nt, synthetic construct
  misc_feature 1..19: note = siRNA antisense sequence
  source 1..19: mol_type = other RNA
atagctggaaaagtcccta

SEQ ID NO: 29134 - RNA, 19 nt, synthetic construct
  misc_feature 1..19: note = siRNA sense sequence
  source 1..19: mol_type = other RNA
agggacttttccagctata

SEQ ID NO: 29135 - RNA, 19 nt, synthetic construct
  misc_feature 1..19: note = siRNA antisense sequence
  source 1..19: mol_type = other RNA
tatagctggaaaagtccct

SEQ ID NO: 29136 - RNA, 19 nt, synthetic construct
  misc_feature 1..19: note = siRNA sense sequence
  source 1..19: mol_type = other RNA
gggacttttccagctatag

SEQ ID NO: 29137 - RNA, 19 nt, synthetic construct
  misc_feature 1..19: note = siRNA antisense sequence
  source 1..19: mol_type = other RNA
ctatagctggaaaagtccc

SEQ ID NO: 29138 - RNA, 19 nt, synthetic construct
  misc_feature 1..19: note = siRNA sense sequence
  source 1..19: mol_type = other RNA
ggacttttccagctatagc

SEQ ID NO: 29139 - RNA, 19 nt, synthetic construct
  misc_feature 1..19: note = siRNA antisense sequence
  source 1..19: mol_type = other RNA
gctatagctggaaaagtcc

SEQ ID NO: 29140 - RNA, 19 nt, synthetic construct
  misc_feature 1..19: note = siRNA sense sequence
  source 1..19: mol_type = other RNA
gacttttccagctatagcc

SEQ ID NO: 29141 - RNA, 19 nt, synthetic construct
  misc_feature 1..19: note = siRNA antisense sequence
  source 1..19: mol_type = other RNA
ggctatagctggaaaagtc

SEQ ID NO: 29142 - RNA, 19 nt, synthetic construct
  misc_feature 1..19: note = siRNA sense sequence
  source 1..19: mol_type = other RNA
acttttccagctatagcct

SEQ ID NO: 29143 - RNA, 19 nt, synthetic construct
  misc_feature 1..19: note = siRNA antisense sequence
  source 1..19: mol_type = other RNA
aggctatagctggaaaagt

SEQ ID NO: 29144 - RNA, 19 nt, synthetic construct
  misc_feature 1..19: note = siRNA sense sequence
  source 1..19: mol_type = other RNA
cttttccagctatagcctt

SEQ ID NO: 29145 - RNA, 19 nt, synthetic construct
  misc_feature 1..19: note = siRNA antisense sequence
  source 1..19: mol_type = other RNA
aaggctatagctggaaaag

SEQ ID NO: 29146 - RNA, 19 nt, synthetic construct
  misc_feature 1..19: note = siRNA sense sequence
  source 1..19: mol_type = other RNA
ttttccagctatagccttc

SEQ ID NO: 29147 - RNA, 19 nt, synthetic construct
  misc_feature 1..19: note = siRNA antisense sequence
  source 1..19: mol_type = other RNA
gaaggctatagctggaaaa

SEQ ID NO: 29148 - RNA, 19 nt, synthetic construct
  misc_feature 1..19: note = siRNA sense sequence
  source 1..19: mol_type = other RNA
tttccagctatagccttct

SEQ ID NO: 29149 - RNA, 19 nt, synthetic construct
  misc_feature 1..19: note = siRNA antisense sequence
  source 1..19: mol_type = other RNA
agaaggctatagctggaaa

SEQ ID NO: 29150 - RNA, 19 nt, synthetic construct
  misc_feature 1..19: note = siRNA sense sequence
  source 1..19: mol_type = other RNA
ttccagctatagccttctg

SEQ ID NO: 29151 - RNA, 19 nt, synthetic construct
  misc_feature 1..19: note = siRNA antisense sequence
  source 1..19: mol_type = other RNA
cagaaggctatagctggaa

SEQ ID NO: 29152 - RNA, 19 nt, synthetic construct
  misc_feature 1..19: note = siRNA sense sequence
  source 1..19: mol_type = other RNA
tccagctatagccttctga

SEQ ID NO: 29153 - RNA, 19 nt, synthetic construct
  misc_feature 1..19: note = siRNA antisense sequence
  source 1..19: mol_type = other RNA
tcagaaggctatagctgga

SEQ ID NO: 29154 - RNA, 19 nt, synthetic construct
  misc_feature 1..19: note = siRNA sense sequence
  source 1..19: mol_type = other RNA
ccagctatagccttctgag

SEQ ID NO: 29155 - RNA, 19 nt, synthetic construct
  misc_feature 1..19: note = siRNA antisense sequence
  source 1..19: mol_type = other RNA
ctcagaaggctatagctgg

SEQ ID NO: 29156 - RNA, 19 nt, synthetic construct
  misc_feature 1..19: note = siRNA sense sequence
  source 1..19: mol_type = other RNA
cacatcgagtttgtattgc

SEQ ID NO: 29157 - RNA, 19 nt, synthetic construct
  misc_feature 1..19: note = siRNA antisense sequence
  source 1..19: mol_type = other RNA
gcaatacaaactcgatgtg

SEQ ID NO: 29158 - RNA, 19 nt, synthetic construct
  misc_feature 1..19: note = siRNA sense sequence
  source 1..19: mol_type = other RNA
acatcgagtttgtattgca

SEQ ID NO: 29159 - RNA, 19 nt, synthetic construct
  misc_feature 1..19: note = siRNA antisense sequence
  source 1..19: mol_type = other RNA
tgcaatacaaactcgatgt

SEQ ID NO: 29160 - RNA, 19 nt, synthetic construct
  misc_feature 1..19: note = siRNA sense sequence
  source 1..19: mol_type = other RNA
catcgagtttgtattgcat

SEQ ID NO: 29161 - RNA, 19 nt, synthetic construct
  misc_feature 1..19: note = siRNA antisense sequence
  source 1..19: mol_type = other RNA
atgcaatacaaactcgatg

SEQ ID NO: 29162 - RNA, 19 nt, synthetic construct
  misc_feature 1..19: note = siRNA sense sequence
  source 1..19: mol_type = other RNA
atcgagtttgtattgcatg

SEQ ID NO: 29163 - RNA, 19 nt, synthetic construct
  misc_feature 1..19: note = siRNA antisense sequence
  source 1..19: mol_type = other RNA
catgcaatacaaactcgat

SEQ ID NO: 29164 - RNA, 19 nt, synthetic construct
  misc_feature 1..19: note = siRNA sense sequence
  source 1..19: mol_type = other RNA
tcgagtttgtattgcatgg

SEQ ID NO: 29165 - RNA, 19 nt, synthetic construct
  misc_feature 1..19: note = siRNA antisense sequence
  source 1..19: mol_type = other RNA
ccatgcaatacaaactcga

SEQ ID NO: 29166 - RNA, 19 nt, synthetic construct
  misc_feature 1..19: note = siRNA sense sequence
  source 1..19: mol_type = other RNA
cgagtttgtattgcatggt

SEQ ID NO: 29167 - RNA, 19 nt, synthetic construct
  misc_feature 1..19: note = siRNA antisense sequence
  source 1..19: mol_type = other RNA
accatgcaatacaaactcg

SEQ ID NO: 29168 - RNA, 19 nt, synthetic construct
  misc_feature 1..19: note = siRNA sense sequence
  source 1..19: mol_type = other RNA
gagtttgtattgcatggtc

SEQ ID NO: 29169 - RNA, 19 nt, synthetic construct
  misc_feature 1..19: note = siRNA antisense sequence
  source 1..19: mol_type = other RNA
gaccatgcaatacaaactc

SEQ ID NO: 29170 - RNA, 19 nt, synthetic construct
  misc_feature 1..19: note = siRNA sense sequence
  source 1..19: mol_type = other RNA
agtttgtattgcatggtca

SEQ ID NO: 29171 - RNA, 19 nt, synthetic construct
  misc_feature 1..19: note = siRNA antisense sequence
  source 1..19: mol_type = other RNA
tgaccatgcaatacaaact

SEQ ID NO: 29172 - RNA, 19 nt, synthetic construct
  misc_feature 1..19: note = siRNA sense sequence
  source 1..19: mol_type = other RNA
gtttgtattgcatggtcaa

SEQ ID NO: 29173 - RNA, 19 nt, synthetic construct
  misc_feature 1..19: note = siRNA antisense sequence
  source 1..19: mol_type = other RNA
ttgaccatgcaatacaaac

SEQ ID NO: 29174 - RNA, 19 nt, synthetic construct
  misc_feature 1..19: note = siRNA sense sequence
  source 1..19: mol_type = other RNA
ttgtattgcatggtcaaaa

SEQ ID NO: 29175 - RNA, 19 nt, synthetic construct
  misc_feature 1..19: note = siRNA antisense sequence
  source 1..19: mol_type = other RNA
ttttgaccatgcaatacaa

SEQ ID NO: 29176 - RNA, 19 nt, synthetic construct
  misc_feature 1..19: note = siRNA sense sequence
  source 1..19: mol_type = other RNA
tgtattgcatggtcaaaag

SEQ ID NO: 29177 - RNA, 19 nt, synthetic construct
  misc_feature 1..19: note = siRNA antisense sequence
  source 1..19: mol_type = other RNA
cttttgaccatgcaataca

SEQ ID NO: 29178 - RNA, 19 nt, synthetic construct
  misc_feature 1..19: note = siRNA sense sequence
  source 1..19: mol_type = other RNA
gtattgcatggtcaaaaga

SEQ ID NO: 29179 - RNA, 19 nt, synthetic construct
  misc_feature 1..19: note = siRNA antisense sequence
  source 1..19: mol_type = other RNA
tcttttgaccatgcaatac

SEQ ID NO: 29180 - RNA, 19 nt, synthetic construct
  misc_feature 1..19: note = siRNA sense sequence
  source 1..19: mol_type = other RNA
gtcaaaagagggctccaag

SEQ ID NO: 29181 - RNA, 19 nt, synthetic construct
  misc_feature 1..19: note = siRNA antisense sequence
  source 1..19: mol_type = other RNA
cttggagccctcttttgac

SEQ ID NO: 29182 - RNA, 19 nt, synthetic construct
  misc_feature 1..19: note = siRNA sense sequence
  source 1..19: mol_type = other RNA
aagctttaaggtgagtgag

SEQ ID NO: 29183 - RNA, 19 nt, synthetic construct
  misc_feature 1..19: note = siRNA antisense sequence
  source 1..19: mol_type = other RNA
ctcactcaccttaaagctt

SEQ ID NO: 29184 - RNA, 19 nt, synthetic construct
  misc_feature 1..19: note = siRNA sense sequence
  source 1..19: mol_type = other RNA
cgactttcctgacatcctt

SEQ ID NO: 29185 - RNA, 19 nt, synthetic construct
  misc_feature 1..19: note = siRNA antisense sequence
  source 1..19: mol_type = other RNA
aaggatgtcaggaaagtcg

SEQ ID NO: 29186 - RNA, 19 nt, synthetic construct
  misc_feature 1..19: note = siRNA sense sequence
  source 1..19: mol_type = other RNA
gactttcctgacatccttc

SEQ ID NO: 29187 - RNA, 19 nt, synthetic construct
  misc_feature 1..19: note = siRNA antisense sequence
  source 1..19: mol_type = other RNA
gaaggatgtcaggaaagtc

SEQ ID NO: 29188 - RNA, 19 nt, synthetic construct
  misc_feature 1..19: note = siRNA sense sequence
  source 1..19: mol_type = other RNA
actttcctgacatccttct

SEQ ID NO: 29189 - RNA, 19 nt, synthetic construct
  misc_feature 1..19: note = siRNA antisense sequence
  source 1..19: mol_type = other RNA
agaaggatgtcaggaaagt

SEQ ID NO: 29190 - RNA, 19 nt, synthetic construct
  misc_feature 1..19: note = siRNA sense sequence
  source 1..19: mol_type = other RNA
ctttcctgacatccttctg

SEQ ID NO: 29191 - RNA, 19 nt, synthetic construct
  misc_feature 1..19: note = siRNA antisense sequence
  source 1..19: mol_type = other RNA
cagaaggatgtcaggaaag

SEQ ID NO: 29192 - RNA, 19 nt, synthetic construct
  misc_feature 1..19: note = siRNA sense sequence
  source 1..19: mol_type = other RNA
tttcctgacatccttctga

SEQ ID NO: 29193 - RNA, 19 nt, synthetic construct
  misc_feature 1..19: note = siRNA antisense sequence
  source 1..19: mol_type = other RNA
tcagaaggatgtcaggaaa

SEQ ID NO: 29194 - RNA, 19 nt, synthetic construct
  misc_feature 1..19: note = siRNA sense sequence
  source 1..19: mol_type = other RNA
tgacatccttctgaatctt

SEQ ID NO: 29195 - RNA, 19 nt, synthetic construct
  misc_feature 1..19: note = siRNA antisense sequence
  source 1..19: mol_type = other RNA
aagattcagaaggatgtca

SEQ ID NO: 29196 - RNA, 19 nt, synthetic construct
  misc_feature 1..19: note = siRNA sense sequence
  source 1..19: mol_type = other RNA
gacatccttctgaatctta

SEQ ID NO: 29197 - RNA, 19 nt, synthetic construct
  misc_feature 1..19: note = siRNA antisense sequence
  source 1..19: mol_type = other RNA
taagattcagaaggatgtc

SEQ ID NO: 29198 - RNA, 19 nt, synthetic construct
  misc_feature 1..19: note = siRNA sense sequence
  source 1..19: mol_type = other RNA
acatccttctgaatcttag

SEQ ID NO: 29199 - RNA, 19 nt, synthetic construct
  misc_feature 1..19: note = siRNA antisense sequence
  source 1..19: mol_type = other RNA
ctaagattcagaaggatgt

SEQ ID NO: 29200 - RNA, 19 nt, synthetic construct
  misc_feature 1..19: note = siRNA sense sequence
  source 1..19: mol_type = other RNA
catccttctgaatcttaga

SEQ ID NO: 29201 - RNA, 19 nt, synthetic construct
  misc_feature 1..19: note = siRNA antisense sequence
  source 1..19: mol_type = other RNA
tctaagattcagaaggatg

SEQ ID NO: 29202 - RNA, 19 nt, synthetic construct
  misc_feature 1..19: note = siRNA sense sequence
  source 1..19: mol_type = other RNA
atccttctgaatcttagac

SEQ ID NO: 29203 - RNA, 19 nt, synthetic construct
  misc_feature 1..19: note = siRNA antisense sequence
  source 1..19: mol_type = other RNA
gtctaagattcagaaggat

SEQ ID NO: 29204 - RNA, 19 nt, synthetic construct
  misc_feature 1..19: note = siRNA sense sequence
  source 1..19: mol_type = other RNA
tccttctgaatcttagaca

SEQ ID NO: 29205 - RNA, 19 nt, synthetic construct
  misc_feature 1..19: note = siRNA antisense sequence
  source 1..19: mol_type = other RNA
tgtctaagattcagaagga

SEQ ID NO: 29206 - RNA, 19 nt, synthetic construct
  misc_feature 1..19: note = siRNA sense sequence
  source 1..19: mol_type = other RNA
catggaatgaccaaaatgg

SEQ ID NO: 29207 - RNA, 19 nt, synthetic construct
  misc_feature 1..19: note = siRNA antisense sequence
  source 1..19: mol_type = other RNA
ccattttggtcattccatg

SEQ ID NO: 29208 - RNA, 19 nt, synthetic construct
  misc_feature 1..19: note = siRNA sense sequence
  source 1..19: mol_type = other RNA
ggtagcaccagatctgtat

SEQ ID NO: 29209 - RNA, 19 nt, synthetic construct
  misc_feature 1..19: note = siRNA antisense sequence
  source 1..19: mol_type = other RNA
atacagatctggtgctacc

SEQ ID NO: 29210 - RNA, 19 nt, synthetic construct
  misc_feature 1..19: note = siRNA sense sequence
  source 1..19: mol_type = other RNA
gtagcaccagatctgtatg

SEQ ID NO: 29211 - RNA, 19 nt, synthetic construct
  misc_feature 1..19: note = siRNA antisense sequence
  source 1..19: mol_type = other RNA
catacagatctggtgctac

SEQ ID NO: 29212 - RNA, 19 nt, synthetic construct
  misc_feature 1..19: note = siRNA sense sequence
  source 1..19: mol_type = other RNA
tagcaccagatctgtatga

SEQ ID NO: 29213 - RNA, 19 nt, synthetic construct
  misc_feature 1..19: note = siRNA antisense sequence
  source 1..19: mol_type = other RNA
tcatacagatctggtgcta

SEQ ID NO: 29214 - RNA, 19 nt, synthetic construct
  misc_feature 1..19: note = siRNA sense sequence
  source 1..19: mol_type = other RNA
agcaccagatctgtatgag

SEQ ID NO: 29215 - RNA, 19 nt, synthetic construct
  misc_feature 1..19: note = siRNA antisense sequence
  source 1..19: mol_type = other RNA
ctcatacagatctggtgct

SEQ ID NO: 29216 - RNA, 19 nt, synthetic construct
  misc_feature 1..19: note = siRNA sense sequence
  source 1..19: mol_type = other RNA
gcaccagatctgtatgagg

SEQ ID NO: 29217 - RNA, 19 nt, synthetic construct
  misc_feature 1..19: note = siRNA antisense sequence
  source 1..19: mol_type = other RNA
cctcatacagatctggtgc

SEQ ID NO: 29218 - RNA, 19 nt, synthetic construct
  misc_feature 1..19: note = siRNA sense sequence
  source 1..19: mol_type = other RNA
caccagatctgtatgaggt

SEQ ID NO: 29219 - RNA, 19 nt, synthetic construct
  misc_feature 1..19: note = siRNA antisense sequence
  source 1..19: mol_type = other RNA
acctcatacagatctggtg

SEQ ID NO: 29220 - RNA, 19 nt, synthetic construct
  misc_feature 1..19: note = siRNA sense sequence
  source 1..19: mol_type = other RNA
accagatctgtatgaggta

SEQ ID NO: 29221 - RNA, 19 nt, synthetic construct
  misc_feature 1..19: note = siRNA antisense sequence
  source 1..19: mol_type = other RNA
tacctcatacagatctggt

SEQ ID NO: 29222 - RNA, 19 nt, synthetic construct
  misc_feature 1..19: note = siRNA sense sequence
  source 1..19: mol_type = other RNA
gatctgtatgaggtattta

SEQ ID NO: 29223 - RNA, 19 nt, synthetic construct
  misc_feature 1..19: note = siRNA antisense sequence
  source 1..19: mol_type = other RNA
taaatacctcatacagatc

SEQ ID NO: 29224 - RNA, 19 nt, synthetic construct
  misc_feature 1..19: note = siRNA sense sequence
  source 1..19: mol_type = other RNA
ctgtatgaggtatttaatc

SEQ ID NO: 29225 - RNA, 19 nt, synthetic construct
  misc_feature 1..19: note = siRNA antisense sequence
  source 1..19: mol_type = other RNA
gattaaatacctcatacag

SEQ ID NO: 29226 - RNA, 19 nt, synthetic construct
  misc_feature 1..19: note = siRNA sense sequence
  source 1..19: mol_type = other RNA
tctgttgcccaggctggag

SEQ ID NO: 29227 - RNA, 19 nt, synthetic construct
  misc_feature 1..19: note = siRNA antisense sequence
  source 1..19: mol_type = other RNA
ctccagcctgggcaacaga

SEQ ID NO: 29228 - RNA, 19 nt, synthetic construct
  misc_feature 1..19: note = siRNA sense sequence
  source 1..19: mol_type = other RNA
ttgcccaggctggagtgca

SEQ ID NO: 29229 - RNA, 19 nt, synthetic construct
  misc_feature 1..19: note = siRNA antisense sequence
  source 1..19: mol_type = other RNA
tgcactccagcctgggcaa

SEQ ID NO: 29230 - RNA, 19 nt, synthetic construct
  misc_feature 1..19: note = siRNA sense sequence
  source 1..19: mol_type = other RNA
aggctggagtgcagtggta

SEQ ID NO: 29231 - RNA, 19 nt, synthetic construct
  misc_feature 1..19: note = siRNA antisense sequence
  source 1..19: mol_type = other RNA
taccactgcactccagcct

SEQ ID NO: 29232 - RNA, 19 nt, synthetic construct
  misc_feature 1..19: note = siRNA sense sequence
  source 1..19: mol_type = other RNA
ggctggagtgcagtggtac

SEQ ID NO: 29233 - RNA, 19 nt, synthetic construct
  misc_feature 1..19: note = siRNA antisense sequence
  source 1..19: mol_type = other RNA
gtaccactgcactccagcc

SEQ ID NO: 29234 - RNA, 19 nt, synthetic construct
  misc_feature 1..19: note = siRNA sense sequence
  source 1..19: mol_type = other RNA
cgatattggctcactgcaa

SEQ ID NO: 29235 - RNA, 19 nt, synthetic construct
  misc_feature 1..19: note = siRNA antisense sequence
  source 1..19: mol_type = other RNA
ttgcagtgagccaatatcg

SEQ ID NO: 29236 - RNA, 19 nt, synthetic construct
  misc_feature 1..19: note = siRNA sense sequence
  source 1..19: mol_type = other RNA
gatattggctcactgcaac

SEQ ID NO: 29237 - RNA, 19 nt, synthetic construct
  misc_feature 1..19: note = siRNA antisense sequence
  source 1..19: mol_type = other RNA
gttgcagtgagccaatatc

SEQ ID NO: 29238 - RNA, 19 nt, synthetic construct
  misc_feature 1..19: note = siRNA sense sequence
  source 1..19: mol_type = other RNA
atattggctcactgcaacc

SEQ ID NO: 29239 - RNA, 19 nt, synthetic construct
  misc_feature 1..19: note = siRNA antisense sequence
  source 1..19: mol_type = other RNA
ggttgcagtgagccaatat

SEQ ID NO: 29240 - RNA, 19 nt, synthetic construct
  misc_feature 1..19: note = siRNA sense sequence
  source 1..19: mol_type = other RNA
tattggctcactgcaacct

SEQ ID NO: 29241 - RNA, 19 nt, synthetic construct
  misc_feature 1..19: note = siRNA antisense sequence
  source 1..19: mol_type = other RNA
aggttgcagtgagccaata

SEQ ID NO: 29242 - RNA, 19 nt, synthetic construct
  misc_feature 1..19: note = siRNA sense sequence
  source 1..19: mol_type = other RNA
tgcctcagcctcccgagta

SEQ ID NO: 29243 - RNA, 19 nt, synthetic construct
  misc_feature 1..19: note = siRNA antisense sequence
  source 1..19: mol_type = other RNA
tactcgggaggctgaggca

SEQ ID NO: 29244 - RNA, 19 nt, synthetic construct
  misc_feature 1..19: note = siRNA sense sequence
  source 1..19: mol_type = other RNA
ctcagcctcccgagtagct

SEQ ID NO: 29245 - RNA, 19 nt, synthetic construct
  misc_feature 1..19: note = siRNA antisense sequence
  source 1..19: mol_type = other RNA
agctactcgggaggctgag

SEQ ID NO: 29246 - RNA, 19 nt, synthetic construct
  misc_feature 1..19: note = siRNA sense sequence
  source 1..19: mol_type = other RNA
cccgagtagctgggattat

SEQ ID NO: 29247 - RNA, 19 nt, synthetic construct
  misc_feature 1..19: note = siRNA antisense sequence
  source 1..19: mol_type = other RNA
ataatcccagctactcggg

SEQ ID NO: 29248 - RNA, 19 nt, synthetic construct
  misc_feature 1..19: note = siRNA sense sequence
  source 1..19: mol_type = other RNA
agtagctgggattataggc

SEQ ID NO: 29249 - RNA, 19 nt, synthetic construct
  misc_feature 1..19: note = siRNA antisense sequence
  source 1..19: mol_type = other RNA
gcctataatcccagctact

SEQ ID NO: 29250 - RNA, 19 nt, synthetic construct
  misc_feature 1..19: note = siRNA sense sequence
  source 1..19: mol_type = other RNA
gtagctgggattataggct

SEQ ID NO: 29251 - RNA, 19 nt, synthetic construct
  misc_feature 1..19: note = siRNA antisense sequence
  source 1..19: mol_type = other RNA
agcctataatcccagctac

SEQ ID NO: 29252 - RNA, 19 nt, synthetic construct
  misc_feature 1..19: note = siRNA sense sequence
  source 1..19: mol_type = other RNA
tagctgggattataggctt

SEQ ID NO: 29253 - RNA, 19 nt, synthetic construct
  misc_feature 1..19: note = siRNA antisense sequence
  source 1..19: mol_type = other RNA
aagcctataatcccagcta

SEQ ID NO: 29254 - RNA, 19 nt, synthetic construct
  misc_feature 1..19: note = siRNA sense sequence
  source 1..19: mol_type = other RNA
agctgggattataggcttg

SEQ ID NO: 29255 - RNA, 19 nt, synthetic construct
  misc_feature 1..19: note = siRNA antisense sequence
  source 1..19: mol_type = other RNA
caagcctataatcccagct

SEQ ID NO: 29256 - RNA, 19 nt, synthetic construct
  misc_feature 1..19: note = siRNA sense sequence
  source 1..19: mol_type = other RNA
gctgggattataggcttgc

SEQ ID NO: 29257 - RNA, 19 nt, synthetic construct
  misc_feature 1..19: note = siRNA antisense sequence
  source 1..19: mol_type = other RNA
gcaagcctataatcccagc

SEQ ID NO: 29258 - RNA, 19 nt, synthetic construct
  misc_feature 1..19: note = siRNA sense sequence
  source 1..19: mol_type = other RNA
ctgggattataggcttgcg

SEQ ID NO: 29259 - RNA, 19 nt, synthetic construct
  misc_feature 1..19: note = siRNA antisense sequence
  source 1..19: mol_type = other RNA
cgcaagcctataatcccag

SEQ ID NO: 29260 - RNA, 19 nt, synthetic construct
  misc_feature 1..19: note = siRNA sense sequence
  source 1..19: mol_type = other RNA
cgccaccatgcccagctaa

SEQ ID NO: 29261 - RNA, 19 nt, synthetic construct
  misc_feature 1..19: note = siRNA antisense sequence
  source 1..19: mol_type = other RNA
ttagctgggcatggtggcg

SEQ ID NO: 29262 - RNA, 19 nt, synthetic construct
  misc_feature 1..19: note = siRNA sense sequence
  source 1..19: mol_type = other RNA
gccaccatgcccagctaat

SEQ ID NO: 29263 - RNA, 19 nt, synthetic construct
  misc_feature 1..19: note = siRNA antisense sequence
  source 1..19: mol_type = other RNA
attagctgggcatggtggc

SEQ ID NO: 29264 - RNA, 19 nt, synthetic construct
  misc_feature 1..19: note = siRNA sense sequence
  source 1..19: mol_type = other RNA
ccaccatgcccagctaatt

SEQ ID NO: 29265 - RNA, 19 nt, synthetic construct
  misc_feature 1..19: note = siRNA antisense sequence
  source 1..19: mol_type = other RNA
aattagctgggcatggtgg

SEQ ID NO: 29266 - RNA, 19 nt, synthetic construct
  misc_feature 1..19: note = siRNA sense sequence
  source 1..19: mol_type = other RNA
caccatgcccagctaattt

SEQ ID NO: 29267 - RNA, 19 nt, synthetic construct
  misc_feature 1..19: note = siRNA antisense sequence
  source 1..19: mol_type = other RNA
aaattagctgggcatggtg

SEQ ID NO: 29268 - RNA, 19 nt, synthetic construct
  misc_feature 1..19: note = siRNA sense sequence
  source 1..19: mol_type = other RNA
accatgcccagctaatttt

SEQ ID NO: 29269 - RNA, 19 nt, synthetic construct
  misc_feature 1..19: note = siRNA antisense sequence
  source 1..19: mol_type = other RNA
aaaattagctgggcatggt

SEQ ID NO: 29270 - RNA, 19 nt, synthetic construct
  misc_feature 1..19: note = siRNA sense sequence
  source 1..19: mol_type = other RNA
aagtgatccacccacctca

SEQ ID NO: 29271 - RNA, 19 nt, synthetic construct
  misc_feature 1..19: note = siRNA antisense sequence
  source 1..19: mol_type = other RNA
tgaggtgggtggatcactt

SEQ ID NO: 29272 - RNA, 19 nt, synthetic construct
  misc_feature 1..19: note = siRNA sense sequence
  source 1..19: mol_type = other RNA
agtgatccacccacctcag

SEQ ID NO: 29273 - RNA, 19 nt, synthetic construct
  misc_feature 1..19: note = siRNA antisense sequence
  source 1..19: mol_type = other RNA
ctgaggtgggtggatcact

SEQ ID NO: 29274 - RNA, 19 nt, synthetic construct
  misc_feature 1..19: note = siRNA sense sequence
  source 1..19: mol_type = other RNA
gtgatccacccacctcagt

SEQ ID NO: 29275 - RNA, 19 nt, synthetic construct
  misc_feature 1..19: note = siRNA antisense sequence
  source 1..19: mol_type = other RNA
actgaggtgggtggatcac

SEQ ID NO: 29276 - RNA, 19 nt, synthetic construct
  misc_feature 1..19: note = siRNA sense sequence
  source 1..19: mol_type = other RNA
tgatccacccacctcagtc

SEQ ID NO: 29277 - RNA, 19 nt, synthetic construct
  misc_feature 1..19: note = siRNA antisense sequence
  source 1..19: mol_type = other RNA
gactgaggtgggtggatca

SEQ ID NO: 29278 - RNA, 19 nt, synthetic construct
  misc_feature 1..19: note = siRNA sense sequence
  source 1..19: mol_type = other RNA
cctcagtctcccaaagtgc

SEQ ID NO: 29279 - RNA, 19 nt, synthetic construct
  misc_feature 1..19: note = siRNA antisense sequence
  source 1..19: mol_type = other RNA
gcactttgggagactgagg

SEQ ID NO: 29280 - RNA, 19 nt, synthetic construct
  misc_feature 1..19: note = siRNA sense sequence
  source 1..19: mol_type = other RNA
ctcagtctcccaaagtgct

SEQ ID NO: 29281 - RNA, 19 nt, synthetic construct
  misc_feature 1..19: note = siRNA antisense sequence
  source 1..19: mol_type = other RNA
agcactttgggagactgag

SEQ ID NO: 29282 - RNA, 19 nt, synthetic construct
  misc_feature 1..19: note = siRNA sense sequence
  source 1..19: mol_type = other RNA
ccaaagtgctgggattgca

SEQ ID NO: 29283 - RNA, 19 nt, synthetic construct
  misc_feature 1..19: note = siRNA antisense sequence
  source 1..19: mol_type = other RNA
tgcaatcccagcactttgg

SEQ ID NO: 29284 - RNA, 19 nt, synthetic construct
  misc_feature 1..19: note = siRNA sense sequence
  source 1..19: mol_type = other RNA
caaagtgctgggattgcag

SEQ ID NO: 29285 - RNA, 19 nt, synthetic construct
  misc_feature 1..19: note = siRNA antisense sequence
  source 1..19: mol_type = other RNA
ctgcaatcccagcactttg

SEQ ID NO: 29286 - RNA, 19 nt, synthetic construct
  misc_feature 1..19: note = siRNA sense sequence
  source 1..19: mol_type = other RNA
aaagtgctgggattgcagg

SEQ ID NO: 29287 - RNA, 19 nt, synthetic construct
  misc_feature 1..19: note = siRNA antisense sequence
  source 1..19: mol_type = other RNA
cctgcaatcccagcacttt

SEQ ID NO: 29288 - RNA, 19 nt, synthetic construct
  misc_feature 1..19: note = siRNA sense sequence
  source 1..19: mol_type = other RNA
gcaggtgtgagccatggca

SEQ ID NO: 29289 - RNA, 19 nt, synthetic construct
  misc_feature 1..19: note = siRNA antisense sequence
  source 1..19: mol_type = other RNA
tgccatggctcacacctgc

SEQ ID NO: 29290 - RNA, 19 nt, synthetic construct
  misc_feature 1..19: note = siRNA sense sequence
  source 1..19: mol_type = other RNA
tgtgagccatggcacctat

SEQ ID NO: 29291 - RNA, 19 nt, synthetic construct
  misc_feature 1..19: note = siRNA antisense sequence
  source 1..19: mol_type = other RNA
ataggtgccatggctcaca

SEQ ID NO: 29292 - RNA, 19 nt, synthetic construct
  misc_feature 1..19: note = siRNA sense sequence
  source 1..19: mol_type = other RNA
ccatggcacctatccaaat

SEQ ID NO: 29293 - RNA, 19 nt, synthetic construct
  misc_feature 1..19: note = siRNA antisense sequence
  source 1..19: mol_type = other RNA
atttggataggtgccatgg

SEQ ID NO: 29294 - RNA, 19 nt, synthetic construct
  misc_feature 1..19: note = siRNA sense sequence
  source 1..19: mol_type = other RNA
catggcacctatccaaatc

SEQ ID NO: 29295 - RNA, 19 nt, synthetic construct
  misc_feature 1..19: note = siRNA antisense sequence
  source 1..19: mol_type = other RNA
gatttggataggtgccatg

SEQ ID NO: 29296 - RNA, 19 nt, synthetic construct
  misc_feature 1..19: note = siRNA sense sequence
  source 1..19: mol_type = other RNA
atggcacctatccaaatca

SEQ ID NO: 29297 - RNA, 19 nt, synthetic construct
  misc_feature 1..19: note = siRNA antisense sequence
  source 1..19: mol_type = other RNA
tgatttggataggtgccat

SEQ ID NO: 29298 - RNA, 19 nt, synthetic construct
  misc_feature 1..19: note = siRNA sense sequence
  source 1..19: mol_type = other RNA
tggcacctatccaaatcat

SEQ ID NO: 29299 - RNA, 19 nt, synthetic construct
  misc_feature 1..19: note = siRNA antisense sequence
  source 1..19: mol_type = other RNA
atgatttggataggtgcca

SEQ ID NO: 29300 - RNA, 19 nt, synthetic construct
  misc_feature 1..19: note = siRNA sense sequence
  source 1..19: mol_type = other RNA
ggcacctatccaaatcatt

SEQ ID NO: 29301 - RNA, 19 nt, synthetic construct
  misc_feature 1..19: note = siRNA antisense sequence
  source 1..19: mol_type = other RNA
aatgatttggataggtgcc

SEQ ID NO: 29302 - RNA, 19 nt, synthetic construct
  misc_feature 1..19: note = siRNA sense sequence
  source 1..19: mol_type = other RNA
gcacctatccaaatcattt

SEQ ID NO: 29303 - RNA, 19 nt, synthetic construct
  misc_feature 1..19: note = siRNA antisense sequence
  source 1..19: mol_type = other RNA
aaatgatttggataggtgc

SEQ ID NO: 29304 - RNA, 19 nt, synthetic construct
  misc_feature 1..19: note = siRNA sense sequence
  source 1..19: mol_type = other RNA
cacctatccaaatcatttt

SEQ ID NO: 29305 - RNA, 19 nt, synthetic construct
  misc_feature 1..19: note = siRNA antisense sequence
  source 1..19: mol_type = other RNA
aaaatgatttggataggtg

SEQ ID NO: 29306 - RNA, 19 nt, synthetic construct
  misc_feature 1..19: note = siRNA sense sequence
  source 1..19: mol_type = other RNA
atgtccaataagtccatct

SEQ ID NO: 29307 - RNA, 19 nt, synthetic construct
  misc_feature 1..19: note = siRNA antisense sequence
  source 1..19: mol_type = other RNA
agatggacttattggacat

SEQ ID NO: 29308 - RNA, 19 nt, synthetic construct
  misc_feature 1..19: note = siRNA sense sequence
  source 1..19: mol_type = other RNA
tgtccaataagtccatctt

SEQ ID NO: 29309 - RNA, 19 nt, synthetic construct
  misc_feature 1..19: note = siRNA antisense sequence
  source 1..19: mol_type = other RNA
aagatggacttattggaca

SEQ ID NO: 29310 - RNA, 19 nt, synthetic construct
  misc_feature 1..19: note = siRNA sense sequence
  source 1..19: mol_type = other RNA
aagtccatcttattctctt

SEQ ID NO: 29311 - RNA, 19 nt, synthetic construct
  misc_feature 1..19: note = siRNA antisense sequence
  source 1..19: mol_type = other RNA
aagagaataagatggactt

SEQ ID NO: 29312 - RNA, 19 nt, synthetic construct
  misc_feature 1..19: note = siRNA sense sequence
  source 1..19: mol_type = other RNA
ccatcttattctcttgggc

SEQ ID NO: 29313 - RNA, 19 nt, synthetic construct
  misc_feature 1..19: note = siRNA antisense sequence
  source 1..19: mol_type = other RNA
gcccaagagaataagatgg

SEQ ID NO: 29314 - RNA, 19 nt, synthetic construct
  misc_feature 1..19: note = siRNA sense sequence
  source 1..19: mol_type = other RNA
catcttattctcttgggca

SEQ ID NO: 29315 - RNA, 19 nt, synthetic construct
  misc_feature 1..19: note = siRNA antisense sequence
  source 1..19: mol_type = other RNA
tgcccaagagaataagatg

SEQ ID NO: 29316 - RNA, 19 nt, synthetic construct
  misc_feature 1..19: note = siRNA sense sequence
  source 1..19: mol_type = other RNA
atcttattctcttgggcat

SEQ ID NO: 29317 - RNA, 19 nt, synthetic construct
  misc_feature 1..19: note = siRNA antisense sequence
  source 1..19: mol_type = other RNA
atgcccaagagaataagat

SEQ ID NO: 29318 - RNA, 19 nt, synthetic construct
  misc_feature 1..19: note = siRNA sense sequence
  source 1..19: mol_type = other RNA
cttattctcttgggcatct

SEQ ID NO: 29319 - RNA, 19 nt, synthetic construct
  misc_feature 1..19: note = siRNA antisense sequence
  source 1..19: mol_type = other RNA
agatgcccaagagaataag

SEQ ID NO: 29320 - RNA, 19 nt, synthetic construct
  misc_feature 1..19: note = siRNA sense sequence
  source 1..19: mol_type = other RNA
ttctcttgggcatctcaac

SEQ ID NO: 29321 - RNA, 19 nt, synthetic construct
  misc_feature 1..19: note = siRNA antisense sequence
  source 1..19: mol_type = other RNA
gttgagatgcccaagagaa

SEQ ID NO: 29322 - RNA, 19 nt, synthetic construct
  misc_feature 1..19: note = siRNA sense sequence
  source 1..19: mol_type = other RNA
cttgggcatctcaaccttt

SEQ ID NO: 29323 - RNA, 19 nt, synthetic construct
  misc_feature 1..19: note = siRNA antisense sequence
  source 1..19: mol_type = other RNA
aaaggttgagatgcccaag

SEQ ID NO: 29324 - RNA, 19 nt, synthetic construct
  misc_feature 1..19: note = siRNA sense sequence
  source 1..19: mol_type = other RNA
ttgggcatctcaacctttt

SEQ ID NO: 29325 - RNA, 19 nt, synthetic construct
  misc_feature 1..19: note = siRNA antisense sequence
  source 1..19: mol_type = other RNA
aaaaggttgagatgcccaa

SEQ ID NO: 29326 - RNA, 19 nt, synthetic construct
  misc_feature 1..19: note = siRNA sense sequence
  source 1..19: mol_type = other RNA
tgggcatctcaaccttttc

SEQ ID NO: 29327 - RNA, 19 nt, synthetic construct
  misc_feature 1..19: note = siRNA antisense sequence
  source 1..19: mol_type = other RNA
gaaaaggttgagatgccca

SEQ ID NO: 29328 - RNA, 19 nt, synthetic construct
  misc_feature 1..19: note = siRNA sense sequence
  source 1..19: mol_type = other RNA
tctcaaccttttcctgcct

SEQ ID NO: 29329 - RNA, 19 nt, synthetic construct
  misc_feature 1..19: note = siRNA antisense sequence
  source 1..19: mol_type = other RNA
aggcaggaaaaggttgaga

SEQ ID NO: 29330 - RNA, 19 nt, synthetic construct
  misc_feature 1..19: note = siRNA sense sequence
  source 1..19: mol_type = other RNA
aaccttttcctgccttagg

SEQ ID NO: 29331 - RNA, 19 nt, synthetic construct
  misc_feature 1..19: note = siRNA antisense sequence
  source 1..19: mol_type = other RNA
cctaaggcaggaaaaggtt

SEQ ID NO: 29332 - RNA, 19 nt, synthetic construct
  misc_feature 1..19: note = siRNA sense sequence
  source 1..19: mol_type = other RNA
aaatggaggtcctctaact

SEQ ID NO: 29333 - RNA, 19 nt, synthetic construct
  misc_feature 1..19: note = siRNA antisense sequence
  source 1..19: mol_type = other RNA
agttagaggacctccattt

SEQ ID NO: 29334 - RNA, 19 nt, synthetic construct
  misc_feature 1..19: note = siRNA sense sequence
  source 1..19: mol_type = other RNA
aatggaggtcctctaactc

SEQ ID NO: 29335 - RNA, 19 nt, synthetic construct
  misc_feature 1..19: note = siRNA antisense sequence
  source 1..19: mol_type = other RNA
gagttagaggacctccatt

SEQ ID NO: 29336 - RNA, 19 nt, synthetic construct
  misc_feature 1..19: note = siRNA sense sequence
  source 1..19: mol_type = other RNA
atcttgtcacatgatcctg

SEQ ID NO: 29337 - RNA, 19 nt, synthetic construct
  misc_feature 1..19: note = siRNA antisense sequence
  source 1..19: mol_type = other RNA
caggatcatgtgacaagat

SEQ ID NO: 29338 - RNA, 19 nt, synthetic construct
  misc_feature 1..19: note = siRNA sense sequence
  source 1..19: mol_type = other RNA
tcttgtcacatgatcctgc

SEQ ID NO: 29339 - RNA, 19 nt, synthetic construct
  misc_feature 1..19: note = siRNA antisense sequence
  source 1..19: mol_type = other RNA
gcaggatcatgtgacaaga

SEQ ID NO: 29340 - RNA, 19 nt, synthetic construct
  misc_feature 1..19: note = siRNA sense sequence
  source 1..19: mol_type = other RNA
cttgtcacatgatcctgct

SEQ ID NO: 29341 - RNA, 19 nt, synthetic construct
  misc_feature 1..19: note = siRNA antisense sequence
  source 1..19: mol_type = other RNA
agcaggatcatgtgacaag

SEQ ID NO: 29342 - RNA, 19 nt, synthetic construct
  misc_feature 1..19: note = siRNA sense sequence
  source 1..19: mol_type = other RNA
catgatcctgctgtaggca

SEQ ID NO: 29343 - RNA, 19 nt, synthetic construct
  misc_feature 1..19: note = siRNA antisense sequence
  source 1..19: mol_type = other RNA
tgcctacagcaggatcatg

SEQ ID NO: 29344 - RNA, 19 nt, synthetic construct
  misc_feature 1..19: note = siRNA sense sequence
  source 1..19: mol_type = other RNA
aacccacaccagttaaatg

SEQ ID NO: 29345 - RNA, 19 nt, synthetic construct
  misc_feature 1..19: note = siRNA antisense sequence
  source 1..19: mol_type = other RNA
catttaactggtgtgggtt

SEQ ID NO: 29346 - RNA, 19 nt, synthetic construct
  misc_feature 1..19: note = siRNA sense sequence
  source 1..19: mol_type = other RNA
acccacaccagttaaatgt

SEQ ID NO: 29347 - RNA, 19 nt, synthetic construct
  misc_feature 1..19: note = siRNA antisense sequence
  source 1..19: mol_type = other RNA
acatttaactggtgtgggt

SEQ ID NO: 29348 - RNA, 19 nt, synthetic construct
  misc_feature 1..19: note = siRNA sense sequence
  source 1..19: mol_type = other RNA
acttgatcaatgtttagcc

SEQ ID NO: 29349 - RNA, 19 nt, synthetic construct
  misc_feature 1..19: note = siRNA antisense sequence
  source 1..19: mol_type = other RNA
ggctaaacattgatcaagt

SEQ ID NO: 29350 - RNA, 19 nt, synthetic construct
  misc_feature 1..19: note = siRNA sense sequence
  source 1..19: mol_type = other RNA
cttgatcaatgtttagcct

SEQ ID NO: 29351 - RNA, 19 nt, synthetic construct
  misc_feature 1..19: note = siRNA antisense sequence
  source 1..19: mol_type = other RNA
aggctaaacattgatcaag

SEQ ID NO: 29352 - RNA, 19 nt, synthetic construct
  misc_feature 1..19: note = siRNA sense sequence
  source 1..19: mol_type = other RNA
atcaatgtttagcctgtgg

SEQ ID NO: 29353 - RNA, 19 nt, synthetic construct
  misc_feature 1..19: note = siRNA antisense sequence
  source 1..19: mol_type = other RNA
ccacaggctaaacattgat

SEQ ID NO: 29354 - RNA, 19 nt, synthetic construct
  misc_feature 1..19: note = siRNA sense sequence
  source 1..19: mol_type = other RNA
atgtttagcctgtggttgg

SEQ ID NO: 29355 - RNA, 19 nt, synthetic construct
  misc_feature 1..19: note = siRNA antisense sequence
  source 1..19: mol_type = other RNA
ccaaccacaggctaaacat

SEQ ID NO: 29356 - RNA, 19 nt, synthetic construct
  misc_feature 1..19: note = siRNA sense sequence
  source 1..19: mol_type = other RNA
tgtttagcctgtggttggc

SEQ ID NO: 29357 - RNA, 19 nt, synthetic construct
  misc_feature 1..19: note = siRNA antisense sequence
  source 1..19: mol_type = other RNA
gccaaccacaggctaaaca

SEQ ID NO: 29358 - RNA, 19 nt, synthetic construct
  misc_feature 1..19: note = siRNA sense sequence
  source 1..19: mol_type = other RNA
cctgtggttggcttttaaa

SEQ ID NO: 29359 - RNA, 19 nt, synthetic construct
  misc_feature 1..19: note = siRNA antisense sequence
  source 1..19: mol_type = other RNA
tttaaaagccaaccacagg

SEQ ID NO: 29360 - RNA, 19 nt, synthetic construct
  misc_feature 1..19: note = siRNA sense sequence
  source 1..19: mol_type = other RNA
gtggttggcttttaaatat

SEQ ID NO: 29361 - RNA, 19 nt, synthetic construct
  misc_feature 1..19: note = siRNA antisense sequence
  source 1..19: mol_type = other RNA
atatttaaaagccaaccac

SEQ ID NO: 29362 - RNA, 19 nt, synthetic construct
  misc_feature 1..19: note = siRNA sense sequence
  source 1..19: mol_type = other RNA
tggttggcttttaaatatc

SEQ ID NO: 29363 - RNA, 19 nt, synthetic construct
  misc_feature 1..19: note = siRNA antisense sequence
  source 1..19: mol_type = other RNA
gatatttaaaagccaacca

SEQ ID NO: 29364 - RNA, 19 nt, synthetic construct
  misc_feature 1..19: note = siRNA sense sequence
  source 1..19: mol_type = other RNA
ggttggcttttaaatatcc

SEQ ID NO: 29365 - RNA, 19 nt, synthetic construct
  misc_feature 1..19: note = siRNA antisense sequence
  source 1..19: mol_type = other RNA
ggatatttaaaagccaacc

SEQ ID NO: 29366 - RNA, 19 nt, synthetic construct
  misc_feature 1..19: note = siRNA sense sequence
  source 1..19: mol_type = other RNA
agagtgctaaaatacagac

SEQ ID NO: 29367 - RNA, 19 nt, synthetic construct
  misc_feature 1..19: note = siRNA antisense sequence
  source 1..19: mol_type = other RNA
gtctgtattttagcactct

SEQ ID NO: 29368 - RNA, 19 nt, synthetic construct
  misc_feature 1..19: note = siRNA sense sequence
  source 1..19: mol_type = other RNA
gagtgctaaaatacagaca

SEQ ID NO: 29369 - RNA, 19 nt, synthetic construct
  misc_feature 1..19: note = siRNA antisense sequence
  source 1..19: mol_type = other RNA
tgtctgtattttagcactc

SEQ ID NO: 29370 - RNA, 19 nt, synthetic construct
  misc_feature 1..19: note = siRNA sense sequence
  source 1..19: mol_type = other RNA
tcagcatttcttttcaact

SEQ ID NO: 29371 - RNA, 19 nt, synthetic construct
  misc_feature 1..19: note = siRNA antisense sequence
  source 1..19: mol_type = other RNA
agttgaaaagaaatgctga

SEQ ID NO: 29372 - RNA, 19 nt, synthetic construct
  misc_feature 1..19: note = siRNA sense sequence
  source 1..19: mol_type = other RNA
catttcttttcaacttcct

SEQ ID NO: 29373 - RNA, 19 nt, synthetic construct
  misc_feature 1..19: note = siRNA antisense sequence
  source 1..19: mol_type = other RNA
aggaagttgaaaagaaatg

SEQ ID NO: 29374 - RNA, 19 nt, synthetic construct
  misc_feature 1..19: note = siRNA sense sequence
  source 1..19: mol_type = other RNA
tttcttttcaacttcctct

SEQ ID NO: 29375 - RNA, 19 nt, synthetic construct
  misc_feature 1..19: note = siRNA antisense sequence
  source 1..19: mol_type = other RNA
agaggaagttgaaaagaaa

SEQ ID NO: 29376 - RNA, 19 nt, synthetic construct
  misc_feature 1..19: note = siRNA sense sequence
  source 1..19: mol_type = other RNA
tcaacttcctctacatgct

SEQ ID NO: 29377 - RNA, 19 nt, synthetic construct
  misc_feature 1..19: note = siRNA antisense sequence
  source 1..19: mol_type = other RNA
agcatgtagaggaagttga

SEQ ID NO: 29378 - RNA, 19 nt, synthetic construct
  misc_feature 1..19: note = siRNA sense sequence
  source 1..19: mol_type = other RNA
caacttcctctacatgctt

SEQ ID NO: 29379 - RNA, 19 nt, synthetic construct
  misc_feature 1..19: note = siRNA antisense sequence
  source 1..19: mol_type = other RNA
aagcatgtagaggaagttg

SEQ ID NO: 29380 - RNA, 19 nt, synthetic construct
  misc_feature 1..19: note = siRNA sense sequence
  source 1..19: mol_type = other RNA
acttcctctacatgcttag

SEQ ID NO: 29381 - RNA, 19 nt, synthetic construct
  misc_feature 1..19: note = siRNA antisense sequence
  source 1..19: mol_type = other RNA
ctaagcatgtagaggaagt

SEQ ID NO: 29382 - RNA, 19 nt, synthetic construct
  misc_feature 1..19: note = siRNA sense sequence
  source 1..19: mol_type = other RNA
attgacttttgtatgtctg

SEQ ID NO: 29383 - RNA, 19 nt, synthetic construct
  misc_feature 1..19: note = siRNA antisense sequence
  source 1..19: mol_type = other RNA
cagacatacaaaagtcaat

SEQ ID NO: 29384 - RNA, 19 nt, synthetic construct
  misc_feature 1..19: note = siRNA sense sequence
  source 1..19: mol_type = other RNA
gacttttgtatgtctgtgg

SEQ ID NO: 29385 - RNA, 19 nt, synthetic construct
  misc_feature 1..19: note = siRNA antisense sequence
  source 1..19: mol_type = other RNA
ccacagacatacaaaagtc

SEQ ID NO: 29386 - RNA, 19 nt, synthetic construct
  misc_feature 1..19: note = siRNA sense sequence
  source 1..19: mol_type = other RNA
tgtatgtctgtggtagctt

SEQ ID NO: 29387 - RNA, 19 nt, synthetic construct
  misc_feature 1..19: note = siRNA antisense sequence
  source 1..19: mol_type = other RNA
aagctaccacagacataca

SEQ ID NO: 29388 - RNA, 19 nt, synthetic construct
  misc_feature 1..19: note = siRNA sense sequence
  source 1..19: mol_type = other RNA
acatattatcaacgtttgc

SEQ ID NO: 29389 - RNA, 19 nt, synthetic construct
  misc_feature 1..19: note = siRNA antisense sequence
  source 1..19: mol_type = other RNA
gcaaacgttgataatatgt

SEQ ID NO: 29390 - RNA, 19 nt, synthetic construct
  misc_feature 1..19: note = siRNA sense sequence
  source 1..19: mol_type = other RNA
catattatcaacgtttgcc

SEQ ID NO: 29391 - RNA, 19 nt, synthetic construct
  misc_feature 1..19: note = siRNA antisense sequence
  source 1..19: mol_type = other RNA
ggcaaacgttgataatatg

SEQ ID NO: 29392 - RNA, 19 nt, synthetic construct
  misc_feature 1..19: note = siRNA sense sequence
  source 1..19: mol_type = other RNA
atattatcaacgtttgcca

SEQ ID NO: 29393 - RNA, 19 nt, synthetic construct
  misc_feature 1..19: note = siRNA antisense sequence
  source 1..19: mol_type = other RNA
tggcaaacgttgataatat

SEQ ID NO: 29394 - RNA, 19 nt, synthetic construct
  misc_feature 1..19: note = siRNA sense sequence
  source 1..19: mol_type = other RNA
tatcaacgtttgccaattt

SEQ ID NO: 29395 - RNA, 19 nt, synthetic construct
  misc_feature 1..19: note = siRNA antisense sequence
  source 1..19: mol_type = other RNA
aaattggcaaacgttgata

SEQ ID NO: 29396 - RNA, 19 nt, synthetic construct
  misc_feature 1..19: note = siRNA sense sequence
  source 1..19: mol_type = other RNA
atcaacgtttgccaattta

SEQ ID NO: 29397 - RNA, 19 nt, synthetic construct
  misc_feature 1..19: note = siRNA antisense sequence
  source 1..19: mol_type = other RNA
taaattggcaaacgttgat

SEQ ID NO: 29398 - RNA, 19 nt, synthetic construct
  misc_feature 1..19: note = siRNA sense sequence
  source 1..19: mol_type = other RNA
tcaacgtttgccaatttat

SEQ ID NO: 29399 - RNA, 19 nt, synthetic construct
  misc_feature 1..19: note = siRNA antisense sequence
  source 1..19: mol_type = other RNA
ataaattggcaaacgttga

SEQ ID NO: 29400 - RNA, 19 nt, synthetic construct
  misc_feature 1..19: note = siRNA sense sequence
  source 1..19: mol_type = other RNA
caacgtttgccaatttatt

SEQ ID NO: 29401 - RNA, 19 nt, synthetic construct
  misc_feature 1..19: note = siRNA antisense sequence
  source 1..19: mol_type = other RNA
aataaattggcaaacgttg

SEQ ID NO: 29402 - RNA, 19 nt, synthetic construct
  misc_feature 1..19: note = siRNA sense sequence
  source 1..19: mol_type = other RNA
caagtatacggaatatcat

SEQ ID NO: 29403 - RNA, 19 nt, synthetic construct
  misc_feature 1..19: note = siRNA antisense sequence
  source 1..19: mol_type = other RNA
atgatattccgtatacttg

SEQ ID NO: 29404 - RNA, 19 nt, synthetic construct
  misc_feature 1..19: note = siRNA sense sequence
  source 1..19: mol_type = other RNA
gtatacggaatatcattag

SEQ ID NO: 29405 - RNA, 19 nt, synthetic construct
  misc_feature 1..19: note = siRNA antisense sequence
  source 1..19: mol_type = other RNA
ctaatgatattccgtatac

SEQ ID NO: 29406 - RNA, 19 nt, synthetic construct
  misc_feature 1..19: note = siRNA sense sequence
  source 1..19: mol_type = other RNA
tatacggaatatcattagc

SEQ ID NO: 29407 - RNA, 19 nt, synthetic construct
  misc_feature 1..19: note = siRNA antisense sequence
  source 1..19: mol_type = other RNA
gctaatgatattccgtata

SEQ ID NO: 29408 - RNA, 19 nt, synthetic construct
  misc_feature 1..19: note = siRNA sense sequence
  source 1..19: mol_type = other RNA
atacggaatatcattagca

SEQ ID NO: 29409 - RNA, 19 nt, synthetic construct
  misc_feature 1..19: note = siRNA antisense sequence
  source 1..19: mol_type = other RNA
tgctaatgatattccgtat

SEQ ID NO: 29410 - RNA, 19 nt, synthetic construct
  misc_feature 1..19: note = siRNA sense sequence
  source 1..19: mol_type = other RNA
tacggaatatcattagcac

SEQ ID NO: 29411 - RNA, 19 nt, synthetic construct
  misc_feature 1..19: note = siRNA antisense sequence
  source 1..19: mol_type = other RNA
gtgctaatgatattccgta

SEQ ID NO: 29412 - RNA, 19 nt, synthetic construct
  misc_feature 1..19: note = siRNA sense sequence
  source 1..19: mol_type = other RNA
tatcattagcacattctgg

SEQ ID NO: 29413 - RNA, 19 nt, synthetic construct
  misc_feature 1..19: note = siRNA antisense sequence
  source 1..19: mol_type = other RNA
ccagaatgtgctaatgata

SEQ ID NO: 29414 - RNA, 19 nt, synthetic construct
  misc_feature 1..19: note = siRNA sense sequence
  source 1..19: mol_type = other RNA
atcattagcacattctggt

SEQ ID NO: 29415 - RNA, 19 nt, synthetic construct
  misc_feature 1..19: note = siRNA antisense sequence
  source 1..19: mol_type = other RNA
accagaatgtgctaatgat

SEQ ID NO: 29416 - RNA, 19 nt, synthetic construct
  misc_feature 1..19: note = siRNA sense sequence
  source 1..19: mol_type = other RNA
tcattagcacattctggtg

SEQ ID NO: 29417 - RNA, 19 nt, synthetic construct
  misc_feature 1..19: note = siRNA antisense sequence
  source 1..19: mol_type = other RNA
caccagaatgtgctaatga

SEQ ID NO: 29418 - RNA, 19 nt, synthetic construct
  misc_feature 1..19: note = siRNA sense sequence
  source 1..19: mol_type = other RNA
cattagcacattctggtga

SEQ ID NO: 29419 - RNA, 19 nt, synthetic construct
  misc_feature 1..19: note = siRNA antisense sequence
  source 1..19: mol_type = other RNA
tcaccagaatgtgctaatg

SEQ ID NO: 29420 - RNA, 19 nt, synthetic construct
  misc_feature 1..19: note = siRNA sense sequence
  source 1..19: mol_type = other RNA
attagcacattctggtgat

SEQ ID NO: 29421 - RNA, 19 nt, synthetic construct
  misc_feature 1..19: note = siRNA antisense sequence
  source 1..19: mol_type = other RNA
atcaccagaatgtgctaat

SEQ ID NO: 29422 - RNA, 19 nt, synthetic construct
  misc_feature 1..19: note = siRNA sense sequence
  source 1..19: mol_type = other RNA
ttagcacattctggtgata

SEQ ID NO: 29423 - RNA, 19 nt, synthetic construct
  misc_feature 1..19: note = siRNA antisense sequence
  source 1..19: mol_type = other RNA
tatcaccagaatgtgctaa

SEQ ID NO: 29424 - RNA, 19 nt, synthetic construct
  misc_feature 1..19: note = siRNA sense sequence
  source 1..19: mol_type = other RNA
tagcacattctggtgatag

SEQ ID NO: 29425 - RNA, 19 nt, synthetic construct
  misc_feature 1..19: note = siRNA antisense sequence
  source 1..19: mol_type = other RNA
ctatcaccagaatgtgcta

SEQ ID NO: 29426 - RNA, 19 nt, synthetic construct
  misc_feature 1..19: note = siRNA sense sequence
  source 1..19: mol_type = other RNA
gcacattctggtgatagta

SEQ ID NO: 29427 - RNA, 19 nt, synthetic construct
  misc_feature 1..19: note = siRNA antisense sequence
  source 1..19: mol_type = other RNA
tactatcaccagaatgtgc

SEQ ID NO: 29428 - RNA, 19 nt, synthetic construct
  misc_feature 1..19: note = siRNA sense sequence
  source 1..19: mol_type = other RNA
cacattctggtgatagtat

SEQ ID NO: 29429 - RNA, 19 nt, synthetic construct
  misc_feature 1..19: note = siRNA antisense sequence
  source 1..19: mol_type = other RNA
atactatcaccagaatgtg

SEQ ID NO: 29430 - RNA, 19 nt, synthetic construct
  misc_feature 1..19: note = siRNA sense sequence
  source 1..19: mol_type = other RNA
acattctggtgatagtatg

SEQ ID NO: 29431 - RNA, 19 nt, synthetic construct
  misc_feature 1..19: note = siRNA antisense sequence
  source 1..19: mol_type = other RNA
catactatcaccagaatgt

SEQ ID NO: 29432 - RNA, 19 nt, synthetic construct
  misc_feature 1..19: note = siRNA sense sequence
  source 1..19: mol_type = other RNA
cattctggtgatagtatgt

SEQ ID NO: 29433 - RNA, 19 nt, synthetic construct
  misc_feature 1..19: note = siRNA antisense sequence
  source 1..19: mol_type = other RNA
acatactatcaccagaatg

SEQ ID NO: 29434 - RNA, 19 nt, synthetic construct
  misc_feature 1..19: note = siRNA sense sequence
  source 1..19: mol_type = other RNA
attctggtgatagtatgtc

SEQ ID NO: 29435 - RNA, 19 nt, synthetic construct
  misc_feature 1..19: note = siRNA antisense sequence
  source 1..19: mol_type = other RNA
gacatactatcaccagaat

SEQ ID NO: 29436 - RNA, 19 nt, synthetic construct
  misc_feature 1..19: note = siRNA sense sequence
  source 1..19: mol_type = other RNA
ttctggtgatagtatgtca

SEQ ID NO: 29437 - RNA, 19 nt, synthetic construct
  misc_feature 1..19: note = siRNA antisense sequence
  source 1..19: mol_type = other RNA
tgacatactatcaccagaa

SEQ ID NO: 29438 - RNA, 19 nt, synthetic construct
  misc_feature 1..19: note = siRNA sense sequence
  source 1..19: mol_type = other RNA
tctggtgatagtatgtcag

SEQ ID NO: 29439 - RNA, 19 nt, synthetic construct
  misc_feature 1..19: note = siRNA antisense sequence
  source 1..19: mol_type = other RNA
ctgacatactatcaccaga

SEQ ID NO: 29440 - RNA, 19 nt, synthetic construct
  misc_feature 1..19: note = siRNA sense sequence
  source 1..19: mol_type = other RNA
ctggtgatagtatgtcaga

SEQ ID NO: 29441 - RNA, 19 nt, synthetic construct
  misc_feature 1..19: note = siRNA antisense sequence
  source 1..19: mol_type = other RNA
tctgacatactatcaccag

SEQ ID NO: 29442 - RNA, 19 nt, synthetic construct
  misc_feature 1..19: note = siRNA sense sequence
  source 1..19: mol_type = other RNA
tggtgatagtatgtcagat

SEQ ID NO: 29443 - RNA, 19 nt, synthetic construct
  misc_feature 1..19: note = siRNA antisense sequence
  source 1..19: mol_type = other RNA
atctgacatactatcacca

SEQ ID NO: 29444 - RNA, 19 nt, synthetic construct
  misc_feature 1..19: note = siRNA sense sequence
  source 1..19: mol_type = other RNA
ggtgatagtatgtcagata

SEQ ID NO: 29445 - RNA, 19 nt, synthetic construct
  misc_feature 1..19: note = siRNA antisense sequence
  source 1..19: mol_type = other RNA
tatctgacatactatcacc

SEQ ID NO: 29446 - RNA, 19 nt, synthetic construct
  misc_feature 1..19: note = siRNA sense sequence
  source 1..19: mol_type = other RNA
gtgatagtatgtcagatat

SEQ ID NO: 29447 - RNA, 19 nt, synthetic construct
  misc_feature 1..19: note = siRNA antisense sequence
  source 1..19: mol_type = other RNA
atatctgacatactatcac

SEQ ID NO: 29448 - RNA, 19 nt, synthetic construct
  misc_feature 1..19: note = siRNA sense sequence
  source 1..19: mol_type = other RNA
tcagatatttaaagagctc

SEQ ID NO: 29449 - RNA, 19 nt, synthetic construct
  misc_feature 1..19: note = siRNA antisense sequence
  source 1..19: mol_type = other RNA
gagctctttaaatatctga

SEQ ID NO: 29450 - RNA, 19 nt, synthetic construct
  misc_feature 1..19: note = siRNA sense sequence
  source 1..19: mol_type = other RNA
cagatatttaaagagctct

SEQ ID NO: 29451 - RNA, 19 nt, synthetic construct
  misc_feature 1..19: note = siRNA antisense sequence
  source 1..19: mol_type = other RNA
agagctctttaaatatctg

SEQ ID NO: 29452 - RNA, 19 nt, synthetic construct
  misc_feature 1..19: note = siRNA sense sequence
  source 1..19: mol_type = other RNA
gatatttaaagagctctag

SEQ ID NO: 29453 - RNA, 19 nt, synthetic construct
  misc_feature 1..19: note = siRNA antisense sequence
  source 1..19: mol_type = other RNA
ctagagctctttaaatatc

SEQ ID NO: 29454 - RNA, 19 nt, synthetic construct
  misc_feature 1..19: note = siRNA sense sequence
  source 1..19: mol_type = other RNA
atatttaaagagctctagc

SEQ ID NO: 29455 - RNA, 19 nt, synthetic construct
  misc_feature 1..19: note = siRNA antisense sequence
  source 1..19: mol_type = other RNA
gctagagctctttaaatat

SEQ ID NO: 29456 - RNA, 19 nt, synthetic construct
  misc_feature 1..19: note = siRNA sense sequence
  source 1..19: mol_type = other RNA
tatttaaagagctctagct

SEQ ID NO: 29457 - RNA, 19 nt, synthetic construct
  misc_feature 1..19: note = siRNA antisense sequence
  source 1..19: mol_type = other RNA
agctagagctctttaaata

SEQ ID NO: 29458 - RNA, 19 nt, synthetic construct
  misc_feature 1..19: note = siRNA sense sequence
  source 1..19: mol_type = other RNA
atttaaagagctctagctt

SEQ ID NO: 29459 - RNA, 19 nt, synthetic construct
  misc_feature 1..19: note = siRNA antisense sequence
  source 1..19: mol_type = other RNA
aagctagagctctttaaat

SEQ ID NO: 29460 - RNA, 19 nt, synthetic construct
  misc_feature 1..19: note = siRNA sense sequence
  source 1..19: mol_type = other RNA
tttaaagagctctagcttg

SEQ ID NO: 29461 - RNA, 19 nt, synthetic construct
  misc_feature 1..19: note = siRNA antisense sequence
  source 1..19: mol_type = other RNA
caagctagagctctttaaa

SEQ ID NO: 29462 - RNA, 19 nt, synthetic construct
  misc_feature 1..19: note = siRNA sense sequence
  source 1..19: mol_type = other RNA
ttaaagagctctagcttga

SEQ ID NO: 29463 - RNA, 19 nt, synthetic construct
  misc_feature 1..19: note = siRNA antisense sequence
  source 1..19: mol_type = other RNA
tcaagctagagctctttaa

SEQ ID NO: 29464 - RNA, 19 nt, synthetic construct
  misc_feature 1..19: note = siRNA sense sequence
  source 1..19: mol_type = other RNA
taaagagctctagcttgaa

SEQ ID NO: 29465 - RNA, 19 nt, synthetic construct
  misc_feature 1..19: note = siRNA antisense sequence
  source 1..19: mol_type = other RNA
ttcaagctagagctcttta

SEQ ID NO: 29466 - RNA, 19 nt, synthetic construct
  misc_feature 1..19: note = siRNA sense sequence
  source 1..19: mol_type = other RNA
aaagagctctagcttgaag

SEQ ID NO: 29467 - RNA, 19 nt, synthetic construct
  misc_feature 1..19: note = siRNA antisense sequence
  source 1..19: mol_type = other RNA
cttcaagctagagctcttt

SEQ ID NO: 29468 - RNA, 19 nt, synthetic construct
  misc_feature 1..19: note = siRNA sense sequence
  source 1..19: mol_type = other RNA
aagagctctagcttgaaga

SEQ ID NO: 29469 - RNA, 19 nt, synthetic construct
  misc_feature 1..19: note = siRNA antisense sequence
  source 1..19: mol_type = other RNA
tcttcaagctagagctctt

SEQ ID NO: 29470 - RNA, 19 nt, synthetic construct
  misc_feature 1..19: note = siRNA sense sequence
  source 1..19: mol_type = other RNA
agagctctagcttgaagaa

SEQ ID NO: 29471 - RNA, 19 nt, synthetic construct
  misc_feature 1..19: note = siRNA antisense sequence
  source 1..19: mol_type = other RNA
ttcttcaagctagagctct

SEQ ID NO: 29472 - RNA, 19 nt, synthetic construct
  misc_feature 1..19: note = siRNA sense sequence
  source 1..19: mol_type = other RNA
aaaatgggccttactttaa

SEQ ID NO: 29473 - RNA, 19 nt, synthetic construct
  misc_feature 1..19: note = siRNA antisense sequence
  source 1..19: mol_type = other RNA
ttaaagtaaggcccatttt

SEQ ID NO: 29474 - RNA, 19 nt, synthetic construct
  misc_feature 1..19: note = siRNA sense sequence
  source 1..19: mol_type = other RNA
atacttaatgatctgggac

SEQ ID NO: 29475 - RNA, 19 nt, synthetic construct
  misc_feature 1..19: note = siRNA antisense sequence
  source 1..19: mol_type = other RNA
gtcccagatcattaagtat

SEQ ID NO: 29476 - RNA, 19 nt, synthetic construct
  misc_feature 1..19: note = siRNA sense sequence
  source 1..19: mol_type = other RNA
tacttaatgatctgggacc

SEQ ID NO: 29477 - RNA, 19 nt, synthetic construct
  misc_feature 1..19: note = siRNA antisense sequence
  source 1..19: mol_type = other RNA
ggtcccagatcattaagta

SEQ ID NO: 29478 - RNA, 19 nt, synthetic construct
  misc_feature 1..19: note = siRNA sense sequence
  source 1..19: mol_type = other RNA
acttaatgatctgggacct

SEQ ID NO: 29479 - RNA, 19 nt, synthetic construct
  misc_feature 1..19: note = siRNA antisense sequence
  source 1..19: mol_type = other RNA
aggtcccagatcattaagt

SEQ ID NO: 29480 - RNA, 19 nt, synthetic construct
  misc_feature 1..19: note = siRNA sense sequence
  source 1..19: mol_type = other RNA
ttaatgatctgggacctaa

SEQ ID NO: 29481 - RNA, 19 nt, synthetic construct
  misc_feature 1..19: note = siRNA antisense sequence
  source 1..19: mol_type = other RNA
ttaggtcccagatcattaa

SEQ ID NO: 29482 - RNA, 19 nt, synthetic construct
  misc_feature 1..19: note = siRNA sense sequence
  source 1..19: mol_type = other RNA
taatgatctgggacctaat

SEQ ID NO: 29483 - RNA, 19 nt, synthetic construct
  misc_feature 1..19: note = siRNA antisense sequence
  source 1..19: mol_type = other RNA
attaggtcccagatcatta

SEQ ID NO: 29484 - RNA, 19 nt, synthetic construct
  misc_feature 1..19: note = siRNA sense sequence
  source 1..19: mol_type = other RNA
aatgatctgggacctaatt

SEQ ID NO: 29485 - RNA, 19 nt, synthetic construct
  misc_feature 1..19: note = siRNA antisense sequence
  source 1..19: mol_type = other RNA
aattaggtcccagatcatt

SEQ ID NO: 29486 - RNA, 19 nt, synthetic construct
  misc_feature 1..19: note = siRNA sense sequence
  source 1..19: mol_type = other RNA
atgatctgggacctaattt

SEQ ID NO: 29487 - RNA, 19 nt, synthetic construct
  misc_feature 1..19: note = siRNA antisense sequence
  source 1..19: mol_type = other RNA
aaattaggtcccagatcat

SEQ ID NO: 29488 - RNA, 19 nt, synthetic construct
  misc_feature 1..19: note = siRNA sense sequence
  source 1..19: mol_type = other RNA
tgatctgggacctaatttt

SEQ ID NO: 29489 - RNA, 19 nt, synthetic construct
  misc_feature 1..19: note = siRNA antisense sequence
  source 1..19: mol_type = other RNA
aaaattaggtcccagatca

SEQ ID NO: 29490 - RNA, 19 nt, synthetic construct
  misc_feature 1..19: note = siRNA sense sequence
  source 1..19: mol_type = other RNA
gatctgggacctaattttc

SEQ ID NO: 29491 - RNA, 19 nt, synthetic construct
  misc_feature 1..19: note = siRNA antisense sequence
  source 1..19: mol_type = other RNA
gaaaattaggtcccagatc

SEQ ID NO: 29492 - RNA, 19 nt, synthetic construct
  misc_feature 1..19: note = siRNA sense sequence
  source 1..19: mol_type = other RNA
tctgggacctaattttctt

SEQ ID NO: 29493 - RNA, 19 nt, synthetic construct
  misc_feature 1..19: note = siRNA antisense sequence
  source 1..19: mol_type = other RNA
aagaaaattaggtcccaga

SEQ ID NO: 29494 - RNA, 19 nt, synthetic construct
  misc_feature 1..19: note = siRNA sense sequence
  source 1..19: mol_type = other RNA
ctgggacctaattttcttc

SEQ ID NO: 29495 - RNA, 19 nt, synthetic construct
  misc_feature 1..19: note = siRNA antisense sequence
  source 1..19: mol_type = other RNA
gaagaaaattaggtcccag

SEQ ID NO: 29496 - RNA, 19 nt, synthetic construct
  misc_feature 1..19: note = siRNA sense sequence
  source 1..19: mol_type = other RNA
gacctaattttcttcagcc

SEQ ID NO: 29497 - RNA, 19 nt, synthetic construct
  misc_feature 1..19: note = siRNA antisense sequence
  source 1..19: mol_type = other RNA
ggctgaagaaaattaggtc

SEQ ID NO: 29498 - RNA, 19 nt, synthetic construct
  misc_feature 1..19: note = siRNA sense sequence
  source 1..19: mol_type = other RNA
acctaattttcttcagccc

SEQ ID NO: 29499 - RNA, 19 nt, synthetic construct
  misc_feature 1..19: note = siRNA antisense sequence
  source 1..19: mol_type = other RNA
gggctgaagaaaattaggt

SEQ ID NO: 29500 - RNA, 19 nt, synthetic construct
  misc_feature 1..19: note = siRNA sense sequence
  source 1..19: mol_type = other RNA
cctaattttcttcagccct

SEQ ID NO: 29501 - RNA, 19 nt, synthetic construct
  misc_feature 1..19: note = siRNA antisense sequence
  source 1..19: mol_type = other RNA
agggctgaagaaaattagg

SEQ ID NO: 29502 - RNA, 19 nt, synthetic construct
  misc_feature 1..19: note = siRNA sense sequence
  source 1..19: mol_type = other RNA
ctaattttcttcagccctg

SEQ ID NO: 29503 - RNA, 19 nt, synthetic construct
  misc_feature 1..19: note = siRNA antisense sequence
  source 1..19: mol_type = other RNA
cagggctgaagaaaattag

SEQ ID NO: 29504 - RNA, 19 nt, synthetic construct
  misc_feature 1..19: note = siRNA sense sequence
  source 1..19: mol_type = other RNA
taattttcttcagccctga

SEQ ID NO: 29505 - RNA, 19 nt, synthetic construct
  misc_feature 1..19: note = siRNA antisense sequence
  source 1..19: mol_type = other RNA
tcagggctgaagaaaatta

SEQ ID NO: 29506 - RNA, 19 nt, synthetic construct
  misc_feature 1..19: note = siRNA sense sequence
  source 1..19: mol_type = other RNA
aattttcttcagccctgat

SEQ ID NO: 29507 - RNA, 19 nt, synthetic construct
  misc_feature 1..19: note = siRNA antisense sequence
  source 1..19: mol_type = other RNA
atcagggctgaagaaaatt

SEQ ID NO: 29508 - RNA, 19 nt, synthetic construct
  misc_feature 1..19: note = siRNA sense sequence
  source 1..19: mol_type = other RNA
attttcttcagccctgatt

SEQ ID NO: 29509 - RNA, 19 nt, synthetic construct
  misc_feature 1..19: note = siRNA antisense sequence
  source 1..19: mol_type = other RNA
aatcagggctgaagaaaat

SEQ ID NO: 29510 - RNA, 19 nt, synthetic construct
  misc_feature 1..19: note = siRNA sense sequence
  source 1..19: mol_type = other RNA
ttttcttcagccctgatta

SEQ ID NO: 29511 - RNA, 19 nt, synthetic construct
  misc_feature 1..19: note = siRNA antisense sequence
  source 1..19: mol_type = other RNA
taatcagggctgaagaaaa

SEQ ID NO: 29512 - RNA, 19 nt, synthetic construct
  misc_feature 1..19: note = siRNA sense sequence
  source 1..19: mol_type = other RNA
ttcttcagccctgattatg

SEQ ID NO: 29513 - RNA, 19 nt, synthetic construct
  misc_feature 1..19: note = siRNA antisense sequence
  source 1..19: mol_type = other RNA
cataatcagggctgaagaa

SEQ ID NO: 29514 - RNA, 19 nt, synthetic construct
  misc_feature 1..19: note = siRNA sense sequence
  source 1..19: mol_type = other RNA
tcttcagccctgattatgc

SEQ ID NO: 29515 - RNA, 19 nt, synthetic construct
  misc_feature 1..19: note = siRNA antisense sequence
  source 1..19: mol_type = other RNA
gcataatcagggctgaaga

SEQ ID NO: 29516 - RNA, 19 nt, synthetic construct
  misc_feature 1..19: note = siRNA sense sequence
  source 1..19: mol_type = other RNA
cttcagccctgattatgct

SEQ ID NO: 29517 - RNA, 19 nt, synthetic construct
  misc_feature 1..19: note = siRNA antisense sequence
  source 1..19: mol_type = other RNA
agcataatcagggctgaag

SEQ ID NO: 29518 - RNA, 19 nt, synthetic construct
  misc_feature 1..19: note = siRNA sense sequence
  source 1..19: mol_type = other RNA
ttcagccctgattatgctt

SEQ ID NO: 29519 - RNA, 19 nt, synthetic construct
  misc_feature 1..19: note = siRNA antisense sequence
  source 1..19: mol_type = other RNA
aagcataatcagggctgaa

SEQ ID NO: 29520 - RNA, 19 nt, synthetic construct
  misc_feature 1..19: note = siRNA sense sequence
  source 1..19: mol_type = other RNA
tcagccctgattatgcttt

SEQ ID NO: 29521 - RNA, 19 nt, synthetic construct
  misc_feature 1..19: note = siRNA antisense sequence
  source 1..19: mol_type = other RNA
aaagcataatcagggctga

SEQ ID NO: 29522 - RNA, 19 nt, synthetic construct
  misc_feature 1..19: note = siRNA sense sequence
  source 1..19: mol_type = other RNA
ctttgtttcatgaccttta

SEQ ID NO: 29523 - RNA, 19 nt, synthetic construct
  misc_feature 1..19: note = siRNA antisense sequence
  source 1..19: mol_type = other RNA
taaaggtcatgaaacaaag

SEQ ID NO: 29524 - RNA, 19 nt, synthetic construct
  misc_feature 1..19: note = siRNA sense sequence
  source 1..19: mol_type = other RNA
aagtcacttaccaaaggaa

SEQ ID NO: 29525 - RNA, 19 nt, synthetic construct
  misc_feature 1..19: note = siRNA antisense sequence
  source 1..19: mol_type = other RNA
ttcctttggtaagtgactt

SEQ ID NO: 29526 - RNA, 19 nt, synthetic construct
  misc_feature 1..19: note = siRNA sense sequence
  source 1..19: mol_type = other RNA
agtcacttaccaaaggaat

SEQ ID NO: 29527 - RNA, 19 nt, synthetic construct
  misc_feature 1..19: note = siRNA antisense sequence
  source 1..19: mol_type = other RNA
attcctttggtaagtgact

SEQ ID NO: 29528 - RNA, 19 nt, synthetic construct
  misc_feature 1..19: note = siRNA sense sequence
  source 1..19: mol_type = other RNA
gtcacttaccaaaggaatt

SEQ ID NO: 29529 - RNA, 19 nt, synthetic construct
  misc_feature 1..19: note = siRNA antisense sequence
  source 1..19: mol_type = other RNA
aattcctttggtaagtgac

SEQ ID NO: 29530 - RNA, 19 nt, synthetic construct
  misc_feature 1..19: note = siRNA sense sequence
  source 1..19: mol_type = other RNA
tcacttaccaaaggaatta

SEQ ID NO: 29531 - RNA, 19 nt, synthetic construct
  misc_feature 1..19: note = siRNA antisense sequence
  source 1..19: mol_type = other RNA
taattcctttggtaagtga

SEQ ID NO: 29532 - RNA, 19 nt, synthetic construct
  misc_feature 1..19: note = siRNA sense sequence
  source 1..19: mol_type = other RNA
cacttaccaaaggaattaa

SEQ ID NO: 29533 - RNA, 19 nt, synthetic construct
  misc_feature 1..19: note = siRNA antisense sequence
  source 1..19: mol_type = other RNA
ttaattcctttggtaagtg

SEQ ID NO: 29534 - RNA, 19 nt, synthetic construct
  misc_feature 1..19: note = siRNA sense sequence
  source 1..19: mol_type = other RNA
ccaaaggaattaaatatgg

SEQ ID NO: 29535 - RNA, 19 nt, synthetic construct
  misc_feature 1..19: note = siRNA antisense sequence
  source 1..19: mol_type = other RNA
ccatatttaattcctttgg

SEQ ID NO: 29536 - RNA, 19 nt, synthetic construct
  misc_feature 1..19: note = siRNA sense sequence
  source 1..19: mol_type = other RNA
tatgtacatgattcatcca

SEQ ID NO: 29537 - RNA, 19 nt, synthetic construct
  misc_feature 1..19: note = siRNA antisense sequence
  source 1..19: mol_type = other RNA
tggatgaatcatgtacata

SEQ ID NO: 29538 - RNA, 19 nt, synthetic construct
  misc_feature 1..19: note = siRNA sense sequence
  source 1..19: mol_type = other RNA
atgtacatgattcatccac

SEQ ID NO: 29539 - RNA, 19 nt, synthetic construct
  misc_feature 1..19: note = siRNA antisense sequence
  source 1..19: mol_type = other RNA
gtggatgaatcatgtacat

SEQ ID NO: 29540 - RNA, 19 nt, synthetic construct
  misc_feature 1..19: note = siRNA sense sequence
  source 1..19: mol_type = other RNA
tgtacatgattcatccaca

SEQ ID NO: 29541 - RNA, 19 nt, synthetic construct
  misc_feature 1..19: note = siRNA antisense sequence
  source 1..19: mol_type = other RNA
tgtggatgaatcatgtaca

SEQ ID NO: 29542 - RNA, 19 nt, synthetic construct
  misc_feature 1..19: note = siRNA sense sequence
  source 1..19: mol_type = other RNA
catgattcatccacatttt

SEQ ID NO: 29543 - RNA, 19 nt, synthetic construct
  misc_feature 1..19: note = siRNA antisense sequence
  source 1..19: mol_type = other RNA
aaaatgtggatgaatcatg

SEQ ID NO: 29544 - RNA, 19 nt, synthetic construct
  misc_feature 1..19: note = siRNA sense sequence
  source 1..19: mol_type = other RNA
tatctatccttacttctgt

SEQ ID NO: 29545 - RNA, 19 nt, synthetic construct
  misc_feature 1..19: note = siRNA antisense sequence
  source 1..19: mol_type = other RNA
acagaagtaaggatagata

SEQ ID NO: 29546 - RNA, 19 nt, synthetic construct
  misc_feature 1..19: note = siRNA sense sequence
  source 1..19: mol_type = other RNA
atctatccttacttctgtt

SEQ ID NO: 29547 - RNA, 19 nt, synthetic construct
  misc_feature 1..19: note = siRNA antisense sequence
  source 1..19: mol_type = other RNA
aacagaagtaaggatagat

SEQ ID NO: 29548 - RNA, 19 nt, synthetic construct
  misc_feature 1..19: note = siRNA sense sequence
  source 1..19: mol_type = other RNA
tctatccttacttctgttt

SEQ ID NO: 29549 - RNA, 19 nt, synthetic construct
  misc_feature 1..19: note = siRNA antisense sequence
  source 1..19: mol_type = other RNA
aaacagaagtaaggataga

SEQ ID NO: 29550 - RNA, 19 nt, synthetic construct
  misc_feature 1..19: note = siRNA sense sequence
  source 1..19: mol_type = other RNA
tccttttgtctcccattaa

SEQ ID NO: 29551 - RNA, 19 nt, synthetic construct
  misc_feature 1..19: note = siRNA antisense sequence
  source 1..19: mol_type = other RNA
ttaatgggagacaaaagga

SEQ ID NO: 29552 - RNA, 19 nt, synthetic construct
  misc_feature 1..19: note = siRNA sense sequence
  source 1..19: mol_type = other RNA
ccttttgtctcccattaat

SEQ ID NO: 29553 - RNA, 19 nt, synthetic construct
  misc_feature 1..19: note = siRNA antisense sequence
  source 1..19: mol_type = other RNA
attaatgggagacaaaagg

SEQ ID NO: 29554 - RNA, 19 nt, synthetic construct
  misc_feature 1..19: note = siRNA sense sequence
  source 1..19: mol_type = other RNA
cttttgtctcccattaatg

SEQ ID NO: 29555 - RNA, 19 nt, synthetic construct
  misc_feature 1..19: note = siRNA antisense sequence
  source 1..19: mol_type = other RNA
cattaatgggagacaaaag

SEQ ID NO: 29556 - RNA, 19 nt, synthetic construct
  misc_feature 1..19: note = siRNA sense sequence
  source 1..19: mol_type = other RNA
ttttgtctcccattaatga

SEQ ID NO: 29557 - RNA, 19 nt, synthetic construct
  misc_feature 1..19: note = siRNA antisense sequence
  source 1..19: mol_type = other RNA
tcattaatgggagacaaaa

SEQ ID NO: 29558 - RNA, 19 nt, synthetic construct
  misc_feature 1..19: note = siRNA sense sequence
  source 1..19: mol_type = other RNA
tttgtctcccattaatgat

SEQ ID NO: 29559 - RNA, 19 nt, synthetic construct
  misc_feature 1..19: note = siRNA antisense sequence
  source 1..19: mol_type = other RNA
atcattaatgggagacaaa

SEQ ID NO: 29560 - RNA, 19 nt, synthetic construct
  misc_feature 1..19: note = siRNA sense sequence
  source 1..19: mol_type = other RNA
ttgtctcccattaatgata

SEQ ID NO: 29561 - RNA, 19 nt, synthetic construct
  misc_feature 1..19: note = siRNA antisense sequence
  source 1..19: mol_type = other RNA
tatcattaatgggagacaa

SEQ ID NO: 29562 - RNA, 19 nt, synthetic construct
  misc_feature 1..19: note = siRNA sense sequence
  source 1..19: mol_type = other RNA
tgtctcccattaatgataa

SEQ ID NO: 29563 - RNA, 19 nt, synthetic construct
  misc_feature 1..19: note = siRNA antisense sequence
  source 1..19: mol_type = other RNA
ttatcattaatgggagaca

SEQ ID NO: 29564 - RNA, 19 nt, synthetic construct
  misc_feature 1..19: note = siRNA sense sequence
  source 1..19: mol_type = other RNA
gtctcccattaatgataaa

SEQ ID NO: 29565 - RNA, 19 nt, synthetic construct
  misc_feature 1..19: note = siRNA antisense sequence
  source 1..19: mol_type = other RNA
tttatcattaatgggagac

SEQ ID NO: 29566 - RNA, 19 nt, synthetic construct
  misc_feature 1..19: note = siRNA sense sequence
  source 1..19: mol_type = other RNA
cggaatcttgctctgttgc

SEQ ID NO: 29567 - RNA, 19 nt, synthetic construct
  misc_feature 1..19: note = siRNA antisense sequence
  source 1..19: mol_type = other RNA
gcaacagagcaagattccg

SEQ ID NO: 29568 - RNA, 19 nt, synthetic construct
  misc_feature 1..19: note = siRNA sense sequence
  source 1..19: mol_type = other RNA
ggaatcttgctctgttgcc

SEQ ID NO: 29569 - RNA, 19 nt, synthetic construct
  misc_feature 1..19: note = siRNA antisense sequence
  source 1..19: mol_type = other RNA
ggcaacagagcaagattcc

SEQ ID NO: 29570 - RNA, 19 nt, synthetic construct
  misc_feature 1..19: note = siRNA sense sequence
  source 1..19: mol_type = other RNA
gaatcttgctctgttgccc

SEQ ID NO: 29571 - RNA, 19 nt, synthetic construct
  misc_feature 1..19: note = siRNA antisense sequence
  source 1..19: mol_type = other RNA
gggcaacagagcaagattc

SEQ ID NO: 29572 - RNA, 19 nt, synthetic construct
  misc_feature 1..19: note = siRNA sense sequence
  source 1..19: mol_type = other RNA
aatcttgctctgttgccca

SEQ ID NO: 29573 - RNA, 19 nt, synthetic construct
  misc_feature 1..19: note = siRNA antisense sequence
  source 1..19: mol_type = other RNA
tgggcaacagagcaagatt

SEQ ID NO: 29574 - RNA, 19 nt, synthetic construct
  misc_feature 1..19: note = siRNA sense sequence
  source 1..19: mol_type = other RNA
atcttgctctgttgcccag

SEQ ID NO: 29575 - RNA, 19 nt, synthetic construct
  misc_feature 1..19: note = siRNA antisense sequence
  source 1..19: mol_type = other RNA
ctgggcaacagagcaagat

SEQ ID NO: 29576 - RNA, 19 nt, synthetic construct
  misc_feature 1..19: note = siRNA sense sequence
  source 1..19: mol_type = other RNA
tcttgctctgttgcccagg

SEQ ID NO: 29577 - RNA, 19 nt, synthetic construct
  misc_feature 1..19: note = siRNA antisense sequence
  source 1..19: mol_type = other RNA
cctgggcaacagagcaaga

SEQ ID NO: 29578 - RNA, 19 nt, synthetic construct
  misc_feature 1..19: note = siRNA sense sequence
  source 1..19: mol_type = other RNA
cttgctctgttgcccaggc

SEQ ID NO: 29579 - RNA, 19 nt, synthetic construct
  misc_feature 1..19: note = siRNA antisense sequence
  source 1..19: mol_type = other RNA
gcctgggcaacagagcaag

SEQ ID NO: 29580 - RNA, 19 nt, synthetic construct
  misc_feature 1..19: note = siRNA sense sequence
  source 1..19: mol_type = other RNA
ttgctctgttgcccaggct

SEQ ID NO: 29581 - RNA, 19 nt, synthetic construct
  misc_feature 1..19: note = siRNA antisense sequence
  source 1..19: mol_type = other RNA
agcctgggcaacagagcaa

SEQ ID NO: 29582 - RNA, 19 nt, synthetic construct
  misc_feature 1..19: note = siRNA sense sequence
  source 1..19: mol_type = other RNA
tgctctgttgcccaggctg

SEQ ID NO: 29583 - RNA, 19 nt, synthetic construct
  misc_feature 1..19: note = siRNA antisense sequence
  source 1..19: mol_type = other RNA
cagcctgggcaacagagca

SEQ ID NO: 29584 - RNA, 19 nt, synthetic construct
  misc_feature 1..19: note = siRNA sense sequence
  source 1..19: mol_type = other RNA
ctctgttgcccaggctgga

SEQ ID NO: 29585 - RNA, 19 nt, synthetic construct
  misc_feature 1..19: note = siRNA antisense sequence
  source 1..19: mol_type = other RNA
tccagcctgggcaacagag

SEQ ID NO: 29586 - RNA, 19 nt, synthetic construct
  misc_feature 1..19: note = siRNA sense sequence
  source 1..19: mol_type = other RNA
tctgttgcccaggctggag

SEQ ID NO: 29587 - RNA, 19 nt, synthetic construct
  misc_feature 1..19: note = siRNA antisense sequence
  source 1..19: mol_type = other RNA
ctccagcctgggcaacaga

SEQ ID NO: 29588 - RNA, 19 nt, synthetic construct
  misc_feature 1..19: note = siRNA sense sequence
  source 1..19: mol_type = other RNA
ggctggagcggaatggcat

SEQ ID NO: 29589 - RNA, 19 nt, synthetic construct
  misc_feature 1..19: note = siRNA antisense sequence
  source 1..19: mol_type = other RNA
atgccattccgctccagcc

SEQ ID NO: 29590 - RNA, 19 nt, synthetic construct
  misc_feature 1..19: note = siRNA sense sequence
  source 1..19: mol_type = other RNA
gctggagcggaatggcatg

SEQ ID NO: 29591 - RNA, 19 nt, synthetic construct
  misc_feature 1..19: note = siRNA antisense sequence
  source 1..19: mol_type = other RNA
catgccattccgctccagc

SEQ ID NO: 29592 - RNA, 19 nt, synthetic construct
  misc_feature 1..19: note = siRNA sense sequence
  source 1..19: mol_type = other RNA
ctggagcggaatggcatga

SEQ ID NO: 29593 - RNA, 19 nt, synthetic construct
  misc_feature 1..19: note = siRNA antisense sequence
  source 1..19: mol_type = other RNA
tcatgccattccgctccag

SEQ ID NO: 29594 - RNA, 19 nt, synthetic construct
  misc_feature 1..19: note = siRNA sense sequence
  source 1..19: mol_type = other RNA
tggagcggaatggcatgat

SEQ ID NO: 29595 - RNA, 19 nt, synthetic construct
  misc_feature 1..19: note = siRNA antisense sequence
  source 1..19: mol_type = other RNA
atcatgccattccgctcca

SEQ ID NO: 29596 - RNA, 19 nt, synthetic construct
  misc_feature 1..19: note = siRNA sense sequence
  source 1..19: mol_type = other RNA
ggagcggaatggcatgatc

SEQ ID NO: 29597 - RNA, 19 nt, synthetic construct
  misc_feature 1..19: note = siRNA antisense sequence
  source 1..19: mol_type = other RNA
gatcatgccattccgctcc

SEQ ID NO: 29598 - RNA, 19 nt, synthetic construct
  misc_feature 1..19: note = siRNA sense sequence
  source 1..19: mol_type = other RNA
gagcggaatggcatgatcc

SEQ ID NO: 29599 - RNA, 19 nt, synthetic construct
  misc_feature 1..19: note = siRNA antisense sequence
  source 1..19: mol_type = other RNA
ggatcatgccattccgctc

SEQ ID NO: 29600 - RNA, 19 nt, synthetic construct
  misc_feature 1..19: note = siRNA sense sequence
  source 1..19: mol_type = other RNA
agcggaatggcatgatccc

SEQ ID NO: 29601 - RNA, 19 nt, synthetic construct
  misc_feature 1..19: note = siRNA antisense sequence
  source 1..19: mol_type = other RNA
gggatcatgccattccgct

SEQ ID NO: 29602 - RNA, 19 nt, synthetic construct
  misc_feature 1..19: note = siRNA sense sequence
  source 1..19: mol_type = other RNA
ggcatgatcccagcctatg

SEQ ID NO: 29603 - RNA, 19 nt, synthetic construct
  misc_feature 1..19: note = siRNA antisense sequence
  source 1..19: mol_type = other RNA
cataggctgggatcatgcc

SEQ ID NO: 29604 - RNA, 19 nt, synthetic construct
  misc_feature 1..19: note = siRNA sense sequence
  source 1..19: mol_type = other RNA
gcatgatcccagcctatgg

SEQ ID NO: 29605 - RNA, 19 nt, synthetic construct
  misc_feature 1..19: note = siRNA antisense sequence
  source 1..19: mol_type = other RNA
ccataggctgggatcatgc

SEQ ID NO: 29606 - RNA, 19 nt, synthetic construct
  misc_feature 1..19: note = siRNA sense sequence
  source 1..19: mol_type = other RNA
catgatcccagcctatggt

SEQ ID NO: 29607 - RNA, 19 nt, synthetic construct
  misc_feature 1..19: note = siRNA antisense sequence
  source 1..19: mol_type = other RNA
accataggctgggatcatg

SEQ ID NO: 29608 - RNA, 19 nt, synthetic construct
  misc_feature 1..19: note = siRNA sense sequence
  source 1..19: mol_type = other RNA
atgatcccagcctatggtg

SEQ ID NO: 29609 - RNA, 19 nt, synthetic construct
  misc_feature 1..19: note = siRNA antisense sequence
  source 1..19: mol_type = other RNA
caccataggctgggatcat

SEQ ID NO: 29610 - RNA, 19 nt, synthetic construct
  misc_feature 1..19: note = siRNA sense sequence
  source 1..19: mol_type = other RNA
tgatcccagcctatggtga

SEQ ID NO: 29611 - RNA, 19 nt, synthetic construct
  misc_feature 1..19: note = siRNA antisense sequence
  source 1..19: mol_type = other RNA
tcaccataggctgggatca

SEQ ID NO: 29612 - RNA, 19 nt, synthetic construct
  misc_feature 1..19: note = siRNA sense sequence
  source 1..19: mol_type = other RNA
gatcccagcctatggtgac

SEQ ID NO: 29613 - RNA, 19 nt, synthetic construct
  misc_feature 1..19: note = siRNA antisense sequence
  source 1..19: mol_type = other RNA
gtcaccataggctgggatc

SEQ ID NO: 29614 - RNA, 19 nt, synthetic construct
  misc_feature 1..19: note = siRNA sense sequence
  source 1..19: mol_type = other RNA
atcccagcctatggtgacc

SEQ ID NO: 29615 - RNA, 19 nt, synthetic construct
  misc_feature 1..19: note = siRNA antisense sequence
  source 1..19: mol_type = other RNA
ggtcaccataggctgggat

SEQ ID NO: 29616 - RNA, 19 nt, synthetic construct
  misc_feature 1..19: note = siRNA sense sequence
  source 1..19: mol_type = other RNA
cagcctatggtgacctctg

SEQ ID NO: 29617 - RNA, 19 nt, synthetic construct
  misc_feature 1..19: note = siRNA antisense sequence
  source 1..19: mol_type = other RNA
cagaggtcaccataggctg

SEQ ID NO: 29618 - RNA, 19 nt, synthetic construct
  misc_feature 1..19: note = siRNA sense sequence
  source 1..19: mol_type = other RNA
acctctgcctcccgagttc

SEQ ID NO: 29619 - RNA, 19 nt, synthetic construct
  misc_feature 1..19: note = siRNA antisense sequence
  source 1..19: mol_type = other RNA
gaactcgggaggcagaggt

SEQ ID NO: 29620 - RNA, 19 nt, synthetic construct
  misc_feature 1..19: note = siRNA sense sequence
  source 1..19: mol_type = other RNA
cacatgttgctcaggctgg

SEQ ID NO: 29621 - RNA, 19 nt, synthetic construct
  misc_feature 1..19: note = siRNA antisense sequence
  source 1..19: mol_type = other RNA
ccagcctgagcaacatgtg

SEQ ID NO: 29622 - RNA, 19 nt, synthetic construct
  misc_feature 1..19: note = siRNA sense sequence
  source 1..19: mol_type = other RNA
gttgctcaggctggtcttg

SEQ ID NO: 29623 - RNA, 19 nt, synthetic construct
  misc_feature 1..19: note = siRNA antisense sequence
  source 1..19: mol_type = other RNA
caagaccagcctgagcaac

SEQ ID NO: 29624 - RNA, 19 nt, synthetic construct
  misc_feature 1..19: note = siRNA sense sequence
  source 1..19: mol_type = other RNA
ttgctcaggctggtcttga

SEQ ID NO: 29625 - RNA, 19 nt, synthetic construct
  misc_feature 1..19: note = siRNA antisense sequence
  source 1..19: mol_type = other RNA
tcaagaccagcctgagcaa

SEQ ID NO: 29626 - RNA, 19 nt, synthetic construct
  misc_feature 1..19: note = siRNA sense sequence
  source 1..19: mol_type = other RNA
tgctcaggctggtcttgaa

SEQ ID NO: 29627 - RNA, 19 nt, synthetic construct
  misc_feature 1..19: note = siRNA antisense sequence
  source 1..19: mol_type = other RNA
ttcaagaccagcctgagca

SEQ ID NO: 29628 - RNA, 19 nt, synthetic construct
  misc_feature 1..19: note = siRNA sense sequence
  source 1..19: mol_type = other RNA
tggcctcccaaagtgctag

SEQ ID NO: 29629 - RNA, 19 nt, synthetic construct
  misc_feature 1..19: note = siRNA antisense sequence
  source 1..19: mol_type = other RNA
ctagcactttgggaggcca

SEQ ID NO: 29630 - RNA, 19 nt, synthetic construct
  misc_feature 1..19: note = siRNA sense sequence
  source 1..19: mol_type = other RNA
ggcctcccaaagtgctagg

SEQ ID NO: 29631 - RNA, 19 nt, synthetic construct
  misc_feature 1..19: note = siRNA antisense sequence
  source 1..19: mol_type = other RNA
cctagcactttgggaggcc

SEQ ID NO: 29632 - RNA, 19 nt, synthetic construct
  misc_feature 1..19: note = siRNA sense sequence
  source 1..19: mol_type = other RNA
gcctcccaaagtgctagga

SEQ ID NO: 29633 - RNA, 19 nt, synthetic construct
  misc_feature 1..19: note = siRNA antisense sequence
  source 1..19: mol_type = other RNA
tcctagcactttgggaggc

SEQ ID NO: 29634 - RNA, 19 nt, synthetic construct
  misc_feature 1..19: note = siRNA sense sequence
  source 1..19: mol_type = other RNA
cctcccaaagtgctaggat

SEQ ID NO: 29635 - RNA, 19 nt, synthetic construct
  misc_feature 1..19: note = siRNA antisense sequence
  source 1..19: mol_type = other RNA
atcctagcactttgggagg

SEQ ID NO: 29636 - RNA, 19 nt, synthetic construct
  misc_feature 1..19: note = siRNA sense sequence
  source 1..19: mol_type = other RNA
ctcccaaagtgctaggatt

SEQ ID NO: 29637 - RNA, 19 nt, synthetic construct
  misc_feature 1..19: note = siRNA antisense sequence
  source 1..19: mol_type = other RNA
aatcctagcactttgggag

SEQ ID NO: 29638 - RNA, 19 nt, synthetic construct
  misc_feature 1..19: note = siRNA sense sequence
  source 1..19: mol_type = other RNA
tcccaaagtgctaggatta

SEQ ID NO: 29639 - RNA, 19 nt, synthetic construct
  misc_feature 1..19: note = siRNA antisense sequence
  source 1..19: mol_type = other RNA
taatcctagcactttggga

SEQ ID NO: 29640 - RNA, 19 nt, synthetic construct
  misc_feature 1..19: note = siRNA sense sequence
  source 1..19: mol_type = other RNA
cccaaagtgctaggattac

SEQ ID NO: 29641 - RNA, 19 nt, synthetic construct
  misc_feature 1..19: note = siRNA antisense sequence
  source 1..19: mol_type = other RNA
gtaatcctagcactttggg

SEQ ID NO: 29642 - RNA, 19 nt, synthetic construct
  misc_feature 1..19: note = siRNA sense sequence
  source 1..19: mol_type = other RNA
ccaaagtgctaggattaca

SEQ ID NO: 29643 - RNA, 19 nt, synthetic construct
  misc_feature 1..19: note = siRNA antisense sequence
  source 1..19: mol_type = other RNA
tgtaatcctagcactttgg

SEQ ID NO: 29644 - RNA, 19 nt, synthetic construct
  misc_feature 1..19: note = siRNA sense sequence
  source 1..19: mol_type = other RNA
agcatgagccactgtgccc

SEQ ID NO: 29645 - RNA, 19 nt, synthetic construct
  misc_feature 1..19: note = siRNA antisense sequence
  source 1..19: mol_type = other RNA
gggcacagtggctcatgct

SEQ ID NO: 29646 - RNA, 19 nt, synthetic construct
  misc_feature 1..19: note = siRNA sense sequence
  source 1..19: mol_type = other RNA
gccagattgttctctctta

SEQ ID NO: 29647 - RNA, 19 nt, synthetic construct
  misc_feature 1..19: note = siRNA antisense sequence
  source 1..19: mol_type = other RNA
taagagagaacaatctggc

SEQ ID NO: 29648 - RNA, 19 nt, synthetic construct
  misc_feature 1..19: note = siRNA sense sequence
  source 1..19: mol_type = other RNA
ccagattgttctctcttaa

SEQ ID NO: 29649 - RNA, 19 nt, synthetic construct
  misc_feature 1..19: note = siRNA antisense sequence
  source 1..19: mol_type = other RNA
ttaagagagaacaatctgg

SEQ ID NO: 29650 - RNA, 19 nt, synthetic construct
  misc_feature 1..19: note = siRNA sense sequence
  source 1..19: mol_type = other RNA
gattgttctctcttaatgg

SEQ ID NO: 29651 - RNA, 19 nt, synthetic construct
  misc_feature 1..19: note = siRNA antisense sequence
  source 1..19: mol_type = other RNA
ccattaagagagaacaatc

SEQ ID NO: 29652 - RNA, 19 nt, synthetic construct
  misc_feature 1..19: note = siRNA sense sequence
  source 1..19: mol_type = other RNA
attgttctctcttaatggg

SEQ ID NO: 29653 - RNA, 19 nt, synthetic construct
  misc_feature 1..19: note = siRNA antisense sequence
  source 1..19: mol_type = other RNA
cccattaagagagaacaat

SEQ ID NO: 29654 - RNA, 19 nt, synthetic construct
  misc_feature 1..19: note = siRNA sense sequence
  source 1..19: mol_type = other RNA
ttgttctctcttaatgggc

SEQ ID NO: 29655 - RNA, 19 nt, synthetic construct
  misc_feature 1..19: note = siRNA antisense sequence
  source 1..19: mol_type = other RNA
gcccattaagagagaacaa

SEQ ID NO: 29656 - RNA, 19 nt, synthetic construct
  misc_feature 1..19: note = siRNA sense sequence
  source 1..19: mol_type = other RNA
tgttctctcttaatgggct

SEQ ID NO: 29657 - RNA, 19 nt, synthetic construct
  misc_feature 1..19: note = siRNA antisense sequence
  source 1..19: mol_type = other RNA
agcccattaagagagaaca

SEQ ID NO: 29658 - RNA, 19 nt, synthetic construct
  misc_feature 1..19: note = siRNA sense sequence
  source 1..19: mol_type = other RNA
gttctctcttaatgggctg

SEQ ID NO: 29659 - RNA, 19 nt, synthetic construct
  misc_feature 1..19: note = siRNA antisense sequence
  source 1..19: mol_type = other RNA
cagcccattaagagagaac

SEQ ID NO: 29660 - RNA, 19 nt, synthetic construct
  misc_feature 1..19: note = siRNA sense sequence
  source 1..19: mol_type = other RNA
ttctctcttaatgggctga

SEQ ID NO: 29661 - RNA, 19 nt, synthetic construct
  misc_feature 1..19: note = siRNA antisense sequence
  source 1..19: mol_type = other RNA
tcagcccattaagagagaa

SEQ ID NO: 29662 - RNA, 19 nt, synthetic construct
  misc_feature 1..19: note = siRNA sense sequence
  source 1..19: mol_type = other RNA
ttaatgggctgataagtaa

SEQ ID NO: 29663 - RNA, 19 nt, synthetic construct
  misc_feature 1..19: note = siRNA antisense sequence
  source 1..19: mol_type = other RNA
ttacttatcagcccattaa

SEQ ID NO: 29664 - RNA, 19 nt, synthetic construct
  misc_feature 1..19: note = siRNA sense sequence
  source 1..19: mol_type = other RNA
taatgggctgataagtaac

SEQ ID NO: 29665 - RNA, 19 nt, synthetic construct
  misc_feature 1..19: note = siRNA antisense sequence
  source 1..19: mol_type = other RNA
gttacttatcagcccatta

SEQ ID NO: 29666 - RNA, 19 nt, synthetic construct
  misc_feature 1..19: note = siRNA sense sequence
  source 1..19: mol_type = other RNA
gggctgataagtaaccaag

SEQ ID NO: 29667 - RNA, 19 nt, synthetic construct
  misc_feature 1..19: note = siRNA antisense sequence
  source 1..19: mol_type = other RNA
cttggttacttatcagccc

SEQ ID NO: 29668 - RNA, 19 nt, synthetic construct
  misc_feature 1..19: note = siRNA sense sequence
  source 1..19: mol_type = other RNA
ggctgataagtaaccaagt

SEQ ID NO: 29669 - RNA, 19 nt, synthetic construct
  misc_feature 1..19: note = siRNA antisense sequence
  source 1..19: mol_type = other RNA
acttggttacttatcagcc

SEQ ID NO: 29670 - RNA, 19 nt, synthetic construct
  misc_feature 1..19: note = siRNA sense sequence
  source 1..19: mol_type = other RNA
gctgataagtaaccaagta

SEQ ID NO: 29671 - RNA, 19 nt, synthetic construct
  misc_feature 1..19: note = siRNA antisense sequence
  source 1..19: mol_type = other RNA
tacttggttacttatcagc

SEQ ID NO: 29672 - RNA, 19 nt, synthetic construct
  misc_feature 1..19: note = siRNA sense sequence
  source 1..19: mol_type = other RNA
ctgataagtaaccaagtaa

SEQ ID NO: 29673 - RNA, 19 nt, synthetic construct
  misc_feature 1..19: note = siRNA antisense sequence
  source 1..19: mol_type = other RNA
ttacttggttacttatcag

SEQ ID NO: 29674 - RNA, 19 nt, synthetic construct
  misc_feature 1..19: note = siRNA sense sequence
  source 1..19: mol_type = other RNA
acatattgtacttttaccc

SEQ ID NO: 29675 - RNA, 19 nt, synthetic construct
  misc_feature 1..19: note = siRNA antisense sequence
  source 1..19: mol_type = other RNA
gggtaaaagtacaatatgt

SEQ ID NO: 29676 - RNA, 19 nt, synthetic construct
  misc_feature 1..19: note = siRNA sense sequence
  source 1..19: mol_type = other RNA
agaggcagcaagcccaagc

SEQ ID NO: 29677 - RNA, 19 nt, synthetic construct
  misc_feature 1..19: note = siRNA antisense sequence
  source 1..19: mol_type = other RNA
gcttgggcttgctgcctct

SEQ ID NO: 29678 - RNA, 19 nt, synthetic construct
  misc_feature 1..19: note = siRNA sense sequence
  source 1..19: mol_type = other RNA
gaggcagcaagcccaagct

SEQ ID NO: 29679 - RNA, 19 nt, synthetic construct
  misc_feature 1..19: note = siRNA antisense sequence
  source 1..19: mol_type = other RNA
agcttgggcttgctgcctc

SEQ ID NO: 29680 - RNA, 19 nt, synthetic construct
  misc_feature 1..19: note = siRNA sense sequence
  source 1..19: mol_type = other RNA
agcccaagctgcagaatgc

SEQ ID NO: 29681 - RNA, 19 nt, synthetic construct
  misc_feature 1..19: note = siRNA antisense sequence
  source 1..19: mol_type = other RNA
gcattctgcagcttgggct

SEQ ID NO: 29682 - RNA, 19 nt, synthetic construct
  misc_feature 1..19: note = siRNA sense sequence
  source 1..19: mol_type = other RNA
gcccaagctgcagaatgcc

SEQ ID NO: 29683 - RNA, 19 nt, synthetic construct
  misc_feature 1..19: note = siRNA antisense sequence
  source 1..19: mol_type = other RNA
ggcattctgcagcttgggc

SEQ ID NO: 29684 - RNA, 19 nt, synthetic construct
  misc_feature 1..19: note = siRNA sense sequence
  source 1..19: mol_type = other RNA
cccaagctgcagaatgccc

SEQ ID NO: 29685 - RNA, 19 nt, synthetic construct
  misc_feature 1..19: note = siRNA antisense sequence
  source 1..19: mol_type = other RNA
gggcattctgcagcttggg

SEQ ID NO: 29686 - RNA, 19 nt, synthetic construct
  misc_feature 1..19: note = siRNA sense sequence
  source 1..19: mol_type = other RNA
ccaagctgcagaatgccca

SEQ ID NO: 29687 - RNA, 19 nt, synthetic construct
  misc_feature 1..19: note = siRNA antisense sequence
  source 1..19: mol_type = other RNA
tgggcattctgcagcttgg

SEQ ID NO: 29688 - RNA, 19 nt, synthetic construct
  misc_feature 1..19: note = siRNA sense sequence
  source 1..19: mol_type = other RNA
caagctgcagaatgcccaa

SEQ ID NO: 29689 - RNA, 19 nt, synthetic construct
  misc_feature 1..19: note = siRNA antisense sequence
  source 1..19: mol_type = other RNA
ttgggcattctgcagcttg

SEQ ID NO: 29690 - RNA, 19 nt, synthetic construct
  misc_feature 1..19: note = siRNA sense sequence
  source 1..19: mol_type = other RNA
aagctgcagaatgcccaat

SEQ ID NO: 29691 - RNA, 19 nt, synthetic construct
  misc_feature 1..19: note = siRNA antisense sequence
  source 1..19: mol_type = other RNA
attgggcattctgcagctt

SEQ ID NO: 29692 - RNA, 19 nt, synthetic construct
  misc_feature 1..19: note = siRNA sense sequence
  source 1..19: mol_type = other RNA
gctgcagaatgcccaatta

SEQ ID NO: 29693 - RNA, 19 nt, synthetic construct
  misc_feature 1..19: note = siRNA antisense sequence
  source 1..19: mol_type = other RNA
taattgggcattctgcagc

SEQ ID NO: 29694 - RNA, 19 nt, synthetic construct
  misc_feature 1..19: note = siRNA sense sequence
  source 1..19: mol_type = other RNA
ctgcagaatgcccaattac

SEQ ID NO: 29695 - RNA, 19 nt, synthetic construct
  misc_feature 1..19: note = siRNA antisense sequence
  source 1..19: mol_type = other RNA
gtaattgggcattctgcag

SEQ ID NO: 29696 - RNA, 19 nt, synthetic construct
  misc_feature 1..19: note = siRNA sense sequence
  source 1..19: mol_type = other RNA
gcagaatgcccaattacac

SEQ ID NO: 29697 - RNA, 19 nt, synthetic construct
  misc_feature 1..19: note = siRNA antisense sequence
  source 1..19: mol_type = other RNA
gtgtaattgggcattctgc

SEQ ID NO: 29698 - RNA, 19 nt, synthetic construct
  misc_feature 1..19: note = siRNA sense sequence
  source 1..19: mol_type = other RNA
caatcctctattagccacc

SEQ ID NO: 29699 - RNA, 19 nt, synthetic construct
  misc_feature 1..19: note = siRNA antisense sequence
  source 1..19: mol_type = other RNA
ggtggctaatagaggattg

SEQ ID NO: 29700 - RNA, 19 nt, synthetic construct
  misc_feature 1..19: note = siRNA sense sequence
  source 1..19: mol_type = other RNA
aatcctctattagccacca

SEQ ID NO: 29701 - RNA, 19 nt, synthetic construct
  misc_feature 1..19: note = siRNA antisense sequence
  source 1..19: mol_type = other RNA
tggtggctaatagaggatt

SEQ ID NO: 29702 - RNA, 19 nt, synthetic construct
  misc_feature 1..19: note = siRNA sense sequence
  source 1..19: mol_type = other RNA
atcctctattagccaccaa

SEQ ID NO: 29703 - RNA, 19 nt, synthetic construct
  misc_feature 1..19: note = siRNA antisense sequence
  source 1..19: mol_type = other RNA
ttggtggctaatagaggat

SEQ ID NO: 29704 - RNA, 19 nt, synthetic construct
  misc_feature 1..19: note = siRNA sense sequence
  source 1..19: mol_type = other RNA
tcctctattagccaccaaa

SEQ ID NO: 29705 - RNA, 19 nt, synthetic construct
  misc_feature 1..19: note = siRNA antisense sequence
  source 1..19: mol_type = other RNA
tttggtggctaatagagga

SEQ ID NO: 29706 - RNA, 19 nt, synthetic construct
  misc_feature 1..19: note = siRNA sense sequence
  source 1..19: mol_type = other RNA
aaataaagacagaagatcc

SEQ ID NO: 29707 - RNA, 19 nt, synthetic construct
  misc_feature 1..19: note = siRNA antisense sequence
  source 1..19: mol_type = other RNA
ggatcttctgtctttattt

SEQ ID NO: 29708 - RNA, 19 nt, synthetic construct
  misc_feature 1..19: note = siRNA sense sequence
  source 1..19: mol_type = other RNA
aataaagacagaagatcct

SEQ ID NO: 29709 - RNA, 19 nt, synthetic construct
  misc_feature 1..19: note = siRNA antisense sequence
  source 1..19: mol_type = other RNA
aggatcttctgtctttatt

SEQ ID NO: 29710 - RNA, 19 nt, synthetic construct
  misc_feature 1..19: note = siRNA sense sequence
  source 1..19: mol_type = other RNA
ataaagacagaagatcctt

SEQ ID NO: 29711 - RNA, 19 nt, synthetic construct
  misc_feature 1..19: note = siRNA antisense sequence
  source 1..19: mol_type = other RNA
aaggatcttctgtctttat

SEQ ID NO: 29712 - RNA, 19 nt, synthetic construct
  misc_feature 1..19: note = siRNA sense sequence
  source 1..19: mol_type = other RNA
aagacagaagatcctttaa

SEQ ID NO: 29713 - RNA, 19 nt, synthetic construct
  misc_feature 1..19: note = siRNA antisense sequence
  source 1..19: mol_type = other RNA
ttaaaggatcttctgtctt

SEQ ID NO: 29714 - RNA, 19 nt, synthetic construct
  misc_feature 1..19: note = siRNA sense sequence
  source 1..19: mol_type = other RNA
agacagaagatcctttaaa

SEQ ID NO: 29715 - RNA, 19 nt, synthetic construct
  misc_feature 1..19: note = siRNA antisense sequence
  source 1..19: mol_type = other RNA
tttaaaggatcttctgtct

SEQ ID NO: 29716 - RNA, 19 nt, synthetic construct
  misc_feature 1..19: note = siRNA sense sequence
  source 1..19: mol_type = other RNA
gacagaagatcctttaaaa

SEQ ID NO: 29717 - RNA, 19 nt, synthetic construct
  misc_feature 1..19: note = siRNA antisense sequence
  source 1..19: mol_type = other RNA
ttttaaaggatcttctgtc

SEQ ID NO: 29718 - RNA, 19 nt, synthetic construct
  misc_feature 1..19: note = siRNA sense sequence
  source 1..19: mol_type = other RNA
actggataaatagtacttc

SEQ ID NO: 29719 - RNA, 19 nt, synthetic construct
  misc_feature 1..19: note = siRNA antisense sequence
  source 1..19: mol_type = other RNA
gaagtactatttatccagt

SEQ ID NO: 29720 - RNA, 19 nt, synthetic construct
  misc_feature 1..19: note = siRNA sense sequence
  source 1..19: mol_type = other RNA
ctggataaatagtacttca

SEQ ID NO: 29721 - RNA, 19 nt, synthetic construct
  misc_feature 1..19: note = siRNA antisense sequence
  source 1..19: mol_type = other RNA
tgaagtactatttatccag

SEQ ID NO: 29722 - RNA, 19 nt, synthetic construct
  misc_feature 1..19: note = siRNA sense sequence
  source 1..19: mol_type = other RNA
tggataaatagtacttcag

SEQ ID NO: 29723 - RNA, 19 nt, synthetic construct
  misc_feature 1..19: note = siRNA antisense sequence
  source 1..19: mol_type = other RNA
ctgaagtactatttatcca

SEQ ID NO: 29724 - RNA, 19 nt, synthetic construct
  misc_feature 1..19: note = siRNA sense sequence
  source 1..19: mol_type = other RNA
ggataaatagtacttcaga

SEQ ID NO: 29725 - RNA, 19 nt, synthetic construct
  misc_feature 1..19: note = siRNA antisense sequence
  source 1..19: mol_type = other RNA
tctgaagtactatttatcc

SEQ ID NO: 29726 - RNA, 19 nt, synthetic construct
  misc_feature 1..19: note = siRNA sense sequence
  source 1..19: mol_type = other RNA
ttgtatgattaaggtggat

SEQ ID NO: 29727 - RNA, 19 nt, synthetic construct
  misc_feature 1..19: note = siRNA antisense sequence
  source 1..19: mol_type = other RNA
atccaccttaatcatacaa

SEQ ID NO: 29728 - RNA, 19 nt, synthetic construct
  misc_feature 1..19: note = siRNA sense sequence
  source 1..19: mol_type = other RNA
tgtatgattaaggtggata

SEQ ID NO: 29729 - RNA, 19 nt, synthetic construct
  misc_feature 1..19: note = siRNA antisense sequence
  source 1..19: mol_type = other RNA
tatccaccttaatcataca

SEQ ID NO: 29730 - RNA, 19 nt, synthetic construct
  misc_feature 1..19: note = siRNA sense sequence
  source 1..19: mol_type = other RNA
gtatgattaaggtggataa

SEQ ID NO: 29731 - RNA, 19 nt, synthetic construct
  misc_feature 1..19: note = siRNA antisense sequence
  source 1..19: mol_type = other RNA
ttatccaccttaatcatac

SEQ ID NO: 29732 - RNA, 19 nt, synthetic construct
  misc_feature 1..19: note = siRNA sense sequence
  source 1..19: mol_type = other RNA
ttaaggtggataattgagc

SEQ ID NO: 29733 - RNA, 19 nt, synthetic construct
  misc_feature 1..19: note = siRNA antisense sequence
  source 1..19: mol_type = other RNA
gctcaattatccaccttaa

SEQ ID NO: 29734 - RNA, 19 nt, synthetic construct
  misc_feature 1..19: note = siRNA sense sequence
  source 1..19: mol_type = other RNA
taaggtggataattgagct

SEQ ID NO: 29735 - RNA, 19 nt, synthetic construct
  misc_feature 1..19: note = siRNA antisense sequence
  source 1..19: mol_type = other RNA
agctcaattatccacctta

SEQ ID NO: 29736 - RNA, 19 nt, synthetic construct
  misc_feature 1..19: note = siRNA sense sequence
  source 1..19: mol_type = other RNA
aaggtggataattgagctg

SEQ ID NO: 29737 - RNA, 19 nt, synthetic construct
  misc_feature 1..19: note = siRNA antisense sequence
  source 1..19: mol_type = other RNA
cagctcaattatccacctt

SEQ ID NO: 29738 - RNA, 19 nt, synthetic construct
  misc_feature 1..19: note = siRNA sense sequence
  source 1..19: mol_type = other RNA
aggtggataattgagctgc

SEQ ID NO: 29739 - RNA, 19 nt, synthetic construct
  misc_feature 1..19: note = siRNA antisense sequence
  source 1..19: mol_type = other RNA
gcagctcaattatccacct

SEQ ID NO: 29740 - RNA, 19 nt, synthetic construct
  misc_feature 1..19: note = siRNA sense sequence
  source 1..19: mol_type = other RNA
ggataattgagctgcttct

SEQ ID NO: 29741 - RNA, 19 nt, synthetic construct
  misc_feature 1..19: note = siRNA antisense sequence
  source 1..19: mol_type = other RNA
agaagcagctcaattatcc

SEQ ID NO: 29742 - RNA, 19 nt, synthetic construct
  misc_feature 1..19: note = siRNA sense sequence
  source 1..19: mol_type = other RNA
ataattgagctgcttctta

SEQ ID NO: 29743 - RNA, 19 nt, synthetic construct
  misc_feature 1..19: note = siRNA antisense sequence
  source 1..19: mol_type = other RNA
taagaagcagctcaattat

SEQ ID NO: 29744 - RNA, 19 nt, synthetic construct
  misc_feature 1..19: note = siRNA sense sequence
  source 1..19: mol_type = other RNA
taattgagctgcttcttat

SEQ ID NO: 29745 - RNA, 19 nt, synthetic construct
  misc_feature 1..19: note = siRNA antisense sequence
  source 1..19: mol_type = other RNA
ataagaagcagctcaatta

SEQ ID NO: 29746 - RNA, 19 nt, synthetic construct
  misc_feature 1..19: note = siRNA sense sequence
  source 1..19: mol_type = other RNA
aattgagctgcttcttatt

SEQ ID NO: 29747 - RNA, 19 nt, synthetic construct
  misc_feature 1..19: note = siRNA antisense sequence
  source 1..19: mol_type = other RNA
aataagaagcagctcaatt

SEQ ID NO: 29748 - RNA, 19 nt, synthetic construct
  misc_feature 1..19: note = siRNA sense sequence
  source 1..19: mol_type = other RNA
attgagctgcttcttattt

SEQ ID NO: 29749 - RNA, 19 nt, synthetic construct
  misc_feature 1..19: note = siRNA antisense sequence
  source 1..19: mol_type = other RNA
aaataagaagcagctcaat

SEQ ID NO: 29750 - RNA, 19 nt, synthetic construct
  misc_feature 1..19: note = siRNA sense sequence
  source 1..19: mol_type = other RNA
ttgagctgcttcttatttt

SEQ ID NO: 29751 - RNA, 19 nt, synthetic construct
  misc_feature 1..19: note = siRNA antisense sequence
  source 1..19: mol_type = other RNA
aaaataagaagcagctcaa

SEQ ID NO: 29752 - RNA, 19 nt, synthetic construct
  misc_feature 1..19: note = siRNA sense sequence
  source 1..19: mol_type = other RNA
acttttgttactacatcca

SEQ ID NO: 29753 - RNA, 19 nt, synthetic construct
  misc_feature 1..19: note = siRNA antisense sequence
  source 1..19: mol_type = other RNA
tggatgtagtaacaaaagt

SEQ ID NO: 29754 - RNA, 19 nt, synthetic construct
  misc_feature 1..19: note = siRNA sense sequence
  source 1..19: mol_type = other RNA
ttttgttactacatccagt

SEQ ID NO: 29755 - RNA, 19 nt, synthetic construct
  misc_feature 1..19: note = siRNA antisense sequence
  source 1..19: mol_type = other RNA
actggatgtagtaacaaaa

SEQ ID NO: 29756 - RNA, 19 nt, synthetic construct
  misc_feature 1..19: note = siRNA sense sequence
  source 1..19: mol_type = other RNA
tttgttactacatccagtg

SEQ ID NO: 29757 - RNA, 19 nt, synthetic construct
  misc_feature 1..19: note = siRNA antisense sequence
  source 1..19: mol_type = other RNA
cactggatgtagtaacaaa

SEQ ID NO: 29758 - RNA, 19 nt, synthetic construct
  misc_feature 1..19: note = siRNA sense sequence
  source 1..19: mol_type = other RNA
ttgttactacatccagtgg

SEQ ID NO: 29759 - RNA, 19 nt, synthetic construct
  misc_feature 1..19: note = siRNA antisense sequence
  source 1..19: mol_type = other RNA
ccactggatgtagtaacaa

SEQ ID NO: 29760 - RNA, 19 nt, synthetic construct
  misc_feature 1..19: note = siRNA sense sequence
  source 1..19: mol_type = other RNA
tgttactacatccagtgga

SEQ ID NO: 29761 - RNA, 19 nt, synthetic construct
  misc_feature 1..19: note = siRNA antisense sequence
  source 1..19: mol_type = other RNA
tccactggatgtagtaaca

SEQ ID NO: 29762 - RNA, 19 nt, synthetic construct
  misc_feature 1..19: note = siRNA sense sequence
  source 1..19: mol_type = other RNA
gttactacatccagtggaa

SEQ ID NO: 29763 - RNA, 19 nt, synthetic construct
  misc_feature 1..19: note = siRNA antisense sequence
  source 1..19: mol_type = other RNA
ttccactggatgtagtaac

SEQ ID NO: 29764 - RNA, 19 nt, synthetic construct
  misc_feature 1..19: note = siRNA sense sequence
  source 1..19: mol_type = other RNA
attctgtatctgttactct

SEQ ID NO: 29765 - RNA, 19 nt, synthetic construct
  misc_feature 1..19: note = siRNA antisense sequence
  source 1..19: mol_type = other RNA
agagtaacagatacagaat

SEQ ID NO: 29766 - RNA, 19 nt, synthetic construct
  misc_feature 1..19: note = siRNA sense sequence
  source 1..19: mol_type = other RNA
ttctgtatctgttactctt

SEQ ID NO: 29767 - RNA, 19 nt, synthetic construct
  misc_feature 1..19: note = siRNA antisense sequence
  source 1..19: mol_type = other RNA
aagagtaacagatacagaa

SEQ ID NO: 29768 - RNA, 19 nt, synthetic construct
  misc_feature 1..19: note = siRNA sense sequence
  source 1..19: mol_type = other RNA
tctgtatctgttactctta

SEQ ID NO: 29769 - RNA, 19 nt, synthetic construct
  misc_feature 1..19: note = siRNA antisense sequence
  source 1..19: mol_type = other RNA
taagagtaacagatacaga

SEQ ID NO: 29770 - RNA, 19 nt, synthetic construct
  misc_feature 1..19: note = siRNA sense sequence
  source 1..19: mol_type = other RNA
ctgtatctgttactcttat

SEQ ID NO: 29771 - RNA, 19 nt, synthetic construct
  misc_feature 1..19: note = siRNA antisense sequence
  source 1..19: mol_type = other RNA
ataagagtaacagatacag

SEQ ID NO: 29772 - RNA, 19 nt, synthetic construct
  misc_feature 1..19: note = siRNA sense sequence
  source 1..19: mol_type = other RNA
gtatctgttactcttattc

SEQ ID NO: 29773 - RNA, 19 nt, synthetic construct
  misc_feature 1..19: note = siRNA antisense sequence
  source 1..19: mol_type = other RNA
gaataagagtaacagatac

SEQ ID NO: 29774 - RNA, 19 nt, synthetic construct
  misc_feature 1..19: note = siRNA sense sequence
  source 1..19: mol_type = other RNA
tatctgttactcttattcc

SEQ ID NO: 29775 - RNA, 19 nt, synthetic construct
  misc_feature 1..19: note = siRNA antisense sequence
  source 1..19: mol_type = other RNA
ggaataagagtaacagata

SEQ ID NO: 29776 - RNA, 19 nt, synthetic construct
  misc_feature 1..19: note = siRNA sense sequence
  source 1..19: mol_type = other RNA
atctgttactcttattcct

SEQ ID NO: 29777 - RNA, 19 nt, synthetic construct
  misc_feature 1..19: note = siRNA antisense sequence
  source 1..19: mol_type = other RNA
aggaataagagtaacagat

SEQ ID NO: 29778 - RNA, 19 nt, synthetic construct
  misc_feature 1..19: note = siRNA sense sequence
  source 1..19: mol_type = other RNA
tctgttactcttattcctc

SEQ ID NO: 29779 - RNA, 19 nt, synthetic construct
  misc_feature 1..19: note = siRNA antisense sequence
  source 1..19: mol_type = other RNA
gaggaataagagtaacaga

SEQ ID NO: 29780 - RNA, 19 nt, synthetic construct
  misc_feature 1..19: note = siRNA sense sequence
  source 1..19: mol_type = other RNA
ttactcttattcctccctt

SEQ ID NO: 29781 - RNA, 19 nt, synthetic construct
  misc_feature 1..19: note = siRNA antisense sequence
  source 1..19: mol_type = other RNA
aagggaggaataagagtaa

SEQ ID NO: 29782 - RNA, 19 nt, synthetic construct
  misc_feature 1..19: note = siRNA sense sequence
  source 1..19: mol_type = other RNA
tactcttattcctcccttc

SEQ ID NO: 29783 - RNA, 19 nt, synthetic construct
  misc_feature 1..19: note = siRNA antisense sequence
  source 1..19: mol_type = other RNA
gaagggaggaataagagta

SEQ ID NO: 29784 - RNA, 19 nt, synthetic construct
  misc_feature 1..19: note = siRNA sense sequence
  source 1..19: mol_type = other RNA
actcttattcctcccttcc

SEQ ID NO: 29785 - RNA, 19 nt, synthetic construct
  misc_feature 1..19: note = siRNA antisense sequence
  source 1..19: mol_type = other RNA
ggaagggaggaataagagt

SEQ ID NO: 29786 - RNA, 19 nt, synthetic construct
  misc_feature 1..19: note = siRNA sense sequence
  source 1..19: mol_type = other RNA
ctcttattcctcccttccc

SEQ ID NO: 29787 - RNA, 19 nt, synthetic construct
  misc_feature 1..19: note = siRNA antisense sequence
  source 1..19: mol_type = other RNA
gggaagggaggaataagag

SEQ ID NO: 29788 - RNA, 19 nt, synthetic construct
  misc_feature 1..19: note = siRNA sense sequence
  source 1..19: mol_type = other RNA
tcttattcctcccttccct

SEQ ID NO: 29789 - RNA, 19 nt, synthetic construct
  misc_feature 1..19: note = siRNA antisense sequence
  source 1..19: mol_type = other RNA
agggaagggaggaataaga

SEQ ID NO: 29790 - RNA, 19 nt, synthetic construct
  misc_feature 1..19: note = siRNA sense sequence
  source 1..19: mol_type = other RNA
cttattcctcccttccctc

SEQ ID NO: 29791 - RNA, 19 nt, synthetic construct
  misc_feature 1..19: note = siRNA antisense sequence
  source 1..19: mol_type = other RNA
gagggaagggaggaataag

SEQ ID NO: 29792 - RNA, 19 nt, synthetic construct
  misc_feature 1..19: note = siRNA sense sequence
  source 1..19: mol_type = other RNA
tattcctcccttccctctg

SEQ ID NO: 29793 - RNA, 19 nt, synthetic construct
  misc_feature 1..19: note = siRNA antisense sequence
  source 1..19: mol_type = other RNA
cagagggaagggaggaata

SEQ ID NO: 29794 - RNA, 19 nt, synthetic construct
  misc_feature 1..19: note = siRNA sense sequence
  source 1..19: mol_type = other RNA
aactacagatctgttttct

SEQ ID NO: 29795 - RNA, 19 nt, synthetic construct
  misc_feature 1..19: note = siRNA antisense sequence
  source 1..19: mol_type = other RNA
agaaaacagatctgtagtt

SEQ ID NO: 29796 - RNA, 19 nt, synthetic construct
  misc_feature 1..19: note = siRNA sense sequence
  source 1..19: mol_type = other RNA
gatctgttttctgttccta

SEQ ID NO: 29797 - RNA, 19 nt, synthetic construct
  misc_feature 1..19: note = siRNA antisense sequence
  source 1..19: mol_type = other RNA
taggaacagaaaacagatc

SEQ ID NO: 29798 - RNA, 19 nt, synthetic construct
  misc_feature 1..19: note = siRNA sense sequence
  source 1..19: mol_type = other RNA
ctgttttctgttcctatta

SEQ ID NO: 29799 - RNA, 19 nt, synthetic construct
  misc_feature 1..19: note = siRNA antisense sequence
  source 1..19: mol_type = other RNA
taataggaacagaaaacag

SEQ ID NO: 29800 - RNA, 19 nt, synthetic construct
  misc_feature 1..19: note = siRNA sense sequence
  source 1..19: mol_type = other RNA
gttttctgttcctattaac

SEQ ID NO: 29801 - RNA, 19 nt, synthetic construct
  misc_feature 1..19: note = siRNA antisense sequence
  source 1..19: mol_type = other RNA
gttaataggaacagaaaac

SEQ ID NO: 29802 - RNA, 19 nt, synthetic construct
  misc_feature 1..19: note = siRNA sense sequence
  source 1..19: mol_type = other RNA
gattcattcatgtcatagt

SEQ ID NO: 29803 - RNA, 19 nt, synthetic construct
  misc_feature 1..19: note = siRNA antisense sequence
  source 1..19: mol_type = other RNA
actatgacatgaatgaatc

SEQ ID NO: 29804 - RNA, 19 nt, synthetic construct
  misc_feature 1..19: note = siRNA sense sequence
  source 1..19: mol_type = other RNA
tagtatgtatcagtatagg

SEQ ID NO: 29805 - RNA, 19 nt, synthetic construct
  misc_feature 1..19: note = siRNA antisense sequence
  source 1..19: mol_type = other RNA
cctatactgatacatacta

SEQ ID NO: 29806 - RNA, 19 nt, synthetic construct
  misc_feature 1..19: note = siRNA sense sequence
  source 1..19: mol_type = other RNA
agtatgtatcagtataggc

SEQ ID NO: 29807 - RNA, 19 nt, synthetic construct
  misc_feature 1..19: note = siRNA antisense sequence
  source 1..19: mol_type = other RNA
gcctatactgatacatact

SEQ ID NO: 29808 - RNA, 19 nt, synthetic construct
  misc_feature 1..19: note = siRNA sense sequence
  source 1..19: mol_type = other RNA
gtatgtatcagtataggcc

SEQ ID NO: 29809 - RNA, 19 nt, synthetic construct
  misc_feature 1..19: note = siRNA antisense sequence
  source 1..19: mol_type = other RNA
ggcctatactgatacatac

SEQ ID NO: 29810 - RNA, 19 nt, synthetic construct
  misc_feature 1..19: note = siRNA sense sequence
  source 1..19: mol_type = other RNA
tatgtatcagtataggccc

SEQ ID NO: 29811 - RNA, 19 nt, synthetic construct
  misc_feature 1..19: note = siRNA antisense sequence
  source 1..19: mol_type = other RNA
gggcctatactgatacata

SEQ ID NO: 29812 - RNA, 19 nt, synthetic construct
  misc_feature 1..19: note = siRNA sense sequence
  source 1..19: mol_type = other RNA
atgtatcagtataggccca

SEQ ID NO: 29813 - RNA, 19 nt, synthetic construct
  misc_feature 1..19: note = siRNA antisense sequence
  source 1..19: mol_type = other RNA
tgggcctatactgatacat

SEQ ID NO: 29814 - RNA, 19 nt, synthetic construct
  misc_feature 1..19: note = siRNA sense sequence
  source 1..19: mol_type = other RNA
tgtatcagtataggcccat

SEQ ID NO: 29815 - RNA, 19 nt, synthetic construct
  misc_feature 1..19: note = siRNA antisense sequence
  source 1..19: mol_type = other RNA
atgggcctatactgataca

SEQ ID NO: 29816 - RNA, 19 nt, synthetic construct
  misc_feature 1..19: note = siRNA sense sequence
  source 1..19: mol_type = other RNA
gtatcagtataggcccatc

SEQ ID NO: 29817 - RNA, 19 nt, synthetic construct
  misc_feature 1..19: note = siRNA antisense sequence
  source 1..19: mol_type = other RNA
gatgggcctatactgatac

SEQ ID NO: 29818 - RNA, 19 nt, synthetic construct
  misc_feature 1..19: note = siRNA sense sequence
  source 1..19: mol_type = other RNA
tatcagtataggcccatct

SEQ ID NO: 29819 - RNA, 19 nt, synthetic construct
  misc_feature 1..19: note = siRNA antisense sequence
  source 1..19: mol_type = other RNA
agatgggcctatactgata

SEQ ID NO: 29820 - RNA, 19 nt, synthetic construct
  misc_feature 1..19: note = siRNA sense sequence
  source 1..19: mol_type = other RNA
atcagtataggcccatctt

SEQ ID NO: 29821 - RNA, 19 nt, synthetic construct
  misc_feature 1..19: note = siRNA antisense sequence
  source 1..19: mol_type = other RNA
aagatgggcctatactgat

SEQ ID NO: 29822 - RNA, 19 nt, synthetic construct
  misc_feature 1..19: note = siRNA sense sequence
  source 1..19: mol_type = other RNA
tcagtataggcccatcttg

SEQ ID NO: 29823 - RNA, 19 nt, synthetic construct
  misc_feature 1..19: note = siRNA antisense sequence
  source 1..19: mol_type = other RNA
caagatgggcctatactga

SEQ ID NO: 29824 - RNA, 19 nt, synthetic construct
  misc_feature 1..19: note = siRNA sense sequence
  source 1..19: mol_type = other RNA
cagtataggcccatcttgt

SEQ ID NO: 29825 - RNA, 19 nt, synthetic construct
  misc_feature 1..19: note = siRNA antisense sequence
  source 1..19: mol_type = other RNA
acaagatgggcctatactg

SEQ ID NO: 29826 - RNA, 19 nt, synthetic construct
  misc_feature 1..19: note = siRNA sense sequence
  source 1..19: mol_type = other RNA
agtataggcccatcttgtt

SEQ ID NO: 29827 - RNA, 19 nt, synthetic construct
  misc_feature 1..19: note = siRNA antisense sequence
  source 1..19: mol_type = other RNA
aacaagatgggcctatact

SEQ ID NO: 29828 - RNA, 19 nt, synthetic construct
  misc_feature 1..19: note = siRNA sense sequence
  source 1..19: mol_type = other RNA
taggcccatcttgttttaa

SEQ ID NO: 29829 - RNA, 19 nt, synthetic construct
  misc_feature 1..19: note = siRNA antisense sequence
  source 1..19: mol_type = other RNA
ttaaaacaagatgggccta

SEQ ID NO: 29830 - RNA, 19 nt, synthetic construct
  misc_feature 1..19: note = siRNA sense sequence
  source 1..19: mol_type = other RNA
aggcccatcttgttttaat

SEQ ID NO: 29831 - RNA, 19 nt, synthetic construct
  misc_feature 1..19: note = siRNA antisense sequence
  source 1..19: mol_type = other RNA
attaaaacaagatgggcct

SEQ ID NO: 29832 - RNA, 19 nt, synthetic construct
  misc_feature 1..19: note = siRNA sense sequence
  source 1..19: mol_type = other RNA
ggcccatcttgttttaatg

SEQ ID NO: 29833 - RNA, 19 nt, synthetic construct
  misc_feature 1..19: note = siRNA antisense sequence
  source 1..19: mol_type = other RNA
cattaaaacaagatgggcc

SEQ ID NO: 29834 - RNA, 19 nt, synthetic construct
  misc_feature 1..19: note = siRNA sense sequence
  source 1..19: mol_type = other RNA
gcccatcttgttttaatgc

SEQ ID NO: 29835 - RNA, 19 nt, synthetic construct
  misc_feature 1..19: note = siRNA antisense sequence
  source 1..19: mol_type = other RNA
gcattaaaacaagatgggc

SEQ ID NO: 29836 - RNA, 19 nt, synthetic construct
  misc_feature 1..19: note = siRNA sense sequence
  source 1..19: mol_type = other RNA
gttttaatgcacttcactt

SEQ ID NO: 29837 - RNA, 19 nt, synthetic construct
  misc_feature 1..19: note = siRNA antisense sequence
  source 1..19: mol_type = other RNA
aagtgaagtgcattaaaac

SEQ ID NO: 29838 - RNA, 19 nt, synthetic construct
  misc_feature 1..19: note = siRNA sense sequence
  source 1..19: mol_type = other RNA
aaggtttgtggcccactct

SEQ ID NO: 29839 - RNA, 19 nt, synthetic construct
  misc_feature 1..19: note = siRNA antisense sequence
  source 1..19: mol_type = other RNA
agagtgggccacaaacctt

SEQ ID NO: 29840 - RNA, 19 nt, synthetic construct
  misc_feature 1..19: note = siRNA sense sequence
  source 1..19: mol_type = other RNA
aggtttgtggcccactctt

SEQ ID NO: 29841 - RNA, 19 nt, synthetic construct
  misc_feature 1..19: note = siRNA antisense sequence
  source 1..19: mol_type = other RNA
aagagtgggccacaaacct

SEQ ID NO: 29842 - RNA, 19 nt, synthetic construct
  misc_feature 1..19: note = siRNA sense sequence
  source 1..19: mol_type = other RNA
ggtttgtggcccactcttc

SEQ ID NO: 29843 - RNA, 19 nt, synthetic construct
  misc_feature 1..19: note = siRNA antisense sequence
  source 1..19: mol_type = other RNA
gaagagtgggccacaaacc

SEQ ID NO: 29844 - RNA, 19 nt, synthetic construct
  misc_feature 1..19: note = siRNA sense sequence
  source 1..19: mol_type = other RNA
gtggcccactcttcacttg

SEQ ID NO: 29845 - RNA, 19 nt, synthetic construct
  misc_feature 1..19: note = siRNA antisense sequence
  source 1..19: mol_type = other RNA
caagtgaagagtgggccac

SEQ ID NO: 29846 - RNA, 19 nt, synthetic construct
  misc_feature 1..19: note = siRNA sense sequence
  source 1..19: mol_type = other RNA
gggccttgtgatcagtggt

SEQ ID NO: 29847 - RNA, 19 nt, synthetic construct
  misc_feature 1..19: note = siRNA antisense sequence
  source 1..19: mol_type = other RNA
accactgatcacaaggccc

SEQ ID NO: 29848 - RNA, 19 nt, synthetic construct
  misc_feature 1..19: note = siRNA sense sequence
  source 1..19: mol_type = other RNA
ggccttgtgatcagtggtg

SEQ ID NO: 29849 - RNA, 19 nt, synthetic construct
  misc_feature 1..19: note = siRNA antisense sequence
  source 1..19: mol_type = other RNA
caccactgatcacaaggcc

SEQ ID NO: 29850 - RNA, 19 nt, synthetic construct
  misc_feature 1..19: note = siRNA sense sequence
  source 1..19: mol_type = other RNA
ttgtgatcagtggtgccag

SEQ ID NO: 29851 - RNA, 19 nt, synthetic construct
  misc_feature 1..19: note = siRNA antisense sequence
  source 1..19: mol_type = other RNA
ctggcaccactgatcacaa

SEQ ID NO: 29852 - RNA, 19 nt, synthetic construct
  misc_feature 1..19: note = siRNA sense sequence
  source 1..19: mol_type = other RNA
tgtgcctatataagatgga

SEQ ID NO: 29853 - RNA, 19 nt, synthetic construct
  misc_feature 1..19: note = siRNA antisense sequence
  source 1..19: mol_type = other RNA
tccatcttatataggcaca

SEQ ID NO: 29854 - RNA, 19 nt, synthetic construct
  misc_feature 1..19: note = siRNA sense sequence
  source 1..19: mol_type = other RNA
gtgcctatataagatggaa

SEQ ID NO: 29855 - RNA, 19 nt, synthetic construct
  misc_feature 1..19: note = siRNA antisense sequence
  source 1..19: mol_type = other RNA
ttccatcttatataggcac

SEQ ID NO: 29856 - RNA, 19 nt, synthetic construct
  misc_feature 1..19: note = siRNA sense sequence
  source 1..19: mol_type = other RNA
aagtgtgtgtgttctgaca

SEQ ID NO: 29857 - RNA, 19 nt, synthetic construct
  misc_feature 1..19: note = siRNA antisense sequence
  source 1..19: mol_type = other RNA
tgtcagaacacacacactt

SEQ ID NO: 29858 - RNA, 19 nt, synthetic construct
  misc_feature 1..19: note = siRNA sense sequence
  source 1..19: mol_type = other RNA
tgaccagctgtttccttct

SEQ ID NO: 29859 - RNA, 19 nt, synthetic construct
  misc_feature 1..19: note = siRNA antisense sequence
  source 1..19: mol_type = other RNA
agaaggaaacagctggtca

SEQ ID NO: 29860 - RNA, 19 nt, synthetic construct
  misc_feature 1..19: note = siRNA sense sequence
  source 1..19: mol_type = other RNA
cagctgtttccttctctct

SEQ ID NO: 29861 - RNA, 19 nt, synthetic construct
  misc_feature 1..19: note = siRNA antisense sequence
  source 1..19: mol_type = other RNA
agagagaaggaaacagctg

SEQ ID NO: 29862 - RNA, 19 nt, synthetic construct
  misc_feature 1..19: note = siRNA sense sequence
  source 1..19: mol_type = other RNA
agctgtttccttctctctc

SEQ ID NO: 29863 - RNA, 19 nt, synthetic construct
  misc_feature 1..19: note = siRNA antisense sequence
  source 1..19: mol_type = other RNA
gagagagaaggaaacagct

SEQ ID NO: 29864 - RNA, 19 nt, synthetic construct
  misc_feature 1..19: note = siRNA sense sequence
  source 1..19: mol_type = other RNA
ttctctctctcccttttct

SEQ ID NO: 29865 - RNA, 19 nt, synthetic construct
  misc_feature 1..19: note = siRNA antisense sequence
  source 1..19: mol_type = other RNA
agaaaagggagagagagaa

SEQ ID NO: 29866 - RNA, 19 nt, synthetic construct
  misc_feature 1..19: note = siRNA sense sequence
  source 1..19: mol_type = other RNA
tctctctctcccttttctt

SEQ ID NO: 29867 - RNA, 19 nt, synthetic construct
  misc_feature 1..19: note = siRNA antisense sequence
  source 1..19: mol_type = other RNA
aagaaaagggagagagaga

SEQ ID NO: 29868 - RNA, 19 nt, synthetic construct
  misc_feature 1..19: note = siRNA sense sequence
  source 1..19: mol_type = other RNA
ttgggcctctctattgcct

SEQ ID NO: 29869 - RNA, 19 nt, synthetic construct
  misc_feature 1..19: note = siRNA antisense sequence
  source 1..19: mol_type = other RNA
aggcaatagagaggcccaa

SEQ ID NO: 29870 - RNA, 19 nt, synthetic construct
  misc_feature 1..19: note = siRNA sense sequence
  source 1..19: mol_type = other RNA
tgggcctctctattgcctg

SEQ ID NO: 29871 - RNA, 19 nt, synthetic construct
  misc_feature 1..19: note = siRNA antisense sequence
  source 1..19: mol_type = other RNA
caggcaatagagaggccca

SEQ ID NO: 29872 - RNA, 19 nt, synthetic construct
  misc_feature 1..19: note = siRNA sense sequence
  source 1..19: mol_type = other RNA
gggcctctctattgcctga

SEQ ID NO: 29873 - RNA, 19 nt, synthetic construct
  misc_feature 1..19: note = siRNA antisense sequence
  source 1..19: mol_type = other RNA
tcaggcaatagagaggccc

SEQ ID NO: 29874 - RNA, 19 nt, synthetic construct
  misc_feature 1..19: note = siRNA sense sequence
  source 1..19: mol_type = other RNA
ggcctctctattgcctgag

SEQ ID NO: 29875 - RNA, 19 nt, synthetic construct
  misc_feature 1..19: note = siRNA antisense sequence
  source 1..19: mol_type = other RNA
ctcaggcaatagagaggcc

SEQ ID NO: 29876 - RNA, 19 nt, synthetic construct
  misc_feature 1..19: note = siRNA sense sequence
  source 1..19: mol_type = other RNA
attagtctaaaataggcag

SEQ ID NO: 29877 - RNA, 19 nt, synthetic construct
  misc_feature 1..19: note = siRNA antisense sequence
  source 1..19: mol_type = other RNA
ctgcctattttagactaat

SEQ ID NO: 29878 - RNA, 19 nt, synthetic construct
  misc_feature 1..19: note = siRNA sense sequence
  source 1..19: mol_type = other RNA
ttagtctaaaataggcagg

SEQ ID NO: 29879 - RNA, 19 nt, synthetic construct
  misc_feature 1..19: note = siRNA antisense sequence
  source 1..19: mol_type = other RNA
cctgcctattttagactaa

SEQ ID NO: 29880 - RNA, 19 nt, synthetic construct
  misc_feature 1..19: note = siRNA sense sequence
  source 1..19: mol_type = other RNA
tagtctaaaataggcaggg

SEQ ID NO: 29881 - RNA, 19 nt, synthetic construct
  misc_feature 1..19: note = siRNA antisense sequence
  source 1..19: mol_type = other RNA
ccctgcctattttagacta

SEQ ID NO: 29882 - RNA, 19 nt, synthetic construct
  misc_feature 1..19: note = siRNA sense sequence
  source 1..19: mol_type = other RNA
agtctaaaataggcagggc

SEQ ID NO: 29883 - RNA, 19 nt, synthetic construct
  misc_feature 1..19: note = siRNA antisense sequence
  source 1..19: mol_type = other RNA
gccctgcctattttagact

SEQ ID NO: 29884 - RNA, 19 nt, synthetic construct
  misc_feature 1..19: note = siRNA sense sequence
  source 1..19: mol_type = other RNA
gcagggcacagtggctcat

SEQ ID NO: 29885 - RNA, 19 nt, synthetic construct
  misc_feature 1..19: note = siRNA antisense sequence
  source 1..19: mol_type = other RNA
atgagccactgtgccctgc

SEQ ID NO: 29886 - RNA, 19 nt, synthetic construct
  misc_feature 1..19: note = siRNA sense sequence
  source 1..19: mol_type = other RNA
cagggcacagtggctcatg

SEQ ID NO: 29887 - RNA, 19 nt, synthetic construct
  misc_feature 1..19: note = siRNA antisense sequence
  source 1..19: mol_type = other RNA
catgagccactgtgccctg

SEQ ID NO: 29888 - RNA, 19 nt, synthetic construct
  misc_feature 1..19: note = siRNA sense sequence
  source 1..19: mol_type = other RNA
agggcacagtggctcatgc

SEQ ID NO: 29889 - RNA, 19 nt, synthetic construct
  misc_feature 1..19: note = siRNA antisense sequence
  source 1..19: mol_type = other RNA
gcatgagccactgtgccct

SEQ ID NO: 29890 - RNA, 19 nt, synthetic construct
  misc_feature 1..19: note = siRNA sense sequence
  source 1..19: mol_type = other RNA
actgcactccagcctgggt

SEQ ID NO: 29891 - RNA, 19 nt, synthetic construct
  misc_feature 1..19: note = siRNA antisense sequence
  source 1..19: mol_type = other RNA
acccaggctggagtgcagt

SEQ ID NO: 29892 - RNA, 19 nt, synthetic construct
  misc_feature 1..19: note = siRNA sense sequence
  source 1..19: mol_type = other RNA
ctgcactccagcctgggta

SEQ ID NO: 29893 - RNA, 19 nt, synthetic construct
  misc_feature 1..19: note = siRNA antisense sequence
  source 1..19: mol_type = other RNA
tacccaggctggagtgcag

SEQ ID NO: 29894 - RNA, 19 nt, synthetic construct
  misc_feature 1..19: note = siRNA sense sequence
  source 1..19: mol_type = other RNA
tgcactccagcctgggtaa

SEQ ID NO: 29895 - RNA, 19 nt, synthetic construct
  misc_feature 1..19: note = siRNA antisense sequence
  source 1..19: mol_type = other RNA
ttacccaggctggagtgca

SEQ ID NO: 29896 - RNA, 19 nt, synthetic construct
  misc_feature 1..19: note = siRNA sense sequence
  source 1..19: mol_type = other RNA
gcactccagcctgggtaac

SEQ ID NO: 29897 - RNA, 19 nt, synthetic construct
  misc_feature 1..19: note = siRNA antisense sequence
  source 1..19: mol_type = other RNA
gttacccaggctggagtgc

SEQ ID NO: 29898 - RNA, 19 nt, synthetic construct
  misc_feature 1..19: note = siRNA sense sequence
  source 1..19: mol_type = other RNA
aaatgactgcgcttagtga

SEQ ID NO: 29899 - RNA, 19 nt, synthetic construct
  misc_feature 1..19: note = siRNA antisense sequence
  source 1..19: mol_type = other RNA
tcactaagcgcagtcattt

SEQ ID NO: 29900 - RNA, 19 nt, synthetic construct
  misc_feature 1..19: note = siRNA sense sequence
  source 1..19: mol_type = other RNA
aatgactgcgcttagtgag

SEQ ID NO: 29901 - RNA, 19 nt, synthetic construct
  misc_feature 1..19: note = siRNA antisense sequence
  source 1..19: mol_type = other RNA
ctcactaagcgcagtcatt

SEQ ID NO: 29902 - RNA, 19 nt, synthetic construct
  misc_feature 1..19: note = siRNA sense sequence
  source 1..19: mol_type = other RNA
atgactgcgcttagtgagg

SEQ ID NO: 29903 - RNA, 19 nt, synthetic construct
  misc_feature 1..19: note = siRNA antisense sequence
  source 1..19: mol_type = other RNA
cctcactaagcgcagtcat

SEQ ID NO: 29904 - RNA, 19 nt, synthetic construct
  misc_feature 1..19: note = siRNA sense sequence
  source 1..19: mol_type = other RNA
tgactgcgcttagtgagga

SEQ ID NO: 29905 - RNA, 19 nt, synthetic construct
  misc_feature 1..19: note = siRNA antisense sequence
  source 1..19: mol_type = other RNA
tcctcactaagcgcagtca

SEQ ID NO: 29906 - RNA, 19 nt, synthetic construct
  misc_feature 1..19: note = siRNA sense sequence
  source 1..19: mol_type = other RNA
aagctaggcctcttggtcc

SEQ ID NO: 29907 - RNA, 19 nt, synthetic construct
  misc_feature 1..19: note = siRNA antisense sequence
  source 1..19: mol_type = other RNA
ggaccaagaggcctagctt

SEQ ID NO: 29908 - RNA, 19 nt, synthetic construct
  misc_feature 1..19: note = siRNA sense sequence
  source 1..19: mol_type = other RNA
aggcctcttggtccagtta

SEQ ID NO: 29909 - RNA, 19 nt, synthetic construct
  misc_feature 1..19: note = siRNA antisense sequence
  source 1..19: mol_type = other RNA
taactggaccaagaggcct

SEQ ID NO: 29910 - RNA, 19 nt, synthetic construct
  misc_feature 1..19: note = siRNA sense sequence
  source 1..19: mol_type = other RNA
ggcctcttggtccagttag

SEQ ID NO: 29911 - RNA, 19 nt, synthetic construct
  misc_feature 1..19: note = siRNA antisense sequence
  source 1..19: mol_type = other RNA
ctaactggaccaagaggcc

SEQ ID NO: 29912 - RNA, 19 nt, synthetic construct
  misc_feature 1..19: note = siRNA sense sequence
  source 1..19: mol_type = other RNA
gcctcttggtccagttagc

SEQ ID NO: 29913 - RNA, 19 nt, synthetic construct
  misc_feature 1..19: note = siRNA antisense sequence
  source 1..19: mol_type = other RNA
gctaactggaccaagaggc

SEQ ID NO: 29914 - RNA, 19 nt, synthetic construct
  misc_feature 1..19: note = siRNA sense sequence
  source 1..19: mol_type = other RNA
cctcttggtccagttagct

SEQ ID NO: 29915 - RNA, 19 nt, synthetic construct
  misc_feature 1..19: note = siRNA antisense sequence
  source 1..19: mol_type = other RNA
agctaactggaccaagagg

SEQ ID NO: 29916 - RNA, 19 nt, synthetic construct
  misc_feature 1..19: note = siRNA sense sequence
  source 1..19: mol_type = other RNA
ctcttggtccagttagctg

SEQ ID NO: 29917 - RNA, 19 nt, synthetic construct
  misc_feature 1..19: note = siRNA antisense sequence
  source 1..19: mol_type = other RNA
cagctaactggaccaagag

SEQ ID NO: 29918 - RNA, 19 nt, synthetic construct
  misc_feature 1..19: note = siRNA sense sequence
  source 1..19: mol_type = other RNA
tcttggtccagttagctga

SEQ ID NO: 29919 - RNA, 19 nt, synthetic construct
  misc_feature 1..19: note = siRNA antisense sequence
  source 1..19: mol_type = other RNA
tcagctaactggaccaaga

SEQ ID NO: 29920 - RNA, 19 nt, synthetic construct
  misc_feature 1..19: note = siRNA sense sequence
  source 1..19: mol_type = other RNA
cttggtccagttagctgag

SEQ ID NO: 29921 - RNA, 19 nt, synthetic construct
  misc_feature 1..19: note = siRNA antisense sequence
  source 1..19: mol_type = other RNA
ctcagctaactggaccaag

SEQ ID NO: 29922 - RNA, 19 nt, synthetic construct
  misc_feature 1..19: note = siRNA sense sequence
  source 1..19: mol_type = other RNA
gtccagttagctgagtcat

SEQ ID NO: 29923 - RNA, 19 nt, synthetic construct
  misc_feature 1..19: note = siRNA antisense sequence
  source 1..19: mol_type = other RNA
atgactcagctaactggac

SEQ ID NO: 29924 - RNA, 19 nt, synthetic construct
  misc_feature 1..19: note = siRNA sense sequence
  source 1..19: mol_type = other RNA
tccagttagctgagtcatg

SEQ ID NO: 29925 - RNA, 19 nt, synthetic construct
  misc_feature 1..19: note = siRNA antisense sequence
  source 1..19: mol_type = other RNA
catgactcagctaactgga

SEQ ID NO: 29926 - RNA, 19 nt, synthetic construct
  misc_feature 1..19: note = siRNA sense sequence
  source 1..19: mol_type = other RNA
gctgagtcatgaatgtaaa

SEQ ID NO: 29927 - RNA, 19 nt, synthetic construct
  misc_feature 1..19: note = siRNA antisense sequence
  source 1..19: mol_type = other RNA
tttacattcatgactcagc

SEQ ID NO: 29928 - RNA, 19 nt, synthetic construct
  misc_feature 1..19: note = siRNA sense sequence
  source 1..19: mol_type = other RNA
ctgagtcatgaatgtaaag

SEQ ID NO: 29929 - RNA, 19 nt, synthetic construct
  misc_feature 1..19: note = siRNA antisense sequence
  source 1..19: mol_type = other RNA
ctttacattcatgactcag

SEQ ID NO: 29930 - RNA, 19 nt, synthetic construct
  misc_feature 1..19: note = siRNA sense sequence
  source 1..19: mol_type = other RNA
tgagtcatgaatgtaaagg

SEQ ID NO: 29931 - RNA, 19 nt, synthetic construct
  misc_feature 1..19: note = siRNA antisense sequence
  source 1..19: mol_type = other RNA
cctttacattcatgactca

SEQ ID NO: 29932 - RNA, 19 nt, synthetic construct
  misc_feature 1..19: note = siRNA sense sequence
  source 1..19: mol_type = other RNA
gagtcatgaatgtaaagga

SEQ ID NO: 29933 - RNA, 19 nt, synthetic construct
  misc_feature 1..19: note = siRNA antisense sequence
  source 1..19: mol_type = other RNA
tcctttacattcatgactc

SEQ ID NO: 29934 - RNA, 19 nt, synthetic construct
  misc_feature 1..19: note = siRNA sense sequence
  source 1..19: mol_type = other RNA
agtcatgaatgtaaaggag

SEQ ID NO: 29935 - RNA, 19 nt, synthetic construct
  misc_feature 1..19: note = siRNA antisense sequence
  source 1..19: mol_type = other RNA
ctcctttacattcatgact

SEQ ID NO: 29936 - RNA, 19 nt, synthetic construct
  misc_feature 1..19: note = siRNA sense sequence
  source 1..19: mol_type = other RNA
aaagttgagtggtctggga

SEQ ID NO: 29937 - RNA, 19 nt, synthetic construct
  misc_feature 1..19: note = siRNA antisense sequence
  source 1..19: mol_type = other RNA
tcccagaccactcaacttt

SEQ ID NO: 29938 - RNA, 19 nt, synthetic construct
  misc_feature 1..19: note = siRNA sense sequence
  source 1..19: mol_type = other RNA
aagttgagtggtctgggaa

SEQ ID NO: 29939 - RNA, 19 nt, synthetic construct
  misc_feature 1..19: note = siRNA antisense sequence
  source 1..19: mol_type = other RNA
ttcccagaccactcaactt

SEQ ID NO: 29940 - RNA, 19 nt, synthetic construct
  misc_feature 1..19: note = siRNA sense sequence
  source 1..19: mol_type = other RNA
agttgagtggtctgggaag

SEQ ID NO: 29941 - RNA, 19 nt, synthetic construct
  misc_feature 1..19: note = siRNA antisense sequence
  source 1..19: mol_type = other RNA
cttcccagaccactcaact

SEQ ID NO: 29942 - RNA, 19 nt, synthetic construct
  misc_feature 1..19: note = siRNA sense sequence
  source 1..19: mol_type = other RNA
ttggtaaaagtagctacac

SEQ ID NO: 29943 - RNA, 19 nt, synthetic construct
  misc_feature 1..19: note = siRNA antisense sequence
  source 1..19: mol_type = other RNA
gtgtagctacttttaccaa

SEQ ID NO: 29944 - RNA, 19 nt, synthetic construct
  misc_feature 1..19: note = siRNA sense sequence
  source 1..19: mol_type = other RNA
tggtaaaagtagctacact

SEQ ID NO: 29945 - RNA, 19 nt, synthetic construct
  misc_feature 1..19: note = siRNA antisense sequence
  source 1..19: mol_type = other RNA
agtgtagctacttttacca

SEQ ID NO: 29946 - RNA, 19 nt, synthetic construct
  misc_feature 1..19: note = siRNA sense sequence
  source 1..19: mol_type = other RNA
ggtaaaagtagctacactg

SEQ ID NO: 29947 - RNA, 19 nt, synthetic construct
  misc_feature 1..19: note = siRNA antisense sequence
  source 1..19: mol_type = other RNA
cagtgtagctacttttacc

SEQ ID NO: 29948 - RNA, 19 nt, synthetic construct
  misc_feature 1..19: note = siRNA sense sequence
  source 1..19: mol_type = other RNA
gtaaaagtagctacactga

SEQ ID NO: 29949 - RNA, 19 nt, synthetic construct
  misc_feature 1..19: note = siRNA antisense sequence
  source 1..19: mol_type = other RNA
tcagtgtagctacttttac

SEQ ID NO: 29950 - RNA, 19 nt, synthetic construct
  misc_feature 1..19: note = siRNA sense sequence
  source 1..19: mol_type = other RNA
taaaagtagctacactgaa

SEQ ID NO: 29951 - RNA, 19 nt, synthetic construct
  misc_feature 1..19: note = siRNA antisense sequence
  source 1..19: mol_type = other RNA
ttcagtgtagctactttta

SEQ ID NO: 29952 - RNA, 19 nt, synthetic construct
  misc_feature 1..19: note = siRNA sense sequence
  source 1..19: mol_type = other RNA
tctagtgcaagaaggtgcc

SEQ ID NO: 29953 - RNA, 19 nt, synthetic construct
  misc_feature 1..19: note = siRNA antisense sequence
  source 1..19: mol_type = other RNA
ggcaccttcttgcactaga

SEQ ID NO: 29954 - RNA, 19 nt, synthetic construct
  misc_feature 1..19: note = siRNA sense sequence
  source 1..19: mol_type = other RNA
ctagtgcaagaaggtgcca

SEQ ID NO: 29955 - RNA, 19 nt, synthetic construct
  misc_feature 1..19: note = siRNA antisense sequence
  source 1..19: mol_type = other RNA
tggcaccttcttgcactag

SEQ ID NO: 29956 - RNA, 19 nt, synthetic construct
  misc_feature 1..19: note = siRNA sense sequence
  source 1..19: mol_type = other RNA
agaagtcagtctggattca

SEQ ID NO: 29957 - RNA, 19 nt, synthetic construct
  misc_feature 1..19: note = siRNA antisense sequence
  source 1..19: mol_type = other RNA
tgaatccagactgacttct

SEQ ID NO: 29958 - RNA, 19 nt, synthetic construct
  misc_feature 1..19: note = siRNA sense sequence
  source 1..19: mol_type = other RNA
ggacaggctaactcttctt

SEQ ID NO: 29959 - RNA, 19 nt, synthetic construct
  misc_feature 1..19: note = siRNA antisense sequence
  source 1..19: mol_type = other RNA
aagaagagttagcctgtcc

SEQ ID NO: 29960 - RNA, 19 nt, synthetic construct
  misc_feature 1..19: note = siRNA sense sequence
  source 1..19: mol_type = other RNA
gacaggctaactcttctta

SEQ ID NO: 29961 - RNA, 19 nt, synthetic construct
  misc_feature 1..19: note = siRNA antisense sequence
  source 1..19: mol_type = other RNA
taagaagagttagcctgtc

SEQ ID NO: 29962 - RNA, 19 nt, synthetic construct
  misc_feature 1..19: note = siRNA sense sequence
  source 1..19: mol_type = other RNA
tggtaactttaaggtgaag

SEQ ID NO: 29963 - RNA, 19 nt, synthetic construct
  misc_feature 1..19: note = siRNA antisense sequence
  source 1..19: mol_type = other RNA
cttcaccttaaagttacca

SEQ ID NO: 29964 - RNA, 19 nt, synthetic construct
  misc_feature 1..19: note = siRNA sense sequence
  source 1..19: mol_type = other RNA
ggtaactttaaggtgaagc

SEQ ID NO: 29965 - RNA, 19 nt, synthetic construct
  misc_feature 1..19: note = siRNA antisense sequence
  source 1..19: mol_type = other RNA
gcttcaccttaaagttacc

SEQ ID NO: 29966 - RNA, 19 nt, synthetic construct
  misc_feature 1..19: note = siRNA sense sequence
  source 1..19: mol_type = other RNA
agccaaagcttattccaaa

SEQ ID NO: 29967 - RNA, 19 nt, synthetic construct
  misc_feature 1..19: note = siRNA antisense sequence
  source 1..19: mol_type = other RNA
tttggaataagctttggct

SEQ ID NO: 29968 - RNA, 19 nt, synthetic construct
  misc_feature 1..19: note = siRNA sense sequence
  source 1..19: mol_type = other RNA
gccaaagcttattccaaaa

SEQ ID NO: 29969 - RNA, 19 nt, synthetic construct
  misc_feature 1..19: note = siRNA antisense sequence
  source 1..19: mol_type = other RNA
ttttggaataagctttggc

SEQ ID NO: 29970 - RNA, 19 nt, synthetic construct
  misc_feature 1..19: note = siRNA sense sequence
  source 1..19: mol_type = other RNA
gctaaatctacctacactc

SEQ ID NO: 29971 - RNA, 19 nt, synthetic construct
  misc_feature 1..19: note = siRNA antisense sequence
  source 1..19: mol_type = other RNA
gagtgtaggtagatttagc

SEQ ID NO: 29972 - RNA, 19 nt, synthetic construct
  misc_feature 1..19: note = siRNA sense sequence
  source 1..19: mol_type = other RNA
ctaaatctacctacactct

SEQ ID NO: 29973 - RNA, 19 nt, synthetic construct
  misc_feature 1..19: note = siRNA antisense sequence
  source 1..19: mol_type = other RNA
agagtgtaggtagatttag

SEQ ID NO: 29974 - RNA, 19 nt, synthetic construct
  misc_feature 1..19: note = siRNA sense sequence
  source 1..19: mol_type = other RNA
taaatctacctacactcta

SEQ ID NO: 29975 - RNA, 19 nt, synthetic construct
  misc_feature 1..19: note = siRNA antisense sequence
  source 1..19: mol_type = other RNA
tagagtgtaggtagattta

SEQ ID NO: 29976 - RNA, 19 nt, synthetic construct
  misc_feature 1..19: note = siRNA sense sequence
  source 1..19: mol_type = other RNA
aaatctacctacactctat

SEQ ID NO: 29977 - RNA, 19 nt, synthetic construct
  misc_feature 1..19: note = siRNA antisense sequence
  source 1..19: mol_type = other RNA
atagagtgtaggtagattt

SEQ ID NO: 29978 - RNA, 19 nt, synthetic construct
  misc_feature 1..19: note = siRNA sense sequence
  source 1..19: mol_type = other RNA
aatctacctacactctata

SEQ ID NO: 29979 - RNA, 19 nt, synthetic construct
  misc_feature 1..19: note = siRNA antisense sequence
  source 1..19: mol_type = other RNA
tatagagtgtaggtagatt

SEQ ID NO: 29980 - RNA, 19 nt, synthetic construct
  misc_feature 1..19: note = siRNA sense sequence
  source 1..19: mol_type = other RNA
ctacctacactctataaat

SEQ ID NO: 29981 - RNA, 19 nt, synthetic construct
  misc_feature 1..19: note = siRNA antisense sequence
  source 1..19: mol_type = other RNA
atttatagagtgtaggtag

SEQ ID NO: 29982 - RNA, 19 nt, synthetic construct
  misc_feature 1..19: note = siRNA sense sequence
  source 1..19: mol_type = other RNA
tacctacactctataaatg

SEQ ID NO: 29983 - RNA, 19 nt, synthetic construct
  misc_feature 1..19: note = siRNA antisense sequence
  source 1..19: mol_type = other RNA
catttatagagtgtaggta

SEQ ID NO: 29984 - RNA, 19 nt, synthetic construct
  misc_feature 1..19: note = siRNA sense sequence
  source 1..19: mol_type = other RNA
acctacactctataaatgg

SEQ ID NO: 29985 - RNA, 19 nt, synthetic construct
  misc_feature 1..19: note = siRNA antisense sequence
  source 1..19: mol_type = other RNA
ccatttatagagtgtaggt

SEQ ID NO: 29986 - RNA, 19 nt, synthetic construct
  misc_feature 1..19: note = siRNA sense sequence
  source 1..19: mol_type = other RNA
cctacactctataaatgga

SEQ ID NO: 29987 - RNA, 19 nt, synthetic construct
  misc_feature 1..19: note = siRNA antisense sequence
  source 1..19: mol_type = other RNA
tccatttatagagtgtagg

SEQ ID NO: 29988 - RNA, 19 nt, synthetic construct
  misc_feature 1..19: note = siRNA sense sequence
  source 1..19: mol_type = other RNA
gtttacagcatagttaact

SEQ ID NO: 29989 - RNA, 19 nt, synthetic construct
  misc_feature 1..19: note = siRNA antisense sequence
  source 1..19: mol_type = other RNA
agttaactatgctgtaaac

SEQ ID NO: 29990 - RNA, 19 nt, synthetic construct
  misc_feature 1..19: note = siRNA sense sequence
  source 1..19: mol_type = other RNA
acagcatagttaactgcat

SEQ ID NO: 29991 - RNA, 19 nt, synthetic construct
  misc_feature 1..19: note = siRNA antisense sequence
  source 1..19: mol_type = other RNA
atgcagttaactatgctgt

SEQ ID NO: 29992 - RNA, 19 nt, synthetic construct
  misc_feature 1..19: note = siRNA sense sequence
  source 1..19: mol_type = other RNA
cagcatagttaactgcata

SEQ ID NO: 29993 - RNA, 19 nt, synthetic construct
  misc_feature 1..19: note = siRNA antisense sequence
  source 1..19: mol_type = other RNA
tatgcagttaactatgctg

SEQ ID NO: 29994 - RNA, 19 nt, synthetic construct
  misc_feature 1..19: note = siRNA sense sequence
  source 1..19: mol_type = other RNA
agcatagttaactgcatat

SEQ ID NO: 29995 - RNA, 19 nt, synthetic construct
  misc_feature 1..19: note = siRNA antisense sequence
  source 1..19: mol_type = other RNA
atatgcagttaactatgct

SEQ ID NO: 29996 - RNA, 19 nt, synthetic construct
  misc_feature 1..19: note = siRNA sense sequence
  source 1..19: mol_type = other RNA
gcatagttaactgcatatt

SEQ ID NO: 29997 - RNA, 19 nt, synthetic construct
  misc_feature 1..19: note = siRNA antisense sequence
  source 1..19: mol_type = other RNA
aatatgcagttaactatgc

SEQ ID NO: 29998 - RNA, 19 nt, synthetic construct
  misc_feature 1..19: note = siRNA sense sequence
  source 1..19: mol_type = other RNA
attactgctcattggtgat

SEQ ID NO: 29999 - RNA, 19 nt, synthetic construct
  misc_feature 1..19: note = siRNA antisense sequence
  source 1..19: mol_type = other RNA
atcaccaatgagcagtaat

SEQ ID NO: 30000 - RNA, 19 nt, synthetic construct
  misc_feature 1..19: note = siRNA sense sequence
  source 1..19: mol_type = other RNA
ttactgctcattggtgata

SEQ ID NO: 30001 - RNA, 19 nt, synthetic construct
  misc_feature 1..19: note = siRNA antisense sequence
  source 1..19: mol_type = other RNA
tatcaccaatgagcagtaa

SEQ ID NO: 30002 - RNA, 19 nt, synthetic construct
  misc_feature 1..19: note = siRNA sense sequence
  source 1..19: mol_type = other RNA
tgctcattggtgatatacc

SEQ ID NO: 30003 - RNA, 19 nt, synthetic construct
  misc_feature 1..19: note = siRNA antisense sequence
  source 1..19: mol_type = other RNA
ggtatatcaccaatgagca

SEQ ID NO: 30004 - RNA, 19 nt, synthetic construct
  misc_feature 1..19: note = siRNA sense sequence
  source 1..19: mol_type = other RNA
gctcattggtgatataccc

SEQ ID NO: 30005 - RNA, 19 nt, synthetic construct
  misc_feature 1..19: note = siRNA antisense sequence
  source 1..19: mol_type = other RNA
gggtatatcaccaatgagc

SEQ ID NO: 30006 - RNA, 19 nt, synthetic construct
  misc_feature 1..19: note = siRNA sense sequence
  source 1..19: mol_type = other RNA
ctcattggtgatataccca

SEQ ID NO: 30007 - RNA, 19 nt, synthetic construct
  misc_feature 1..19: note = siRNA antisense sequence
  source 1..19: mol_type = other RNA
tgggtatatcaccaatgag

SEQ ID NO: 30008 - RNA, 19 nt, synthetic construct
  misc_feature 1..19: note = siRNA sense sequence
  source 1..19: mol_type = other RNA
ttggtgatatacccagtca

SEQ ID NO: 30009 - RNA, 19 nt, synthetic construct
  misc_feature 1..19: note = siRNA antisense sequence
  source 1..19: mol_type = other RNA
tgactgggtatatcaccaa

SEQ ID NO: 30010 - RNA, 19 nt, synthetic construct
  misc_feature 1..19: note = siRNA sense sequence
  source 1..19: mol_type = other RNA
tgatatacccagtcaccca

SEQ ID NO: 30011 - RNA, 19 nt, synthetic construct
  misc_feature 1..19: note = siRNA antisense sequence
  source 1..19: mol_type = other RNA
tgggtgactgggtatatca

SEQ ID NO: 30012 - RNA, 19 nt, synthetic construct
  misc_feature 1..19: note = siRNA sense sequence
  source 1..19: mol_type = other RNA
gatatacccagtcacccaa

SEQ ID NO: 30013 - RNA, 19 nt, synthetic construct
  misc_feature 1..19: note = siRNA antisense sequence
  source 1..19: mol_type = other RNA
ttgggtgactgggtatatc

SEQ ID NO: 30014 - RNA, 19 nt, synthetic construct
  misc_feature 1..19: note = siRNA sense sequence
  source 1..19: mol_type = other RNA
atatacccagtcacccaag

SEQ ID NO: 30015 - RNA, 19 nt, synthetic construct
  misc_feature 1..19: note = siRNA antisense sequence
  source 1..19: mol_type = other RNA
cttgggtgactgggtatat

SEQ ID NO: 30016 - RNA, 19 nt, synthetic construct
  misc_feature 1..19: note = siRNA sense sequence
  source 1..19: mol_type = other RNA
cacccaagagctccagtgg

SEQ ID NO: 30017 - RNA, 19 nt, synthetic construct
  misc_feature 1..19: note = siRNA antisense sequence
  source 1..19: mol_type = other RNA
ccactggagctcttgggtg

SEQ ID NO: 30018 - RNA, 19 nt, synthetic construct
  misc_feature 1..19: note = siRNA sense sequence
  source 1..19: mol_type = other RNA
acccaagagctccagtgga

SEQ ID NO: 30019 - RNA, 19 nt, synthetic construct
  misc_feature 1..19: note = siRNA antisense sequence
  source 1..19: mol_type = other RNA
tccactggagctcttgggt

SEQ ID NO: 30020 - RNA, 19 nt, synthetic construct
  misc_feature 1..19: note = siRNA sense sequence
  source 1..19: mol_type = other RNA
atgttgtttcaatgacttc

SEQ ID NO: 30021 - RNA, 19 nt, synthetic construct
  misc_feature 1..19: note = siRNA antisense sequence
  source 1..19: mol_type = other RNA
gaagtcattgaaacaacat

SEQ ID NO: 30022 - RNA, 19 nt, synthetic construct
  misc_feature 1..19: note = siRNA sense sequence
  source 1..19: mol_type = other RNA
tgttgtttcaatgacttct

SEQ ID NO: 30023 - RNA, 19 nt, synthetic construct
  misc_feature 1..19: note = siRNA antisense sequence
  source 1..19: mol_type = other RNA
agaagtcattgaaacaaca

SEQ ID NO: 30024 - RNA, 19 nt, synthetic construct
  misc_feature 1..19: note = siRNA sense sequence
  source 1..19: mol_type = other RNA
gttgtttcaatgacttctg

SEQ ID NO: 30025 - RNA, 19 nt, synthetic construct
  misc_feature 1..19: note = siRNA antisense sequence
  source 1..19: mol_type = other RNA
cagaagtcattgaaacaac

SEQ ID NO: 30026 - RNA, 19 nt, synthetic construct
  misc_feature 1..19: note = siRNA sense sequence
  source 1..19: mol_type = other RNA
caagattcattctgtaccc

SEQ ID NO: 30027 - RNA, 19 nt, synthetic construct
  misc_feature 1..19: note = siRNA antisense sequence
  source 1..19: mol_type = other RNA
gggtacagaatgaatcttg

SEQ ID NO: 30028 - RNA, 19 nt, synthetic construct
  misc_feature 1..19: note = siRNA sense sequence
  source 1..19: mol_type = other RNA
aagattcattctgtaccca

SEQ ID NO: 30029 - RNA, 19 nt, synthetic construct
  misc_feature 1..19: note = siRNA antisense sequence
  source 1..19: mol_type = other RNA
tgggtacagaatgaatctt

SEQ ID NO: 30030 - RNA, 19 nt, synthetic construct
  misc_feature 1..19: note = siRNA sense sequence
  source 1..19: mol_type = other RNA
agattcattctgtacccat

SEQ ID NO: 30031 - RNA, 19 nt, synthetic construct
  misc_feature 1..19: note = siRNA antisense sequence
  source 1..19: mol_type = other RNA
atgggtacagaatgaatct

SEQ ID NO: 30032 - RNA, 19 nt, synthetic construct
  misc_feature 1..19: note = siRNA sense sequence
  source 1..19: mol_type = other RNA
gattcattctgtacccatc

SEQ ID NO: 30033 - RNA, 19 nt, synthetic construct
  misc_feature 1..19: note = siRNA antisense sequence
  source 1..19: mol_type = other RNA
gatgggtacagaatgaatc

SEQ ID NO: 30034 - RNA, 19 nt, synthetic construct
  misc_feature 1..19: note = siRNA sense sequence
  source 1..19: mol_type = other RNA
attcattctgtacccatct

SEQ ID NO: 30035 - RNA, 19 nt, synthetic construct
  misc_feature 1..19: note = siRNA antisense sequence
  source 1..19: mol_type = other RNA
agatgggtacagaatgaat

SEQ ID NO: 30036 - RNA, 19 nt, synthetic construct
  misc_feature 1..19: note = siRNA sense sequence
  source 1..19: mol_type = other RNA
ttcattctgtacccatcta

SEQ ID NO: 30037 - RNA, 19 nt, synthetic construct
  misc_feature 1..19: note = siRNA antisense sequence
  source 1..19: mol_type = other RNA
tagatgggtacagaatgaa

SEQ ID NO: 30038 - RNA, 19 nt, synthetic construct
  misc_feature 1..19: note = siRNA sense sequence
  source 1..19: mol_type = other RNA
tcattctgtacccatctat

SEQ ID NO: 30039 - RNA, 19 nt, synthetic construct
  misc_feature 1..19: note = siRNA antisense sequence
  source 1..19: mol_type = other RNA
atagatgggtacagaatga

SEQ ID NO: 30040 - RNA, 19 nt, synthetic construct
  misc_feature 1..19: note = siRNA sense sequence
  source 1..19: mol_type = other RNA
cattctgtacccatctatc

SEQ ID NO: 30041 - RNA, 19 nt, synthetic construct
  misc_feature 1..19: note = siRNA antisense sequence
  source 1..19: mol_type = other RNA
gatagatgggtacagaatg

SEQ ID NO: 30042 - RNA, 19 nt, synthetic construct
  misc_feature 1..19: note = siRNA sense sequence
  source 1..19: mol_type = other RNA
attctgtacccatctatca

SEQ ID NO: 30043 - RNA, 19 nt, synthetic construct
  misc_feature 1..19: note = siRNA antisense sequence
  source 1..19: mol_type = other RNA
tgatagatgggtacagaat

SEQ ID NO: 30044 - RNA, 19 nt, synthetic construct
  misc_feature 1..19: note = siRNA sense sequence
  source 1..19: mol_type = other RNA
ttctgtacccatctatcaa

SEQ ID NO: 30045 - RNA, 19 nt, synthetic construct
  misc_feature 1..19: note = siRNA antisense sequence
  source 1..19: mol_type = other RNA
ttgatagatgggtacagaa

SEQ ID NO: 30046 - RNA, 19 nt, synthetic construct
  misc_feature 1..19: note = siRNA sense sequence
  source 1..19: mol_type = other RNA
tctgtacccatctatcaaa

SEQ ID NO: 30047 - RNA, 19 nt, synthetic construct
  misc_feature 1..19: note = siRNA antisense sequence
  source 1..19: mol_type = other RNA
tttgatagatgggtacaga

SEQ ID NO: 30048 - RNA, 19 nt, synthetic construct
  misc_feature 1..19: note = siRNA sense sequence
  source 1..19: mol_type = other RNA
ctgtacccatctatcaaaa

SEQ ID NO: 30049 - RNA, 19 nt, synthetic construct
  misc_feature 1..19: note = siRNA antisense sequence
  source 1..19: mol_type = other RNA
ttttgatagatgggtacag

SEQ ID NO: 30050 - RNA, 19 nt, synthetic construct
  misc_feature 1..19: note = siRNA sense sequence
  source 1..19: mol_type = other RNA
ttttgactttcacgtctca

SEQ ID NO: 30051 - RNA, 19 nt, synthetic construct
  misc_feature 1..19: note = siRNA antisense sequence
  source 1..19: mol_type = other RNA
tgagacgtgaaagtcaaaa

SEQ ID NO: 30052 - RNA, 19 nt, synthetic construct
  misc_feature 1..19: note = siRNA sense sequence
  source 1..19: mol_type = other RNA
tttgactttcacgtctcat

SEQ ID NO: 30053 - RNA, 19 nt, synthetic construct
  misc_feature 1..19: note = siRNA antisense sequence
  source 1..19: mol_type = other RNA
atgagacgtgaaagtcaaa

SEQ ID NO: 30054 - RNA, 19 nt, synthetic construct
  misc_feature 1..19: note = siRNA sense sequence
  source 1..19: mol_type = other RNA
ttgactttcacgtctcatt

SEQ ID NO: 30055 - RNA, 19 nt, synthetic construct
  misc_feature 1..19: note = siRNA antisense sequence
  source 1..19: mol_type = other RNA
aatgagacgtgaaagtcaa

SEQ ID NO: 30056 - RNA, 19 nt, synthetic construct
  misc_feature 1..19: note = siRNA sense sequence
  source 1..19: mol_type = other RNA
tgactttcacgtctcatta

SEQ ID NO: 30057 - RNA, 19 nt, synthetic construct
  misc_feature 1..19: note = siRNA antisense sequence
  source 1..19: mol_type = other RNA
taatgagacgtgaaagtca

SEQ ID NO: 30058 - RNA, 19 nt, synthetic construct
  misc_feature 1..19: note = siRNA sense sequence
  source 1..19: mol_type = other RNA
gactttcacgtctcattat

SEQ ID NO: 30059 - RNA, 19 nt, synthetic construct
  misc_feature 1..19: note = siRNA antisense sequence
  source 1..19: mol_type = other RNA
ataatgagacgtgaaagtc

SEQ ID NO: 30060 - RNA, 19 nt, synthetic construct
  misc_feature 1..19: note = siRNA sense sequence
  source 1..19: mol_type = other RNA
actttcacgtctcattatt

SEQ ID NO: 30061 - RNA, 19 nt, synthetic construct
  misc_feature 1..19: note = siRNA antisense sequence
  source 1..19: mol_type = other RNA
aataatgagacgtgaaagt

SEQ ID NO: 30062 - RNA, 19 nt, synthetic construct
  misc_feature 1..19: note = siRNA sense sequence
  source 1..19: mol_type = other RNA
tcacgtctcattatttaag

SEQ ID NO: 30063 - RNA, 19 nt, synthetic construct
  misc_feature 1..19: note = siRNA antisense sequence
  source 1..19: mol_type = other RNA
cttaaataatgagacgtga

SEQ ID NO: 30064 - RNA, 19 nt, synthetic construct
  misc_feature 1..19: note = siRNA sense sequence
  source 1..19: mol_type = other RNA
ggatttaccattatagatg

SEQ ID NO: 30065 - RNA, 19 nt, synthetic construct
  misc_feature 1..19: note = siRNA antisense sequence
  source 1..19: mol_type = other RNA
catctataatggtaaatcc

SEQ ID NO: 30066 - RNA, 19 nt, synthetic construct
  misc_feature 1..19: note = siRNA sense sequence
  source 1..19: mol_type = other RNA
atttaccattatagatgcc

SEQ ID NO: 30067 - RNA, 19 nt, synthetic construct
  misc_feature 1..19: note = siRNA antisense sequence
  source 1..19: mol_type = other RNA
ggcatctataatggtaaat

SEQ ID NO: 30068 - RNA, 19 nt, synthetic construct
  misc_feature 1..19: note = siRNA sense sequence
  source 1..19: mol_type = other RNA
tttaccattatagatgcca

SEQ ID NO: 30069 - RNA, 19 nt, synthetic construct
  misc_feature 1..19: note = siRNA antisense sequence
  source 1..19: mol_type = other RNA
tggcatctataatggtaaa

SEQ ID NO: 30070 - RNA, 19 nt, synthetic construct
  misc_feature 1..19: note = siRNA sense sequence
  source 1..19: mol_type = other RNA
ttttggtttatgggaggag

SEQ ID NO: 30071 - RNA, 19 nt, synthetic construct
  misc_feature 1..19: note = siRNA antisense sequence
  source 1..19: mol_type = other RNA
ctcctcccataaaccaaaa

SEQ ID NO: 30072 - RNA, 19 nt, synthetic construct
  misc_feature 1..19: note = siRNA sense sequence
  source 1..19: mol_type = other RNA
tttggtttatgggaggagg

SEQ ID NO: 30073 - RNA, 19 nt, synthetic construct
  misc_feature 1..19: note = siRNA antisense sequence
  source 1..19: mol_type = other RNA
cctcctcccataaaccaaa

SEQ ID NO: 30074 - RNA, 19 nt, synthetic construct
  misc_feature 1..19: note = siRNA sense sequence
  source 1..19: mol_type = other RNA
actgatttccaaccctcat

SEQ ID NO: 30075 - RNA, 19 nt, synthetic construct
  misc_feature 1..19: note = siRNA antisense sequence
  source 1..19: mol_type = other RNA
atgagggttggaaatcagt

SEQ ID NO: 30076 - RNA, 19 nt, synthetic construct
  misc_feature 1..19: note = siRNA sense sequence
  source 1..19: mol_type = other RNA
tgatttccaaccctcatgg

SEQ ID NO: 30077 - RNA, 19 nt, synthetic construct
  misc_feature 1..19: note = siRNA antisense sequence
  source 1..19: mol_type = other RNA
ccatgagggttggaaatca

SEQ ID NO: 30078 - RNA, 19 nt, synthetic construct
  misc_feature 1..19: note = siRNA sense sequence
  source 1..19: mol_type = other RNA
agatagtaactgcagatac

SEQ ID NO: 30079 - RNA, 19 nt, synthetic construct
  misc_feature 1..19: note = siRNA antisense sequence
  source 1..19: mol_type = other RNA
gtatctgcagttactatct

SEQ ID NO: 30080 - RNA, 19 nt, synthetic construct
  misc_feature 1..19: note = siRNA sense sequence
  source 1..19: mol_type = other RNA
gatagtaactgcagatacg

SEQ ID NO: 30081 - RNA, 19 nt, synthetic construct
  misc_feature 1..19: note = siRNA antisense sequence
  source 1..19: mol_type = other RNA
cgtatctgcagttactatc

SEQ ID NO: 30082 - RNA, 19 nt, synthetic construct
  misc_feature 1..19: note = siRNA sense sequence
  source 1..19: mol_type = other RNA
gagttgtttctcatgggtg

SEQ ID NO: 30083 - RNA, 19 nt, synthetic construct
  misc_feature 1..19: note = siRNA antisense sequence
  source 1..19: mol_type = other RNA
cacccatgagaaacaactc

SEQ ID NO: 30084 - RNA, 19 nt, synthetic construct
  misc_feature 1..19: note = siRNA sense sequence
  source 1..19: mol_type = other RNA
agttgtttctcatgggtga

SEQ ID NO: 30085 - RNA, 19 nt, synthetic construct
  misc_feature 1..19: note = siRNA antisense sequence
  source 1..19: mol_type = other RNA
tcacccatgagaaacaact

SEQ ID NO: 30086 - RNA, 19 nt, synthetic construct
  misc_feature 1..19: note = siRNA sense sequence
  source 1..19: mol_type = other RNA
aacttagacgataaagcaa

SEQ ID NO: 30087 - RNA, 19 nt, synthetic construct
  misc_feature 1..19: note = siRNA antisense sequence
  source 1..19: mol_type = other RNA
ttgctttatcgtctaagtt

SEQ ID NO: 30088 - RNA, 19 nt, synthetic construct
  misc_feature 1..19: note = siRNA sense sequence
  source 1..19: mol_type = other RNA
acttagacgataaagcaat

SEQ ID NO: 30089 - RNA, 19 nt, synthetic construct
  misc_feature 1..19: note = siRNA antisense sequence
  source 1..19: mol_type = other RNA
attgctttatcgtctaagt

SEQ ID NO: 30090 - RNA, 19 nt, synthetic construct
  misc_feature 1..19: note = siRNA sense sequence
  source 1..19: mol_type = other RNA
cttagacgataaagcaatg

SEQ ID NO: 30091 - RNA, 19 nt, synthetic construct
  misc_feature 1..19: note = siRNA antisense sequence
  source 1..19: mol_type = other RNA
cattgctttatcgtctaag

SEQ ID NO: 30092 - RNA, 19 nt, synthetic construct
  misc_feature 1..19: note = siRNA sense sequence
  source 1..19: mol_type = other RNA
ttagacgataaagcaatgt

SEQ ID NO: 30093 - RNA, 19 nt, synthetic construct
  misc_feature 1..19: note = siRNA antisense sequence
  source 1..19: mol_type = other RNA
acattgctttatcgtctaa

SEQ ID NO: 30094 - RNA, 19 nt, synthetic construct
  misc_feature 1..19: note = siRNA sense sequence
  source 1..19: mol_type = other RNA
tagacgataaagcaatgtc

SEQ ID NO: 30095 - RNA, 19 nt, synthetic construct
  misc_feature 1..19: note = siRNA antisense sequence
  source 1..19: mol_type = other RNA
gacattgctttatcgtcta

SEQ ID NO: 30096 - RNA, 19 nt, synthetic construct
  misc_feature 1..19: note = siRNA sense sequence
  source 1..19: mol_type = other RNA
agacgataaagcaatgtca

SEQ ID NO: 30097 - RNA, 19 nt, synthetic construct
  misc_feature 1..19: note = siRNA antisense sequence
  source 1..19: mol_type = other RNA
tgacattgctttatcgtct

SEQ ID NO: 30098 - RNA, 19 nt, synthetic construct
  misc_feature 1..19: note = siRNA sense sequence
  source 1..19: mol_type = other RNA
gacgataaagcaatgtcag

SEQ ID NO: 30099 - RNA, 19 nt, synthetic construct
  misc_feature 1..19: note = siRNA antisense sequence
  source 1..19: mol_type = other RNA
ctgacattgctttatcgtc

SEQ ID NO: 30100 - RNA, 19 nt, synthetic construct
  misc_feature 1..19: note = siRNA sense sequence
  source 1..19: mol_type = other RNA
acgataaagcaatgtcagg

SEQ ID NO: 30101 - RNA, 19 nt, synthetic construct
  misc_feature 1..19: note = siRNA antisense sequence
  source 1..19: mol_type = other RNA
cctgacattgctttatcgt

SEQ ID NO: 30102 - RNA, 19 nt, synthetic construct
  misc_feature 1..19: note = siRNA sense sequence
  source 1..19: mol_type = other RNA
taaagcaatgtcaggattt

SEQ ID NO: 30103 - RNA, 19 nt, synthetic construct
  misc_feature 1..19: note = siRNA antisense sequence
  source 1..19: mol_type = other RNA
aaatcctgacattgcttta

SEQ ID NO: 30104 - RNA, 19 nt, synthetic construct
  misc_feature 1..19: note = siRNA sense sequence
  source 1..19: mol_type = other RNA
aaagcaatgtcaggatttg

SEQ ID NO: 30105 - RNA, 19 nt, synthetic construct
  misc_feature 1..19: note = siRNA antisense sequence
  source 1..19: mol_type = other RNA
caaatcctgacattgcttt

SEQ ID NO: 30106 - RNA, 19 nt, synthetic construct
  misc_feature 1..19: note = siRNA sense sequence
  source 1..19: mol_type = other RNA
aagcaatgtcaggatttga

SEQ ID NO: 30107 - RNA, 19 nt, synthetic construct
  misc_feature 1..19: note = siRNA antisense sequence
  source 1..19: mol_type = other RNA
tcaaatcctgacattgctt

SEQ ID NO: 30108 - RNA, 19 nt, synthetic construct
  misc_feature 1..19: note = siRNA sense sequence
  source 1..19: mol_type = other RNA
aatgtcaggatttgaggat

SEQ ID NO: 30109 - RNA, 19 nt, synthetic construct
  misc_feature 1..19: note = siRNA antisense sequence
  source 1..19: mol_type = other RNA
atcctcaaatcctgacatt

SEQ ID NO: 30110 - RNA, 19 nt, synthetic construct
  misc_feature 1..19: note = siRNA sense sequence
  source 1..19: mol_type = other RNA
atgtcaggatttgaggatt

SEQ ID NO: 30111 - RNA, 19 nt, synthetic construct
  misc_feature 1..19: note = siRNA antisense sequence
  source 1..19: mol_type = other RNA
aatcctcaaatcctgacat

SEQ ID NO: 30112 - RNA, 19 nt, synthetic construct
  misc_feature 1..19: note = siRNA sense sequence
  source 1..19: mol_type = other RNA
gtcaggatttgaggattga

SEQ ID NO: 30113 - RNA, 19 nt, synthetic construct
  misc_feature 1..19: note = siRNA antisense sequence
  source 1..19: mol_type = other RNA
tcaatcctcaaatcctgac

SEQ ID NO: 30114 - RNA, 19 nt, synthetic construct
  misc_feature 1..19: note = siRNA sense sequence
  source 1..19: mol_type = other RNA
caggatttgaggattgact

SEQ ID NO: 30115 - RNA, 19 nt, synthetic construct
  misc_feature 1..19: note = siRNA antisense sequence
  source 1..19: mol_type = other RNA
agtcaatcctcaaatcctg

SEQ ID NO: 30116 - RNA, 19 nt, synthetic construct
  misc_feature 1..19: note = siRNA sense sequence
  source 1..19: mol_type = other RNA
aggatttgaggattgactc

SEQ ID NO: 30117 - RNA, 19 nt, synthetic construct
  misc_feature 1..19: note = siRNA antisense sequence
  source 1..19: mol_type = other RNA
gagtcaatcctcaaatcct

SEQ ID NO: 30118 - RNA, 19 nt, synthetic construct
  misc_feature 1..19: note = siRNA sense sequence
  source 1..19: mol_type = other RNA
tttgaggattgactctaat

SEQ ID NO: 30119 - RNA, 19 nt, synthetic construct
  misc_feature 1..19: note = siRNA antisense sequence
  source 1..19: mol_type = other RNA
attagagtcaatcctcaaa

SEQ ID NO: 30120 - RNA, 19 nt, synthetic construct
  misc_feature 1..19: note = siRNA sense sequence
  source 1..19: mol_type = other RNA
tgggtaaaattgcatgcta

SEQ ID NO: 30121 - RNA, 19 nt, synthetic construct
  misc_feature 1..19: note = siRNA antisense sequence
  source 1..19: mol_type = other RNA
tagcatgcaattttaccca

SEQ ID NO: 30122 - RNA, 19 nt, synthetic construct
  misc_feature 1..19: note = siRNA sense sequence
  source 1..19: mol_type = other RNA
gggtaaaattgcatgctac

SEQ ID NO: 30123 - RNA, 19 nt, synthetic construct
  misc_feature 1..19: note = siRNA antisense sequence
  source 1..19: mol_type = other RNA
gtagcatgcaattttaccc

SEQ ID NO: 30124 - RNA, 19 nt, synthetic construct
  misc_feature 1..19: note = siRNA sense sequence
  source 1..19: mol_type = other RNA
ggtaaaattgcatgctaca

SEQ ID NO: 30125 - RNA, 19 nt, synthetic construct
  misc_feature 1..19: note = siRNA antisense sequence
  source 1..19: mol_type = other RNA
tgtagcatgcaattttacc

SEQ ID NO: 30126 - RNA, 19 nt, synthetic construct
  misc_feature 1..19: note = siRNA sense sequence
  source 1..19: mol_type = other RNA
gtaaaattgcatgctacag

SEQ ID NO: 30127 - RNA, 19 nt, synthetic construct
  misc_feature 1..19: note = siRNA antisense sequence
  source 1..19: mol_type = other RNA
ctgtagcatgcaattttac

SEQ ID NO: 30128 - RNA, 19 nt, synthetic construct
  misc_feature 1..19: note = siRNA sense sequence
  source 1..19: mol_type = other RNA
taaaattgcatgctacaga

SEQ ID NO: 30129 - RNA, 19 nt, synthetic construct
  misc_feature 1..19: note = siRNA antisense sequence
  source 1..19: mol_type = other RNA
tctgtagcatgcaatttta

SEQ ID NO: 30130 - RNA, 19 nt, synthetic construct
  misc_feature 1..19: note = siRNA sense sequence
  source 1..19: mol_type = other RNA
ggttttattctattctgag

SEQ ID NO: 30131 - RNA, 19 nt, synthetic construct
  misc_feature 1..19: note = siRNA antisense sequence
  source 1..19: mol_type = other RNA
ctcagaatagaataaaacc

SEQ ID NO: 30132 - RNA, 19 nt, synthetic construct
  misc_feature 1..19: note = siRNA sense sequence
  source 1..19: mol_type = other RNA
cctgcccagtcagcaacca

SEQ ID NO: 30133 - RNA, 19 nt, synthetic construct
  misc_feature 1..19: note = siRNA antisense sequence
  source 1..19: mol_type = other RNA
tggttgctgactgggcagg

SEQ ID NO: 30134 - RNA, 19 nt, synthetic construct
  misc_feature 1..19: note = siRNA sense sequence
  source 1..19: mol_type = other RNA
cccagtcagcaaccatcac

SEQ ID NO: 30135 - RNA, 19 nt, synthetic construct
  misc_feature 1..19: note = siRNA antisense sequence
  source 1..19: mol_type = other RNA
gtgatggttgctgactggg

SEQ ID NO: 30136 - RNA, 19 nt, synthetic construct
  misc_feature 1..19: note = siRNA sense sequence
  source 1..19: mol_type = other RNA
agtcagcaaccatcaccat

SEQ ID NO: 30137 - RNA, 19 nt, synthetic construct
  misc_feature 1..19: note = siRNA antisense sequence
  source 1..19: mol_type = other RNA
atggtgatggttgctgact

SEQ ID NO: 30138 - RNA, 19 nt, synthetic construct
  misc_feature 1..19: note = siRNA sense sequence
  source 1..19: mol_type = other RNA
gtcagcaaccatcaccatt

SEQ ID NO: 30139 - RNA, 19 nt, synthetic construct
  misc_feature 1..19: note = siRNA antisense sequence
  source 1..19: mol_type = other RNA
aatggtgatggttgctgac

SEQ ID NO: 30140 - RNA, 19 nt, synthetic construct
  misc_feature 1..19: note = siRNA sense sequence
  source 1..19: mol_type = other RNA
tcagcaaccatcaccattg

SEQ ID NO: 30141 - RNA, 19 nt, synthetic construct
  misc_feature 1..19: note = siRNA antisense sequence
  source 1..19: mol_type = other RNA
caatggtgatggttgctga

SEQ ID NO: 30142 - RNA, 19 nt, synthetic construct
  misc_feature 1..19: note = siRNA sense sequence
  source 1..19: mol_type = other RNA
agcaaccatcaccattgag

SEQ ID NO: 30143 - RNA, 19 nt, synthetic construct
  misc_feature 1..19: note = siRNA antisense sequence
  source 1..19: mol_type = other RNA
ctcaatggtgatggttgct

SEQ ID NO: 30144 - RNA, 19 nt, synthetic construct
  misc_feature 1..19: note = siRNA sense sequence
  source 1..19: mol_type = other RNA
aaccatcaccattgaggca

SEQ ID NO: 30145 - RNA, 19 nt, synthetic construct
  misc_feature 1..19: note = siRNA antisense sequence
  source 1..19: mol_type = other RNA
tgcctcaatggtgatggtt

SEQ ID NO: 30146 - RNA, 19 nt, synthetic construct
  misc_feature 1..19: note = siRNA sense sequence
  source 1..19: mol_type = other RNA
aagactaaggtatgcatat

SEQ ID NO: 30147 - RNA, 19 nt, synthetic construct
  misc_feature 1..19: note = siRNA antisense sequence
  source 1..19: mol_type = other RNA
atatgcataccttagtctt

SEQ ID NO: 30148 - RNA, 19 nt, synthetic construct
  misc_feature 1..19: note = siRNA sense sequence
  source 1..19: mol_type = other RNA
tgctttgtgtacttaatag

SEQ ID NO: 30149 - RNA, 19 nt, synthetic construct
  misc_feature 1..19: note = siRNA antisense sequence
  source 1..19: mol_type = other RNA
ctattaagtacacaaagca

SEQ ID NO: 30150 - RNA, 19 nt, synthetic construct
  misc_feature 1..19: note = siRNA sense sequence
  source 1..19: mol_type = other RNA
gctttgtgtacttaataga

SEQ ID NO: 30151 - RNA, 19 nt, synthetic construct
  misc_feature 1..19: note = siRNA antisense sequence
  source 1..19: mol_type = other RNA
tctattaagtacacaaagc

SEQ ID NO: 30152 - RNA, 19 nt, synthetic construct
  misc_feature 1..19: note = siRNA sense sequence
  source 1..19: mol_type = other RNA
aaatttgcatcacttgctt

SEQ ID NO: 30153 - RNA, 19 nt, synthetic construct
  misc_feature 1..19: note = siRNA antisense sequence
  source 1..19: mol_type = other RNA
aagcaagtgatgcaaattt

SEQ ID NO: 30154 - RNA, 19 nt, synthetic construct
  misc_feature 1..19: note = siRNA sense sequence
  source 1..19: mol_type = other RNA
aatttgcatcacttgcttt

SEQ ID NO: 30155 - RNA, 19 nt, synthetic construct
  misc_feature 1..19: note = siRNA antisense sequence
  source 1..19: mol_type = other RNA
aaagcaagtgatgcaaatt

SEQ ID NO: 30156 - RNA, 19 nt, synthetic construct
  misc_feature 1..19: note = siRNA sense sequence
  source 1..19: mol_type = other RNA
gcatcacttgctttattgc

SEQ ID NO: 30157 - RNA, 19 nt, synthetic construct
  misc_feature 1..19: note = siRNA antisense sequence
  source 1..19: mol_type = other RNA
gcaataaagcaagtgatgc

SEQ ID NO: 30158 - RNA, 19 nt, synthetic construct
  misc_feature 1..19: note = siRNA sense sequence
  source 1..19: mol_type = other RNA
catcacttgctttattgca

SEQ ID NO: 30159 - RNA, 19 nt, synthetic construct
  misc_feature 1..19: note = siRNA antisense sequence
  source 1..19: mol_type = other RNA
tgcaataaagcaagtgatg

SEQ ID NO: 30160 - RNA, 19 nt, synthetic construct
  misc_feature 1..19: note = siRNA sense sequence
  source 1..19: mol_type = other RNA
agtatctctgtgatgtgcc

SEQ ID NO: 30161 - RNA, 19 nt, synthetic construct
  misc_feature 1..19: note = siRNA antisense sequence
  source 1..19: mol_type = other RNA
ggcacatcacagagatact

SEQ ID NO: 30162 - RNA, 19 nt, synthetic construct
  misc_feature 1..19: note = siRNA sense sequence
  source 1..19: mol_type = other RNA
gtatctctgtgatgtgcct

SEQ ID NO: 30163 - RNA, 19 nt, synthetic construct
  misc_feature 1..19: note = siRNA antisense sequence
  source 1..19: mol_type = other RNA
aggcacatcacagagatac

SEQ ID NO: 30164 - RNA, 19 nt, synthetic construct
  misc_feature 1..19: note = siRNA sense sequence
  source 1..19: mol_type = other RNA
tatctctgtgatgtgcctg

SEQ ID NO: 30165 - RNA, 19 nt, synthetic construct
  misc_feature 1..19: note = siRNA antisense sequence
  source 1..19: mol_type = other RNA
caggcacatcacagagata

SEQ ID NO: 30166 - RNA, 19 nt, synthetic construct
  misc_feature 1..19: note = siRNA sense sequence
  source 1..19: mol_type = other RNA
atctctgtgatgtgcctgt

SEQ ID NO: 30167 - RNA, 19 nt, synthetic construct
  misc_feature 1..19: note = siRNA antisense sequence
  source 1..19: mol_type = other RNA
acaggcacatcacagagat

SEQ ID NO: 30168 - RNA, 19 nt, synthetic construct
  misc_feature 1..19: note = siRNA sense sequence
  source 1..19: mol_type = other RNA
tctctgtgatgtgcctgta

SEQ ID NO: 30169 - RNA, 19 nt, synthetic construct
  misc_feature 1..19: note = siRNA antisense sequence
  source 1..19: mol_type = other RNA
tacaggcacatcacagaga

SEQ ID NO: 30170 - RNA, 19 nt, synthetic construct
  misc_feature 1..19: note = siRNA sense sequence
  source 1..19: mol_type = other RNA
ctctgtgatgtgcctgtac

SEQ ID NO: 30171 - RNA, 19 nt, synthetic construct
  misc_feature 1..19: note = siRNA antisense sequence
  source 1..19: mol_type = other RNA
gtacaggcacatcacagag

SEQ ID NO: 30172 - RNA, 19 nt, synthetic construct
  misc_feature 1..19: note = siRNA sense sequence
  source 1..19: mol_type = other RNA
ctgtgatgtgcctgtactt

SEQ ID NO: 30173 - RNA, 19 nt, synthetic construct
  misc_feature 1..19: note = siRNA antisense sequence
  source 1..19: mol_type = other RNA
aagtacaggcacatcacag

SEQ ID NO: 30174 - RNA, 19 nt, synthetic construct
  misc_feature 1..19: note = siRNA sense sequence
  source 1..19: mol_type = other RNA
tgtgatgtgcctgtacttc

SEQ ID NO: 30175 - RNA, 19 nt, synthetic construct
  misc_feature 1..19: note = siRNA antisense sequence
  source 1..19: mol_type = other RNA
gaagtacaggcacatcaca

SEQ ID NO: 30176 - RNA, 19 nt, synthetic construct
  misc_feature 1..19: note = siRNA sense sequence
  source 1..19: mol_type = other RNA
tgatgtgcctgtacttcat

SEQ ID NO: 30177 - RNA, 19 nt, synthetic construct
  misc_feature 1..19: note = siRNA antisense sequence
  source 1..19: mol_type = other RNA
atgaagtacaggcacatca

SEQ ID NO: 30178 - RNA, 19 nt, synthetic construct
  misc_feature 1..19: note = siRNA sense sequence
  source 1..19: mol_type = other RNA
gatgtgcctgtacttcatt

SEQ ID NO: 30179 - RNA, 19 nt, synthetic construct
  misc_feature 1..19: note = siRNA antisense sequence
  source 1..19: mol_type = other RNA
aatgaagtacaggcacatc

SEQ ID NO: 30180 - RNA, 19 nt, synthetic construct
  misc_feature 1..19: note = siRNA sense sequence
  source 1..19: mol_type = other RNA
atgtgcctgtacttcattc

SEQ ID NO: 30181 - RNA, 19 nt, synthetic construct
  misc_feature 1..19: note = siRNA antisense sequence
  source 1..19: mol_type = other RNA
gaatgaagtacaggcacat

SEQ ID NO: 30182 - RNA, 19 nt, synthetic construct
  misc_feature 1..19: note = siRNA sense sequence
  source 1..19: mol_type = other RNA
tcatgtatctatttagcag

SEQ ID NO: 30183 - RNA, 19 nt, synthetic construct
  misc_feature 1..19: note = siRNA antisense sequence
  source 1..19: mol_type = other RNA
ctgctaaatagatacatga

SEQ ID NO: 30184 - RNA, 19 nt, synthetic construct
  misc_feature 1..19: note = siRNA sense sequence
  source 1..19: mol_type = other RNA
catgtatctatttagcagt

SEQ ID NO: 30185 - RNA, 19 nt, synthetic construct
  misc_feature 1..19: note = siRNA antisense sequence
  source 1..19: mol_type = other RNA
actgctaaatagatacatg

SEQ ID NO: 30186 - RNA, 19 nt, synthetic construct
  misc_feature 1..19: note = siRNA sense sequence
  source 1..19: mol_type = other RNA
tgtatctatttagcagttg

SEQ ID NO: 30187 - RNA, 19 nt, synthetic construct
  misc_feature 1..19: note = siRNA antisense sequence
  source 1..19: mol_type = other RNA
caactgctaaatagataca

SEQ ID NO: 30188 - RNA, 19 nt, synthetic construct
  misc_feature 1..19: note = siRNA sense sequence
  source 1..19: mol_type = other RNA
gtatctatttagcagttga

SEQ ID NO: 30189 - RNA, 19 nt, synthetic construct
  misc_feature 1..19: note = siRNA antisense sequence
  source 1..19: mol_type = other RNA
tcaactgctaaatagatac

SEQ ID NO: 30190 - RNA, 19 nt, synthetic construct
  misc_feature 1..19: note = siRNA sense sequence
  source 1..19: mol_type = other RNA
atctatttagcagttgatg

SEQ ID NO: 30191 - RNA, 19 nt, synthetic construct
  misc_feature 1..19: note = siRNA antisense sequence
  source 1..19: mol_type = other RNA
catcaactgctaaatagat

SEQ ID NO: 30192 - RNA, 19 nt, synthetic construct
  misc_feature 1..19: note = siRNA sense sequence
  source 1..19: mol_type = other RNA
tctatttagcagttgatgg

SEQ ID NO: 30193 - RNA, 19 nt, synthetic construct
  misc_feature 1..19: note = siRNA antisense sequence
  source 1..19: mol_type = other RNA
ccatcaactgctaaataga

SEQ ID NO: 30194 - RNA, 19 nt, synthetic construct
  misc_feature 1..19: note = siRNA sense sequence
  source 1..19: mol_type = other RNA
ctatttagcagttgatgga

SEQ ID NO: 30195 - RNA, 19 nt, synthetic construct
  misc_feature 1..19: note = siRNA antisense sequence
  source 1..19: mol_type = other RNA
tccatcaactgctaaatag

SEQ ID NO: 30196 - RNA, 19 nt, synthetic construct
  misc_feature 1..19: note = siRNA sense sequence
  source 1..19: mol_type = other RNA
tatttagcagttgatggac

SEQ ID NO: 30197 - RNA, 19 nt, synthetic construct
  misc_feature 1..19: note = siRNA antisense sequence
  source 1..19: mol_type = other RNA
gtccatcaactgctaaata

SEQ ID NO: 30198 - RNA, 19 nt, synthetic construct
  misc_feature 1..19: note = siRNA sense sequence
  source 1..19: mol_type = other RNA
ggaatagaattgttgactt

SEQ ID NO: 30199 - RNA, 19 nt, synthetic construct
  misc_feature 1..19: note = siRNA antisense sequence
  source 1..19: mol_type = other RNA
aagtcaacaattctattcc

SEQ ID NO: 30200 - RNA, 19 nt, synthetic construct
  misc_feature 1..19: note = siRNA sense sequence
  source 1..19: mol_type = other RNA
agaattgttgacttgtagg

SEQ ID NO: 30201 - RNA, 19 nt, synthetic construct
  misc_feature 1..19: note = siRNA antisense sequence
  source 1..19: mol_type = other RNA
cctacaagtcaacaattct

SEQ ID NO: 30202 - RNA, 19 nt, synthetic construct
  misc_feature 1..19: note = siRNA sense sequence
  source 1..19: mol_type = other RNA
gaattgttgacttgtaggg

SEQ ID NO: 30203 - RNA, 19 nt, synthetic construct
  misc_feature 1..19: note = siRNA antisense sequence
  source 1..19: mol_type = other RNA
ccctacaagtcaacaattc

SEQ ID NO: 30204 - RNA, 19 nt, synthetic construct
  misc_feature 1..19: note = siRNA sense sequence
  source 1..19: mol_type = other RNA
aattgttgacttgtagggc

SEQ ID NO: 30205 - RNA, 19 nt, synthetic construct
  misc_feature 1..19: note = siRNA antisense sequence
  source 1..19: mol_type = other RNA
gccctacaagtcaacaatt

SEQ ID NO: 30206 - RNA, 19 nt, synthetic construct
  misc_feature 1..19: note = siRNA sense sequence
  source 1..19: mol_type = other RNA
acttgtagggcaactctat

SEQ ID NO: 30207 - RNA, 19 nt, synthetic construct
  misc_feature 1..19: note = siRNA antisense sequence
  source 1..19: mol_type = other RNA
atagagttgccctacaagt

SEQ ID NO: 30208 - RNA, 19 nt, synthetic construct
  misc_feature 1..19: note = siRNA sense sequence
  source 1..19: mol_type = other RNA
cttgtagggcaactctatg

SEQ ID NO: 30209 - RNA, 19 nt, synthetic construct
  misc_feature 1..19: note = siRNA antisense sequence
  source 1..19: mol_type = other RNA
catagagttgccctacaag

SEQ ID NO: 30210 - RNA, 19 nt, synthetic construct
  misc_feature 1..19: note = siRNA sense sequence
  source 1..19: mol_type = other RNA
tagggcaactctatgtgta

SEQ ID NO: 30211 - RNA, 19 nt, synthetic construct
  misc_feature 1..19: note = siRNA antisense sequence
  source 1..19: mol_type = other RNA
tacacatagagttgcccta

SEQ ID NO: 30212 - RNA, 19 nt, synthetic construct
  misc_feature 1..19: note = siRNA sense sequence
  source 1..19: mol_type = other RNA
agggcaactctatgtgtaa

SEQ ID NO: 30213 - RNA, 19 nt, synthetic construct
  misc_feature 1..19: note = siRNA antisense sequence
  source 1..19: mol_type = other RNA
ttacacatagagttgccct

SEQ ID NO: 30214 - RNA, 19 nt, synthetic construct
  misc_feature 1..19: note = siRNA sense sequence
  source 1..19: mol_type = other RNA
gggcaactctatgtgtaac

SEQ ID NO: 30215 - RNA, 19 nt, synthetic construct
  misc_feature 1..19: note = siRNA antisense sequence
  source 1..19: mol_type = other RNA
gttacacatagagttgccc

SEQ ID NO: 30216 - RNA, 19 nt, synthetic construct
  misc_feature 1..19: note = siRNA sense sequence
  source 1..19: mol_type = other RNA
ggcaactctatgtgtaact

SEQ ID NO: 30217 - RNA, 19 nt, synthetic construct
  misc_feature 1..19: note = siRNA antisense sequence
  source 1..19: mol_type = other RNA
agttacacatagagttgcc

SEQ ID NO: 30218 - RNA, 19 nt, synthetic construct
  misc_feature 1..19: note = siRNA sense sequence
  source 1..19: mol_type = other RNA
cacatccttgtcaatcctt

SEQ ID NO: 30219 - RNA, 19 nt, synthetic construct
  misc_feature 1..19: note = siRNA antisense sequence
  source 1..19: mol_type = other RNA
aaggattgacaaggatgtg

SEQ ID NO: 30220 - RNA, 19 nt, synthetic construct
  misc_feature 1..19: note = siRNA sense sequence
  source 1..19: mol_type = other RNA
acatccttgtcaatcctta

SEQ ID NO: 30221 - RNA, 19 nt, synthetic construct
  misc_feature 1..19: note = siRNA antisense sequence
  source 1..19: mol_type = other RNA
taaggattgacaaggatgt

SEQ ID NO: 30222 - RNA, 19 nt, synthetic construct
  misc_feature 1..19: note = siRNA sense sequence
  source 1..19: mol_type = other RNA
catccttgtcaatccttat

SEQ ID NO: 30223 - RNA, 19 nt, synthetic construct
  misc_feature 1..19: note = siRNA antisense sequence
  source 1..19: mol_type = other RNA
ataaggattgacaaggatg

SEQ ID NO: 30224 - RNA, 19 nt, synthetic construct
  misc_feature 1..19: note = siRNA sense sequence
  source 1..19: mol_type = other RNA
atccttgtcaatccttatt

SEQ ID NO: 30225 - RNA, 19 nt, synthetic construct
  misc_feature 1..19: note = siRNA antisense sequence
  source 1..19: mol_type = other RNA
aataaggattgacaaggat

SEQ ID NO: 30226 - RNA, 19 nt, synthetic construct
  misc_feature 1..19: note = siRNA sense sequence
  source 1..19: mol_type = other RNA
tccttgtcaatccttattt

SEQ ID NO: 30227 - RNA, 19 nt, synthetic construct
  misc_feature 1..19: note = siRNA antisense sequence
  source 1..19: mol_type = other RNA
aaataaggattgacaagga

SEQ ID NO: 30228 - RNA, 19 nt, synthetic construct
  misc_feature 1..19: note = siRNA sense sequence
  source 1..19: mol_type = other RNA
ccttgtcaatccttatttt

SEQ ID NO: 30229 - RNA, 19 nt, synthetic construct
  misc_feature 1..19: note = siRNA antisense sequence
  source 1..19: mol_type = other RNA
aaaataaggattgacaagg

SEQ ID NO: 30230 - RNA, 19 nt, synthetic construct
  misc_feature 1..19: note = siRNA sense sequence
  source 1..19: mol_type = other RNA
tgtcaatccttattttctg

SEQ ID NO: 30231 - RNA, 19 nt, synthetic construct
  misc_feature 1..19: note = siRNA antisense sequence
  source 1..19: mol_type = other RNA
cagaaaataaggattgaca

SEQ ID NO: 30232 - RNA, 19 nt, synthetic construct
  misc_feature 1..19: note = siRNA sense sequence
  source 1..19: mol_type = other RNA
gtcaatccttattttctgt

SEQ ID NO: 30233 - RNA, 19 nt, synthetic construct
  misc_feature 1..19: note = siRNA antisense sequence
  source 1..19: mol_type = other RNA
acagaaaataaggattgac

SEQ ID NO: 30234 - RNA, 19 nt, synthetic construct
  misc_feature 1..19: note = siRNA sense sequence
  source 1..19: mol_type = other RNA
attctactggctgtgaagt

SEQ ID NO: 30235 - RNA, 19 nt, synthetic construct
  misc_feature 1..19: note = siRNA antisense sequence
  source 1..19: mol_type = other RNA
acttcacagccagtagaat

SEQ ID NO: 30236 - RNA, 19 nt, synthetic construct
  misc_feature 1..19: note = siRNA sense sequence
  source 1..19: mol_type = other RNA
ttctactggctgtgaagtg

SEQ ID NO: 30237 - RNA, 19 nt, synthetic construct
  misc_feature 1..19: note = siRNA antisense sequence
  source 1..19: mol_type = other RNA
cacttcacagccagtagaa

SEQ ID NO: 30238 - RNA, 19 nt, synthetic construct
  misc_feature 1..19: note = siRNA sense sequence
  source 1..19: mol_type = other RNA
tctactggctgtgaagtga

SEQ ID NO: 30239 - RNA, 19 nt, synthetic construct
  misc_feature 1..19: note = siRNA antisense sequence
  source 1..19: mol_type = other RNA
tcacttcacagccagtaga

SEQ ID NO: 30240 - RNA, 19 nt, synthetic construct
  misc_feature 1..19: note = siRNA sense sequence
  source 1..19: mol_type = other RNA
tgagcatcttattatgtgc

SEQ ID NO: 30241 - RNA, 19 nt, synthetic construct
  misc_feature 1..19: note = siRNA antisense sequence
  source 1..19: mol_type = other RNA
gcacataataagatgctca

SEQ ID NO: 30242 - RNA, 19 nt, synthetic construct
  misc_feature 1..19: note = siRNA sense sequence
  source 1..19: mol_type = other RNA
gcatcttattatgtgctta

SEQ ID NO: 30243 - RNA, 19 nt, synthetic construct
  misc_feature 1..19: note = siRNA antisense sequence
  source 1..19: mol_type = other RNA
taagcacataataagatgc

SEQ ID NO: 30244 - RNA, 19 nt, synthetic construct
  misc_feature 1..19: note = siRNA sense sequence
  source 1..19: mol_type = other RNA
gccatttgtgtaacttatt

SEQ ID NO: 30245 - RNA, 19 nt, synthetic construct
  misc_feature 1..19: note = siRNA antisense sequence
  source 1..19: mol_type = other RNA
aataagttacacaaatggc

SEQ ID NO: 30246 - RNA, 19 nt, synthetic construct
  misc_feature 1..19: note = siRNA sense sequence
  source 1..19: mol_type = other RNA
ttgtgtaacttatttggag

SEQ ID NO: 30247 - RNA, 19 nt, synthetic construct
  misc_feature 1..19: note = siRNA antisense sequence
  source 1..19: mol_type = other RNA
ctccaaataagttacacaa

SEQ ID NO: 30248 - RNA, 19 nt, synthetic construct
  misc_feature 1..19: note = siRNA sense sequence
  source 1..19: mol_type = other RNA
gttgagttgcttcttattt

SEQ ID NO: 30249 - RNA, 19 nt, synthetic construct
  misc_feature 1..19: note = siRNA antisense sequence
  source 1..19: mol_type = other RNA
aaataagaagcaactcaac

SEQ ID NO: 30250 - RNA, 19 nt, synthetic construct
  misc_feature 1..19: note = siRNA sense sequence
  source 1..19: mol_type = other RNA
gactcaagaggactttagt

SEQ ID NO: 30251 - RNA, 19 nt, synthetic construct
  misc_feature 1..19: note = siRNA antisense sequence
  source 1..19: mol_type = other RNA
actaaagtcctcttgagtc

SEQ ID NO: 30252 - RNA, 19 nt, synthetic construct
  misc_feature 1..19: note = siRNA sense sequence
  source 1..19: mol_type = other RNA
actcaagaggactttagtt

SEQ ID NO: 30253 - RNA, 19 nt, synthetic construct
  misc_feature 1..19: note = siRNA antisense sequence
  source 1..19: mol_type = other RNA
aactaaagtcctcttgagt

SEQ ID NO: 30254 - RNA, 19 nt, synthetic construct
  misc_feature 1..19: note = siRNA sense sequence
  source 1..19: mol_type = other RNA
ctcaagaggactttagttg

SEQ ID NO: 30255 - RNA, 19 nt, synthetic construct
  misc_feature 1..19: note = siRNA antisense sequence
  source 1..19: mol_type = other RNA
caactaaagtcctcttgag

SEQ ID NO: 30256 - RNA, 19 nt, synthetic construct
  misc_feature 1..19: note = siRNA sense sequence
  source 1..19: mol_type = other RNA
tcaagaggactttagttgc

SEQ ID NO: 30257 - RNA, 19 nt, synthetic construct
  misc_feature 1..19: note = siRNA antisense sequence
  source 1..19: mol_type = other RNA
gcaactaaagtcctcttga

SEQ ID NO: 30258 - RNA, 19 nt, synthetic construct
  misc_feature 1..19: note = siRNA sense sequence
  source 1..19: mol_type = other RNA
caagaggactttagttgca

SEQ ID NO: 30259 - RNA, 19 nt, synthetic construct
  misc_feature 1..19: note = siRNA antisense sequence
  source 1..19: mol_type = other RNA
tgcaactaaagtcctcttg

SEQ ID NO: 30260 - RNA, 19 nt, synthetic construct
  misc_feature 1..19: note = siRNA sense sequence
  source 1..19: mol_type = other RNA
aagaggactttagttgcat

SEQ ID NO: 30261 - RNA, 19 nt, synthetic construct
  misc_feature 1..19: note = siRNA antisense sequence
  source 1..19: mol_type = other RNA
atgcaactaaagtcctctt

SEQ ID NO: 30262 - RNA, 19 nt, synthetic construct
  misc_feature 1..19: note = siRNA sense sequence
  source 1..19: mol_type = other RNA
agaggactttagttgcatg

SEQ ID NO: 30263 - RNA, 19 nt, synthetic construct
  misc_feature 1..19: note = siRNA antisense sequence
  source 1..19: mol_type = other RNA
catgcaactaaagtcctct

SEQ ID NO: 30264 - RNA, 19 nt, synthetic construct
  misc_feature 1..19: note = siRNA sense sequence
  source 1..19: mol_type = other RNA
gaggactttagttgcatgg

SEQ ID NO: 30265 - RNA, 19 nt, synthetic construct
  misc_feature 1..19: note = siRNA antisense sequence
  source 1..19: mol_type = other RNA
ccatgcaactaaagtcctc

SEQ ID NO: 30266 - RNA, 19 nt, synthetic construct
  misc_feature 1..19: note = siRNA sense sequence
  source 1..19: mol_type = other RNA
aggactttagttgcatggg

SEQ ID NO: 30267 - RNA, 19 nt, synthetic construct
  misc_feature 1..19: note = siRNA antisense sequence
  source 1..19: mol_type = other RNA
cccatgcaactaaagtcct

SEQ ID NO: 30268 - RNA, 19 nt, synthetic construct
  misc_feature 1..19: note = siRNA sense sequence
  source 1..19: mol_type = other RNA
ggactttagttgcatggga

SEQ ID NO: 30269 - RNA, 19 nt, synthetic construct
  misc_feature 1..19: note = siRNA antisense sequence
  source 1..19: mol_type = other RNA
tcccatgcaactaaagtcc

SEQ ID NO: 30270 - RNA, 19 nt, synthetic construct
  misc_feature 1..19: note = siRNA sense sequence
  source 1..19: mol_type = other RNA
gactttagttgcatgggaa

SEQ ID NO: 30271 - RNA, 19 nt, synthetic construct
  misc_feature 1..19: note = siRNA antisense sequence
  source 1..19: mol_type = other RNA
ttcccatgcaactaaagtc

SEQ ID NO: 30272 - RNA, 19 nt, synthetic construct
  misc_feature 1..19: note = siRNA sense sequence
  source 1..19: mol_type = other RNA
aaatattctaggtctgggt

SEQ ID NO: 30273 - RNA, 19 nt, synthetic construct
  misc_feature 1..19: note = siRNA antisense sequence
  source 1..19: mol_type = other RNA
acccagacctagaatattt

SEQ ID NO: 30274 - RNA, 19 nt, synthetic construct
  misc_feature 1..19: note = siRNA sense sequence
  source 1..19: mol_type = other RNA
aatattctaggtctgggtg

SEQ ID NO: 30275 - RNA, 19 nt, synthetic construct
  misc_feature 1..19: note = siRNA antisense sequence
  source 1..19: mol_type = other RNA
cacccagacctagaatatt

SEQ ID NO: 30276 - RNA, 19 nt, synthetic construct
  misc_feature 1..19: note = siRNA sense sequence
  source 1..19: mol_type = other RNA
atattctaggtctgggtga

SEQ ID NO: 30277 - RNA, 19 nt, synthetic construct
  misc_feature 1..19: note = siRNA antisense sequence
  source 1..19: mol_type = other RNA
tcacccagacctagaatat

SEQ ID NO: 30278 - RNA, 19 nt, synthetic construct
  misc_feature 1..19: note = siRNA sense sequence
  source 1..19: mol_type = other RNA
tattctaggtctgggtgat

SEQ ID NO: 30279 - RNA, 19 nt, synthetic construct
  misc_feature 1..19: note = siRNA antisense sequence
  source 1..19: mol_type = other RNA
atcacccagacctagaata

SEQ ID NO: 30280 - RNA, 19 nt, synthetic construct
  misc_feature 1..19: note = siRNA sense sequence
  source 1..19: mol_type = other RNA
ttctaggtctgggtgatgg

SEQ ID NO: 30281 - RNA, 19 nt, synthetic construct
  misc_feature 1..19: note = siRNA antisense sequence
  source 1..19: mol_type = other RNA
ccatcacccagacctagaa

SEQ ID NO: 30282 - RNA, 19 nt, synthetic construct
  misc_feature 1..19: note = siRNA sense sequence
  source 1..19: mol_type = other RNA
tctaggtctgggtgatggt

SEQ ID NO: 30283 - RNA, 19 nt, synthetic construct
  misc_feature 1..19: note = siRNA antisense sequence
  source 1..19: mol_type = other RNA
accatcacccagacctaga

SEQ ID NO: 30284 - RNA, 19 nt, synthetic construct
  misc_feature 1..19: note = siRNA sense sequence
  source 1..19: mol_type = other RNA
ctaggtctgggtgatggtt

SEQ ID NO: 30285 - RNA, 19 nt, synthetic construct
  misc_feature 1..19: note = siRNA antisense sequence
  source 1..19: mol_type = other RNA
aaccatcacccagacctag

SEQ ID NO: 30286 - RNA, 19 nt, synthetic construct
  misc_feature 1..19: note = siRNA sense sequence
  source 1..19: mol_type = other RNA
taggtctgggtgatggttt

SEQ ID NO: 30287 - RNA, 19 nt, synthetic construct
  misc_feature 1..19: note = siRNA antisense sequence
  source 1..19: mol_type = other RNA
aaaccatcacccagaccta

SEQ ID NO: 30288 - RNA, 19 nt, synthetic construct
  misc_feature 1..19: note = siRNA sense sequence
  source 1..19: mol_type = other RNA
aggtctgggtgatggtttc

SEQ ID NO: 30289 - RNA, 19 nt, synthetic construct
  misc_feature 1..19: note = siRNA antisense sequence
  source 1..19: mol_type = other RNA
gaaaccatcacccagacct

SEQ ID NO: 30290 - RNA, 19 nt, synthetic construct
  misc_feature 1..19: note = siRNA sense sequence
  source 1..19: mol_type = other RNA
ggtctgggtgatggtttca

SEQ ID NO: 30291 - RNA, 19 nt, synthetic construct
  misc_feature 1..19: note = siRNA antisense sequence
  source 1..19: mol_type = other RNA
tgaaaccatcacccagacc

SEQ ID NO: 30292 - RNA, 19 nt, synthetic construct
  misc_feature 1..19: note = siRNA sense sequence
  source 1..19: mol_type = other RNA
gtctgggtgatggtttcat

SEQ ID NO: 30293 - RNA, 19 nt, synthetic construct
  misc_feature 1..19: note = siRNA antisense sequence
  source 1..19: mol_type = other RNA
atgaaaccatcacccagac

SEQ ID NO: 30294 - RNA, 19 nt, synthetic construct
  misc_feature 1..19: note = siRNA sense sequence
  source 1..19: mol_type = other RNA
tctgggtgatggtttcatg

SEQ ID NO: 30295 - RNA, 19 nt, synthetic construct
  misc_feature 1..19: note = siRNA antisense sequence
  source 1..19: mol_type = other RNA
catgaaaccatcacccaga

SEQ ID NO: 30296 - RNA, 19 nt, synthetic construct
  misc_feature 1..19: note = siRNA sense sequence
  source 1..19: mol_type = other RNA
tgggtgatggtttcatgga

SEQ ID NO: 30297 - RNA, 19 nt, synthetic construct
  misc_feature 1..19: note = siRNA antisense sequence
  source 1..19: mol_type = other RNA
tccatgaaaccatcaccca

SEQ ID NO: 30298 - RNA, 19 nt, synthetic construct
  misc_feature 1..19: note = siRNA sense sequence
  source 1..19: mol_type = other RNA
atggtttcatggatgtgtt

SEQ ID NO: 30299 - RNA, 19 nt, synthetic construct
  misc_feature 1..19: note = siRNA antisense sequence
  source 1..19: mol_type = other RNA
aacacatccatgaaaccat

SEQ ID NO: 30300 - RNA, 19 nt, synthetic construct
  misc_feature 1..19: note = siRNA sense sequence
  source 1..19: mol_type = other RNA
actttgtgataatttgtgc

SEQ ID NO: 30301 - RNA, 19 nt, synthetic construct
  misc_feature 1..19: note = siRNA antisense sequence
  source 1..19: mol_type = other RNA
gcacaaattatcacaaagt

SEQ ID NO: 30302 - RNA, 19 nt, synthetic construct
  misc_feature 1..19: note = siRNA sense sequence
  source 1..19: mol_type = other RNA
ctttgtgataatttgtgca

SEQ ID NO: 30303 - RNA, 19 nt, synthetic construct
  misc_feature 1..19: note = siRNA antisense sequence
  source 1..19: mol_type = other RNA
tgcacaaattatcacaaag

SEQ ID NO: 30304 - RNA, 19 nt, synthetic construct
  misc_feature 1..19: note = siRNA sense sequence
  source 1..19: mol_type = other RNA
tttgtgataatttgtgcac

SEQ ID NO: 30305 - RNA, 19 nt, synthetic construct
  misc_feature 1..19: note = siRNA antisense sequence
  source 1..19: mol_type = other RNA
gtgcacaaattatcacaaa

SEQ ID NO: 30306 - RNA, 19 nt, synthetic construct
  misc_feature 1..19: note = siRNA sense sequence
  source 1..19: mol_type = other RNA
gcatgtgtttcctttcttg

SEQ ID NO: 30307 - RNA, 19 nt, synthetic construct
  misc_feature 1..19: note = siRNA antisense sequence
  source 1..19: mol_type = other RNA
caagaaaggaaacacatgc

SEQ ID NO: 30308 - RNA, 19 nt, synthetic construct
  misc_feature 1..19: note = siRNA sense sequence
  source 1..19: mol_type = other RNA
catgtgtttcctttcttga

SEQ ID NO: 30309 - RNA, 19 nt, synthetic construct
  misc_feature 1..19: note = siRNA antisense sequence
  source 1..19: mol_type = other RNA
tcaagaaaggaaacacatg

SEQ ID NO: 30310 - RNA, 19 nt, synthetic construct
  misc_feature 1..19: note = siRNA sense sequence
  source 1..19: mol_type = other RNA
tgtgtttcctttcttgaat

SEQ ID NO: 30311 - RNA, 19 nt, synthetic construct
  misc_feature 1..19: note = siRNA antisense sequence
  source 1..19: mol_type = other RNA
attcaagaaaggaaacaca

SEQ ID NO: 30312 - RNA, 19 nt, synthetic construct
  misc_feature 1..19: note = siRNA sense sequence
  source 1..19: mol_type = other RNA
gtgtttcctttcttgaatg

SEQ ID NO: 30313 - RNA, 19 nt, synthetic construct
  misc_feature 1..19: note = siRNA antisense sequence
  source 1..19: mol_type = other RNA
cattcaagaaaggaaacac

SEQ ID NO: 30314 - RNA, 19 nt, synthetic construct
  misc_feature 1..19: note = siRNA sense sequence
  source 1..19: mol_type = other RNA
cctttcttgaatgtattag

SEQ ID NO: 30315 - RNA, 19 nt, synthetic construct
  misc_feature 1..19: note = siRNA antisense sequence
  source 1..19: mol_type = other RNA
ctaatacattcaagaaagg

SEQ ID NO: 30316 - RNA, 19 nt, synthetic construct
  misc_feature 1..19: note = siRNA sense sequence
  source 1..19: mol_type = other RNA
cttgaatgtattagtttcc

SEQ ID NO: 30317 - RNA, 19 nt, synthetic construct
  misc_feature 1..19: note = siRNA antisense sequence
  source 1..19: mol_type = other RNA
ggaaactaatacattcaag

SEQ ID NO: 30318 - RNA, 19 nt, synthetic construct
  misc_feature 1..19: note = siRNA sense sequence
  source 1..19: mol_type = other RNA
tagagctactgtaccaaat

SEQ ID NO: 30319 - RNA, 19 nt, synthetic construct
  misc_feature 1..19: note = siRNA antisense sequence
  source 1..19: mol_type = other RNA
atttggtacagtagctcta

SEQ ID NO: 30320 - RNA, 19 nt, synthetic construct
  misc_feature 1..19: note = siRNA sense sequence
  source 1..19: mol_type = other RNA
agagctactgtaccaaatt

SEQ ID NO: 30321 - RNA, 19 nt, synthetic construct
  misc_feature 1..19: note = siRNA antisense sequence
  source 1..19: mol_type = other RNA
aatttggtacagtagctct

SEQ ID NO: 30322 - RNA, 19 nt, synthetic construct
  misc_feature 1..19: note = siRNA sense sequence
  source 1..19: mol_type = other RNA
gagctactgtaccaaatta

SEQ ID NO: 30323 - RNA, 19 nt, synthetic construct
  misc_feature 1..19: note = siRNA antisense sequence
  source 1..19: mol_type = other RNA
taatttggtacagtagctc

SEQ ID NO: 30324 - RNA, 19 nt, synthetic construct
  misc_feature 1..19: note = siRNA sense sequence
  source 1..19: mol_type = other RNA
agctactgtaccaaattag

SEQ ID NO: 30325 - RNA, 19 nt, synthetic construct
  misc_feature 1..19: note = siRNA antisense sequence
  source 1..19: mol_type = other RNA
ctaatttggtacagtagct

SEQ ID NO: 30326 - RNA, 19 nt, synthetic construct
  misc_feature 1..19: note = siRNA sense sequence
  source 1..19: mol_type = other RNA
gctactgtaccaaattagt

SEQ ID NO: 30327 - RNA, 19 nt, synthetic construct
  misc_feature 1..19: note = siRNA antisense sequence
  source 1..19: mol_type = other RNA
actaatttggtacagtagc

SEQ ID NO: 30328 - RNA, 19 nt, synthetic construct
  misc_feature 1..19: note = siRNA sense sequence
  source 1..19: mol_type = other RNA
ggcagagccatactccttc

SEQ ID NO: 30329 - RNA, 19 nt, synthetic construct
  misc_feature 1..19: note = siRNA antisense sequence
  source 1..19: mol_type = other RNA
gaaggagtatggctctgcc

SEQ ID NO: 30330 - RNA, 19 nt, synthetic construct
  misc_feature 1..19: note = siRNA sense sequence
  source 1..19: mol_type = other RNA
gcagagccatactccttct

SEQ ID NO: 30331 - RNA, 19 nt, synthetic construct
  misc_feature 1..19: note = siRNA antisense sequence
  source 1..19: mol_type = other RNA
agaaggagtatggctctgc

SEQ ID NO: 30332 - RNA, 19 nt, synthetic construct
  misc_feature 1..19: note = siRNA sense sequence
  source 1..19: mol_type = other RNA
agagccatactccttctga

SEQ ID NO: 30333 - RNA, 19 nt, synthetic construct
  misc_feature 1..19: note = siRNA antisense sequence
  source 1..19: mol_type = other RNA
tcagaaggagtatggctct

SEQ ID NO: 30334 - RNA, 19 nt, synthetic construct
  misc_feature 1..19: note = siRNA sense sequence
  source 1..19: mol_type = other RNA
gagccatactccttctgaa

SEQ ID NO: 30335 - RNA, 19 nt, synthetic construct
  misc_feature 1..19: note = siRNA antisense sequence
  source 1..19: mol_type = other RNA
ttcagaaggagtatggctc

SEQ ID NO: 30336 - RNA, 19 nt, synthetic construct
  misc_feature 1..19: note = siRNA sense sequence
  source 1..19: mol_type = other RNA
ccttctgaagcctctatgg

SEQ ID NO: 30337 - RNA, 19 nt, synthetic construct
  misc_feature 1..19: note = siRNA antisense sequence
  source 1..19: mol_type = other RNA
ccatagaggcttcagaagg

SEQ ID NO: 30338 - RNA, 19 nt, synthetic construct
  misc_feature 1..19: note = siRNA sense sequence
  source 1..19: mol_type = other RNA
cttctgaagcctctatggg

SEQ ID NO: 30339 - RNA, 19 nt, synthetic construct
  misc_feature 1..19: note = siRNA antisense sequence
  source 1..19: mol_type = other RNA
cccatagaggcttcagaag

SEQ ID NO: 30340 - RNA, 19 nt, synthetic construct
  misc_feature 1..19: note = siRNA sense sequence
  source 1..19: mol_type = other RNA
ttctgaagcctctatggga

SEQ ID NO: 30341 - RNA, 19 nt, synthetic construct
  misc_feature 1..19: note = siRNA antisense sequence
  source 1..19: mol_type = other RNA
tcccatagaggcttcagaa

SEQ ID NO: 30342 - RNA, 19 nt, synthetic construct
  misc_feature 1..19: note = siRNA sense sequence
  source 1..19: mol_type = other RNA
aatcattccctgccttttc

SEQ ID NO: 30343 - RNA, 19 nt, synthetic construct
  misc_feature 1..19: note = siRNA antisense sequence
  source 1..19: mol_type = other RNA
gaaaaggcagggaatgatt

SEQ ID NO: 30344 - RNA, 19 nt, synthetic construct
  misc_feature 1..19: note = siRNA sense sequence
  source 1..19: mol_type = other RNA
ccttttccagtttctgatg

SEQ ID NO: 30345 - RNA, 19 nt, synthetic construct
  misc_feature 1..19: note = siRNA antisense sequence
  source 1..19: mol_type = other RNA
catcagaaactggaaaagg

SEQ ID NO: 30346 - RNA, 19 nt, synthetic construct
  misc_feature 1..19: note = siRNA sense sequence
  source 1..19: mol_type = other RNA
cttttccagtttctgatgg

SEQ ID NO: 30347 - RNA, 19 nt, synthetic construct
  misc_feature 1..19: note = siRNA antisense sequence
  source 1..19: mol_type = other RNA
ccatcagaaactggaaaag

SEQ ID NO: 30348 - RNA, 19 nt, synthetic construct
  misc_feature 1..19: note = siRNA sense sequence
  source 1..19: mol_type = other RNA
ttttccagtttctgatggt

SEQ ID NO: 30349 - RNA, 19 nt, synthetic construct
  misc_feature 1..19: note = siRNA antisense sequence
  source 1..19: mol_type = other RNA
accatcagaaactggaaaa

SEQ ID NO: 30350 - RNA, 19 nt, synthetic construct
  misc_feature 1..19: note = siRNA sense sequence
  source 1..19: mol_type = other RNA
tttccagtttctgatggtt

SEQ ID NO: 30351 - RNA, 19 nt, synthetic construct
  misc_feature 1..19: note = siRNA antisense sequence
  source 1..19: mol_type = other RNA
aaccatcagaaactggaaa

SEQ ID NO: 30352 - RNA, 19 nt, synthetic construct
  misc_feature 1..19: note = siRNA sense sequence
  source 1..19: mol_type = other RNA
tccagtttctgatggttcc

SEQ ID NO: 30353 - RNA, 19 nt, synthetic construct
  misc_feature 1..19: note = siRNA antisense sequence
  source 1..19: mol_type = other RNA
ggaaccatcagaaactgga

SEQ ID NO: 30354 - RNA, 19 nt, synthetic construct
  misc_feature 1..19: note = siRNA sense sequence
  source 1..19: mol_type = other RNA
ccagtttctgatggttcct

SEQ ID NO: 30355 - RNA, 19 nt, synthetic construct
  misc_feature 1..19: note = siRNA antisense sequence
  source 1..19: mol_type = other RNA
aggaaccatcagaaactgg

SEQ ID NO: 30356 - RNA, 19 nt, synthetic construct
  misc_feature 1..19: note = siRNA sense sequence
  source 1..19: mol_type = other RNA
ctgatggttcctggcaatc

SEQ ID NO: 30357 - RNA, 19 nt, synthetic construct
  misc_feature 1..19: note = siRNA antisense sequence
  source 1..19: mol_type = other RNA
gattgccaggaaccatcag

SEQ ID NO: 30358 - RNA, 19 nt, synthetic construct
  misc_feature 1..19: note = siRNA sense sequence
  source 1..19: mol_type = other RNA
tgatggttcctggcaatcc

SEQ ID NO: 30359 - RNA, 19 nt, synthetic construct
  misc_feature 1..19: note = siRNA antisense sequence
  source 1..19: mol_type = other RNA
ggattgccaggaaccatca

SEQ ID NO: 30360 - RNA, 19 nt, synthetic construct
  misc_feature 1..19: note = siRNA sense sequence
  source 1..19: mol_type = other RNA
ggttcctggcaatccttag

SEQ ID NO: 30361 - RNA, 19 nt, synthetic construct
  misc_feature 1..19: note = siRNA antisense sequence
  source 1..19: mol_type = other RNA
ctaaggattgccaggaacc

SEQ ID NO: 30362 - RNA, 19 nt, synthetic construct
  misc_feature 1..19: note = siRNA sense sequence
  source 1..19: mol_type = other RNA
gttcctggcaatccttagc

SEQ ID NO: 30363 - RNA, 19 nt, synthetic construct
  misc_feature 1..19: note = siRNA antisense sequence
  source 1..19: mol_type = other RNA
gctaaggattgccaggaac

SEQ ID NO: 30364 - RNA, 19 nt, synthetic construct
  misc_feature 1..19: note = siRNA sense sequence
  source 1..19: mol_type = other RNA
tcctggcaatccttagcat

SEQ ID NO: 30365 - RNA, 19 nt, synthetic construct
  misc_feature 1..19: note = siRNA antisense sequence
  source 1..19: mol_type = other RNA
atgctaaggattgccagga

SEQ ID NO: 30366 - RNA, 19 nt, synthetic construct
  misc_feature 1..19: note = siRNA sense sequence
  source 1..19: mol_type = other RNA
aatccttagcattgcatgg

SEQ ID NO: 30367 - RNA, 19 nt, synthetic construct
  misc_feature 1..19: note = siRNA antisense sequence
  source 1..19: mol_type = other RNA
ccatgcaatgctaaggatt

SEQ ID NO: 30368 - RNA, 19 nt, synthetic construct
  misc_feature 1..19: note = siRNA sense sequence
  source 1..19: mol_type = other RNA
atccttagcattgcatggc

SEQ ID NO: 30369 - RNA, 19 nt, synthetic construct
  misc_feature 1..19: note = siRNA antisense sequence
  source 1..19: mol_type = other RNA
gccatgcaatgctaaggat

SEQ ID NO: 30370 - RNA, 19 nt, synthetic construct
  misc_feature 1..19: note = siRNA sense sequence
  source 1..19: mol_type = other RNA
tccttagcattgcatggct

SEQ ID NO: 30371 - RNA, 19 nt, synthetic construct
  misc_feature 1..19: note = siRNA antisense sequence
  source 1..19: mol_type = other RNA
agccatgcaatgctaagga

SEQ ID NO: 30372 - RNA, 19 nt, synthetic construct
  misc_feature 1..19: note = siRNA sense sequence
  source 1..19: mol_type = other RNA
ccttagcattgcatggctt

SEQ ID NO: 30373 - RNA, 19 nt, synthetic construct
  misc_feature 1..19: note = siRNA antisense sequence
  source 1..19: mol_type = other RNA
aagccatgcaatgctaagg

SEQ ID NO: 30374 - RNA, 19 nt, synthetic construct
  misc_feature 1..19: note = siRNA sense sequence
  source 1..19: mol_type = other RNA
cttagcattgcatggcttc

SEQ ID NO: 30375 - RNA, 19 nt, synthetic construct
  misc_feature 1..19: note = siRNA antisense sequence
  source 1..19: mol_type = other RNA
gaagccatgcaatgctaag

SEQ ID NO: 30376 - RNA, 19 nt, synthetic construct
  misc_feature 1..19: note = siRNA sense sequence
  source 1..19: mol_type = other RNA
ttagcattgcatggcttct

SEQ ID NO: 30377 - RNA, 19 nt, synthetic construct
  misc_feature 1..19: note = siRNA antisense sequence
  source 1..19: mol_type = other RNA
agaagccatgcaatgctaa

SEQ ID NO: 30378 - RNA, 19 nt, synthetic construct
  misc_feature 1..19: note = siRNA sense sequence
  source 1..19: mol_type = other RNA
tagcattgcatggcttctt

SEQ ID NO: 30379 - RNA, 19 nt, synthetic construct
  misc_feature 1..19: note = siRNA antisense sequence
  source 1..19: mol_type = other RNA
aagaagccatgcaatgcta

SEQ ID NO: 30380 - RNA, 19 nt, synthetic construct
  misc_feature 1..19: note = siRNA sense sequence
  source 1..19: mol_type = other RNA
agcattgcatggcttcttg

SEQ ID NO: 30381 - RNA, 19 nt, synthetic construct
  misc_feature 1..19: note = siRNA antisense sequence
  source 1..19: mol_type = other RNA
caagaagccatgcaatgct

SEQ ID NO: 30382 - RNA, 19 nt, synthetic construct
  misc_feature 1..19: note = siRNA sense sequence
  source 1..19: mol_type = other RNA
attgcatggcttcttgaca

SEQ ID NO: 30383 - RNA, 19 nt, synthetic construct
  misc_feature 1..19: note = siRNA antisense sequence
  source 1..19: mol_type = other RNA
tgtcaagaagccatgcaat

SEQ ID NO: 30384 - RNA, 19 nt, synthetic construct
  misc_feature 1..19: note = siRNA sense sequence
  source 1..19: mol_type = other RNA
ttgcatggcttcttgacac

SEQ ID NO: 30385 - RNA, 19 nt, synthetic construct
  misc_feature 1..19: note = siRNA antisense sequence
  source 1..19: mol_type = other RNA
gtgtcaagaagccatgcaa

SEQ ID NO: 30386 - RNA, 19 nt, synthetic construct
  misc_feature 1..19: note = siRNA sense sequence
  source 1..19: mol_type = other RNA
tgcatggcttcttgacact

SEQ ID NO: 30387 - RNA, 19 nt, synthetic construct
  misc_feature 1..19: note = siRNA antisense sequence
  source 1..19: mol_type = other RNA
agtgtcaagaagccatgca

SEQ ID NO: 30388 - RNA, 19 nt, synthetic construct
  misc_feature 1..19: note = siRNA sense sequence
  source 1..19: mol_type = other RNA
gcatggcttcttgacactt

SEQ ID NO: 30389 - RNA, 19 nt, synthetic construct
  misc_feature 1..19: note = siRNA antisense sequence
  source 1..19: mol_type = other RNA
aagtgtcaagaagccatgc

SEQ ID NO: 30390 - RNA, 19 nt, synthetic construct
  misc_feature 1..19: note = siRNA sense sequence
  source 1..19: mol_type = other RNA
catggcttcttgacacttg

SEQ ID NO: 30391 - RNA, 19 nt, synthetic construct
  misc_feature 1..19: note = siRNA antisense sequence
  source 1..19: mol_type = other RNA
caagtgtcaagaagccatg

SEQ ID NO: 30392 - RNA, 19 nt, synthetic construct
  misc_feature 1..19: note = siRNA sense sequence
  source 1..19: mol_type = other RNA
gcttcttgacacttgatac

SEQ ID NO: 30393 - RNA, 19 nt, synthetic construct
  misc_feature 1..19: note = siRNA antisense sequence
  source 1..19: mol_type = other RNA
gtatcaagtgtcaagaagc

SEQ ID NO: 30394 - RNA, 19 nt, synthetic construct
  misc_feature 1..19: note = siRNA sense sequence
  source 1..19: mol_type = other RNA
ttcttgacacttgatacta

SEQ ID NO: 30395 - RNA, 19 nt, synthetic construct
  misc_feature 1..19: note = siRNA antisense sequence
  source 1..19: mol_type = other RNA
tagtatcaagtgtcaagaa

SEQ ID NO: 30396 - RNA, 19 nt, synthetic construct
  misc_feature 1..19: note = siRNA sense sequence
  source 1..19: mol_type = other RNA
tcttgacacttgatactaa

SEQ ID NO: 30397 - RNA, 19 nt, synthetic construct
  misc_feature 1..19: note = siRNA antisense sequence
  source 1..19: mol_type = other RNA
ttagtatcaagtgtcaaga

SEQ ID NO: 30398 - RNA, 19 nt, synthetic construct
  misc_feature 1..19: note = siRNA sense sequence
  source 1..19: mol_type = other RNA
cttgacacttgatactaat

SEQ ID NO: 30399 - RNA, 19 nt, synthetic construct
  misc_feature 1..19: note = siRNA antisense sequence
  source 1..19: mol_type = other RNA
attagtatcaagtgtcaag

SEQ ID NO: 30400 - RNA, 19 nt, synthetic construct
  misc_feature 1..19: note = siRNA sense sequence
  source 1..19: mol_type = other RNA
ttgacacttgatactaatc

SEQ ID NO: 30401 - RNA, 19 nt, synthetic construct
  misc_feature 1..19: note = siRNA antisense sequence
  source 1..19: mol_type = other RNA
gattagtatcaagtgtcaa

SEQ ID NO: 30402 - RNA, 19 nt, synthetic construct
  misc_feature 1..19: note = siRNA sense sequence
  source 1..19: mol_type = other RNA
tgacacttgatactaatct

SEQ ID NO: 30403 - RNA, 19 nt, synthetic construct
  misc_feature 1..19: note = siRNA antisense sequence
  source 1..19: mol_type = other RNA
agattagtatcaagtgtca

SEQ ID NO: 30404 - RNA, 19 nt, synthetic construct
  misc_feature 1..19: note = siRNA sense sequence
  source 1..19: mol_type = other RNA
gacacttgatactaatctc

SEQ ID NO: 30405 - RNA, 19 nt, synthetic construct
  misc_feature 1..19: note = siRNA antisense sequence
  source 1..19: mol_type = other RNA
gagattagtatcaagtgtc

SEQ ID NO: 30406 - RNA, 19 nt, synthetic construct
  misc_feature 1..19: note = siRNA sense sequence
  source 1..19: mol_type = other RNA
acacttgatactaatctct

SEQ ID NO: 30407 - RNA, 19 nt, synthetic construct
  misc_feature 1..19: note = siRNA antisense sequence
  source 1..19: mol_type = other RNA
agagattagtatcaagtgt

SEQ ID NO: 30408 - RNA, 19 nt, synthetic construct
  misc_feature 1..19: note = siRNA sense sequence
  source 1..19: mol_type = other RNA
cacttgatactaatctcta

SEQ ID NO: 30409 - RNA, 19 nt, synthetic construct
  misc_feature 1..19: note = siRNA antisense sequence
  source 1..19: mol_type = other RNA
tagagattagtatcaagtg

SEQ ID NO: 30410 - RNA, 19 nt, synthetic construct
  misc_feature 1..19: note = siRNA sense sequence
  source 1..19: mol_type = other RNA
cttgatactaatctctaac

SEQ ID NO: 30411 - RNA, 19 nt, synthetic construct
  misc_feature 1..19: note = siRNA antisense sequence
  source 1..19: mol_type = other RNA
gttagagattagtatcaag

SEQ ID NO: 30412 - RNA, 19 nt, synthetic construct
  misc_feature 1..19: note = siRNA sense sequence
  source 1..19: mol_type = other RNA
ctaatctctaactttgtct

SEQ ID NO: 30413 - RNA, 19 nt, synthetic construct
  misc_feature 1..19: note = siRNA antisense sequence
  source 1..19: mol_type = other RNA
agacaaagttagagattag

SEQ ID NO: 30414 - RNA, 19 nt, synthetic construct
  misc_feature 1..19: note = siRNA sense sequence
  source 1..19: mol_type = other RNA
tctaactttgtcttcacat

SEQ ID NO: 30415 - RNA, 19 nt, synthetic construct
  misc_feature 1..19: note = siRNA antisense sequence
  source 1..19: mol_type = other RNA
atgtgaagacaaagttaga

SEQ ID NO: 30416 - RNA, 19 nt, synthetic construct
  misc_feature 1..19: note = siRNA sense sequence
  source 1..19: mol_type = other RNA
ctaactttgtcttcacatg

SEQ ID NO: 30417 - RNA, 19 nt, synthetic construct
  misc_feature 1..19: note = siRNA antisense sequence
  source 1..19: mol_type = other RNA
catgtgaagacaaagttag

SEQ ID NO: 30418 - RNA, 19 nt, synthetic construct
  misc_feature 1..19: note = siRNA sense sequence
  source 1..19: mol_type = other RNA
taactttgtcttcacatgg

SEQ ID NO: 30419 - RNA, 19 nt, synthetic construct
  misc_feature 1..19: note = siRNA antisense sequence
  source 1..19: mol_type = other RNA
ccatgtgaagacaaagtta

SEQ ID NO: 30420 - RNA, 19 nt, synthetic construct
  misc_feature 1..19: note = siRNA sense sequence
  source 1..19: mol_type = other RNA
aactttgtcttcacatggt

SEQ ID NO: 30421 - RNA, 19 nt, synthetic construct
  misc_feature 1..19: note = siRNA antisense sequence
  source 1..19: mol_type = other RNA
accatgtgaagacaaagtt

SEQ ID NO: 30422 - RNA, 19 nt, synthetic construct
  misc_feature 1..19: note = siRNA sense sequence
  source 1..19: mol_type = other RNA
tggtcttctttctccctca

SEQ ID NO: 30423 - RNA, 19 nt, synthetic construct
  misc_feature 1..19: note = siRNA antisense sequence
  source 1..19: mol_type = other RNA
tgagggagaaagaagacca

SEQ ID NO: 30424 - RNA, 19 nt, synthetic construct
  misc_feature 1..19: note = siRNA sense sequence
  source 1..19: mol_type = other RNA
gtcttctttctccctcatg

SEQ ID NO: 30425 - RNA, 19 nt, synthetic construct
  misc_feature 1..19: note = siRNA antisense sequence
  source 1..19: mol_type = other RNA
catgagggagaaagaagac

SEQ ID NO: 30426 - RNA, 19 nt, synthetic construct
  misc_feature 1..19: note = siRNA sense sequence
  source 1..19: mol_type = other RNA
tctccctcatgtttctgtt

SEQ ID NO: 30427 - RNA, 19 nt, synthetic construct
  misc_feature 1..19: note = siRNA antisense sequence
  source 1..19: mol_type = other RNA
aacagaaacatgagggaga

SEQ ID NO: 30428 - RNA, 19 nt, synthetic construct
  misc_feature 1..19: note = siRNA sense sequence
  source 1..19: mol_type = other RNA
tatcttaaatactcctctc

SEQ ID NO: 30429 - RNA, 19 nt, synthetic construct
  misc_feature 1..19: note = siRNA antisense sequence
  source 1..19: mol_type = other RNA
gagaggagtatttaagata

SEQ ID NO: 30430 - RNA, 19 nt, synthetic construct
  misc_feature 1..19: note = siRNA sense sequence
  source 1..19: mol_type = other RNA
ttaaatactcctctccttt

SEQ ID NO: 30431 - RNA, 19 nt, synthetic construct
  misc_feature 1..19: note = siRNA antisense sequence
  source 1..19: mol_type = other RNA
aaaggagaggagtatttaa

SEQ ID NO: 30432 - RNA, 19 nt, synthetic construct
  misc_feature 1..19: note = siRNA sense sequence
  source 1..19: mol_type = other RNA
ctcttataagattaccagt

SEQ ID NO: 30433 - RNA, 19 nt, synthetic construct
  misc_feature 1..19: note = siRNA antisense sequence
  source 1..19: mol_type = other RNA
actggtaatcttataagag

SEQ ID NO: 30434 - RNA, 19 nt, synthetic construct
  misc_feature 1..19: note = siRNA sense sequence
  source 1..19: mol_type = other RNA
taagattaccagtcattga

SEQ ID NO: 30435 - RNA, 19 nt, synthetic construct
  misc_feature 1..19: note = siRNA antisense sequence
  source 1..19: mol_type = other RNA
tcaatgactggtaatctta

SEQ ID NO: 30436 - RNA, 19 nt, synthetic construct
  misc_feature 1..19: note = siRNA sense sequence
  source 1..19: mol_type = other RNA
agattaccagtcattgaat

SEQ ID NO: 30437 - RNA, 19 nt, synthetic construct
  misc_feature 1..19: note = siRNA antisense sequence
  source 1..19: mol_type = other RNA
attcaatgactggtaatct

SEQ ID NO: 30438 - RNA, 19 nt, synthetic construct
  misc_feature 1..19: note = siRNA sense sequence
  source 1..19: mol_type = other RNA
gattaccagtcattgaatt

SEQ ID NO: 30439 - RNA, 19 nt, synthetic construct
  misc_feature 1..19: note = siRNA antisense sequence
  source 1..19: mol_type = other RNA
aattcaatgactggtaatc

SEQ ID NO: 30440 - RNA, 19 nt, synthetic construct
  misc_feature 1..19: note = siRNA sense sequence
  source 1..19: mol_type = other RNA
agtcattgaattttggccc

SEQ ID NO: 30441 - RNA, 19 nt, synthetic construct
  misc_feature 1..19: note = siRNA antisense sequence
  source 1..19: mol_type = other RNA
gggccaaaattcaatgact

SEQ ID NO: 30442 - RNA, 19 nt, synthetic construct
  misc_feature 1..19: note = siRNA sense sequence
  source 1..19: mol_type = other RNA
acaggatgatctcatttag

SEQ ID NO: 30443 - RNA, 19 nt, synthetic construct
  misc_feature 1..19: note = siRNA antisense sequence
  source 1..19: mol_type = other RNA
ctaaatgagatcatcctgt

SEQ ID NO: 30444 - RNA, 19 nt, synthetic construct
  misc_feature 1..19: note = siRNA sense sequence
  source 1..19: mol_type = other RNA
aggatgatctcatttagac

SEQ ID NO: 30445 - RNA, 19 nt, synthetic construct
  misc_feature 1..19: note = siRNA antisense sequence
  source 1..19: mol_type = other RNA
gtctaaatgagatcatcct

SEQ ID NO: 30446 - RNA, 19 nt, synthetic construct
  misc_feature 1..19: note = siRNA sense sequence
  source 1..19: mol_type = other RNA
tcacatttacagataccga

SEQ ID NO: 30447 - RNA, 19 nt, synthetic construct
  misc_feature 1..19: note = siRNA antisense sequence
  source 1..19: mol_type = other RNA
tcggtatctgtaaatgtga

SEQ ID NO: 30448 - RNA, 19 nt, synthetic construct
  misc_feature 1..19: note = siRNA sense sequence
  source 1..19: mol_type = other RNA
cacatttacagataccgat

SEQ ID NO: 30449 - RNA, 19 nt, synthetic construct
  misc_feature 1..19: note = siRNA antisense sequence
  source 1..19: mol_type = other RNA
atcggtatctgtaaatgtg

SEQ ID NO: 30450 - RNA, 19 nt, synthetic construct
  misc_feature 1..19: note = siRNA sense sequence
  source 1..19: mol_type = other RNA
acatttacagataccgata

SEQ ID NO: 30451 - RNA, 19 nt, synthetic construct
  misc_feature 1..19: note = siRNA antisense sequence
  source 1..19: mol_type = other RNA
tatcggtatctgtaaatgt

SEQ ID NO: 30452 - RNA, 19 nt, synthetic construct
  misc_feature 1..19: note = siRNA sense sequence
  source 1..19: mol_type = other RNA
catttacagataccgatac

SEQ ID NO: 30453 - RNA, 19 nt, synthetic construct
  misc_feature 1..19: note = siRNA antisense sequence
  source 1..19: mol_type = other RNA
gtatcggtatctgtaaatg

SEQ ID NO: 30454 - RNA, 19 nt, synthetic construct
  misc_feature 1..19: note = siRNA sense sequence
  source 1..19: mol_type = other RNA
caattcagcccactataat

SEQ ID NO: 30455 - RNA, 19 nt, synthetic construct
  misc_feature 1..19: note = siRNA antisense sequence
  source 1..19: mol_type = other RNA
attatagtgggctgaattg

SEQ ID NO: 30456 - RNA, 19 nt, synthetic construct
  misc_feature 1..19: note = siRNA sense sequence
  source 1..19: mol_type = other RNA
aattcagcccactataatg

SEQ ID NO: 30457 - RNA, 19 nt, synthetic construct
  misc_feature 1..19: note = siRNA antisense sequence
  source 1..19: mol_type = other RNA
cattatagtgggctgaatt

SEQ ID NO: 30458 - RNA, 19 nt, synthetic construct
  misc_feature 1..19: note = siRNA sense sequence
  source 1..19: mol_type = other RNA
attcagcccactataatga

SEQ ID NO: 30459 - RNA, 19 nt, synthetic construct
  misc_feature 1..19: note = siRNA antisense sequence
  source 1..19: mol_type = other RNA
tcattatagtgggctgaat

SEQ ID NO: 30460 - RNA, 19 nt, synthetic construct
  misc_feature 1..19: note = siRNA sense sequence
  source 1..19: mol_type = other RNA
catatattaggcttcagtt

SEQ ID NO: 30461 - RNA, 19 nt, synthetic construct
  misc_feature 1..19: note = siRNA antisense sequence
  source 1..19: mol_type = other RNA
aactgaagcctaatatatg

SEQ ID NO: 30462 - RNA, 19 nt, synthetic construct
  misc_feature 1..19: note = siRNA sense sequence
  source 1..19: mol_type = other RNA
caattttactggtcagatg

SEQ ID NO: 30463 - RNA, 19 nt, synthetic construct
  misc_feature 1..19: note = siRNA antisense sequence
  source 1..19: mol_type = other RNA
catctgaccagtaaaattg

SEQ ID NO: 30464 - RNA, 19 nt, synthetic construct
  misc_feature 1..19: note = siRNA sense sequence
  source 1..19: mol_type = other RNA
aattttactggtcagatgt

SEQ ID NO: 30465 - RNA, 19 nt, synthetic construct
  misc_feature 1..19: note = siRNA antisense sequence
  source 1..19: mol_type = other RNA
acatctgaccagtaaaatt

SEQ ID NO: 30466 - RNA, 19 nt, synthetic construct
  misc_feature 1..19: note = siRNA sense sequence
  source 1..19: mol_type = other RNA
attttactggtcagatgtg

SEQ ID NO: 30467 - RNA, 19 nt, synthetic construct
  misc_feature 1..19: note = siRNA antisense sequence
  source 1..19: mol_type = other RNA
cacatctgaccagtaaaat

SEQ ID NO: 30468 - RNA, 19 nt, synthetic construct
  misc_feature 1..19: note = siRNA sense sequence
  source 1..19: mol_type = other RNA
ttttactggtcagatgtgg

SEQ ID NO: 30469 - RNA, 19 nt, synthetic construct
  misc_feature 1..19: note = siRNA antisense sequence
  source 1..19: mol_type = other RNA
ccacatctgaccagtaaaa

SEQ ID NO: 30470 - RNA, 19 nt, synthetic construct
  misc_feature 1..19: note = siRNA sense sequence
  source 1..19: mol_type = other RNA
atgcctataatcccagcac

SEQ ID NO: 30471 - RNA, 19 nt, synthetic construct
  misc_feature 1..19: note = siRNA antisense sequence
  source 1..19: mol_type = other RNA
gtgctgggattataggcat

SEQ ID NO: 30472 - RNA, 19 nt, synthetic construct
  misc_feature 1..19: note = siRNA sense sequence
  source 1..19: mol_type = other RNA
gaggccgaggtgggtagat

SEQ ID NO: 30473 - RNA, 19 nt, synthetic construct
  misc_feature 1..19: note = siRNA antisense sequence
  source 1..19: mol_type = other RNA
atctacccacctcggcctc

SEQ ID NO: 30474 - RNA, 19 nt, synthetic construct
  misc_feature 1..19: note = siRNA sense sequence
  source 1..19: mol_type = other RNA
aggccgaggtgggtagatc

SEQ ID NO: 30475 - RNA, 19 nt, synthetic construct
  misc_feature 1..19: note = siRNA antisense sequence
  source 1..19: mol_type = other RNA
gatctacccacctcggcct

SEQ ID NO: 30476 - RNA, 19 nt, synthetic construct
  misc_feature 1..19: note = siRNA sense sequence
  source 1..19: mol_type = other RNA
aggccaggagttcaagatg

SEQ ID NO: 30477 - RNA, 19 nt, synthetic construct
  misc_feature 1..19: note = siRNA antisense sequence
  source 1..19: mol_type = other RNA
catcttgaactcctggcct

SEQ ID NO: 30478 - RNA, 19 nt, synthetic construct
  misc_feature 1..19: note = siRNA sense sequence
  source 1..19: mol_type = other RNA
ggccaggagttcaagatga

SEQ ID NO: 30479 - RNA, 19 nt, synthetic construct
  misc_feature 1..19: note = siRNA antisense sequence
  source 1..19: mol_type = other RNA
tcatcttgaactcctggcc

SEQ ID NO: 30480 - RNA, 19 nt, synthetic construct
  misc_feature 1..19: note = siRNA sense sequence
  source 1..19: mol_type = other RNA
gccaggagttcaagatgag

SEQ ID NO: 30481 - RNA, 19 nt, synthetic construct
  misc_feature 1..19: note = siRNA antisense sequence
  source 1..19: mol_type = other RNA
ctcatcttgaactcctggc

SEQ ID NO: 30482 - RNA, 19 nt, synthetic construct
  misc_feature 1..19: note = siRNA sense sequence
  source 1..19: mol_type = other RNA
ccaggagttcaagatgagt

SEQ ID NO: 30483 - RNA, 19 nt, synthetic construct
  misc_feature 1..19: note = siRNA antisense sequence
  source 1..19: mol_type = other RNA
actcatcttgaactcctgg

SEQ ID NO: 30484 - RNA, 19 nt, synthetic construct
  misc_feature 1..19: note = siRNA sense sequence
  source 1..19: mol_type = other RNA
caggagttcaagatgagtt

SEQ ID NO: 30485 - RNA, 19 nt, synthetic construct
  misc_feature 1..19: note = siRNA antisense sequence
  source 1..19: mol_type = other RNA
aactcatcttgaactcctg

SEQ ID NO: 30486 - RNA, 19 nt, synthetic construct
  misc_feature 1..19: note = siRNA sense sequence
  source 1..19: mol_type = other RNA
aggagttcaagatgagttt

SEQ ID NO: 30487 - RNA, 19 nt, synthetic construct
  misc_feature 1..19: note = siRNA antisense sequence
  source 1..19: mol_type = other RNA
aaactcatcttgaactcct

SEQ ID NO: 30488 - RNA, 19 nt, synthetic construct
  misc_feature 1..19: note = siRNA sense sequence
  source 1..19: mol_type = other RNA
ggagttcaagatgagtttg

SEQ ID NO: 30489 - RNA, 19 nt, synthetic construct
  misc_feature 1..19: note = siRNA antisense sequence
  source 1..19: mol_type = other RNA
caaactcatcttgaactcc

SEQ ID NO: 30490 - RNA, 19 nt, synthetic construct
  misc_feature 1..19: note = siRNA sense sequence
  source 1..19: mol_type = other RNA
gagttcaagatgagtttgg

SEQ ID NO: 30491 - RNA, 19 nt, synthetic construct
  misc_feature 1..19: note = siRNA antisense sequence
  source 1..19: mol_type = other RNA
ccaaactcatcttgaactc

SEQ ID NO: 30492 - RNA, 19 nt, synthetic construct
  misc_feature 1..19: note = siRNA sense sequence
  source 1..19: mol_type = other RNA
agttcaagatgagtttggt

SEQ ID NO: 30493 - RNA, 19 nt, synthetic construct
  misc_feature 1..19: note = siRNA antisense sequence
  source 1..19: mol_type = other RNA
accaaactcatcttgaact

SEQ ID NO: 30494 - RNA, 19 nt, synthetic construct
  misc_feature 1..19: note = siRNA sense sequence
  source 1..19: mol_type = other RNA
gttcaagatgagtttggtc

SEQ ID NO: 30495 - RNA, 19 nt, synthetic construct
  misc_feature 1..19: note = siRNA antisense sequence
  source 1..19: mol_type = other RNA
gaccaaactcatcttgaac

SEQ ID NO: 30496 - RNA, 19 nt, synthetic construct
  misc_feature 1..19: note = siRNA sense sequence
  source 1..19: mol_type = other RNA
ttcaagatgagtttggtca

SEQ ID NO: 30497 - RNA, 19 nt, synthetic construct
  misc_feature 1..19: note = siRNA antisense sequence
  source 1..19: mol_type = other RNA
tgaccaaactcatcttgaa

SEQ ID NO: 30498 - RNA, 19 nt, synthetic construct
  misc_feature 1..19: note = siRNA sense sequence
  source 1..19: mol_type = other RNA
tcaagatgagtttggtcaa

SEQ ID NO: 30499 - RNA, 19 nt, synthetic construct
  misc_feature 1..19: note = siRNA antisense sequence
  source 1..19: mol_type = other RNA
ttgaccaaactcatcttga

SEQ ID NO: 30500 - RNA, 19 nt, synthetic construct
  misc_feature 1..19: note = siRNA sense sequence
  source 1..19: mol_type = other RNA
caagatgagtttggtcaac

SEQ ID NO: 30501 - RNA, 19 nt, synthetic construct
  misc_feature 1..19: note = siRNA antisense sequence
  source 1..19: mol_type = other RNA
gttgaccaaactcatcttg

SEQ ID NO: 30502 - RNA, 19 nt, synthetic construct
  misc_feature 1..19: note = siRNA sense sequence
  source 1..19: mol_type = other RNA
gtctaggtttctgagtcaa

SEQ ID NO: 30503 - RNA, 19 nt, synthetic construct
  misc_feature 1..19: note = siRNA antisense sequence
  source 1..19: mol_type = other RNA
ttgactcagaaacctagac

SEQ ID NO: 30504 - RNA, 19 nt, synthetic construct
  misc_feature 1..19: note = siRNA sense sequence
  source 1..19: mol_type = other RNA
tctaggtttctgagtcaaa

SEQ ID NO: 30505 - RNA, 19 nt, synthetic construct
  misc_feature 1..19: note = siRNA antisense sequence
  source 1..19: mol_type = other RNA
tttgactcagaaacctaga

SEQ ID NO: 30506 - RNA, 19 nt, synthetic construct
  misc_feature 1..19: note = siRNA sense sequence
  source 1..19: mol_type = other RNA
ctaggtttctgagtcaaaa

SEQ ID NO: 30507 - RNA, 19 nt, synthetic construct
  misc_feature 1..19: note = siRNA antisense sequence
  source 1..19: mol_type = other RNA
ttttgactcagaaacctag

SEQ ID NO: 30508 - RNA, 19 nt, synthetic construct
  misc_feature 1..19: note = siRNA sense sequence
  source 1..19: mol_type = other RNA
taggtttctgagtcaaaat

SEQ ID NO: 30509 - RNA, 19 nt, synthetic construct
  misc_feature 1..19: note = siRNA antisense sequence
  source 1..19: mol_type = other RNA
attttgactcagaaaccta

SEQ ID NO: 30510 - RNA, 19 nt, synthetic construct
  misc_feature 1..19: note = siRNA sense sequence
  source 1..19: mol_type = other RNA
ggtttctgagtcaaaatat

SEQ ID NO: 30511 - RNA, 19 nt, synthetic construct
  misc_feature 1..19: note = siRNA antisense sequence
  source 1..19: mol_type = other RNA
atattttgactcagaaacc

SEQ ID NO: 30512 - RNA, 19 nt, synthetic construct
  misc_feature 1..19: note = siRNA sense sequence
  source 1..19: mol_type = other RNA
gtttctgagtcaaaatatc

SEQ ID NO: 30513 - RNA, 19 nt, synthetic construct
  misc_feature 1..19: note = siRNA antisense sequence
  source 1..19: mol_type = other RNA
gatattttgactcagaaac

SEQ ID NO: 30514 - RNA, 19 nt, synthetic construct
  misc_feature 1..19: note = siRNA sense sequence
  source 1..19: mol_type = other RNA
ttctgagtcaaaatatctg

SEQ ID NO: 30515 - RNA, 19 nt, synthetic construct
  misc_feature 1..19: note = siRNA antisense sequence
  source 1..19: mol_type = other RNA
cagatattttgactcagaa

SEQ ID NO: 30516 - RNA, 19 nt, synthetic construct
  misc_feature 1..19: note = siRNA sense sequence
  source 1..19: mol_type = other RNA
aaaattcacgggatgctca

SEQ ID NO: 30517 - RNA, 19 nt, synthetic construct
  misc_feature 1..19: note = siRNA antisense sequence
  source 1..19: mol_type = other RNA
tgagcatcccgtgaatttt

SEQ ID NO: 30518 - RNA, 19 nt, synthetic construct
  misc_feature 1..19: note = siRNA sense sequence
  source 1..19: mol_type = other RNA
aaattcacgggatgctcac

SEQ ID NO: 30519 - RNA, 19 nt, synthetic construct
  misc_feature 1..19: note = siRNA antisense sequence
  source 1..19: mol_type = other RNA
gtgagcatcccgtgaattt

SEQ ID NO: 30520 - RNA, 19 nt, synthetic construct
  misc_feature 1..19: note = siRNA sense sequence
  source 1..19: mol_type = other RNA
aattcacgggatgctcacc

SEQ ID NO: 30521 - RNA, 19 nt, synthetic construct
  misc_feature 1..19: note = siRNA antisense sequence
  source 1..19: mol_type = other RNA
ggtgagcatcccgtgaatt

SEQ ID NO: 30522 - RNA, 19 nt, synthetic construct
  misc_feature 1..19: note = siRNA sense sequence
  source 1..19: mol_type = other RNA
attcacgggatgctcacca

SEQ ID NO: 30523 - RNA, 19 nt, synthetic construct
  misc_feature 1..19: note = siRNA antisense sequence
  source 1..19: mol_type = other RNA
tggtgagcatcccgtgaat

SEQ ID NO: 30524 - RNA, 19 nt, synthetic construct
  misc_feature 1..19: note = siRNA sense sequence
  source 1..19: mol_type = other RNA
ttcacgggatgctcaccac

SEQ ID NO: 30525 - RNA, 19 nt, synthetic construct
  misc_feature 1..19: note = siRNA antisense sequence
  source 1..19: mol_type = other RNA
gtggtgagcatcccgtgaa

SEQ ID NO: 30526 - RNA, 19 nt, synthetic construct
  misc_feature 1..19: note = siRNA sense sequence
  source 1..19: mol_type = other RNA
cgggatgctcaccaccata

SEQ ID NO: 30527 - RNA, 19 nt, synthetic construct
  misc_feature 1..19: note = siRNA antisense sequence
  source 1..19: mol_type = other RNA
tatggtggtgagcatcccg

SEQ ID NO: 30528 - RNA, 19 nt, synthetic construct
  misc_feature 1..19: note = siRNA sense sequence
  source 1..19: mol_type = other RNA
gggatgctcaccaccataa

SEQ ID NO: 30529 - RNA, 19 nt, synthetic construct
  misc_feature 1..19: note = siRNA antisense sequence
  source 1..19: mol_type = other RNA
ttatggtggtgagcatccc

SEQ ID NO: 30530 - RNA, 19 nt, synthetic construct
  misc_feature 1..19: note = siRNA sense sequence
  source 1..19: mol_type = other RNA
ggatgctcaccaccataaa

SEQ ID NO: 30531 - RNA, 19 nt, synthetic construct
  misc_feature 1..19: note = siRNA antisense sequence
  source 1..19: mol_type = other RNA
tttatggtggtgagcatcc

SEQ ID NO: 30532 - RNA, 19 nt, synthetic construct
  misc_feature 1..19: note = siRNA sense sequence
  source 1..19: mol_type = other RNA
gatgctcaccaccataaaa

SEQ ID NO: 30533 - RNA, 19 nt, synthetic construct
  misc_feature 1..19: note = siRNA antisense sequence
  source 1..19: mol_type = other RNA
ttttatggtggtgagcatc

SEQ ID NO: 30534 - RNA, 19 nt, synthetic construct
  misc_feature 1..19: note = siRNA sense sequence
  source 1..19: mol_type = other RNA
atgctcaccaccataaaag

SEQ ID NO: 30535 - RNA, 19 nt, synthetic construct
  misc_feature 1..19: note = siRNA antisense sequence
  source 1..19: mol_type = other RNA
cttttatggtggtgagcat

SEQ ID NO: 30536 - RNA, 19 nt, synthetic construct
  misc_feature 1..19: note = siRNA sense sequence
  source 1..19: mol_type = other RNA
tgctcaccaccataaaagt

SEQ ID NO: 30537 - RNA, 19 nt, synthetic construct
  misc_feature 1..19: note = siRNA antisense sequence
  source 1..19: mol_type = other RNA
acttttatggtggtgagca

SEQ ID NO: 30538 - RNA, 19 nt, synthetic construct
  misc_feature 1..19: note = siRNA sense sequence
  source 1..19: mol_type = other RNA
gctcaccaccataaaagtt

SEQ ID NO: 30539 - RNA, 19 nt, synthetic construct
  misc_feature 1..19: note = siRNA antisense sequence
  source 1..19: mol_type = other RNA
aacttttatggtggtgagc

SEQ ID NO: 30540 - RNA, 19 nt, synthetic construct
  misc_feature 1..19: note = siRNA sense sequence
  source 1..19: mol_type = other RNA
ctcaccaccataaaagtta

SEQ ID NO: 30541 - RNA, 19 nt, synthetic construct
  misc_feature 1..19: note = siRNA antisense sequence
  source 1..19: mol_type = other RNA
taacttttatggtggtgag

SEQ ID NO: 30542 - RNA, 19 nt, synthetic construct
  misc_feature 1..19: note = siRNA sense sequence
  source 1..19: mol_type = other RNA
tcaccaccataaaagttag

SEQ ID NO: 30543 - RNA, 19 nt, synthetic construct
  misc_feature 1..19: note = siRNA antisense sequence
  source 1..19: mol_type = other RNA
ctaacttttatggtggtga

SEQ ID NO: 30544 - RNA, 19 nt, synthetic construct
  misc_feature 1..19: note = siRNA sense sequence
  source 1..19: mol_type = other RNA
caccaccataaaagttaga

SEQ ID NO: 30545 - RNA, 19 nt, synthetic construct
  misc_feature 1..19: note = siRNA antisense sequence
  source 1..19: mol_type = other RNA
tctaacttttatggtggtg

SEQ ID NO: 30546 - RNA, 19 nt, synthetic construct
  misc_feature 1..19: note = siRNA sense sequence
  source 1..19: mol_type = other RNA
accaccataaaagttagaa

SEQ ID NO: 30547 - RNA, 19 nt, synthetic construct
  misc_feature 1..19: note = siRNA antisense sequence
  source 1..19: mol_type = other RNA
ttctaacttttatggtggt

SEQ ID NO: 30548 - RNA, 19 nt, synthetic construct
  misc_feature 1..19: note = siRNA sense sequence
  source 1..19: mol_type = other RNA
aaagcacagttagatggaa

SEQ ID NO: 30549 - RNA, 19 nt, synthetic construct
  misc_feature 1..19: note = siRNA antisense sequence
  source 1..19: mol_type = other RNA
ttccatctaactgtgcttt

SEQ ID NO: 30550 - RNA, 19 nt, synthetic construct
  misc_feature 1..19: note = siRNA sense sequence
  source 1..19: mol_type = other RNA
aggatatttatctgttgtg

SEQ ID NO: 30551 - RNA, 19 nt, synthetic construct
  misc_feature 1..19: note = siRNA antisense sequence
  source 1..19: mol_type = other RNA
cacaacagataaatatcct

SEQ ID NO: 30552 - RNA, 19 nt, synthetic construct
  misc_feature 1..19: note = siRNA sense sequence
  source 1..19: mol_type = other RNA
ggatatttatctgttgtgg

SEQ ID NO: 30553 - RNA, 19 nt, synthetic construct
  misc_feature 1..19: note = siRNA antisense sequence
  source 1..19: mol_type = other RNA
ccacaacagataaatatcc

SEQ ID NO: 30554 - RNA, 19 nt, synthetic construct
  misc_feature 1..19: note = siRNA sense sequence
  source 1..19: mol_type = other RNA
gatatttatctgttgtggg

SEQ ID NO: 30555 - RNA, 19 nt, synthetic construct
  misc_feature 1..19: note = siRNA antisense sequence
  source 1..19: mol_type = other RNA
cccacaacagataaatatc

SEQ ID NO: 30556 - RNA, 19 nt, synthetic construct
  misc_feature 1..19: note = siRNA sense sequence
  source 1..19: mol_type = other RNA
atatttatctgttgtgggt

SEQ ID NO: 30557 - RNA, 19 nt, synthetic construct
  misc_feature 1..19: note = siRNA antisense sequence
  source 1..19: mol_type = other RNA
acccacaacagataaatat

SEQ ID NO: 30558 - RNA, 19 nt, synthetic construct
  misc_feature 1..19: note = siRNA sense sequence
  source 1..19: mol_type = other RNA
gtgttcacactgttaccca

SEQ ID NO: 30559 - RNA, 19 nt, synthetic construct
  misc_feature 1..19: note = siRNA antisense sequence
  source 1..19: mol_type = other RNA
tgggtaacagtgtgaacac

SEQ ID NO: 30560 - RNA, 19 nt, synthetic construct
  misc_feature 1..19: note = siRNA sense sequence
  source 1..19: mol_type = other RNA
tgttcacactgttacccat

SEQ ID NO: 30561 - RNA, 19 nt, synthetic construct
  misc_feature 1..19: note = siRNA antisense sequence
  source 1..19: mol_type = other RNA
atgggtaacagtgtgaaca

SEQ ID NO: 30562 - RNA, 19 nt, synthetic construct
  misc_feature 1..19: note = siRNA sense sequence
  source 1..19: mol_type = other RNA
gttcacactgttacccatg

SEQ ID NO: 30563 - RNA, 19 nt, synthetic construct
  misc_feature 1..19: note = siRNA antisense sequence
  source 1..19: mol_type = other RNA
catgggtaacagtgtgaac

SEQ ID NO: 30564 - RNA, 19 nt, synthetic construct
  misc_feature 1..19: note = siRNA sense sequence
  source 1..19: mol_type = other RNA
ttcacactgttacccatgg

SEQ ID NO: 30565 - RNA, 19 nt, synthetic construct
  misc_feature 1..19: note = siRNA antisense sequence
  source 1..19: mol_type = other RNA
ccatgggtaacagtgtgaa

SEQ ID NO: 30566 - RNA, 19 nt, synthetic construct
  misc_feature 1..19: note = siRNA sense sequence
  source 1..19: mol_type = other RNA
tcacactgttacccatggc

SEQ ID NO: 30567 - RNA, 19 nt, synthetic construct
  misc_feature 1..19: note = siRNA antisense sequence
  source 1..19: mol_type = other RNA
gccatgggtaacagtgtga

SEQ ID NO: 30568 - RNA, 19 nt, synthetic construct
  misc_feature 1..19: note = siRNA sense sequence
  source 1..19: mol_type = other RNA
cacactgttacccatggca

SEQ ID NO: 30569 - RNA, 19 nt, synthetic construct
  misc_feature 1..19: note = siRNA antisense sequence
  source 1..19: mol_type = other RNA
tgccatgggtaacagtgtg

SEQ ID NO: 30570 - RNA, 19 nt, synthetic construct
  misc_feature 1..19: note = siRNA sense sequence
  source 1..19: mol_type = other RNA
acactgttacccatggcac

SEQ ID NO: 30571 - RNA, 19 nt, synthetic construct
  misc_feature 1..19: note = siRNA antisense sequence
  source 1..19: mol_type = other RNA
gtgccatgggtaacagtgt

SEQ ID NO: 30572 - RNA, 19 nt, synthetic construct
  misc_feature 1..19: note = siRNA sense sequence
  source 1..19: mol_type = other RNA
cactgttacccatggcaca

SEQ ID NO: 30573 - RNA, 19 nt, synthetic construct
  misc_feature 1..19: note = siRNA antisense sequence
  source 1..19: mol_type = other RNA
tgtgccatgggtaacagtg

SEQ ID NO: 30574 - RNA, 19 nt, synthetic construct
  misc_feature 1..19: note = siRNA sense sequence
  source 1..19: mol_type = other RNA
catggcacattcctggttt

SEQ ID NO: 30575 - RNA, 19 nt, synthetic construct
  misc_feature 1..19: note = siRNA antisense sequence
  source 1..19: mol_type = other RNA
aaaccaggaatgtgccatg

SEQ ID NO: 30576 - RNA, 19 nt, synthetic construct
  misc_feature 1..19: note = siRNA sense sequence
  source 1..19: mol_type = other RNA
atggcacattcctggtttt

SEQ ID NO: 30577 - RNA, 19 nt, synthetic construct
  misc_feature 1..19: note = siRNA antisense sequence
  source 1..19: mol_type = other RNA
aaaaccaggaatgtgccat

SEQ ID NO: 30578 - RNA, 19 nt, synthetic construct
  misc_feature 1..19: note = siRNA sense sequence
  source 1..19: mol_type = other RNA
ttggtatttggtcattttg

SEQ ID NO: 30579 - RNA, 19 nt, synthetic construct
  misc_feature 1..19: note = siRNA antisense sequence
  source 1..19: mol_type = other RNA
caaaatgaccaaataccaa

SEQ ID NO: 30580 - RNA, 19 nt, synthetic construct
  misc_feature 1..19: note = siRNA sense sequence
  source 1..19: mol_type = other RNA
tggtatttggtcattttga

SEQ ID NO: 30581 - RNA, 19 nt, synthetic construct
  misc_feature 1..19: note = siRNA antisense sequence
  source 1..19: mol_type = other RNA
tcaaaatgaccaaatacca

SEQ ID NO: 30582 - RNA, 19 nt, synthetic construct
  misc_feature 1..19: note = siRNA sense sequence
  source 1..19: mol_type = other RNA
ggtatttggtcattttgaa

SEQ ID NO: 30583 - RNA, 19 nt, synthetic construct
  misc_feature 1..19: note = siRNA antisense sequence
  source 1..19: mol_type = other RNA
ttcaaaatgaccaaatacc

SEQ ID NO: 30584 - RNA, 19 nt, synthetic construct
  misc_feature 1..19: note = siRNA sense sequence
  source 1..19: mol_type = other RNA
acattgtgatccttacctt

SEQ ID NO: 30585 - RNA, 19 nt, synthetic construct
  misc_feature 1..19: note = siRNA antisense sequence
  source 1..19: mol_type = other RNA
aaggtaaggatcacaatgt

SEQ ID NO: 30586 - RNA, 19 nt, synthetic construct
  misc_feature 1..19: note = siRNA sense sequence
  source 1..19: mol_type = other RNA
cattgtgatccttaccttt

SEQ ID NO: 30587 - RNA, 19 nt, synthetic construct
  misc_feature 1..19: note = siRNA antisense sequence
  source 1..19: mol_type = other RNA
aaaggtaaggatcacaatg

SEQ ID NO: 30588 - RNA, 19 nt, synthetic construct
  misc_feature 1..19: note = siRNA sense sequence
  source 1..19: mol_type = other RNA
attgtgatccttacctttg

SEQ ID NO: 30589 - RNA, 19 nt, synthetic construct
  misc_feature 1..19: note = siRNA antisense sequence
  source 1..19: mol_type = other RNA
caaaggtaaggatcacaat

SEQ ID NO: 30590 - RNA, 19 nt, synthetic construct
  misc_feature 1..19: note = siRNA sense sequence
  source 1..19: mol_type = other RNA
ttgtgatccttacctttgg

SEQ ID NO: 30591 - RNA, 19 nt, synthetic construct
  misc_feature 1..19: note = siRNA antisense sequence
  source 1..19: mol_type = other RNA
ccaaaggtaaggatcacaa

SEQ ID NO: 30592 - RNA, 19 nt, synthetic construct
  misc_feature 1..19: note = siRNA sense sequence
  source 1..19: mol_type = other RNA
tgtgatccttacctttgga

SEQ ID NO: 30593 - RNA, 19 nt, synthetic construct
  misc_feature 1..19: note = siRNA antisense sequence
  source 1..19: mol_type = other RNA
tccaaaggtaaggatcaca

SEQ ID NO: 30594 - RNA, 19 nt, synthetic construct
  misc_feature 1..19: note = siRNA sense sequence
  source 1..19: mol_type = other RNA
gtgatccttacctttggac

SEQ ID NO: 30595 - RNA, 19 nt, synthetic construct
  misc_feature 1..19: note = siRNA antisense sequence
  source 1..19: mol_type = other RNA
gtccaaaggtaaggatcac

SEQ ID NO: 30596 - RNA, 19 nt, synthetic construct
  misc_feature 1..19: note = siRNA sense sequence
  source 1..19: mol_type = other RNA
tgatccttacctttggact

SEQ ID NO: 30597 - RNA, 19 nt, synthetic construct
  misc_feature 1..19: note = siRNA antisense sequence
  source 1..19: mol_type = other RNA
agtccaaaggtaaggatca

SEQ ID NO: 30598 - RNA, 19 nt, synthetic construct
  misc_feature 1..19: note = siRNA sense sequence
  source 1..19: mol_type = other RNA
gatccttacctttggactt

SEQ ID NO: 30599 - RNA, 19 nt, synthetic construct
  misc_feature 1..19: note = siRNA antisense sequence
  source 1..19: mol_type = other RNA
aagtccaaaggtaaggatc

SEQ ID NO: 30600 - RNA, 19 nt, synthetic construct
  misc_feature 1..19: note = siRNA sense sequence
  source 1..19: mol_type = other RNA
tacctttggacttgttaac

SEQ ID NO: 30601 - RNA, 19 nt, synthetic construct
  misc_feature 1..19: note = siRNA antisense sequence
  source 1..19: mol_type = other RNA
gttaacaagtccaaaggta

SEQ ID NO: 30602 - RNA, 19 nt, synthetic construct
  misc_feature 1..19: note = siRNA sense sequence
  source 1..19: mol_type = other RNA
caactggctgaggattcaa

SEQ ID NO: 30603 - RNA, 19 nt, synthetic construct
  misc_feature 1..19: note = siRNA antisense sequence
  source 1..19: mol_type = other RNA
ttgaatcctcagccagttg

SEQ ID NO: 30604 - RNA, 19 nt, synthetic construct
  misc_feature 1..19: note = siRNA sense sequence
  source 1..19: mol_type = other RNA
aactggctgaggattcaag

SEQ ID NO: 30605 - RNA, 19 nt, synthetic construct
  misc_feature 1..19: note = siRNA antisense sequence
  source 1..19: mol_type = other RNA
cttgaatcctcagccagtt

SEQ ID NO: 30606 - RNA, 19 nt, synthetic construct
  misc_feature 1..19: note = siRNA sense sequence
  source 1..19: mol_type = other RNA
actggctgaggattcaagg

SEQ ID NO: 30607 - RNA, 19 nt, synthetic construct
  misc_feature 1..19: note = siRNA antisense sequence
  source 1..19: mol_type = other RNA
ccttgaatcctcagccagt

SEQ ID NO: 30608 - RNA, 19 nt, synthetic construct
  misc_feature 1..19: note = siRNA sense sequence
  source 1..19: mol_type = other RNA
ctggctgaggattcaaggc

SEQ ID NO: 30609 - RNA, 19 nt, synthetic construct
  misc_feature 1..19: note = siRNA antisense sequence
  source 1..19: mol_type = other RNA
gccttgaatcctcagccag

SEQ ID NO: 30610 - RNA, 19 nt, synthetic construct
  misc_feature 1..19: note = siRNA sense sequence
  source 1..19: mol_type = other RNA
tggctgaggattcaaggca

SEQ ID NO: 30611 - RNA, 19 nt, synthetic construct
  misc_feature 1..19: note = siRNA antisense sequence
  source 1..19: mol_type = other RNA
tgccttgaatcctcagcca

SEQ ID NO: 30612 - RNA, 19 nt, synthetic construct
  misc_feature 1..19: note = siRNA sense sequence
  source 1..19: mol_type = other RNA
tgaggattcaaggcataaa

SEQ ID NO: 30613 - RNA, 19 nt, synthetic construct
  misc_feature 1..19: note = siRNA antisense sequence
  source 1..19: mol_type = other RNA
tttatgccttgaatcctca

SEQ ID NO: 30614 - RNA, 19 nt, synthetic construct
  misc_feature 1..19: note = siRNA sense sequence
  source 1..19: mol_type = other RNA
gaggattcaaggcataaaa

SEQ ID NO: 30615 - RNA, 19 nt, synthetic construct
  misc_feature 1..19: note = siRNA antisense sequence
  source 1..19: mol_type = other RNA
ttttatgccttgaatcctc

SEQ ID NO: 30616 - RNA, 19 nt, synthetic construct
  misc_feature 1..19: note = siRNA sense sequence
  source 1..19: mol_type = other RNA
gattcaaggcataaaagga

SEQ ID NO: 30617 - RNA, 19 nt, synthetic construct
  misc_feature 1..19: note = siRNA antisense sequence
  source 1..19: mol_type = other RNA
tccttttatgccttgaatc

SEQ ID NO: 30618 - RNA, 19 nt, synthetic construct
  misc_feature 1..19: note = siRNA sense sequence
  source 1..19: mol_type = other RNA
ttcaaggcataaaaggaat

SEQ ID NO: 30619 - RNA, 19 nt, synthetic construct
  misc_feature 1..19: note = siRNA antisense sequence
  source 1..19: mol_type = other RNA
attccttttatgccttgaa

SEQ ID NO: 30620 - RNA, 19 nt, synthetic construct
  misc_feature 1..19: note = siRNA sense sequence
  source 1..19: mol_type = other RNA
tcaaggcataaaaggaata

SEQ ID NO: 30621 - RNA, 19 nt, synthetic construct
  misc_feature 1..19: note = siRNA antisense sequence
  source 1..19: mol_type = other RNA
tattccttttatgccttga

SEQ ID NO: 30622 - RNA, 19 nt, synthetic construct
  misc_feature 1..19: note = siRNA sense sequence
  source 1..19: mol_type = other RNA
attatgcttactattgagc

SEQ ID NO: 30623 - RNA, 19 nt, synthetic construct
  misc_feature 1..19: note = siRNA antisense sequence
  source 1..19: mol_type = other RNA
gctcaatagtaagcataat

SEQ ID NO: 30624 - RNA, 19 nt, synthetic construct
  misc_feature 1..19: note = siRNA sense sequence
  source 1..19: mol_type = other RNA
tgagcctcagcacctttgt

SEQ ID NO: 30625 - RNA, 19 nt, synthetic construct
  misc_feature 1..19: note = siRNA antisense sequence
  source 1..19: mol_type = other RNA
acaaaggtgctgaggctca

SEQ ID NO: 30626 - RNA, 19 nt, synthetic construct
  misc_feature 1..19: note = siRNA sense sequence
  source 1..19: mol_type = other RNA
gagcctcagcacctttgta

SEQ ID NO: 30627 - RNA, 19 nt, synthetic construct
  misc_feature 1..19: note = siRNA antisense sequence
  source 1..19: mol_type = other RNA
tacaaaggtgctgaggctc

SEQ ID NO: 30628 - RNA, 19 nt, synthetic construct
  misc_feature 1..19: note = siRNA sense sequence
  source 1..19: mol_type = other RNA
ctcagcacctttgtatttt

SEQ ID NO: 30629 - RNA, 19 nt, synthetic construct
  misc_feature 1..19: note = siRNA antisense sequence
  source 1..19: mol_type = other RNA
aaaatacaaaggtgctgag

SEQ ID NO: 30630 - RNA, 19 nt, synthetic construct
  misc_feature 1..19: note = siRNA sense sequence
  source 1..19: mol_type = other RNA
tcagcacctttgtatttta

SEQ ID NO: 30631 - RNA, 19 nt, synthetic construct
  misc_feature 1..19: note = siRNA antisense sequence
  source 1..19: mol_type = other RNA
taaaatacaaaggtgctga

SEQ ID NO: 30632 - RNA, 19 nt, synthetic construct
  misc_feature 1..19: note = siRNA sense sequence
  source 1..19: mol_type = other RNA
cagcacctttgtattttaa

SEQ ID NO: 30633 - RNA, 19 nt, synthetic construct
  misc_feature 1..19: note = siRNA antisense sequence
  source 1..19: mol_type = other RNA
ttaaaatacaaaggtgctg

SEQ ID NO: 30634 - RNA, 19 nt, synthetic construct
  misc_feature 1..19: note = siRNA sense sequence
  source 1..19: mol_type = other RNA
ttaatatgacatgtggctg

SEQ ID NO: 30635 - RNA, 19 nt, synthetic construct
  misc_feature 1..19: note = siRNA antisense sequence
  source 1..19: mol_type = other RNA
cagccacatgtcatattaa

SEQ ID NO: 30636 - RNA, 19 nt, synthetic construct
  misc_feature 1..19: note = siRNA sense sequence
  source 1..19: mol_type = other RNA
taatatgacatgtggctga

SEQ ID NO: 30637 - RNA, 19 nt, synthetic construct
  misc_feature 1..19: note = siRNA antisense sequence
  source 1..19: mol_type = other RNA
tcagccacatgtcatatta

SEQ ID NO: 30638 - RNA, 19 nt, synthetic construct
  misc_feature 1..19: note = siRNA sense sequence
  source 1..19: mol_type = other RNA
atgacatgtggctgatgat

SEQ ID NO: 30639 - RNA, 19 nt, synthetic construct
  misc_feature 1..19: note = siRNA antisense sequence
  source 1..19: mol_type = other RNA
atcatcagccacatgtcat

SEQ ID NO: 30640 - RNA, 19 nt, synthetic construct
  misc_feature 1..19: note = siRNA sense sequence
  source 1..19: mol_type = other RNA
tgacatgtggctgatgatc

SEQ ID NO: 30641 - RNA, 19 nt, synthetic construct
  misc_feature 1..19: note = siRNA antisense sequence
  source 1..19: mol_type = other RNA
gatcatcagccacatgtca

SEQ ID NO: 30642 - RNA, 19 nt, synthetic construct
  misc_feature 1..19: note = siRNA sense sequence
  source 1..19: mol_type = other RNA
gacatgtggctgatgatca

SEQ ID NO: 30643 - RNA, 19 nt, synthetic construct
  misc_feature 1..19: note = siRNA antisense sequence
  source 1..19: mol_type = other RNA
tgatcatcagccacatgtc

SEQ ID NO: 30644 - RNA, 19 nt, synthetic construct
  misc_feature 1..19: note = siRNA sense sequence
  source 1..19: mol_type = other RNA
acatgtggctgatgatcaa

SEQ ID NO: 30645 - RNA, 19 nt, synthetic construct
  misc_feature 1..19: note = siRNA antisense sequence
  source 1..19: mol_type = other RNA
ttgatcatcagccacatgt

SEQ ID NO: 30646 - RNA, 19 nt, synthetic construct
  misc_feature 1..19: note = siRNA sense sequence
  source 1..19: mol_type = other RNA
tggctgatgatcaaccttg

SEQ ID NO: 30647 - RNA, 19 nt, synthetic construct
  misc_feature 1..19: note = siRNA antisense sequence
  source 1..19: mol_type = other RNA
caaggttgatcatcagcca

SEQ ID NO: 30648 - RNA, 19 nt, synthetic construct
  misc_feature 1..19: note = siRNA sense sequence
  source 1..19: mol_type = other RNA
tgatcaaccttgctgggtc

SEQ ID NO: 30649 - RNA, 19 nt, synthetic construct
  misc_feature 1..19: note = siRNA antisense sequence
  source 1..19: mol_type = other RNA
gacccagcaaggttgatca

SEQ ID NO: 30650 - RNA, 19 nt, synthetic construct
  misc_feature 1..19: note = siRNA sense sequence
  source 1..19: mol_type = other RNA
gatcaaccttgctgggtct

SEQ ID NO: 30651 - RNA, 19 nt, synthetic construct
  misc_feature 1..19: note = siRNA antisense sequence
  source 1..19: mol_type = other RNA
agacccagcaaggttgatc

SEQ ID NO: 30652 - RNA, 19 nt, synthetic construct
  misc_feature 1..19: note = siRNA sense sequence
  source 1..19: mol_type = other RNA
atcaaccttgctgggtctc

SEQ ID NO: 30653 - RNA, 19 nt, synthetic construct
  misc_feature 1..19: note = siRNA antisense sequence
  source 1..19: mol_type = other RNA
gagacccagcaaggttgat

SEQ ID NO: 30654 - RNA, 19 nt, synthetic construct
  misc_feature 1..19: note = siRNA sense sequence
  source 1..19: mol_type = other RNA
caaccttgctgggtctcat

SEQ ID NO: 30655 - RNA, 19 nt, synthetic construct
  misc_feature 1..19: note = siRNA antisense sequence
  source 1..19: mol_type = other RNA
atgagacccagcaaggttg

SEQ ID NO: 30656 - RNA, 19 nt, synthetic construct
  misc_feature 1..19: note = siRNA sense sequence
  source 1..19: mol_type = other RNA
aaccttgctgggtctcatt

SEQ ID NO: 30657 - RNA, 19 nt, synthetic construct
  misc_feature 1..19: note = siRNA antisense sequence
  source 1..19: mol_type = other RNA
aatgagacccagcaaggtt

SEQ ID NO: 30658 - RNA, 19 nt, synthetic construct
  misc_feature 1..19: note = siRNA sense sequence
  source 1..19: mol_type = other RNA
accttgctgggtctcattt

SEQ ID NO: 30659 - RNA, 19 nt, synthetic construct
  misc_feature 1..19: note = siRNA antisense sequence
  source 1..19: mol_type = other RNA
aaatgagacccagcaaggt

SEQ ID NO: 30660 - RNA, 19 nt, synthetic construct
  misc_feature 1..19: note = siRNA sense sequence
  source 1..19: mol_type = other RNA
ccttgctgggtctcatttc

SEQ ID NO: 30661 - RNA, 19 nt, synthetic construct
  misc_feature 1..19: note = siRNA antisense sequence
  source 1..19: mol_type = other RNA
gaaatgagacccagcaagg

SEQ ID NO: 30662 - RNA, 19 nt, synthetic construct
  misc_feature 1..19: note = siRNA sense sequence
  source 1..19: mol_type = other RNA
ctgggtctcatttcatata

SEQ ID NO: 30663 - RNA, 19 nt, synthetic construct
  misc_feature 1..19: note = siRNA antisense sequence
  source 1..19: mol_type = other RNA
tatatgaaatgagacccag

SEQ ID NO: 30664 - RNA, 19 nt, synthetic construct
  misc_feature 1..19: note = siRNA sense sequence
  source 1..19: mol_type = other RNA
tgggtctcatttcatatat

SEQ ID NO: 30665 - RNA, 19 nt, synthetic construct
  misc_feature 1..19: note = siRNA antisense sequence
  source 1..19: mol_type = other RNA
atatatgaaatgagaccca

SEQ ID NO: 30666 - RNA, 19 nt, synthetic construct
  misc_feature 1..19: note = siRNA sense sequence
  source 1..19: mol_type = other RNA
gggtctcatttcatatatc

SEQ ID NO: 30667 - RNA, 19 nt, synthetic construct
  misc_feature 1..19: note = siRNA antisense sequence
  source 1..19: mol_type = other RNA
gatatatgaaatgagaccc

SEQ ID NO: 30668 - RNA, 19 nt, synthetic construct
  misc_feature 1..19: note = siRNA sense sequence
  source 1..19: mol_type = other RNA
ggtctcatttcatatatca

SEQ ID NO: 30669 - RNA, 19 nt, synthetic construct
  misc_feature 1..19: note = siRNA antisense sequence
  source 1..19: mol_type = other RNA
tgatatatgaaatgagacc

SEQ ID NO: 30670 - RNA, 19 nt, synthetic construct
  misc_feature 1..19: note = siRNA sense sequence
  source 1..19: mol_type = other RNA
ttcccaagagtgatatttg

SEQ ID NO: 30671 - RNA, 19 nt, synthetic construct
  misc_feature 1..19: note = siRNA antisense sequence
  source 1..19: mol_type = other RNA
caaatatcactcttgggaa

SEQ ID NO: 30672 - RNA, 19 nt, synthetic construct
  misc_feature 1..19: note = siRNA sense sequence
  source 1..19: mol_type = other RNA
ccaagagtgatatttgatt

SEQ ID NO: 30673 - RNA, 19 nt, synthetic construct
  misc_feature 1..19: note = siRNA antisense sequence
  source 1..19: mol_type = other RNA
aatcaaatatcactcttgg

SEQ ID NO: 30674 - RNA, 19 nt, synthetic construct
  misc_feature 1..19: note = siRNA sense sequence
  source 1..19: mol_type = other RNA
taaaagttatttgagtccc

SEQ ID NO: 30675 - RNA, 19 nt, synthetic construct
  misc_feature 1..19: note = siRNA antisense sequence
  source 1..19: mol_type = other RNA
gggactcaaataactttta

SEQ ID NO: 30676 - RNA, 19 nt, synthetic construct
  misc_feature 1..19: note = siRNA sense sequence
  source 1..19: mol_type = other RNA
aaaagttatttgagtccct

SEQ ID NO: 30677 - RNA, 19 nt, synthetic construct
  misc_feature 1..19: note = siRNA antisense sequence
  source 1..19: mol_type = other RNA
agggactcaaataactttt

SEQ ID NO: 30678 - RNA, 19 nt, synthetic construct
  misc_feature 1..19: note = siRNA sense sequence
  source 1..19: mol_type = other RNA
aaagttatttgagtcccta

SEQ ID NO: 30679 - RNA, 19 nt, synthetic construct
  misc_feature 1..19: note = siRNA antisense sequence
  source 1..19: mol_type = other RNA
tagggactcaaataacttt

SEQ ID NO: 30680 - RNA, 19 nt, synthetic construct
  misc_feature 1..19: note = siRNA sense sequence
  source 1..19: mol_type = other RNA
aagttatttgagtccctaa

SEQ ID NO: 30681 - RNA, 19 nt, synthetic construct
  misc_feature 1..19: note = siRNA antisense sequence
  source 1..19: mol_type = other RNA
ttagggactcaaataactt

SEQ ID NO: 30682 - RNA, 19 nt, synthetic construct
  misc_feature 1..19: note = siRNA sense sequence
  source 1..19: mol_type = other RNA
agttatttgagtccctaaa

SEQ ID NO: 30683 - RNA, 19 nt, synthetic construct
  misc_feature 1..19: note = siRNA antisense sequence
  source 1..19: mol_type = other RNA
tttagggactcaaataact

SEQ ID NO: 30684 - RNA, 19 nt, synthetic construct
  misc_feature 1..19: note = siRNA sense sequence
  source 1..19: mol_type = other RNA
aaaagccagtagggtatag

SEQ ID NO: 30685 - RNA, 19 nt, synthetic construct
  misc_feature 1..19: note = siRNA antisense sequence
  source 1..19: mol_type = other RNA
ctataccctactggctttt

SEQ ID NO: 30686 - RNA, 19 nt, synthetic construct
  misc_feature 1..19: note = siRNA sense sequence
  source 1..19: mol_type = other RNA
aaagccagtagggtatagt

SEQ ID NO: 30687 - RNA, 19 nt, synthetic construct
  misc_feature 1..19: note = siRNA antisense sequence
  source 1..19: mol_type = other RNA
actataccctactggcttt

SEQ ID NO: 30688 - RNA, 19 nt, synthetic construct
  misc_feature 1..19: note = siRNA sense sequence
  source 1..19: mol_type = other RNA
agccagtagggtatagtag

SEQ ID NO: 30689 - RNA, 19 nt, synthetic construct
  misc_feature 1..19: note = siRNA antisense sequence
  source 1..19: mol_type = other RNA
ctactataccctactggct

SEQ ID NO: 30690 - RNA, 19 nt, synthetic construct
  misc_feature 1..19: note = siRNA sense sequence
  source 1..19: mol_type = other RNA
gccagtagggtatagtagc

SEQ ID NO: 30691 - RNA, 19 nt, synthetic construct
  misc_feature 1..19: note = siRNA antisense sequence
  source 1..19: mol_type = other RNA
gctactataccctactggc

SEQ ID NO: 30692 - RNA, 19 nt, synthetic construct
  misc_feature 1..19: note = siRNA sense sequence
  source 1..19: mol_type = other RNA
ccagtagggtatagtagct

SEQ ID NO: 30693 - RNA, 19 nt, synthetic construct
  misc_feature 1..19: note = siRNA antisense sequence
  source 1..19: mol_type = other RNA
agctactataccctactgg

SEQ ID NO: 30694 - RNA, 19 nt, synthetic construct
  misc_feature 1..19: note = siRNA sense sequence
  source 1..19: mol_type = other RNA
gcaagcaattttagtatca

SEQ ID NO: 30695 - RNA, 19 nt, synthetic construct
  misc_feature 1..19: note = siRNA antisense sequence
  source 1..19: mol_type = other RNA
tgatactaaaattgcttgc

SEQ ID NO: 30696 - RNA, 19 nt, synthetic construct
  misc_feature 1..19: note = siRNA sense sequence
  source 1..19: mol_type = other RNA
caagcaattttagtatcag

SEQ ID NO: 30697 - RNA, 19 nt, synthetic construct
  misc_feature 1..19: note = siRNA antisense sequence
  source 1..19: mol_type = other RNA
ctgatactaaaattgcttg

SEQ ID NO: 30698 - RNA, 19 nt, synthetic construct
  misc_feature 1..19: note = siRNA sense sequence
  source 1..19: mol_type = other RNA
taaaagcttagaagcctac

SEQ ID NO: 30699 - RNA, 19 nt, synthetic construct
  misc_feature 1..19: note = siRNA antisense sequence
  source 1..19: mol_type = other RNA
gtaggcttctaagctttta

SEQ ID NO: 30700 - RNA, 19 nt, synthetic construct
  misc_feature 1..19: note = siRNA sense sequence
  source 1..19: mol_type = other RNA
aaaagcttagaagcctact

SEQ ID NO: 30701 - RNA, 19 nt, synthetic construct
  misc_feature 1..19: note = siRNA antisense sequence
  source 1..19: mol_type = other RNA
agtaggcttctaagctttt

SEQ ID NO: 30702 - RNA, 19 nt, synthetic construct
  misc_feature 1..19: note = siRNA sense sequence
  source 1..19: mol_type = other RNA
aaagcttagaagcctactc

SEQ ID NO: 30703 - RNA, 19 nt, synthetic construct
  misc_feature 1..19: note = siRNA antisense sequence
  source 1..19: mol_type = other RNA
gagtaggcttctaagcttt

SEQ ID NO: 30704 - RNA, 19 nt, synthetic construct
  misc_feature 1..19: note = siRNA sense sequence
  source 1..19: mol_type = other RNA
aagcttagaagcctactct

SEQ ID NO: 30705 - RNA, 19 nt, synthetic construct
  misc_feature 1..19: note = siRNA antisense sequence
  source 1..19: mol_type = other RNA
agagtaggcttctaagctt

SEQ ID NO: 30706 - RNA, 19 nt, synthetic construct
  misc_feature 1..19: note = siRNA sense sequence
  source 1..19: mol_type = other RNA
agcttagaagcctactctt

SEQ ID NO: 30707 - RNA, 19 nt, synthetic construct
  misc_feature 1..19: note = siRNA antisense sequence
  source 1..19: mol_type = other RNA
aagagtaggcttctaagct

SEQ ID NO: 30708 - RNA, 19 nt, synthetic construct
  misc_feature 1..19: note = siRNA sense sequence
  source 1..19: mol_type = other RNA
gcttagaagcctactcttt

SEQ ID NO: 30709 - RNA, 19 nt, synthetic construct
  misc_feature 1..19: note = siRNA antisense sequence
  source 1..19: mol_type = other RNA
aaagagtaggcttctaagc

SEQ ID NO: 30710 - RNA, 19 nt, synthetic construct
  misc_feature 1..19: note = siRNA sense sequence
  source 1..19: mol_type = other RNA
cttagaagcctactcttta

SEQ ID NO: 30711 - RNA, 19 nt, synthetic construct
  misc_feature 1..19: note = siRNA antisense sequence
  source 1..19: mol_type = other RNA
taaagagtaggcttctaag

SEQ ID NO: 30712 - RNA, 19 nt, synthetic construct
  misc_feature 1..19: note = siRNA sense sequence
  source 1..19: mol_type = other RNA
ttagaagcctactctttag

SEQ ID NO: 30713 - RNA, 19 nt, synthetic construct
  misc_feature 1..19: note = siRNA antisense sequence
  source 1..19: mol_type = other RNA
ctaaagagtaggcttctaa

SEQ ID NO: 30714 - RNA, 19 nt, synthetic construct
  misc_feature 1..19: note = siRNA sense sequence
  source 1..19: mol_type = other RNA
tagaagcctactctttaga

SEQ ID NO: 30715 - RNA, 19 nt, synthetic construct
  misc_feature 1..19: note = siRNA antisense sequence
  source 1..19: mol_type = other RNA
tctaaagagtaggcttcta

SEQ ID NO: 30716 - RNA, 19 nt, synthetic construct
  misc_feature 1..19: note = siRNA sense sequence
  source 1..19: mol_type = other RNA
agaagcctactctttagat

SEQ ID NO: 30717 - RNA, 19 nt, synthetic construct
  misc_feature 1..19: note = siRNA antisense sequence
  source 1..19: mol_type = other RNA
atctaaagagtaggcttct

SEQ ID NO: 30718 - RNA, 19 nt, synthetic construct
  misc_feature 1..19: note = siRNA sense sequence
  source 1..19: mol_type = other RNA
gaagcctactctttagatt

SEQ ID NO: 30719 - RNA, 19 nt, synthetic construct
  misc_feature 1..19: note = siRNA antisense sequence
  source 1..19: mol_type = other RNA
aatctaaagagtaggcttc

SEQ ID NO: 30720 - RNA, 19 nt, synthetic construct
  misc_feature 1..19: note = siRNA sense sequence
  source 1..19: mol_type = other RNA
aagcctactctttagattg

SEQ ID NO: 30721 - RNA, 19 nt, synthetic construct
  misc_feature 1..19: note = siRNA antisense sequence
  source 1..19: mol_type = other RNA
caatctaaagagtaggctt

SEQ ID NO: 30722 - RNA, 19 nt, synthetic construct
  misc_feature 1..19: note = siRNA sense sequence
  source 1..19: mol_type = other RNA
agcctactctttagattgt

SEQ ID NO: 30723 - RNA, 19 nt, synthetic construct
  misc_feature 1..19: note = siRNA antisense sequence
  source 1..19: mol_type = other RNA
acaatctaaagagtaggct

SEQ ID NO: 30724 - RNA, 19 nt, synthetic construct
  misc_feature 1..19: note = siRNA sense sequence
  source 1..19: mol_type = other RNA
gcctactctttagattgta

SEQ ID NO: 30725 - RNA, 19 nt, synthetic construct
  misc_feature 1..19: note = siRNA antisense sequence
  source 1..19: mol_type = other RNA
tacaatctaaagagtaggc

SEQ ID NO: 30726 - RNA, 19 nt, synthetic construct
  misc_feature 1..19: note = siRNA sense sequence
  source 1..19: mol_type = other RNA
tactctttagattgtagtg

SEQ ID NO: 30727 - RNA, 19 nt, synthetic construct
  misc_feature 1..19: note = siRNA antisense sequence
  source 1..19: mol_type = other RNA
cactacaatctaaagagta

SEQ ID NO: 30728 - RNA, 19 nt, synthetic construct
  misc_feature 1..19: note = siRNA sense sequence
  source 1..19: mol_type = other RNA
actctttagattgtagtgc

SEQ ID NO: 30729 - RNA, 19 nt, synthetic construct
  misc_feature 1..19: note = siRNA antisense sequence
  source 1..19: mol_type = other RNA
gcactacaatctaaagagt

SEQ ID NO: 30730 - RNA, 19 nt, synthetic construct
  misc_feature 1..19: note = siRNA sense sequence
  source 1..19: mol_type = other RNA
ctctttagattgtagtgct

SEQ ID NO: 30731 - RNA, 19 nt, synthetic construct
  misc_feature 1..19: note = siRNA antisense sequence
  source 1..19: mol_type = other RNA
agcactacaatctaaagag

SEQ ID NO: 30732 - RNA, 19 nt, synthetic construct
  misc_feature 1..19: note = siRNA sense sequence
  source 1..19: mol_type = other RNA
tctttagattgtagtgcta

SEQ ID NO: 30733 - RNA, 19 nt, synthetic construct
  misc_feature 1..19: note = siRNA antisense sequence
  source 1..19: mol_type = other RNA
tagcactacaatctaaaga

SEQ ID NO: 30734 - RNA, 19 nt, synthetic construct
  misc_feature 1..19: note = siRNA sense sequence
  source 1..19: mol_type = other RNA
ctttagattgtagtgctat

SEQ ID NO: 30735 - RNA, 19 nt, synthetic construct
  misc_feature 1..19: note = siRNA antisense sequence
  source 1..19: mol_type = other RNA
atagcactacaatctaaag

SEQ ID NO: 30736 - RNA, 19 nt, synthetic construct
  misc_feature 1..19: note = siRNA sense sequence
  source 1..19: mol_type = other RNA
gattgtagtgctattttgg

SEQ ID NO: 30737 - RNA, 19 nt, synthetic construct
  misc_feature 1..19: note = siRNA antisense sequence
  source 1..19: mol_type = other RNA
ccaaaatagcactacaatc

SEQ ID NO: 30738 - RNA, 19 nt, synthetic construct
  misc_feature 1..19: note = siRNA sense sequence
  source 1..19: mol_type = other RNA
attgtagtgctattttgga

SEQ ID NO: 30739 - RNA, 19 nt, synthetic construct
  misc_feature 1..19: note = siRNA antisense sequence
  source 1..19: mol_type = other RNA
tccaaaatagcactacaat

SEQ ID NO: 30740 - RNA, 19 nt, synthetic construct
  misc_feature 1..19: note = siRNA sense sequence
  source 1..19: mol_type = other RNA
ttgtagtgctattttggag

SEQ ID NO: 30741 - RNA, 19 nt, synthetic construct
  misc_feature 1..19: note = siRNA antisense sequence
  source 1..19: mol_type = other RNA
ctccaaaatagcactacaa

SEQ ID NO: 30742 - RNA, 19 nt, synthetic construct
  misc_feature 1..19: note = siRNA sense sequence
  source 1..19: mol_type = other RNA
tgtagtgctattttggagg

SEQ ID NO: 30743 - RNA, 19 nt, synthetic construct
  misc_feature 1..19: note = siRNA antisense sequence
  source 1..19: mol_type = other RNA
cctccaaaatagcactaca

SEQ ID NO: 30744 - RNA, 19 nt, synthetic construct
  misc_feature 1..19: note = siRNA sense sequence
  source 1..19: mol_type = other RNA
gtagtgctattttggaggc

SEQ ID NO: 30745 - RNA, 19 nt, synthetic construct
  misc_feature 1..19: note = siRNA antisense sequence
  source 1..19: mol_type = other RNA
gcctccaaaatagcactac

SEQ ID NO: 30746 - RNA, 19 nt, synthetic construct
  misc_feature 1..19: note = siRNA sense sequence
  source 1..19: mol_type = other RNA
tagtgctattttggaggca

SEQ ID NO: 30747 - RNA, 19 nt, synthetic construct
  misc_feature 1..19: note = siRNA antisense sequence
  source 1..19: mol_type = other RNA
tgcctccaaaatagcacta

SEQ ID NO: 30748 - RNA, 19 nt, synthetic construct
  misc_feature 1..19: note = siRNA sense sequence
  source 1..19: mol_type = other RNA
attttggaggcatatcttt

SEQ ID NO: 30749 - RNA, 19 nt, synthetic construct
  misc_feature 1..19: note = siRNA antisense sequence
  source 1..19: mol_type = other RNA
aaagatatgcctccaaaat

SEQ ID NO: 30750 - RNA, 19 nt, synthetic construct
  misc_feature 1..19: note = siRNA sense sequence
  source 1..19: mol_type = other RNA
ttttggaggcatatctttt

SEQ ID NO: 30751 - RNA, 19 nt, synthetic construct
  misc_feature 1..19: note = siRNA antisense sequence
  source 1..19: mol_type = other RNA
aaaagatatgcctccaaaa

SEQ ID NO: 30752 - RNA, 19 nt, synthetic construct
  misc_feature 1..19: note = siRNA sense sequence
  source 1..19: mol_type = other RNA
ttttggatagtattccctg

SEQ ID NO: 30753 - RNA, 19 nt, synthetic construct
  misc_feature 1..19: note = siRNA antisense sequence
  source 1..19: mol_type = other RNA
cagggaatactatccaaaa

SEQ ID NO: 30754 - RNA, 19 nt, synthetic construct
  misc_feature 1..19: note = siRNA sense sequence
  source 1..19: mol_type = other RNA
tttggatagtattccctgt

SEQ ID NO: 30755 - RNA, 19 nt, synthetic construct
  misc_feature 1..19: note = siRNA antisense sequence
  source 1..19: mol_type = other RNA
acagggaatactatccaaa

SEQ ID NO: 30756 - RNA, 19 nt, synthetic construct
  misc_feature 1..19: note = siRNA sense sequence
  source 1..19: mol_type = other RNA
ttggatagtattccctgtt

SEQ ID NO: 30757 - RNA, 19 nt, synthetic construct
  misc_feature 1..19: note = siRNA antisense sequence
  source 1..19: mol_type = other RNA
aacagggaatactatccaa

SEQ ID NO: 30758 - RNA, 19 nt, synthetic construct
  misc_feature 1..19: note = siRNA sense sequence
  source 1..19: mol_type = other RNA
tggatagtattccctgtta

SEQ ID NO: 30759 - RNA, 19 nt, synthetic construct
  misc_feature 1..19: note = siRNA antisense sequence
  source 1..19: mol_type = other RNA
taacagggaatactatcca

SEQ ID NO: 30760 - RNA, 19 nt, synthetic construct
  misc_feature 1..19: note = siRNA sense sequence
  source 1..19: mol_type = other RNA
ggatagtattccctgttaa

SEQ ID NO: 30761 - RNA, 19 nt, synthetic construct
  misc_feature 1..19: note = siRNA antisense sequence
  source 1..19: mol_type = other RNA
ttaacagggaatactatcc

SEQ ID NO: 30762 - RNA, 19 nt, synthetic construct
  misc_feature 1..19: note = siRNA sense sequence
  source 1..19: mol_type = other RNA
gatagtattccctgttaag

SEQ ID NO: 30763 - RNA, 19 nt, synthetic construct
  misc_feature 1..19: note = siRNA antisense sequence
  source 1..19: mol_type = other RNA
cttaacagggaatactatc

SEQ ID NO: 30764 - RNA, 19 nt, synthetic construct
  misc_feature 1..19: note = siRNA sense sequence
  source 1..19: mol_type = other RNA
gatgatgaggctttaattc

SEQ ID NO: 30765 - RNA, 19 nt, synthetic construct
  misc_feature 1..19: note = siRNA antisense sequence
  source 1..19: mol_type = other RNA
gaattaaagcctcatcatc

SEQ ID NO: 30766 - RNA, 19 nt, synthetic construct
  misc_feature 1..19: note = siRNA sense sequence
  source 1..19: mol_type = other RNA
atgatgaggctttaattca

SEQ ID NO: 30767 - RNA, 19 nt, synthetic construct
  misc_feature 1..19: note = siRNA antisense sequence
  source 1..19: mol_type = other RNA
tgaattaaagcctcatcat

SEQ ID NO: 30768 - RNA, 19 nt, synthetic construct
  misc_feature 1..19: note = siRNA sense sequence
  source 1..19: mol_type = other RNA
tgatgaggctttaattcag

SEQ ID NO: 30769 - RNA, 19 nt, synthetic construct
  misc_feature 1..19: note = siRNA antisense sequence
  source 1..19: mol_type = other RNA
ctgaattaaagcctcatca

SEQ ID NO: 30770 - RNA, 19 nt, synthetic construct
  misc_feature 1..19: note = siRNA sense sequence
  source 1..19: mol_type = other RNA
gatgaggctttaattcagt

SEQ ID NO: 30771 - RNA, 19 nt, synthetic construct
  misc_feature 1..19: note = siRNA antisense sequence
  source 1..19: mol_type = other RNA
actgaattaaagcctcatc

SEQ ID NO: 30772 - RNA, 19 nt, synthetic construct
  misc_feature 1..19: note = siRNA sense sequence
  source 1..19: mol_type = other RNA
atgaggctttaattcagta

SEQ ID NO: 30773 - RNA, 19 nt, synthetic construct
  misc_feature 1..19: note = siRNA antisense sequence
  source 1..19: mol_type = other RNA
tactgaattaaagcctcat

SEQ ID NO: 30774 - RNA, 19 nt, synthetic construct
  misc_feature 1..19: note = siRNA sense sequence
  source 1..19: mol_type = other RNA
tgaggctttaattcagtac

SEQ ID NO: 30775 - RNA, 19 nt, synthetic construct
  misc_feature 1..19: note = siRNA antisense sequence
  source 1..19: mol_type = other RNA
gtactgaattaaagcctca

SEQ ID NO: 30776 - RNA, 19 nt, synthetic construct
  misc_feature 1..19: note = siRNA sense sequence
  source 1..19: mol_type = other RNA
gaggctttaattcagtaca

SEQ ID NO: 30777 - RNA, 19 nt, synthetic construct
  misc_feature 1..19: note = siRNA antisense sequence
  source 1..19: mol_type = other RNA
tgtactgaattaaagcctc

SEQ ID NO: 30778 - RNA, 19 nt, synthetic construct
  misc_feature 1..19: note = siRNA sense sequence
  source 1..19: mol_type = other RNA
aggctttaattcagtacat

SEQ ID NO: 30779 - RNA, 19 nt, synthetic construct
  misc_feature 1..19: note = siRNA antisense sequence
  source 1..19: mol_type = other RNA
atgtactgaattaaagcct

SEQ ID NO: 30780 - RNA, 19 nt, synthetic construct
  misc_feature 1..19: note = siRNA sense sequence
  source 1..19: mol_type = other RNA
ggctttaattcagtacatt

SEQ ID NO: 30781 - RNA, 19 nt, synthetic construct
  misc_feature 1..19: note = siRNA antisense sequence
  source 1..19: mol_type = other RNA
aatgtactgaattaaagcc

SEQ ID NO: 30782 - RNA, 19 nt, synthetic construct
  misc_feature 1..19: note = siRNA sense sequence
  source 1..19: mol_type = other RNA
gctttaattcagtacattc

SEQ ID NO: 30783 - RNA, 19 nt, synthetic construct
  misc_feature 1..19: note = siRNA antisense sequence
  source 1..19: mol_type = other RNA
gaatgtactgaattaaagc

SEQ ID NO: 30784 - RNA, 19 nt, synthetic construct
  misc_feature 1..19: note = siRNA sense sequence
  source 1..19: mol_type = other RNA
cagtacattctcaaattgt

SEQ ID NO: 30785 - RNA, 19 nt, synthetic construct
  misc_feature 1..19: note = siRNA antisense sequence
  source 1..19: mol_type = other RNA
acaatttgagaatgtactg

SEQ ID NO: 30786 - RNA, 19 nt, synthetic construct
  misc_feature 1..19: note = siRNA sense sequence
  source 1..19: mol_type = other RNA
gtacattctcaaattgttc

SEQ ID NO: 30787 - RNA, 19 nt, synthetic construct
  misc_feature 1..19: note = siRNA antisense sequence
  source 1..19: mol_type = other RNA
gaacaatttgagaatgtac

SEQ ID NO: 30788 - RNA, 19 nt, synthetic construct
  misc_feature 1..19: note = siRNA sense sequence
  source 1..19: mol_type = other RNA
tacattctcaaattgttcc

SEQ ID NO: 30789 - RNA, 19 nt, synthetic construct
  misc_feature 1..19: note = siRNA antisense sequence
  source 1..19: mol_type = other RNA
ggaacaatttgagaatgta

SEQ ID NO: 30790 - RNA, 19 nt, synthetic construct
  misc_feature 1..19: note = siRNA sense sequence
  source 1..19: mol_type = other RNA
ttctcaaattgttcccact

SEQ ID NO: 30791 - RNA, 19 nt, synthetic construct
  misc_feature 1..19: note = siRNA antisense sequence
  source 1..19: mol_type = other RNA
agtgggaacaatttgagaa

SEQ ID NO: 30792 - RNA, 19 nt, synthetic construct
  misc_feature 1..19: note = siRNA sense sequence
  source 1..19: mol_type = other RNA
tctcaaattgttcccacta

SEQ ID NO: 30793 - RNA, 19 nt, synthetic construct
  misc_feature 1..19: note = siRNA antisense sequence
  source 1..19: mol_type = other RNA
tagtgggaacaatttgaga

SEQ ID NO: 30794 - RNA, 19 nt, synthetic construct
  misc_feature 1..19: note = siRNA sense sequence
  source 1..19: mol_type = other RNA
ctttggaagttttcatagg

SEQ ID NO: 30795 - RNA, 19 nt, synthetic construct
  misc_feature 1..19: note = siRNA antisense sequence
  source 1..19: mol_type = other RNA
cctatgaaaacttccaaag

SEQ ID NO: 30796 - RNA, 19 nt, synthetic construct
  misc_feature 1..19: note = siRNA sense sequence
  source 1..19: mol_type = other RNA
tttggaagttttcataggt

SEQ ID NO: 30797 - RNA, 19 nt, synthetic construct
  misc_feature 1..19: note = siRNA antisense sequence
  source 1..19: mol_type = other RNA
acctatgaaaacttccaaa

SEQ ID NO: 30798 - RNA, 19 nt, synthetic construct
  misc_feature 1..19: note = siRNA sense sequence
  source 1..19: mol_type = other RNA
ttggaagttttcataggta

SEQ ID NO: 30799 - RNA, 19 nt, synthetic construct
  misc_feature 1..19: note = siRNA antisense sequence
  source 1..19: mol_type = other RNA
tacctatgaaaacttccaa

SEQ ID NO: 30800 - RNA, 19 nt, synthetic construct
  misc_feature 1..19: note = siRNA sense sequence
  source 1..19: mol_type = other RNA
tggaagttttcataggtag

SEQ ID NO: 30801 - RNA, 19 nt, synthetic construct
  misc_feature 1..19: note = siRNA antisense sequence
  source 1..19: mol_type = other RNA
ctacctatgaaaacttcca

SEQ ID NO: 30802 - RNA, 19 nt, synthetic construct
  misc_feature 1..19: note = siRNA sense sequence
  source 1..19: mol_type = other RNA
ggaagttttcataggtagg

SEQ ID NO: 30803 - RNA, 19 nt, synthetic construct
  misc_feature 1..19: note = siRNA antisense sequence
  source 1..19: mol_type = other RNA
cctacctatgaaaacttcc

SEQ ID NO: 30804 - RNA, 19 nt, synthetic construct
  misc_feature 1..19: note = siRNA sense sequence
  source 1..19: mol_type = other RNA
ttcataggtaggactgtaa

SEQ ID NO: 30805 - RNA, 19 nt, synthetic construct
  misc_feature 1..19: note = siRNA antisense sequence
  source 1..19: mol_type = other RNA
ttacagtcctacctatgaa

SEQ ID NO: 30806 - RNA, 19 nt, synthetic construct
  misc_feature 1..19: note = siRNA sense sequence
  source 1..19: mol_type = other RNA
tcataggtaggactgtaag

SEQ ID NO: 30807 - RNA, 19 nt, synthetic construct
  misc_feature 1..19: note = siRNA antisense sequence
  source 1..19: mol_type = other RNA
cttacagtcctacctatga

SEQ ID NO: 30808 - RNA, 19 nt, synthetic construct
  misc_feature 1..19: note = siRNA sense sequence
  source 1..19: mol_type = other RNA
atcctaatcattttaccag

SEQ ID NO: 30809 - RNA, 19 nt, synthetic construct
  misc_feature 1..19: note = siRNA antisense sequence
  source 1..19: mol_type = other RNA
ctggtaaaatgattaggat

SEQ ID NO: 30810 - RNA, 19 nt, synthetic construct
  misc_feature 1..19: note = siRNA sense sequence
  source 1..19: mol_type = other RNA
tcctaatcattttaccaga

SEQ ID NO: 30811 - RNA, 19 nt, synthetic construct
  misc_feature 1..19: note = siRNA antisense sequence
  source 1..19: mol_type = other RNA
tctggtaaaatgattagga

SEQ ID NO: 30812 - RNA, 19 nt, synthetic construct
  misc_feature 1..19: note = siRNA sense sequence
  source 1..19: mol_type = other RNA
ttttctggctttatttgac

SEQ ID NO: 30813 - RNA, 19 nt, synthetic construct
  misc_feature 1..19: note = siRNA antisense sequence
  source 1..19: mol_type = other RNA
gtcaaataaagccagaaaa

SEQ ID NO: 30814 - RNA, 19 nt, synthetic construct
  misc_feature 1..19: note = siRNA sense sequence
  source 1..19: mol_type = other RNA
tttctggctttatttgaca

SEQ ID NO: 30815 - RNA, 19 nt, synthetic construct
  misc_feature 1..19: note = siRNA antisense sequence
  source 1..19: mol_type = other RNA
tgtcaaataaagccagaaa

SEQ ID NO: 30816 - RNA, 19 nt, synthetic construct
  misc_feature 1..19: note = siRNA sense sequence
  source 1..19: mol_type = other RNA
ttctggctttatttgacag

SEQ ID NO: 30817 - RNA, 19 nt, synthetic construct
  misc_feature 1..19: note = siRNA antisense sequence
  source 1..19: mol_type = other RNA
ctgtcaaataaagccagaa

SEQ ID NO: 30818 - RNA, 19 nt, synthetic construct
  misc_feature 1..19: note = siRNA sense sequence
  source 1..19: mol_type = other RNA
tctggctttatttgacagg

SEQ ID NO: 30819 - RNA, 19 nt, synthetic construct
  misc_feature 1..19: note = siRNA antisense sequence
  source 1..19: mol_type = other RNA
cctgtcaaataaagccaga

SEQ ID NO: 30820 - RNA, 19 nt, synthetic construct
  misc_feature 1..19: note = siRNA sense sequence
  source 1..19: mol_type = other RNA
ctggctttatttgacaggt

SEQ ID NO: 30821 - RNA, 19 nt, synthetic construct
  misc_feature 1..19: note = siRNA antisense sequence
  source 1..19: mol_type = other RNA
acctgtcaaataaagccag

SEQ ID NO: 30822 - RNA, 19 nt, synthetic construct
  misc_feature 1..19: note = siRNA sense sequence
  source 1..19: mol_type = other RNA
agttgattgtagttcatcc

SEQ ID NO: 30823 - RNA, 19 nt, synthetic construct
  misc_feature 1..19: note = siRNA antisense sequence
  source 1..19: mol_type = other RNA
ggatgaactacaatcaact

SEQ ID NO: 30824 - RNA, 19 nt, synthetic construct
  misc_feature 1..19: note = siRNA sense sequence
  source 1..19: mol_type = other RNA
gttgattgtagttcatcca

SEQ ID NO: 30825 - RNA, 19 nt, synthetic construct
  misc_feature 1..19: note = siRNA antisense sequence
  source 1..19: mol_type = other RNA
tggatgaactacaatcaac

SEQ ID NO: 30826 - RNA, 19 nt, synthetic construct
  misc_feature 1..19: note = siRNA sense sequence
  source 1..19: mol_type = other RNA
ttgattgtagttcatccag

SEQ ID NO: 30827 - RNA, 19 nt, synthetic construct
  misc_feature 1..19: note = siRNA antisense sequence
  source 1..19: mol_type = other RNA
ctggatgaactacaatcaa

SEQ ID NO: 30828 - RNA, 19 nt, synthetic construct
  misc_feature 1..19: note = siRNA sense sequence
  source 1..19: mol_type = other RNA
tgattgtagttcatccaga

SEQ ID NO: 30829 - RNA, 19 nt, synthetic construct
  misc_feature 1..19: note = siRNA antisense sequence
  source 1..19: mol_type = other RNA
tctggatgaactacaatca

SEQ ID NO: 30830 - RNA, 19 nt, synthetic construct
  misc_feature 1..19: note = siRNA sense sequence
  source 1..19: mol_type = other RNA
gattgtagttcatccagaa

SEQ ID NO: 30831 - RNA, 19 nt, synthetic construct
  misc_feature 1..19: note = siRNA antisense sequence
  source 1..19: mol_type = other RNA
ttctggatgaactacaatc

SEQ ID NO: 30832 - RNA, 19 nt, synthetic construct
  misc_feature 1..19: note = siRNA sense sequence
  source 1..19: mol_type = other RNA
aaagttactccatgttggt

SEQ ID NO: 30833 - RNA, 19 nt, synthetic construct
  misc_feature 1..19: note = siRNA antisense sequence
  source 1..19: mol_type = other RNA
accaacatggagtaacttt

SEQ ID NO: 30834 - RNA, 19 nt, synthetic construct
  misc_feature 1..19: note = siRNA sense sequence
  source 1..19: mol_type = other RNA
aagttactccatgttggta

SEQ ID NO: 30835 - RNA, 19 nt, synthetic construct
  misc_feature 1..19: note = siRNA antisense sequence
  source 1..19: mol_type = other RNA
taccaacatggagtaactt

SEQ ID NO: 30836 - RNA, 19 nt, synthetic construct
  misc_feature 1..19: note = siRNA sense sequence
  source 1..19: mol_type = other RNA
tactccatgttggtaaaag

SEQ ID NO: 30837 - RNA, 19 nt, synthetic construct
  misc_feature 1..19: note = siRNA antisense sequence
  source 1..19: mol_type = other RNA
cttttaccaacatggagta

SEQ ID NO: 30838 - RNA, 19 nt, synthetic construct
  misc_feature 1..19: note = siRNA sense sequence
  source 1..19: mol_type = other RNA
actccatgttggtaaaagg

SEQ ID NO: 30839 - RNA, 19 nt, synthetic construct
  misc_feature 1..19: note = siRNA antisense sequence
  source 1..19: mol_type = other RNA
ccttttaccaacatggagt

SEQ ID NO: 30840 - RNA, 19 nt, synthetic construct
  misc_feature 1..19: note = siRNA sense sequence
  source 1..19: mol_type = other RNA
ctccatgttggtaaaaggt

SEQ ID NO: 30841 - RNA, 19 nt, synthetic construct
  misc_feature 1..19: note = siRNA antisense sequence
  source 1..19: mol_type = other RNA
accttttaccaacatggag

SEQ ID NO: 30842 - RNA, 19 nt, synthetic construct
  misc_feature 1..19: note = siRNA sense sequence
  source 1..19: mol_type = other RNA
tccatgttggtaaaaggtt

SEQ ID NO: 30843 - RNA, 19 nt, synthetic construct
  misc_feature 1..19: note = siRNA antisense sequence
  source 1..19: mol_type = other RNA
aaccttttaccaacatgga

SEQ ID NO: 30844 - RNA, 19 nt, synthetic construct
  misc_feature 1..19: note = siRNA sense sequence
  source 1..19: mol_type = other RNA
ccatgttggtaaaaggtta

SEQ ID NO: 30845 - RNA, 19 nt, synthetic construct
  misc_feature 1..19: note = siRNA antisense sequence
  source 1..19: mol_type = other RNA
taaccttttaccaacatgg

SEQ ID NO: 30846 - RNA, 19 nt, synthetic construct
  misc_feature 1..19: note = siRNA sense sequence
  source 1..19: mol_type = other RNA
catgttggtaaaaggttaa

SEQ ID NO: 30847 - RNA, 19 nt, synthetic construct
  misc_feature 1..19: note = siRNA antisense sequence
  source 1..19: mol_type = other RNA
ttaaccttttaccaacatg

SEQ ID NO: 30848 - RNA, 19 nt, synthetic construct
  misc_feature 1..19: note = siRNA sense sequence
  source 1..19: mol_type = other RNA
tttaaattagtcaaaggcc

SEQ ID NO: 30849 - RNA, 19 nt, synthetic construct
  misc_feature 1..19: note = siRNA antisense sequence
  source 1..19: mol_type = other RNA
ggcctttgactaatttaaa

SEQ ID NO: 30850 - RNA, 19 nt, synthetic construct
  misc_feature 1..19: note = siRNA sense sequence
  source 1..19: mol_type = other RNA
ttaaattagtcaaaggcca

SEQ ID NO: 30851 - RNA, 19 nt, synthetic construct
  misc_feature 1..19: note = siRNA antisense sequence
  source 1..19: mol_type = other RNA
tggcctttgactaatttaa

SEQ ID NO: 30852 - RNA, 19 nt, synthetic construct
  misc_feature 1..19: note = siRNA sense sequence
  source 1..19: mol_type = other RNA
taaattagtcaaaggccaa

SEQ ID NO: 30853 - RNA, 19 nt, synthetic construct
  misc_feature 1..19: note = siRNA antisense sequence
  source 1..19: mol_type = other RNA
ttggcctttgactaattta

SEQ ID NO: 30854 - RNA, 19 nt, synthetic construct
  misc_feature 1..19: note = siRNA sense sequence
  source 1..19: mol_type = other RNA
aattagtcaaaggccaagt

SEQ ID NO: 30855 - RNA, 19 nt, synthetic construct
  misc_feature 1..19: note = siRNA antisense sequence
  source 1..19: mol_type = other RNA
acttggcctttgactaatt

SEQ ID NO: 30856 - RNA, 19 nt, synthetic construct
  misc_feature 1..19: note = siRNA sense sequence
  source 1..19: mol_type = other RNA
attagtcaaaggccaagta

SEQ ID NO: 30857 - RNA, 19 nt, synthetic construct
  misc_feature 1..19: note = siRNA antisense sequence
  source 1..19: mol_type = other RNA
tacttggcctttgactaat

SEQ ID NO: 30858 - RNA, 19 nt, synthetic construct
  misc_feature 1..19: note = siRNA sense sequence
  source 1..19: mol_type = other RNA
ttagtcaaaggccaagtat

SEQ ID NO: 30859 - RNA, 19 nt, synthetic construct
  misc_feature 1..19: note = siRNA antisense sequence
  source 1..19: mol_type = other RNA
atacttggcctttgactaa

SEQ ID NO: 30860 - RNA, 19 nt, synthetic construct
  misc_feature 1..19: note = siRNA sense sequence
  source 1..19: mol_type = other RNA
aaggccaagtatttcataa

SEQ ID NO: 30861 - RNA, 19 nt, synthetic construct
  misc_feature 1..19: note = siRNA antisense sequence
  source 1..19: mol_type = other RNA
ttatgaaatacttggcctt

SEQ ID NO: 30862 - RNA, 19 nt, synthetic construct
  misc_feature 1..19: note = siRNA sense sequence
  source 1..19: mol_type = other RNA
aggccaagtatttcataaa

SEQ ID NO: 30863 - RNA, 19 nt, synthetic construct
  misc_feature 1..19: note = siRNA antisense sequence
  source 1..19: mol_type = other RNA
tttatgaaatacttggcct

SEQ ID NO: 30864 - RNA, 19 nt, synthetic construct
  misc_feature 1..19: note = siRNA sense sequence
  source 1..19: mol_type = other RNA
ggccaagtatttcataaag

SEQ ID NO: 30865 - RNA, 19 nt, synthetic construct
  misc_feature 1..19: note = siRNA antisense sequence
  source 1..19: mol_type = other RNA
ctttatgaaatacttggcc

SEQ ID NO: 30866 - RNA, 19 nt, synthetic construct
  misc_feature 1..19: note = siRNA sense sequence
  source 1..19: mol_type = other RNA
agtgttgatgtaaattgtg

SEQ ID NO: 30867 - RNA, 19 nt, synthetic construct
  misc_feature 1..19: note = siRNA antisense sequence
  source 1..19: mol_type = other RNA
cacaatttacatcaacact

SEQ ID NO: 30868 - RNA, 19 nt, synthetic construct
  misc_feature 1..19: note = siRNA sense sequence
  source 1..19: mol_type = other RNA
gtgttgatgtaaattgtgt

SEQ ID NO: 30869 - RNA, 19 nt, synthetic construct
  misc_feature 1..19: note = siRNA antisense sequence
  source 1..19: mol_type = other RNA
acacaatttacatcaacac

SEQ ID NO: 30870 - RNA, 19 nt, synthetic construct
  misc_feature 1..19: note = siRNA sense sequence
  source 1..19: mol_type = other RNA
attgtgttactgatctttg

SEQ ID NO: 30871 - RNA, 19 nt, synthetic construct
  misc_feature 1..19: note = siRNA antisense sequence
  source 1..19: mol_type = other RNA
caaagatcagtaacacaat

SEQ ID NO: 30872 - RNA, 19 nt, synthetic construct
  misc_feature 1..19: note = siRNA sense sequence
  source 1..19: mol_type = other RNA
tgtgttactgatctttgat

SEQ ID NO: 30873 - RNA, 19 nt, synthetic construct
  misc_feature 1..19: note = siRNA antisense sequence
  source 1..19: mol_type = other RNA
atcaaagatcagtaacaca

SEQ ID NO: 30874 - RNA, 19 nt, synthetic construct
  misc_feature 1..19: note = siRNA sense sequence
  source 1..19: mol_type = other RNA
tctttgatcataatgtgga

SEQ ID NO: 30875 - RNA, 19 nt, synthetic construct
  misc_feature 1..19: note = siRNA antisense sequence
  source 1..19: mol_type = other RNA
tccacattatgatcaaaga

SEQ ID NO: 30876 - RNA, 19 nt, synthetic construct
  misc_feature 1..19: note = siRNA sense sequence
  source 1..19: mol_type = other RNA
ctttgatcataatgtggaa

SEQ ID NO: 30877 - RNA, 19 nt, synthetic construct
  misc_feature 1..19: note = siRNA antisense sequence
  source 1..19: mol_type = other RNA
ttccacattatgatcaaag

SEQ ID NO: 30878 - RNA, 19 nt, synthetic construct
  misc_feature 1..19: note = siRNA sense sequence
  source 1..19: mol_type = other RNA
tcataatgtggaatagtag

SEQ ID NO: 30879 - RNA, 19 nt, synthetic construct
  misc_feature 1..19: note = siRNA antisense sequence
  source 1..19: mol_type = other RNA
ctactattccacattatga

SEQ ID NO: 30880 - RNA, 19 nt, synthetic construct
  misc_feature 1..19: note = siRNA sense sequence
  source 1..19: mol_type = other RNA
cataatgtggaatagtagt

SEQ ID NO: 30881 - RNA, 19 nt, synthetic construct
  misc_feature 1..19: note = siRNA antisense sequence
  source 1..19: mol_type = other RNA
actactattccacattatg

SEQ ID NO: 30882 - RNA, 19 nt, synthetic construct
  misc_feature 1..19: note = siRNA sense sequence
  source 1..19: mol_type = other RNA
taatgtggaatagtagttg

SEQ ID NO: 30883 - RNA, 19 nt, synthetic construct
  misc_feature 1..19: note = siRNA antisense sequence
  source 1..19: mol_type = other RNA
caactactattccacatta

SEQ ID NO: 30884 - RNA, 19 nt, synthetic construct
  misc_feature 1..19: note = siRNA sense sequence
  source 1..19: mol_type = other RNA
aatgtggaatagtagttgc

SEQ ID NO: 30885 - RNA, 19 nt, synthetic construct
  misc_feature 1..19: note = siRNA antisense sequence
  source 1..19: mol_type = other RNA
gcaactactattccacatt

SEQ ID NO: 30886 - RNA, 19 nt, synthetic construct
  misc_feature 1..19: note = siRNA sense sequence
  source 1..19: mol_type = other RNA
atgtggaatagtagttgca

SEQ ID NO: 30887 - RNA, 19 nt, synthetic construct
  misc_feature 1..19: note = siRNA antisense sequence
  source 1..19: mol_type = other RNA
tgcaactactattccacat

SEQ ID NO: 30888 - RNA, 19 nt, synthetic construct
  misc_feature 1..19: note = siRNA sense sequence
  source 1..19: mol_type = other RNA
atagtagttgcactcaaga

SEQ ID NO: 30889 - RNA, 19 nt, synthetic construct
  misc_feature 1..19: note = siRNA antisense sequence
  source 1..19: mol_type = other RNA
tcttgagtgcaactactat

SEQ ID NO: 30890 - RNA, 19 nt, synthetic construct
  misc_feature 1..19: note = siRNA sense sequence
  source 1..19: mol_type = other RNA
tagtagttgcactcaagat

SEQ ID NO: 30891 - RNA, 19 nt, synthetic construct
  misc_feature 1..19: note = siRNA antisense sequence
  source 1..19: mol_type = other RNA
atcttgagtgcaactacta

SEQ ID NO: 30892 - RNA, 19 nt, synthetic construct
  misc_feature 1..19: note = siRNA sense sequence
  source 1..19: mol_type = other RNA
agtagttgcactcaagata

SEQ ID NO: 30893 - RNA, 19 nt, synthetic construct
  misc_feature 1..19: note = siRNA antisense sequence
  source 1..19: mol_type = other RNA
tatcttgagtgcaactact

SEQ ID NO: 30894 - RNA, 19 nt, synthetic construct
  misc_feature 1..19: note = siRNA sense sequence
  source 1..19: mol_type = other RNA
tatgttacagggtttggct

SEQ ID NO: 30895 - RNA, 19 nt, synthetic construct
  misc_feature 1..19: note = siRNA antisense sequence
  source 1..19: mol_type = other RNA
agccaaaccctgtaacata

SEQ ID NO: 30896 - RNA, 19 nt, synthetic construct
  misc_feature 1..19: note = siRNA sense sequence
  source 1..19: mol_type = other RNA
atgttacagggtttggctt

SEQ ID NO: 30897 - RNA, 19 nt, synthetic construct
  misc_feature 1..19: note = siRNA antisense sequence
  source 1..19: mol_type = other RNA
aagccaaaccctgtaacat

SEQ ID NO: 30898 - RNA, 19 nt, synthetic construct
  misc_feature 1..19: note = siRNA sense sequence
  source 1..19: mol_type = other RNA
aaataactgacatacagca

SEQ ID NO: 30899 - RNA, 19 nt, synthetic construct
  misc_feature 1..19: note = siRNA antisense sequence
  source 1..19: mol_type = other RNA
tgctgtatgtcagttattt

SEQ ID NO: 30900 - RNA, 19 nt, synthetic construct
  misc_feature 1..19: note = siRNA sense sequence
  source 1..19: mol_type = other RNA
tgacatacagcagaggcac

SEQ ID NO: 30901 - RNA, 19 nt, synthetic construct
  misc_feature 1..19: note = siRNA antisense sequence
  source 1..19: mol_type = other RNA
gtgcctctgctgtatgtca

SEQ ID NO: 30902 - RNA, 19 nt, synthetic construct
  misc_feature 1..19: note = siRNA sense sequence
  source 1..19: mol_type = other RNA
acagcagaggcactcaccc

SEQ ID NO: 30903 - RNA, 19 nt, synthetic construct
  misc_feature 1..19: note = siRNA antisense sequence
  source 1..19: mol_type = other RNA
gggtgagtgcctctgctgt

SEQ ID NO: 30904 - RNA, 19 nt, synthetic construct
  misc_feature 1..19: note = siRNA sense sequence
  source 1..19: mol_type = other RNA
agcagaggcactcacccta

SEQ ID NO: 30905 - RNA, 19 nt, synthetic construct
  misc_feature 1..19: note = siRNA antisense sequence
  source 1..19: mol_type = other RNA
tagggtgagtgcctctgct

SEQ ID NO: 30906 - RNA, 19 nt, synthetic construct
  misc_feature 1..19: note = siRNA sense sequence
  source 1..19: mol_type = other RNA
gcagaggcactcaccctaa

SEQ ID NO: 30907 - RNA, 19 nt, synthetic construct
  misc_feature 1..19: note = siRNA antisense sequence
  source 1..19: mol_type = other RNA
ttagggtgagtgcctctgc

SEQ ID NO: 30908 - RNA, 19 nt, synthetic construct
  misc_feature 1..19: note = siRNA sense sequence
  source 1..19: mol_type = other RNA
cagaggcactcaccctaac

SEQ ID NO: 30909 - RNA, 19 nt, synthetic construct
  misc_feature 1..19: note = siRNA antisense sequence
  source 1..19: mol_type = other RNA
gttagggtgagtgcctctg

SEQ ID NO: 30910 - RNA, 19 nt, synthetic construct
  misc_feature 1..19: note = siRNA sense sequence
  source 1..19: mol_type = other RNA
acatactttccatctatac

SEQ ID NO: 30911 - RNA, 19 nt, synthetic construct
  misc_feature 1..19: note = siRNA antisense sequence
  source 1..19: mol_type = other RNA
gtatagatggaaagtatgt

SEQ ID NO: 30912 - RNA, 19 nt, synthetic construct
  misc_feature 1..19: note = siRNA sense sequence
  source 1..19: mol_type = other RNA
catactttccatctatacg

SEQ ID NO: 30913 - RNA, 19 nt, synthetic construct
  misc_feature 1..19: note = siRNA antisense sequence
  source 1..19: mol_type = other RNA
cgtatagatggaaagtatg

SEQ ID NO: 30914 - RNA, 19 nt, synthetic construct
  misc_feature 1..19: note = siRNA sense sequence
  source 1..19: mol_type = other RNA
atactttccatctatacgc

SEQ ID NO: 30915 - RNA, 19 nt, synthetic construct
  misc_feature 1..19: note = siRNA antisense sequence
  source 1..19: mol_type = other RNA
gcgtatagatggaaagtat

SEQ ID NO: 30916 - RNA, 19 nt, synthetic construct
  misc_feature 1..19: note = siRNA sense sequence
  source 1..19: mol_type = other RNA
tactttccatctatacgcc

SEQ ID NO: 30917 - RNA, 19 nt, synthetic construct
  misc_feature 1..19: note = siRNA antisense sequence
  source 1..19: mol_type = other RNA
ggcgtatagatggaaagta

SEQ ID NO: 30918 - RNA, 19 nt, synthetic construct
  misc_feature 1..19: note = siRNA sense sequence
  source 1..19: mol_type = other RNA
actttccatctatacgcca

SEQ ID NO: 30919 - RNA, 19 nt, synthetic construct
  misc_feature 1..19: note = siRNA antisense sequence
  source 1..19: mol_type = other RNA
tggcgtatagatggaaagt

SEQ ID NO: 30920 - RNA, 19 nt, synthetic construct
  misc_feature 1..19: note = siRNA sense sequence
  source 1..19: mol_type = other RNA
tgggacctccctcagctct

SEQ ID NO: 30921 - RNA, 19 nt, synthetic construct
  misc_feature 1..19: note = siRNA antisense sequence
  source 1..19: mol_type = other RNA
agagctgagggaggtccca

SEQ ID NO: 30922 - RNA, 19 nt, synthetic construct
  misc_feature 1..19: note = siRNA sense sequence
  source 1..19: mol_type = other RNA
tcagctctgccctcctaat

SEQ ID NO: 30923 - RNA, 19 nt, synthetic construct
  misc_feature 1..19: note = siRNA antisense sequence
  source 1..19: mol_type = other RNA
attaggagggcagagctga

SEQ ID NO: 30924 - RNA, 19 nt, synthetic construct
  misc_feature 1..19: note = siRNA sense sequence
  source 1..19: mol_type = other RNA
agctctgccctcctaataa

SEQ ID NO: 30925 - RNA, 19 nt, synthetic construct
  misc_feature 1..19: note = siRNA antisense sequence
  source 1..19: mol_type = other RNA
ttattaggagggcagagct

SEQ ID NO: 30926 - RNA, 19 nt, synthetic construct
  misc_feature 1..19: note = siRNA sense sequence
  source 1..19: mol_type = other RNA
gctctgccctcctaataag

SEQ ID NO: 30927 - RNA, 19 nt, synthetic construct
  misc_feature 1..19: note = siRNA antisense sequence
  source 1..19: mol_type = other RNA
cttattaggagggcagagc

SEQ ID NO: 30928 - RNA, 19 nt, synthetic construct
  misc_feature 1..19: note = siRNA sense sequence
  source 1..19: mol_type = other RNA
ctctgccctcctaataaga

SEQ ID NO: 30929 - RNA, 19 nt, synthetic construct
  misc_feature 1..19: note = siRNA antisense sequence
  source 1..19: mol_type = other RNA
tcttattaggagggcagag

SEQ ID NO: 30930 - RNA, 19 nt, synthetic construct
  misc_feature 1..19: note = siRNA sense sequence
  source 1..19: mol_type = other RNA
gccctcctaataagaccat

SEQ ID NO: 30931 - RNA, 19 nt, synthetic construct
  misc_feature 1..19: note = siRNA antisense sequence
  source 1..19: mol_type = other RNA
atggtcttattaggagggc

SEQ ID NO: 30932 - RNA, 19 nt, synthetic construct
  misc_feature 1..19: note = siRNA sense sequence
  source 1..19: mol_type = other RNA
ccctcctaataagaccatc

SEQ ID NO: 30933 - RNA, 19 nt, synthetic construct
  misc_feature 1..19: note = siRNA antisense sequence
  source 1..19: mol_type = other RNA
gatggtcttattaggaggg

SEQ ID NO: 30934 - RNA, 19 nt, synthetic construct
  misc_feature 1..19: note = siRNA sense sequence
  source 1..19: mol_type = other RNA
cctcctaataagaccatcc

SEQ ID NO: 30935 - RNA, 19 nt, synthetic construct
  misc_feature 1..19: note = siRNA antisense sequence
  source 1..19: mol_type = other RNA
ggatggtcttattaggagg

SEQ ID NO: 30936 - RNA, 19 nt, synthetic construct
  misc_feature 1..19: note = siRNA sense sequence
  source 1..19: mol_type = other RNA
ctcctaataagaccatcct

SEQ ID NO: 30937 - RNA, 19 nt, synthetic construct
  misc_feature 1..19: note = siRNA antisense sequence
  source 1..19: mol_type = other RNA
aggatggtcttattaggag

SEQ ID NO: 30938 - RNA, 19 nt, synthetic construct
  misc_feature 1..19: note = siRNA sense sequence
  source 1..19: mol_type = other RNA
tcctaataagaccatcctg

SEQ ID NO: 30939 - RNA, 19 nt, synthetic construct
  misc_feature 1..19: note = siRNA antisense sequence
  source 1..19: mol_type = other RNA
caggatggtcttattagga

SEQ ID NO: 30940 - RNA, 19 nt, synthetic construct
  misc_feature 1..19: note = siRNA sense sequence
  source 1..19: mol_type = other RNA
cctaataagaccatcctga

SEQ ID NO: 30941 - RNA, 19 nt, synthetic construct
  misc_feature 1..19: note = siRNA antisense sequence
  source 1..19: mol_type = other RNA
tcaggatggtcttattagg

SEQ ID NO: 30942 - RNA, 19 nt, synthetic construct
  misc_feature 1..19: note = siRNA sense sequence
  source 1..19: mol_type = other RNA
ctaataagaccatcctgac

SEQ ID NO: 30943 - RNA, 19 nt, synthetic construct
  misc_feature 1..19: note = siRNA antisense sequence
  source 1..19: mol_type = other RNA
gtcaggatggtcttattag

SEQ ID NO: 30944 - RNA, 19 nt, synthetic construct
  misc_feature 1..19: note = siRNA sense sequence
  source 1..19: mol_type = other RNA
taataagaccatcctgaca

SEQ ID NO: 30945 - RNA, 19 nt, synthetic construct
  misc_feature 1..19: note = siRNA antisense sequence
  source 1..19: mol_type = other RNA
tgtcaggatggtcttatta

SEQ ID NO: 30946 - RNA, 19 nt, synthetic construct
  misc_feature 1..19: note = siRNA sense sequence
  source 1..19: mol_type = other RNA
aataagaccatcctgacac

SEQ ID NO: 30947 - RNA, 19 nt, synthetic construct
  misc_feature 1..19: note = siRNA antisense sequence
  source 1..19: mol_type = other RNA
gtgtcaggatggtcttatt

SEQ ID NO: 30948 - RNA, 19 nt, synthetic construct
  misc_feature 1..19: note = siRNA sense sequence
  source 1..19: mol_type = other RNA
gcagcaattattctttgat

SEQ ID NO: 30949 - RNA, 19 nt, synthetic construct
  misc_feature 1..19: note = siRNA antisense sequence
  source 1..19: mol_type = other RNA
atcaaagaataattgctgc

SEQ ID NO: 30950 - RNA, 19 nt, synthetic construct
  misc_feature 1..19: note = siRNA sense sequence
  source 1..19: mol_type = other RNA
cagcaattattctttgatg

SEQ ID NO: 30951 - RNA, 19 nt, synthetic construct
  misc_feature 1..19: note = siRNA antisense sequence
  source 1..19: mol_type = other RNA
catcaaagaataattgctg

SEQ ID NO: 30952 - RNA, 19 nt, synthetic construct
  misc_feature 1..19: note = siRNA sense sequence
  source 1..19: mol_type = other RNA
gacatcaccaccgtcttgc

SEQ ID NO: 30953 - RNA, 19 nt, synthetic construct
  misc_feature 1..19: note = siRNA antisense sequence
  source 1..19: mol_type = other RNA
gcaagacggtggtgatgtc

SEQ ID NO: 30954 - RNA, 19 nt, synthetic construct
  misc_feature 1..19: note = siRNA sense sequence
  source 1..19: mol_type = other RNA
tatgtgcataatggaagat

SEQ ID NO: 30955 - RNA, 19 nt, synthetic construct
  misc_feature 1..19: note = siRNA antisense sequence
  source 1..19: mol_type = other RNA
atcttccattatgcacata

SEQ ID NO: 30956 - RNA, 19 nt, synthetic construct
  misc_feature 1..19: note = siRNA sense sequence
  source 1..19: mol_type = other RNA
atgtgcataatggaagatt

SEQ ID NO: 30957 - RNA, 19 nt, synthetic construct
  misc_feature 1..19: note = siRNA antisense sequence
  source 1..19: mol_type = other RNA
aatcttccattatgcacat

SEQ ID NO: 30958 - RNA, 19 nt, synthetic construct
  misc_feature 1..19: note = siRNA sense sequence
  source 1..19: mol_type = other RNA
tgtgcataatggaagattt

SEQ ID NO: 30959 - RNA, 19 nt, synthetic construct
  misc_feature 1..19: note = siRNA antisense sequence
  source 1..19: mol_type = other RNA
aaatcttccattatgcaca

SEQ ID NO: 30960 - RNA, 19 nt, synthetic construct
  misc_feature 1..19: note = siRNA sense sequence
  source 1..19: mol_type = other RNA
gtgcataatggaagatttc

SEQ ID NO: 30961 - RNA, 19 nt, synthetic construct
  misc_feature 1..19: note = siRNA antisense sequence
  source 1..19: mol_type = other RNA
gaaatcttccattatgcac

SEQ ID NO: 30962 - RNA, 19 nt, synthetic construct
  misc_feature 1..19: note = siRNA sense sequence
  source 1..19: mol_type = other RNA
actttaaatctgacctagc

SEQ ID NO: 30963 - RNA, 19 nt, synthetic construct
  misc_feature 1..19: note = siRNA antisense sequence
  source 1..19: mol_type = other RNA
gctaggtcagatttaaagt

SEQ ID NO: 30964 - RNA, 19 nt, synthetic construct
  misc_feature 1..19: note = siRNA sense sequence
  source 1..19: mol_type = other RNA
ctttaaatctgacctagcc

SEQ ID NO: 30965 - RNA, 19 nt, synthetic construct
  misc_feature 1..19: note = siRNA antisense sequence
  source 1..19: mol_type = other RNA
ggctaggtcagatttaaag

SEQ ID NO: 30966 - RNA, 19 nt, synthetic construct
  misc_feature 1..19: note = siRNA sense sequence
  source 1..19: mol_type = other RNA
tttaaatctgacctagcca

SEQ ID NO: 30967 - RNA, 19 nt, synthetic construct
  misc_feature 1..19: note = siRNA antisense sequence
  source 1..19: mol_type = other RNA
tggctaggtcagatttaaa

SEQ ID NO: 30968 - RNA, 19 nt, synthetic construct
  misc_feature 1..19: note = siRNA sense sequence
  source 1..19: mol_type = other RNA
aatctgacctagccatgaa

SEQ ID NO: 30969 - RNA, 19 nt, synthetic construct
  misc_feature 1..19: note = siRNA antisense sequence
  source 1..19: mol_type = other RNA
ttcatggctaggtcagatt

SEQ ID NO: 30970 - RNA, 19 nt, synthetic construct
  misc_feature 1..19: note = siRNA sense sequence
  source 1..19: mol_type = other RNA
aaagtcagtgtgagtcctg

SEQ ID NO: 30971 - RNA, 19 nt, synthetic construct
  misc_feature 1..19: note = siRNA antisense sequence
  source 1..19: mol_type = other RNA
caggactcacactgacttt

SEQ ID NO: 30972 - RNA, 19 nt, synthetic construct
  misc_feature 1..19: note = siRNA sense sequence
  source 1..19: mol_type = other RNA
aagtcagtgtgagtcctgc

SEQ ID NO: 30973 - RNA, 19 nt, synthetic construct
  misc_feature 1..19: note = siRNA antisense sequence
  source 1..19: mol_type = other RNA
gcaggactcacactgactt

SEQ ID NO: 30974 - RNA, 19 nt, synthetic construct
  misc_feature 1..19: note = siRNA sense sequence
  source 1..19: mol_type = other RNA
agtcagtgtgagtcctgca

SEQ ID NO: 30975 - RNA, 19 nt, synthetic construct
  misc_feature 1..19: note = siRNA antisense sequence
  source 1..19: mol_type = other RNA
tgcaggactcacactgact

SEQ ID NO: 30976 - RNA, 19 nt, synthetic construct
  misc_feature 1..19: note = siRNA sense sequence
  source 1..19: mol_type = other RNA
gtcagtgtgagtcctgcat

SEQ ID NO: 30977 - RNA, 19 nt, synthetic construct
  misc_feature 1..19: note = siRNA antisense sequence
  source 1..19: mol_type = other RNA
atgcaggactcacactgac

SEQ ID NO: 30978 - RNA, 19 nt, synthetic construct
  misc_feature 1..19: note = siRNA sense sequence
  source 1..19: mol_type = other RNA
tcagtgtgagtcctgcatc

SEQ ID NO: 30979 - RNA, 19 nt, synthetic construct
  misc_feature 1..19: note = siRNA antisense sequence
  source 1..19: mol_type = other RNA
gatgcaggactcacactga

SEQ ID NO: 30980 - RNA, 19 nt, synthetic construct
  misc_feature 1..19: note = siRNA sense sequence
  source 1..19: mol_type = other RNA
cagtgtgagtcctgcatca

SEQ ID NO: 30981 - RNA, 19 nt, synthetic construct
  misc_feature 1..19: note = siRNA antisense sequence
  source 1..19: mol_type = other RNA
tgatgcaggactcacactg

SEQ ID NO: 30982 - RNA, 19 nt, synthetic construct
  misc_feature 1..19: note = siRNA sense sequence
  source 1..19: mol_type = other RNA
agtgtgagtcctgcatcat

SEQ ID NO: 30983 - RNA, 19 nt, synthetic construct
  misc_feature 1..19: note = siRNA antisense sequence
  source 1..19: mol_type = other RNA
atgatgcaggactcacact

SEQ ID NO: 30984 - RNA, 19 nt, synthetic construct
  misc_feature 1..19: note = siRNA sense sequence
  source 1..19: mol_type = other RNA
gtgtgagtcctgcatcatg

SEQ ID NO: 30985 - RNA, 19 nt, synthetic construct
  misc_feature 1..19: note = siRNA antisense sequence
  source 1..19: mol_type = other RNA
catgatgcaggactcacac

SEQ ID NO: 30986 - RNA, 19 nt, synthetic construct
  misc_feature 1..19: note = siRNA sense sequence
  source 1..19: mol_type = other RNA
tgtgagtcctgcatcatgt

SEQ ID NO: 30987 - RNA, 19 nt, synthetic construct
  misc_feature 1..19: note = siRNA antisense sequence
  source 1..19: mol_type = other RNA
acatgatgcaggactcaca

SEQ ID NO: 30988 - RNA, 19 nt, synthetic construct
  misc_feature 1..19: note = siRNA sense sequence
  source 1..19: mol_type = other RNA
gtgagtcctgcatcatgtt

SEQ ID NO: 30989 - RNA, 19 nt, synthetic construct
  misc_feature 1..19: note = siRNA antisense sequence
  source 1..19: mol_type = other RNA
aacatgatgcaggactcac

SEQ ID NO: 30990 - RNA, 19 nt, synthetic construct
  misc_feature 1..19: note = siRNA sense sequence
  source 1..19: mol_type = other RNA
tgagtcctgcatcatgttt

SEQ ID NO: 30991 - RNA, 19 nt, synthetic construct
  misc_feature 1..19: note = siRNA antisense sequence
  source 1..19: mol_type = other RNA
aaacatgatgcaggactca

SEQ ID NO: 30992 - RNA, 19 nt, synthetic construct
  misc_feature 1..19: note = siRNA sense sequence
  source 1..19: mol_type = other RNA
gagtcctgcatcatgtttt

SEQ ID NO: 30993 - RNA, 19 nt, synthetic construct
  misc_feature 1..19: note = siRNA antisense sequence
  source 1..19: mol_type = other RNA
aaaacatgatgcaggactc

SEQ ID NO: 30994 - RNA, 19 nt, synthetic construct
  misc_feature 1..19: note = siRNA sense sequence
  source 1..19: mol_type = other RNA
agtcctgcatcatgttttc

SEQ ID NO: 30995 - RNA, 19 nt, synthetic construct
  misc_feature 1..19: note = siRNA antisense sequence
  source 1..19: mol_type = other RNA
gaaaacatgatgcaggact

SEQ ID NO: 30996 - RNA, 19 nt, synthetic construct
  misc_feature 1..19: note = siRNA sense sequence
  source 1..19: mol_type = other RNA
gtcctgcatcatgttttca

SEQ ID NO: 30997 - RNA, 19 nt, synthetic construct
  misc_feature 1..19: note = siRNA antisense sequence
  source 1..19: mol_type = other RNA
tgaaaacatgatgcaggac

SEQ ID NO: 30998 - RNA, 19 nt, synthetic construct
  misc_feature 1..19: note = siRNA sense sequence
  source 1..19: mol_type = other RNA
tcctgcatcatgttttcat

SEQ ID NO: 30999 - RNA, 19 nt, synthetic construct
  misc_feature 1..19: note = siRNA antisense sequence
  source 1..19: mol_type = other RNA
atgaaaacatgatgcagga

SEQ ID NO: 31000 - RNA, 19 nt, synthetic construct
  misc_feature 1..19: note = siRNA sense sequence
  source 1..19: mol_type = other RNA
cctgcatcatgttttcatc

SEQ ID NO: 31001 - RNA, 19 nt, synthetic construct
  misc_feature 1..19: note = siRNA antisense sequence
  source 1..19: mol_type = other RNA
gatgaaaacatgatgcagg

SEQ ID NO: 31002 - RNA, 19 nt, synthetic construct
  misc_feature 1..19: note = siRNA sense sequence
  source 1..19: mol_type = other RNA
ctgcatcatgttttcatcc

SEQ ID NO: 31003 - RNA, 19 nt, synthetic construct
  misc_feature 1..19: note = siRNA antisense sequence
  source 1..19: mol_type = other RNA
ggatgaaaacatgatgcag

SEQ ID NO: 31004 - RNA, 19 nt, synthetic construct
  misc_feature 1..19: note = siRNA sense sequence
  source 1..19: mol_type = other RNA
tgcatcatgttttcatcct

SEQ ID NO: 31005 - RNA, 19 nt, synthetic construct
  misc_feature 1..19: note = siRNA antisense sequence
  source 1..19: mol_type = other RNA
aggatgaaaacatgatgca

SEQ ID NO: 31006 - RNA, 19 nt, synthetic construct
  misc_feature 1..19: note = siRNA sense sequence
  source 1..19: mol_type = other RNA
atcatgttttcatcctgct

SEQ ID NO: 31007 - RNA, 19 nt, synthetic construct
  misc_feature 1..19: note = siRNA antisense sequence
  source 1..19: mol_type = other RNA
agcaggatgaaaacatgat

SEQ ID NO: 31008 - RNA, 19 nt, synthetic construct
  misc_feature 1..19: note = siRNA sense sequence
  source 1..19: mol_type = other RNA
tcatgttttcatcctgcta

SEQ ID NO: 31009 - RNA, 19 nt, synthetic construct
  misc_feature 1..19: note = siRNA antisense sequence
  source 1..19: mol_type = other RNA
tagcaggatgaaaacatga

SEQ ID NO: 31010 - RNA, 19 nt, synthetic construct
  misc_feature 1..19: note = siRNA sense sequence
  source 1..19: mol_type = other RNA
catgttttcatcctgctat

SEQ ID NO: 31011 - RNA, 19 nt, synthetic construct
  misc_feature 1..19: note = siRNA antisense sequence
  source 1..19: mol_type = other RNA
atagcaggatgaaaacatg

SEQ ID NO: 31012 - RNA, 19 nt, synthetic construct
  misc_feature 1..19: note = siRNA sense sequence
  source 1..19: mol_type = other RNA
atgttttcatcctgctatg

SEQ ID NO: 31013 - RNA, 19 nt, synthetic construct
  misc_feature 1..19: note = siRNA antisense sequence
  source 1..19: mol_type = other RNA
catagcaggatgaaaacat

SEQ ID NO: 31014 - RNA, 19 nt, synthetic construct
  misc_feature 1..19: note = siRNA sense sequence
  source 1..19: mol_type = other RNA
tttcatcctgctatgtttt

SEQ ID NO: 31015 - RNA, 19 nt, synthetic construct
  misc_feature 1..19: note = siRNA antisense sequence
  source 1..19: mol_type = other RNA
aaaacatagcaggatgaaa

SEQ ID NO: 31016 - RNA, 19 nt, synthetic construct
  misc_feature 1..19: note = siRNA sense sequence
  source 1..19: mol_type = other RNA
ttttactttctggtagtgc

SEQ ID NO: 31017 - RNA, 19 nt, synthetic construct
  misc_feature 1..19: note = siRNA antisense sequence
  source 1..19: mol_type = other RNA
gcactaccagaaagtaaaa

SEQ ID NO: 31018 - RNA, 19 nt, synthetic construct
  misc_feature 1..19: note = siRNA sense sequence
  source 1..19: mol_type = other RNA
tttactttctggtagtgct

SEQ ID NO: 31019 - RNA, 19 nt, synthetic construct
  misc_feature 1..19: note = siRNA antisense sequence
  source 1..19: mol_type = other RNA
agcactaccagaaagtaaa

SEQ ID NO: 31020 - RNA, 19 nt, synthetic construct
  misc_feature 1..19: note = siRNA sense sequence
  source 1..19: mol_type = other RNA
ttactttctggtagtgctt

SEQ ID NO: 31021 - RNA, 19 nt, synthetic construct
  misc_feature 1..19: note = siRNA antisense sequence
  source 1..19: mol_type = other RNA
aagcactaccagaaagtaa

SEQ ID NO: 31022 - RNA, 19 nt, synthetic construct
  misc_feature 1..19: note = siRNA sense sequence
  source 1..19: mol_type = other RNA
actttctggtagtgctttt

SEQ ID NO: 31023 - RNA, 19 nt, synthetic construct
  misc_feature 1..19: note = siRNA antisense sequence
  source 1..19: mol_type = other RNA
aaaagcactaccagaaagt

SEQ ID NO: 31024 - RNA, 19 nt, synthetic construct
  misc_feature 1..19: note = siRNA sense sequence
  source 1..19: mol_type = other RNA
ctttctggtagtgctttta

SEQ ID NO: 31025 - RNA, 19 nt, synthetic construct
  misc_feature 1..19: note = siRNA antisense sequence
  source 1..19: mol_type = other RNA
taaaagcactaccagaaag

SEQ ID NO: 31026 - RNA, 19 nt, synthetic construct
  misc_feature 1..19: note = siRNA sense sequence
  source 1..19: mol_type = other RNA
tttctggtagtgcttttaa

SEQ ID NO: 31027 - RNA, 19 nt, synthetic construct
  misc_feature 1..19: note = siRNA antisense sequence
  source 1..19: mol_type = other RNA
ttaaaagcactaccagaaa

SEQ ID NO: 31028 - RNA, 19 nt, synthetic construct
  misc_feature 1..19: note = siRNA sense sequence
  source 1..19: mol_type = other RNA
ttctggtagtgcttttaac

SEQ ID NO: 31029 - RNA, 19 nt, synthetic construct
  misc_feature 1..19: note = siRNA antisense sequence
  source 1..19: mol_type = other RNA
gttaaaagcactaccagaa

SEQ ID NO: 31030 - RNA, 19 nt, synthetic construct
  misc_feature 1..19: note = siRNA sense sequence
  source 1..19: mol_type = other RNA
ttttacataggaatcacct

SEQ ID NO: 31031 - RNA, 19 nt, synthetic construct
  misc_feature 1..19: note = siRNA antisense sequence
  source 1..19: mol_type = other RNA
aggtgattcctatgtaaaa

SEQ ID NO: 31032 - RNA, 19 nt, synthetic construct
  misc_feature 1..19: note = siRNA sense sequence
  source 1..19: mol_type = other RNA
acataggaatcacctgtct

SEQ ID NO: 31033 - RNA, 19 nt, synthetic construct
  misc_feature 1..19: note = siRNA antisense sequence
  source 1..19: mol_type = other RNA
agacaggtgattcctatgt

SEQ ID NO: 31034 - RNA, 19 nt, synthetic construct
  misc_feature 1..19: note = siRNA sense sequence
  source 1..19: mol_type = other RNA
cataggaatcacctgtcta

SEQ ID NO: 31035 - RNA, 19 nt, synthetic construct
  misc_feature 1..19: note = siRNA antisense sequence
  source 1..19: mol_type = other RNA
tagacaggtgattcctatg

SEQ ID NO: 31036 - RNA, 19 nt, synthetic construct
  misc_feature 1..19: note = siRNA sense sequence
  source 1..19: mol_type = other RNA
ataggaatcacctgtctaa

SEQ ID NO: 31037 - RNA, 19 nt, synthetic construct
  misc_feature 1..19: note = siRNA antisense sequence
  source 1..19: mol_type = other RNA
ttagacaggtgattcctat

SEQ ID NO: 31038 - RNA, 19 nt, synthetic construct
  misc_feature 1..19: note = siRNA sense sequence
  source 1..19: mol_type = other RNA
gaatcacctgtctaatcaa

SEQ ID NO: 31039 - RNA, 19 nt, synthetic construct
  misc_feature 1..19: note = siRNA antisense sequence
  source 1..19: mol_type = other RNA
ttgattagacaggtgattc

SEQ ID NO: 31040 - RNA, 19 nt, synthetic construct
  misc_feature 1..19: note = siRNA sense sequence
  source 1..19: mol_type = other RNA
aatcacctgtctaatcaac

SEQ ID NO: 31041 - RNA, 19 nt, synthetic construct
  misc_feature 1..19: note = siRNA antisense sequence
  source 1..19: mol_type = other RNA
gttgattagacaggtgatt

SEQ ID NO: 31042 - RNA, 19 nt, synthetic construct
  misc_feature 1..19: note = siRNA sense sequence
  source 1..19: mol_type = other RNA
atcacctgtctaatcaact

SEQ ID NO: 31043 - RNA, 19 nt, synthetic construct
  misc_feature 1..19: note = siRNA antisense sequence
  source 1..19: mol_type = other RNA
agttgattagacaggtgat

SEQ ID NO: 31044 - RNA, 19 nt, synthetic construct
  misc_feature 1..19: note = siRNA sense sequence
  source 1..19: mol_type = other RNA
tcacctgtctaatcaacta

SEQ ID NO: 31045 - RNA, 19 nt, synthetic construct
  misc_feature 1..19: note = siRNA antisense sequence
  source 1..19: mol_type = other RNA
tagttgattagacaggtga

SEQ ID NO: 31046 - RNA, 19 nt, synthetic construct
  misc_feature 1..19: note = siRNA sense sequence
  source 1..19: mol_type = other RNA
cacctgtctaatcaactac

SEQ ID NO: 31047 - RNA, 19 nt, synthetic construct
  misc_feature 1..19: note = siRNA antisense sequence
  source 1..19: mol_type = other RNA
gtagttgattagacaggtg

SEQ ID NO: 31048 - RNA, 19 nt, synthetic construct
  misc_feature 1..19: note = siRNA sense sequence
  source 1..19: mol_type = other RNA
acctgtctaatcaactaca

SEQ ID NO: 31049 - RNA, 19 nt, synthetic construct
  misc_feature 1..19: note = siRNA antisense sequence
  source 1..19: mol_type = other RNA
tgtagttgattagacaggt

SEQ ID NO: 31050 - RNA, 19 nt, synthetic construct
  misc_feature 1..19: note = siRNA sense sequence
  source 1..19: mol_type = other RNA
tctgttgcctagactgatg

SEQ ID NO: 31051 - RNA, 19 nt, synthetic construct
  misc_feature 1..19: note = siRNA antisense sequence
  source 1..19: mol_type = other RNA
catcagtctaggcaacaga

SEQ ID NO: 31052 - RNA, 19 nt, synthetic construct
  misc_feature 1..19: note = siRNA sense sequence
  source 1..19: mol_type = other RNA
ctgttgcctagactgatgg

SEQ ID NO: 31053 - RNA, 19 nt, synthetic construct
  misc_feature 1..19: note = siRNA antisense sequence
  source 1..19: mol_type = other RNA
ccatcagtctaggcaacag

SEQ ID NO: 31054 - RNA, 19 nt, synthetic construct
  misc_feature 1..19: note = siRNA sense sequence
  source 1..19: mol_type = other RNA
tgttgcctagactgatggg

SEQ ID NO: 31055 - RNA, 19 nt, synthetic construct
  misc_feature 1..19: note = siRNA antisense sequence
  source 1..19: mol_type = other RNA
cccatcagtctaggcaaca

SEQ ID NO: 31056 - RNA, 19 nt, synthetic construct
  misc_feature 1..19: note = siRNA sense sequence
  source 1..19: mol_type = other RNA
gttgcctagactgatgggc

SEQ ID NO: 31057 - RNA, 19 nt, synthetic construct
  misc_feature 1..19: note = siRNA antisense sequence
  source 1..19: mol_type = other RNA
gcccatcagtctaggcaac

SEQ ID NO: 31058 - RNA, 19 nt, synthetic construct
  misc_feature 1..19: note = siRNA sense sequence
  source 1..19: mol_type = other RNA
gcctagactgatgggcaat

SEQ ID NO: 31059 - RNA, 19 nt, synthetic construct
  misc_feature 1..19: note = siRNA antisense sequence
  source 1..19: mol_type = other RNA
attgcccatcagtctaggc

SEQ ID NO: 31060 - RNA, 19 nt, synthetic construct
  misc_feature 1..19: note = siRNA sense sequence
  source 1..19: mol_type = other RNA
agactgatgggcaataacg

SEQ ID NO: 31061 - RNA, 19 nt, synthetic construct
  misc_feature 1..19: note = siRNA antisense sequence
  source 1..19: mol_type = other RNA
cgttattgcccatcagtct

SEQ ID NO: 31062 - RNA, 19 nt, synthetic construct
  misc_feature 1..19: note = siRNA sense sequence
  source 1..19: mol_type = other RNA
gactgatgggcaataacga

SEQ ID NO: 31063 - RNA, 19 nt, synthetic construct
  misc_feature 1..19: note = siRNA antisense sequence
  source 1..19: mol_type = other RNA
tcgttattgcccatcagtc

SEQ ID NO: 31064 - RNA, 19 nt, synthetic construct
  misc_feature 1..19: note = siRNA sense sequence
  source 1..19: mol_type = other RNA
actgatgggcaataacgaa

SEQ ID NO: 31065 - RNA, 19 nt, synthetic construct
  misc_feature 1..19: note = siRNA antisense sequence
  source 1..19: mol_type = other RNA
ttcgttattgcccatcagt

SEQ ID NO: 31066 - RNA, 19 nt, synthetic construct
  misc_feature 1..19: note = siRNA sense sequence
  source 1..19: mol_type = other RNA
aaatcttggctcactgcaa

SEQ ID NO: 31067 - RNA, 19 nt, synthetic construct
  misc_feature 1..19: note = siRNA antisense sequence
  source 1..19: mol_type = other RNA
ttgcagtgagccaagattt

SEQ ID NO: 31068 - RNA, 19 nt, synthetic construct
  misc_feature 1..19: note = siRNA sense sequence
  source 1..19: mol_type = other RNA
aatcttggctcactgcaac

SEQ ID NO: 31069 - RNA, 19 nt, synthetic construct
  misc_feature 1..19: note = siRNA antisense sequence
  source 1..19: mol_type = other RNA
gttgcagtgagccaagatt

SEQ ID NO: 31070 - RNA, 19 nt, synthetic construct
  misc_feature 1..19: note = siRNA sense sequence
  source 1..19: mol_type = other RNA
atcttggctcactgcaacc

SEQ ID NO: 31071 - RNA, 19 nt, synthetic construct
  misc_feature 1..19: note = siRNA antisense sequence
  source 1..19: mol_type = other RNA
ggttgcagtgagccaagat

SEQ ID NO: 31072 - RNA, 19 nt, synthetic construct
  misc_feature 1..19: note = siRNA sense sequence
  source 1..19: mol_type = other RNA
tcttggctcactgcaacct

SEQ ID NO: 31073 - RNA, 19 nt, synthetic construct
  misc_feature 1..19: note = siRNA antisense sequence
  source 1..19: mol_type = other RNA
aggttgcagtgagccaaga

SEQ ID NO: 31074 - RNA, 19 nt, synthetic construct
  misc_feature 1..19: note = siRNA sense sequence
  source 1..19: mol_type = other RNA
acctctgcctcctgggttc

SEQ ID NO: 31075 - RNA, 19 nt, synthetic construct
  misc_feature 1..19: note = siRNA antisense sequence
  source 1..19: mol_type = other RNA
gaacccaggaggcagaggt

SEQ ID NO: 31076 - RNA, 19 nt, synthetic construct
  misc_feature 1..19: note = siRNA sense sequence
  source 1..19: mol_type = other RNA
cctctgcctcctgggttca

SEQ ID NO: 31077 - RNA, 19 nt, synthetic construct
  misc_feature 1..19: note = siRNA antisense sequence
  source 1..19: mol_type = other RNA
tgaacccaggaggcagagg

SEQ ID NO: 31078 - RNA, 19 nt, synthetic construct
  misc_feature 1..19: note = siRNA sense sequence
  source 1..19: mol_type = other RNA
ctctgcctcctgggttcaa

SEQ ID NO: 31079 - RNA, 19 nt, synthetic construct
  misc_feature 1..19: note = siRNA antisense sequence
  source 1..19: mol_type = other RNA
ttgaacccaggaggcagag

SEQ ID NO: 31080 - RNA, 19 nt, synthetic construct
  misc_feature 1..19: note = siRNA sense sequence
  source 1..19: mol_type = other RNA
tctgcctcctgggttcaag

SEQ ID NO: 31081 - RNA, 19 nt, synthetic construct
  misc_feature 1..19: note = siRNA antisense sequence
  source 1..19: mol_type = other RNA
cttgaacccaggaggcaga

SEQ ID NO: 31082 - RNA, 19 nt, synthetic construct
  misc_feature 1..19: note = siRNA sense sequence
  source 1..19: mol_type = other RNA
ctgcctcctgggttcaagc

SEQ ID NO: 31083 - RNA, 19 nt, synthetic construct
  misc_feature 1..19: note = siRNA antisense sequence
  source 1..19: mol_type = other RNA
gcttgaacccaggaggcag

SEQ ID NO: 31084 - RNA, 19 nt, synthetic construct
  misc_feature 1..19: note = siRNA sense sequence
  source 1..19: mol_type = other RNA
tgcctcctgggttcaagcg

SEQ ID NO: 31085 - RNA, 19 nt, synthetic construct
  misc_feature 1..19: note = siRNA antisense sequence
  source 1..19: mol_type = other RNA
cgcttgaacccaggaggca

SEQ ID NO: 31086 - RNA, 19 nt, synthetic construct
  misc_feature 1..19: note = siRNA sense sequence
  source 1..19: mol_type = other RNA
gcctcctgggttcaagcga

SEQ ID NO: 31087 - RNA, 19 nt, synthetic construct
  misc_feature 1..19: note = siRNA antisense sequence
  source 1..19: mol_type = other RNA
tcgcttgaacccaggaggc

SEQ ID NO: 31088 - RNA, 19 nt, synthetic construct
  misc_feature 1..19: note = siRNA sense sequence
  source 1..19: mol_type = other RNA
cctcctgggttcaagcgat

SEQ ID NO: 31089 - RNA, 19 nt, synthetic construct
  misc_feature 1..19: note = siRNA antisense sequence
  source 1..19: mol_type = other RNA
atcgcttgaacccaggagg

SEQ ID NO: 31090 - RNA, 19 nt, synthetic construct
  misc_feature 1..19: note = siRNA sense sequence
  source 1..19: mol_type = other RNA
ctcctgggttcaagcgatt

SEQ ID NO: 31091 - RNA, 19 nt, synthetic construct
  misc_feature 1..19: note = siRNA antisense sequence
  source 1..19: mol_type = other RNA
aatcgcttgaacccaggag

SEQ ID NO: 31092 - RNA, 19 nt, synthetic construct
  misc_feature 1..19: note = siRNA sense sequence
  source 1..19: mol_type = other RNA
tcctgggttcaagcgattc

SEQ ID NO: 31093 - RNA, 19 nt, synthetic construct
  misc_feature 1..19: note = siRNA antisense sequence
  source 1..19: mol_type = other RNA
gaatcgcttgaacccagga

SEQ ID NO: 31094 - RNA, 19 nt, synthetic construct
  misc_feature 1..19: note = siRNA sense sequence
  source 1..19: mol_type = other RNA
cctgggttcaagcgattct

SEQ ID NO: 31095 - RNA, 19 nt, synthetic construct
  misc_feature 1..19: note = siRNA antisense sequence
  source 1..19: mol_type = other RNA
agaatcgcttgaacccagg

SEQ ID NO: 31096 - RNA, 19 nt, synthetic construct
  misc_feature 1..19: note = siRNA sense sequence
  source 1..19: mol_type = other RNA
ctgggttcaagcgattctc

SEQ ID NO: 31097 - RNA, 19 nt, synthetic construct
  misc_feature 1..19: note = siRNA antisense sequence
  source 1..19: mol_type = other RNA
gagaatcgcttgaacccag

SEQ ID NO: 31098 - RNA, 19 nt, synthetic construct
  misc_feature 1..19: note = siRNA sense sequence
  source 1..19: mol_type = other RNA
tgggttcaagcgattctca

SEQ ID NO: 31099 - RNA, 19 nt, synthetic construct
  misc_feature 1..19: note = siRNA antisense sequence
  source 1..19: mol_type = other RNA
tgagaatcgcttgaaccca

SEQ ID NO: 31100 - RNA, 19 nt, synthetic construct
  misc_feature 1..19: note = siRNA sense sequence
  source 1..19: mol_type = other RNA
gggttcaagcgattctcat

SEQ ID NO: 31101 - RNA, 19 nt, synthetic construct
  misc_feature 1..19: note = siRNA antisense sequence
  source 1..19: mol_type = other RNA
atgagaatcgcttgaaccc

SEQ ID NO: 31102 - RNA, 19 nt, synthetic construct
  misc_feature 1..19: note = siRNA sense sequence
  source 1..19: mol_type = other RNA
ggttcaagcgattctcatg

SEQ ID NO: 31103 - RNA, 19 nt, synthetic construct
  misc_feature 1..19: note = siRNA antisense sequence
  source 1..19: mol_type = other RNA
catgagaatcgcttgaacc

SEQ ID NO: 31104 - RNA, 19 nt, synthetic construct
  misc_feature 1..19: note = siRNA sense sequence
  source 1..19: mol_type = other RNA
gttcaagcgattctcatgc

SEQ ID NO: 31105 - RNA, 19 nt, synthetic construct
  misc_feature 1..19: note = siRNA antisense sequence
  source 1..19: mol_type = other RNA
gcatgagaatcgcttgaac

SEQ ID NO: 31106 - RNA, 19 nt, synthetic construct
  misc_feature 1..19: note = siRNA sense sequence
  source 1..19: mol_type = other RNA
ttcaagcgattctcatgcc

SEQ ID NO: 31107 - RNA, 19 nt, synthetic construct
  misc_feature 1..19: note = siRNA antisense sequence
  source 1..19: mol_type = other RNA
ggcatgagaatcgcttgaa

SEQ ID NO: 31108 - RNA, 19 nt, synthetic construct
  misc_feature 1..19: note = siRNA sense sequence
  source 1..19: mol_type = other RNA
tgcctcagtctcccgagta

SEQ ID NO: 31109 - RNA, 19 nt, synthetic construct
  misc_feature 1..19: note = siRNA antisense sequence
  source 1..19: mol_type = other RNA
tactcgggagactgaggca

SEQ ID NO: 31110 - RNA, 19 nt, synthetic construct
  misc_feature 1..19: note = siRNA sense sequence
  source 1..19: mol_type = other RNA
gcctcagtctcccgagtag

SEQ ID NO: 31111 - RNA, 19 nt, synthetic construct
  misc_feature 1..19: note = siRNA antisense sequence
  source 1..19: mol_type = other RNA
ctactcgggagactgaggc

SEQ ID NO: 31112 - RNA, 19 nt, synthetic construct
  misc_feature 1..19: note = siRNA sense sequence
  source 1..19: mol_type = other RNA
cctcagtctcccgagtagc

SEQ ID NO: 31113 - RNA, 19 nt, synthetic construct
  misc_feature 1..19: note = siRNA antisense sequence
  source 1..19: mol_type = other RNA
gctactcgggagactgagg

SEQ ID NO: 31114 - RNA, 19 nt, synthetic construct
  misc_feature 1..19: note = siRNA sense sequence
  source 1..19: mol_type = other RNA
ctcagtctcccgagtagct

SEQ ID NO: 31115 - RNA, 19 nt, synthetic construct
  misc_feature 1..19: note = siRNA antisense sequence
  source 1..19: mol_type = other RNA
agctactcgggagactgag

SEQ ID NO: 31116 - RNA, 19 nt, synthetic construct
  misc_feature 1..19: note = siRNA sense sequence
  source 1..19: mol_type = other RNA
tcagtctcccgagtagctg

SEQ ID NO: 31117 - RNA, 19 nt, synthetic construct
  misc_feature 1..19: note = siRNA antisense sequence
  source 1..19: mol_type = other RNA
cagctactcgggagactga

SEQ ID NO: 31118 - RNA, 19 nt, synthetic construct
  misc_feature 1..19: note = siRNA sense sequence
  source 1..19: mol_type = other RNA
cagtctcccgagtagctgg

SEQ ID NO: 31119 - RNA, 19 nt, synthetic construct
  misc_feature 1..19: note = siRNA antisense sequence
  source 1..19: mol_type = other RNA
ccagctactcgggagactg

SEQ ID NO: 31120 - RNA, 19 nt, synthetic construct
  misc_feature 1..19: note = siRNA sense sequence
  source 1..19: mol_type = other RNA
agtctcccgagtagctggg

SEQ ID NO: 31121 - RNA, 19 nt, synthetic construct
  misc_feature 1..19: note = siRNA antisense sequence
  source 1..19: mol_type = other RNA
cccagctactcgggagact

SEQ ID NO: 31122 - RNA, 19 nt, synthetic construct
  misc_feature 1..19: note = siRNA sense sequence
  source 1..19: mol_type = other RNA
accaccacacctcggctaa

SEQ ID NO: 31123 - RNA, 19 nt, synthetic construct
  misc_feature 1..19: note = siRNA antisense sequence
  source 1..19: mol_type = other RNA
ttagccgaggtgtggtggt

SEQ ID NO: 31124 - RNA, 19 nt, synthetic construct
  misc_feature 1..19: note = siRNA sense sequence
  source 1..19: mol_type = other RNA
ccaccacacctcggctaat

SEQ ID NO: 31125 - RNA, 19 nt, synthetic construct
  misc_feature 1..19: note = siRNA antisense sequence
  source 1..19: mol_type = other RNA
attagccgaggtgtggtgg

SEQ ID NO: 31126 - RNA, 19 nt, synthetic construct
  misc_feature 1..19: note = siRNA sense sequence
  source 1..19: mol_type = other RNA
caccacacctcggctaatt

SEQ ID NO: 31127 - RNA, 19 nt, synthetic construct
  misc_feature 1..19: note = siRNA antisense sequence
  source 1..19: mol_type = other RNA
aattagccgaggtgtggtg

SEQ ID NO: 31128 - RNA, 19 nt, synthetic construct
  misc_feature 1..19: note = siRNA sense sequence
  source 1..19: mol_type = other RNA
accacacctcggctaattt

SEQ ID NO: 31129 - RNA, 19 nt, synthetic construct
  misc_feature 1..19: note = siRNA antisense sequence
  source 1..19: mol_type = other RNA
aaattagccgaggtgtggt

SEQ ID NO: 31130 - RNA, 19 nt, synthetic construct
  misc_feature 1..19: note = siRNA sense sequence
  source 1..19: mol_type = other RNA
ccacacctcggctaatttt

SEQ ID NO: 31131 - RNA, 19 nt, synthetic construct
  misc_feature 1..19: note = siRNA antisense sequence
  source 1..19: mol_type = other RNA
aaaattagccgaggtgtgg

SEQ ID NO: 31132 - RNA, 19 nt, synthetic construct
  misc_feature 1..19: note = siRNA sense sequence
  source 1..19: mol_type = other RNA
gggtttcaccatgttggcc

SEQ ID NO: 31133 - RNA, 19 nt, synthetic construct
  misc_feature 1..19: note = siRNA antisense sequence
  source 1..19: mol_type = other RNA
ggccaacatggtgaaaccc

SEQ ID NO: 31134 - RNA, 19 nt, synthetic construct
  misc_feature 1..19: note = siRNA sense sequence
  source 1..19: mol_type = other RNA
ggtttcaccatgttggcca

SEQ ID NO: 31135 - RNA, 19 nt, synthetic construct
  misc_feature 1..19: note = siRNA antisense sequence
  source 1..19: mol_type = other RNA
tggccaacatggtgaaacc

SEQ ID NO: 31136 - RNA, 19 nt, synthetic construct
  misc_feature 1..19: note = siRNA sense sequence
  source 1..19: mol_type = other RNA
gtttcaccatgttggccag

SEQ ID NO: 31137 - RNA, 19 nt, synthetic construct
  misc_feature 1..19: note = siRNA antisense sequence
  source 1..19: mol_type = other RNA
ctggccaacatggtgaaac

SEQ ID NO: 31138 - RNA, 19 nt, synthetic construct
  misc_feature 1..19: note = siRNA sense sequence
  source 1..19: mol_type = other RNA
caccatgttggccaggctg

SEQ ID NO: 31139 - RNA, 19 nt, synthetic construct
  misc_feature 1..19: note = siRNA antisense sequence
  source 1..19: mol_type = other RNA
cagcctggccaacatggtg

SEQ ID NO: 31140 - RNA, 19 nt, synthetic construct
  misc_feature 1..19: note = siRNA sense sequence
  source 1..19: mol_type = other RNA
accatgttggccaggctgg

SEQ ID NO: 31141 - RNA, 19 nt, synthetic construct
  misc_feature 1..19: note = siRNA antisense sequence
  source 1..19: mol_type = other RNA
ccagcctggccaacatggt

SEQ ID NO: 31142 - RNA, 19 nt, synthetic construct
  misc_feature 1..19: note = siRNA sense sequence
  source 1..19: mol_type = other RNA
ccatgttggccaggctggt

SEQ ID NO: 31143 - RNA, 19 nt, synthetic construct
  misc_feature 1..19: note = siRNA antisense sequence
  source 1..19: mol_type = other RNA
accagcctggccaacatgg

SEQ ID NO: 31144 - RNA, 19 nt, synthetic construct
  misc_feature 1..19: note = siRNA sense sequence
  source 1..19: mol_type = other RNA
catgttggccaggctggtc

SEQ ID NO: 31145 - RNA, 19 nt, synthetic construct
  misc_feature 1..19: note = siRNA antisense sequence
  source 1..19: mol_type = other RNA
gaccagcctggccaacatg

SEQ ID NO: 31146 - RNA, 19 nt, synthetic construct
  misc_feature 1..19: note = siRNA sense sequence
  source 1..19: mol_type = other RNA
atgttggccaggctggtct

SEQ ID NO: 31147 - RNA, 19 nt, synthetic construct
  misc_feature 1..19: note = siRNA antisense sequence
  source 1..19: mol_type = other RNA
agaccagcctggccaacat

SEQ ID NO: 31148 - RNA, 19 nt, synthetic construct
  misc_feature 1..19: note = siRNA sense sequence
  source 1..19: mol_type = other RNA
tgttggccaggctggtctc

SEQ ID NO: 31149 - RNA, 19 nt, synthetic construct
  misc_feature 1..19: note = siRNA antisense sequence
  source 1..19: mol_type = other RNA
gagaccagcctggccaaca

SEQ ID NO: 31150 - RNA, 19 nt, synthetic construct
  misc_feature 1..19: note = siRNA sense sequence
  source 1..19: mol_type = other RNA
ttggccaggctggtctcga

SEQ ID NO: 31151 - RNA, 19 nt, synthetic construct
  misc_feature 1..19: note = siRNA antisense sequence
  source 1..19: mol_type = other RNA
tcgagaccagcctggccaa

SEQ ID NO: 31152 - RNA, 19 nt, synthetic construct
  misc_feature 1..19: note = siRNA sense sequence
  source 1..19: mol_type = other RNA
tggccaggctggtctcgaa

SEQ ID NO: 31153 - RNA, 19 nt, synthetic construct
  misc_feature 1..19: note = siRNA antisense sequence
  source 1..19: mol_type = other RNA
ttcgagaccagcctggcca

SEQ ID NO: 31154 - RNA, 19 nt, synthetic construct
  misc_feature 1..19: note = siRNA sense sequence
  source 1..19: mol_type = other RNA
aactcctgacctcaagtga

SEQ ID NO: 31155 - RNA, 19 nt, synthetic construct
  misc_feature 1..19: note = siRNA antisense sequence
  source 1..19: mol_type = other RNA
tcacttgaggtcaggagtt

SEQ ID NO: 31156 - RNA, 19 nt, synthetic construct
  misc_feature 1..19: note = siRNA sense sequence
  source 1..19: mol_type = other RNA
cctgacctcaagtgatctg

SEQ ID NO: 31157 - RNA, 19 nt, synthetic construct
  misc_feature 1..19: note = siRNA antisense sequence
  source 1..19: mol_type = other RNA
cagatcacttgaggtcagg

SEQ ID NO: 31158 - RNA, 19 nt, synthetic construct
  misc_feature 1..19: note = siRNA sense sequence
  source 1..19: mol_type = other RNA
ctgacctcaagtgatctgc

SEQ ID NO: 31159 - RNA, 19 nt, synthetic construct
  misc_feature 1..19: note = siRNA antisense sequence
  source 1..19: mol_type = other RNA
gcagatcacttgaggtcag

SEQ ID NO: 31160 - RNA, 19 nt, synthetic construct
  misc_feature 1..19: note = siRNA sense sequence
  source 1..19: mol_type = other RNA
tgacctcaagtgatctgcc

SEQ ID NO: 31161 - RNA, 19 nt, synthetic construct
  misc_feature 1..19: note = siRNA antisense sequence
  source 1..19: mol_type = other RNA
ggcagatcacttgaggtca

SEQ ID NO: 31162 - RNA, 19 nt, synthetic construct
  misc_feature 1..19: note = siRNA sense sequence
  source 1..19: mol_type = other RNA
gacctcaagtgatctgccc

SEQ ID NO: 31163 - RNA, 19 nt, synthetic construct
  misc_feature 1..19: note = siRNA antisense sequence
  source 1..19: mol_type = other RNA
gggcagatcacttgaggtc

SEQ ID NO: 31164 - RNA, 19 nt, synthetic construct
  misc_feature 1..19: note = siRNA sense sequence
  source 1..19: mol_type = other RNA
acctcaagtgatctgccca

SEQ ID NO: 31165 - RNA, 19 nt, synthetic construct
  misc_feature 1..19: note = siRNA antisense sequence
  source 1..19: mol_type = other RNA
tgggcagatcacttgaggt

SEQ ID NO: 31166 - RNA, 19 nt, synthetic construct
  misc_feature 1..19: note = siRNA sense sequence
  source 1..19: mol_type = other RNA
cctcaagtgatctgcccac

SEQ ID NO: 31167 - RNA, 19 nt, synthetic construct
  misc_feature 1..19: note = siRNA antisense sequence
  source 1..19: mol_type = other RNA
gtgggcagatcacttgagg

SEQ ID NO: 31168 - RNA, 19 nt, synthetic construct
  misc_feature 1..19: note = siRNA sense sequence
  source 1..19: mol_type = other RNA
aagtgatctgcccacctca

SEQ ID NO: 31169 - RNA, 19 nt, synthetic construct
  misc_feature 1..19: note = siRNA antisense sequence
  source 1..19: mol_type = other RNA
tgaggtgggcagatcactt

SEQ ID NO: 31170 - RNA, 19 nt, synthetic construct
  misc_feature 1..19: note = siRNA sense sequence
  source 1..19: mol_type = other RNA
agtgatctgcccacctcag

SEQ ID NO: 31171 - RNA, 19 nt, synthetic construct
  misc_feature 1..19: note = siRNA antisense sequence
  source 1..19: mol_type = other RNA
ctgaggtgggcagatcact

SEQ ID NO: 31172 - RNA, 19 nt, synthetic construct
  misc_feature 1..19: note = siRNA sense sequence
  source 1..19: mol_type = other RNA
cctcagcctcccaaagtgc

SEQ ID NO: 31173 - RNA, 19 nt, synthetic construct
  misc_feature 1..19: note = siRNA antisense sequence
  source 1..19: mol_type = other RNA
gcactttgggaggctgagg

SEQ ID NO: 31174 - RNA, 19 nt, synthetic construct
  misc_feature 1..19: note = siRNA sense sequence
  source 1..19: mol_type = other RNA
ctcagcctcccaaagtgct

SEQ ID NO: 31175 - RNA, 19 nt, synthetic construct
  misc_feature 1..19: note = siRNA antisense sequence
  source 1..19: mol_type = other RNA
agcactttgggaggctgag

SEQ ID NO: 31176 - RNA, 19 nt, synthetic construct
  misc_feature 1..19: note = siRNA sense sequence
  source 1..19: mol_type = other RNA
ccaaagtgctgggattaca

SEQ ID NO: 31177 - RNA, 19 nt, synthetic construct
  misc_feature 1..19: note = siRNA antisense sequence
  source 1..19: mol_type = other RNA
tgtaatcccagcactttgg

SEQ ID NO: 31178 - RNA, 19 nt, synthetic construct
  misc_feature 1..19: note = siRNA sense sequence
  source 1..19: mol_type = other RNA
caaagtgctgggattacag

SEQ ID NO: 31179 - RNA, 19 nt, synthetic construct
  misc_feature 1..19: note = siRNA antisense sequence
  source 1..19: mol_type = other RNA
ctgtaatcccagcactttg

SEQ ID NO: 31180 - RNA, 19 nt, synthetic construct
  misc_feature 1..19: note = siRNA sense sequence
  source 1..19: mol_type = other RNA
gtgctgggattacaggagt

SEQ ID NO: 31181 - RNA, 19 nt, synthetic construct
  misc_feature 1..19: note = siRNA antisense sequence
  source 1..19: mol_type = other RNA
actcctgtaatcccagcac

SEQ ID NO: 31182 - RNA, 19 nt, synthetic construct
  misc_feature 1..19: note = siRNA sense sequence
  source 1..19: mol_type = other RNA
tgctgggattacaggagtg

SEQ ID NO: 31183 - RNA, 19 nt, synthetic construct
  misc_feature 1..19: note = siRNA antisense sequence
  source 1..19: mol_type = other RNA
cactcctgtaatcccagca

SEQ ID NO: 31184 - RNA, 19 nt, synthetic construct
  misc_feature 1..19: note = siRNA sense sequence
  source 1..19: mol_type = other RNA
gctgggattacaggagtga

SEQ ID NO: 31185 - RNA, 19 nt, synthetic construct
  misc_feature 1..19: note = siRNA antisense sequence
  source 1..19: mol_type = other RNA
tcactcctgtaatcccagc

SEQ ID NO: 31186 - RNA, 19 nt, synthetic construct
  misc_feature 1..19: note = siRNA sense sequence
  source 1..19: mol_type = other RNA
aactaagtctcaagatacc

SEQ ID NO: 31187 - RNA, 19 nt, synthetic construct
  misc_feature 1..19: note = siRNA antisense sequence
  source 1..19: mol_type = other RNA
ggtatcttgagacttagtt

SEQ ID NO: 31188 - RNA, 19 nt, synthetic construct
  misc_feature 1..19: note = siRNA sense sequence
  source 1..19: mol_type = other RNA
actaagtctcaagatacct

SEQ ID NO: 31189 - RNA, 19 nt, synthetic construct
  misc_feature 1..19: note = siRNA antisense sequence
  source 1..19: mol_type = other RNA
aggtatcttgagacttagt

SEQ ID NO: 31190 - RNA, 19 nt, synthetic construct
  misc_feature 1..19: note = siRNA sense sequence
  source 1..19: mol_type = other RNA
ctaagtctcaagatacctg

SEQ ID NO: 31191 - RNA, 19 nt, synthetic construct
  misc_feature 1..19: note = siRNA antisense sequence
  source 1..19: mol_type = other RNA
caggtatcttgagacttag

SEQ ID NO: 31192 - RNA, 19 nt, synthetic construct
  misc_feature 1..19: note = siRNA sense sequence
  source 1..19: mol_type = other RNA
taagtctcaagatacctgt

SEQ ID NO: 31193 - RNA, 19 nt, synthetic construct
  misc_feature 1..19: note = siRNA antisense sequence
  source 1..19: mol_type = other RNA
acaggtatcttgagactta

SEQ ID NO: 31194 - RNA, 19 nt, synthetic construct
  misc_feature 1..19: note = siRNA sense sequence
  source 1..19: mol_type = other RNA
aagtctcaagatacctgtt

SEQ ID NO: 31195 - RNA, 19 nt, synthetic construct
  misc_feature 1..19: note = siRNA antisense sequence
  source 1..19: mol_type = other RNA
aacaggtatcttgagactt

SEQ ID NO: 31196 - RNA, 19 nt, synthetic construct
  misc_feature 1..19: note = siRNA sense sequence
  source 1..19: mol_type = other RNA
agtctcaagatacctgttt

SEQ ID NO: 31197 - RNA, 19 nt, synthetic construct
  misc_feature 1..19: note = siRNA antisense sequence
  source 1..19: mol_type = other RNA
aaacaggtatcttgagact

SEQ ID NO: 31198 - RNA, 19 nt, synthetic construct
  misc_feature 1..19: note = siRNA sense sequence
  source 1..19: mol_type = other RNA
tcaagatacctgtttctaa

SEQ ID NO: 31199 - RNA, 19 nt, synthetic construct
  misc_feature 1..19: note = siRNA antisense sequence
  source 1..19: mol_type = other RNA
ttagaaacaggtatcttga

SEQ ID NO: 31200 - RNA, 19 nt, synthetic construct
  misc_feature 1..19: note = siRNA sense sequence
  source 1..19: mol_type = other RNA
caagatacctgtttctaat

SEQ ID NO: 31201 - RNA, 19 nt, synthetic construct
  misc_feature 1..19: note = siRNA antisense sequence
  source 1..19: mol_type = other RNA
attagaaacaggtatcttg

SEQ ID NO: 31202 - RNA, 19 nt, synthetic construct
  misc_feature 1..19: note = siRNA sense sequence
  source 1..19: mol_type = other RNA
aagatacctgtttctaatg

SEQ ID NO: 31203 - RNA, 19 nt, synthetic construct
  misc_feature 1..19: note = siRNA antisense sequence
  source 1..19: mol_type = other RNA
cattagaaacaggtatctt

SEQ ID NO: 31204 - RNA, 19 nt, synthetic construct
  misc_feature 1..19: note = siRNA sense sequence
  source 1..19: mol_type = other RNA
agatacctgtttctaatga

SEQ ID NO: 31205 - RNA, 19 nt, synthetic construct
  misc_feature 1..19: note = siRNA antisense sequence
  source 1..19: mol_type = other RNA
tcattagaaacaggtatct

SEQ ID NO: 31206 - RNA, 19 nt, synthetic construct
  misc_feature 1..19: note = siRNA sense sequence
  source 1..19: mol_type = other RNA
gatacctgtttctaatgac

SEQ ID NO: 31207 - RNA, 19 nt, synthetic construct
  misc_feature 1..19: note = siRNA antisense sequence
  source 1..19: mol_type = other RNA
gtcattagaaacaggtatc

SEQ ID NO: 31208 - RNA, 19 nt, synthetic construct
  misc_feature 1..19: note = siRNA sense sequence
  source 1..19: mol_type = other RNA
atacctgtttctaatgact

SEQ ID NO: 31209 - RNA, 19 nt, synthetic construct
  misc_feature 1..19: note = siRNA antisense sequence
  source 1..19: mol_type = other RNA
agtcattagaaacaggtat

SEQ ID NO: 31210 - RNA, 19 nt, synthetic construct
  misc_feature 1..19: note = siRNA sense sequence
  source 1..19: mol_type = other RNA
tacctgtttctaatgactt

SEQ ID NO: 31211 - RNA, 19 nt, synthetic construct
  misc_feature 1..19: note = siRNA antisense sequence
  source 1..19: mol_type = other RNA
aagtcattagaaacaggta

SEQ ID NO: 31212 - RNA, 19 nt, synthetic construct
  misc_feature 1..19: note = siRNA sense sequence
  source 1..19: mol_type = other RNA
acctgtttctaatgacttt

SEQ ID NO: 31213 - RNA, 19 nt, synthetic construct
  misc_feature 1..19: note = siRNA antisense sequence
  source 1..19: mol_type = other RNA
aaagtcattagaaacaggt

SEQ ID NO: 31214 - RNA, 19 nt, synthetic construct
  misc_feature 1..19: note = siRNA sense sequence
  source 1..19: mol_type = other RNA
tgacttttagatagcatag

SEQ ID NO: 31215 - RNA, 19 nt, synthetic construct
  misc_feature 1..19: note = siRNA antisense sequence
  source 1..19: mol_type = other RNA
ctatgctatctaaaagtca

SEQ ID NO: 31216 - RNA, 19 nt, synthetic construct
  misc_feature 1..19: note = siRNA sense sequence
  source 1..19: mol_type = other RNA
gacttttagatagcataga

SEQ ID NO: 31217 - RNA, 19 nt, synthetic construct
  misc_feature 1..19: note = siRNA antisense sequence
  source 1..19: mol_type = other RNA
tctatgctatctaaaagtc

SEQ ID NO: 31218 - RNA, 19 nt, synthetic construct
  misc_feature 1..19: note = siRNA sense sequence
  source 1..19: mol_type = other RNA
acttttagatagcatagac

SEQ ID NO: 31219 - RNA, 19 nt, synthetic construct
  misc_feature 1..19: note = siRNA antisense sequence
  source 1..19: mol_type = other RNA
gtctatgctatctaaaagt

SEQ ID NO: 31220 - RNA, 19 nt, synthetic construct
  misc_feature 1..19: note = siRNA sense sequence
  source 1..19: mol_type = other RNA
cttttagatagcatagacc

SEQ ID NO: 31221 - RNA, 19 nt, synthetic construct
  misc_feature 1..19: note = siRNA antisense sequence
  source 1..19: mol_type = other RNA
ggtctatgctatctaaaag

SEQ ID NO: 31222 - RNA, 19 nt, synthetic construct
  misc_feature 1..19: note = siRNA sense sequence
  source 1..19: mol_type = other RNA
ttttagatagcatagacct

SEQ ID NO: 31223 - RNA, 19 nt, synthetic construct
  misc_feature 1..19: note = siRNA antisense sequence
  source 1..19: mol_type = other RNA
aggtctatgctatctaaaa

SEQ ID NO: 31224 - RNA, 19 nt, synthetic construct
  misc_feature 1..19: note = siRNA sense sequence
  source 1..19: mol_type = other RNA
tttagatagcatagacctc

SEQ ID NO: 31225 - RNA, 19 nt, synthetic construct
  misc_feature 1..19: note = siRNA antisense sequence
  source 1..19: mol_type = other RNA
gaggtctatgctatctaaa

SEQ ID NO: 31226 - RNA, 19 nt, synthetic construct
  misc_feature 1..19: note = siRNA sense sequence
  source 1..19: mol_type = other RNA
ttagatagcatagacctct

SEQ ID NO: 31227 - RNA, 19 nt, synthetic construct
  misc_feature 1..19: note = siRNA antisense sequence
  source 1..19: mol_type = other RNA
agaggtctatgctatctaa

SEQ ID NO: 31228 - RNA, 19 nt, synthetic construct
  misc_feature 1..19: note = siRNA sense sequence
  source 1..19: mol_type = other RNA
tagatagcatagacctctt

SEQ ID NO: 31229 - RNA, 19 nt, synthetic construct
  misc_feature 1..19: note = siRNA antisense sequence
  source 1..19: mol_type = other RNA
aagaggtctatgctatcta

SEQ ID NO: 31230 - RNA, 19 nt, synthetic construct
  misc_feature 1..19: note = siRNA sense sequence
  source 1..19: mol_type = other RNA
agatagcatagacctcttt

SEQ ID NO: 31231 - RNA, 19 nt, synthetic construct
  misc_feature 1..19: note = siRNA antisense sequence
  source 1..19: mol_type = other RNA
aaagaggtctatgctatct

SEQ ID NO: 31232 - RNA, 19 nt, synthetic construct
  misc_feature 1..19: note = siRNA sense sequence
  source 1..19: mol_type = other RNA
gatagcatagacctcttta

SEQ ID NO: 31233 - RNA, 19 nt, synthetic construct
  misc_feature 1..19: note = siRNA antisense sequence
  source 1..19: mol_type = other RNA
taaagaggtctatgctatc

SEQ ID NO: 31234 - RNA, 19 nt, synthetic construct
  misc_feature 1..19: note = siRNA sense sequence
  source 1..19: mol_type = other RNA
gcatagacctctttattga

SEQ ID NO: 31235 - RNA, 19 nt, synthetic construct
  misc_feature 1..19: note = siRNA antisense sequence
  source 1..19: mol_type = other RNA
tcaataaagaggtctatgc

SEQ ID NO: 31236 - RNA, 19 nt, synthetic construct
  misc_feature 1..19: note = siRNA sense sequence
  source 1..19: mol_type = other RNA
catagacctctttattgat

SEQ ID NO: 31237 - RNA, 19 nt, synthetic construct
  misc_feature 1..19: note = siRNA antisense sequence
  source 1..19: mol_type = other RNA
atcaataaagaggtctatg

SEQ ID NO: 31238 - RNA, 19 nt, synthetic construct
  misc_feature 1..19: note = siRNA sense sequence
  source 1..19: mol_type = other RNA
taggattcataaaattggc

SEQ ID NO: 31239 - RNA, 19 nt, synthetic construct
  misc_feature 1..19: note = siRNA antisense sequence
  source 1..19: mol_type = other RNA
gccaattttatgaatccta

SEQ ID NO: 31240 - RNA, 19 nt, synthetic construct
  misc_feature 1..19: note = siRNA sense sequence
  source 1..19: mol_type = other RNA
aggattcataaaattggca

SEQ ID NO: 31241 - RNA, 19 nt, synthetic construct
  misc_feature 1..19: note = siRNA antisense sequence
  source 1..19: mol_type = other RNA
tgccaattttatgaatcct

SEQ ID NO: 31242 - RNA, 19 nt, synthetic construct
  misc_feature 1..19: note = siRNA sense sequence
  source 1..19: mol_type = other RNA
ggattcataaaattggcat

SEQ ID NO: 31243 - RNA, 19 nt, synthetic construct
  misc_feature 1..19: note = siRNA antisense sequence
  source 1..19: mol_type = other RNA
atgccaattttatgaatcc

SEQ ID NO: 31244 - RNA, 19 nt, synthetic construct
  misc_feature 1..19: note = siRNA sense sequence
  source 1..19: mol_type = other RNA
tcataaaattggcatcaca

SEQ ID NO: 31245 - RNA, 19 nt, synthetic construct
  misc_feature 1..19: note = siRNA antisense sequence
  source 1..19: mol_type = other RNA
tgtgatgccaattttatga

SEQ ID NO: 31246 - RNA, 19 nt, synthetic construct
  misc_feature 1..19: note = siRNA sense sequence
  source 1..19: mol_type = other RNA
acagtaatcacttatggct

SEQ ID NO: 31247 - RNA, 19 nt, synthetic construct
  misc_feature 1..19: note = siRNA antisense sequence
  source 1..19: mol_type = other RNA
agccataagtgattactgt

SEQ ID NO: 31248 - RNA, 19 nt, synthetic construct
  misc_feature 1..19: note = siRNA sense sequence
  source 1..19: mol_type = other RNA
cagtaatcacttatggctc

SEQ ID NO: 31249 - RNA, 19 nt, synthetic construct
  misc_feature 1..19: note = siRNA antisense sequence
  source 1..19: mol_type = other RNA
gagccataagtgattactg

SEQ ID NO: 31250 - RNA, 19 nt, synthetic construct
  misc_feature 1..19: note = siRNA sense sequence
  source 1..19: mol_type = other RNA
tcccttaaagaccttctac

SEQ ID NO: 31251 - RNA, 19 nt, synthetic construct
  misc_feature 1..19: note = siRNA antisense sequence
  source 1..19: mol_type = other RNA
gtagaaggtctttaaggga

SEQ ID NO: 31252 - RNA, 19 nt, synthetic construct
  misc_feature 1..19: note = siRNA sense sequence
  source 1..19: mol_type = other RNA
tacctttcctttcacatgg

SEQ ID NO: 31253 - RNA, 19 nt, synthetic construct
  misc_feature 1..19: note = siRNA antisense sequence
  source 1..19: mol_type = other RNA
ccatgtgaaaggaaaggta

SEQ ID NO: 31254 - RNA, 19 nt, synthetic construct
  misc_feature 1..19: note = siRNA sense sequence
  source 1..19: mol_type = other RNA
acctttcctttcacatggg

SEQ ID NO: 31255 - RNA, 19 nt, synthetic construct
  misc_feature 1..19: note = siRNA antisense sequence
  source 1..19: mol_type = other RNA
cccatgtgaaaggaaaggt

SEQ ID NO: 31256 - RNA, 19 nt, synthetic construct
  misc_feature 1..19: note = siRNA sense sequence
  source 1..19: mol_type = other RNA
cctttcctttcacatggga

SEQ ID NO: 31257 - RNA, 19 nt, synthetic construct
  misc_feature 1..19: note = siRNA antisense sequence
  source 1..19: mol_type = other RNA
tcccatgtgaaaggaaagg

SEQ ID NO: 31258 - RNA, 19 nt, synthetic construct
  misc_feature 1..19: note = siRNA sense sequence
  source 1..19: mol_type = other RNA
ctttcctttcacatgggac

SEQ ID NO: 31259 - RNA, 19 nt, synthetic construct
  misc_feature 1..19: note = siRNA antisense sequence
  source 1..19: mol_type = other RNA
gtcccatgtgaaaggaaag

SEQ ID NO: 31260 - RNA, 19 nt, synthetic construct
  misc_feature 1..19: note = siRNA sense sequence
  source 1..19: mol_type = other RNA
tttcctttcacatgggact

SEQ ID NO: 31261 - RNA, 19 nt, synthetic construct
  misc_feature 1..19: note = siRNA antisense sequence
  source 1..19: mol_type = other RNA
agtcccatgtgaaaggaaa

SEQ ID NO: 31262 - RNA, 19 nt, synthetic construct
  misc_feature 1..19: note = siRNA sense sequence
  source 1..19: mol_type = other RNA
ttcctttcacatgggactt

SEQ ID NO: 31263 - RNA, 19 nt, synthetic construct
  misc_feature 1..19: note = siRNA antisense sequence
  source 1..19: mol_type = other RNA
aagtcccatgtgaaaggaa

SEQ ID NO: 31264 - RNA, 19 nt, synthetic construct
  misc_feature 1..19: note = siRNA sense sequence
  source 1..19: mol_type = other RNA
tcctttcacatgggacttt

SEQ ID NO: 31265 - RNA, 19 nt, synthetic construct
  misc_feature 1..19: note = siRNA antisense sequence
  source 1..19: mol_type = other RNA
aaagtcccatgtgaaagga

SEQ ID NO: 31266 - RNA, 19 nt, synthetic construct
  misc_feature 1..19: note = siRNA sense sequence
  source 1..19: mol_type = other RNA
cctttcacatgggactttt

SEQ ID NO: 31267 - RNA, 19 nt, synthetic construct
  misc_feature 1..19: note = siRNA antisense sequence
  source 1..19: mol_type = other RNA
aaaagtcccatgtgaaagg

SEQ ID NO: 31268 - RNA, 19 nt, synthetic construct
  misc_feature 1..19: note = siRNA sense sequence
  source 1..19: mol_type = other RNA
ctttcacatgggactttta

SEQ ID NO: 31269 - RNA, 19 nt, synthetic construct
  misc_feature 1..19: note = siRNA antisense sequence
  source 1..19: mol_type = other RNA
taaaagtcccatgtgaaag

SEQ ID NO: 31270 - RNA, 19 nt, synthetic construct
  misc_feature 1..19: note = siRNA sense sequence
  source 1..19: mol_type = other RNA
ttcacatgggacttttatt

SEQ ID NO: 31271 - RNA, 19 nt, synthetic construct
  misc_feature 1..19: note = siRNA antisense sequence
  source 1..19: mol_type = other RNA
aataaaagtcccatgtgaa

SEQ ID NO: 31272 - RNA, 19 nt, synthetic construct
  misc_feature 1..19: note = siRNA sense sequence
  source 1..19: mol_type = other RNA
tcacatgggacttttatta

SEQ ID NO: 31273 - RNA, 19 nt, synthetic construct
  misc_feature 1..19: note = siRNA antisense sequence
  source 1..19: mol_type = other RNA
taataaaagtcccatgtga

SEQ ID NO: 31274 - RNA, 19 nt, synthetic construct
  misc_feature 1..19: note = siRNA sense sequence
  source 1..19: mol_type = other RNA
cacatgggacttttattaa

SEQ ID NO: 31275 - RNA, 19 nt, synthetic construct
  misc_feature 1..19: note = siRNA antisense sequence
  source 1..19: mol_type = other RNA
ttaataaaagtcccatgtg

SEQ ID NO: 31276 - RNA, 19 nt, synthetic construct
  misc_feature 1..19: note = siRNA sense sequence
  source 1..19: mol_type = other RNA
catgggacttttattaatg

SEQ ID NO: 31277 - RNA, 19 nt, synthetic construct
  misc_feature 1..19: note = siRNA antisense sequence
  source 1..19: mol_type = other RNA
cattaataaaagtcccatg

SEQ ID NO: 31278 - RNA, 19 nt, synthetic construct
  misc_feature 1..19: note = siRNA sense sequence
  source 1..19: mol_type = other RNA
ttgttatcaactgcagagt

SEQ ID NO: 31279 - RNA, 19 nt, synthetic construct
  misc_feature 1..19: note = siRNA antisense sequence
  source 1..19: mol_type = other RNA
actctgcagttgataacaa

SEQ ID NO: 31280 - RNA, 19 nt, synthetic construct
  misc_feature 1..19: note = siRNA sense sequence
  source 1..19: mol_type = other RNA
tgttatcaactgcagagta

SEQ ID NO: 31281 - RNA, 19 nt, synthetic construct
  misc_feature 1..19: note = siRNA antisense sequence
  source 1..19: mol_type = other RNA
tactctgcagttgataaca

SEQ ID NO: 31282 - RNA, 19 nt, synthetic construct
  misc_feature 1..19: note = siRNA sense sequence
  source 1..19: mol_type = other RNA
gttatcaactgcagagtag

SEQ ID NO: 31283 - RNA, 19 nt, synthetic construct
  misc_feature 1..19: note = siRNA antisense sequence
  source 1..19: mol_type = other RNA
ctactctgcagttgataac

SEQ ID NO: 31284 - RNA, 19 nt, synthetic construct
  misc_feature 1..19: note = siRNA sense sequence
  source 1..19: mol_type = other RNA
ttatcaactgcagagtagg

SEQ ID NO: 31285 - RNA, 19 nt, synthetic construct
  misc_feature 1..19: note = siRNA antisense sequence
  source 1..19: mol_type = other RNA
cctactctgcagttgataa

SEQ ID NO: 31286 - RNA, 19 nt, synthetic construct
  misc_feature 1..19: note = siRNA sense sequence
  source 1..19: mol_type = other RNA
tatcaactgcagagtaggc

SEQ ID NO: 31287 - RNA, 19 nt, synthetic construct
  misc_feature 1..19: note = siRNA antisense sequence
  source 1..19: mol_type = other RNA
gcctactctgcagttgata

SEQ ID NO: 31288 - RNA, 19 nt, synthetic construct
  misc_feature 1..19: note = siRNA sense sequence
  source 1..19: mol_type = other RNA
atcaactgcagagtaggcc

SEQ ID NO: 31289 - RNA, 19 nt, synthetic construct
  misc_feature 1..19: note = siRNA antisense sequence
  source 1..19: mol_type = other RNA
ggcctactctgcagttgat

SEQ ID NO: 31290 - RNA, 19 nt, synthetic construct
  misc_feature 1..19: note = siRNA sense sequence
  source 1..19: mol_type = other RNA
tcaactgcagagtaggccc

SEQ ID NO: 31291 - RNA, 19 nt, synthetic construct
  misc_feature 1..19: note = siRNA antisense sequence
  source 1..19: mol_type = other RNA
gggcctactctgcagttga

SEQ ID NO: 31292 - RNA, 19 nt, synthetic construct
  misc_feature 1..19: note = siRNA sense sequence
  source 1..19: mol_type = other RNA
caactgcagagtaggccca

SEQ ID NO: 31293 - RNA, 19 nt, synthetic construct
  misc_feature 1..19: note = siRNA antisense sequence
  source 1..19: mol_type = other RNA
tgggcctactctgcagttg

SEQ ID NO: 31294 - RNA, 19 nt, synthetic construct
  misc_feature 1..19: note = siRNA sense sequence
  source 1..19: mol_type = other RNA
aactgcagagtaggcccag

SEQ ID NO: 31295 - RNA, 19 nt, synthetic construct
  misc_feature 1..19: note = siRNA antisense sequence
  source 1..19: mol_type = other RNA
ctgggcctactctgcagtt

SEQ ID NO: 31296 - RNA, 19 nt, synthetic construct
  misc_feature 1..19: note = siRNA sense sequence
  source 1..19: mol_type = other RNA
ctgcagagtaggcccagtc

SEQ ID NO: 31297 - RNA, 19 nt, synthetic construct
  misc_feature 1..19: note = siRNA antisense sequence
  source 1..19: mol_type = other RNA
gactgggcctactctgcag

SEQ ID NO: 31298 - RNA, 19 nt, synthetic construct
  misc_feature 1..19: note = siRNA sense sequence
  source 1..19: mol_type = other RNA
aggcccagtctttctcttt

SEQ ID NO: 31299 - RNA, 19 nt, synthetic construct
  misc_feature 1..19: note = siRNA antisense sequence
  source 1..19: mol_type = other RNA
aaagagaaagactgggcct

SEQ ID NO: 31300 - RNA, 19 nt, synthetic construct
  misc_feature 1..19: note = siRNA sense sequence
  source 1..19: mol_type = other RNA
ggcccagtctttctctttt

SEQ ID NO: 31301 - RNA, 19 nt, synthetic construct
  misc_feature 1..19: note = siRNA antisense sequence
  source 1..19: mol_type = other RNA
aaaagagaaagactgggcc

SEQ ID NO: 31302 - RNA, 19 nt, synthetic construct
  misc_feature 1..19: note = siRNA sense sequence
  source 1..19: mol_type = other RNA
gcccagtctttctctttta

SEQ ID NO: 31303 - RNA, 19 nt, synthetic construct
  misc_feature 1..19: note = siRNA antisense sequence
  source 1..19: mol_type = other RNA
taaaagagaaagactgggc

SEQ ID NO: 31304 - RNA, 19 nt, synthetic construct
  misc_feature 1..19: note = siRNA sense sequence
  source 1..19: mol_type = other RNA
cccagtctttctcttttac

SEQ ID NO: 31305 - RNA, 19 nt, synthetic construct
  misc_feature 1..19: note = siRNA antisense sequence
  source 1..19: mol_type = other RNA
gtaaaagagaaagactggg

SEQ ID NO: 31306 - RNA, 19 nt, synthetic construct
  misc_feature 1..19: note = siRNA sense sequence
  source 1..19: mol_type = other RNA
ccagtctttctcttttact

SEQ ID NO: 31307 - RNA, 19 nt, synthetic construct
  misc_feature 1..19: note = siRNA antisense sequence
  source 1..19: mol_type = other RNA
agtaaaagagaaagactgg

SEQ ID NO: 31308 - RNA, 19 nt, synthetic construct
  misc_feature 1..19: note = siRNA sense sequence
  source 1..19: mol_type = other RNA
cagtctttctcttttactc

SEQ ID NO: 31309 - RNA, 19 nt, synthetic construct
  misc_feature 1..19: note = siRNA antisense sequence
  source 1..19: mol_type = other RNA
gagtaaaagagaaagactg

SEQ ID NO: 31310 - RNA, 19 nt, synthetic construct
  misc_feature 1..19: note = siRNA sense sequence
  source 1..19: mol_type = other RNA
agtctttctcttttactct

SEQ ID NO: 31311 - RNA, 19 nt, synthetic construct
  misc_feature 1..19: note = siRNA antisense sequence
  source 1..19: mol_type = other RNA
agagtaaaagagaaagact

SEQ ID NO: 31312 - RNA, 19 nt, synthetic construct
  misc_feature 1..19: note = siRNA sense sequence
  source 1..19: mol_type = other RNA
gtctttctcttttactctc

SEQ ID NO: 31313 - RNA, 19 nt, synthetic construct
  misc_feature 1..19: note = siRNA antisense sequence
  source 1..19: mol_type = other RNA
gagagtaaaagagaaagac

SEQ ID NO: 31314 - RNA, 19 nt, synthetic construct
  misc_feature 1..19: note = siRNA sense sequence
  source 1..19: mol_type = other RNA
tctcttttactctctgtcc

SEQ ID NO: 31315 - RNA, 19 nt, synthetic construct
  misc_feature 1..19: note = siRNA antisense sequence
  source 1..19: mol_type = other RNA
ggacagagagtaaaagaga

SEQ ID NO: 31316 - RNA, 19 nt, synthetic construct
  misc_feature 1..19: note = siRNA sense sequence
  source 1..19: mol_type = other RNA
ctcttttactctctgtcct

SEQ ID NO: 31317 - RNA, 19 nt, synthetic construct
  misc_feature 1..19: note = siRNA antisense sequence
  source 1..19: mol_type = other RNA
aggacagagagtaaaagag

SEQ ID NO: 31318 - RNA, 19 nt, synthetic construct
  misc_feature 1..19: note = siRNA sense sequence
  source 1..19: mol_type = other RNA
tttactctctgtcctttta

SEQ ID NO: 31319 - RNA, 19 nt, synthetic construct
  misc_feature 1..19: note = siRNA antisense sequence
  source 1..19: mol_type = other RNA
taaaaggacagagagtaaa

SEQ ID NO: 31320 - RNA, 19 nt, synthetic construct
  misc_feature 1..19: note = siRNA sense sequence
  source 1..19: mol_type = other RNA
ttactctctgtccttttaa

SEQ ID NO: 31321 - RNA, 19 nt, synthetic construct
  misc_feature 1..19: note = siRNA antisense sequence
  source 1..19: mol_type = other RNA
ttaaaaggacagagagtaa

SEQ ID NO: 31322 - RNA, 19 nt, synthetic construct
  misc_feature 1..19: note = siRNA sense sequence
  source 1..19: mol_type = other RNA
tactctctgtccttttaag

SEQ ID NO: 31323 - RNA, 19 nt, synthetic construct
  misc_feature 1..19: note = siRNA antisense sequence
  source 1..19: mol_type = other RNA
cttaaaaggacagagagta

SEQ ID NO: 31324 - RNA, 19 nt, synthetic construct
  misc_feature 1..19: note = siRNA sense sequence
  source 1..19: mol_type = other RNA
actctctgtccttttaaga

SEQ ID NO: 31325 - RNA, 19 nt, synthetic construct
  misc_feature 1..19: note = siRNA antisense sequence
  source 1..19: mol_type = other RNA
tcttaaaaggacagagagt

SEQ ID NO: 31326 - RNA, 19 nt, synthetic construct
  misc_feature 1..19: note = siRNA sense sequence
  source 1..19: mol_type = other RNA
aatgagtcatgtctttgta

SEQ ID NO: 31327 - RNA, 19 nt, synthetic construct
  misc_feature 1..19: note = siRNA antisense sequence
  source 1..19: mol_type = other RNA
tacaaagacatgactcatt

SEQ ID NO: 31328 - RNA, 19 nt, synthetic construct
  misc_feature 1..19: note = siRNA sense sequence
  source 1..19: mol_type = other RNA
atgagtcatgtctttgtag

SEQ ID NO: 31329 - RNA, 19 nt, synthetic construct
  misc_feature 1..19: note = siRNA antisense sequence
  source 1..19: mol_type = other RNA
ctacaaagacatgactcat

SEQ ID NO: 31330 - RNA, 19 nt, synthetic construct
  misc_feature 1..19: note = siRNA sense sequence
  source 1..19: mol_type = other RNA
atgtctttgtagccatcta

SEQ ID NO: 31331 - RNA, 19 nt, synthetic construct
  misc_feature 1..19: note = siRNA antisense sequence
  source 1..19: mol_type = other RNA
tagatggctacaaagacat

SEQ ID NO: 31332 - RNA, 19 nt, synthetic construct
  misc_feature 1..19: note = siRNA sense sequence
  source 1..19: mol_type = other RNA
gtctttgtagccatctaga

SEQ ID NO: 31333 - RNA, 19 nt, synthetic construct
  misc_feature 1..19: note = siRNA antisense sequence
  source 1..19: mol_type = other RNA
tctagatggctacaaagac

SEQ ID NO: 31334 - RNA, 19 nt, synthetic construct
  misc_feature 1..19: note = siRNA sense sequence
  source 1..19: mol_type = other RNA
tgtagccatctagatttct

SEQ ID NO: 31335 - RNA, 19 nt, synthetic construct
  misc_feature 1..19: note = siRNA antisense sequence
  source 1..19: mol_type = other RNA
agaaatctagatggctaca

SEQ ID NO: 31336 - RNA, 19 nt, synthetic construct
  misc_feature 1..19: note = siRNA sense sequence
  source 1..19: mol_type = other RNA
gtagccatctagatttctt

SEQ ID NO: 31337 - RNA, 19 nt, synthetic construct
  misc_feature 1..19: note = siRNA antisense sequence
  source 1..19: mol_type = other RNA
aagaaatctagatggctac

SEQ ID NO: 31338 - RNA, 19 nt, synthetic construct
  misc_feature 1..19: note = siRNA sense sequence
  source 1..19: mol_type = other RNA
tagccatctagatttctta

SEQ ID NO: 31339 - RNA, 19 nt, synthetic construct
  misc_feature 1..19: note = siRNA antisense sequence
  source 1..19: mol_type = other RNA
taagaaatctagatggcta

SEQ ID NO: 31340 - RNA, 19 nt, synthetic construct
  misc_feature 1..19: note = siRNA sense sequence
  source 1..19: mol_type = other RNA
agccatctagatttcttag

SEQ ID NO: 31341 - RNA, 19 nt, synthetic construct
  misc_feature 1..19: note = siRNA antisense sequence
  source 1..19: mol_type = other RNA
ctaagaaatctagatggct

SEQ ID NO: 31342 - RNA, 19 nt, synthetic construct
  misc_feature 1..19: note = siRNA sense sequence
  source 1..19: mol_type = other RNA
gccatctagatttcttagc

SEQ ID NO: 31343 - RNA, 19 nt, synthetic construct
  misc_feature 1..19: note = siRNA antisense sequence
  source 1..19: mol_type = other RNA
gctaagaaatctagatggc

SEQ ID NO: 31344 - RNA, 19 nt, synthetic construct
  misc_feature 1..19: note = siRNA sense sequence
  source 1..19: mol_type = other RNA
ccatctagatttcttagct

SEQ ID NO: 31345 - RNA, 19 nt, synthetic construct
  misc_feature 1..19: note = siRNA antisense sequence
  source 1..19: mol_type = other RNA
agctaagaaatctagatgg

SEQ ID NO: 31346 - RNA, 19 nt, synthetic construct
  misc_feature 1..19: note = siRNA sense sequence
  source 1..19: mol_type = other RNA
catctagatttcttagctc

SEQ ID NO: 31347 - RNA, 19 nt, synthetic construct
  misc_feature 1..19: note = siRNA antisense sequence
  source 1..19: mol_type = other RNA
gagctaagaaatctagatg

SEQ ID NO: 31348 - RNA, 19 nt, synthetic construct
  misc_feature 1..19: note = siRNA sense sequence
  source 1..19: mol_type = other RNA
atctagatttcttagctct

SEQ ID NO: 31349 - RNA, 19 nt, synthetic construct
  misc_feature 1..19: note = siRNA antisense sequence
  source 1..19: mol_type = other RNA
agagctaagaaatctagat

SEQ ID NO: 31350 - RNA, 19 nt, synthetic construct
  misc_feature 1..19: note = siRNA sense sequence
  source 1..19: mol_type = other RNA
tctagatttcttagctctg

SEQ ID NO: 31351 - RNA, 19 nt, synthetic construct
  misc_feature 1..19: note = siRNA antisense sequence
  source 1..19: mol_type = other RNA
cagagctaagaaatctaga

SEQ ID NO: 31352 - RNA, 19 nt, synthetic construct
  misc_feature 1..19: note = siRNA sense sequence
  source 1..19: mol_type = other RNA
tagatttcttagctctgtt

SEQ ID NO: 31353 - RNA, 19 nt, synthetic construct
  misc_feature 1..19: note = siRNA antisense sequence
  source 1..19: mol_type = other RNA
aacagagctaagaaatcta

SEQ ID NO: 31354 - RNA, 19 nt, synthetic construct
  misc_feature 1..19: note = siRNA sense sequence
  source 1..19: mol_type = other RNA
agatttcttagctctgttg

SEQ ID NO: 31355 - RNA, 19 nt, synthetic construct
  misc_feature 1..19: note = siRNA antisense sequence
  source 1..19: mol_type = other RNA
caacagagctaagaaatct

SEQ ID NO: 31356 - RNA, 19 nt, synthetic construct
  misc_feature 1..19: note = siRNA sense sequence
  source 1..19: mol_type = other RNA
gatttcttagctctgttgc

SEQ ID NO: 31357 - RNA, 19 nt, synthetic construct
  misc_feature 1..19: note = siRNA antisense sequence
  source 1..19: mol_type = other RNA
gcaacagagctaagaaatc

SEQ ID NO: 31358 - RNA, 19 nt, synthetic construct
  misc_feature 1..19: note = siRNA sense sequence
  source 1..19: mol_type = other RNA
atttcttagctctgttgcc

SEQ ID NO: 31359 - RNA, 19 nt, synthetic construct
  misc_feature 1..19: note = siRNA antisense sequence
  source 1..19: mol_type = other RNA
ggcaacagagctaagaaat

SEQ ID NO: 31360 - RNA, 19 nt, synthetic construct
  misc_feature 1..19: note = siRNA sense sequence
  source 1..19: mol_type = other RNA
ttagctctgttgcctcatt

SEQ ID NO: 31361 - RNA, 19 nt, synthetic construct
  misc_feature 1..19: note = siRNA antisense sequence
  source 1..19: mol_type = other RNA
aatgaggcaacagagctaa

SEQ ID NO: 31362 - RNA, 19 nt, synthetic construct
  misc_feature 1..19: note = siRNA sense sequence
  source 1..19: mol_type = other RNA
tagctctgttgcctcattc

SEQ ID NO: 31363 - RNA, 19 nt, synthetic construct
  misc_feature 1..19: note = siRNA antisense sequence
  source 1..19: mol_type = other RNA
gaatgaggcaacagagcta

SEQ ID NO: 31364 - RNA, 19 nt, synthetic construct
  misc_feature 1..19: note = siRNA sense sequence
  source 1..19: mol_type = other RNA
agctctgttgcctcattct

SEQ ID NO: 31365 - RNA, 19 nt, synthetic construct
  misc_feature 1..19: note = siRNA antisense sequence
  source 1..19: mol_type = other RNA
agaatgaggcaacagagct

SEQ ID NO: 31366 - RNA, 19 nt, synthetic construct
  misc_feature 1..19: note = siRNA sense sequence
  source 1..19: mol_type = other RNA
gctctgttgcctcattctt

SEQ ID NO: 31367 - RNA, 19 nt, synthetic construct
  misc_feature 1..19: note = siRNA antisense sequence
  source 1..19: mol_type = other RNA
aagaatgaggcaacagagc

SEQ ID NO: 31368 - RNA, 19 nt, synthetic construct
  misc_feature 1..19: note = siRNA sense sequence
  source 1..19: mol_type = other RNA
ctctgttgcctcattcttc

SEQ ID NO: 31369 - RNA, 19 nt, synthetic construct
  misc_feature 1..19: note = siRNA antisense sequence
  source 1..19: mol_type = other RNA
gaagaatgaggcaacagag

SEQ ID NO: 31370 - RNA, 19 nt, synthetic construct
  misc_feature 1..19: note = siRNA sense sequence
  source 1..19: mol_type = other RNA
ctcattactggactaccca

SEQ ID NO: 31371 - RNA, 19 nt, synthetic construct
  misc_feature 1..19: note = siRNA antisense sequence
  source 1..19: mol_type = other RNA
tgggtagtccagtaatgag

SEQ ID NO: 31372 - RNA, 19 nt, synthetic construct
  misc_feature 1..19: note = siRNA sense sequence
  source 1..19: mol_type = other RNA
tcattactggactacccaa

SEQ ID NO: 31373 - RNA, 19 nt, synthetic construct
  misc_feature 1..19: note = siRNA antisense sequence
  source 1..19: mol_type = other RNA
ttgggtagtccagtaatga

SEQ ID NO: 31374 - RNA, 19 nt, synthetic construct
  misc_feature 1..19: note = siRNA sense sequence
  source 1..19: mol_type = other RNA
cattactggactacccaat

SEQ ID NO: 31375 - RNA, 19 nt, synthetic construct
  misc_feature 1..19: note = siRNA antisense sequence
  source 1..19: mol_type = other RNA
attgggtagtccagtaatg

SEQ ID NO: 31376 - RNA, 19 nt, synthetic construct
  misc_feature 1..19: note = siRNA sense sequence
  source 1..19: mol_type = other RNA
attactggactacccaatc

SEQ ID NO: 31377 - RNA, 19 nt, synthetic construct
  misc_feature 1..19: note = siRNA antisense sequence
  source 1..19: mol_type = other RNA
gattgggtagtccagtaat

SEQ ID NO: 31378 - RNA, 19 nt, synthetic construct
  misc_feature 1..19: note = siRNA sense sequence
  source 1..19: mol_type = other RNA
ttactggactacccaatct

SEQ ID NO: 31379 - RNA, 19 nt, synthetic construct
  misc_feature 1..19: note = siRNA antisense sequence
  source 1..19: mol_type = other RNA
agattgggtagtccagtaa

SEQ ID NO: 31380 - RNA, 19 nt, synthetic construct
  misc_feature 1..19: note = siRNA sense sequence
  source 1..19: mol_type = other RNA
tactggactacccaatctc

SEQ ID NO: 31381 - RNA, 19 nt, synthetic construct
  misc_feature 1..19: note = siRNA antisense sequence
  source 1..19: mol_type = other RNA
gagattgggtagtccagta

SEQ ID NO: 31382 - RNA, 19 nt, synthetic construct
  misc_feature 1..19: note = siRNA sense sequence
  source 1..19: mol_type = other RNA
actggactacccaatctca

SEQ ID NO: 31383 - RNA, 19 nt, synthetic construct
  misc_feature 1..19: note = siRNA antisense sequence
  source 1..19: mol_type = other RNA
tgagattgggtagtccagt

SEQ ID NO: 31384 - RNA, 19 nt, synthetic construct
  misc_feature 1..19: note = siRNA sense sequence
  source 1..19: mol_type = other RNA
ctggactacccaatctcag

SEQ ID NO: 31385 - RNA, 19 nt, synthetic construct
  misc_feature 1..19: note = siRNA antisense sequence
  source 1..19: mol_type = other RNA
ctgagattgggtagtccag

SEQ ID NO: 31386 - RNA, 19 nt, synthetic construct
  misc_feature 1..19: note = siRNA sense sequence
  source 1..19: mol_type = other RNA
tggactacccaatctcagt

SEQ ID NO: 31387 - RNA, 19 nt, synthetic construct
  misc_feature 1..19: note = siRNA antisense sequence
  source 1..19: mol_type = other RNA
actgagattgggtagtcca

SEQ ID NO: 31388 - RNA, 19 nt, synthetic construct
  misc_feature 1..19: note = siRNA sense sequence
  source 1..19: mol_type = other RNA
gactacccaatctcagttc

SEQ ID NO: 31389 - RNA, 19 nt, synthetic construct
  misc_feature 1..19: note = siRNA antisense sequence
  source 1..19: mol_type = other RNA
gaactgagattgggtagtc

SEQ ID NO: 31390 - RNA, 19 nt, synthetic construct
  misc_feature 1..19: note = siRNA sense sequence
  source 1..19: mol_type = other RNA
actacccaatctcagttcc

SEQ ID NO: 31391 - RNA, 19 nt, synthetic construct
  misc_feature 1..19: note = siRNA antisense sequence
  source 1..19: mol_type = other RNA
ggaactgagattgggtagt

SEQ ID NO: 31392 - RNA, 19 nt, synthetic construct
  misc_feature 1..19: note = siRNA sense sequence
  source 1..19: mol_type = other RNA
cccaatctcagttcccttc

SEQ ID NO: 31393 - RNA, 19 nt, synthetic construct
  misc_feature 1..19: note = siRNA antisense sequence
  source 1..19: mol_type = other RNA
gaagggaactgagattggg

SEQ ID NO: 31394 - RNA, 19 nt, synthetic construct
  misc_feature 1..19: note = siRNA sense sequence
  source 1..19: mol_type = other RNA
ccaatctcagttcccttct

SEQ ID NO: 31395 - RNA, 19 nt, synthetic construct
  misc_feature 1..19: note = siRNA antisense sequence
  source 1..19: mol_type = other RNA
agaagggaactgagattgg

SEQ ID NO: 31396 - RNA, 19 nt, synthetic construct
  misc_feature 1..19: note = siRNA sense sequence
  source 1..19: mol_type = other RNA
caatctcagttcccttctg

SEQ ID NO: 31397 - RNA, 19 nt, synthetic construct
  misc_feature 1..19: note = siRNA antisense sequence
  source 1..19: mol_type = other RNA
cagaagggaactgagattg

SEQ ID NO: 31398 - RNA, 19 nt, synthetic construct
  misc_feature 1..19: note = siRNA sense sequence
  source 1..19: mol_type = other RNA
aatctcagttcccttctgt

SEQ ID NO: 31399 - RNA, 19 nt, synthetic construct
  misc_feature 1..19: note = siRNA antisense sequence
  source 1..19: mol_type = other RNA
acagaagggaactgagatt

SEQ ID NO: 31400 - RNA, 19 nt, synthetic construct
  misc_feature 1..19: note = siRNA sense sequence
  source 1..19: mol_type = other RNA
atctcagttcccttctgta

SEQ ID NO: 31401 - RNA, 19 nt, synthetic construct
  misc_feature 1..19: note = siRNA antisense sequence
  source 1..19: mol_type = other RNA
tacagaagggaactgagat

SEQ ID NO: 31402 - RNA, 19 nt, synthetic construct
  misc_feature 1..19: note = siRNA sense sequence
  source 1..19: mol_type = other RNA
tctcagttcccttctgtac

SEQ ID NO: 31403 - RNA, 19 nt, synthetic construct
  misc_feature 1..19: note = siRNA antisense sequence
  source 1..19: mol_type = other RNA
gtacagaagggaactgaga

SEQ ID NO: 31404 - RNA, 19 nt, synthetic construct
  misc_feature 1..19: note = siRNA sense sequence
  source 1..19: mol_type = other RNA
ctcagttcccttctgtact

SEQ ID NO: 31405 - RNA, 19 nt, synthetic construct
  misc_feature 1..19: note = siRNA antisense sequence
  source 1..19: mol_type = other RNA
agtacagaagggaactgag

SEQ ID NO: 31406 - RNA, 19 nt, synthetic construct
  misc_feature 1..19: note = siRNA sense sequence
  source 1..19: mol_type = other RNA
cagttcccttctgtacttt

SEQ ID NO: 31407 - RNA, 19 nt, synthetic construct
  misc_feature 1..19: note = siRNA antisense sequence
  source 1..19: mol_type = other RNA
aaagtacagaagggaactg

SEQ ID NO: 31408 - RNA, 19 nt, synthetic construct
  misc_feature 1..19: note = siRNA sense sequence
  source 1..19: mol_type = other RNA
agttcccttctgtacttta

SEQ ID NO: 31409 - RNA, 19 nt, synthetic construct
  misc_feature 1..19: note = siRNA antisense sequence
  source 1..19: mol_type = other RNA
taaagtacagaagggaact

SEQ ID NO: 31410 - RNA, 19 nt, synthetic construct
  misc_feature 1..19: note = siRNA sense sequence
  source 1..19: mol_type = other RNA
gttcccttctgtactttag

SEQ ID NO: 31411 - RNA, 19 nt, synthetic construct
  misc_feature 1..19: note = siRNA antisense sequence
  source 1..19: mol_type = other RNA
ctaaagtacagaagggaac

SEQ ID NO: 31412 - RNA, 19 nt, synthetic construct
  misc_feature 1..19: note = siRNA sense sequence
  source 1..19: mol_type = other RNA
aactctctccttccctcat

SEQ ID NO: 31413 - RNA, 19 nt, synthetic construct
  misc_feature 1..19: note = siRNA antisense sequence
  source 1..19: mol_type = other RNA
atgagggaaggagagagtt

SEQ ID NO: 31414 - RNA, 19 nt, synthetic construct
  misc_feature 1..19: note = siRNA sense sequence
  source 1..19: mol_type = other RNA
actctctccttccctcatc

SEQ ID NO: 31415 - RNA, 19 nt, synthetic construct
  misc_feature 1..19: note = siRNA antisense sequence
  source 1..19: mol_type = other RNA
gatgagggaaggagagagt

SEQ ID NO: 31416 - RNA, 19 nt, synthetic construct
  misc_feature 1..19: note = siRNA sense sequence
  source 1..19: mol_type = other RNA
ctccttccctcatcttgat

SEQ ID NO: 31417 - RNA, 19 nt, synthetic construct
  misc_feature 1..19: note = siRNA antisense sequence
  source 1..19: mol_type = other RNA
atcaagatgagggaaggag

SEQ ID NO: 31418 - RNA, 19 nt, synthetic construct
  misc_feature 1..19: note = siRNA sense sequence
  source 1..19: mol_type = other RNA
tccttccctcatcttgatt

SEQ ID NO: 31419 - RNA, 19 nt, synthetic construct
  misc_feature 1..19: note = siRNA antisense sequence
  source 1..19: mol_type = other RNA
aatcaagatgagggaagga

SEQ ID NO: 31420 - RNA, 19 nt, synthetic construct
  misc_feature 1..19: note = siRNA sense sequence
  source 1..19: mol_type = other RNA
ctcatcttgatttcactag

SEQ ID NO: 31421 - RNA, 19 nt, synthetic construct
  misc_feature 1..19: note = siRNA antisense sequence
  source 1..19: mol_type = other RNA
ctagtgaaatcaagatgag

SEQ ID NO: 31422 - RNA, 19 nt, synthetic construct
  misc_feature 1..19: note = siRNA sense sequence
  source 1..19: mol_type = other RNA
tcatcttgatttcactagg

SEQ ID NO: 31423 - RNA, 19 nt, synthetic construct
  misc_feature 1..19: note = siRNA antisense sequence
  source 1..19: mol_type = other RNA
cctagtgaaatcaagatga

SEQ ID NO: 31424 - RNA, 19 nt, synthetic construct
  misc_feature 1..19: note = siRNA sense sequence
  source 1..19: mol_type = other RNA
catcttgatttcactaggc

SEQ ID NO: 31425 - RNA, 19 nt, synthetic construct
  misc_feature 1..19: note = siRNA antisense sequence
  source 1..19: mol_type = other RNA
gcctagtgaaatcaagatg

SEQ ID NO: 31426 - RNA, 19 nt, synthetic construct
  misc_feature 1..19: note = siRNA sense sequence
  source 1..19: mol_type = other RNA
atcttgatttcactaggcc

SEQ ID NO: 31427 - RNA, 19 nt, synthetic construct
  misc_feature 1..19: note = siRNA antisense sequence
  source 1..19: mol_type = other RNA
ggcctagtgaaatcaagat

SEQ ID NO: 31428 - RNA, 19 nt, synthetic construct
  misc_feature 1..19: note = siRNA sense sequence
  source 1..19: mol_type = other RNA
tcttgatttcactaggcca

SEQ ID NO: 31429 - RNA, 19 nt, synthetic construct
  misc_feature 1..19: note = siRNA antisense sequence
  source 1..19: mol_type = other RNA
tggcctagtgaaatcaaga

SEQ ID NO: 31430 - RNA, 19 nt, synthetic construct
  misc_feature 1..19: note = siRNA sense sequence
  source 1..19: mol_type = other RNA
cttgatttcactaggccac

SEQ ID NO: 31431 - RNA, 19 nt, synthetic construct
  misc_feature 1..19: note = siRNA antisense sequence
  source 1..19: mol_type = other RNA
gtggcctagtgaaatcaag

SEQ ID NO: 31432 - RNA, 19 nt, synthetic construct
  misc_feature 1..19: note = siRNA sense sequence
  source 1..19: mol_type = other RNA
ttgatttcactaggccaca

SEQ ID NO: 31433 - RNA, 19 nt, synthetic construct
  misc_feature 1..19: note = siRNA antisense sequence
  source 1..19: mol_type = other RNA
tgtggcctagtgaaatcaa

SEQ ID NO: 31434 - RNA, 19 nt, synthetic construct
  misc_feature 1..19: note = siRNA sense sequence
  source 1..19: mol_type = other RNA
tgatttcactaggccacac

SEQ ID NO: 31435 - RNA, 19 nt, synthetic construct
  misc_feature 1..19: note = siRNA antisense sequence
  source 1..19: mol_type = other RNA
gtgtggcctagtgaaatca

SEQ ID NO: 31436 - RNA, 19 nt, synthetic construct
  misc_feature 1..19: note = siRNA sense sequence
  source 1..19: mol_type = other RNA
gatttcactaggccacact

SEQ ID NO: 31437 - RNA, 19 nt, synthetic construct
  misc_feature 1..19: note = siRNA antisense sequence
  source 1..19: mol_type = other RNA
agtgtggcctagtgaaatc

SEQ ID NO: 31438 - RNA, 19 nt, synthetic construct
  misc_feature 1..19: note = siRNA sense sequence
  source 1..19: mol_type = other RNA
atttcactaggccacacta

SEQ ID NO: 31439 - RNA, 19 nt, synthetic construct
  misc_feature 1..19: note = siRNA antisense sequence
  source 1..19: mol_type = other RNA
tagtgtggcctagtgaaat

SEQ ID NO: 31440 - RNA, 19 nt, synthetic construct
  misc_feature 1..19: note = siRNA sense sequence
  source 1..19: mol_type = other RNA
ttcactaggccacactata

SEQ ID NO: 31441 - RNA, 19 nt, synthetic construct
  misc_feature 1..19: note = siRNA antisense sequence
  source 1..19: mol_type = other RNA
tatagtgtggcctagtgaa

SEQ ID NO: 31442 - RNA, 19 nt, synthetic construct
  misc_feature 1..19: note = siRNA sense sequence
  source 1..19: mol_type = other RNA
tcactaggccacactataa

SEQ ID NO: 31443 - RNA, 19 nt, synthetic construct
  misc_feature 1..19: note = siRNA antisense sequence
  source 1..19: mol_type = other RNA
ttatagtgtggcctagtga

SEQ ID NO: 31444 - RNA, 19 nt, synthetic construct
  misc_feature 1..19: note = siRNA sense sequence
  source 1..19: mol_type = other RNA
cactaggccacactataac

SEQ ID NO: 31445 - RNA, 19 nt, synthetic construct
  misc_feature 1..19: note = siRNA antisense sequence
  source 1..19: mol_type = other RNA
gttatagtgtggcctagtg

SEQ ID NO: 31446 - RNA, 19 nt, synthetic construct
  misc_feature 1..19: note = siRNA sense sequence
  source 1..19: mol_type = other RNA
actaggccacactataacc

SEQ ID NO: 31447 - RNA, 19 nt, synthetic construct
  misc_feature 1..19: note = siRNA antisense sequence
  source 1..19: mol_type = other RNA
ggttatagtgtggcctagt

SEQ ID NO: 31448 - RNA, 19 nt, synthetic construct
  misc_feature 1..19: note = siRNA sense sequence
  source 1..19: mol_type = other RNA
ctaggccacactataaccc

SEQ ID NO: 31449 - RNA, 19 nt, synthetic construct
  misc_feature 1..19: note = siRNA antisense sequence
  source 1..19: mol_type = other RNA
gggttatagtgtggcctag

SEQ ID NO: 31450 - RNA, 19 nt, synthetic construct
  misc_feature 1..19: note = siRNA sense sequence
  source 1..19: mol_type = other RNA
agctcttgagcctcctgtt

SEQ ID NO: 31451 - RNA, 19 nt, synthetic construct
  misc_feature 1..19: note = siRNA antisense sequence
  source 1..19: mol_type = other RNA
aacaggaggctcaagagct

SEQ ID NO: 31452 - RNA, 19 nt, synthetic construct
  misc_feature 1..19: note = siRNA sense sequence
  source 1..19: mol_type = other RNA
gctcttgagcctcctgttc

SEQ ID NO: 31453 - RNA, 19 nt, synthetic construct
  misc_feature 1..19: note = siRNA antisense sequence
  source 1..19: mol_type = other RNA
gaacaggaggctcaagagc

SEQ ID NO: 31454 - RNA, 19 nt, synthetic construct
  misc_feature 1..19: note = siRNA sense sequence
  source 1..19: mol_type = other RNA
cttgagcctcctgttccat

SEQ ID NO: 31455 - RNA, 19 nt, synthetic construct
  misc_feature 1..19: note = siRNA antisense sequence
  source 1..19: mol_type = other RNA
atggaacaggaggctcaag

SEQ ID NO: 31456 - RNA, 19 nt, synthetic construct
  misc_feature 1..19: note = siRNA sense sequence
  source 1..19: mol_type = other RNA
agcctcctgttccatggat

SEQ ID NO: 31457 - RNA, 19 nt, synthetic construct
  misc_feature 1..19: note = siRNA antisense sequence
  source 1..19: mol_type = other RNA
atccatggaacaggaggct

SEQ ID NO: 31458 - RNA, 19 nt, synthetic construct
  misc_feature 1..19: note = siRNA sense sequence
  source 1..19: mol_type = other RNA
gcctcctgttccatggatc

SEQ ID NO: 31459 - RNA, 19 nt, synthetic construct
  misc_feature 1..19: note = siRNA antisense sequence
  source 1..19: mol_type = other RNA
gatccatggaacaggaggc

SEQ ID NO: 31460 - RNA, 19 nt, synthetic construct
  misc_feature 1..19: note = siRNA sense sequence
  source 1..19: mol_type = other RNA
cctcctgttccatggatct

SEQ ID NO: 31461 - RNA, 19 nt, synthetic construct
  misc_feature 1..19: note = siRNA antisense sequence
  source 1..19: mol_type = other RNA
agatccatggaacaggagg

SEQ ID NO: 31462 - RNA, 19 nt, synthetic construct
  misc_feature 1..19: note = siRNA sense sequence
  source 1..19: mol_type = other RNA
ctcctgttccatggatctc

SEQ ID NO: 31463 - RNA, 19 nt, synthetic construct
  misc_feature 1..19: note = siRNA antisense sequence
  source 1..19: mol_type = other RNA
gagatccatggaacaggag

SEQ ID NO: 31464 - RNA, 19 nt, synthetic construct
  misc_feature 1..19: note = siRNA sense sequence
  source 1..19: mol_type = other RNA
cctgttccatggatctctc

SEQ ID NO: 31465 - RNA, 19 nt, synthetic construct
  misc_feature 1..19: note = siRNA antisense sequence
  source 1..19: mol_type = other RNA
gagagatccatggaacagg

SEQ ID NO: 31466 - RNA, 19 nt, synthetic construct
  misc_feature 1..19: note = siRNA sense sequence
  source 1..19: mol_type = other RNA
cccatagaattaatcaacg

SEQ ID NO: 31467 - RNA, 19 nt, synthetic construct
  misc_feature 1..19: note = siRNA antisense sequence
  source 1..19: mol_type = other RNA
cgttgattaattctatggg

SEQ ID NO: 31468 - RNA, 19 nt, synthetic construct
  misc_feature 1..19: note = siRNA sense sequence
  source 1..19: mol_type = other RNA
ccatagaattaatcaacgg

SEQ ID NO: 31469 - RNA, 19 nt, synthetic construct
  misc_feature 1..19: note = siRNA antisense sequence
  source 1..19: mol_type = other RNA
ccgttgattaattctatgg

SEQ ID NO: 31470 - RNA, 19 nt, synthetic construct
  misc_feature 1..19: note = siRNA sense sequence
  source 1..19: mol_type = other RNA
catagaattaatcaacggt

SEQ ID NO: 31471 - RNA, 19 nt, synthetic construct
  misc_feature 1..19: note = siRNA antisense sequence
  source 1..19: mol_type = other RNA
accgttgattaattctatg

SEQ ID NO: 31472 - RNA, 19 nt, synthetic construct
  misc_feature 1..19: note = siRNA sense sequence
  source 1..19: mol_type = other RNA
atagaattaatcaacggtg

SEQ ID NO: 31473 - RNA, 19 nt, synthetic construct
  misc_feature 1..19: note = siRNA antisense sequence
  source 1..19: mol_type = other RNA
caccgttgattaattctat

SEQ ID NO: 31474 - RNA, 19 nt, synthetic construct
  misc_feature 1..19: note = siRNA sense sequence
  source 1..19: mol_type = other RNA
tagaattaatcaacggtgg

SEQ ID NO: 31475 - RNA, 19 nt, synthetic construct
  misc_feature 1..19: note = siRNA antisense sequence
  source 1..19: mol_type = other RNA
ccaccgttgattaattcta

SEQ ID NO: 31476 - RNA, 19 nt, synthetic construct
  misc_feature 1..19: note = siRNA sense sequence
  source 1..19: mol_type = other RNA
agaattaatcaacggtggc

SEQ ID NO: 31477 - RNA, 19 nt, synthetic construct
  misc_feature 1..19: note = siRNA antisense sequence
  source 1..19: mol_type = other RNA
gccaccgttgattaattct

SEQ ID NO: 31478 - RNA, 19 nt, synthetic construct
  misc_feature 1..19: note = siRNA sense sequence
  source 1..19: mol_type = other RNA
gaattaatcaacggtggcc

SEQ ID NO: 31479 - RNA, 19 nt, synthetic construct
  misc_feature 1..19: note = siRNA antisense sequence
  source 1..19: mol_type = other RNA
ggccaccgttgattaattc

SEQ ID NO: 31480 - RNA, 19 nt, synthetic construct
  misc_feature 1..19: note = siRNA sense sequence
  source 1..19: mol_type = other RNA
aattaatcaacggtggcca

SEQ ID NO: 31481 - RNA, 19 nt, synthetic construct
  misc_feature 1..19: note = siRNA antisense sequence
  source 1..19: mol_type = other RNA
tggccaccgttgattaatt

SEQ ID NO: 31482 - RNA, 19 nt, synthetic construct
  misc_feature 1..19: note = siRNA sense sequence
  source 1..19: mol_type = other RNA
attaatcaacggtggccaa

SEQ ID NO: 31483 - RNA, 19 nt, synthetic construct
  misc_feature 1..19: note = siRNA antisense sequence
  source 1..19: mol_type = other RNA
ttggccaccgttgattaat

SEQ ID NO: 31484 - RNA, 19 nt, synthetic construct
  misc_feature 1..19: note = siRNA sense sequence
  source 1..19: mol_type = other RNA
ttaatcaacggtggccaag

SEQ ID NO: 31485 - RNA, 19 nt, synthetic construct
  misc_feature 1..19: note = siRNA antisense sequence
  source 1..19: mol_type = other RNA
cttggccaccgttgattaa

SEQ ID NO: 31486 - RNA, 19 nt, synthetic construct
  misc_feature 1..19: note = siRNA sense sequence
  source 1..19: mol_type = other RNA
taatcaacggtggccaaga

SEQ ID NO: 31487 - RNA, 19 nt, synthetic construct
  misc_feature 1..19: note = siRNA antisense sequence
  source 1..19: mol_type = other RNA
tcttggccaccgttgatta

SEQ ID NO: 31488 - RNA, 19 nt, synthetic construct
  misc_feature 1..19: note = siRNA sense sequence
  source 1..19: mol_type = other RNA
aatcaacggtggccaagag

SEQ ID NO: 31489 - RNA, 19 nt, synthetic construct
  misc_feature 1..19: note = siRNA antisense sequence
  source 1..19: mol_type = other RNA
ctcttggccaccgttgatt

SEQ ID NO: 31490 - RNA, 19 nt, synthetic construct
  misc_feature 1..19: note = siRNA sense sequence
  source 1..19: mol_type = other RNA
atcaacggtggccaagagt

SEQ ID NO: 31491 - RNA, 19 nt, synthetic construct
  misc_feature 1..19: note = siRNA antisense sequence
  source 1..19: mol_type = other RNA
actcttggccaccgttgat

SEQ ID NO: 31492 - RNA, 19 nt, synthetic construct
  misc_feature 1..19: note = siRNA sense sequence
  source 1..19: mol_type = other RNA
tcaacggtggccaagagtg

SEQ ID NO: 31493 - RNA, 19 nt, synthetic construct
  misc_feature 1..19: note = siRNA antisense sequence
  source 1..19: mol_type = other RNA
cactcttggccaccgttga

SEQ ID NO: 31494 - RNA, 19 nt, synthetic construct
  misc_feature 1..19: note = siRNA sense sequence
  source 1..19: mol_type = other RNA
caacggtggccaagagtgt

SEQ ID NO: 31495 - RNA, 19 nt, synthetic construct
  misc_feature 1..19: note = siRNA antisense sequence
  source 1..19: mol_type = other RNA
acactcttggccaccgttg

SEQ ID NO: 31496 - RNA, 19 nt, synthetic construct
  misc_feature 1..19: note = siRNA sense sequence
  source 1..19: mol_type = other RNA
aacggtggccaagagtgta

SEQ ID NO: 31497 - RNA, 19 nt, synthetic construct
  misc_feature 1..19: note = siRNA antisense sequence
  source 1..19: mol_type = other RNA
tacactcttggccaccgtt

SEQ ID NO: 31498 - RNA, 19 nt, synthetic construct
  misc_feature 1..19: note = siRNA sense sequence
  source 1..19: mol_type = other RNA
acggtggccaagagtgtag

SEQ ID NO: 31499 - RNA, 19 nt, synthetic construct
  misc_feature 1..19: note = siRNA antisense sequence
  source 1..19: mol_type = other RNA
ctacactcttggccaccgt

SEQ ID NO: 31500 - RNA, 19 nt, synthetic construct
  misc_feature 1..19: note = siRNA sense sequence
  source 1..19: mol_type = other RNA
cggtggccaagagtgtagg

SEQ ID NO: 31501 - RNA, 19 nt, synthetic construct
  misc_feature 1..19: note = siRNA antisense sequence
  source 1..19: mol_type = other RNA
cctacactcttggccaccg

SEQ ID NO: 31502 - RNA, 19 nt, synthetic construct
  misc_feature 1..19: note = siRNA sense sequence
  source 1..19: mol_type = other RNA
ggtggccaagagtgtaggt

SEQ ID NO: 31503 - RNA, 19 nt, synthetic construct
  misc_feature 1..19: note = siRNA antisense sequence
  source 1..19: mol_type = other RNA
acctacactcttggccacc

SEQ ID NO: 31504 - RNA, 19 nt, synthetic construct
  misc_feature 1..19: note = siRNA sense sequence
  source 1..19: mol_type = other RNA
gtggccaagagtgtaggta

SEQ ID NO: 31505 - RNA, 19 nt, synthetic construct
  misc_feature 1..19: note = siRNA antisense sequence
  source 1..19: mol_type = other RNA
tacctacactcttggccac

SEQ ID NO: 31506 - RNA, 19 nt, synthetic construct
  misc_feature 1..19: note = siRNA sense sequence
  source 1..19: mol_type = other RNA
tggccaagagtgtaggtaa

SEQ ID NO: 31507 - RNA, 19 nt, synthetic construct
  misc_feature 1..19: note = siRNA antisense sequence
  source 1..19: mol_type = other RNA
ttacctacactcttggcca

SEQ ID NO: 31508 - RNA, 19 nt, synthetic construct
  misc_feature 1..19: note = siRNA sense sequence
  source 1..19: mol_type = other RNA
ggccaagagtgtaggtaac

SEQ ID NO: 31509 - RNA, 19 nt, synthetic construct
  misc_feature 1..19: note = siRNA antisense sequence
  source 1..19: mol_type = other RNA
gttacctacactcttggcc

SEQ ID NO: 31510 - RNA, 19 nt, synthetic construct
  misc_feature 1..19: note = siRNA sense sequence
  source 1..19: mol_type = other RNA
gccaagagtgtaggtaact

SEQ ID NO: 31511 - RNA, 19 nt, synthetic construct
  misc_feature 1..19: note = siRNA antisense sequence
  source 1..19: mol_type = other RNA
agttacctacactcttggc

SEQ ID NO: 31512 - RNA, 19 nt, synthetic construct
  misc_feature 1..19: note = siRNA sense sequence
  source 1..19: mol_type = other RNA
ccaagagtgtaggtaacta

SEQ ID NO: 31513 - RNA, 19 nt, synthetic construct
  misc_feature 1..19: note = siRNA antisense sequence
  source 1..19: mol_type = other RNA
tagttacctacactcttgg

SEQ ID NO: 31514 - RNA, 19 nt, synthetic construct
  misc_feature 1..19: note = siRNA sense sequence
  source 1..19: mol_type = other RNA
caagagtgtaggtaactag

SEQ ID NO: 31515 - RNA, 19 nt, synthetic construct
  misc_feature 1..19: note = siRNA antisense sequence
  source 1..19: mol_type = other RNA
ctagttacctacactcttg

SEQ ID NO: 31516 - RNA, 19 nt, synthetic construct
  misc_feature 1..19: note = siRNA sense sequence
  source 1..19: mol_type = other RNA
aagagtgtaggtaactaga

SEQ ID NO: 31517 - RNA, 19 nt, synthetic construct
  misc_feature 1..19: note = siRNA antisense sequence
  source 1..19: mol_type = other RNA
tctagttacctacactctt

SEQ ID NO: 31518 - RNA, 19 nt, synthetic construct
  misc_feature 1..19: note = siRNA sense sequence
  source 1..19: mol_type = other RNA
agagtgtaggtaactagat

SEQ ID NO: 31519 - RNA, 19 nt, synthetic construct
  misc_feature 1..19: note = siRNA antisense sequence
  source 1..19: mol_type = other RNA
atctagttacctacactct

SEQ ID NO: 31520 - RNA, 19 nt, synthetic construct
  misc_feature 1..19: note = siRNA sense sequence
  source 1..19: mol_type = other RNA
gagtgtaggtaactagatg

SEQ ID NO: 31521 - RNA, 19 nt, synthetic construct
  misc_feature 1..19: note = siRNA antisense sequence
  source 1..19: mol_type = other RNA
catctagttacctacactc

SEQ ID NO: 31522 - RNA, 19 nt, synthetic construct
  misc_feature 1..19: note = siRNA sense sequence
  source 1..19: mol_type = other RNA
agtgtaggtaactagatgg

SEQ ID NO: 31523 - RNA, 19 nt, synthetic construct
  misc_feature 1..19: note = siRNA antisense sequence
  source 1..19: mol_type = other RNA
ccatctagttacctacact

SEQ ID NO: 31524 - RNA, 19 nt, synthetic construct
  misc_feature 1..19: note = siRNA sense sequence
  source 1..19: mol_type = other RNA
gtgtaggtaactagatggc

SEQ ID NO: 31525 - RNA, 19 nt, synthetic construct
  misc_feature 1..19: note = siRNA antisense sequence
  source 1..19: mol_type = other RNA
gccatctagttacctacac

SEQ ID NO: 31526 - RNA, 19 nt, synthetic construct
  misc_feature 1..19: note = siRNA sense sequence
  source 1..19: mol_type = other RNA
tgtaggtaactagatggct

SEQ ID NO: 31527 - RNA, 19 nt, synthetic construct
  misc_feature 1..19: note = siRNA antisense sequence
  source 1..19: mol_type = other RNA
agccatctagttacctaca

SEQ ID NO: 31528 - RNA, 19 nt, synthetic construct
  misc_feature 1..19: note = siRNA sense sequence
  source 1..19: mol_type = other RNA
gtaggtaactagatggctc

SEQ ID NO: 31529 - RNA, 19 nt, synthetic construct
  misc_feature 1..19: note = siRNA antisense sequence
  source 1..19: mol_type = other RNA
gagccatctagttacctac

SEQ ID NO: 31530 - RNA, 19 nt, synthetic construct
  misc_feature 1..19: note = siRNA sense sequence
  source 1..19: mol_type = other RNA
taggtaactagatggctca

SEQ ID NO: 31531 - RNA, 19 nt, synthetic construct
  misc_feature 1..19: note = siRNA antisense sequence
  source 1..19: mol_type = other RNA
tgagccatctagttaccta

SEQ ID NO: 31532 - RNA, 19 nt, synthetic construct
  misc_feature 1..19: note = siRNA sense sequence
  source 1..19: mol_type = other RNA
aggtaactagatggctcat

SEQ ID NO: 31533 - RNA, 19 nt, synthetic construct
  misc_feature 1..19: note = siRNA antisense sequence
  source 1..19: mol_type = other RNA
atgagccatctagttacct

SEQ ID NO: 31534 - RNA, 19 nt, synthetic construct
  misc_feature 1..19: note = siRNA sense sequence
  source 1..19: mol_type = other RNA
ggtaactagatggctcatt

SEQ ID NO: 31535 - RNA, 19 nt, synthetic construct
  misc_feature 1..19: note = siRNA antisense sequence
  source 1..19: mol_type = other RNA
aatgagccatctagttacc

SEQ ID NO: 31536 - RNA, 19 nt, synthetic construct
  misc_feature 1..19: note = siRNA sense sequence
  source 1..19: mol_type = other RNA
gtaactagatggctcattc

SEQ ID NO: 31537 - RNA, 19 nt, synthetic construct
  misc_feature 1..19: note = siRNA antisense sequence
  source 1..19: mol_type = other RNA
gaatgagccatctagttac

SEQ ID NO: 31538 - RNA, 19 nt, synthetic construct
  misc_feature 1..19: note = siRNA sense sequence
  source 1..19: mol_type = other RNA
taactagatggctcattca

SEQ ID NO: 31539 - RNA, 19 nt, synthetic construct
  misc_feature 1..19: note = siRNA antisense sequence
  source 1..19: mol_type = other RNA
tgaatgagccatctagtta

SEQ ID NO: 31540 - RNA, 19 nt, synthetic construct
  misc_feature 1..19: note = siRNA sense sequence
  source 1..19: mol_type = other RNA
aactagatggctcattcag

SEQ ID NO: 31541 - RNA, 19 nt, synthetic construct
  misc_feature 1..19: note = siRNA antisense sequence
  source 1..19: mol_type = other RNA
ctgaatgagccatctagtt

SEQ ID NO: 31542 - RNA, 19 nt, synthetic construct
  misc_feature 1..19: note = siRNA sense sequence
  source 1..19: mol_type = other RNA
actagatggctcattcaga

SEQ ID NO: 31543 - RNA, 19 nt, synthetic construct
  misc_feature 1..19: note = siRNA antisense sequence
  source 1..19: mol_type = other RNA
tctgaatgagccatctagt

SEQ ID NO: 31544 - RNA, 19 nt, synthetic construct
  misc_feature 1..19: note = siRNA sense sequence
  source 1..19: mol_type = other RNA
ctagatggctcattcagat

SEQ ID NO: 31545 - RNA, 19 nt, synthetic construct
  misc_feature 1..19: note = siRNA antisense sequence
  source 1..19: mol_type = other RNA
atctgaatgagccatctag

SEQ ID NO: 31546 - RNA, 19 nt, synthetic construct
  misc_feature 1..19: note = siRNA sense sequence
  source 1..19: mol_type = other RNA
tagatggctcattcagatc

SEQ ID NO: 31547 - RNA, 19 nt, synthetic construct
  misc_feature 1..19: note = siRNA antisense sequence
  source 1..19: mol_type = other RNA
gatctgaatgagccatcta

SEQ ID NO: 31548 - RNA, 19 nt, synthetic construct
  misc_feature 1..19: note = siRNA sense sequence
  source 1..19: mol_type = other RNA
gatggctcattcagatctg

SEQ ID NO: 31549 - RNA, 19 nt, synthetic construct
  misc_feature 1..19: note = siRNA antisense sequence
  source 1..19: mol_type = other RNA
cagatctgaatgagccatc

SEQ ID NO: 31550 - RNA, 19 nt, synthetic construct
  misc_feature 1..19: note = siRNA sense sequence
  source 1..19: mol_type = other RNA
atggctcattcagatctga

SEQ ID NO: 31551 - RNA, 19 nt, synthetic construct
  misc_feature 1..19: note = siRNA antisense sequence
  source 1..19: mol_type = other RNA
tcagatctgaatgagccat

SEQ ID NO: 31552 - RNA, 19 nt, synthetic construct
  misc_feature 1..19: note = siRNA sense sequence
  source 1..19: mol_type = other RNA
tggctcattcagatctgat

SEQ ID NO: 31553 - RNA, 19 nt, synthetic construct
  misc_feature 1..19: note = siRNA antisense sequence
  source 1..19: mol_type = other RNA
atcagatctgaatgagcca

SEQ ID NO: 31554 - RNA, 19 nt, synthetic construct
  misc_feature 1..19: note = siRNA sense sequence
  source 1..19: mol_type = other RNA
ttcagatctgatactcatt

SEQ ID NO: 31555 - RNA, 19 nt, synthetic construct
  misc_feature 1..19: note = siRNA antisense sequence
  source 1..19: mol_type = other RNA
aatgagtatcagatctgaa

SEQ ID NO: 31556 - RNA, 19 nt, synthetic construct
  misc_feature 1..19: note = siRNA sense sequence
  source 1..19: mol_type = other RNA
tcagatctgatactcattc

SEQ ID NO: 31557 - RNA, 19 nt, synthetic construct
  misc_feature 1..19: note = siRNA antisense sequence
  source 1..19: mol_type = other RNA
gaatgagtatcagatctga

SEQ ID NO: 31558 - RNA, 19 nt, synthetic construct
  misc_feature 1..19: note = siRNA sense sequence
  source 1..19: mol_type = other RNA
cattcctggacttgtcagc

SEQ ID NO: 31559 - RNA, 19 nt, synthetic construct
  misc_feature 1..19: note = siRNA antisense sequence
  source 1..19: mol_type = other RNA
gctgacaagtccaggaatg

SEQ ID NO: 31560 - RNA, 19 nt, synthetic construct
  misc_feature 1..19: note = siRNA sense sequence
  source 1..19: mol_type = other RNA
attcctggacttgtcagct

SEQ ID NO: 31561 - RNA, 19 nt, synthetic construct
  misc_feature 1..19: note = siRNA antisense sequence
  source 1..19: mol_type = other RNA
agctgacaagtccaggaat

SEQ ID NO: 31562 - RNA, 19 nt, synthetic construct
  misc_feature 1..19: note = siRNA sense sequence
  source 1..19: mol_type = other RNA
ttcctggacttgtcagctg

SEQ ID NO: 31563 - RNA, 19 nt, synthetic construct
  misc_feature 1..19: note = siRNA antisense sequence
  source 1..19: mol_type = other RNA
cagctgacaagtccaggaa

SEQ ID NO: 31564 - RNA, 19 nt, synthetic construct
  misc_feature 1..19: note = siRNA sense sequence
  source 1..19: mol_type = other RNA
tcctggacttgtcagctgt

SEQ ID NO: 31565 - RNA, 19 nt, synthetic construct
  misc_feature 1..19: note = siRNA antisense sequence
  source 1..19: mol_type = other RNA
acagctgacaagtccagga

SEQ ID NO: 31566 - RNA, 19 nt, synthetic construct
  misc_feature 1..19: note = siRNA sense sequence
  source 1..19: mol_type = other RNA
cctggacttgtcagctgtg

SEQ ID NO: 31567 - RNA, 19 nt, synthetic construct
  misc_feature 1..19: note = siRNA antisense sequence
  source 1..19: mol_type = other RNA
cacagctgacaagtccagg

SEQ ID NO: 31568 - RNA, 19 nt, synthetic construct
  misc_feature 1..19: note = siRNA sense sequence
  source 1..19: mol_type = other RNA
ctggacttgtcagctgtgg

SEQ ID NO: 31569 - RNA, 19 nt, synthetic construct
  misc_feature 1..19: note = siRNA antisense sequence
  source 1..19: mol_type = other RNA
ccacagctgacaagtccag

SEQ ID NO: 31570 - RNA, 19 nt, synthetic construct
  misc_feature 1..19: note = siRNA sense sequence
  source 1..19: mol_type = other RNA
tggacttgtcagctgtggc

SEQ ID NO: 31571 - RNA, 19 nt, synthetic construct
  misc_feature 1..19: note = siRNA antisense sequence
  source 1..19: mol_type = other RNA
gccacagctgacaagtcca

SEQ ID NO: 31572 - RNA, 19 nt, synthetic construct
  misc_feature 1..19: note = siRNA sense sequence
  source 1..19: mol_type = other RNA
ggacttgtcagctgtggcc

SEQ ID NO: 31573 - RNA, 19 nt, synthetic construct
  misc_feature 1..19: note = siRNA antisense sequence
  source 1..19: mol_type = other RNA
ggccacagctgacaagtcc

SEQ ID NO: 31574 - RNA, 19 nt, synthetic construct
  misc_feature 1..19: note = siRNA sense sequence
  source 1..19: mol_type = other RNA
gacttgtcagctgtggcct

SEQ ID NO: 31575 - RNA, 19 nt, synthetic construct
  misc_feature 1..19: note = siRNA antisense sequence
  source 1..19: mol_type = other RNA
aggccacagctgacaagtc

SEQ ID NO: 31576 - RNA, 19 nt, synthetic construct
  misc_feature 1..19: note = siRNA sense sequence
  source 1..19: mol_type = other RNA
cttgtcagctgtggcctgg

SEQ ID NO: 31577 - RNA, 19 nt, synthetic construct
  misc_feature 1..19: note = siRNA antisense sequence
  source 1..19: mol_type = other RNA
ccaggccacagctgacaag

SEQ ID NO: 31578 - RNA, 19 nt, synthetic construct
  misc_feature 1..19: note = siRNA sense sequence
  source 1..19: mol_type = other RNA
ttgtcagctgtggcctggg

SEQ ID NO: 31579 - RNA, 19 nt, synthetic construct
  misc_feature 1..19: note = siRNA antisense sequence
  source 1..19: mol_type = other RNA
cccaggccacagctgacaa

SEQ ID NO: 31580 - RNA, 19 nt, synthetic construct
  misc_feature 1..19: note = siRNA sense sequence
  source 1..19: mol_type = other RNA
tgtcagctgtggcctgggt

SEQ ID NO: 31581 - RNA, 19 nt, synthetic construct
  misc_feature 1..19: note = siRNA antisense sequence
  source 1..19: mol_type = other RNA
acccaggccacagctgaca

SEQ ID NO: 31582 - RNA, 19 nt, synthetic construct
  misc_feature 1..19: note = siRNA sense sequence
  source 1..19: mol_type = other RNA
tgggtggcagagtcactta

SEQ ID NO: 31583 - RNA, 19 nt, synthetic construct
  misc_feature 1..19: note = siRNA antisense sequence
  source 1..19: mol_type = other RNA
taagtgactctgccaccca

SEQ ID NO: 31584 - RNA, 19 nt, synthetic construct
  misc_feature 1..19: note = siRNA sense sequence
  source 1..19: mol_type = other RNA
gggtggcagagtcacttaa

SEQ ID NO: 31585 - RNA, 19 nt, synthetic construct
  misc_feature 1..19: note = siRNA antisense sequence
  source 1..19: mol_type = other RNA
ttaagtgactctgccaccc

SEQ ID NO: 31586 - RNA, 19 nt, synthetic construct
  misc_feature 1..19: note = siRNA sense sequence
  source 1..19: mol_type = other RNA
ggtggcagagtcacttaaa

SEQ ID NO: 31587 - RNA, 19 nt, synthetic construct
  misc_feature 1..19: note = siRNA antisense sequence
  source 1..19: mol_type = other RNA
tttaagtgactctgccacc

SEQ ID NO: 31588 - RNA, 19 nt, synthetic construct
  misc_feature 1..19: note = siRNA sense sequence
  source 1..19: mol_type = other RNA
gtggcagagtcacttaaaa

SEQ ID NO: 31589 - RNA, 19 nt, synthetic construct
  misc_feature 1..19: note = siRNA antisense sequence
  source 1..19: mol_type = other RNA
ttttaagtgactctgccac

SEQ ID NO: 31590 - RNA, 19 nt, synthetic construct
  misc_feature 1..19: note = siRNA sense sequence
  source 1..19: mol_type = other RNA
cattgcagcatcttcagaa

SEQ ID NO: 31591 - RNA, 19 nt, synthetic construct
  misc_feature 1..19: note = siRNA antisense sequence
  source 1..19: mol_type = other RNA
ttctgaagatgctgcaatg

SEQ ID NO: 31592 - RNA, 19 nt, synthetic construct
  misc_feature 1..19: note = siRNA sense sequence
  source 1..19: mol_type = other RNA
aatctttggttggagtaga

SEQ ID NO: 31593 - RNA, 19 nt, synthetic construct
  misc_feature 1..19: note = siRNA antisense sequence
  source 1..19: mol_type = other RNA
tctactccaaccaaagatt

SEQ ID NO: 31594 - RNA, 19 nt, synthetic construct
  misc_feature 1..19: note = siRNA sense sequence
  source 1..19: mol_type = other RNA
atctttggttggagtagaa

SEQ ID NO: 31595 - RNA, 19 nt, synthetic construct
  misc_feature 1..19: note = siRNA antisense sequence
  source 1..19: mol_type = other RNA
ttctactccaaccaaagat

SEQ ID NO: 31596 - RNA, 19 nt, synthetic construct
  misc_feature 1..19: note = siRNA sense sequence
  source 1..19: mol_type = other RNA
tctttggttggagtagaat

SEQ ID NO: 31597 - RNA, 19 nt, synthetic construct
  misc_feature 1..19: note = siRNA antisense sequence
  source 1..19: mol_type = other RNA
attctactccaaccaaaga

SEQ ID NO: 31598 - RNA, 19 nt, synthetic construct
  misc_feature 1..19: note = siRNA sense sequence
  source 1..19: mol_type = other RNA
ctttggttggagtagaata

SEQ ID NO: 31599 - RNA, 19 nt, synthetic construct
  misc_feature 1..19: note = siRNA antisense sequence
  source 1..19: mol_type = other RNA
tattctactccaaccaaag

SEQ ID NO: 31600 - RNA, 19 nt, synthetic construct
  misc_feature 1..19: note = siRNA sense sequence
  source 1..19: mol_type = other RNA
ggttggagtagaatagatg

SEQ ID NO: 31601 - RNA, 19 nt, synthetic construct
  misc_feature 1..19: note = siRNA antisense sequence
  source 1..19: mol_type = other RNA
catctattctactccaacc

SEQ ID NO: 31602 - RNA, 19 nt, synthetic construct
  misc_feature 1..19: note = siRNA sense sequence
  source 1..19: mol_type = other RNA
gttggagtagaatagatgc

SEQ ID NO: 31603 - RNA, 19 nt, synthetic construct
  misc_feature 1..19: note = siRNA antisense sequence
  source 1..19: mol_type = other RNA
gcatctattctactccaac

SEQ ID NO: 31604 - RNA, 19 nt, synthetic construct
  misc_feature 1..19: note = siRNA sense sequence
  source 1..19: mol_type = other RNA
ttggagtagaatagatgcc

SEQ ID NO: 31605 - RNA, 19 nt, synthetic construct
  misc_feature 1..19: note = siRNA antisense sequence
  source 1..19: mol_type = other RNA
ggcatctattctactccaa

SEQ ID NO: 31606 - RNA, 19 nt, synthetic construct
  misc_feature 1..19: note = siRNA sense sequence
  source 1..19: mol_type = other RNA
aaaaggtagttgttggctt

SEQ ID NO: 31607 - RNA, 19 nt, synthetic construct
  misc_feature 1..19: note = siRNA antisense sequence
  source 1..19: mol_type = other RNA
aagccaacaactacctttt

SEQ ID NO: 31608 - RNA, 19 nt, synthetic construct
  misc_feature 1..19: note = siRNA sense sequence
  source 1..19: mol_type = other RNA
aaaggtagttgttggcttc

SEQ ID NO: 31609 - RNA, 19 nt, synthetic construct
  misc_feature 1..19: note = siRNA antisense sequence
  source 1..19: mol_type = other RNA
gaagccaacaactaccttt

SEQ ID NO: 31610 - RNA, 19 nt, synthetic construct
  misc_feature 1..19: note = siRNA sense sequence
  source 1..19: mol_type = other RNA
aaggtagttgttggcttct

SEQ ID NO: 31611 - RNA, 19 nt, synthetic construct
  misc_feature 1..19: note = siRNA antisense sequence
  source 1..19: mol_type = other RNA
agaagccaacaactacctt

SEQ ID NO: 31612 - RNA, 19 nt, synthetic construct
  misc_feature 1..19: note = siRNA sense sequence
  source 1..19: mol_type = other RNA
aggtagttgttggcttctg

SEQ ID NO: 31613 - RNA, 19 nt, synthetic construct
  misc_feature 1..19: note = siRNA antisense sequence
  source 1..19: mol_type = other RNA
cagaagccaacaactacct

SEQ ID NO: 31614 - RNA, 19 nt, synthetic construct
  misc_feature 1..19: note = siRNA sense sequence
  source 1..19: mol_type = other RNA
ggtagttgttggcttctga

SEQ ID NO: 31615 - RNA, 19 nt, synthetic construct
  misc_feature 1..19: note = siRNA antisense sequence
  source 1..19: mol_type = other RNA
tcagaagccaacaactacc

SEQ ID NO: 31616 - RNA, 19 nt, synthetic construct
  misc_feature 1..19: note = siRNA sense sequence
  source 1..19: mol_type = other RNA
gtagttgttggcttctgat

SEQ ID NO: 31617 - RNA, 19 nt, synthetic construct
  misc_feature 1..19: note = siRNA antisense sequence
  source 1..19: mol_type = other RNA
atcagaagccaacaactac

SEQ ID NO: 31618 - RNA, 19 nt, synthetic construct
  misc_feature 1..19: note = siRNA sense sequence
  source 1..19: mol_type = other RNA
tagttgttggcttctgatg

SEQ ID NO: 31619 - RNA, 19 nt, synthetic construct
  misc_feature 1..19: note = siRNA antisense sequence
  source 1..19: mol_type = other RNA
catcagaagccaacaacta

SEQ ID NO: 31620 - RNA, 19 nt, synthetic construct
  misc_feature 1..19: note = siRNA sense sequence
  source 1..19: mol_type = other RNA
agttgttggcttctgatga

SEQ ID NO: 31621 - RNA, 19 nt, synthetic construct
  misc_feature 1..19: note = siRNA antisense sequence
  source 1..19: mol_type = other RNA
tcatcagaagccaacaact

SEQ ID NO: 31622 - RNA, 19 nt, synthetic construct
  misc_feature 1..19: note = siRNA sense sequence
  source 1..19: mol_type = other RNA
gttgttggcttctgatgaa

SEQ ID NO: 31623 - RNA, 19 nt, synthetic construct
  misc_feature 1..19: note = siRNA antisense sequence
  source 1..19: mol_type = other RNA
ttcatcagaagccaacaac

SEQ ID NO: 31624 - RNA, 19 nt, synthetic construct
  misc_feature 1..19: note = siRNA sense sequence
  source 1..19: mol_type = other RNA
aaatggaagggtcaaatta

SEQ ID NO: 31625 - RNA, 19 nt, synthetic construct
  misc_feature 1..19: note = siRNA antisense sequence
  source 1..19: mol_type = other RNA
taatttgacccttccattt

SEQ ID NO: 31626 - RNA, 19 nt, synthetic construct
  misc_feature 1..19: note = siRNA sense sequence
  source 1..19: mol_type = other RNA
aatggaagggtcaaattaa

SEQ ID NO: 31627 - RNA, 19 nt, synthetic construct
  misc_feature 1..19: note = siRNA antisense sequence
  source 1..19: mol_type = other RNA
ttaatttgacccttccatt

SEQ ID NO: 31628 - RNA, 19 nt, synthetic construct
  misc_feature 1..19: note = siRNA sense sequence
  source 1..19: mol_type = other RNA
atggaagggtcaaattaaa

SEQ ID NO: 31629 - RNA, 19 nt, synthetic construct
  misc_feature 1..19: note = siRNA antisense sequence
  source 1..19: mol_type = other RNA
tttaatttgacccttccat

SEQ ID NO: 31630 - RNA, 19 nt, synthetic construct
  misc_feature 1..19: note = siRNA sense sequence
  source 1..19: mol_type = other RNA
tggaagggtcaaattaaat

SEQ ID NO: 31631 - RNA, 19 nt, synthetic construct
  misc_feature 1..19: note = siRNA antisense sequence
  source 1..19: mol_type = other RNA
atttaatttgacccttcca

SEQ ID NO: 31632 - RNA, 19 nt, synthetic construct
  misc_feature 1..19: note = siRNA sense sequence
  source 1..19: mol_type = other RNA
ggaagggtcaaattaaata

SEQ ID NO: 31633 - RNA, 19 nt, synthetic construct
  misc_feature 1..19: note = siRNA antisense sequence
  source 1..19: mol_type = other RNA
tatttaatttgacccttcc

SEQ ID NO: 31634 - RNA, 19 nt, synthetic construct
  misc_feature 1..19: note = siRNA sense sequence
  source 1..19: mol_type = other RNA
taaataatagctgaggtct

SEQ ID NO: 31635 - RNA, 19 nt, synthetic construct
  misc_feature 1..19: note = siRNA antisense sequence
  source 1..19: mol_type = other RNA
agacctcagctattattta

SEQ ID NO: 31636 - RNA, 19 nt, synthetic construct
  misc_feature 1..19: note = siRNA sense sequence
  source 1..19: mol_type = other RNA
aaataatagctgaggtctc

SEQ ID NO: 31637 - RNA, 19 nt, synthetic construct
  misc_feature 1..19: note = siRNA antisense sequence
  source 1..19: mol_type = other RNA
gagacctcagctattattt

SEQ ID NO: 31638 - RNA, 19 nt, synthetic construct
  misc_feature 1..19: note = siRNA sense sequence
  source 1..19: mol_type = other RNA
aataatagctgaggtctca

SEQ ID NO: 31639 - RNA, 19 nt, synthetic construct
  misc_feature 1..19: note = siRNA antisense sequence
  source 1..19: mol_type = other RNA
tgagacctcagctattatt

SEQ ID NO: 31640 - RNA, 19 nt, synthetic construct
  misc_feature 1..19: note = siRNA sense sequence
  source 1..19: mol_type = other RNA
ataatagctgaggtctcat

SEQ ID NO: 31641 - RNA, 19 nt, synthetic construct
  misc_feature 1..19: note = siRNA antisense sequence
  source 1..19: mol_type = other RNA
atgagacctcagctattat

SEQ ID NO: 31642 - RNA, 19 nt, synthetic construct
  misc_feature 1..19: note = siRNA sense sequence
  source 1..19: mol_type = other RNA
taatagctgaggtctcatc

SEQ ID NO: 31643 - RNA, 19 nt, synthetic construct
  misc_feature 1..19: note = siRNA antisense sequence
  source 1..19: mol_type = other RNA
gatgagacctcagctatta

SEQ ID NO: 31644 - RNA, 19 nt, synthetic construct
  misc_feature 1..19: note = siRNA sense sequence
  source 1..19: mol_type = other RNA
atagctgaggtctcatccc

SEQ ID NO: 31645 - RNA, 19 nt, synthetic construct
  misc_feature 1..19: note = siRNA antisense sequence
  source 1..19: mol_type = other RNA
gggatgagacctcagctat

SEQ ID NO: 31646 - RNA, 19 nt, synthetic construct
  misc_feature 1..19: note = siRNA sense sequence
  source 1..19: mol_type = other RNA
ctgaggtctcatcccttct

SEQ ID NO: 31647 - RNA, 19 nt, synthetic construct
  misc_feature 1..19: note = siRNA antisense sequence
  source 1..19: mol_type = other RNA
agaagggatgagacctcag

SEQ ID NO: 31648 - RNA, 19 nt, synthetic construct
  misc_feature 1..19: note = siRNA sense sequence
  source 1..19: mol_type = other RNA
tgaggtctcatcccttcta

SEQ ID NO: 31649 - RNA, 19 nt, synthetic construct
  misc_feature 1..19: note = siRNA antisense sequence
  source 1..19: mol_type = other RNA
tagaagggatgagacctca

SEQ ID NO: 31650 - RNA, 19 nt, synthetic construct
  misc_feature 1..19: note = siRNA sense sequence
  source 1..19: mol_type = other RNA
gaggtctcatcccttctac

SEQ ID NO: 31651 - RNA, 19 nt, synthetic construct
  misc_feature 1..19: note = siRNA antisense sequence
  source 1..19: mol_type = other RNA
gtagaagggatgagacctc

SEQ ID NO: 31652 - RNA, 19 nt, synthetic construct
  misc_feature 1..19: note = siRNA sense sequence
  source 1..19: mol_type = other RNA
tctcatcccttctacccat

SEQ ID NO: 31653 - RNA, 19 nt, synthetic construct
  misc_feature 1..19: note = siRNA antisense sequence
  source 1..19: mol_type = other RNA
atgggtagaagggatgaga

SEQ ID NO: 31654 - RNA, 19 nt, synthetic construct
  misc_feature 1..19: note = siRNA sense sequence
  source 1..19: mol_type = other RNA
ctcatcccttctacccata

SEQ ID NO: 31655 - RNA, 19 nt, synthetic construct
  misc_feature 1..19: note = siRNA antisense sequence
  source 1..19: mol_type = other RNA
tatgggtagaagggatgag

SEQ ID NO: 31656 - RNA, 19 nt, synthetic construct
  misc_feature 1..19: note = siRNA sense sequence
  source 1..19: mol_type = other RNA
tcatcccttctacccataa

SEQ ID NO: 31657 - RNA, 19 nt, synthetic construct
  misc_feature 1..19: note = siRNA antisense sequence
  source 1..19: mol_type = other RNA
ttatgggtagaagggatga

SEQ ID NO: 31658 - RNA, 19 nt, synthetic construct
  misc_feature 1..19: note = siRNA sense sequence
  source 1..19: mol_type = other RNA
catcccttctacccataag

SEQ ID NO: 31659 - RNA, 19 nt, synthetic construct
  misc_feature 1..19: note = siRNA antisense sequence
  source 1..19: mol_type = other RNA
cttatgggtagaagggatg

SEQ ID NO: 31660 - RNA, 19 nt, synthetic construct
  misc_feature 1..19: note = siRNA sense sequence
  source 1..19: mol_type = other RNA
atcccttctacccataaga

SEQ ID NO: 31661 - RNA, 19 nt, synthetic construct
  misc_feature 1..19: note = siRNA antisense sequence
  source 1..19: mol_type = other RNA
tcttatgggtagaagggat

SEQ ID NO: 31662 - RNA, 19 nt, synthetic construct
  misc_feature 1..19: note = siRNA sense sequence
  source 1..19: mol_type = other RNA
ggaggtcataaataattct

SEQ ID NO: 31663 - RNA, 19 nt, synthetic construct
  misc_feature 1..19: note = siRNA antisense sequence
  source 1..19: mol_type = other RNA
agaattatttatgacctcc

SEQ ID NO: 31664 - RNA, 19 nt, synthetic construct
  misc_feature 1..19: note = siRNA sense sequence
  source 1..19: mol_type = other RNA
caagttcttctaatctcca

SEQ ID NO: 31665 - RNA, 19 nt, synthetic construct
  misc_feature 1..19: note = siRNA antisense sequence
  source 1..19: mol_type = other RNA
tggagattagaagaacttg

SEQ ID NO: 31666 - RNA, 19 nt, synthetic construct
  misc_feature 1..19: note = siRNA sense sequence
  source 1..19: mol_type = other RNA
tctccatattttcttacac

SEQ ID NO: 31667 - RNA, 19 nt, synthetic construct
  misc_feature 1..19: note = siRNA antisense sequence
  source 1..19: mol_type = other RNA
gtgtaagaaaatatggaga

SEQ ID NO: 31668 - RNA, 19 nt, synthetic construct
  misc_feature 1..19: note = siRNA sense sequence
  source 1..19: mol_type = other RNA
ctccatattttcttacacc

SEQ ID NO: 31669 - RNA, 19 nt, synthetic construct
  misc_feature 1..19: note = siRNA antisense sequence
  source 1..19: mol_type = other RNA
ggtgtaagaaaatatggag

SEQ ID NO: 31670 - RNA, 19 nt, synthetic construct
  misc_feature 1..19: note = siRNA sense sequence
  source 1..19: mol_type = other RNA
tccatattttcttacacct

SEQ ID NO: 31671 - RNA, 19 nt, synthetic construct
  misc_feature 1..19: note = siRNA antisense sequence
  source 1..19: mol_type = other RNA
aggtgtaagaaaatatgga

SEQ ID NO: 31672 - RNA, 19 nt, synthetic construct
  misc_feature 1..19: note = siRNA sense sequence
  source 1..19: mol_type = other RNA
tggtcaaatacatctctct

SEQ ID NO: 31673 - RNA, 19 nt, synthetic construct
  misc_feature 1..19: note = siRNA antisense sequence
  source 1..19: mol_type = other RNA
agagagatgtatttgacca

SEQ ID NO: 31674 - RNA, 19 nt, synthetic construct
  misc_feature 1..19: note = siRNA sense sequence
  source 1..19: mol_type = other RNA
ggtcaaatacatctctctt

SEQ ID NO: 31675 - RNA, 19 nt, synthetic construct
  misc_feature 1..19: note = siRNA antisense sequence
  source 1..19: mol_type = other RNA
aagagagatgtatttgacc

SEQ ID NO: 31676 - RNA, 19 nt, synthetic construct
  misc_feature 1..19: note = siRNA sense sequence
  source 1..19: mol_type = other RNA
aaatacatctctcttgcaa

SEQ ID NO: 31677 - RNA, 19 nt, synthetic construct
  misc_feature 1..19: note = siRNA antisense sequence
  source 1..19: mol_type = other RNA
ttgcaagagagatgtattt

SEQ ID NO: 31678 - RNA, 19 nt, synthetic construct
  misc_feature 1..19: note = siRNA sense sequence
  source 1..19: mol_type = other RNA
aatacatctctcttgcaag

SEQ ID NO: 31679 - RNA, 19 nt, synthetic construct
  misc_feature 1..19: note = siRNA antisense sequence
  source 1..19: mol_type = other RNA
cttgcaagagagatgtatt

SEQ ID NO: 31680 - RNA, 19 nt, synthetic construct
  misc_feature 1..19: note = siRNA sense sequence
  source 1..19: mol_type = other RNA
atacatctctcttgcaaga

SEQ ID NO: 31681 - RNA, 19 nt, synthetic construct
  misc_feature 1..19: note = siRNA antisense sequence
  source 1..19: mol_type = other RNA
tcttgcaagagagatgtat

SEQ ID NO: 31682 - RNA, 19 nt, synthetic construct
  misc_feature 1..19: note = siRNA sense sequence
  source 1..19: mol_type = other RNA
tacatctctcttgcaagaa

SEQ ID NO: 31683 - RNA, 19 nt, synthetic construct
  misc_feature 1..19: note = siRNA antisense sequence
  source 1..19: mol_type = other RNA
ttcttgcaagagagatgta

SEQ ID NO: 31684 - RNA, 19 nt, synthetic construct
  misc_feature 1..19: note = siRNA sense sequence
  source 1..19: mol_type = other RNA
acatctctcttgcaagaat

SEQ ID NO: 31685 - RNA, 19 nt, synthetic construct
  misc_feature 1..19: note = siRNA antisense sequence
  source 1..19: mol_type = other RNA
attcttgcaagagagatgt

SEQ ID NO: 31686 - RNA, 19 nt, synthetic construct
  misc_feature 1..19: note = siRNA sense sequence
  source 1..19: mol_type = other RNA
catctctcttgcaagaatt

SEQ ID NO: 31687 - RNA, 19 nt, synthetic construct
  misc_feature 1..19: note = siRNA antisense sequence
  source 1..19: mol_type = other RNA
aattcttgcaagagagatg

SEQ ID NO: 31688 - RNA, 19 nt, synthetic construct
  misc_feature 1..19: note = siRNA sense sequence
  source 1..19: mol_type = other RNA
atctctcttgcaagaatta

SEQ ID NO: 31689 - RNA, 19 nt, synthetic construct
  misc_feature 1..19: note = siRNA antisense sequence
  source 1..19: mol_type = other RNA
taattcttgcaagagagat

SEQ ID NO: 31690 - RNA, 19 nt, synthetic construct
  misc_feature 1..19: note = siRNA sense sequence
  source 1..19: mol_type = other RNA
tctctcttgcaagaattat

SEQ ID NO: 31691 - RNA, 19 nt, synthetic construct
  misc_feature 1..19: note = siRNA antisense sequence
  source 1..19: mol_type = other RNA
ataattcttgcaagagaga

SEQ ID NO: 31692 - RNA, 19 nt, synthetic construct
  misc_feature 1..19: note = siRNA sense sequence
  source 1..19: mol_type = other RNA
aacttggaagcagatttaa

SEQ ID NO: 31693 - RNA, 19 nt, synthetic construct
  misc_feature 1..19: note = siRNA antisense sequence
  source 1..19: mol_type = other RNA
ttaaatctgcttccaagtt

SEQ ID NO: 31694 - RNA, 19 nt, synthetic construct
  misc_feature 1..19: note = siRNA sense sequence
  source 1..19: mol_type = other RNA
acttggaagcagatttaaa

SEQ ID NO: 31695 - RNA, 19 nt, synthetic construct
  misc_feature 1..19: note = siRNA antisense sequence
  source 1..19: mol_type = other RNA
tttaaatctgcttccaagt

SEQ ID NO: 31696 - RNA, 19 nt, synthetic construct
  misc_feature 1..19: note = siRNA sense sequence
  source 1..19: mol_type = other RNA
cttggaagcagatttaaat

SEQ ID NO: 31697 - RNA, 19 nt, synthetic construct
  misc_feature 1..19: note = siRNA antisense sequence
  source 1..19: mol_type = other RNA
atttaaatctgcttccaag

SEQ ID NO: 31698 - RNA, 19 nt, synthetic construct
  misc_feature 1..19: note = siRNA sense sequence
  source 1..19: mol_type = other RNA
ggaagcagatttaaatact

SEQ ID NO: 31699 - RNA, 19 nt, synthetic construct
  misc_feature 1..19: note = siRNA antisense sequence
  source 1..19: mol_type = other RNA
agtatttaaatctgcttcc

SEQ ID NO: 31700 - RNA, 19 nt, synthetic construct
  misc_feature 1..19: note = siRNA sense sequence
  source 1..19: mol_type = other RNA
gaagcagatttaaatactg

SEQ ID NO: 31701 - RNA, 19 nt, synthetic construct
  misc_feature 1..19: note = siRNA antisense sequence
  source 1..19: mol_type = other RNA
cagtatttaaatctgcttc

SEQ ID NO: 31702 - RNA, 19 nt, synthetic construct
  misc_feature 1..19: note = siRNA sense sequence
  source 1..19: mol_type = other RNA
gtgtgtgtgtgtgtgtctt

SEQ ID NO: 31703 - RNA, 19 nt, synthetic construct
  misc_feature 1..19: note = siRNA antisense sequence
  source 1..19: mol_type = other RNA
aagacacacacacacacac

SEQ ID NO: 31704 - RNA, 19 nt, synthetic construct
  misc_feature 1..19: note = siRNA sense sequence
  source 1..19: mol_type = other RNA
tgtgtgtgtgtgtgtcttc

SEQ ID NO: 31705 - RNA, 19 nt, synthetic construct
  misc_feature 1..19: note = siRNA antisense sequence
  source 1..19: mol_type = other RNA
gaagacacacacacacaca

SEQ ID NO: 31706 - RNA, 19 nt, synthetic construct
  misc_feature 1..19: note = siRNA sense sequence
  source 1..19: mol_type = other RNA
gtgtgtgtgtgtgtcttct

SEQ ID NO: 31707 - RNA, 19 nt, synthetic construct
  misc_feature 1..19: note = siRNA antisense sequence
  source 1..19: mol_type = other RNA
agaagacacacacacacac

SEQ ID NO: 31708 - RNA, 19 nt, synthetic construct
  misc_feature 1..19: note = siRNA sense sequence
  source 1..19: mol_type = other RNA
tgtgtgtgtgtgtcttctg

SEQ ID NO: 31709 - RNA, 19 nt, synthetic construct
  misc_feature 1..19: note = siRNA antisense sequence
  source 1..19: mol_type = other RNA
cagaagacacacacacaca

SEQ ID NO: 31710 - RNA, 19 nt, synthetic construct
  misc_feature 1..19: note = siRNA sense sequence
  source 1..19: mol_type = other RNA
gtgtgtgtgtgtcttctgg

SEQ ID NO: 31711 - RNA, 19 nt, synthetic construct
  misc_feature 1..19: note = siRNA antisense sequence
  source 1..19: mol_type = other RNA
ccagaagacacacacacac

SEQ ID NO: 31712 - RNA, 19 nt, synthetic construct
  misc_feature 1..19: note = siRNA sense sequence
  source 1..19: mol_type = other RNA
tgtgtgtgtgtcttctggt

SEQ ID NO: 31713 - RNA, 19 nt, synthetic construct
  misc_feature 1..19: note = siRNA antisense sequence
  source 1..19: mol_type = other RNA
accagaagacacacacaca

SEQ ID NO: 31714 - RNA, 19 nt, synthetic construct
  misc_feature 1..19: note = siRNA sense sequence
  source 1..19: mol_type = other RNA
gtgtgtgtgtcttctggtg

SEQ ID NO: 31715 - RNA, 19 nt, synthetic construct
  misc_feature 1..19: note = siRNA antisense sequence
  source 1..19: mol_type = other RNA
caccagaagacacacacac

SEQ ID NO: 31716 - RNA, 19 nt, synthetic construct
  misc_feature 1..19: note = siRNA sense sequence
  source 1..19: mol_type = other RNA
tgtgtcttctggtgctatt

SEQ ID NO: 31717 - RNA, 19 nt, synthetic construct
  misc_feature 1..19: note = siRNA antisense sequence
  source 1..19: mol_type = other RNA
aatagcaccagaagacaca

SEQ ID NO: 31718 - RNA, 19 nt, synthetic construct
  misc_feature 1..19: note = siRNA sense sequence
  source 1..19: mol_type = other RNA
gtgtcttctggtgctattt

SEQ ID NO: 31719 - RNA, 19 nt, synthetic construct
  misc_feature 1..19: note = siRNA antisense sequence
  source 1..19: mol_type = other RNA
aaatagcaccagaagacac

SEQ ID NO: 31720 - RNA, 19 nt, synthetic construct
  misc_feature 1..19: note = siRNA sense sequence
  source 1..19: mol_type = other RNA
tgtcttctggtgctatttc

SEQ ID NO: 31721 - RNA, 19 nt, synthetic construct
  misc_feature 1..19: note = siRNA antisense sequence
  source 1..19: mol_type = other RNA
gaaatagcaccagaagaca

SEQ ID NO: 31722 - RNA, 19 nt, synthetic construct
  misc_feature 1..19: note = siRNA sense sequence
  source 1..19: mol_type = other RNA
gtcttctggtgctatttct

SEQ ID NO: 31723 - RNA, 19 nt, synthetic construct
  misc_feature 1..19: note = siRNA antisense sequence
  source 1..19: mol_type = other RNA
agaaatagcaccagaagac

SEQ ID NO: 31724 - RNA, 19 nt, synthetic construct
  misc_feature 1..19: note = siRNA sense sequence
  source 1..19: mol_type = other RNA
tctggtgctatttctcaaa

SEQ ID NO: 31725 - RNA, 19 nt, synthetic construct
  misc_feature 1..19: note = siRNA antisense sequence
  source 1..19: mol_type = other RNA
tttgagaaatagcaccaga

SEQ ID NO: 31726 - RNA, 19 nt, synthetic construct
  misc_feature 1..19: note = siRNA sense sequence
  source 1..19: mol_type = other RNA
ctggtgctatttctcaaaa

SEQ ID NO: 31727 - RNA, 19 nt, synthetic construct
  misc_feature 1..19: note = siRNA antisense sequence
  source 1..19: mol_type = other RNA
ttttgagaaatagcaccag

SEQ ID NO: 31728 - RNA, 19 nt, synthetic construct
  misc_feature 1..19: note = siRNA sense sequence
  source 1..19: mol_type = other RNA
tggtgctatttctcaaaag

SEQ ID NO: 31729 - RNA, 19 nt, synthetic construct
  misc_feature 1..19: note = siRNA antisense sequence
  source 1..19: mol_type = other RNA
cttttgagaaatagcacca

SEQ ID NO: 31730 - RNA, 19 nt, synthetic construct
  misc_feature 1..19: note = siRNA sense sequence
  source 1..19: mol_type = other RNA
cattttgttaagccatcaa

SEQ ID NO: 31731 - RNA, 19 nt, synthetic construct
  misc_feature 1..19: note = siRNA antisense sequence
  source 1..19: mol_type = other RNA
ttgatggcttaacaaaatg

SEQ ID NO: 31732 - RNA, 19 nt, synthetic construct
  misc_feature 1..19: note = siRNA sense sequence
  source 1..19: mol_type = other RNA
atacctgtaatcccagcac

SEQ ID NO: 31733 - RNA, 19 nt, synthetic construct
  misc_feature 1..19: note = siRNA antisense sequence
  source 1..19: mol_type = other RNA
gtgctgggattacaggtat

SEQ ID NO: 31734 - RNA, 19 nt, synthetic construct
  misc_feature 1..19: note = siRNA sense sequence
  source 1..19: mol_type = other RNA
ccagcactttgggaagcca

SEQ ID NO: 31735 - RNA, 19 nt, synthetic construct
  misc_feature 1..19: note = siRNA antisense sequence
  source 1..19: mol_type = other RNA
tggcttcccaaagtgctgg

SEQ ID NO: 31736 - RNA, 19 nt, synthetic construct
  misc_feature 1..19: note = siRNA sense sequence
  source 1..19: mol_type = other RNA
ggaagccaaggtgtgtaga

SEQ ID NO: 31737 - RNA, 19 nt, synthetic construct
  misc_feature 1..19: note = siRNA antisense sequence
  source 1..19: mol_type = other RNA
tctacacaccttggcttcc

SEQ ID NO: 31738 - RNA, 19 nt, synthetic construct
  misc_feature 1..19: note = siRNA sense sequence
  source 1..19: mol_type = other RNA
gaagccaaggtgtgtagat

SEQ ID NO: 31739 - RNA, 19 nt, synthetic construct
  misc_feature 1..19: note = siRNA antisense sequence
  source 1..19: mol_type = other RNA
atctacacaccttggcttc

SEQ ID NO: 31740 - RNA, 19 nt, synthetic construct
  misc_feature 1..19: note = siRNA sense sequence
  source 1..19: mol_type = other RNA
aagccaaggtgtgtagatc

SEQ ID NO: 31741 - RNA, 19 nt, synthetic construct
  misc_feature 1..19: note = siRNA antisense sequence
  source 1..19: mol_type = other RNA
gatctacacaccttggctt

SEQ ID NO: 31742 - RNA, 19 nt, synthetic construct
  misc_feature 1..19: note = siRNA sense sequence
  source 1..19: mol_type = other RNA
agccaaggtgtgtagatca

SEQ ID NO: 31743 - RNA, 19 nt, synthetic construct
  misc_feature 1..19: note = siRNA antisense sequence
  source 1..19: mol_type = other RNA
tgatctacacaccttggct

SEQ ID NO: 31744 - RNA, 19 nt, synthetic construct
  misc_feature 1..19: note = siRNA sense sequence
  source 1..19: mol_type = other RNA
caaggtgtgtagatcattt

SEQ ID NO: 31745 - RNA, 19 nt, synthetic construct
  misc_feature 1..19: note = siRNA antisense sequence
  source 1..19: mol_type = other RNA
aaatgatctacacaccttg

SEQ ID NO: 31746 - RNA, 19 nt, synthetic construct
  misc_feature 1..19: note = siRNA sense sequence
  source 1..19: mol_type = other RNA
aaggtgtgtagatcatttg

SEQ ID NO: 31747 - RNA, 19 nt, synthetic construct
  misc_feature 1..19: note = siRNA antisense sequence
  source 1..19: mol_type = other RNA
caaatgatctacacacctt

SEQ ID NO: 31748 - RNA, 19 nt, synthetic construct
  misc_feature 1..19: note = siRNA sense sequence
  source 1..19: mol_type = other RNA
aggtgtgtagatcatttga

SEQ ID NO: 31749 - RNA, 19 nt, synthetic construct
  misc_feature 1..19: note = siRNA antisense sequence
  source 1..19: mol_type = other RNA
tcaaatgatctacacacct

SEQ ID NO: 31750 - RNA, 19 nt, synthetic construct
  misc_feature 1..19: note = siRNA sense sequence
  source 1..19: mol_type = other RNA
atttgagttcaagagctcg

SEQ ID NO: 31751 - RNA, 19 nt, synthetic construct
  misc_feature 1..19: note = siRNA antisense sequence
  source 1..19: mol_type = other RNA
cgagctcttgaactcaaat

SEQ ID NO: 31752 - RNA, 19 nt, synthetic construct
  misc_feature 1..19: note = siRNA sense sequence
  source 1..19: mol_type = other RNA
tttgagttcaagagctcga

SEQ ID NO: 31753 - RNA, 19 nt, synthetic construct
  misc_feature 1..19: note = siRNA antisense sequence
  source 1..19: mol_type = other RNA
tcgagctcttgaactcaaa

SEQ ID NO: 31754 - RNA, 19 nt, synthetic construct
  misc_feature 1..19: note = siRNA sense sequence
  source 1..19: mol_type = other RNA
aaaattagctgggcatggt

SEQ ID NO: 31755 - RNA, 19 nt, synthetic construct
  misc_feature 1..19: note = siRNA antisense sequence
  source 1..19: mol_type = other RNA
accatgcccagctaatttt

SEQ ID NO: 31756 - RNA, 19 nt, synthetic construct
  misc_feature 1..19: note = siRNA sense sequence
  source 1..19: mol_type = other RNA
aaattagctgggcatggtg

SEQ ID NO: 31757 - RNA, 19 nt, synthetic construct
  misc_feature 1..19: note = siRNA antisense sequence
  source 1..19: mol_type = other RNA
caccatgcccagctaattt

SEQ ID NO: 31758 - RNA, 19 nt, synthetic construct
  misc_feature 1..19: note = siRNA sense sequence
  source 1..19: mol_type = other RNA
aattagctgggcatggtgg

SEQ ID NO: 31759 - RNA, 19 nt, synthetic construct
  misc_feature 1..19: note = siRNA antisense sequence
  source 1..19: mol_type = other RNA
ccaccatgcccagctaatt

SEQ ID NO: 31760 - RNA, 19 nt, synthetic construct
  misc_feature 1..19: note = siRNA sense sequence
  source 1..19: mol_type = other RNA
attagctgggcatggtggt

SEQ ID NO: 31761 - RNA, 19 nt, synthetic construct
  misc_feature 1..19: note = siRNA antisense sequence
  source 1..19: mol_type = other RNA
accaccatgcccagctaat

SEQ ID NO: 31762 - RNA, 19 nt, synthetic construct
  misc_feature 1..19: note = siRNA sense sequence
  source 1..19: mol_type = other RNA
ttagctgggcatggtggta

SEQ ID NO: 31763 - RNA, 19 nt, synthetic construct
  misc_feature 1..19: note = siRNA antisense sequence
  source 1..19: mol_type = other RNA
taccaccatgcccagctaa

SEQ ID NO: 31764 - RNA, 19 nt, synthetic construct
  misc_feature 1..19: note = siRNA sense sequence
  source 1..19: mol_type = other RNA
tagctgggcatggtggtac

SEQ ID NO: 31765 - RNA, 19 nt, synthetic construct
  misc_feature 1..19: note = siRNA antisense sequence
  source 1..19: mol_type = other RNA
gtaccaccatgcccagcta

SEQ ID NO: 31766 - RNA, 19 nt, synthetic construct
  misc_feature 1..19: note = siRNA sense sequence
  source 1..19: mol_type = other RNA
agctgggcatggtggtaca

SEQ ID NO: 31767 - RNA, 19 nt, synthetic construct
  misc_feature 1..19: note = siRNA antisense sequence
  source 1..19: mol_type = other RNA
tgtaccaccatgcccagct

SEQ ID NO: 31768 - RNA, 19 nt, synthetic construct
  misc_feature 1..19: note = siRNA sense sequence
  source 1..19: mol_type = other RNA
gctgggcatggtggtacac

SEQ ID NO: 31769 - RNA, 19 nt, synthetic construct
  misc_feature 1..19: note = siRNA antisense sequence
  source 1..19: mol_type = other RNA
gtgtaccaccatgcccagc

SEQ ID NO: 31770 - RNA, 19 nt, synthetic construct
  misc_feature 1..19: note = siRNA sense sequence
  source 1..19: mol_type = other RNA
acttttaatcccagctact

SEQ ID NO: 31771 - RNA, 19 nt, synthetic construct
  misc_feature 1..19: note = siRNA antisense sequence
  source 1..19: mol_type = other RNA
agtagctgggattaaaagt

SEQ ID NO: 31772 - RNA, 19 nt, synthetic construct
  misc_feature 1..19: note = siRNA sense sequence
  source 1..19: mol_type = other RNA
cttttaatcccagctactt

SEQ ID NO: 31773 - RNA, 19 nt, synthetic construct
  misc_feature 1..19: note = siRNA antisense sequence
  source 1..19: mol_type = other RNA
aagtagctgggattaaaag

SEQ ID NO: 31774 - RNA, 19 nt, synthetic construct
  misc_feature 1..19: note = siRNA sense sequence
  source 1..19: mol_type = other RNA
ttttaatcccagctacttg

SEQ ID NO: 31775 - RNA, 19 nt, synthetic construct
  misc_feature 1..19: note = siRNA antisense sequence
  source 1..19: mol_type = other RNA
caagtagctgggattaaaa

SEQ ID NO: 31776 - RNA, 19 nt, synthetic construct
  misc_feature 1..19: note = siRNA sense sequence
  source 1..19: mol_type = other RNA
tttaatcccagctacttgg

SEQ ID NO: 31777 - RNA, 19 nt, synthetic construct
  misc_feature 1..19: note = siRNA antisense sequence
  source 1..19: mol_type = other RNA
ccaagtagctgggattaaa

SEQ ID NO: 31778 - RNA, 19 nt, synthetic construct
  misc_feature 1..19: note = siRNA sense sequence
  source 1..19: mol_type = other RNA
tacttgggaggctgatgtg

SEQ ID NO: 31779 - RNA, 19 nt, synthetic construct
  misc_feature 1..19: note = siRNA antisense sequence
  source 1..19: mol_type = other RNA
cacatcagcctcccaagta

SEQ ID NO: 31780 - RNA, 19 nt, synthetic construct
  misc_feature 1..19: note = siRNA sense sequence
  source 1..19: mol_type = other RNA
acttgggaggctgatgtgg

SEQ ID NO: 31781 - RNA, 19 nt, synthetic construct
  misc_feature 1..19: note = siRNA antisense sequence
  source 1..19: mol_type = other RNA
ccacatcagcctcccaagt

SEQ ID NO: 31782 - RNA, 19 nt, synthetic construct
  misc_feature 1..19: note = siRNA sense sequence
  source 1..19: mol_type = other RNA
gctgcagtgagccaagata

SEQ ID NO: 31783 - RNA, 19 nt, synthetic construct
  misc_feature 1..19: note = siRNA antisense sequence
  source 1..19: mol_type = other RNA
tatcttggctcactgcagc

SEQ ID NO: 31784 - RNA, 19 nt, synthetic construct
  misc_feature 1..19: note = siRNA sense sequence
  source 1..19: mol_type = other RNA
ctgcagtgagccaagatag

SEQ ID NO: 31785 - RNA, 19 nt, synthetic construct
  misc_feature 1..19: note = siRNA antisense sequence
  source 1..19: mol_type = other RNA
ctatcttggctcactgcag

SEQ ID NO: 31786 - RNA, 19 nt, synthetic construct
  misc_feature 1..19: note = siRNA sense sequence
  source 1..19: mol_type = other RNA
tgcagtgagccaagatagt

SEQ ID NO: 31787 - RNA, 19 nt, synthetic construct
  misc_feature 1..19: note = siRNA antisense sequence
  source 1..19: mol_type = other RNA
actatcttggctcactgca

SEQ ID NO: 31788 - RNA, 19 nt, synthetic construct
  misc_feature 1..19: note = siRNA sense sequence
  source 1..19: mol_type = other RNA
gcagtgagccaagatagtg

SEQ ID NO: 31789 - RNA, 19 nt, synthetic construct
  misc_feature 1..19: note = siRNA antisense sequence
  source 1..19: mol_type = other RNA
cactatcttggctcactgc

SEQ ID NO: 31790 - RNA, 19 nt, synthetic construct
  misc_feature 1..19: note = siRNA sense sequence
  source 1..19: mol_type = other RNA
cagtgagccaagatagtgc

SEQ ID NO: 31791 - RNA, 19 nt, synthetic construct
  misc_feature 1..19: note = siRNA antisense sequence
  source 1..19: mol_type = other RNA
gcactatcttggctcactg

SEQ ID NO: 31792 - RNA, 19 nt, synthetic construct
  misc_feature 1..19: note = siRNA sense sequence
  source 1..19: mol_type = other RNA
aaattagcctttacctgtg

SEQ ID NO: 31793 - RNA, 19 nt, synthetic construct
  misc_feature 1..19: note = siRNA antisense sequence
  source 1..19: mol_type = other RNA
cacaggtaaaggctaattt

SEQ ID NO: 31794 - RNA, 19 nt, synthetic construct
  misc_feature 1..19: note = siRNA sense sequence
  source 1..19: mol_type = other RNA
aattagcctttacctgtgt

SEQ ID NO: 31795 - RNA, 19 nt, synthetic construct
  misc_feature 1..19: note = siRNA antisense sequence
  source 1..19: mol_type = other RNA
acacaggtaaaggctaatt

SEQ ID NO: 31796 - RNA, 19 nt, synthetic construct
  misc_feature 1..19: note = siRNA sense sequence
  source 1..19: mol_type = other RNA
attagcctttacctgtgtg

SEQ ID NO: 31797 - RNA, 19 nt, synthetic construct
  misc_feature 1..19: note = siRNA antisense sequence
  source 1..19: mol_type = other RNA
cacacaggtaaaggctaat

SEQ ID NO: 31798 - RNA, 19 nt, synthetic construct
  misc_feature 1..19: note = siRNA sense sequence
  source 1..19: mol_type = other RNA
gcctttacctgtgtgtact

SEQ ID NO: 31799 - RNA, 19 nt, synthetic construct
  misc_feature 1..19: note = siRNA antisense sequence
  source 1..19: mol_type = other RNA
agtacacacaggtaaaggc

SEQ ID NO: 31800 - RNA, 19 nt, synthetic construct
  misc_feature 1..19: note = siRNA sense sequence
  source 1..19: mol_type = other RNA
cctttacctgtgtgtacta

SEQ ID NO: 31801 - RNA, 19 nt, synthetic construct
  misc_feature 1..19: note = siRNA antisense sequence
  source 1..19: mol_type = other RNA
tagtacacacaggtaaagg

SEQ ID NO: 31802 - RNA, 19 nt, synthetic construct
  misc_feature 1..19: note = siRNA sense sequence
  source 1..19: mol_type = other RNA
ctttacctgtgtgtactac

SEQ ID NO: 31803 - RNA, 19 nt, synthetic construct
  misc_feature 1..19: note = siRNA antisense sequence
  source 1..19: mol_type = other RNA
gtagtacacacaggtaaag

SEQ ID NO: 31804 - RNA, 19 nt, synthetic construct
  misc_feature 1..19: note = siRNA sense sequence
  source 1..19: mol_type = other RNA
tttacctgtgtgtactaca

SEQ ID NO: 31805 - RNA, 19 nt, synthetic construct
  misc_feature 1..19: note = siRNA antisense sequence
  source 1..19: mol_type = other RNA
tgtagtacacacaggtaaa

SEQ ID NO: 31806 - RNA, 19 nt, synthetic construct
  misc_feature 1..19: note = siRNA sense sequence
  source 1..19: mol_type = other RNA
aactgactgttgtctcata

SEQ ID NO: 31807 - RNA, 19 nt, synthetic construct
  misc_feature 1..19: note = siRNA antisense sequence
  source 1..19: mol_type = other RNA
tatgagacaacagtcagtt

SEQ ID NO: 31808 - RNA, 19 nt, synthetic construct
  misc_feature 1..19: note = siRNA sense sequence
  source 1..19: mol_type = other RNA
actgactgttgtctcataa

SEQ ID NO: 31809 - RNA, 19 nt, synthetic construct
  misc_feature 1..19: note = siRNA antisense sequence
  source 1..19: mol_type = other RNA
ttatgagacaacagtcagt

SEQ ID NO: 31810 - RNA, 19 nt, synthetic construct
  misc_feature 1..19: note = siRNA sense sequence
  source 1..19: mol_type = other RNA
ctgactgttgtctcataaa

SEQ ID NO: 31811 - RNA, 19 nt, synthetic construct
  misc_feature 1..19: note = siRNA antisense sequence
  source 1..19: mol_type = other RNA
tttatgagacaacagtcag

SEQ ID NO: 31812 - RNA, 19 nt, synthetic construct
  misc_feature 1..19: note = siRNA sense sequence
  source 1..19: mol_type = other RNA
tgactgttgtctcataaag

SEQ ID NO: 31813 - RNA, 19 nt, synthetic construct
  misc_feature 1..19: note = siRNA antisense sequence
  source 1..19: mol_type = other RNA
ctttatgagacaacagtca

SEQ ID NO: 31814 - RNA, 19 nt, synthetic construct
  misc_feature 1..19: note = siRNA sense sequence
  source 1..19: mol_type = other RNA
gactgttgtctcataaaga

SEQ ID NO: 31815 - RNA, 19 nt, synthetic construct
  misc_feature 1..19: note = siRNA antisense sequence
  source 1..19: mol_type = other RNA
tctttatgagacaacagtc

SEQ ID NO: 31816 - RNA, 19 nt, synthetic construct
  misc_feature 1..19: note = siRNA sense sequence
  source 1..19: mol_type = other RNA
aaccaagcctaatgcaact

SEQ ID NO: 31817 - RNA, 19 nt, synthetic construct
  misc_feature 1..19: note = siRNA antisense sequence
  source 1..19: mol_type = other RNA
agttgcattaggcttggtt

SEQ ID NO: 31818 - RNA, 19 nt, synthetic construct
  misc_feature 1..19: note = siRNA sense sequence
  source 1..19: mol_type = other RNA
aagcctaatgcaacttaat

SEQ ID NO: 31819 - RNA, 19 nt, synthetic construct
  misc_feature 1..19: note = siRNA antisense sequence
  source 1..19: mol_type = other RNA
attaagttgcattaggctt

SEQ ID NO: 31820 - RNA, 19 nt, synthetic construct
  misc_feature 1..19: note = siRNA sense sequence
  source 1..19: mol_type = other RNA
agcctaatgcaacttaatt

SEQ ID NO: 31821 - RNA, 19 nt, synthetic construct
  misc_feature 1..19: note = siRNA antisense sequence
  source 1..19: mol_type = other RNA
aattaagttgcattaggct

SEQ ID NO: 31822 - RNA, 19 nt, synthetic construct
  misc_feature 1..19: note = siRNA sense sequence
  source 1..19: mol_type = other RNA
gcctaatgcaacttaattg

SEQ ID NO: 31823 - RNA, 19 nt, synthetic construct
  misc_feature 1..19: note = siRNA antisense sequence
  source 1..19: mol_type = other RNA
caattaagttgcattaggc

SEQ ID NO: 31824 - RNA, 19 nt, synthetic construct
  misc_feature 1..19: note = siRNA sense sequence
  source 1..19: mol_type = other RNA
cctaatgcaacttaattgt

SEQ ID NO: 31825 - RNA, 19 nt, synthetic construct
  misc_feature 1..19: note = siRNA antisense sequence
  source 1..19: mol_type = other RNA
acaattaagttgcattagg

SEQ ID NO: 31826 - RNA, 19 nt, synthetic construct
  misc_feature 1..19: note = siRNA sense sequence
  source 1..19: mol_type = other RNA
atgcaacttaattgttcac

SEQ ID NO: 31827 - RNA, 19 nt, synthetic construct
  misc_feature 1..19: note = siRNA antisense sequence
  source 1..19: mol_type = other RNA
gtgaacaattaagttgcat

SEQ ID NO: 31828 - RNA, 19 nt, synthetic construct
  misc_feature 1..19: note = siRNA sense sequence
  source 1..19: mol_type = other RNA
tgcaacttaattgttcaca

SEQ ID NO: 31829 - RNA, 19 nt, synthetic construct
  misc_feature 1..19: note = siRNA antisense sequence
  source 1..19: mol_type = other RNA
tgtgaacaattaagttgca

SEQ ID NO: 31830 - RNA, 19 nt, synthetic construct
  misc_feature 1..19: note = siRNA sense sequence
  source 1..19: mol_type = other RNA
gcaacttaattgttcacac

SEQ ID NO: 31831 - RNA, 19 nt, synthetic construct
  misc_feature 1..19: note = siRNA antisense sequence
  source 1..19: mol_type = other RNA
gtgtgaacaattaagttgc

SEQ ID NO: 31832 - RNA, 19 nt, synthetic construct
  misc_feature 1..19: note = siRNA sense sequence
  source 1..19: mol_type = other RNA
gatgtacttcttctataac

SEQ ID NO: 31833 - RNA, 19 nt, synthetic construct
  misc_feature 1..19: note = siRNA antisense sequence
  source 1..19: mol_type = other RNA
gttatagaagaagtacatc

SEQ ID NO: 31834 - RNA, 19 nt, synthetic construct
  misc_feature 1..19: note = siRNA sense sequence
  source 1..19: mol_type = other RNA
tgtacttcttctataactc

SEQ ID NO: 31835 - RNA, 19 nt, synthetic construct
  misc_feature 1..19: note = siRNA antisense sequence
  source 1..19: mol_type = other RNA
gagttatagaagaagtaca

SEQ ID NO: 31836 - RNA, 19 nt, synthetic construct
  misc_feature 1..19: note = siRNA sense sequence
  source 1..19: mol_type = other RNA
gtacttcttctataactct

SEQ ID NO: 31837 - RNA, 19 nt, synthetic construct
  misc_feature 1..19: note = siRNA antisense sequence
  source 1..19: mol_type = other RNA
agagttatagaagaagtac

SEQ ID NO: 31838 - RNA, 19 nt, synthetic construct
  misc_feature 1..19: note = siRNA sense sequence
  source 1..19: mol_type = other RNA
acttcttctataactctac

SEQ ID NO: 31839 - RNA, 19 nt, synthetic construct
  misc_feature 1..19: note = siRNA antisense sequence
  source 1..19: mol_type = other RNA
gtagagttatagaagaagt

SEQ ID NO: 31840 - RNA, 19 nt, synthetic construct
  misc_feature 1..19: note = siRNA sense sequence
  source 1..19: mol_type = other RNA
cttcttctataactctaca

SEQ ID NO: 31841 - RNA, 19 nt, synthetic construct
  misc_feature 1..19: note = siRNA antisense sequence
  source 1..19: mol_type = other RNA
tgtagagttatagaagaag

SEQ ID NO: 31842 - RNA, 19 nt, synthetic construct
  misc_feature 1..19: note = siRNA sense sequence
  source 1..19: mol_type = other RNA
ttcttctataactctacag

SEQ ID NO: 31843 - RNA, 19 nt, synthetic construct
  misc_feature 1..19: note = siRNA antisense sequence
  source 1..19: mol_type = other RNA
ctgtagagttatagaagaa

SEQ ID NO: 31844 - RNA, 19 nt, synthetic construct
  misc_feature 1..19: note = siRNA sense sequence
  source 1..19: mol_type = other RNA
tctataactctacaggact

SEQ ID NO: 31845 - RNA, 19 nt, synthetic construct
  misc_feature 1..19: note = siRNA antisense sequence
  source 1..19: mol_type = other RNA
agtcctgtagagttataga

SEQ ID NO: 31846 - RNA, 19 nt, synthetic construct
  misc_feature 1..19: note = siRNA sense sequence
  source 1..19: mol_type = other RNA
ctataactctacaggactt

SEQ ID NO: 31847 - RNA, 19 nt, synthetic construct
  misc_feature 1..19: note = siRNA antisense sequence
  source 1..19: mol_type = other RNA
aagtcctgtagagttatag

SEQ ID NO: 31848 - RNA, 19 nt, synthetic construct
  misc_feature 1..19: note = siRNA sense sequence
  source 1..19: mol_type = other RNA
tataactctacaggactta

SEQ ID NO: 31849 - RNA, 19 nt, synthetic construct
  misc_feature 1..19: note = siRNA antisense sequence
  source 1..19: mol_type = other RNA
taagtcctgtagagttata

SEQ ID NO: 31850 - RNA, 19 nt, synthetic construct
  misc_feature 1..19: note = siRNA sense sequence
  source 1..19: mol_type = other RNA
ataactctacaggacttaa

SEQ ID NO: 31851 - RNA, 19 nt, synthetic construct
  misc_feature 1..19: note = siRNA antisense sequence
  source 1..19: mol_type = other RNA
ttaagtcctgtagagttat

SEQ ID NO: 31852 - RNA, 19 nt, synthetic construct
  misc_feature 1..19: note = siRNA sense sequence
  source 1..19: mol_type = other RNA
taactctacaggacttaaa

SEQ ID NO: 31853 - RNA, 19 nt, synthetic construct
  misc_feature 1..19: note = siRNA antisense sequence
  source 1..19: mol_type = other RNA
tttaagtcctgtagagtta

SEQ ID NO: 31854 - RNA, 19 nt, synthetic construct
  misc_feature 1..19: note = siRNA sense sequence
  source 1..19: mol_type = other RNA
aactctacaggacttaaaa

SEQ ID NO: 31855 - RNA, 19 nt, synthetic construct
  misc_feature 1..19: note = siRNA antisense sequence
  source 1..19: mol_type = other RNA
ttttaagtcctgtagagtt

SEQ ID NO: 31856 - RNA, 19 nt, synthetic construct
  misc_feature 1..19: note = siRNA sense sequence
  source 1..19: mol_type = other RNA
actctacaggacttaaaag

SEQ ID NO: 31857 - RNA, 19 nt, synthetic construct
  misc_feature 1..19: note = siRNA antisense sequence
  source 1..19: mol_type = other RNA
cttttaagtcctgtagagt

SEQ ID NO: 31858 - RNA, 19 nt, synthetic construct
  misc_feature 1..19: note = siRNA sense sequence
  source 1..19: mol_type = other RNA
ctctacaggacttaaaaga

SEQ ID NO: 31859 - RNA, 19 nt, synthetic construct
  misc_feature 1..19: note = siRNA antisense sequence
  source 1..19: mol_type = other RNA
tcttttaagtcctgtagag

SEQ ID NO: 31860 - RNA, 19 nt, synthetic construct
  misc_feature 1..19: note = siRNA sense sequence
  source 1..19: mol_type = other RNA
tgattgtattatgggttcc

SEQ ID NO: 31861 - RNA, 19 nt, synthetic construct
  misc_feature 1..19: note = siRNA antisense sequence
  source 1..19: mol_type = other RNA
ggaacccataatacaatca

SEQ ID NO: 31862 - RNA, 19 nt, synthetic construct
  misc_feature 1..19: note = siRNA sense sequence
  source 1..19: mol_type = other RNA
gattgtattatgggttcca

SEQ ID NO: 31863 - RNA, 19 nt, synthetic construct
  misc_feature 1..19: note = siRNA antisense sequence
  source 1..19: mol_type = other RNA
tggaacccataatacaatc

SEQ ID NO: 31864 - RNA, 19 nt, synthetic construct
  misc_feature 1..19: note = siRNA sense sequence
  source 1..19: mol_type = other RNA
tccatctgattttactacc

SEQ ID NO: 31865 - RNA, 19 nt, synthetic construct
  misc_feature 1..19: note = siRNA antisense sequence
  source 1..19: mol_type = other RNA
ggtagtaaaatcagatgga

SEQ ID NO: 31866 - RNA, 19 nt, synthetic construct
  misc_feature 1..19: note = siRNA sense sequence
  source 1..19: mol_type = other RNA
gattttactaccttgctct

SEQ ID NO: 31867 - RNA, 19 nt, synthetic construct
  misc_feature 1..19: note = siRNA antisense sequence
  source 1..19: mol_type = other RNA
agagcaaggtagtaaaatc

SEQ ID NO: 31868 - RNA, 19 nt, synthetic construct
  misc_feature 1..19: note = siRNA sense sequence
  source 1..19: mol_type = other RNA
attttactaccttgctctt

SEQ ID NO: 31869 - RNA, 19 nt, synthetic construct
  misc_feature 1..19: note = siRNA antisense sequence
  source 1..19: mol_type = other RNA
aagagcaaggtagtaaaat

SEQ ID NO: 31870 - RNA, 19 nt, synthetic construct
  misc_feature 1..19: note = siRNA sense sequence
  source 1..19: mol_type = other RNA
tactaccttgctcttgcta

SEQ ID NO: 31871 - RNA, 19 nt, synthetic construct
  misc_feature 1..19: note = siRNA antisense sequence
  source 1..19: mol_type = other RNA
tagcaagagcaaggtagta

SEQ ID NO: 31872 - RNA, 19 nt, synthetic construct
  misc_feature 1..19: note = siRNA sense sequence
  source 1..19: mol_type = other RNA
actaccttgctcttgctag

SEQ ID NO: 31873 - RNA, 19 nt, synthetic construct
  misc_feature 1..19: note = siRNA antisense sequence
  source 1..19: mol_type = other RNA
ctagcaagagcaaggtagt

SEQ ID NO: 31874 - RNA, 19 nt, synthetic construct
  misc_feature 1..19: note = siRNA sense sequence
  source 1..19: mol_type = other RNA
cttgctagagttaagagtt

SEQ ID NO: 31875 - RNA, 19 nt, synthetic construct
  misc_feature 1..19: note = siRNA antisense sequence
  source 1..19: mol_type = other RNA
aactcttaactctagcaag

SEQ ID NO: 31876 - RNA, 19 nt, synthetic construct
  misc_feature 1..19: note = siRNA sense sequence
  source 1..19: mol_type = other RNA
ttgctagagttaagagttt

SEQ ID NO: 31877 - RNA, 19 nt, synthetic construct
  misc_feature 1..19: note = siRNA antisense sequence
  source 1..19: mol_type = other RNA
aaactcttaactctagcaa

SEQ ID NO: 31878 - RNA, 19 nt, synthetic construct
  misc_feature 1..19: note = siRNA sense sequence
  source 1..19: mol_type = other RNA
tgctagagttaagagtttt

SEQ ID NO: 31879 - RNA, 19 nt, synthetic construct
  misc_feature 1..19: note = siRNA antisense sequence
  source 1..19: mol_type = other RNA
aaaactcttaactctagca

SEQ ID NO: 31880 - RNA, 19 nt, synthetic construct
  misc_feature 1..19: note = siRNA sense sequence
  source 1..19: mol_type = other RNA
gctagagttaagagttttc

SEQ ID NO: 31881 - RNA, 19 nt, synthetic construct
  misc_feature 1..19: note = siRNA antisense sequence
  source 1..19: mol_type = other RNA
gaaaactcttaactctagc

SEQ ID NO: 31882 - RNA, 19 nt, synthetic construct
  misc_feature 1..19: note = siRNA sense sequence
  source 1..19: mol_type = other RNA
ctagagttaagagttttct

SEQ ID NO: 31883 - RNA, 19 nt, synthetic construct
  misc_feature 1..19: note = siRNA antisense sequence
  source 1..19: mol_type = other RNA
agaaaactcttaactctag

SEQ ID NO: 31884 - RNA, 19 nt, synthetic construct
  misc_feature 1..19: note = siRNA sense sequence
  source 1..19: mol_type = other RNA
agagttaagagttttctga

SEQ ID NO: 31885 - RNA, 19 nt, synthetic construct
  misc_feature 1..19: note = siRNA antisense sequence
  source 1..19: mol_type = other RNA
tcagaaaactcttaactct

SEQ ID NO: 31886 - RNA, 19 nt, synthetic construct
  misc_feature 1..19: note = siRNA sense sequence
  source 1..19: mol_type = other RNA
gagttaagagttttctgaa

SEQ ID NO: 31887 - RNA, 19 nt, synthetic construct
  misc_feature 1..19: note = siRNA antisense sequence
  source 1..19: mol_type = other RNA
ttcagaaaactcttaactc

SEQ ID NO: 31888 - RNA, 19 nt, synthetic construct
  misc_feature 1..19: note = siRNA sense sequence
  source 1..19: mol_type = other RNA
aagcttattcagtgttaac

SEQ ID NO: 31889 - RNA, 19 nt, synthetic construct
  misc_feature 1..19: note = siRNA antisense sequence
  source 1..19: mol_type = other RNA
gttaacactgaataagctt

SEQ ID NO: 31890 - RNA, 19 nt, synthetic construct
  misc_feature 1..19: note = siRNA sense sequence
  source 1..19: mol_type = other RNA
agcttattcagtgttaact

SEQ ID NO: 31891 - RNA, 19 nt, synthetic construct
  misc_feature 1..19: note = siRNA antisense sequence
  source 1..19: mol_type = other RNA
agttaacactgaataagct

SEQ ID NO: 31892 - RNA, 19 nt, synthetic construct
  misc_feature 1..19: note = siRNA sense sequence
  source 1..19: mol_type = other RNA
gcttattcagtgttaacta

SEQ ID NO: 31893 - RNA, 19 nt, synthetic construct
  misc_feature 1..19: note = siRNA antisense sequence
  source 1..19: mol_type = other RNA
tagttaacactgaataagc

SEQ ID NO: 31894 - RNA, 19 nt, synthetic construct
  misc_feature 1..19: note = siRNA sense sequence
  source 1..19: mol_type = other RNA
atgttacttttcctgggcc

SEQ ID NO: 31895 - RNA, 19 nt, synthetic construct
  misc_feature 1..19: note = siRNA antisense sequence
  source 1..19: mol_type = other RNA
ggcccaggaaaagtaacat

SEQ ID NO: 31896 - RNA, 19 nt, synthetic construct
  misc_feature 1..19: note = siRNA sense sequence
  source 1..19: mol_type = other RNA
aaggttattttgttgcaag

SEQ ID NO: 31897 - RNA, 19 nt, synthetic construct
  misc_feature 1..19: note = siRNA antisense sequence
  source 1..19: mol_type = other RNA
cttgcaacaaaataacctt

SEQ ID NO: 31898 - RNA, 19 nt, synthetic construct
  misc_feature 1..19: note = siRNA sense sequence
  source 1..19: mol_type = other RNA
ttattttgttgcaagagtc

SEQ ID NO: 31899 - RNA, 19 nt, synthetic construct
  misc_feature 1..19: note = siRNA antisense sequence
  source 1..19: mol_type = other RNA
gactcttgcaacaaaataa

SEQ ID NO: 31900 - RNA, 19 nt, synthetic construct
  misc_feature 1..19: note = siRNA sense sequence
  source 1..19: mol_type = other RNA
tattttgttgcaagagtct

SEQ ID NO: 31901 - RNA, 19 nt, synthetic construct
  misc_feature 1..19: note = siRNA antisense sequence
  source 1..19: mol_type = other RNA
agactcttgcaacaaaata

SEQ ID NO: 31902 - RNA, 19 nt, synthetic construct
  misc_feature 1..19: note = siRNA sense sequence
  source 1..19: mol_type = other RNA
ttgttgcaagagtctattt

SEQ ID NO: 31903 - RNA, 19 nt, synthetic construct
  misc_feature 1..19: note = siRNA antisense sequence
  source 1..19: mol_type = other RNA
aaatagactcttgcaacaa

SEQ ID NO: 31904 - RNA, 19 nt, synthetic construct
  misc_feature 1..19: note = siRNA sense sequence
  source 1..19: mol_type = other RNA
tgttgcaagagtctattta

SEQ ID NO: 31905 - RNA, 19 nt, synthetic construct
  misc_feature 1..19: note = siRNA antisense sequence
  source 1..19: mol_type = other RNA
taaatagactcttgcaaca

SEQ ID NO: 31906 - RNA, 19 nt, synthetic construct
  misc_feature 1..19: note = siRNA sense sequence
  source 1..19: mol_type = other RNA
gttgcaagagtctatttag

SEQ ID NO: 31907 - RNA, 19 nt, synthetic construct
  misc_feature 1..19: note = siRNA antisense sequence
  source 1..19: mol_type = other RNA
ctaaatagactcttgcaac

SEQ ID NO: 31908 - RNA, 19 nt, synthetic construct
  misc_feature 1..19: note = siRNA sense sequence
  source 1..19: mol_type = other RNA
ttgcaagagtctatttagg

SEQ ID NO: 31909 - RNA, 19 nt, synthetic construct
  misc_feature 1..19: note = siRNA antisense sequence
  source 1..19: mol_type = other RNA
cctaaatagactcttgcaa

SEQ ID NO: 31910 - RNA, 19 nt, synthetic construct
  misc_feature 1..19: note = siRNA sense sequence
  source 1..19: mol_type = other RNA
tgcaagagtctatttaggt

SEQ ID NO: 31911 - RNA, 19 nt, synthetic construct
  misc_feature 1..19: note = siRNA antisense sequence
  source 1..19: mol_type = other RNA
acctaaatagactcttgca

SEQ ID NO: 31912 - RNA, 19 nt, synthetic construct
  misc_feature 1..19: note = siRNA sense sequence
  source 1..19: mol_type = other RNA
aagcaaattgaagttgttc

SEQ ID NO: 31913 - RNA, 19 nt, synthetic construct
  misc_feature 1..19: note = siRNA antisense sequence
  source 1..19: mol_type = other RNA
gaacaacttcaatttgctt

SEQ ID NO: 31914 - RNA, 19 nt, synthetic construct
  misc_feature 1..19: note = siRNA sense sequence
  source 1..19: mol_type = other RNA
agcaaattgaagttgttct

SEQ ID NO: 31915 - RNA, 19 nt, synthetic construct
  misc_feature 1..19: note = siRNA antisense sequence
  source 1..19: mol_type = other RNA
agaacaacttcaatttgct

SEQ ID NO: 31916 - RNA, 19 nt, synthetic construct
  misc_feature 1..19: note = siRNA sense sequence
  source 1..19: mol_type = other RNA
gcaaattgaagttgttctg

SEQ ID NO: 31917 - RNA, 19 nt, synthetic construct
  misc_feature 1..19: note = siRNA antisense sequence
  source 1..19: mol_type = other RNA
cagaacaacttcaatttgc

SEQ ID NO: 31918 - RNA, 19 nt, synthetic construct
  misc_feature 1..19: note = siRNA sense sequence
  source 1..19: mol_type = other RNA
caaattgaagttgttctga

SEQ ID NO: 31919 - RNA, 19 nt, synthetic construct
  misc_feature 1..19: note = siRNA antisense sequence
  source 1..19: mol_type = other RNA
tcagaacaacttcaatttg

SEQ ID NO: 31920 - RNA, 19 nt, synthetic construct
  misc_feature 1..19: note = siRNA sense sequence
  source 1..19: mol_type = other RNA
gaagttgttctgataaatg

SEQ ID NO: 31921 - RNA, 19 nt, synthetic construct
  misc_feature 1..19: note = siRNA antisense sequence
  source 1..19: mol_type = other RNA
catttatcagaacaacttc

SEQ ID NO: 31922 - RNA, 19 nt, synthetic construct
  misc_feature 1..19: note = siRNA sense sequence
  source 1..19: mol_type = other RNA
aactatgatgtggccattt

SEQ ID NO: 31923 - RNA, 19 nt, synthetic construct
  misc_feature 1..19: note = siRNA antisense sequence
  source 1..19: mol_type = other RNA
aaatggccacatcatagtt

SEQ ID NO: 31924 - RNA, 19 nt, synthetic construct
  misc_feature 1..19: note = siRNA sense sequence
  source 1..19: mol_type = other RNA
actatgatgtggccattta

SEQ ID NO: 31925 - RNA, 19 nt, synthetic construct
  misc_feature 1..19: note = siRNA antisense sequence
  source 1..19: mol_type = other RNA
taaatggccacatcatagt

SEQ ID NO: 31926 - RNA, 19 nt, synthetic construct
  misc_feature 1..19: note = siRNA sense sequence
  source 1..19: mol_type = other RNA
ctatgatgtggccatttaa

SEQ ID NO: 31927 - RNA, 19 nt, synthetic construct
  misc_feature 1..19: note = siRNA antisense sequence
  source 1..19: mol_type = other RNA
ttaaatggccacatcatag

SEQ ID NO: 31928 - RNA, 19 nt, synthetic construct
  misc_feature 1..19: note = siRNA sense sequence
  source 1..19: mol_type = other RNA
ggaggtatattaactttgt

SEQ ID NO: 31929 - RNA, 19 nt, synthetic construct
  misc_feature 1..19: note = siRNA antisense sequence
  source 1..19: mol_type = other RNA
acaaagttaatatacctcc

SEQ ID NO: 31930 - RNA, 19 nt, synthetic construct
  misc_feature 1..19: note = siRNA sense sequence
  source 1..19: mol_type = other RNA
gaggtatattaactttgtg

SEQ ID NO: 31931 - RNA, 19 nt, synthetic construct
  misc_feature 1..19: note = siRNA antisense sequence
  source 1..19: mol_type = other RNA
cacaaagttaatatacctc

SEQ ID NO: 31932 - RNA, 19 nt, synthetic construct
  misc_feature 1..19: note = siRNA sense sequence
  source 1..19: mol_type = other RNA
aggtatattaactttgtgg

SEQ ID NO: 31933 - RNA, 19 nt, synthetic construct
  misc_feature 1..19: note = siRNA antisense sequence
  source 1..19: mol_type = other RNA
ccacaaagttaatatacct

SEQ ID NO: 31934 - RNA, 19 nt, synthetic construct
  misc_feature 1..19: note = siRNA sense sequence
  source 1..19: mol_type = other RNA
ggtatattaactttgtgga

SEQ ID NO: 31935 - RNA, 19 nt, synthetic construct
  misc_feature 1..19: note = siRNA antisense sequence
  source 1..19: mol_type = other RNA
tccacaaagttaatatacc

SEQ ID NO: 31936 - RNA, 19 nt, synthetic construct
  misc_feature 1..19: note = siRNA sense sequence
  source 1..19: mol_type = other RNA
ttaactttgtggaattgtg

SEQ ID NO: 31937 - RNA, 19 nt, synthetic construct
  misc_feature 1..19: note = siRNA antisense sequence
  source 1..19: mol_type = other RNA
cacaattccacaaagttaa

SEQ ID NO: 31938 - RNA, 19 nt, synthetic construct
  misc_feature 1..19: note = siRNA sense sequence
  source 1..19: mol_type = other RNA
taactttgtggaattgtgc

SEQ ID NO: 31939 - RNA, 19 nt, synthetic construct
  misc_feature 1..19: note = siRNA antisense sequence
  source 1..19: mol_type = other RNA
gcacaattccacaaagtta

SEQ ID NO: 31940 - RNA, 19 nt, synthetic construct
  misc_feature 1..19: note = siRNA sense sequence
  source 1..19: mol_type = other RNA
aactttgtggaattgtgcc

SEQ ID NO: 31941 - RNA, 19 nt, synthetic construct
  misc_feature 1..19: note = siRNA antisense sequence
  source 1..19: mol_type = other RNA
ggcacaattccacaaagtt

SEQ ID NO: 31942 - RNA, 19 nt, synthetic construct
  misc_feature 1..19: note = siRNA sense sequence
  source 1..19: mol_type = other RNA
actttgtggaattgtgcca

SEQ ID NO: 31943 - RNA, 19 nt, synthetic construct
  misc_feature 1..19: note = siRNA antisense sequence
  source 1..19: mol_type = other RNA
tggcacaattccacaaagt

SEQ ID NO: 31944 - RNA, 19 nt, synthetic construct
  misc_feature 1..19: note = siRNA sense sequence
  source 1..19: mol_type = other RNA
tgtggaattgtgccattaa

SEQ ID NO: 31945 - RNA, 19 nt, synthetic construct
  misc_feature 1..19: note = siRNA antisense sequence
  source 1..19: mol_type = other RNA
ttaatggcacaattccaca

SEQ ID NO: 31946 - RNA, 19 nt, synthetic construct
  misc_feature 1..19: note = siRNA sense sequence
  source 1..19: mol_type = other RNA
gtggaattgtgccattaaa

SEQ ID NO: 31947 - RNA, 19 nt, synthetic construct
  misc_feature 1..19: note = siRNA antisense sequence
  source 1..19: mol_type = other RNA
tttaatggcacaattccac

SEQ ID NO: 31948 - RNA, 19 nt, synthetic construct
  misc_feature 1..19: note = siRNA sense sequence
  source 1..19: mol_type = other RNA
tggaattgtgccattaaag

SEQ ID NO: 31949 - RNA, 19 nt, synthetic construct
  misc_feature 1..19: note = siRNA antisense sequence
  source 1..19: mol_type = other RNA
ctttaatggcacaattcca

SEQ ID NO: 31950 - RNA, 19 nt, synthetic construct
  misc_feature 1..19: note = siRNA sense sequence
  source 1..19: mol_type = other RNA
ggaattgtgccattaaaga

SEQ ID NO: 31951 - RNA, 19 nt, synthetic construct
  misc_feature 1..19: note = siRNA antisense sequence
  source 1..19: mol_type = other RNA
tctttaatggcacaattcc

SEQ ID NO: 31952 - RNA, 19 nt, synthetic construct
  misc_feature 1..19: note = siRNA sense sequence
  source 1..19: mol_type = other RNA
gaattgtgccattaaagac

SEQ ID NO: 31953 - RNA, 19 nt, synthetic construct
  misc_feature 1..19: note = siRNA antisense sequence
  source 1..19: mol_type = other RNA
gtctttaatggcacaattc

SEQ ID NO: 31954 - RNA, 19 nt, synthetic construct
  misc_feature 1..19: note = siRNA sense sequence
  source 1..19: mol_type = other RNA
aattgtgccattaaagaca

SEQ ID NO: 31955 - RNA, 19 nt, synthetic construct
  misc_feature 1..19: note = siRNA antisense sequence
  source 1..19: mol_type = other RNA
tgtctttaatggcacaatt

SEQ ID NO: 31956 - RNA, 19 nt, synthetic construct
  misc_feature 1..19: note = siRNA sense sequence
  source 1..19: mol_type = other RNA
aagcagttggctggatgaa

SEQ ID NO: 31957 - RNA, 19 nt, synthetic construct
  misc_feature 1..19: note = siRNA antisense sequence
  source 1..19: mol_type = other RNA
ttcatccagccaactgctt

SEQ ID NO: 31958 - RNA, 19 nt, synthetic construct
  misc_feature 1..19: note = siRNA sense sequence
  source 1..19: mol_type = other RNA
agcagttggctggatgaag

SEQ ID NO: 31959 - RNA, 19 nt, synthetic construct
  misc_feature 1..19: note = siRNA antisense sequence
  source 1..19: mol_type = other RNA
cttcatccagccaactgct

SEQ ID NO: 31960 - RNA, 19 nt, synthetic construct
  misc_feature 1..19: note = siRNA sense sequence
  source 1..19: mol_type = other RNA
gttggctggatgaagtagt

SEQ ID NO: 31961 - RNA, 19 nt, synthetic construct
  misc_feature 1..19: note = siRNA antisense sequence
  source 1..19: mol_type = other RNA
actacttcatccagccaac

SEQ ID NO: 31962 - RNA, 19 nt, synthetic construct
  misc_feature 1..19: note = siRNA sense sequence
  source 1..19: mol_type = other RNA
ttggctggatgaagtagta

SEQ ID NO: 31963 - RNA, 19 nt, synthetic construct
  misc_feature 1..19: note = siRNA antisense sequence
  source 1..19: mol_type = other RNA
tactacttcatccagccaa

SEQ ID NO: 31964 - RNA, 19 nt, synthetic construct
  misc_feature 1..19: note = siRNA sense sequence
  source 1..19: mol_type = other RNA
tggctggatgaagtagtat

SEQ ID NO: 31965 - RNA, 19 nt, synthetic construct
  misc_feature 1..19: note = siRNA antisense sequence
  source 1..19: mol_type = other RNA
atactacttcatccagcca

SEQ ID NO: 31966 - RNA, 19 nt, synthetic construct
  misc_feature 1..19: note = siRNA sense sequence
  source 1..19: mol_type = other RNA
ggctggatgaagtagtata

SEQ ID NO: 31967 - RNA, 19 nt, synthetic construct
  misc_feature 1..19: note = siRNA antisense sequence
  source 1..19: mol_type = other RNA
tatactacttcatccagcc

SEQ ID NO: 31968 - RNA, 19 nt, synthetic construct
  misc_feature 1..19: note = siRNA sense sequence
  source 1..19: mol_type = other RNA
gctggatgaagtagtatag

SEQ ID NO: 31969 - RNA, 19 nt, synthetic construct
  misc_feature 1..19: note = siRNA antisense sequence
  source 1..19: mol_type = other RNA
ctatactacttcatccagc

SEQ ID NO: 31970 - RNA, 19 nt, synthetic construct
  misc_feature 1..19: note = siRNA sense sequence
  source 1..19: mol_type = other RNA
ggatgaagtagtatagaat

SEQ ID NO: 31971 - RNA, 19 nt, synthetic construct
  misc_feature 1..19: note = siRNA antisense sequence
  source 1..19: mol_type = other RNA
attctatactacttcatcc

SEQ ID NO: 31972 - RNA, 19 nt, synthetic construct
  misc_feature 1..19: note = siRNA sense sequence
  source 1..19: mol_type = other RNA
tgaagtagtatagaattgc

SEQ ID NO: 31973 - RNA, 19 nt, synthetic construct
  misc_feature 1..19: note = siRNA antisense sequence
  source 1..19: mol_type = other RNA
gcaattctatactacttca

SEQ ID NO: 31974 - RNA, 19 nt, synthetic construct
  misc_feature 1..19: note = siRNA sense sequence
  source 1..19: mol_type = other RNA
gaagtagtatagaattgca

SEQ ID NO: 31975 - RNA, 19 nt, synthetic construct
  misc_feature 1..19: note = siRNA antisense sequence
  source 1..19: mol_type = other RNA
tgcaattctatactacttc

SEQ ID NO: 31976 - RNA, 19 nt, synthetic construct
  misc_feature 1..19: note = siRNA sense sequence
  source 1..19: mol_type = other RNA
ttagaatcaataagacacc

SEQ ID NO: 31977 - RNA, 19 nt, synthetic construct
  misc_feature 1..19: note = siRNA antisense sequence
  source 1..19: mol_type = other RNA
ggtgtcttattgattctaa

SEQ ID NO: 31978 - RNA, 19 nt, synthetic construct
  misc_feature 1..19: note = siRNA sense sequence
  source 1..19: mol_type = other RNA
tagaatcaataagacacct

SEQ ID NO: 31979 - RNA, 19 nt, synthetic construct
  misc_feature 1..19: note = siRNA antisense sequence
  source 1..19: mol_type = other RNA
aggtgtcttattgattcta

SEQ ID NO: 31980 - RNA, 19 nt, synthetic construct
  misc_feature 1..19: note = siRNA sense sequence
  source 1..19: mol_type = other RNA
agaatcaataagacaccta

SEQ ID NO: 31981 - RNA, 19 nt, synthetic construct
  misc_feature 1..19: note = siRNA antisense sequence
  source 1..19: mol_type = other RNA
taggtgtcttattgattct

SEQ ID NO: 31982 - RNA, 19 nt, synthetic construct
  misc_feature 1..19: note = siRNA sense sequence
  source 1..19: mol_type = other RNA
gaatcaataagacacctaa

SEQ ID NO: 31983 - RNA, 19 nt, synthetic construct
  misc_feature 1..19: note = siRNA antisense sequence
  source 1..19: mol_type = other RNA
ttaggtgtcttattgattc

SEQ ID NO: 31984 - RNA, 19 nt, synthetic construct
  misc_feature 1..19: note = siRNA sense sequence
  source 1..19: mol_type = other RNA
atcaataagacacctaatg

SEQ ID NO: 31985 - RNA, 19 nt, synthetic construct
  misc_feature 1..19: note = siRNA antisense sequence
  source 1..19: mol_type = other RNA
cattaggtgtcttattgat

SEQ ID NO: 31986 - RNA, 19 nt, synthetic construct
  misc_feature 1..19: note = siRNA sense sequence
  source 1..19: mol_type = other RNA
tcaataagacacctaatgg

SEQ ID NO: 31987 - RNA, 19 nt, synthetic construct
  misc_feature 1..19: note = siRNA antisense sequence
  source 1..19: mol_type = other RNA
ccattaggtgtcttattga

SEQ ID NO: 31988 - RNA, 19 nt, synthetic construct
  misc_feature 1..19: note = siRNA sense sequence
  source 1..19: mol_type = other RNA
caataagacacctaatgga

SEQ ID NO: 31989 - RNA, 19 nt, synthetic construct
  misc_feature 1..19: note = siRNA antisense sequence
  source 1..19: mol_type = other RNA
tccattaggtgtcttattg

SEQ ID NO: 31990 - RNA, 19 nt, synthetic construct
  misc_feature 1..19: note = siRNA sense sequence
  source 1..19: mol_type = other RNA
aataagacacctaatggaa

SEQ ID NO: 31991 - RNA, 19 nt, synthetic construct
  misc_feature 1..19: note = siRNA antisense sequence
  source 1..19: mol_type = other RNA
ttccattaggtgtcttatt

SEQ ID NO: 31992 - RNA, 19 nt, synthetic construct
  misc_feature 1..19: note = siRNA sense sequence
  source 1..19: mol_type = other RNA
catctaccaatgaatctat

SEQ ID NO: 31993 - RNA, 19 nt, synthetic construct
  misc_feature 1..19: note = siRNA antisense sequence
  source 1..19: mol_type = other RNA
atagattcattggtagatg

SEQ ID NO: 31994 - RNA, 19 nt, synthetic construct
  misc_feature 1..19: note = siRNA sense sequence
  source 1..19: mol_type = other RNA
atctaccaatgaatctatg

SEQ ID NO: 31995 - RNA, 19 nt, synthetic construct
  misc_feature 1..19: note = siRNA antisense sequence
  source 1..19: mol_type = other RNA
catagattcattggtagat

SEQ ID NO: 31996 - RNA, 19 nt, synthetic construct
  misc_feature 1..19: note = siRNA sense sequence
  source 1..19: mol_type = other RNA
tctatgaagatcaggtact

SEQ ID NO: 31997 - RNA, 19 nt, synthetic construct
  misc_feature 1..19: note = siRNA antisense sequence
  source 1..19: mol_type = other RNA
agtacctgatcttcataga

SEQ ID NO: 31998 - RNA, 19 nt, synthetic construct
  misc_feature 1..19: note = siRNA sense sequence
  source 1..19: mol_type = other RNA
tatgaagatcaggtacttt

SEQ ID NO: 31999 - RNA, 19 nt, synthetic construct
  misc_feature 1..19: note = siRNA antisense sequence
  source 1..19: mol_type = other RNA
aaagtacctgatcttcata

SEQ ID NO: 32000 - RNA, 19 nt, synthetic construct
  misc_feature 1..19: note = siRNA sense sequence
  source 1..19: mol_type = other RNA
atgaagatcaggtacttta

SEQ ID NO: 32001 - RNA, 19 nt, synthetic construct
  misc_feature 1..19: note = siRNA antisense sequence
  source 1..19: mol_type = other RNA
taaagtacctgatcttcat

SEQ ID NO: 32002 - RNA, 19 nt, synthetic construct
  misc_feature 1..19: note = siRNA sense sequence
  source 1..19: mol_type = other RNA
tgaagatcaggtactttag

SEQ ID NO: 32003 - RNA, 19 nt, synthetic construct
  misc_feature 1..19: note = siRNA antisense sequence
  source 1..19: mol_type = other RNA
ctaaagtacctgatcttca

SEQ ID NO: 32004 - RNA, 19 nt, synthetic construct
  misc_feature 1..19: note = siRNA sense sequence
  source 1..19: mol_type = other RNA
gaagatcaggtactttagc

SEQ ID NO: 32005 - RNA, 19 nt, synthetic construct
  misc_feature 1..19: note = siRNA antisense sequence
  source 1..19: mol_type = other RNA
gctaaagtacctgatcttc

SEQ ID NO: 32006 - RNA, 19 nt, synthetic construct
  misc_feature 1..19: note = siRNA sense sequence
  source 1..19: mol_type = other RNA
aagatcaggtactttagca

SEQ ID NO: 32007 - RNA, 19 nt, synthetic construct
  misc_feature 1..19: note = siRNA antisense sequence
  source 1..19: mol_type = other RNA
tgctaaagtacctgatctt

SEQ ID NO: 32008 - RNA, 19 nt, synthetic construct
  misc_feature 1..19: note = siRNA sense sequence
  source 1..19: mol_type = other RNA
agatcaggtactttagcaa

SEQ ID NO: 32009 - RNA, 19 nt, synthetic construct
  misc_feature 1..19: note = siRNA antisense sequence
  source 1..19: mol_type = other RNA
ttgctaaagtacctgatct

SEQ ID NO: 32010 - RNA, 19 nt, synthetic construct
  misc_feature 1..19: note = siRNA sense sequence
  source 1..19: mol_type = other RNA
aggtactttagcaatatag

SEQ ID NO: 32011 - RNA, 19 nt, synthetic construct
  misc_feature 1..19: note = siRNA antisense sequence
  source 1..19: mol_type = other RNA
ctatattgctaaagtacct

SEQ ID NO: 32012 - RNA, 19 nt, synthetic construct
  misc_feature 1..19: note = siRNA sense sequence
  source 1..19: mol_type = other RNA
ggtactttagcaatataga

SEQ ID NO: 32013 - RNA, 19 nt, synthetic construct
  misc_feature 1..19: note = siRNA antisense sequence
  source 1..19: mol_type = other RNA
tctatattgctaaagtacc

SEQ ID NO: 32014 - RNA, 19 nt, synthetic construct
  misc_feature 1..19: note = siRNA sense sequence
  source 1..19: mol_type = other RNA
cagtccatgtgaaggcagt

SEQ ID NO: 32015 - RNA, 19 nt, synthetic construct
  misc_feature 1..19: note = siRNA antisense sequence
  source 1..19: mol_type = other RNA
actgccttcacatggactg

SEQ ID NO: 32016 - RNA, 19 nt, synthetic construct
  misc_feature 1..19: note = siRNA sense sequence
  source 1..19: mol_type = other RNA
agtccatgtgaaggcagtt

SEQ ID NO: 32017 - RNA, 19 nt, synthetic construct
  misc_feature 1..19: note = siRNA antisense sequence
  source 1..19: mol_type = other RNA
aactgccttcacatggact

SEQ ID NO: 32018 - RNA, 19 nt, synthetic construct
  misc_feature 1..19: note = siRNA sense sequence
  source 1..19: mol_type = other RNA
gtccatgtgaaggcagttc

SEQ ID NO: 32019 - RNA, 19 nt, synthetic construct
  misc_feature 1..19: note = siRNA antisense sequence
  source 1..19: mol_type = other RNA
gaactgccttcacatggac

SEQ ID NO: 32020 - RNA, 19 nt, synthetic construct
  misc_feature 1..19: note = siRNA sense sequence
  source 1..19: mol_type = other RNA
ggcagttcattcctggtgt

SEQ ID NO: 32021 - RNA, 19 nt, synthetic construct
  misc_feature 1..19: note = siRNA antisense sequence
  source 1..19: mol_type = other RNA
acaccaggaatgaactgcc

SEQ ID NO: 32022 - RNA, 19 nt, synthetic construct
  misc_feature 1..19: note = siRNA sense sequence
  source 1..19: mol_type = other RNA
gcagttcattcctggtgtg

SEQ ID NO: 32023 - RNA, 19 nt, synthetic construct
  misc_feature 1..19: note = siRNA antisense sequence
  source 1..19: mol_type = other RNA
cacaccaggaatgaactgc

SEQ ID NO: 32024 - RNA, 19 nt, synthetic construct
  misc_feature 1..19: note = siRNA sense sequence
  source 1..19: mol_type = other RNA
cagttcattcctggtgtgg

SEQ ID NO: 32025 - RNA, 19 nt, synthetic construct
  misc_feature 1..19: note = siRNA antisense sequence
  source 1..19: mol_type = other RNA
ccacaccaggaatgaactg

SEQ ID NO: 32026 - RNA, 19 nt, synthetic construct
  misc_feature 1..19: note = siRNA sense sequence
  source 1..19: mol_type = other RNA
tcattcctggtgtggtggc

SEQ ID NO: 32027 - RNA, 19 nt, synthetic construct
  misc_feature 1..19: note = siRNA antisense sequence
  source 1..19: mol_type = other RNA
gccaccacaccaggaatga

SEQ ID NO: 32028 - RNA, 19 nt, synthetic construct
  misc_feature 1..19: note = siRNA sense sequence
  source 1..19: mol_type = other RNA
cattcctggtgtggtggct

SEQ ID NO: 32029 - RNA, 19 nt, synthetic construct
  misc_feature 1..19: note = siRNA antisense sequence
  source 1..19: mol_type = other RNA
agccaccacaccaggaatg

SEQ ID NO: 32030 - RNA, 19 nt, synthetic construct
  misc_feature 1..19: note = siRNA sense sequence
  source 1..19: mol_type = other RNA
attcctggtgtggtggctc

SEQ ID NO: 32031 - RNA, 19 nt, synthetic construct
  misc_feature 1..19: note = siRNA antisense sequence
  source 1..19: mol_type = other RNA
gagccaccacaccaggaat

SEQ ID NO: 32032 - RNA, 19 nt, synthetic construct
  misc_feature 1..19: note = siRNA sense sequence
  source 1..19: mol_type = other RNA
ttcctggtgtggtggctct

SEQ ID NO: 32033 - RNA, 19 nt, synthetic construct
  misc_feature 1..19: note = siRNA antisense sequence
  source 1..19: mol_type = other RNA
agagccaccacaccaggaa

SEQ ID NO: 32034 - RNA, 19 nt, synthetic construct
  misc_feature 1..19: note = siRNA sense sequence
  source 1..19: mol_type = other RNA
ttgtcagcataaccctgtg

SEQ ID NO: 32035 - RNA, 19 nt, synthetic construct
  misc_feature 1..19: note = siRNA antisense sequence
  source 1..19: mol_type = other RNA
cacagggttatgctgacaa

SEQ ID NO: 32036 - RNA, 19 nt, synthetic construct
  misc_feature 1..19: note = siRNA sense sequence
  source 1..19: mol_type = other RNA
tgtcagcataaccctgtgt

SEQ ID NO: 32037 - RNA, 19 nt, synthetic construct
  misc_feature 1..19: note = siRNA antisense sequence
  source 1..19: mol_type = other RNA
acacagggttatgctgaca

SEQ ID NO: 32038 - RNA, 19 nt, synthetic construct
  misc_feature 1..19: note = siRNA sense sequence
  source 1..19: mol_type = other RNA
gtcagcataaccctgtgtt

SEQ ID NO: 32039 - RNA, 19 nt, synthetic construct
  misc_feature 1..19: note = siRNA antisense sequence
  source 1..19: mol_type = other RNA
aacacagggttatgctgac

SEQ ID NO: 32040 - RNA, 19 nt, synthetic construct
  misc_feature 1..19: note = siRNA sense sequence
  source 1..19: mol_type = other RNA
ccctgtgttactttcatct

SEQ ID NO: 32041 - RNA, 19 nt, synthetic construct
  misc_feature 1..19: note = siRNA antisense sequence
  source 1..19: mol_type = other RNA
agatgaaagtaacacaggg

SEQ ID NO: 32042 - RNA, 19 nt, synthetic construct
  misc_feature 1..19: note = siRNA sense sequence
  source 1..19: mol_type = other RNA
cctgtgttactttcatctt

SEQ ID NO: 32043 - RNA, 19 nt, synthetic construct
  misc_feature 1..19: note = siRNA antisense sequence
  source 1..19: mol_type = other RNA
aagatgaaagtaacacagg

SEQ ID NO: 32044 - RNA, 19 nt, synthetic construct
  misc_feature 1..19: note = siRNA sense sequence
  source 1..19: mol_type = other RNA
tgtgttactttcatctttc

SEQ ID NO: 32045 - RNA, 19 nt, synthetic construct
  misc_feature 1..19: note = siRNA antisense sequence
  source 1..19: mol_type = other RNA
gaaagatgaaagtaacaca

SEQ ID NO: 32046 - RNA, 19 nt, synthetic construct
  misc_feature 1..19: note = siRNA sense sequence
  source 1..19: mol_type = other RNA
gtgttactttcatctttct

SEQ ID NO: 32047 - RNA, 19 nt, synthetic construct
  misc_feature 1..19: note = siRNA antisense sequence
  source 1..19: mol_type = other RNA
agaaagatgaaagtaacac

SEQ ID NO: 32048 - RNA, 19 nt, synthetic construct
  misc_feature 1..19: note = siRNA sense sequence
  source 1..19: mol_type = other RNA
tgttactttcatctttctg

SEQ ID NO: 32049 - RNA, 19 nt, synthetic construct
  misc_feature 1..19: note = siRNA antisense sequence
  source 1..19: mol_type = other RNA
cagaaagatgaaagtaaca

SEQ ID NO: 32050 - RNA, 19 nt, synthetic construct
  misc_feature 1..19: note = siRNA sense sequence
  source 1..19: mol_type = other RNA
gttactttcatctttctgc

SEQ ID NO: 32051 - RNA, 19 nt, synthetic construct
  misc_feature 1..19: note = siRNA antisense sequence
  source 1..19: mol_type = other RNA
gcagaaagatgaaagtaac

SEQ ID NO: 32052 - RNA, 19 nt, synthetic construct
  misc_feature 1..19: note = siRNA sense sequence
  source 1..19: mol_type = other RNA
actttcatctttctgcttc

SEQ ID NO: 32053 - RNA, 19 nt, synthetic construct
  misc_feature 1..19: note = siRNA antisense sequence
  source 1..19: mol_type = other RNA
gaagcagaaagatgaaagt

SEQ ID NO: 32054 - RNA, 19 nt, synthetic construct
  misc_feature 1..19: note = siRNA sense sequence
  source 1..19: mol_type = other RNA
tttctgcttcagcacctag

SEQ ID NO: 32055 - RNA, 19 nt, synthetic construct
  misc_feature 1..19: note = siRNA antisense sequence
  source 1..19: mol_type = other RNA
ctaggtgctgaagcagaaa

SEQ ID NO: 32056 - RNA, 19 nt, synthetic construct
  misc_feature 1..19: note = siRNA sense sequence
  source 1..19: mol_type = other RNA
ttctgcttcagcacctagc

SEQ ID NO: 32057 - RNA, 19 nt, synthetic construct
  misc_feature 1..19: note = siRNA antisense sequence
  source 1..19: mol_type = other RNA
gctaggtgctgaagcagaa

SEQ ID NO: 32058 - RNA, 19 nt, synthetic construct
  misc_feature 1..19: note = siRNA sense sequence
  source 1..19: mol_type = other RNA
tcagcacctagcacatcac

SEQ ID NO: 32059 - RNA, 19 nt, synthetic construct
  misc_feature 1..19: note = siRNA antisense sequence
  source 1..19: mol_type = other RNA
gtgatgtgctaggtgctga

SEQ ID NO: 32060 - RNA, 19 nt, synthetic construct
  misc_feature 1..19: note = siRNA sense sequence
  source 1..19: mol_type = other RNA
cagcacctagcacatcact

SEQ ID NO: 32061 - RNA, 19 nt, synthetic construct
  misc_feature 1..19: note = siRNA antisense sequence
  source 1..19: mol_type = other RNA
agtgatgtgctaggtgctg

SEQ ID NO: 32062 - RNA, 19 nt, synthetic construct
  misc_feature 1..19: note = siRNA sense sequence
  source 1..19: mol_type = other RNA
agcacctagcacatcactt

SEQ ID NO: 32063 - RNA, 19 nt, synthetic construct
  misc_feature 1..19: note = siRNA antisense sequence
  source 1..19: mol_type = other RNA
aagtgatgtgctaggtgct

SEQ ID NO: 32064 - RNA, 19 nt, synthetic construct
  misc_feature 1..19: note = siRNA sense sequence
  source 1..19: mol_type = other RNA
gcacctagcacatcacttc

SEQ ID NO: 32065 - RNA, 19 nt, synthetic construct
  misc_feature 1..19: note = siRNA antisense sequence
  source 1..19: mol_type = other RNA
gaagtgatgtgctaggtgc

SEQ ID NO: 32066 - RNA, 19 nt, synthetic construct
  misc_feature 1..19: note = siRNA sense sequence
  source 1..19: mol_type = other RNA
cacctagcacatcacttct

SEQ ID NO: 32067 - RNA, 19 nt, synthetic construct
  misc_feature 1..19: note = siRNA antisense sequence
  source 1..19: mol_type = other RNA
agaagtgatgtgctaggtg

SEQ ID NO: 32068 - RNA, 19 nt, synthetic construct
  misc_feature 1..19: note = siRNA sense sequence
  source 1..19: mol_type = other RNA
acctagcacatcacttctg

SEQ ID NO: 32069 - RNA, 19 nt, synthetic construct
  misc_feature 1..19: note = siRNA antisense sequence
  source 1..19: mol_type = other RNA
cagaagtgatgtgctaggt

SEQ ID NO: 32070 - RNA, 19 nt, synthetic construct
  misc_feature 1..19: note = siRNA sense sequence
  source 1..19: mol_type = other RNA
cctagcacatcacttctgt

SEQ ID NO: 32071 - RNA, 19 nt, synthetic construct
  misc_feature 1..19: note = siRNA antisense sequence
  source 1..19: mol_type = other RNA
acagaagtgatgtgctagg

SEQ ID NO: 32072 - RNA, 19 nt, synthetic construct
  misc_feature 1..19: note = siRNA sense sequence
  source 1..19: mol_type = other RNA
ctagcacatcacttctgtt

SEQ ID NO: 32073 - RNA, 19 nt, synthetic construct
  misc_feature 1..19: note = siRNA antisense sequence
  source 1..19: mol_type = other RNA
aacagaagtgatgtgctag

SEQ ID NO: 32074 - RNA, 19 nt, synthetic construct
  misc_feature 1..19: note = siRNA sense sequence
  source 1..19: mol_type = other RNA
tagcacatcacttctgttc

SEQ ID NO: 32075 - RNA, 19 nt, synthetic construct
  misc_feature 1..19: note = siRNA antisense sequence
  source 1..19: mol_type = other RNA
gaacagaagtgatgtgcta

SEQ ID NO: 32076 - RNA, 19 nt, synthetic construct
  misc_feature 1..19: note = siRNA sense sequence
  source 1..19: mol_type = other RNA
gcacatcacttctgttcaa

SEQ ID NO: 32077 - RNA, 19 nt, synthetic construct
  misc_feature 1..19: note = siRNA antisense sequence
  source 1..19: mol_type = other RNA
ttgaacagaagtgatgtgc

SEQ ID NO: 32078 - RNA, 19 nt, synthetic construct
  misc_feature 1..19: note = siRNA sense sequence
  source 1..19: mol_type = other RNA
cttctgttcaagttcactt

SEQ ID NO: 32079 - RNA, 19 nt, synthetic construct
  misc_feature 1..19: note = siRNA antisense sequence
  source 1..19: mol_type = other RNA
aagtgaacttgaacagaag

SEQ ID NO: 32080 - RNA, 19 nt, synthetic construct
  misc_feature 1..19: note = siRNA sense sequence
  source 1..19: mol_type = other RNA
ttctgttcaagttcacttc

SEQ ID NO: 32081 - RNA, 19 nt, synthetic construct
  misc_feature 1..19: note = siRNA antisense sequence
  source 1..19: mol_type = other RNA
gaagtgaacttgaacagaa

SEQ ID NO: 32082 - RNA, 19 nt, synthetic construct
  misc_feature 1..19: note = siRNA sense sequence
  source 1..19: mol_type = other RNA
tctgttcaagttcacttca

SEQ ID NO: 32083 - RNA, 19 nt, synthetic construct
  misc_feature 1..19: note = siRNA antisense sequence
  source 1..19: mol_type = other RNA
tgaagtgaacttgaacaga

SEQ ID NO: 32084 - RNA, 19 nt, synthetic construct
  misc_feature 1..19: note = siRNA sense sequence
  source 1..19: mol_type = other RNA
ctgttcaagttcacttcat

SEQ ID NO: 32085 - RNA, 19 nt, synthetic construct
  misc_feature 1..19: note = siRNA antisense sequence
  source 1..19: mol_type = other RNA
atgaagtgaacttgaacag

SEQ ID NO: 32086 - RNA, 19 nt, synthetic construct
  misc_feature 1..19: note = siRNA sense sequence
  source 1..19: mol_type = other RNA
tgttcaagttcacttcata

SEQ ID NO: 32087 - RNA, 19 nt, synthetic construct
  misc_feature 1..19: note = siRNA antisense sequence
  source 1..19: mol_type = other RNA
tatgaagtgaacttgaaca

SEQ ID NO: 32088 - RNA, 19 nt, synthetic construct
  misc_feature 1..19: note = siRNA sense sequence
  source 1..19: mol_type = other RNA
gttcaagttcacttcatag

SEQ ID NO: 32089 - RNA, 19 nt, synthetic construct
  misc_feature 1..19: note = siRNA antisense sequence
  source 1..19: mol_type = other RNA
ctatgaagtgaacttgaac

SEQ ID NO: 32090 - RNA, 19 nt, synthetic construct
  misc_feature 1..19: note = siRNA sense sequence
  source 1..19: mol_type = other RNA
ttcaagttcacttcatagt

SEQ ID NO: 32091 - RNA, 19 nt, synthetic construct
  misc_feature 1..19: note = siRNA antisense sequence
  source 1..19: mol_type = other RNA
actatgaagtgaacttgaa

SEQ ID NO: 32092 - RNA, 19 nt, synthetic construct
  misc_feature 1..19: note = siRNA sense sequence
  source 1..19: mol_type = other RNA
tcaagttcacttcatagtc

SEQ ID NO: 32093 - RNA, 19 nt, synthetic construct
  misc_feature 1..19: note = siRNA antisense sequence
  source 1..19: mol_type = other RNA
gactatgaagtgaacttga

SEQ ID NO: 32094 - RNA, 19 nt, synthetic construct
  misc_feature 1..19: note = siRNA sense sequence
  source 1..19: mol_type = other RNA
caagttcacttcatagtcc

SEQ ID NO: 32095 - RNA, 19 nt, synthetic construct
  misc_feature 1..19: note = siRNA antisense sequence
  source 1..19: mol_type = other RNA
ggactatgaagtgaacttg

SEQ ID NO: 32096 - RNA, 19 nt, synthetic construct
  misc_feature 1..19: note = siRNA sense sequence
  source 1..19: mol_type = other RNA
aagttcacttcatagtcca

SEQ ID NO: 32097 - RNA, 19 nt, synthetic construct
  misc_feature 1..19: note = siRNA antisense sequence
  source 1..19: mol_type = other RNA
tggactatgaagtgaactt

SEQ ID NO: 32098 - RNA, 19 nt, synthetic construct
  misc_feature 1..19: note = siRNA sense sequence
  source 1..19: mol_type = other RNA
agttcacttcatagtccaa

SEQ ID NO: 32099 - RNA, 19 nt, synthetic construct
  misc_feature 1..19: note = siRNA antisense sequence
  source 1..19: mol_type = other RNA
ttggactatgaagtgaact

SEQ ID NO: 32100 - RNA, 19 nt, synthetic construct
  misc_feature 1..19: note = siRNA sense sequence
  source 1..19: mol_type = other RNA
gttcacttcatagtccaac

SEQ ID NO: 32101 - RNA, 19 nt, synthetic construct
  misc_feature 1..19: note = siRNA antisense sequence
  source 1..19: mol_type = other RNA
gttggactatgaagtgaac

SEQ ID NO: 32102 - RNA, 19 nt, synthetic construct
  misc_feature 1..19: note = siRNA sense sequence
  source 1..19: mol_type = other RNA
gggcagttgaagcctgtct

SEQ ID NO: 32103 - RNA, 19 nt, synthetic construct
  misc_feature 1..19: note = siRNA antisense sequence
  source 1..19: mol_type = other RNA
agacaggcttcaactgccc

SEQ ID NO: 32104 - RNA, 19 nt, synthetic construct
  misc_feature 1..19: note = siRNA sense sequence
  source 1..19: mol_type = other RNA
ggcagttgaagcctgtctt

SEQ ID NO: 32105 - RNA, 19 nt, synthetic construct
  misc_feature 1..19: note = siRNA antisense sequence
  source 1..19: mol_type = other RNA
aagacaggcttcaactgcc

SEQ ID NO: 32106 - RNA, 19 nt, synthetic construct
  misc_feature 1..19: note = siRNA sense sequence
  source 1..19: mol_type = other RNA
ttgaagcctgtcttagtct

SEQ ID NO: 32107 - RNA, 19 nt, synthetic construct
  misc_feature 1..19: note = siRNA antisense sequence
  source 1..19: mol_type = other RNA
agactaagacaggcttcaa

SEQ ID NO: 32108 - RNA, 19 nt, synthetic construct
  misc_feature 1..19: note = siRNA sense sequence
  source 1..19: mol_type = other RNA
tgaagcctgtcttagtctg

SEQ ID NO: 32109 - RNA, 19 nt, synthetic construct
  misc_feature 1..19: note = siRNA antisense sequence
  source 1..19: mol_type = other RNA
cagactaagacaggcttca

SEQ ID NO: 32110 - RNA, 19 nt, synthetic construct
  misc_feature 1..19: note = siRNA sense sequence
  source 1..19: mol_type = other RNA
gcctgtcttagtctgctta

SEQ ID NO: 32111 - RNA, 19 nt, synthetic construct
  misc_feature 1..19: note = siRNA antisense sequence
  source 1..19: mol_type = other RNA
taagcagactaagacaggc

SEQ ID NO: 32112 - RNA, 19 nt, synthetic construct
  misc_feature 1..19: note = siRNA sense sequence
  source 1..19: mol_type = other RNA
gtcttagtctgcttagttg

SEQ ID NO: 32113 - RNA, 19 nt, synthetic construct
  misc_feature 1..19: note = siRNA antisense sequence
  source 1..19: mol_type = other RNA
caactaagcagactaagac

SEQ ID NO: 32114 - RNA, 19 nt, synthetic construct
  misc_feature 1..19: note = siRNA sense sequence
  source 1..19: mol_type = other RNA
tcttagtctgcttagttgc

SEQ ID NO: 32115 - RNA, 19 nt, synthetic construct
  misc_feature 1..19: note = siRNA antisense sequence
  source 1..19: mol_type = other RNA
gcaactaagcagactaaga

SEQ ID NO: 32116 - RNA, 19 nt, synthetic construct
  misc_feature 1..19: note = siRNA sense sequence
  source 1..19: mol_type = other RNA
cttagtctgcttagttgcc

SEQ ID NO: 32117 - RNA, 19 nt, synthetic construct
  misc_feature 1..19: note = siRNA antisense sequence
  source 1..19: mol_type = other RNA
ggcaactaagcagactaag

SEQ ID NO: 32118 - RNA, 19 nt, synthetic construct
  misc_feature 1..19: note = siRNA sense sequence
  source 1..19: mol_type = other RNA
ttagtctgcttagttgcca

SEQ ID NO: 32119 - RNA, 19 nt, synthetic construct
  misc_feature 1..19: note = siRNA antisense sequence
  source 1..19: mol_type = other RNA
tggcaactaagcagactaa

SEQ ID NO: 32120 - RNA, 19 nt, synthetic construct
  misc_feature 1..19: note = siRNA sense sequence
  source 1..19: mol_type = other RNA
gcttagttgccatagcaga

SEQ ID NO: 32121 - RNA, 19 nt, synthetic construct
  misc_feature 1..19: note = siRNA antisense sequence
  source 1..19: mol_type = other RNA
tctgctatggcaactaagc

SEQ ID NO: 32122 - RNA, 19 nt, synthetic construct
  misc_feature 1..19: note = siRNA sense sequence
  source 1..19: mol_type = other RNA
agactgggtggctaatata

SEQ ID NO: 32123 - RNA, 19 nt, synthetic construct
  misc_feature 1..19: note = siRNA antisense sequence
  source 1..19: mol_type = other RNA
tatattagccacccagtct

SEQ ID NO: 32124 - RNA, 19 nt, synthetic construct
  misc_feature 1..19: note = siRNA sense sequence
  source 1..19: mol_type = other RNA
gactgggtggctaatataa

SEQ ID NO: 32125 - RNA, 19 nt, synthetic construct
  misc_feature 1..19: note = siRNA antisense sequence
  source 1..19: mol_type = other RNA
ttatattagccacccagtc

SEQ ID NO: 32126 - RNA, 19 nt, synthetic construct
  misc_feature 1..19: note = siRNA sense sequence
  source 1..19: mol_type = other RNA
actgggtggctaatataac

SEQ ID NO: 32127 - RNA, 19 nt, synthetic construct
  misc_feature 1..19: note = siRNA antisense sequence
  source 1..19: mol_type = other RNA
gttatattagccacccagt

SEQ ID NO: 32128 - RNA, 19 nt, synthetic construct
  misc_feature 1..19: note = siRNA sense sequence
  source 1..19: mol_type = other RNA
tgtattctccctctgctct

SEQ ID NO: 32129 - RNA, 19 nt, synthetic construct
  misc_feature 1..19: note = siRNA antisense sequence
  source 1..19: mol_type = other RNA
agagcagagggagaataca

SEQ ID NO: 32130 - RNA, 19 nt, synthetic construct
  misc_feature 1..19: note = siRNA sense sequence
  source 1..19: mol_type = other RNA
gtattctccctctgctcta

SEQ ID NO: 32131 - RNA, 19 nt, synthetic construct
  misc_feature 1..19: note = siRNA antisense sequence
  source 1..19: mol_type = other RNA
tagagcagagggagaatac

SEQ ID NO: 32132 - RNA, 19 nt, synthetic construct
  misc_feature 1..19: note = siRNA sense sequence
  source 1..19: mol_type = other RNA
tctccctctgctctagaag

SEQ ID NO: 32133 - RNA, 19 nt, synthetic construct
  misc_feature 1..19: note = siRNA antisense sequence
  source 1..19: mol_type = other RNA
cttctagagcagagggaga

SEQ ID NO: 32134 - RNA, 19 nt, synthetic construct
  misc_feature 1..19: note = siRNA sense sequence
  source 1..19: mol_type = other RNA
tagaagctagaaggccaaa

SEQ ID NO: 32135 - RNA, 19 nt, synthetic construct
  misc_feature 1..19: note = siRNA antisense sequence
  source 1..19: mol_type = other RNA
tttggccttctagcttcta

SEQ ID NO: 32136 - RNA, 19 nt, synthetic construct
  misc_feature 1..19: note = siRNA sense sequence
  source 1..19: mol_type = other RNA
agaagctagaaggccaaaa

SEQ ID NO: 32137 - RNA, 19 nt, synthetic construct
  misc_feature 1..19: note = siRNA antisense sequence
  source 1..19: mol_type = other RNA
ttttggccttctagcttct

SEQ ID NO: 32138 - RNA, 19 nt, synthetic construct
  misc_feature 1..19: note = siRNA sense sequence
  source 1..19: mol_type = other RNA
ggccaaaatcaagttgctt

SEQ ID NO: 32139 - RNA, 19 nt, synthetic construct
  misc_feature 1..19: note = siRNA antisense sequence
  source 1..19: mol_type = other RNA
aagcaacttgattttggcc

SEQ ID NO: 32140 - RNA, 19 nt, synthetic construct
  misc_feature 1..19: note = siRNA sense sequence
  source 1..19: mol_type = other RNA
gccaaaatcaagttgcttt

SEQ ID NO: 32141 - RNA, 19 nt, synthetic construct
  misc_feature 1..19: note = siRNA antisense sequence
  source 1..19: mol_type = other RNA
aaagcaacttgattttggc

SEQ ID NO: 32142 - RNA, 19 nt, synthetic construct
  misc_feature 1..19: note = siRNA sense sequence
  source 1..19: mol_type = other RNA
ccaaaatcaagttgctttc

SEQ ID NO: 32143 - RNA, 19 nt, synthetic construct
  misc_feature 1..19: note = siRNA antisense sequence
  source 1..19: mol_type = other RNA
gaaagcaacttgattttgg

SEQ ID NO: 32144 - RNA, 19 nt, synthetic construct
  misc_feature 1..19: note = siRNA sense sequence
  source 1..19: mol_type = other RNA
aatcaagttgctttcagct

SEQ ID NO: 32145 - RNA, 19 nt, synthetic construct
  misc_feature 1..19: note = siRNA antisense sequence
  source 1..19: mol_type = other RNA
agctgaaagcaacttgatt

SEQ ID NO: 32146 - RNA, 19 nt, synthetic construct
  misc_feature 1..19: note = siRNA sense sequence
  source 1..19: mol_type = other RNA
atcaagttgctttcagctt

SEQ ID NO: 32147 - RNA, 19 nt, synthetic construct
  misc_feature 1..19: note = siRNA antisense sequence
  source 1..19: mol_type = other RNA
aagctgaaagcaacttgat

SEQ ID NO: 32148 - RNA, 19 nt, synthetic construct
  misc_feature 1..19: note = siRNA sense sequence
  source 1..19: mol_type = other RNA
aagttgctttcagcttgat

SEQ ID NO: 32149 - RNA, 19 nt, synthetic construct
  misc_feature 1..19: note = siRNA antisense sequence
  source 1..19: mol_type = other RNA
atcaagctgaaagcaactt

SEQ ID NO: 32150 - RNA, 19 nt, synthetic construct
  misc_feature 1..19: note = siRNA sense sequence
  source 1..19: mol_type = other RNA
ttttgatgaggcttccctt

SEQ ID NO: 32151 - RNA, 19 nt, synthetic construct
  misc_feature 1..19: note = siRNA antisense sequence
  source 1..19: mol_type = other RNA
aagggaagcctcatcaaaa

SEQ ID NO: 32152 - RNA, 19 nt, synthetic construct
  misc_feature 1..19: note = siRNA sense sequence
  source 1..19: mol_type = other RNA
ctgtcttgtaaatggccat

SEQ ID NO: 32153 - RNA, 19 nt, synthetic construct
  misc_feature 1..19: note = siRNA antisense sequence
  source 1..19: mol_type = other RNA
atggccatttacaagacag

SEQ ID NO: 32154 - RNA, 19 nt, synthetic construct
  misc_feature 1..19: note = siRNA sense sequence
  source 1..19: mol_type = other RNA
gccatcttcttgccgtatc

SEQ ID NO: 32155 - RNA, 19 nt, synthetic construct
  misc_feature 1..19: note = siRNA antisense sequence
  source 1..19: mol_type = other RNA
gatacggcaagaagatggc

SEQ ID NO: 32156 - RNA, 19 nt, synthetic construct
  misc_feature 1..19: note = siRNA sense sequence
  source 1..19: mol_type = other RNA
ccatcttcttgccgtatcc

SEQ ID NO: 32157 - RNA, 19 nt, synthetic construct
  misc_feature 1..19: note = siRNA antisense sequence
  source 1..19: mol_type = other RNA
ggatacggcaagaagatgg

SEQ ID NO: 32158 - RNA, 19 nt, synthetic construct
  misc_feature 1..19: note = siRNA sense sequence
  source 1..19: mol_type = other RNA
catcttcttgccgtatcct

SEQ ID NO: 32159 - RNA, 19 nt, synthetic construct
  misc_feature 1..19: note = siRNA antisense sequence
  source 1..19: mol_type = other RNA
aggatacggcaagaagatg

SEQ ID NO: 32160 - RNA, 19 nt, synthetic construct
  misc_feature 1..19: note = siRNA sense sequence
  source 1..19: mol_type = other RNA
atcttcttgccgtatcctc

SEQ ID NO: 32161 - RNA, 19 nt, synthetic construct
  misc_feature 1..19: note = siRNA antisense sequence
  source 1..19: mol_type = other RNA
gaggatacggcaagaagat

SEQ ID NO: 32162 - RNA, 19 nt, synthetic construct
  misc_feature 1..19: note = siRNA sense sequence
  source 1..19: mol_type = other RNA
cttatctctgtgtacatag

SEQ ID NO: 32163 - RNA, 19 nt, synthetic construct
  misc_feature 1..19: note = siRNA antisense sequence
  source 1..19: mol_type = other RNA
ctatgtacacagagataag

SEQ ID NO: 32164 - RNA, 19 nt, synthetic construct
  misc_feature 1..19: note = siRNA sense sequence
  source 1..19: mol_type = other RNA
ttatctctgtgtacatagt

SEQ ID NO: 32165 - RNA, 19 nt, synthetic construct
  misc_feature 1..19: note = siRNA antisense sequence
  source 1..19: mol_type = other RNA
actatgtacacagagataa

SEQ ID NO: 32166 - RNA, 19 nt, synthetic construct
  misc_feature 1..19: note = siRNA sense sequence
  source 1..19: mol_type = other RNA
tatctctgtgtacatagtg

SEQ ID NO: 32167 - RNA, 19 nt, synthetic construct
  misc_feature 1..19: note = siRNA antisense sequence
  source 1..19: mol_type = other RNA
cactatgtacacagagata

SEQ ID NO: 32168 - RNA, 19 nt, synthetic construct
  misc_feature 1..19: note = siRNA sense sequence
  source 1..19: mol_type = other RNA
atctctgtgtacatagtgg

SEQ ID NO: 32169 - RNA, 19 nt, synthetic construct
  misc_feature 1..19: note = siRNA antisense sequence
  source 1..19: mol_type = other RNA
ccactatgtacacagagat

SEQ ID NO: 32170 - RNA, 19 nt, synthetic construct
  misc_feature 1..19: note = siRNA sense sequence
  source 1..19: mol_type = other RNA
tctctgtgtacatagtgga

SEQ ID NO: 32171 - RNA, 19 nt, synthetic construct
  misc_feature 1..19: note = siRNA antisense sequence
  source 1..19: mol_type = other RNA
tccactatgtacacagaga

SEQ ID NO: 32172 - RNA, 19 nt, synthetic construct
  misc_feature 1..19: note = siRNA sense sequence
  source 1..19: mol_type = other RNA
ctctgtgtacatagtggag

SEQ ID NO: 32173 - RNA, 19 nt, synthetic construct
  misc_feature 1..19: note = siRNA antisense sequence
  source 1..19: mol_type = other RNA
ctccactatgtacacagag

SEQ ID NO: 32174 - RNA, 19 nt, synthetic construct
  misc_feature 1..19: note = siRNA sense sequence
  source 1..19: mol_type = other RNA
aaaagaaggaaggaaggaa

SEQ ID NO: 32175 - RNA, 19 nt, synthetic construct
  misc_feature 1..19: note = siRNA antisense sequence
  source 1..19: mol_type = other RNA
ttccttccttccttctttt

SEQ ID NO: 32176 - RNA, 19 nt, synthetic construct
  misc_feature 1..19: note = siRNA sense sequence
  source 1..19: mol_type = other RNA
tggtatccctttcttttat

SEQ ID NO: 32177 - RNA, 19 nt, synthetic construct
  misc_feature 1..19: note = siRNA antisense sequence
  source 1..19: mol_type = other RNA
ataaaagaaagggatacca

SEQ ID NO: 32178 - RNA, 19 nt, synthetic construct
  misc_feature 1..19: note = siRNA sense sequence
  source 1..19: mol_type = other RNA
ggtatccctttcttttatt

SEQ ID NO: 32179 - RNA, 19 nt, synthetic construct
  misc_feature 1..19: note = siRNA antisense sequence
  source 1..19: mol_type = other RNA
aataaaagaaagggatacc

SEQ ID NO: 32180 - RNA, 19 nt, synthetic construct
  misc_feature 1..19: note = siRNA sense sequence
  source 1..19: mol_type = other RNA
agtggttgtgatttcattt

SEQ ID NO: 32181 - RNA, 19 nt, synthetic construct
  misc_feature 1..19: note = siRNA antisense sequence
  source 1..19: mol_type = other RNA
aaatgaaatcacaaccact

SEQ ID NO: 32182 - RNA, 19 nt, synthetic construct
  misc_feature 1..19: note = siRNA sense sequence
  source 1..19: mol_type = other RNA
ggttgtgatttcatttaac

SEQ ID NO: 32183 - RNA, 19 nt, synthetic construct
  misc_feature 1..19: note = siRNA antisense sequence
  source 1..19: mol_type = other RNA
gttaaatgaaatcacaacc

SEQ ID NO: 32184 - RNA, 19 nt, synthetic construct
  misc_feature 1..19: note = siRNA sense sequence
  source 1..19: mol_type = other RNA
gttgtgatttcatttaacc

SEQ ID NO: 32185 - RNA, 19 nt, synthetic construct
  misc_feature 1..19: note = siRNA antisense sequence
  source 1..19: mol_type = other RNA
ggttaaatgaaatcacaac

SEQ ID NO: 32186 - RNA, 19 nt, synthetic construct
  misc_feature 1..19: note = siRNA sense sequence
  source 1..19: mol_type = other RNA
aaatgctgtcactttagcg

SEQ ID NO: 32187 - RNA, 19 nt, synthetic construct
  misc_feature 1..19: note = siRNA antisense sequence
  source 1..19: mol_type = other RNA
cgctaaagtgacagcattt

SEQ ID NO: 32188 - RNA, 19 nt, synthetic construct
  misc_feature 1..19: note = siRNA sense sequence
  source 1..19: mol_type = other RNA
aatgctgtcactttagcgg

SEQ ID NO: 32189 - RNA, 19 nt, synthetic construct
  misc_feature 1..19: note = siRNA antisense sequence
  source 1..19: mol_type = other RNA
ccgctaaagtgacagcatt

SEQ ID NO: 32190 - RNA, 19 nt, synthetic construct
  misc_feature 1..19: note = siRNA sense sequence
  source 1..19: mol_type = other RNA
atgctgtcactttagcggt

SEQ ID NO: 32191 - RNA, 19 nt, synthetic construct
  misc_feature 1..19: note = siRNA antisense sequence
  source 1..19: mol_type = other RNA
accgctaaagtgacagcat

SEQ ID NO: 32192 - RNA, 19 nt, synthetic construct
  misc_feature 1..19: note = siRNA sense sequence
  source 1..19: mol_type = other RNA
tgctgtcactttagcggtt

SEQ ID NO: 32193 - RNA, 19 nt, synthetic construct
  misc_feature 1..19: note = siRNA antisense sequence
  source 1..19: mol_type = other RNA
aaccgctaaagtgacagca

SEQ ID NO: 32194 - RNA, 19 nt, synthetic construct
  misc_feature 1..19: note = siRNA sense sequence
  source 1..19: mol_type = other RNA
gctgtcactttagcggtta

SEQ ID NO: 32195 - RNA, 19 nt, synthetic construct
  misc_feature 1..19: note = siRNA antisense sequence
  source 1..19: mol_type = other RNA
taaccgctaaagtgacagc

SEQ ID NO: 32196 - RNA, 19 nt, synthetic construct
  misc_feature 1..19: note = siRNA sense sequence
  source 1..19: mol_type = other RNA
ctgtcactttagcggttag

SEQ ID NO: 32197 - RNA, 19 nt, synthetic construct
  misc_feature 1..19: note = siRNA antisense sequence
  source 1..19: mol_type = other RNA
ctaaccgctaaagtgacag

SEQ ID NO: 32198 - RNA, 19 nt, synthetic construct
  misc_feature 1..19: note = siRNA sense sequence
  source 1..19: mol_type = other RNA
tgtcactttagcggttagg

SEQ ID NO: 32199 - RNA, 19 nt, synthetic construct
  misc_feature 1..19: note = siRNA antisense sequence
  source 1..19: mol_type = other RNA
cctaaccgctaaagtgaca

SEQ ID NO: 32200 - RNA, 19 nt, synthetic construct
  misc_feature 1..19: note = siRNA sense sequence
  source 1..19: mol_type = other RNA
gtcactttagcggttaggg

SEQ ID NO: 32201 - RNA, 19 nt, synthetic construct
  misc_feature 1..19: note = siRNA antisense sequence
  source 1..19: mol_type = other RNA
ccctaaccgctaaagtgac

SEQ ID NO: 32202 - RNA, 19 nt, synthetic construct
  misc_feature 1..19: note = siRNA sense sequence
  source 1..19: mol_type = other RNA
tcactttagcggttagggc

SEQ ID NO: 32203 - RNA, 19 nt, synthetic construct
  misc_feature 1..19: note = siRNA antisense sequence
  source 1..19: mol_type = other RNA
gccctaaccgctaaagtga

SEQ ID NO: 32204 - RNA, 19 nt, synthetic construct
  misc_feature 1..19: note = siRNA sense sequence
  source 1..19: mol_type = other RNA
aaggtagaagaaggataaa

SEQ ID NO: 32205 - RNA, 19 nt, synthetic construct
  misc_feature 1..19: note = siRNA antisense sequence
  source 1..19: mol_type = other RNA
tttatccttcttctacctt

SEQ ID NO: 32206 - RNA, 19 nt, synthetic construct
  misc_feature 1..19: note = siRNA sense sequence
  source 1..19: mol_type = other RNA
ggtagaagaaggataaaag

SEQ ID NO: 32207 - RNA, 19 nt, synthetic construct
  misc_feature 1..19: note = siRNA antisense sequence
  source 1..19: mol_type = other RNA
cttttatccttcttctacc

SEQ ID NO: 32208 - RNA, 19 nt, synthetic construct
  misc_feature 1..19: note = siRNA sense sequence
  source 1..19: mol_type = other RNA
gtagaagaaggataaaaga

SEQ ID NO: 32209 - RNA, 19 nt, synthetic construct
  misc_feature 1..19: note = siRNA antisense sequence
  source 1..19: mol_type = other RNA
tcttttatccttcttctac

SEQ ID NO: 32210 - RNA, 19 nt, synthetic construct
  misc_feature 1..19: note = siRNA sense sequence
  source 1..19: mol_type = other RNA
aaaaggcattctgagttga

SEQ ID NO: 32211 - RNA, 19 nt, synthetic construct
  misc_feature 1..19: note = siRNA antisense sequence
  source 1..19: mol_type = other RNA
tcaactcagaatgcctttt

SEQ ID NO: 32212 - RNA, 19 nt, synthetic construct
  misc_feature 1..19: note = siRNA sense sequence
  source 1..19: mol_type = other RNA
aaaggcattctgagttgaa

SEQ ID NO: 32213 - RNA, 19 nt, synthetic construct
  misc_feature 1..19: note = siRNA antisense sequence
  source 1..19: mol_type = other RNA
ttcaactcagaatgccttt

SEQ ID NO: 32214 - RNA, 19 nt, synthetic construct
  misc_feature 1..19: note = siRNA sense sequence
  source 1..19: mol_type = other RNA
tgagttgaatcagttctgc

SEQ ID NO: 32215 - RNA, 19 nt, synthetic construct
  misc_feature 1..19: note = siRNA antisense sequence
  source 1..19: mol_type = other RNA
gcagaactgattcaactca

SEQ ID NO: 32216 - RNA, 19 nt, synthetic construct
  misc_feature 1..19: note = siRNA sense sequence
  source 1..19: mol_type = other RNA
gagttgaatcagttctgca

SEQ ID NO: 32217 - RNA, 19 nt, synthetic construct
  misc_feature 1..19: note = siRNA antisense sequence
  source 1..19: mol_type = other RNA
tgcagaactgattcaactc

SEQ ID NO: 32218 - RNA, 19 nt, synthetic construct
  misc_feature 1..19: note = siRNA sense sequence
  source 1..19: mol_type = other RNA
tgaatcagttctgcacagg

SEQ ID NO: 32219 - RNA, 19 nt, synthetic construct
  misc_feature 1..19: note = siRNA antisense sequence
  source 1..19: mol_type = other RNA
cctgtgcagaactgattca

SEQ ID NO: 32220 - RNA, 19 nt, synthetic construct
  misc_feature 1..19: note = siRNA sense sequence
  source 1..19: mol_type = other RNA
caatacttccacttacttt

SEQ ID NO: 32221 - RNA, 19 nt, synthetic construct
  misc_feature 1..19: note = siRNA antisense sequence
  source 1..19: mol_type = other RNA
aaagtaagtggaagtattg

SEQ ID NO: 32222 - RNA, 19 nt, synthetic construct
  misc_feature 1..19: note = siRNA sense sequence
  source 1..19: mol_type = other RNA
gtcgtacagctatgctatc

SEQ ID NO: 32223 - RNA, 19 nt, synthetic construct
  misc_feature 1..19: note = siRNA antisense sequence
  source 1..19: mol_type = other RNA
gatagcatagctgtacgac

SEQ ID NO: 32224 - RNA, 19 nt, synthetic construct
  misc_feature 1..19: note = siRNA sense sequence
  source 1..19: mol_type = other RNA
tcgtacagctatgctatct

SEQ ID NO: 32225 - RNA, 19 nt, synthetic construct
  misc_feature 1..19: note = siRNA antisense sequence
  source 1..19: mol_type = other RNA
agatagcatagctgtacga

SEQ ID NO: 32226 - RNA, 19 nt, synthetic construct
  misc_feature 1..19: note = siRNA sense sequence
  source 1..19: mol_type = other RNA
cgtacagctatgctatcta

SEQ ID NO: 32227 - RNA, 19 nt, synthetic construct
  misc_feature 1..19: note = siRNA antisense sequence
  source 1..19: mol_type = other RNA
tagatagcatagctgtacg

SEQ ID NO: 32228 - RNA, 19 nt, synthetic construct
  misc_feature 1..19: note = siRNA sense sequence
  source 1..19: mol_type = other RNA
gctatgctatctacctgtt

SEQ ID NO: 32229 - RNA, 19 nt, synthetic construct
  misc_feature 1..19: note = siRNA antisense sequence
  source 1..19: mol_type = other RNA
aacaggtagatagcatagc

SEQ ID NO: 32230 - RNA, 19 nt, synthetic construct
  misc_feature 1..19: note = siRNA sense sequence
  source 1..19: mol_type = other RNA
ctatgctatctacctgttg

SEQ ID NO: 32231 - RNA, 19 nt, synthetic construct
  misc_feature 1..19: note = siRNA antisense sequence
  source 1..19: mol_type = other RNA
caacaggtagatagcatag

SEQ ID NO: 32232 - RNA, 19 nt, synthetic construct
  misc_feature 1..19: note = siRNA sense sequence
  source 1..19: mol_type = other RNA
tatgctatctacctgttgt

SEQ ID NO: 32233 - RNA, 19 nt, synthetic construct
  misc_feature 1..19: note = siRNA antisense sequence
  source 1..19: mol_type = other RNA
acaacaggtagatagcata

SEQ ID NO: 32234 - RNA, 19 nt, synthetic construct
  misc_feature 1..19: note = siRNA sense sequence
  source 1..19: mol_type = other RNA
atgctatctacctgttgtc

SEQ ID NO: 32235 - RNA, 19 nt, synthetic construct
  misc_feature 1..19: note = siRNA antisense sequence
  source 1..19: mol_type = other RNA
gacaacaggtagatagcat

SEQ ID NO: 32236 - RNA, 19 nt, synthetic construct
  misc_feature 1..19: note = siRNA sense sequence
  source 1..19: mol_type = other RNA
tgctatctacctgttgtct

SEQ ID NO: 32237 - RNA, 19 nt, synthetic construct
  misc_feature 1..19: note = siRNA antisense sequence
  source 1..19: mol_type = other RNA
agacaacaggtagatagca

SEQ ID NO: 32238 - RNA, 19 nt, synthetic construct
  misc_feature 1..19: note = siRNA sense sequence
  source 1..19: mol_type = other RNA
gctatctacctgttgtctt

SEQ ID NO: 32239 - RNA, 19 nt, synthetic construct
  misc_feature 1..19: note = siRNA antisense sequence
  source 1..19: mol_type = other RNA
aagacaacaggtagatagc

SEQ ID NO: 32240 - RNA, 19 nt, synthetic construct
  misc_feature 1..19: note = siRNA sense sequence
  source 1..19: mol_type = other RNA
ctatctacctgttgtcttc

SEQ ID NO: 32241 - RNA, 19 nt, synthetic construct
  misc_feature 1..19: note = siRNA antisense sequence
  source 1..19: mol_type = other RNA
gaagacaacaggtagatag

SEQ ID NO: 32242 - RNA, 19 nt, synthetic construct
  misc_feature 1..19: note = siRNA sense sequence
  source 1..19: mol_type = other RNA
tatctacctgttgtcttct

SEQ ID NO: 32243 - RNA, 19 nt, synthetic construct
  misc_feature 1..19: note = siRNA antisense sequence
  source 1..19: mol_type = other RNA
agaagacaacaggtagata

SEQ ID NO: 32244 - RNA, 19 nt, synthetic construct
  misc_feature 1..19: note = siRNA sense sequence
  source 1..19: mol_type = other RNA
atctacctgttgtcttctg

SEQ ID NO: 32245 - RNA, 19 nt, synthetic construct
  misc_feature 1..19: note = siRNA antisense sequence
  source 1..19: mol_type = other RNA
cagaagacaacaggtagat

SEQ ID NO: 32246 - RNA, 19 nt, synthetic construct
  misc_feature 1..19: note = siRNA sense sequence
  source 1..19: mol_type = other RNA
tctacctgttgtcttctgg

SEQ ID NO: 32247 - RNA, 19 nt, synthetic construct
  misc_feature 1..19: note = siRNA antisense sequence
  source 1..19: mol_type = other RNA
ccagaagacaacaggtaga

SEQ ID NO: 32248 - RNA, 19 nt, synthetic construct
  misc_feature 1..19: note = siRNA sense sequence
  source 1..19: mol_type = other RNA
ctacctgttgtcttctggc

SEQ ID NO: 32249 - RNA, 19 nt, synthetic construct
  misc_feature 1..19: note = siRNA antisense sequence
  source 1..19: mol_type = other RNA
gccagaagacaacaggtag

SEQ ID NO: 32250 - RNA, 19 nt, synthetic construct
  misc_feature 1..19: note = siRNA sense sequence
  source 1..19: mol_type = other RNA
tacctgttgtcttctggct

SEQ ID NO: 32251 - RNA, 19 nt, synthetic construct
  misc_feature 1..19: note = siRNA antisense sequence
  source 1..19: mol_type = other RNA
agccagaagacaacaggta

SEQ ID NO: 32252 - RNA, 19 nt, synthetic construct
  misc_feature 1..19: note = siRNA sense sequence
  source 1..19: mol_type = other RNA
acctgttgtcttctggctg

SEQ ID NO: 32253 - RNA, 19 nt, synthetic construct
  misc_feature 1..19: note = siRNA antisense sequence
  source 1..19: mol_type = other RNA
cagccagaagacaacaggt

SEQ ID NO: 32254 - RNA, 19 nt, synthetic construct
  misc_feature 1..19: note = siRNA sense sequence
  source 1..19: mol_type = other RNA
cctgttgtcttctggctgt

SEQ ID NO: 32255 - RNA, 19 nt, synthetic construct
  misc_feature 1..19: note = siRNA antisense sequence
  source 1..19: mol_type = other RNA
acagccagaagacaacagg

SEQ ID NO: 32256 - RNA, 19 nt, synthetic construct
  misc_feature 1..19: note = siRNA sense sequence
  source 1..19: mol_type = other RNA
ctgttgtcttctggctgtg

SEQ ID NO: 32257 - RNA, 19 nt, synthetic construct
  misc_feature 1..19: note = siRNA antisense sequence
  source 1..19: mol_type = other RNA
cacagccagaagacaacag

SEQ ID NO: 32258 - RNA, 19 nt, synthetic construct
  misc_feature 1..19: note = siRNA sense sequence
  source 1..19: mol_type = other RNA
tgttgtcttctggctgtgt

SEQ ID NO: 32259 - RNA, 19 nt, synthetic construct
  misc_feature 1..19: note = siRNA antisense sequence
  source 1..19: mol_type = other RNA
acacagccagaagacaaca

SEQ ID NO: 32260 - RNA, 19 nt, synthetic construct
  misc_feature 1..19: note = siRNA sense sequence
  source 1..19: mol_type = other RNA
gttgtcttctggctgtgta

SEQ ID NO: 32261 - RNA, 19 nt, synthetic construct
  misc_feature 1..19: note = siRNA antisense sequence
  source 1..19: mol_type = other RNA
tacacagccagaagacaac

SEQ ID NO: 32262 - RNA, 19 nt, synthetic construct
  misc_feature 1..19: note = siRNA sense sequence
  source 1..19: mol_type = other RNA
ttgtcttctggctgtgtac

SEQ ID NO: 32263 - RNA, 19 nt, synthetic construct
  misc_feature 1..19: note = siRNA antisense sequence
  source 1..19: mol_type = other RNA
gtacacagccagaagacaa

SEQ ID NO: 32264 - RNA, 19 nt, synthetic construct
  misc_feature 1..19: note = siRNA sense sequence
  source 1..19: mol_type = other RNA
cttctggctgtgtacactg

SEQ ID NO: 32265 - RNA, 19 nt, synthetic construct
  misc_feature 1..19: note = siRNA antisense sequence
  source 1..19: mol_type = other RNA
cagtgtacacagccagaag

SEQ ID NO: 32266 - RNA, 19 nt, synthetic construct
  misc_feature 1..19: note = siRNA sense sequence
  source 1..19: mol_type = other RNA
ttctggctgtgtacactgc

SEQ ID NO: 32267 - RNA, 19 nt, synthetic construct
  misc_feature 1..19: note = siRNA antisense sequence
  source 1..19: mol_type = other RNA
gcagtgtacacagccagaa

SEQ ID NO: 32268 - RNA, 19 nt, synthetic construct
  misc_feature 1..19: note = siRNA sense sequence
  source 1..19: mol_type = other RNA
tctggctgtgtacactgct

SEQ ID NO: 32269 - RNA, 19 nt, synthetic construct
  misc_feature 1..19: note = siRNA antisense sequence
  source 1..19: mol_type = other RNA
agcagtgtacacagccaga

SEQ ID NO: 32270 - RNA, 19 nt, synthetic construct
  misc_feature 1..19: note = siRNA sense sequence
  source 1..19: mol_type = other RNA
ttaagagctaataagcctt

SEQ ID NO: 32271 - RNA, 19 nt, synthetic construct
  misc_feature 1..19: note = siRNA antisense sequence
  source 1..19: mol_type = other RNA
aaggcttattagctcttaa

SEQ ID NO: 32272 - RNA, 19 nt, synthetic construct
  misc_feature 1..19: note = siRNA sense sequence
  source 1..19: mol_type = other RNA
taagagctaataagccttc

SEQ ID NO: 32273 - RNA, 19 nt, synthetic construct
  misc_feature 1..19: note = siRNA antisense sequence
  source 1..19: mol_type = other RNA
gaaggcttattagctctta

SEQ ID NO: 32274 - RNA, 19 nt, synthetic construct
  misc_feature 1..19: note = siRNA sense sequence
  source 1..19: mol_type = other RNA
aagagctaataagccttct

SEQ ID NO: 32275 - RNA, 19 nt, synthetic construct
  misc_feature 1..19: note = siRNA antisense sequence
  source 1..19: mol_type = other RNA
agaaggcttattagctctt

SEQ ID NO: 32276 - RNA, 19 nt, synthetic construct
  misc_feature 1..19: note = siRNA sense sequence
  source 1..19: mol_type = other RNA
agagctaataagccttctt

SEQ ID NO: 32277 - RNA, 19 nt, synthetic construct
  misc_feature 1..19: note = siRNA antisense sequence
  source 1..19: mol_type = other RNA
aagaaggcttattagctct

SEQ ID NO: 32278 - RNA, 19 nt, synthetic construct
  misc_feature 1..19: note = siRNA sense sequence
  source 1..19: mol_type = other RNA
aactgtgctaggcgttgag

SEQ ID NO: 32279 - RNA, 19 nt, synthetic construct
  misc_feature 1..19: note = siRNA antisense sequence
  source 1..19: mol_type = other RNA
ctcaacgcctagcacagtt

SEQ ID NO: 32280 - RNA, 19 nt, synthetic construct
  misc_feature 1..19: note = siRNA sense sequence
  source 1..19: mol_type = other RNA
taagtactctaaggaattc

SEQ ID NO: 32281 - RNA, 19 nt, synthetic construct
  misc_feature 1..19: note = siRNA antisense sequence
  source 1..19: mol_type = other RNA
gaattccttagagtactta

SEQ ID NO: 32282 - RNA, 19 nt, synthetic construct
  misc_feature 1..19: note = siRNA sense sequence
  source 1..19: mol_type = other RNA
aagtactctaaggaattcc

SEQ ID NO: 32283 - RNA, 19 nt, synthetic construct
  misc_feature 1..19: note = siRNA antisense sequence
  source 1..19: mol_type = other RNA
ggaattccttagagtactt

SEQ ID NO: 32284 - RNA, 19 nt, synthetic construct
  misc_feature 1..19: note = siRNA sense sequence
  source 1..19: mol_type = other RNA
agtactctaaggaattccc

SEQ ID NO: 32285 - RNA, 19 nt, synthetic construct
  misc_feature 1..19: note = siRNA antisense sequence
  source 1..19: mol_type = other RNA
gggaattccttagagtact

SEQ ID NO: 32286 - RNA, 19 nt, synthetic construct
  misc_feature 1..19: note = siRNA sense sequence
  source 1..19: mol_type = other RNA
gtactctaaggaattccca

SEQ ID NO: 32287 - RNA, 19 nt, synthetic construct
  misc_feature 1..19: note = siRNA antisense sequence
  source 1..19: mol_type = other RNA
tgggaattccttagagtac

SEQ ID NO: 32288 - RNA, 19 nt, synthetic construct
  misc_feature 1..19: note = siRNA sense sequence
  source 1..19: mol_type = other RNA
aatataaagcgatacatcc

SEQ ID NO: 32289 - RNA, 19 nt, synthetic construct
  misc_feature 1..19: note = siRNA antisense sequence
  source 1..19: mol_type = other RNA
ggatgtatcgctttatatt

SEQ ID NO: 32290 - RNA, 19 nt, synthetic construct
  misc_feature 1..19: note = siRNA sense sequence
  source 1..19: mol_type = other RNA
atataaagcgatacatcct

SEQ ID NO: 32291 - RNA, 19 nt, synthetic construct
  misc_feature 1..19: note = siRNA antisense sequence
  source 1..19: mol_type = other RNA
aggatgtatcgctttatat

SEQ ID NO: 32292 - RNA, 19 nt, synthetic construct
  misc_feature 1..19: note = siRNA sense sequence
  source 1..19: mol_type = other RNA
tataaagcgatacatccta

SEQ ID NO: 32293 - RNA, 19 nt, synthetic construct
  misc_feature 1..19: note = siRNA antisense sequence
  source 1..19: mol_type = other RNA
taggatgtatcgctttata

SEQ ID NO: 32294 - RNA, 19 nt, synthetic construct
  misc_feature 1..19: note = siRNA sense sequence
  source 1..19: mol_type = other RNA
ataaagcgatacatcctat

SEQ ID NO: 32295 - RNA, 19 nt, synthetic construct
  misc_feature 1..19: note = siRNA antisense sequence
  source 1..19: mol_type = other RNA
ataggatgtatcgctttat

SEQ ID NO: 32296 - RNA, 19 nt, synthetic construct
  misc_feature 1..19: note = siRNA sense sequence
  source 1..19: mol_type = other RNA
taaagcgatacatcctatg

SEQ ID NO: 32297 - RNA, 19 nt, synthetic construct
  misc_feature 1..19: note = siRNA antisense sequence
  source 1..19: mol_type = other RNA
cataggatgtatcgcttta

SEQ ID NO: 32298 - RNA, 19 nt, synthetic construct
  misc_feature 1..19: note = siRNA sense sequence
  source 1..19: mol_type = other RNA
aaagcgatacatcctatgg

SEQ ID NO: 32299 - RNA, 19 nt, synthetic construct
  misc_feature 1..19: note = siRNA antisense sequence
  source 1..19: mol_type = other RNA
ccataggatgtatcgcttt

SEQ ID NO: 32300 - RNA, 19 nt, synthetic construct
  misc_feature 1..19: note = siRNA sense sequence
  source 1..19: mol_type = other RNA
aagcgatacatcctatggg

SEQ ID NO: 32301 - RNA, 19 nt, synthetic construct
  misc_feature 1..19: note = siRNA antisense sequence
  source 1..19: mol_type = other RNA
cccataggatgtatcgctt

SEQ ID NO: 32302 - RNA, 19 nt, synthetic construct
  misc_feature 1..19: note = siRNA sense sequence
  source 1..19: mol_type = other RNA
agcgatacatcctatggga

SEQ ID NO: 32303 - RNA, 19 nt, synthetic construct
  misc_feature 1..19: note = siRNA antisense sequence
  source 1..19: mol_type = other RNA
tcccataggatgtatcgct

SEQ ID NO: 32304 - RNA, 19 nt, synthetic construct
  misc_feature 1..19: note = siRNA sense sequence
  source 1..19: mol_type = other RNA
tcctatgggataaatgtgt

SEQ ID NO: 32305 - RNA, 19 nt, synthetic construct
  misc_feature 1..19: note = siRNA antisense sequence
  source 1..19: mol_type = other RNA
acacatttatcccatagga

SEQ ID NO: 32306 - RNA, 19 nt, synthetic construct
  misc_feature 1..19: note = siRNA sense sequence
  source 1..19: mol_type = other RNA
ctatgggataaatgtgtac

SEQ ID NO: 32307 - RNA, 19 nt, synthetic construct
  misc_feature 1..19: note = siRNA antisense sequence
  source 1..19: mol_type = other RNA
gtacacatttatcccatag

SEQ ID NO: 32308 - RNA, 19 nt, synthetic construct
  misc_feature 1..19: note = siRNA sense sequence
  source 1..19: mol_type = other RNA
agagttcaccaggctaaga

SEQ ID NO: 32309 - RNA, 19 nt, synthetic construct
  misc_feature 1..19: note = siRNA antisense sequence
  source 1..19: mol_type = other RNA
tcttagcctggtgaactct

SEQ ID NO: 32310 - RNA, 19 nt, synthetic construct
  misc_feature 1..19: note = siRNA sense sequence
  source 1..19: mol_type = other RNA
agttcaccaggctaagaat

SEQ ID NO: 32311 - RNA, 19 nt, synthetic construct
  misc_feature 1..19: note = siRNA antisense sequence
  source 1..19: mol_type = other RNA
attcttagcctggtgaact

SEQ ID NO: 32312 - RNA, 19 nt, synthetic construct
  misc_feature 1..19: note = siRNA sense sequence
  source 1..19: mol_type = other RNA
gttcaccaggctaagaatt

SEQ ID NO: 32313 - RNA, 19 nt, synthetic construct
  misc_feature 1..19: note = siRNA antisense sequence
  source 1..19: mol_type = other RNA
aattcttagcctggtgaac

SEQ ID NO: 32314 - RNA, 19 nt, synthetic construct
  misc_feature 1..19: note = siRNA sense sequence
  source 1..19: mol_type = other RNA
ttcaccaggctaagaattg

SEQ ID NO: 32315 - RNA, 19 nt, synthetic construct
  misc_feature 1..19: note = siRNA antisense sequence
  source 1..19: mol_type = other RNA
caattcttagcctggtgaa

SEQ ID NO: 32316 - RNA, 19 nt, synthetic construct
  misc_feature 1..19: note = siRNA sense sequence
  source 1..19: mol_type = other RNA
tcaccaggctaagaattga

SEQ ID NO: 32317 - RNA, 19 nt, synthetic construct
  misc_feature 1..19: note = siRNA antisense sequence
  source 1..19: mol_type = other RNA
tcaattcttagcctggtga

SEQ ID NO: 32318 - RNA, 19 nt, synthetic construct
  misc_feature 1..19: note = siRNA sense sequence
  source 1..19: mol_type = other RNA
caccaggctaagaattgaa

SEQ ID NO: 32319 - RNA, 19 nt, synthetic construct
  misc_feature 1..19: note = siRNA antisense sequence
  source 1..19: mol_type = other RNA
ttcaattcttagcctggtg

SEQ ID NO: 32320 - RNA, 19 nt, synthetic construct
  misc_feature 1..19: note = siRNA sense sequence
  source 1..19: mol_type = other RNA
accaggctaagaattgaag

SEQ ID NO: 32321 - RNA, 19 nt, synthetic construct
  misc_feature 1..19: note = siRNA antisense sequence
  source 1..19: mol_type = other RNA
cttcaattcttagcctggt

SEQ ID NO: 32322 - RNA, 19 nt, synthetic construct
  misc_feature 1..19: note = siRNA sense sequence
  source 1..19: mol_type = other RNA
ccaggctaagaattgaaga

SEQ ID NO: 32323 - RNA, 19 nt, synthetic construct
  misc_feature 1..19: note = siRNA antisense sequence
  source 1..19: mol_type = other RNA
tcttcaattcttagcctgg

SEQ ID NO: 32324 - RNA, 19 nt, synthetic construct
  misc_feature 1..19: note = siRNA sense sequence
  source 1..19: mol_type = other RNA
caggctaagaattgaagaa

SEQ ID NO: 32325 - RNA, 19 nt, synthetic construct
  misc_feature 1..19: note = siRNA antisense sequence
  source 1..19: mol_type = other RNA
ttcttcaattcttagcctg

SEQ ID NO: 32326 - RNA, 19 nt, synthetic construct
  misc_feature 1..19: note = siRNA sense sequence
  source 1..19: mol_type = other RNA
cgcatattgaagggtggcc

SEQ ID NO: 32327 - RNA, 19 nt, synthetic construct
  misc_feature 1..19: note = siRNA antisense sequence
  source 1..19: mol_type = other RNA
ggccacccttcaatatgcg

SEQ ID NO: 32328 - RNA, 19 nt, synthetic construct
  misc_feature 1..19: note = siRNA sense sequence
  source 1..19: mol_type = other RNA
gcatattgaagggtggcca

SEQ ID NO: 32329 - RNA, 19 nt, synthetic construct
  misc_feature 1..19: note = siRNA antisense sequence
  source 1..19: mol_type = other RNA
tggccacccttcaatatgc

SEQ ID NO: 32330 - RNA, 19 nt, synthetic construct
  misc_feature 1..19: note = siRNA sense sequence
  source 1..19: mol_type = other RNA
catattgaagggtggccat

SEQ ID NO: 32331 - RNA, 19 nt, synthetic construct
  misc_feature 1..19: note = siRNA antisense sequence
  source 1..19: mol_type = other RNA
atggccacccttcaatatg

SEQ ID NO: 32332 - RNA, 19 nt, synthetic construct
  misc_feature 1..19: note = siRNA sense sequence
  source 1..19: mol_type = other RNA
atattgaagggtggccatt

SEQ ID NO: 32333 - RNA, 19 nt, synthetic construct
  misc_feature 1..19: note = siRNA antisense sequence
  source 1..19: mol_type = other RNA
aatggccacccttcaatat

SEQ ID NO: 32334 - RNA, 19 nt, synthetic construct
  misc_feature 1..19: note = siRNA sense sequence
  source 1..19: mol_type = other RNA
tattgaagggtggccatta

SEQ ID NO: 32335 - RNA, 19 nt, synthetic construct
  misc_feature 1..19: note = siRNA antisense sequence
  source 1..19: mol_type = other RNA
taatggccacccttcaata

SEQ ID NO: 32336 - RNA, 19 nt, synthetic construct
  misc_feature 1..19: note = siRNA sense sequence
  source 1..19: mol_type = other RNA
attgaagggtggccattac

SEQ ID NO: 32337 - RNA, 19 nt, synthetic construct
  misc_feature 1..19: note = siRNA antisense sequence
  source 1..19: mol_type = other RNA
gtaatggccacccttcaat

SEQ ID NO: 32338 - RNA, 19 nt, synthetic construct
  misc_feature 1..19: note = siRNA sense sequence
  source 1..19: mol_type = other RNA
ttgaagggtggccattact

SEQ ID NO: 32339 - RNA, 19 nt, synthetic construct
  misc_feature 1..19: note = siRNA antisense sequence
  source 1..19: mol_type = other RNA
agtaatggccacccttcaa

SEQ ID NO: 32340 - RNA, 19 nt, synthetic construct
  misc_feature 1..19: note = siRNA sense sequence
  source 1..19: mol_type = other RNA
tgaagggtggccattactt

SEQ ID NO: 32341 - RNA, 19 nt, synthetic construct
  misc_feature 1..19: note = siRNA antisense sequence
  source 1..19: mol_type = other RNA
aagtaatggccacccttca

SEQ ID NO: 32342 - RNA, 19 nt, synthetic construct
  misc_feature 1..19: note = siRNA sense sequence
  source 1..19: mol_type = other RNA
gaagggtggccattacttg

SEQ ID NO: 32343 - RNA, 19 nt, synthetic construct
  misc_feature 1..19: note = siRNA antisense sequence
  source 1..19: mol_type = other RNA
caagtaatggccacccttc

SEQ ID NO: 32344 - RNA, 19 nt, synthetic construct
  misc_feature 1..19: note = siRNA sense sequence
  source 1..19: mol_type = other RNA
ggtggccattacttgacat

SEQ ID NO: 32345 - RNA, 19 nt, synthetic construct
  misc_feature 1..19: note = siRNA antisense sequence
  source 1..19: mol_type = other RNA
atgtcaagtaatggccacc

SEQ ID NO: 32346 - RNA, 19 nt, synthetic construct
  misc_feature 1..19: note = siRNA sense sequence
  source 1..19: mol_type = other RNA
gtggccattacttgacatt

SEQ ID NO: 32347 - RNA, 19 nt, synthetic construct
  misc_feature 1..19: note = siRNA antisense sequence
  source 1..19: mol_type = other RNA
aatgtcaagtaatggccac

SEQ ID NO: 32348 - RNA, 19 nt, synthetic construct
  misc_feature 1..19: note = siRNA sense sequence
  source 1..19: mol_type = other RNA
tggccattacttgacattc

SEQ ID NO: 32349 - RNA, 19 nt, synthetic construct
  misc_feature 1..19: note = siRNA antisense sequence
  source 1..19: mol_type = other RNA
gaatgtcaagtaatggcca

SEQ ID NO: 32350 - RNA, 19 nt, synthetic construct
  misc_feature 1..19: note = siRNA sense sequence
  source 1..19: mol_type = other RNA
gccattacttgacattctg

SEQ ID NO: 32351 - RNA, 19 nt, synthetic construct
  misc_feature 1..19: note = siRNA antisense sequence
  source 1..19: mol_type = other RNA
cagaatgtcaagtaatggc

SEQ ID NO: 32352 - RNA, 19 nt, synthetic construct
  misc_feature 1..19: note = siRNA sense sequence
  source 1..19: mol_type = other RNA
ccattacttgacattctga

SEQ ID NO: 32353 - RNA, 19 nt, synthetic construct
  misc_feature 1..19: note = siRNA antisense sequence
  source 1..19: mol_type = other RNA
tcagaatgtcaagtaatgg

SEQ ID NO: 32354 - RNA, 19 nt, synthetic construct
  misc_feature 1..19: note = siRNA sense sequence
  source 1..19: mol_type = other RNA
cattacttgacattctgag

SEQ ID NO: 32355 - RNA, 19 nt, synthetic construct
  misc_feature 1..19: note = siRNA antisense sequence
  source 1..19: mol_type = other RNA
ctcagaatgtcaagtaatg

SEQ ID NO: 32356 - RNA, 19 nt, synthetic construct
  misc_feature 1..19: note = siRNA sense sequence
  source 1..19: mol_type = other RNA
attacttgacattctgagc

SEQ ID NO: 32357 - RNA, 19 nt, synthetic construct
  misc_feature 1..19: note = siRNA antisense sequence
  source 1..19: mol_type = other RNA
gctcagaatgtcaagtaat

SEQ ID NO: 32358 - RNA, 19 nt, synthetic construct
  misc_feature 1..19: note = siRNA sense sequence
  source 1..19: mol_type = other RNA
ctgagccagagtagtaatg

SEQ ID NO: 32359 - RNA, 19 nt, synthetic construct
  misc_feature 1..19: note = siRNA antisense sequence
  source 1..19: mol_type = other RNA
cattactactctggctcag

SEQ ID NO: 32360 - RNA, 19 nt, synthetic construct
  misc_feature 1..19: note = siRNA sense sequence
  source 1..19: mol_type = other RNA
tgagccagagtagtaatga

SEQ ID NO: 32361 - RNA, 19 nt, synthetic construct
  misc_feature 1..19: note = siRNA antisense sequence
  source 1..19: mol_type = other RNA
tcattactactctggctca

SEQ ID NO: 32362 - RNA, 19 nt, synthetic construct
  misc_feature 1..19: note = siRNA sense sequence
  source 1..19: mol_type = other RNA
gagccagagtagtaatgag

SEQ ID NO: 32363 - RNA, 19 nt, synthetic construct
  misc_feature 1..19: note = siRNA antisense sequence
  source 1..19: mol_type = other RNA
ctcattactactctggctc

SEQ ID NO: 32364 - RNA, 19 nt, synthetic construct
  misc_feature 1..19: note = siRNA sense sequence
  source 1..19: mol_type = other RNA
aaaggtcaaatgagccctc

SEQ ID NO: 32365 - RNA, 19 nt, synthetic construct
  misc_feature 1..19: note = siRNA antisense sequence
  source 1..19: mol_type = other RNA
gagggctcatttgaccttt

SEQ ID NO: 32366 - RNA, 19 nt, synthetic construct
  misc_feature 1..19: note = siRNA sense sequence
  source 1..19: mol_type = other RNA
aaggtcaaatgagccctca

SEQ ID NO: 32367 - RNA, 19 nt, synthetic construct
  misc_feature 1..19: note = siRNA antisense sequence
  source 1..19: mol_type = other RNA
tgagggctcatttgacctt

SEQ ID NO: 32368 - RNA, 19 nt, synthetic construct
  misc_feature 1..19: note = siRNA sense sequence
  source 1..19: mol_type = other RNA
tgagccctcattttaatgg

SEQ ID NO: 32369 - RNA, 19 nt, synthetic construct
  misc_feature 1..19: note = siRNA antisense sequence
  source 1..19: mol_type = other RNA
ccattaaaatgagggctca

SEQ ID NO: 32370 - RNA, 19 nt, synthetic construct
  misc_feature 1..19: note = siRNA sense sequence
  source 1..19: mol_type = other RNA
gagccctcattttaatggg

SEQ ID NO: 32371 - RNA, 19 nt, synthetic construct
  misc_feature 1..19: note = siRNA antisense sequence
  source 1..19: mol_type = other RNA
cccattaaaatgagggctc

SEQ ID NO: 32372 - RNA, 19 nt, synthetic construct
  misc_feature 1..19: note = siRNA sense sequence
  source 1..19: mol_type = other RNA
agccctcattttaatgggt

SEQ ID NO: 32373 - RNA, 19 nt, synthetic construct
  misc_feature 1..19: note = siRNA antisense sequence
  source 1..19: mol_type = other RNA
acccattaaaatgagggct

SEQ ID NO: 32374 - RNA, 19 nt, synthetic construct
  misc_feature 1..19: note = siRNA sense sequence
  source 1..19: mol_type = other RNA
gccctcattttaatgggtc

SEQ ID NO: 32375 - RNA, 19 nt, synthetic construct
  misc_feature 1..19: note = siRNA antisense sequence
  source 1..19: mol_type = other RNA
gacccattaaaatgagggc

SEQ ID NO: 32376 - RNA, 19 nt, synthetic construct
  misc_feature 1..19: note = siRNA sense sequence
  source 1..19: mol_type = other RNA
ccctcattttaatgggtct

SEQ ID NO: 32377 - RNA, 19 nt, synthetic construct
  misc_feature 1..19: note = siRNA antisense sequence
  source 1..19: mol_type = other RNA
agacccattaaaatgaggg

SEQ ID NO: 32378 - RNA, 19 nt, synthetic construct
  misc_feature 1..19: note = siRNA sense sequence
  source 1..19: mol_type = other RNA
cctcattttaatgggtcta

SEQ ID NO: 32379 - RNA, 19 nt, synthetic construct
  misc_feature 1..19: note = siRNA antisense sequence
  source 1..19: mol_type = other RNA
tagacccattaaaatgagg

SEQ ID NO: 32380 - RNA, 19 nt, synthetic construct
  misc_feature 1..19: note = siRNA sense sequence
  source 1..19: mol_type = other RNA
ctcattttaatgggtctaa

SEQ ID NO: 32381 - RNA, 19 nt, synthetic construct
  misc_feature 1..19: note = siRNA antisense sequence
  source 1..19: mol_type = other RNA
ttagacccattaaaatgag

SEQ ID NO: 32382 - RNA, 19 nt, synthetic construct
  misc_feature 1..19: note = siRNA sense sequence
  source 1..19: mol_type = other RNA
ttaatgggtctaaaatggt

SEQ ID NO: 32383 - RNA, 19 nt, synthetic construct
  misc_feature 1..19: note = siRNA antisense sequence
  source 1..19: mol_type = other RNA
accattttagacccattaa

SEQ ID NO: 32384 - RNA, 19 nt, synthetic construct
  misc_feature 1..19: note = siRNA sense sequence
  source 1..19: mol_type = other RNA
taatgggtctaaaatggtg

SEQ ID NO: 32385 - RNA, 19 nt, synthetic construct
  misc_feature 1..19: note = siRNA antisense sequence
  source 1..19: mol_type = other RNA
caccattttagacccatta

SEQ ID NO: 32386 - RNA, 19 nt, synthetic construct
  misc_feature 1..19: note = siRNA sense sequence
  source 1..19: mol_type = other RNA
ggtctaaaatggtgcttaa

SEQ ID NO: 32387 - RNA, 19 nt, synthetic construct
  misc_feature 1..19: note = siRNA antisense sequence
  source 1..19: mol_type = other RNA
ttaagcaccattttagacc

SEQ ID NO: 32388 - RNA, 19 nt, synthetic construct
  misc_feature 1..19: note = siRNA sense sequence
  source 1..19: mol_type = other RNA
gtctaaaatggtgcttaaa

SEQ ID NO: 32389 - RNA, 19 nt, synthetic construct
  misc_feature 1..19: note = siRNA antisense sequence
  source 1..19: mol_type = other RNA
tttaagcaccattttagac

SEQ ID NO: 32390 - RNA, 19 nt, synthetic construct
  misc_feature 1..19: note = siRNA sense sequence
  source 1..19: mol_type = other RNA
aaagtgggacagcatttat

SEQ ID NO: 32391 - RNA, 19 nt, synthetic construct
  misc_feature 1..19: note = siRNA antisense sequence
  source 1..19: mol_type = other RNA
ataaatgctgtcccacttt

SEQ ID NO: 32392 - RNA, 19 nt, synthetic construct
  misc_feature 1..19: note = siRNA sense sequence
  source 1..19: mol_type = other RNA
aagtgggacagcatttatt

SEQ ID NO: 32393 - RNA, 19 nt, synthetic construct
  misc_feature 1..19: note = siRNA antisense sequence
  source 1..19: mol_type = other RNA
aataaatgctgtcccactt

SEQ ID NO: 32394 - RNA, 19 nt, synthetic construct
  misc_feature 1..19: note = siRNA sense sequence
  source 1..19: mol_type = other RNA
agtgggacagcatttattg

SEQ ID NO: 32395 - RNA, 19 nt, synthetic construct
  misc_feature 1..19: note = siRNA antisense sequence
  source 1..19: mol_type = other RNA
caataaatgctgtcccact

SEQ ID NO: 32396 - RNA, 19 nt, synthetic construct
  misc_feature 1..19: note = siRNA sense sequence
  source 1..19: mol_type = other RNA
ggacagcatttattgggtg

SEQ ID NO: 32397 - RNA, 19 nt, synthetic construct
  misc_feature 1..19: note = siRNA antisense sequence
  source 1..19: mol_type = other RNA
cacccaataaatgctgtcc

SEQ ID NO: 32398 - RNA, 19 nt, synthetic construct
  misc_feature 1..19: note = siRNA sense sequence
  source 1..19: mol_type = other RNA
gacagcatttattgggtga

SEQ ID NO: 32399 - RNA, 19 nt, synthetic construct
  misc_feature 1..19: note = siRNA antisense sequence
  source 1..19: mol_type = other RNA
tcacccaataaatgctgtc

SEQ ID NO: 32400 - RNA, 19 nt, synthetic construct
  misc_feature 1..19: note = siRNA sense sequence
  source 1..19: mol_type = other RNA
acagcatttattgggtgat

SEQ ID NO: 32401 - RNA, 19 nt, synthetic construct
  misc_feature 1..19: note = siRNA antisense sequence
  source 1..19: mol_type = other RNA
atcacccaataaatgctgt

SEQ ID NO: 32402 - RNA, 19 nt, synthetic construct
  misc_feature 1..19: note = siRNA sense sequence
  source 1..19: mol_type = other RNA
cagcatttattgggtgatg

SEQ ID NO: 32403 - RNA, 19 nt, synthetic construct
  misc_feature 1..19: note = siRNA antisense sequence
  source 1..19: mol_type = other RNA
catcacccaataaatgctg

SEQ ID NO: 32404 - RNA, 19 nt, synthetic construct
  misc_feature 1..19: note = siRNA sense sequence
  source 1..19: mol_type = other RNA
agcatttattgggtgatga

SEQ ID NO: 32405 - RNA, 19 nt, synthetic construct
  misc_feature 1..19: note = siRNA antisense sequence
  source 1..19: mol_type = other RNA
tcatcacccaataaatgct

SEQ ID NO: 32406 - RNA, 19 nt, synthetic construct
  misc_feature 1..19: note = siRNA sense sequence
  source 1..19: mol_type = other RNA
gcatttattgggtgatgaa

SEQ ID NO: 32407 - RNA, 19 nt, synthetic construct
  misc_feature 1..19: note = siRNA antisense sequence
  source 1..19: mol_type = other RNA
ttcatcacccaataaatgc

SEQ ID NO: 32408 - RNA, 19 nt, synthetic construct
  misc_feature 1..19: note = siRNA sense sequence
  source 1..19: mol_type = other RNA
gggtgatgaatttatagat

SEQ ID NO: 32409 - RNA, 19 nt, synthetic construct
  misc_feature 1..19: note = siRNA antisense sequence
  source 1..19: mol_type = other RNA
atctataaattcatcaccc

SEQ ID NO: 32410 - RNA, 19 nt, synthetic construct
  misc_feature 1..19: note = siRNA sense sequence
  source 1..19: mol_type = other RNA
ggtgatgaatttatagatg

SEQ ID NO: 32411 - RNA, 19 nt, synthetic construct
  misc_feature 1..19: note = siRNA antisense sequence
  source 1..19: mol_type = other RNA
catctataaattcatcacc

SEQ ID NO: 32412 - RNA, 19 nt, synthetic construct
  misc_feature 1..19: note = siRNA sense sequence
  source 1..19: mol_type = other RNA
gatgtgtgtgtgtatatat

SEQ ID NO: 32413 - RNA, 19 nt, synthetic construct
  misc_feature 1..19: note = siRNA antisense sequence
  source 1..19: mol_type = other RNA
atatatacacacacacatc

SEQ ID NO: 32414 - RNA, 19 nt, synthetic construct
  misc_feature 1..19: note = siRNA sense sequence
  source 1..19: mol_type = other RNA
attagattccattgatgtc

SEQ ID NO: 32415 - RNA, 19 nt, synthetic construct
  misc_feature 1..19: note = siRNA antisense sequence
  source 1..19: mol_type = other RNA
gacatcaatggaatctaat

SEQ ID NO: 32416 - RNA, 19 nt, synthetic construct
  misc_feature 1..19: note = siRNA sense sequence
  source 1..19: mol_type = other RNA
ttagattccattgatgtca

SEQ ID NO: 32417 - RNA, 19 nt, synthetic construct
  misc_feature 1..19: note = siRNA antisense sequence
  source 1..19: mol_type = other RNA
tgacatcaatggaatctaa

SEQ ID NO: 32418 - RNA, 19 nt, synthetic construct
  misc_feature 1..19: note = siRNA sense sequence
  source 1..19: mol_type = other RNA
tgttgttgttattggttcg

SEQ ID NO: 32419 - RNA, 19 nt, synthetic construct
  misc_feature 1..19: note = siRNA antisense sequence
  source 1..19: mol_type = other RNA
cgaaccaataacaacaaca

SEQ ID NO: 32420 - RNA, 19 nt, synthetic construct
  misc_feature 1..19: note = siRNA sense sequence
  source 1..19: mol_type = other RNA
ttgttctaatttctgccct

SEQ ID NO: 32421 - RNA, 19 nt, synthetic construct
  misc_feature 1..19: note = siRNA antisense sequence
  source 1..19: mol_type = other RNA
agggcagaaattagaacaa

SEQ ID NO: 32422 - RNA, 19 nt, synthetic construct
  misc_feature 1..19: note = siRNA sense sequence
  source 1..19: mol_type = other RNA
tgttctaatttctgccctt

SEQ ID NO: 32423 - RNA, 19 nt, synthetic construct
  misc_feature 1..19: note = siRNA antisense sequence
  source 1..19: mol_type = other RNA
aagggcagaaattagaaca

SEQ ID NO: 32424 - RNA, 19 nt, synthetic construct
  misc_feature 1..19: note = siRNA sense sequence
  source 1..19: mol_type = other RNA
gttctaatttctgcccttt

SEQ ID NO: 32425 - RNA, 19 nt, synthetic construct
  misc_feature 1..19: note = siRNA antisense sequence
  source 1..19: mol_type = other RNA
aaagggcagaaattagaac

SEQ ID NO: 32426 - RNA, 19 nt, synthetic construct
  misc_feature 1..19: note = siRNA sense sequence
  source 1..19: mol_type = other RNA
taatttctgcccttttcaa

SEQ ID NO: 32427 - RNA, 19 nt, synthetic construct
  misc_feature 1..19: note = siRNA antisense sequence
  source 1..19: mol_type = other RNA
ttgaaaagggcagaaatta

SEQ ID NO: 32428 - RNA, 19 nt, synthetic construct
  misc_feature 1..19: note = siRNA sense sequence
  source 1..19: mol_type = other RNA
aatttctgcccttttcaag

SEQ ID NO: 32429 - RNA, 19 nt, synthetic construct
  misc_feature 1..19: note = siRNA antisense sequence
  source 1..19: mol_type = other RNA
cttgaaaagggcagaaatt

SEQ ID NO: 32430 - RNA, 19 nt, synthetic construct
  misc_feature 1..19: note = siRNA sense sequence
  source 1..19: mol_type = other RNA
atttctgcccttttcaaga

SEQ ID NO: 32431 - RNA, 19 nt, synthetic construct
  misc_feature 1..19: note = siRNA antisense sequence
  source 1..19: mol_type = other RNA
tcttgaaaagggcagaaat

SEQ ID NO: 32432 - RNA, 19 nt, synthetic construct
  misc_feature 1..19: note = siRNA sense sequence
  source 1..19: mol_type = other RNA
tttctgcccttttcaagat

SEQ ID NO: 32433 - RNA, 19 nt, synthetic construct
  misc_feature 1..19: note = siRNA antisense sequence
  source 1..19: mol_type = other RNA
atcttgaaaagggcagaaa

SEQ ID NO: 32434 - RNA, 19 nt, synthetic construct
  misc_feature 1..19: note = siRNA sense sequence
  source 1..19: mol_type = other RNA
ttctgcccttttcaagatt

SEQ ID NO: 32435 - RNA, 19 nt, synthetic construct
  misc_feature 1..19: note = siRNA antisense sequence
  source 1..19: mol_type = other RNA
aatcttgaaaagggcagaa

SEQ ID NO: 32436 - RNA, 19 nt, synthetic construct
  misc_feature 1..19: note = siRNA sense sequence
  source 1..19: mol_type = other RNA
tctgcccttttcaagattc

SEQ ID NO: 32437 - RNA, 19 nt, synthetic construct
  misc_feature 1..19: note = siRNA antisense sequence
  source 1..19: mol_type = other RNA
gaatcttgaaaagggcaga

SEQ ID NO: 32438 - RNA, 19 nt, synthetic construct
  misc_feature 1..19: note = siRNA sense sequence
  source 1..19: mol_type = other RNA
ctgcccttttcaagattca

SEQ ID NO: 32439 - RNA, 19 nt, synthetic construct
  misc_feature 1..19: note = siRNA antisense sequence
  source 1..19: mol_type = other RNA
tgaatcttgaaaagggcag

SEQ ID NO: 32440 - RNA, 19 nt, synthetic construct
  misc_feature 1..19: note = siRNA sense sequence
  source 1..19: mol_type = other RNA
tgcccttttcaagattcaa

SEQ ID NO: 32441 - RNA, 19 nt, synthetic construct
  misc_feature 1..19: note = siRNA antisense sequence
  source 1..19: mol_type = other RNA
ttgaatcttgaaaagggca

SEQ ID NO: 32442 - RNA, 19 nt, synthetic construct
  misc_feature 1..19: note = siRNA sense sequence
  source 1..19: mol_type = other RNA
gcccttttcaagattcaaa

SEQ ID NO: 32443 - RNA, 19 nt, synthetic construct
  misc_feature 1..19: note = siRNA antisense sequence
  source 1..19: mol_type = other RNA
tttgaatcttgaaaagggc

SEQ ID NO: 32444 - RNA, 19 nt, synthetic construct
  misc_feature 1..19: note = siRNA sense sequence
  source 1..19: mol_type = other RNA
cccttttcaagattcaaat

SEQ ID NO: 32445 - RNA, 19 nt, synthetic construct
  misc_feature 1..19: note = siRNA antisense sequence
  source 1..19: mol_type = other RNA
atttgaatcttgaaaaggg

SEQ ID NO: 32446 - RNA, 19 nt, synthetic construct
  misc_feature 1..19: note = siRNA sense sequence
  source 1..19: mol_type = other RNA
ccttttcaagattcaaatc

SEQ ID NO: 32447 - RNA, 19 nt, synthetic construct
  misc_feature 1..19: note = siRNA antisense sequence
  source 1..19: mol_type = other RNA
gatttgaatcttgaaaagg

SEQ ID NO: 32448 - RNA, 19 nt, synthetic construct
  misc_feature 1..19: note = siRNA sense sequence
  source 1..19: mol_type = other RNA
caacttaaaagcaaggagt

SEQ ID NO: 32449 - RNA, 19 nt, synthetic construct
  misc_feature 1..19: note = siRNA antisense sequence
  source 1..19: mol_type = other RNA
actccttgcttttaagttg

SEQ ID NO: 32450 - RNA, 19 nt, synthetic construct
  misc_feature 1..19: note = siRNA sense sequence
  source 1..19: mol_type = other RNA
acttaaaagcaaggagttg

SEQ ID NO: 32451 - RNA, 19 nt, synthetic construct
  misc_feature 1..19: note = siRNA antisense sequence
  source 1..19: mol_type = other RNA
caactccttgcttttaagt

SEQ ID NO: 32452 - RNA, 19 nt, synthetic construct
  misc_feature 1..19: note = siRNA sense sequence
  source 1..19: mol_type = other RNA
caaggagttgcaagaatat

SEQ ID NO: 32453 - RNA, 19 nt, synthetic construct
  misc_feature 1..19: note = siRNA antisense sequence
  source 1..19: mol_type = other RNA
atattcttgcaactccttg

SEQ ID NO: 32454 - RNA, 19 nt, synthetic construct
  misc_feature 1..19: note = siRNA sense sequence
  source 1..19: mol_type = other RNA
aaggagttgcaagaatata

SEQ ID NO: 32455 - RNA, 19 nt, synthetic construct
  misc_feature 1..19: note = siRNA antisense sequence
  source 1..19: mol_type = other RNA
tatattcttgcaactcctt

SEQ ID NO: 32456 - RNA, 19 nt, synthetic construct
  misc_feature 1..19: note = siRNA sense sequence
  source 1..19: mol_type = other RNA
aggagttgcaagaatatat

SEQ ID NO: 32457 - RNA, 19 nt, synthetic construct
  misc_feature 1..19: note = siRNA antisense sequence
  source 1..19: mol_type = other RNA
atatattcttgcaactcct

SEQ ID NO: 32458 - RNA, 19 nt, synthetic construct
  misc_feature 1..19: note = siRNA sense sequence
  source 1..19: mol_type = other RNA
ggagttgcaagaatatatg

SEQ ID NO: 32459 - RNA, 19 nt, synthetic construct
  misc_feature 1..19: note = siRNA antisense sequence
  source 1..19: mol_type = other RNA
catatattcttgcaactcc

SEQ ID NO: 32460 - RNA, 19 nt, synthetic construct
  misc_feature 1..19: note = siRNA sense sequence
  source 1..19: mol_type = other RNA
gagttgcaagaatatatgg

SEQ ID NO: 32461 - RNA, 19 nt, synthetic construct
  misc_feature 1..19: note = siRNA antisense sequence
  source 1..19: mol_type = other RNA
ccatatattcttgcaactc

SEQ ID NO: 32462 - RNA, 19 nt, synthetic construct
  misc_feature 1..19: note = siRNA sense sequence
  source 1..19: mol_type = other RNA
agttgcaagaatatatgga

SEQ ID NO: 32463 - RNA, 19 nt, synthetic construct
  misc_feature 1..19: note = siRNA antisense sequence
  source 1..19: mol_type = other RNA
tccatatattcttgcaact

SEQ ID NO: 32464 - RNA, 19 nt, synthetic construct
  misc_feature 1..19: note = siRNA sense sequence
  source 1..19: mol_type = other RNA
gttgcaagaatatatggaa

SEQ ID NO: 32465 - RNA, 19 nt, synthetic construct
  misc_feature 1..19: note = siRNA antisense sequence
  source 1..19: mol_type = other RNA
ttccatatattcttgcaac

SEQ ID NO: 32466 - RNA, 19 nt, synthetic construct
  misc_feature 1..19: note = siRNA sense sequence
  source 1..19: mol_type = other RNA
tgcaagaatatatggaatg

SEQ ID NO: 32467 - RNA, 19 nt, synthetic construct
  misc_feature 1..19: note = siRNA antisense sequence
  source 1..19: mol_type = other RNA
cattccatatattcttgca

SEQ ID NO: 32468 - RNA, 19 nt, synthetic construct
  misc_feature 1..19: note = siRNA sense sequence
  source 1..19: mol_type = other RNA
aagaatatatggaatggtg

SEQ ID NO: 32469 - RNA, 19 nt, synthetic construct
  misc_feature 1..19: note = siRNA antisense sequence
  source 1..19: mol_type = other RNA
caccattccatatattctt

SEQ ID NO: 32470 - RNA, 19 nt, synthetic construct
  misc_feature 1..19: note = siRNA sense sequence
  source 1..19: mol_type = other RNA
agaatatatggaatggtga

SEQ ID NO: 32471 - RNA, 19 nt, synthetic construct
  misc_feature 1..19: note = siRNA antisense sequence
  source 1..19: mol_type = other RNA
tcaccattccatatattct

SEQ ID NO: 32472 - RNA, 19 nt, synthetic construct
  misc_feature 1..19: note = siRNA sense sequence
  source 1..19: mol_type = other RNA
gaatatatggaatggtgag

SEQ ID NO: 32473 - RNA, 19 nt, synthetic construct
  misc_feature 1..19: note = siRNA antisense sequence
  source 1..19: mol_type = other RNA
ctcaccattccatatattc

SEQ ID NO: 32474 - RNA, 19 nt, synthetic construct
  misc_feature 1..19: note = siRNA sense sequence
  source 1..19: mol_type = other RNA
attgtccaatgcacattct

SEQ ID NO: 32475 - RNA, 19 nt, synthetic construct
  misc_feature 1..19: note = siRNA antisense sequence
  source 1..19: mol_type = other RNA
agaatgtgcattggacaat

SEQ ID NO: 32476 - RNA, 19 nt, synthetic construct
  misc_feature 1..19: note = siRNA sense sequence
  source 1..19: mol_type = other RNA
ttgtccaatgcacattctt

SEQ ID NO: 32477 - RNA, 19 nt, synthetic construct
  misc_feature 1..19: note = siRNA antisense sequence
  source 1..19: mol_type = other RNA
aagaatgtgcattggacaa

SEQ ID NO: 32478 - RNA, 19 nt, synthetic construct
  misc_feature 1..19: note = siRNA sense sequence
  source 1..19: mol_type = other RNA
tgtccaatgcacattctta

SEQ ID NO: 32479 - RNA, 19 nt, synthetic construct
  misc_feature 1..19: note = siRNA antisense sequence
  source 1..19: mol_type = other RNA
taagaatgtgcattggaca

SEQ ID NO: 32480 - RNA, 19 nt, synthetic construct
  misc_feature 1..19: note = siRNA sense sequence
  source 1..19: mol_type = other RNA
gcacattcttatttatctg

SEQ ID NO: 32481 - RNA, 19 nt, synthetic construct
  misc_feature 1..19: note = siRNA antisense sequence
  source 1..19: mol_type = other RNA
cagataaataagaatgtgc

SEQ ID NO: 32482 - RNA, 19 nt, synthetic construct
  misc_feature 1..19: note = siRNA sense sequence
  source 1..19: mol_type = other RNA
cacattcttatttatctgc

SEQ ID NO: 32483 - RNA, 19 nt, synthetic construct
  misc_feature 1..19: note = siRNA antisense sequence
  source 1..19: mol_type = other RNA
gcagataaataagaatgtg

SEQ ID NO: 32484 - RNA, 19 nt, synthetic construct
  misc_feature 1..19: note = siRNA sense sequence
  source 1..19: mol_type = other RNA
atctttctatatcctgttg

SEQ ID NO: 32485 - RNA, 19 nt, synthetic construct
  misc_feature 1..19: note = siRNA antisense sequence
  source 1..19: mol_type = other RNA
caacaggatatagaaagat

SEQ ID NO: 32486 - RNA, 19 nt, synthetic construct
  misc_feature 1..19: note = siRNA sense sequence
  source 1..19: mol_type = other RNA
aactttgccgataattgta

SEQ ID NO: 32487 - RNA, 19 nt, synthetic construct
  misc_feature 1..19: note = siRNA antisense sequence
  source 1..19: mol_type = other RNA
tacaattatcggcaaagtt

SEQ ID NO: 32488 - RNA, 19 nt, synthetic construct
  misc_feature 1..19: note = siRNA sense sequence
  source 1..19: mol_type = other RNA
actttgccgataattgtag

SEQ ID NO: 32489 - RNA, 19 nt, synthetic construct
  misc_feature 1..19: note = siRNA antisense sequence
  source 1..19: mol_type = other RNA
ctacaattatcggcaaagt

SEQ ID NO: 32490 - RNA, 19 nt, synthetic construct
  misc_feature 1..19: note = siRNA sense sequence
  source 1..19: mol_type = other RNA
ctttgccgataattgtaga

SEQ ID NO: 32491 - RNA, 19 nt, synthetic construct
  misc_feature 1..19: note = siRNA antisense sequence
  source 1..19: mol_type = other RNA
tctacaattatcggcaaag

SEQ ID NO: 32492 - RNA, 19 nt, synthetic construct
  misc_feature 1..19: note = siRNA sense sequence
  source 1..19: mol_type = other RNA
tttgccgataattgtagaa

SEQ ID NO: 32493 - RNA, 19 nt, synthetic construct
  misc_feature 1..19: note = siRNA antisense sequence
  source 1..19: mol_type = other RNA
ttctacaattatcggcaaa

SEQ ID NO: 32494 - RNA, 19 nt, synthetic construct
  misc_feature 1..19: note = siRNA sense sequence
  source 1..19: mol_type = other RNA
accttggcatttctttctt

SEQ ID NO: 32495 - RNA, 19 nt, synthetic construct
  misc_feature 1..19: note = siRNA antisense sequence
  source 1..19: mol_type = other RNA
aagaaagaaatgccaaggt

SEQ ID NO: 32496 - RNA, 19 nt, synthetic construct
  misc_feature 1..19: note = siRNA sense sequence
  source 1..19: mol_type = other RNA
ccttggcatttctttcttc

SEQ ID NO: 32497 - RNA, 19 nt, synthetic construct
  misc_feature 1..19: note = siRNA antisense sequence
  source 1..19: mol_type = other RNA
gaagaaagaaatgccaagg

SEQ ID NO: 32498 - RNA, 19 nt, synthetic construct
  misc_feature 1..19: note = siRNA sense sequence
  source 1..19: mol_type = other RNA
ggcatttctttcttccatc

SEQ ID NO: 32499 - RNA, 19 nt, synthetic construct
  misc_feature 1..19: note = siRNA antisense sequence
  source 1..19: mol_type = other RNA
gatggaagaaagaaatgcc

SEQ ID NO: 32500 - RNA, 19 nt, synthetic construct
  misc_feature 1..19: note = siRNA sense sequence
  source 1..19: mol_type = other RNA
gcatttctttcttccatct

SEQ ID NO: 32501 - RNA, 19 nt, synthetic construct
  misc_feature 1..19: note = siRNA antisense sequence
  source 1..19: mol_type = other RNA
agatggaagaaagaaatgc

SEQ ID NO: 32502 - RNA, 19 nt, synthetic construct
  misc_feature 1..19: note = siRNA sense sequence
  source 1..19: mol_type = other RNA
catttctttcttccatctt

SEQ ID NO: 32503 - RNA, 19 nt, synthetic construct
  misc_feature 1..19: note = siRNA antisense sequence
  source 1..19: mol_type = other RNA
aagatggaagaaagaaatg

SEQ ID NO: 32504 - RNA, 19 nt, synthetic construct
  misc_feature 1..19: note = siRNA sense sequence
  source 1..19: mol_type = other RNA
ttcagtctacctcttgcat

SEQ ID NO: 32505 - RNA, 19 nt, synthetic construct
  misc_feature 1..19: note = siRNA antisense sequence
  source 1..19: mol_type = other RNA
atgcaagaggtagactgaa

SEQ ID NO: 32506 - RNA, 19 nt, synthetic construct
  misc_feature 1..19: note = siRNA sense sequence
  source 1..19: mol_type = other RNA
tcagtctacctcttgcatg

SEQ ID NO: 32507 - RNA, 19 nt, synthetic construct
  misc_feature 1..19: note = siRNA antisense sequence
  source 1..19: mol_type = other RNA
catgcaagaggtagactga

SEQ ID NO: 32508 - RNA, 19 nt, synthetic construct
  misc_feature 1..19: note = siRNA sense sequence
  source 1..19: mol_type = other RNA
cagtctacctcttgcatgc

SEQ ID NO: 32509 - RNA, 19 nt, synthetic construct
  misc_feature 1..19: note = siRNA antisense sequence
  source 1..19: mol_type = other RNA
gcatgcaagaggtagactg

SEQ ID NO: 32510 - RNA, 19 nt, synthetic construct
  misc_feature 1..19: note = siRNA sense sequence
  source 1..19: mol_type = other RNA
agtctacctcttgcatgct

SEQ ID NO: 32511 - RNA, 19 nt, synthetic construct
  misc_feature 1..19: note = siRNA antisense sequence
  source 1..19: mol_type = other RNA
agcatgcaagaggtagact

SEQ ID NO: 32512 - RNA, 19 nt, synthetic construct
  misc_feature 1..19: note = siRNA sense sequence
  source 1..19: mol_type = other RNA
gtctacctcttgcatgctg

SEQ ID NO: 32513 - RNA, 19 nt, synthetic construct
  misc_feature 1..19: note = siRNA antisense sequence
  source 1..19: mol_type = other RNA
cagcatgcaagaggtagac

SEQ ID NO: 32514 - RNA, 19 nt, synthetic construct
  misc_feature 1..19: note = siRNA sense sequence
  source 1..19: mol_type = other RNA
ctacctcttgcatgctgac

SEQ ID NO: 32515 - RNA, 19 nt, synthetic construct
  misc_feature 1..19: note = siRNA antisense sequence
  source 1..19: mol_type = other RNA
gtcagcatgcaagaggtag

SEQ ID NO: 32516 - RNA, 19 nt, synthetic construct
  misc_feature 1..19: note = siRNA sense sequence
  source 1..19: mol_type = other RNA
cttgcatgctgaccaatcc

SEQ ID NO: 32517 - RNA, 19 nt, synthetic construct
  misc_feature 1..19: note = siRNA antisense sequence
  source 1..19: mol_type = other RNA
ggattggtcagcatgcaag

SEQ ID NO: 32518 - RNA, 19 nt, synthetic construct
  misc_feature 1..19: note = siRNA sense sequence
  source 1..19: mol_type = other RNA
ttgcatgctgaccaatcct

SEQ ID NO: 32519 - RNA, 19 nt, synthetic construct
  misc_feature 1..19: note = siRNA antisense sequence
  source 1..19: mol_type = other RNA
aggattggtcagcatgcaa

SEQ ID NO: 32520 - RNA, 19 nt, synthetic construct
  misc_feature 1..19: note = siRNA sense sequence
  source 1..19: mol_type = other RNA
tgcatgctgaccaatccta

SEQ ID NO: 32521 - RNA, 19 nt, synthetic construct
  misc_feature 1..19: note = siRNA antisense sequence
  source 1..19: mol_type = other RNA
taggattggtcagcatgca

SEQ ID NO: 32522 - RNA, 19 nt, synthetic construct
  misc_feature 1..19: note = siRNA sense sequence
  source 1..19: mol_type = other RNA
gcatgctgaccaatcctaa

SEQ ID NO: 32523 - RNA, 19 nt, synthetic construct
  misc_feature 1..19: note = siRNA antisense sequence
  source 1..19: mol_type = other RNA
ttaggattggtcagcatgc

SEQ ID NO: 32524 - RNA, 19 nt, synthetic construct
  misc_feature 1..19: note = siRNA sense sequence
  source 1..19: mol_type = other RNA
catgctgaccaatcctaaa

SEQ ID NO: 32525 - RNA, 19 nt, synthetic construct
  misc_feature 1..19: note = siRNA antisense sequence
  source 1..19: mol_type = other RNA
tttaggattggtcagcatg

SEQ ID NO: 32526 - RNA, 19 nt, synthetic construct
  misc_feature 1..19: note = siRNA sense sequence
  source 1..19: mol_type = other RNA
atgctgaccaatcctaaat

SEQ ID NO: 32527 - RNA, 19 nt, synthetic construct
  misc_feature 1..19: note = siRNA antisense sequence
  source 1..19: mol_type = other RNA
atttaggattggtcagcat

SEQ ID NO: 32528 - RNA, 19 nt, synthetic construct
  misc_feature 1..19: note = siRNA sense sequence
  source 1..19: mol_type = other RNA
tgctgaccaatcctaaatt

SEQ ID NO: 32529 - RNA, 19 nt, synthetic construct
  misc_feature 1..19: note = siRNA antisense sequence
  source 1..19: mol_type = other RNA
aatttaggattggtcagca

SEQ ID NO: 32530 - RNA, 19 nt, synthetic construct
  misc_feature 1..19: note = siRNA sense sequence
  source 1..19: mol_type = other RNA
aatcctaaattgggcgatg

SEQ ID NO: 32531 - RNA, 19 nt, synthetic construct
  misc_feature 1..19: note = siRNA antisense sequence
  source 1..19: mol_type = other RNA
catcgcccaatttaggatt

SEQ ID NO: 32532 - RNA, 19 nt, synthetic construct
  misc_feature 1..19: note = siRNA sense sequence
  source 1..19: mol_type = other RNA
atcctaaattgggcgatga

SEQ ID NO: 32533 - RNA, 19 nt, synthetic construct
  misc_feature 1..19: note = siRNA antisense sequence
  source 1..19: mol_type = other RNA
tcatcgcccaatttaggat

SEQ ID NO: 32534 - RNA, 19 nt, synthetic construct
  misc_feature 1..19: note = siRNA sense sequence
  source 1..19: mol_type = other RNA
tcctaaattgggcgatgac

SEQ ID NO: 32535 - RNA, 19 nt, synthetic construct
  misc_feature 1..19: note = siRNA antisense sequence
  source 1..19: mol_type = other RNA
gtcatcgcccaatttagga

SEQ ID NO: 32536 - RNA, 19 nt, synthetic construct
  misc_feature 1..19: note = siRNA sense sequence
  source 1..19: mol_type = other RNA
cctaaattgggcgatgacc

SEQ ID NO: 32537 - RNA, 19 nt, synthetic construct
  misc_feature 1..19: note = siRNA antisense sequence
  source 1..19: mol_type = other RNA
ggtcatcgcccaatttagg

SEQ ID NO: 32538 - RNA, 19 nt, synthetic construct
  misc_feature 1..19: note = siRNA sense sequence
  source 1..19: mol_type = other RNA
aattgggcgatgacctatt

SEQ ID NO: 32539 - RNA, 19 nt, synthetic construct
  misc_feature 1..19: note = siRNA antisense sequence
  source 1..19: mol_type = other RNA
aataggtcatcgcccaatt

SEQ ID NO: 32540 - RNA, 19 nt, synthetic construct
  misc_feature 1..19: note = siRNA sense sequence
  source 1..19: mol_type = other RNA
attgggcgatgacctattt

SEQ ID NO: 32541 - RNA, 19 nt, synthetic construct
  misc_feature 1..19: note = siRNA antisense sequence
  source 1..19: mol_type = other RNA
aaataggtcatcgcccaat

SEQ ID NO: 32542 - RNA, 19 nt, synthetic construct
  misc_feature 1..19: note = siRNA sense sequence
  source 1..19: mol_type = other RNA
ttgggcgatgacctattta

SEQ ID NO: 32543 - RNA, 19 nt, synthetic construct
  misc_feature 1..19: note = siRNA antisense sequence
  source 1..19: mol_type = other RNA
taaataggtcatcgcccaa

SEQ ID NO: 32544 - RNA, 19 nt, synthetic construct
  misc_feature 1..19: note = siRNA sense sequence
  source 1..19: mol_type = other RNA
tgggcgatgacctatttat

SEQ ID NO: 32545 - RNA, 19 nt, synthetic construct
  misc_feature 1..19: note = siRNA antisense sequence
  source 1..19: mol_type = other RNA
ataaataggtcatcgccca

SEQ ID NO: 32546 - RNA, 19 nt, synthetic construct
  misc_feature 1..19: note = siRNA sense sequence
  source 1..19: mol_type = other RNA
gggcgatgacctatttatt

SEQ ID NO: 32547 - RNA, 19 nt, synthetic construct
  misc_feature 1..19: note = siRNA antisense sequence
  source 1..19: mol_type = other RNA
aataaataggtcatcgccc

SEQ ID NO: 32548 - RNA, 19 nt, synthetic construct
  misc_feature 1..19: note = siRNA sense sequence
  source 1..19: mol_type = other RNA
ggcgatgacctatttattt

SEQ ID NO: 32549 - RNA, 19 nt, synthetic construct
  misc_feature 1..19: note = siRNA antisense sequence
  source 1..19: mol_type = other RNA
aaataaataggtcatcgcc

SEQ ID NO: 32550 - RNA, 19 nt, synthetic construct
  misc_feature 1..19: note = siRNA sense sequence
  source 1..19: mol_type = other RNA
cgatgacctatttattttg

SEQ ID NO: 32551 - RNA, 19 nt, synthetic construct
  misc_feature 1..19: note = siRNA antisense sequence
  source 1..19: mol_type = other RNA
caaaataaataggtcatcg

SEQ ID NO: 32552 - RNA, 19 nt, synthetic construct
  misc_feature 1..19: note = siRNA sense sequence
  source 1..19: mol_type = other RNA
gatgacctatttattttgc

SEQ ID NO: 32553 - RNA, 19 nt, synthetic construct
  misc_feature 1..19: note = siRNA antisense sequence
  source 1..19: mol_type = other RNA
gcaaaataaataggtcatc

SEQ ID NO: 32554 - RNA, 19 nt, synthetic construct
  misc_feature 1..19: note = siRNA sense sequence
  source 1..19: mol_type = other RNA
gacctatttattttgcatc

SEQ ID NO: 32555 - RNA, 19 nt, synthetic construct
  misc_feature 1..19: note = siRNA antisense sequence
  source 1..19: mol_type = other RNA
gatgcaaaataaataggtc

SEQ ID NO: 32556 - RNA, 19 nt, synthetic construct
  misc_feature 1..19: note = siRNA sense sequence
  source 1..19: mol_type = other RNA
ttattttgcatcttccctg

SEQ ID NO: 32557 - RNA, 19 nt, synthetic construct
  misc_feature 1..19: note = siRNA antisense sequence
  source 1..19: mol_type = other RNA
cagggaagatgcaaaataa

SEQ ID NO: 32558 - RNA, 19 nt, synthetic construct
  misc_feature 1..19: note = siRNA sense sequence
  source 1..19: mol_type = other RNA
attttgcatcttccctgaa

SEQ ID NO: 32559 - RNA, 19 nt, synthetic construct
  misc_feature 1..19: note = siRNA antisense sequence
  source 1..19: mol_type = other RNA
ttcagggaagatgcaaaat

SEQ ID NO: 32560 - RNA, 19 nt, synthetic construct
  misc_feature 1..19: note = siRNA sense sequence
  source 1..19: mol_type = other RNA
catcttccctgaatgctta

SEQ ID NO: 32561 - RNA, 19 nt, synthetic construct
  misc_feature 1..19: note = siRNA antisense sequence
  source 1..19: mol_type = other RNA
taagcattcagggaagatg

SEQ ID NO: 32562 - RNA, 19 nt, synthetic construct
  misc_feature 1..19: note = siRNA sense sequence
  source 1..19: mol_type = other RNA
atcttccctgaatgcttaa

SEQ ID NO: 32563 - RNA, 19 nt, synthetic construct
  misc_feature 1..19: note = siRNA antisense sequence
  source 1..19: mol_type = other RNA
ttaagcattcagggaagat

SEQ ID NO: 32564 - RNA, 19 nt, synthetic construct
  misc_feature 1..19: note = siRNA sense sequence
  source 1..19: mol_type = other RNA
tcttccctgaatgcttaat

SEQ ID NO: 32565 - RNA, 19 nt, synthetic construct
  misc_feature 1..19: note = siRNA antisense sequence
  source 1..19: mol_type = other RNA
attaagcattcagggaaga

SEQ ID NO: 32566 - RNA, 19 nt, synthetic construct
  misc_feature 1..19: note = siRNA sense sequence
  source 1..19: mol_type = other RNA
ttccctgaatgcttaatct

SEQ ID NO: 32567 - RNA, 19 nt, synthetic construct
  misc_feature 1..19: note = siRNA antisense sequence
  source 1..19: mol_type = other RNA
agattaagcattcagggaa

SEQ ID NO: 32568 - RNA, 19 nt, synthetic construct
  misc_feature 1..19: note = siRNA sense sequence
  source 1..19: mol_type = other RNA
tccctgaatgcttaatctt

SEQ ID NO: 32569 - RNA, 19 nt, synthetic construct
  misc_feature 1..19: note = siRNA antisense sequence
  source 1..19: mol_type = other RNA
aagattaagcattcaggga

SEQ ID NO: 32570 - RNA, 19 nt, synthetic construct
  misc_feature 1..19: note = siRNA sense sequence
  source 1..19: mol_type = other RNA
ccctgaatgcttaatcttc

SEQ ID NO: 32571 - RNA, 19 nt, synthetic construct
  misc_feature 1..19: note = siRNA antisense sequence
  source 1..19: mol_type = other RNA
gaagattaagcattcaggg

SEQ ID NO: 32572 - RNA, 19 nt, synthetic construct
  misc_feature 1..19: note = siRNA sense sequence
  source 1..19: mol_type = other RNA
gttacttaatttacttccg

SEQ ID NO: 32573 - RNA, 19 nt, synthetic construct
  misc_feature 1..19: note = siRNA antisense sequence
  source 1..19: mol_type = other RNA
cggaagtaaattaagtaac

SEQ ID NO: 32574 - RNA, 19 nt, synthetic construct
  misc_feature 1..19: note = siRNA sense sequence
  source 1..19: mol_type = other RNA
aatttctcccagagtaagg

SEQ ID NO: 32575 - RNA, 19 nt, synthetic construct
  misc_feature 1..19: note = siRNA antisense sequence
  source 1..19: mol_type = other RNA
ccttactctgggagaaatt

SEQ ID NO: 32576 - RNA, 19 nt, synthetic construct
  misc_feature 1..19: note = siRNA sense sequence
  source 1..19: mol_type = other RNA
atttctcccagagtaagga

SEQ ID NO: 32577 - RNA, 19 nt, synthetic construct
  misc_feature 1..19: note = siRNA antisense sequence
  source 1..19: mol_type = other RNA
tccttactctgggagaaat

SEQ ID NO: 32578 - RNA, 19 nt, synthetic construct
  misc_feature 1..19: note = siRNA sense sequence
  source 1..19: mol_type = other RNA
tttctcccagagtaaggaa

SEQ ID NO: 32579 - RNA, 19 nt, synthetic construct
  misc_feature 1..19: note = siRNA antisense sequence
  source 1..19: mol_type = other RNA
ttccttactctgggagaaa

SEQ ID NO: 32580 - RNA, 19 nt, synthetic construct
  misc_feature 1..19: note = siRNA sense sequence
  source 1..19: mol_type = other RNA
tctcccagagtaaggaatt

SEQ ID NO: 32581 - RNA, 19 nt, synthetic construct
  misc_feature 1..19: note = siRNA antisense sequence
  source 1..19: mol_type = other RNA
aattccttactctgggaga

SEQ ID NO: 32582 - RNA, 19 nt, synthetic construct
  misc_feature 1..19: note = siRNA sense sequence
  source 1..19: mol_type = other RNA
ctcccagagtaaggaatta

SEQ ID NO: 32583 - RNA, 19 nt, synthetic construct
  misc_feature 1..19: note = siRNA antisense sequence
  source 1..19: mol_type = other RNA
taattccttactctgggag

SEQ ID NO: 32584 - RNA, 19 nt, synthetic construct
  misc_feature 1..19: note = siRNA sense sequence
  source 1..19: mol_type = other RNA
tcccagagtaaggaattat

SEQ ID NO: 32585 - RNA, 19 nt, synthetic construct
  misc_feature 1..19: note = siRNA antisense sequence
  source 1..19: mol_type = other RNA
ataattccttactctggga

SEQ ID NO: 32586 - RNA, 19 nt, synthetic construct
  misc_feature 1..19: note = siRNA sense sequence
  source 1..19: mol_type = other RNA
cccagagtaaggaattatg

SEQ ID NO: 32587 - RNA, 19 nt, synthetic construct
  misc_feature 1..19: note = siRNA antisense sequence
  source 1..19: mol_type = other RNA
cataattccttactctggg

SEQ ID NO: 32588 - RNA, 19 nt, synthetic construct
  misc_feature 1..19: note = siRNA sense sequence
  source 1..19: mol_type = other RNA
gagtaaggaattatgagtt

SEQ ID NO: 32589 - RNA, 19 nt, synthetic construct
  misc_feature 1..19: note = siRNA antisense sequence
  source 1..19: mol_type = other RNA
aactcataattccttactc

SEQ ID NO: 32590 - RNA, 19 nt, synthetic construct
  misc_feature 1..19: note = siRNA sense sequence
  source 1..19: mol_type = other RNA
agtaaggaattatgagttc

SEQ ID NO: 32591 - RNA, 19 nt, synthetic construct
  misc_feature 1..19: note = siRNA antisense sequence
  source 1..19: mol_type = other RNA
gaactcataattccttact

SEQ ID NO: 32592 - RNA, 19 nt, synthetic construct
  misc_feature 1..19: note = siRNA sense sequence
  source 1..19: mol_type = other RNA
aattatgagttcctggagc

SEQ ID NO: 32593 - RNA, 19 nt, synthetic construct
  misc_feature 1..19: note = siRNA antisense sequence
  source 1..19: mol_type = other RNA
gctccaggaactcataatt

SEQ ID NO: 32594 - RNA, 19 nt, synthetic construct
  misc_feature 1..19: note = siRNA sense sequence
  source 1..19: mol_type = other RNA
attatgagttcctggagca

SEQ ID NO: 32595 - RNA, 19 nt, synthetic construct
  misc_feature 1..19: note = siRNA antisense sequence
  source 1..19: mol_type = other RNA
tgctccaggaactcataat

SEQ ID NO: 32596 - RNA, 19 nt, synthetic construct
  misc_feature 1..19: note = siRNA sense sequence
  source 1..19: mol_type = other RNA
ttatgagttcctggagcag

SEQ ID NO: 32597 - RNA, 19 nt, synthetic construct
  misc_feature 1..19: note = siRNA antisense sequence
  source 1..19: mol_type = other RNA
ctgctccaggaactcataa

SEQ ID NO: 32598 - RNA, 19 nt, synthetic construct
  misc_feature 1..19: note = siRNA sense sequence
  source 1..19: mol_type = other RNA
tatgagttcctggagcagc

SEQ ID NO: 32599 - RNA, 19 nt, synthetic construct
  misc_feature 1..19: note = siRNA antisense sequence
  source 1..19: mol_type = other RNA
gctgctccaggaactcata

SEQ ID NO: 32600 - RNA, 19 nt, synthetic construct
  misc_feature 1..19: note = siRNA sense sequence
  source 1..19: mol_type = other RNA
atgagttcctggagcagca

SEQ ID NO: 32601 - RNA, 19 nt, synthetic construct
  misc_feature 1..19: note = siRNA antisense sequence
  source 1..19: mol_type = other RNA
tgctgctccaggaactcat

SEQ ID NO: 32602 - RNA, 19 nt, synthetic construct
  misc_feature 1..19: note = siRNA sense sequence
  source 1..19: mol_type = other RNA
tcctggagcagcacatgtg

SEQ ID NO: 32603 - RNA, 19 nt, synthetic construct
  misc_feature 1..19: note = siRNA antisense sequence
  source 1..19: mol_type = other RNA
cacatgtgctgctccagga

SEQ ID NO: 32604 - RNA, 19 nt, synthetic construct
  misc_feature 1..19: note = siRNA sense sequence
  source 1..19: mol_type = other RNA
cctggagcagcacatgtgt

SEQ ID NO: 32605 - RNA, 19 nt, synthetic construct
  misc_feature 1..19: note = siRNA antisense sequence
  source 1..19: mol_type = other RNA
acacatgtgctgctccagg

SEQ ID NO: 32606 - RNA, 19 nt, synthetic construct
  misc_feature 1..19: note = siRNA sense sequence
  source 1..19: mol_type = other RNA
ctggagcagcacatgtgtc

SEQ ID NO: 32607 - RNA, 19 nt, synthetic construct
  misc_feature 1..19: note = siRNA antisense sequence
  source 1..19: mol_type = other RNA
gacacatgtgctgctccag

SEQ ID NO: 32608 - RNA, 19 nt, synthetic construct
  misc_feature 1..19: note = siRNA sense sequence
  source 1..19: mol_type = other RNA
tggagcagcacatgtgtct

SEQ ID NO: 32609 - RNA, 19 nt, synthetic construct
  misc_feature 1..19: note = siRNA antisense sequence
  source 1..19: mol_type = other RNA
agacacatgtgctgctcca

SEQ ID NO: 32610 - RNA, 19 nt, synthetic construct
  misc_feature 1..19: note = siRNA sense sequence
  source 1..19: mol_type = other RNA
gagcagcacatgtgtctct

SEQ ID NO: 32611 - RNA, 19 nt, synthetic construct
  misc_feature 1..19: note = siRNA antisense sequence
  source 1..19: mol_type = other RNA
agagacacatgtgctgctc

SEQ ID NO: 32612 - RNA, 19 nt, synthetic construct
  misc_feature 1..19: note = siRNA sense sequence
  source 1..19: mol_type = other RNA
agcagcacatgtgtctctt

SEQ ID NO: 32613 - RNA, 19 nt, synthetic construct
  misc_feature 1..19: note = siRNA antisense sequence
  source 1..19: mol_type = other RNA
aagagacacatgtgctgct

SEQ ID NO: 32614 - RNA, 19 nt, synthetic construct
  misc_feature 1..19: note = siRNA sense sequence
  source 1..19: mol_type = other RNA
gcagcacatgtgtctcttt

SEQ ID NO: 32615 - RNA, 19 nt, synthetic construct
  misc_feature 1..19: note = siRNA antisense sequence
  source 1..19: mol_type = other RNA
aaagagacacatgtgctgc

SEQ ID NO: 32616 - RNA, 19 nt, synthetic construct
  misc_feature 1..19: note = siRNA sense sequence
  source 1..19: mol_type = other RNA
aaatttcagttccatggtg

SEQ ID NO: 32617 - RNA, 19 nt, synthetic construct
  misc_feature 1..19: note = siRNA antisense sequence
  source 1..19: mol_type = other RNA
caccatggaactgaaattt

SEQ ID NO: 32618 - RNA, 19 nt, synthetic construct
  misc_feature 1..19: note = siRNA sense sequence
  source 1..19: mol_type = other RNA
aatttcagttccatggtga

SEQ ID NO: 32619 - RNA, 19 nt, synthetic construct
  misc_feature 1..19: note = siRNA antisense sequence
  source 1..19: mol_type = other RNA
tcaccatggaactgaaatt

SEQ ID NO: 32620 - RNA, 19 nt, synthetic construct
  misc_feature 1..19: note = siRNA sense sequence
  source 1..19: mol_type = other RNA
tttcagttccatggtgagg

SEQ ID NO: 32621 - RNA, 19 nt, synthetic construct
  misc_feature 1..19: note = siRNA antisense sequence
  source 1..19: mol_type = other RNA
cctcaccatggaactgaaa

SEQ ID NO: 32622 - RNA, 19 nt, synthetic construct
  misc_feature 1..19: note = siRNA sense sequence
  source 1..19: mol_type = other RNA
ttcagttccatggtgagga

SEQ ID NO: 32623 - RNA, 19 nt, synthetic construct
  misc_feature 1..19: note = siRNA antisense sequence
  source 1..19: mol_type = other RNA
tcctcaccatggaactgaa

SEQ ID NO: 32624 - RNA, 19 nt, synthetic construct
  misc_feature 1..19: note = siRNA sense sequence
  source 1..19: mol_type = other RNA
tcagttccatggtgaggat

SEQ ID NO: 32625 - RNA, 19 nt, synthetic construct
  misc_feature 1..19: note = siRNA antisense sequence
  source 1..19: mol_type = other RNA
atcctcaccatggaactga

SEQ ID NO: 32626 - RNA, 19 nt, synthetic construct
  misc_feature 1..19: note = siRNA sense sequence
  source 1..19: mol_type = other RNA
cagttccatggtgaggatt

SEQ ID NO: 32627 - RNA, 19 nt, synthetic construct
  misc_feature 1..19: note = siRNA antisense sequence
  source 1..19: mol_type = other RNA
aatcctcaccatggaactg

SEQ ID NO: 32628 - RNA, 19 nt, synthetic construct
  misc_feature 1..19: note = siRNA sense sequence
  source 1..19: mol_type = other RNA
agttccatggtgaggatta

SEQ ID NO: 32629 - RNA, 19 nt, synthetic construct
  misc_feature 1..19: note = siRNA antisense sequence
  source 1..19: mol_type = other RNA
taatcctcaccatggaact

SEQ ID NO: 32630 - RNA, 19 nt, synthetic construct
  misc_feature 1..19: note = siRNA sense sequence
  source 1..19: mol_type = other RNA
gttccatggtgaggattat

SEQ ID NO: 32631 - RNA, 19 nt, synthetic construct
  misc_feature 1..19: note = siRNA antisense sequence
  source 1..19: mol_type = other RNA
ataatcctcaccatggaac

SEQ ID NO: 32632 - RNA, 19 nt, synthetic construct
  misc_feature 1..19: note = siRNA sense sequence
  source 1..19: mol_type = other RNA
tccatggtgaggattattt

SEQ ID NO: 32633 - RNA, 19 nt, synthetic construct
  misc_feature 1..19: note = siRNA antisense sequence
  source 1..19: mol_type = other RNA
aaataatcctcaccatgga

SEQ ID NO: 32634 - RNA, 19 nt, synthetic construct
  misc_feature 1..19: note = siRNA sense sequence
  source 1..19: mol_type = other RNA
atggtgaggattatttgca

SEQ ID NO: 32635 - RNA, 19 nt, synthetic construct
  misc_feature 1..19: note = siRNA antisense sequence
  source 1..19: mol_type = other RNA
tgcaaataatcctcaccat

SEQ ID NO: 32636 - RNA, 19 nt, synthetic construct
  misc_feature 1..19: note = siRNA sense sequence
  source 1..19: mol_type = other RNA
atctctgaagaggcaatgg

SEQ ID NO: 32637 - RNA, 19 nt, synthetic construct
  misc_feature 1..19: note = siRNA antisense sequence
  source 1..19: mol_type = other RNA
ccattgcctcttcagagat

SEQ ID NO: 32638 - RNA, 19 nt, synthetic construct
  misc_feature 1..19: note = siRNA sense sequence
  source 1..19: mol_type = other RNA
tctctgaagaggcaatggt

SEQ ID NO: 32639 - RNA, 19 nt, synthetic construct
  misc_feature 1..19: note = siRNA antisense sequence
  source 1..19: mol_type = other RNA
accattgcctcttcagaga

SEQ ID NO: 32640 - RNA, 19 nt, synthetic construct
  misc_feature 1..19: note = siRNA sense sequence
  source 1..19: mol_type = other RNA
ctctgaagaggcaatggtc

SEQ ID NO: 32641 - RNA, 19 nt, synthetic construct
  misc_feature 1..19: note = siRNA antisense sequence
  source 1..19: mol_type = other RNA
gaccattgcctcttcagag

SEQ ID NO: 32642 - RNA, 19 nt, synthetic construct
  misc_feature 1..19: note = siRNA sense sequence
  source 1..19: mol_type = other RNA
tctgaagaggcaatggtcc

SEQ ID NO: 32643 - RNA, 19 nt, synthetic construct
  misc_feature 1..19: note = siRNA antisense sequence
  source 1..19: mol_type = other RNA
ggaccattgcctcttcaga

SEQ ID NO: 32644 - RNA, 19 nt, synthetic construct
  misc_feature 1..19: note = siRNA sense sequence
  source 1..19: mol_type = other RNA
ctgaagaggcaatggtcca

SEQ ID NO: 32645 - RNA, 19 nt, synthetic construct
  misc_feature 1..19: note = siRNA antisense sequence
  source 1..19: mol_type = other RNA
tggaccattgcctcttcag

SEQ ID NO: 32646 - RNA, 19 nt, synthetic construct
  misc_feature 1..19: note = siRNA sense sequence
  source 1..19: mol_type = other RNA
tgaagaggcaatggtccat

SEQ ID NO: 32647 - RNA, 19 nt, synthetic construct
  misc_feature 1..19: note = siRNA antisense sequence
  source 1..19: mol_type = other RNA
atggaccattgcctcttca

SEQ ID NO: 32648 - RNA, 19 nt, synthetic construct
  misc_feature 1..19: note = siRNA sense sequence
  source 1..19: mol_type = other RNA
gaagaggcaatggtccatc

SEQ ID NO: 32649 - RNA, 19 nt, synthetic construct
  misc_feature 1..19: note = siRNA antisense sequence
  source 1..19: mol_type = other RNA
gatggaccattgcctcttc

SEQ ID NO: 32650 - RNA, 19 nt, synthetic construct
  misc_feature 1..19: note = siRNA sense sequence
  source 1..19: mol_type = other RNA
aagaggcaatggtccatcc

SEQ ID NO: 32651 - RNA, 19 nt, synthetic construct
  misc_feature 1..19: note = siRNA antisense sequence
  source 1..19: mol_type = other RNA
ggatggaccattgcctctt

SEQ ID NO: 32652 - RNA, 19 nt, synthetic construct
  misc_feature 1..19: note = siRNA sense sequence
  source 1..19: mol_type = other RNA
agaggcaatggtccatcca

SEQ ID NO: 32653 - RNA, 19 nt, synthetic construct
  misc_feature 1..19: note = siRNA antisense sequence
  source 1..19: mol_type = other RNA
tggatggaccattgcctct

SEQ ID NO: 32654 - RNA, 19 nt, synthetic construct
  misc_feature 1..19: note = siRNA sense sequence
  source 1..19: mol_type = other RNA
gaggcaatggtccatccag

SEQ ID NO: 32655 - RNA, 19 nt, synthetic construct
  misc_feature 1..19: note = siRNA antisense sequence
  source 1..19: mol_type = other RNA
ctggatggaccattgcctc

SEQ ID NO: 32656 - RNA, 19 nt, synthetic construct
  misc_feature 1..19: note = siRNA sense sequence
  source 1..19: mol_type = other RNA
aggcaatggtccatccaga

SEQ ID NO: 32657 - RNA, 19 nt, synthetic construct
  misc_feature 1..19: note = siRNA antisense sequence
  source 1..19: mol_type = other RNA
tctggatggaccattgcct

SEQ ID NO: 32658 - RNA, 19 nt, synthetic construct
  misc_feature 1..19: note = siRNA sense sequence
  source 1..19: mol_type = other RNA
atagcacagagccagtaca

SEQ ID NO: 32659 - RNA, 19 nt, synthetic construct
  misc_feature 1..19: note = siRNA antisense sequence
  source 1..19: mol_type = other RNA
tgtactggctctgtgctat

SEQ ID NO: 32660 - RNA, 19 nt, synthetic construct
  misc_feature 1..19: note = siRNA sense sequence
  source 1..19: mol_type = other RNA
tagcacagagccagtacat

SEQ ID NO: 32661 - RNA, 19 nt, synthetic construct
  misc_feature 1..19: note = siRNA antisense sequence
  source 1..19: mol_type = other RNA
atgtactggctctgtgcta

SEQ ID NO: 32662 - RNA, 19 nt, synthetic construct
  misc_feature 1..19: note = siRNA sense sequence
  source 1..19: mol_type = other RNA
agcacagagccagtacata

SEQ ID NO: 32663 - RNA, 19 nt, synthetic construct
  misc_feature 1..19: note = siRNA antisense sequence
  source 1..19: mol_type = other RNA
tatgtactggctctgtgct

SEQ ID NO: 32664 - RNA, 19 nt, synthetic construct
  misc_feature 1..19: note = siRNA sense sequence
  source 1..19: mol_type = other RNA
gcacagagccagtacataa

SEQ ID NO: 32665 - RNA, 19 nt, synthetic construct
  misc_feature 1..19: note = siRNA antisense sequence
  source 1..19: mol_type = other RNA
ttatgtactggctctgtgc

SEQ ID NO: 32666 - RNA, 19 nt, synthetic construct
  misc_feature 1..19: note = siRNA sense sequence
  source 1..19: mol_type = other RNA
cacagagccagtacataaa

SEQ ID NO: 32667 - RNA, 19 nt, synthetic construct
  misc_feature 1..19: note = siRNA antisense sequence
  source 1..19: mol_type = other RNA
tttatgtactggctctgtg

SEQ ID NO: 32668 - RNA, 19 nt, synthetic construct
  misc_feature 1..19: note = siRNA sense sequence
  source 1..19: mol_type = other RNA
acagagccagtacataaaa

SEQ ID NO: 32669 - RNA, 19 nt, synthetic construct
  misc_feature 1..19: note = siRNA antisense sequence
  source 1..19: mol_type = other RNA
ttttatgtactggctctgt

SEQ ID NO: 32670 - RNA, 19 nt, synthetic construct
  misc_feature 1..19: note = siRNA sense sequence
  source 1..19: mol_type = other RNA
cagagccagtacataaaat

SEQ ID NO: 32671 - RNA, 19 nt, synthetic construct
  misc_feature 1..19: note = siRNA antisense sequence
  source 1..19: mol_type = other RNA
attttatgtactggctctg

SEQ ID NO: 32672 - RNA, 19 nt, synthetic construct
  misc_feature 1..19: note = siRNA sense sequence
  source 1..19: mol_type = other RNA
agagccagtacataaaata

SEQ ID NO: 32673 - RNA, 19 nt, synthetic construct
  misc_feature 1..19: note = siRNA antisense sequence
  source 1..19: mol_type = other RNA
tattttatgtactggctct

SEQ ID NO: 32674 - RNA, 19 nt, synthetic construct
  misc_feature 1..19: note = siRNA sense sequence
  source 1..19: mol_type = other RNA
gagccagtacataaaataa

SEQ ID NO: 32675 - RNA, 19 nt, synthetic construct
  misc_feature 1..19: note = siRNA antisense sequence
  source 1..19: mol_type = other RNA
ttattttatgtactggctc

SEQ ID NO: 32676 - RNA, 19 nt, synthetic construct
  misc_feature 1..19: note = siRNA sense sequence
  source 1..19: mol_type = other RNA
aattctagcaagtcagtat

SEQ ID NO: 32677 - RNA, 19 nt, synthetic construct
  misc_feature 1..19: note = siRNA antisense sequence
  source 1..19: mol_type = other RNA
atactgacttgctagaatt

SEQ ID NO: 32678 - RNA, 19 nt, synthetic construct
  misc_feature 1..19: note = siRNA sense sequence
  source 1..19: mol_type = other RNA
attctagcaagtcagtatc

SEQ ID NO: 32679 - RNA, 19 nt, synthetic construct
  misc_feature 1..19: note = siRNA antisense sequence
  source 1..19: mol_type = other RNA
gatactgacttgctagaat

SEQ ID NO: 32680 - RNA, 19 nt, synthetic construct
  misc_feature 1..19: note = siRNA sense sequence
  source 1..19: mol_type = other RNA
tagcaagtcagtatctttt

SEQ ID NO: 32681 - RNA, 19 nt, synthetic construct
  misc_feature 1..19: note = siRNA antisense sequence
  source 1..19: mol_type = other RNA
aaaagatactgacttgcta

SEQ ID NO: 32682 - RNA, 19 nt, synthetic construct
  misc_feature 1..19: note = siRNA sense sequence
  source 1..19: mol_type = other RNA
agcaagtcagtatcttttc

SEQ ID NO: 32683 - RNA, 19 nt, synthetic construct
  misc_feature 1..19: note = siRNA antisense sequence
  source 1..19: mol_type = other RNA
gaaaagatactgacttgct

SEQ ID NO: 32684 - RNA, 19 nt, synthetic construct
  misc_feature 1..19: note = siRNA sense sequence
  source 1..19: mol_type = other RNA
agtcagtatcttttctggc

SEQ ID NO: 32685 - RNA, 19 nt, synthetic construct
  misc_feature 1..19: note = siRNA antisense sequence
  source 1..19: mol_type = other RNA
gccagaaaagatactgact

SEQ ID NO: 32686 - RNA, 19 nt, synthetic construct
  misc_feature 1..19: note = siRNA sense sequence
  source 1..19: mol_type = other RNA
gtcagtatcttttctggcc

SEQ ID NO: 32687 - RNA, 19 nt, synthetic construct
  misc_feature 1..19: note = siRNA antisense sequence
  source 1..19: mol_type = other RNA
ggccagaaaagatactgac

SEQ ID NO: 32688 - RNA, 19 nt, synthetic construct
  misc_feature 1..19: note = siRNA sense sequence
  source 1..19: mol_type = other RNA
tcagtatcttttctggcca

SEQ ID NO: 32689 - RNA, 19 nt, synthetic construct
  misc_feature 1..19: note = siRNA antisense sequence
  source 1..19: mol_type = other RNA
tggccagaaaagatactga

SEQ ID NO: 32690 - RNA, 19 nt, synthetic construct
  misc_feature 1..19: note = siRNA sense sequence
  source 1..19: mol_type = other RNA
cagtatcttttctggccag

SEQ ID NO: 32691 - RNA, 19 nt, synthetic construct
  misc_feature 1..19: note = siRNA antisense sequence
  source 1..19: mol_type = other RNA
ctggccagaaaagatactg

SEQ ID NO: 32692 - RNA, 19 nt, synthetic construct
  misc_feature 1..19: note = siRNA sense sequence
  source 1..19: mol_type = other RNA
tcttttctggccagtacat

SEQ ID NO: 32693 - RNA, 19 nt, synthetic construct
  misc_feature 1..19: note = siRNA antisense sequence
  source 1..19: mol_type = other RNA
atgtactggccagaaaaga

SEQ ID NO: 32694 - RNA, 19 nt, synthetic construct
  misc_feature 1..19: note = siRNA sense sequence
  source 1..19: mol_type = other RNA
cttttctggccagtacatt

SEQ ID NO: 32695 - RNA, 19 nt, synthetic construct
  misc_feature 1..19: note = siRNA antisense sequence
  source 1..19: mol_type = other RNA
aatgtactggccagaaaag

SEQ ID NO: 32696 - RNA, 19 nt, synthetic construct
  misc_feature 1..19: note = siRNA sense sequence
  source 1..19: mol_type = other RNA
ttttctggccagtacattt

SEQ ID NO: 32697 - RNA, 19 nt, synthetic construct
  misc_feature 1..19: note = siRNA antisense sequence
  source 1..19: mol_type = other RNA
aaatgtactggccagaaaa

SEQ ID NO: 32698 - RNA, 19 nt, synthetic construct
  misc_feature 1..19: note = siRNA sense sequence
  source 1..19: mol_type = other RNA
tttctggccagtacatttg

SEQ ID NO: 32699 - RNA, 19 nt, synthetic construct
  misc_feature 1..19: note = siRNA antisense sequence
  source 1..19: mol_type = other RNA
caaatgtactggccagaaa

SEQ ID NO: 32700 - RNA, 19 nt, synthetic construct
  misc_feature 1..19: note = siRNA sense sequence
  source 1..19: mol_type = other RNA
ttctggccagtacatttgt

SEQ ID NO: 32701 - RNA, 19 nt, synthetic construct
  misc_feature 1..19: note = siRNA antisense sequence
  source 1..19: mol_type = other RNA
acaaatgtactggccagaa

SEQ ID NO: 32702 - RNA, 19 nt, synthetic construct
  misc_feature 1..19: note = siRNA sense sequence
  source 1..19: mol_type = other RNA
ctggccagtacatttgtgt

SEQ ID NO: 32703 - RNA, 19 nt, synthetic construct
  misc_feature 1..19: note = siRNA antisense sequence
  source 1..19: mol_type = other RNA
acacaaatgtactggccag

SEQ ID NO: 32704 - RNA, 19 nt, synthetic construct
  misc_feature 1..19: note = siRNA sense sequence
  source 1..19: mol_type = other RNA
agtgccaatttgatttcca

SEQ ID NO: 32705 - RNA, 19 nt, synthetic construct
  misc_feature 1..19: note = siRNA antisense sequence
  source 1..19: mol_type = other RNA
tggaaatcaaattggcact

SEQ ID NO: 32706 - RNA, 19 nt, synthetic construct
  misc_feature 1..19: note = siRNA sense sequence
  source 1..19: mol_type = other RNA
gtgccaatttgatttccaa

SEQ ID NO: 32707 - RNA, 19 nt, synthetic construct
  misc_feature 1..19: note = siRNA antisense sequence
  source 1..19: mol_type = other RNA
ttggaaatcaaattggcac

SEQ ID NO: 32708 - RNA, 19 nt, synthetic construct
  misc_feature 1..19: note = siRNA sense sequence
  source 1..19: mol_type = other RNA
ccgccttggaagttgaatc

SEQ ID NO: 32709 - RNA, 19 nt, synthetic construct
  misc_feature 1..19: note = siRNA antisense sequence
  source 1..19: mol_type = other RNA
gattcaacttccaaggcgg

SEQ ID NO: 32710 - RNA, 19 nt, synthetic construct
  misc_feature 1..19: note = siRNA sense sequence
  source 1..19: mol_type = other RNA
cgccttggaagttgaatct

SEQ ID NO: 32711 - RNA, 19 nt, synthetic construct
  misc_feature 1..19: note = siRNA antisense sequence
  source 1..19: mol_type = other RNA
agattcaacttccaaggcg

SEQ ID NO: 32712 - RNA, 19 nt, synthetic construct
  misc_feature 1..19: note = siRNA sense sequence
  source 1..19: mol_type = other RNA
gccttggaagttgaatctc

SEQ ID NO: 32713 - RNA, 19 nt, synthetic construct
  misc_feature 1..19: note = siRNA antisense sequence
  source 1..19: mol_type = other RNA
gagattcaacttccaaggc

SEQ ID NO: 32714 - RNA, 19 nt, synthetic construct
  misc_feature 1..19: note = siRNA sense sequence
  source 1..19: mol_type = other RNA
ttggaagttgaatctcagt

SEQ ID NO: 32715 - RNA, 19 nt, synthetic construct
  misc_feature 1..19: note = siRNA antisense sequence
  source 1..19: mol_type = other RNA
actgagattcaacttccaa

SEQ ID NO: 32716 - RNA, 19 nt, synthetic construct
  misc_feature 1..19: note = siRNA sense sequence
  source 1..19: mol_type = other RNA
tggaagttgaatctcagtc

SEQ ID NO: 32717 - RNA, 19 nt, synthetic construct
  misc_feature 1..19: note = siRNA antisense sequence
  source 1..19: mol_type = other RNA
gactgagattcaacttcca

SEQ ID NO: 32718 - RNA, 19 nt, synthetic construct
  misc_feature 1..19: note = siRNA sense sequence
  source 1..19: mol_type = other RNA
ggaagttgaatctcagtca

SEQ ID NO: 32719 - RNA, 19 nt, synthetic construct
  misc_feature 1..19: note = siRNA antisense sequence
  source 1..19: mol_type = other RNA
tgactgagattcaacttcc

SEQ ID NO: 32720 - RNA, 19 nt, synthetic construct
  misc_feature 1..19: note = siRNA sense sequence
  source 1..19: mol_type = other RNA
gaagttgaatctcagtcat

SEQ ID NO: 32721 - RNA, 19 nt, synthetic construct
  misc_feature 1..19: note = siRNA antisense sequence
  source 1..19: mol_type = other RNA
atgactgagattcaacttc

SEQ ID NO: 32722 - RNA, 19 nt, synthetic construct
  misc_feature 1..19: note = siRNA sense sequence
  source 1..19: mol_type = other RNA
aagttgaatctcagtcatg

SEQ ID NO: 32723 - RNA, 19 nt, synthetic construct
  misc_feature 1..19: note = siRNA antisense sequence
  source 1..19: mol_type = other RNA
catgactgagattcaactt

SEQ ID NO: 32724 - RNA, 19 nt, synthetic construct
  misc_feature 1..19: note = siRNA sense sequence
  source 1..19: mol_type = other RNA
agttgaatctcagtcatgt

SEQ ID NO: 32725 - RNA, 19 nt, synthetic construct
  misc_feature 1..19: note = siRNA antisense sequence
  source 1..19: mol_type = other RNA
acatgactgagattcaact

SEQ ID NO: 32726 - RNA, 19 nt, synthetic construct
  misc_feature 1..19: note = siRNA sense sequence
  source 1..19: mol_type = other RNA
gttgaatctcagtcatgta

SEQ ID NO: 32727 - RNA, 19 nt, synthetic construct
  misc_feature 1..19: note = siRNA antisense sequence
  source 1..19: mol_type = other RNA
tacatgactgagattcaac

SEQ ID NO: 32728 - RNA, 19 nt, synthetic construct
  misc_feature 1..19: note = siRNA sense sequence
  source 1..19: mol_type = other RNA
ttgaatctcagtcatgtac

SEQ ID NO: 32729 - RNA, 19 nt, synthetic construct
  misc_feature 1..19: note = siRNA antisense sequence
  source 1..19: mol_type = other RNA
gtacatgactgagattcaa

SEQ ID NO: 32730 - RNA, 19 nt, synthetic construct
  misc_feature 1..19: note = siRNA sense sequence
  source 1..19: mol_type = other RNA
atctcagtcatgtacacca

SEQ ID NO: 32731 - RNA, 19 nt, synthetic construct
  misc_feature 1..19: note = siRNA antisense sequence
  source 1..19: mol_type = other RNA
tggtgtacatgactgagat

SEQ ID NO: 32732 - RNA, 19 nt, synthetic construct
  misc_feature 1..19: note = siRNA sense sequence
  source 1..19: mol_type = other RNA
tctcagtcatgtacaccag

SEQ ID NO: 32733 - RNA, 19 nt, synthetic construct
  misc_feature 1..19: note = siRNA antisense sequence
  source 1..19: mol_type = other RNA
ctggtgtacatgactgaga

SEQ ID NO: 32734 - RNA, 19 nt, synthetic construct
  misc_feature 1..19: note = siRNA sense sequence
  source 1..19: mol_type = other RNA
ctcagtcatgtacaccaga

SEQ ID NO: 32735 - RNA, 19 nt, synthetic construct
  misc_feature 1..19: note = siRNA antisense sequence
  source 1..19: mol_type = other RNA
tctggtgtacatgactgag

SEQ ID NO: 32736 - RNA, 19 nt, synthetic construct
  misc_feature 1..19: note = siRNA sense sequence
  source 1..19: mol_type = other RNA
tcagtcatgtacaccagaa

SEQ ID NO: 32737 - RNA, 19 nt, synthetic construct
  misc_feature 1..19: note = siRNA antisense sequence
  source 1..19: mol_type = other RNA
ttctggtgtacatgactga

SEQ ID NO: 32738 - RNA, 19 nt, synthetic construct
  misc_feature 1..19: note = siRNA sense sequence
  source 1..19: mol_type = other RNA
cagtcatgtacaccagaat

SEQ ID NO: 32739 - RNA, 19 nt, synthetic construct
  misc_feature 1..19: note = siRNA antisense sequence
  source 1..19: mol_type = other RNA
attctggtgtacatgactg

SEQ ID NO: 32740 - RNA, 19 nt, synthetic construct
  misc_feature 1..19: note = siRNA sense sequence
  source 1..19: mol_type = other RNA
agtcatgtacaccagaata

SEQ ID NO: 32741 - RNA, 19 nt, synthetic construct
  misc_feature 1..19: note = siRNA antisense sequence
  source 1..19: mol_type = other RNA
tattctggtgtacatgact

SEQ ID NO: 32742 - RNA, 19 nt, synthetic construct
  misc_feature 1..19: note = siRNA sense sequence
  source 1..19: mol_type = other RNA
gtcatgtacaccagaatat

SEQ ID NO: 32743 - RNA, 19 nt, synthetic construct
  misc_feature 1..19: note = siRNA antisense sequence
  source 1..19: mol_type = other RNA
atattctggtgtacatgac

SEQ ID NO: 32744 - RNA, 19 nt, synthetic construct
  misc_feature 1..19: note = siRNA sense sequence
  source 1..19: mol_type = other RNA
caaatcacccttggccaga

SEQ ID NO: 32745 - RNA, 19 nt, synthetic construct
  misc_feature 1..19: note = siRNA antisense sequence
  source 1..19: mol_type = other RNA
tctggccaagggtgatttg

SEQ ID NO: 32746 - RNA, 19 nt, synthetic construct
  misc_feature 1..19: note = siRNA sense sequence
  source 1..19: mol_type = other RNA
aaatcacccttggccagat

SEQ ID NO: 32747 - RNA, 19 nt, synthetic construct
  misc_feature 1..19: note = siRNA antisense sequence
  source 1..19: mol_type = other RNA
atctggccaagggtgattt

SEQ ID NO: 32748 - RNA, 19 nt, synthetic construct
  misc_feature 1..19: note = siRNA sense sequence
  source 1..19: mol_type = other RNA
atcacccttggccagattt

SEQ ID NO: 32749 - RNA, 19 nt, synthetic construct
  misc_feature 1..19: note = siRNA antisense sequence
  source 1..19: mol_type = other RNA
aaatctggccaagggtgat

SEQ ID NO: 32750 - RNA, 19 nt, synthetic construct
  misc_feature 1..19: note = siRNA sense sequence
  source 1..19: mol_type = other RNA
tcacccttggccagatttc

SEQ ID NO: 32751 - RNA, 19 nt, synthetic construct
  misc_feature 1..19: note = siRNA antisense sequence
  source 1..19: mol_type = other RNA
gaaatctggccaagggtga

SEQ ID NO: 32752 - RNA, 19 nt, synthetic construct
  misc_feature 1..19: note = siRNA sense sequence
  source 1..19: mol_type = other RNA
cacccttggccagatttcc

SEQ ID NO: 32753 - RNA, 19 nt, synthetic construct
  misc_feature 1..19: note = siRNA antisense sequence
  source 1..19: mol_type = other RNA
ggaaatctggccaagggtg

SEQ ID NO: 32754 - RNA, 19 nt, synthetic construct
  misc_feature 1..19: note = siRNA sense sequence
  source 1..19: mol_type = other RNA
ccacttggttgttcatttt

SEQ ID NO: 32755 - RNA, 19 nt, synthetic construct
  misc_feature 1..19: note = siRNA antisense sequence
  source 1..19: mol_type = other RNA
aaaatgaacaaccaagtgg

SEQ ID NO: 32756 - RNA, 19 nt, synthetic construct
  misc_feature 1..19: note = siRNA sense sequence
  source 1..19: mol_type = other RNA
gttgttcattttgcctacc

SEQ ID NO: 32757 - RNA, 19 nt, synthetic construct
  misc_feature 1..19: note = siRNA antisense sequence
  source 1..19: mol_type = other RNA
ggtaggcaaaatgaacaac

SEQ ID NO: 32758 - RNA, 19 nt, synthetic construct
  misc_feature 1..19: note = siRNA sense sequence
  source 1..19: mol_type = other RNA
tcattttgcctacctctga

SEQ ID NO: 32759 - RNA, 19 nt, synthetic construct
  misc_feature 1..19: note = siRNA antisense sequence
  source 1..19: mol_type = other RNA
tcagaggtaggcaaaatga

SEQ ID NO: 32760 - RNA, 19 nt, synthetic construct
  misc_feature 1..19: note = siRNA sense sequence
  source 1..19: mol_type = other RNA
cattttgcctacctctgaa

SEQ ID NO: 32761 - RNA, 19 nt, synthetic construct
  misc_feature 1..19: note = siRNA antisense sequence
  source 1..19: mol_type = other RNA
ttcagaggtaggcaaaatg

SEQ ID NO: 32762 - RNA, 19 nt, synthetic construct
  misc_feature 1..19: note = siRNA sense sequence
  source 1..19: mol_type = other RNA
ctgcctttgtctacttgtg

SEQ ID NO: 32763 - RNA, 19 nt, synthetic construct
  misc_feature 1..19: note = siRNA antisense sequence
  source 1..19: mol_type = other RNA
cacaagtagacaaaggcag

SEQ ID NO: 32764 - RNA, 19 nt, synthetic construct
  misc_feature 1..19: note = siRNA sense sequence
  source 1..19: mol_type = other RNA
tgcctttgtctacttgtgc

SEQ ID NO: 32765 - RNA, 19 nt, synthetic construct
  misc_feature 1..19: note = siRNA antisense sequence
  source 1..19: mol_type = other RNA
gcacaagtagacaaaggca

SEQ ID NO: 32766 - RNA, 19 nt, synthetic construct
  misc_feature 1..19: note = siRNA sense sequence
  source 1..19: mol_type = other RNA
gcctttgtctacttgtgcc

SEQ ID NO: 32767 - RNA, 19 nt, synthetic construct
  misc_feature 1..19: note = siRNA antisense sequence
  source 1..19: mol_type = other RNA
ggcacaagtagacaaaggc

SEQ ID NO: 32768 - RNA, 19 nt, synthetic construct
  misc_feature 1..19: note = siRNA sense sequence
  source 1..19: mol_type = other RNA
tgtctacttgtgccttctc

SEQ ID NO: 32769 - RNA, 19 nt, synthetic construct
  misc_feature 1..19: note = siRNA antisense sequence
  source 1..19: mol_type = other RNA
gagaaggcacaagtagaca

SEQ ID NO: 32770 - RNA, 19 nt, synthetic construct
  misc_feature 1..19: note = siRNA sense sequence
  source 1..19: mol_type = other RNA
gtctacttgtgccttctca

SEQ ID NO: 32771 - RNA, 19 nt, synthetic construct
  misc_feature 1..19: note = siRNA antisense sequence
  source 1..19: mol_type = other RNA
tgagaaggcacaagtagac

SEQ ID NO: 32772 - RNA, 19 nt, synthetic construct
  misc_feature 1..19: note = siRNA sense sequence
  source 1..19: mol_type = other RNA
tctacttgtgccttctcag

SEQ ID NO: 32773 - RNA, 19 nt, synthetic construct
  misc_feature 1..19: note = siRNA antisense sequence
  source 1..19: mol_type = other RNA
ctgagaaggcacaagtaga

SEQ ID NO: 32774 - RNA, 19 nt, synthetic construct
  misc_feature 1..19: note = siRNA sense sequence
  source 1..19: mol_type = other RNA
ctacttgtgccttctcaga

SEQ ID NO: 32775 - RNA, 19 nt, synthetic construct
  misc_feature 1..19: note = siRNA antisense sequence
  source 1..19: mol_type = other RNA
tctgagaaggcacaagtag

SEQ ID NO: 32776 - RNA, 19 nt, synthetic construct
  misc_feature 1..19: note = siRNA sense sequence
  source 1..19: mol_type = other RNA
tacttgtgccttctcagat

SEQ ID NO: 32777 - RNA, 19 nt, synthetic construct
  misc_feature 1..19: note = siRNA antisense sequence
  source 1..19: mol_type = other RNA
atctgagaaggcacaagta

SEQ ID NO: 32778 - RNA, 19 nt, synthetic construct
  misc_feature 1..19: note = siRNA sense sequence
  source 1..19: mol_type = other RNA
acttgtgccttctcagatc

SEQ ID NO: 32779 - RNA, 19 nt, synthetic construct
  misc_feature 1..19: note = siRNA antisense sequence
  source 1..19: mol_type = other RNA
gatctgagaaggcacaagt

SEQ ID NO: 32780 - RNA, 19 nt, synthetic construct
  misc_feature 1..19: note = siRNA sense sequence
  source 1..19: mol_type = other RNA
ttgtgccttctcagatctg

SEQ ID NO: 32781 - RNA, 19 nt, synthetic construct
  misc_feature 1..19: note = siRNA antisense sequence
  source 1..19: mol_type = other RNA
cagatctgagaaggcacaa

SEQ ID NO: 32782 - RNA, 19 nt, synthetic construct
  misc_feature 1..19: note = siRNA sense sequence
  source 1..19: mol_type = other RNA
tgtgccttctcagatctgc

SEQ ID NO: 32783 - RNA, 19 nt, synthetic construct
  misc_feature 1..19: note = siRNA antisense sequence
  source 1..19: mol_type = other RNA
gcagatctgagaaggcaca

SEQ ID NO: 32784 - RNA, 19 nt, synthetic construct
  misc_feature 1..19: note = siRNA sense sequence
  source 1..19: mol_type = other RNA
atctgctgctcctggccca

SEQ ID NO: 32785 - RNA, 19 nt, synthetic construct
  misc_feature 1..19: note = siRNA antisense sequence
  source 1..19: mol_type = other RNA
tgggccaggagcagcagat

SEQ ID NO: 32786 - RNA, 19 nt, synthetic construct
  misc_feature 1..19: note = siRNA sense sequence
  source 1..19: mol_type = other RNA
ctgctgctcctggcccatt

SEQ ID NO: 32787 - RNA, 19 nt, synthetic construct
  misc_feature 1..19: note = siRNA antisense sequence
  source 1..19: mol_type = other RNA
aatgggccaggagcagcag

SEQ ID NO: 32788 - RNA, 19 nt, synthetic construct
  misc_feature 1..19: note = siRNA sense sequence
  source 1..19: mol_type = other RNA
gctcctggcccattccttg

SEQ ID NO: 32789 - RNA, 19 nt, synthetic construct
  misc_feature 1..19: note = siRNA antisense sequence
  source 1..19: mol_type = other RNA
caaggaatgggccaggagc

SEQ ID NO: 32790 - RNA, 19 nt, synthetic construct
  misc_feature 1..19: note = siRNA sense sequence
  source 1..19: mol_type = other RNA
ctcctggcccattccttga

SEQ ID NO: 32791 - RNA, 19 nt, synthetic construct
  misc_feature 1..19: note = siRNA antisense sequence
  source 1..19: mol_type = other RNA
tcaaggaatgggccaggag

SEQ ID NO: 32792 - RNA, 19 nt, synthetic construct
  misc_feature 1..19: note = siRNA sense sequence
  source 1..19: mol_type = other RNA
tcctggcccattccttgat

SEQ ID NO: 32793 - RNA, 19 nt, synthetic construct
  misc_feature 1..19: note = siRNA antisense sequence
  source 1..19: mol_type = other RNA
atcaaggaatgggccagga

SEQ ID NO: 32794 - RNA, 19 nt, synthetic construct
  misc_feature 1..19: note = siRNA sense sequence
  source 1..19: mol_type = other RNA
cctggcccattccttgatc

SEQ ID NO: 32795 - RNA, 19 nt, synthetic construct
  misc_feature 1..19: note = siRNA antisense sequence
  source 1..19: mol_type = other RNA
gatcaaggaatgggccagg

SEQ ID NO: 32796 - RNA, 19 nt, synthetic construct
  misc_feature 1..19: note = siRNA sense sequence
  source 1..19: mol_type = other RNA
ctggcccattccttgatct

SEQ ID NO: 32797 - RNA, 19 nt, synthetic construct
  misc_feature 1..19: note = siRNA antisense sequence
  source 1..19: mol_type = other RNA
agatcaaggaatgggccag

SEQ ID NO: 32798 - RNA, 19 nt, synthetic construct
  misc_feature 1..19: note = siRNA sense sequence
  source 1..19: mol_type = other RNA
tggcccattccttgatctc

SEQ ID NO: 32799 - RNA, 19 nt, synthetic construct
  misc_feature 1..19: note = siRNA antisense sequence
  source 1..19: mol_type = other RNA
gagatcaaggaatgggcca

SEQ ID NO: 32800 - RNA, 19 nt, synthetic construct
  misc_feature 1..19: note = siRNA sense sequence
  source 1..19: mol_type = other RNA
taaaggtcattcaatcaag

SEQ ID NO: 32801 - RNA, 19 nt, synthetic construct
  misc_feature 1..19: note = siRNA antisense sequence
  source 1..19: mol_type = other RNA
cttgattgaatgaccttta

SEQ ID NO: 32802 - RNA, 19 nt, synthetic construct
  misc_feature 1..19: note = siRNA sense sequence
  source 1..19: mol_type = other RNA
aaaggtcattcaatcaagc

SEQ ID NO: 32803 - RNA, 19 nt, synthetic construct
  misc_feature 1..19: note = siRNA antisense sequence
  source 1..19: mol_type = other RNA
gcttgattgaatgaccttt

SEQ ID NO: 32804 - RNA, 19 nt, synthetic construct
  misc_feature 1..19: note = siRNA sense sequence
  source 1..19: mol_type = other RNA
aaggtcattcaatcaagct

SEQ ID NO: 32805 - RNA, 19 nt, synthetic construct
  misc_feature 1..19: note = siRNA antisense sequence
  source 1..19: mol_type = other RNA
agcttgattgaatgacctt

SEQ ID NO: 32806 - RNA, 19 nt, synthetic construct
  misc_feature 1..19: note = siRNA sense sequence
  source 1..19: mol_type = other RNA
tcattcaatcaagctcttc

SEQ ID NO: 32807 - RNA, 19 nt, synthetic construct
  misc_feature 1..19: note = siRNA antisense sequence
  source 1..19: mol_type = other RNA
gaagagcttgattgaatga

SEQ ID NO: 32808 - RNA, 19 nt, synthetic construct
  misc_feature 1..19: note = siRNA sense sequence
  source 1..19: mol_type = other RNA
cattcaatcaagctcttct

SEQ ID NO: 32809 - RNA, 19 nt, synthetic construct
  misc_feature 1..19: note = siRNA antisense sequence
  source 1..19: mol_type = other RNA
agaagagcttgattgaatg

SEQ ID NO: 32810 - RNA, 19 nt, synthetic construct
  misc_feature 1..19: note = siRNA sense sequence
  source 1..19: mol_type = other RNA
attcaatcaagctcttcta

SEQ ID NO: 32811 - RNA, 19 nt, synthetic construct
  misc_feature 1..19: note = siRNA antisense sequence
  source 1..19: mol_type = other RNA
tagaagagcttgattgaat

SEQ ID NO: 32812 - RNA, 19 nt, synthetic construct
  misc_feature 1..19: note = siRNA sense sequence
  source 1..19: mol_type = other RNA
ttcaatcaagctcttctat

SEQ ID NO: 32813 - RNA, 19 nt, synthetic construct
  misc_feature 1..19: note = siRNA antisense sequence
  source 1..19: mol_type = other RNA
atagaagagcttgattgaa

SEQ ID NO: 32814 - RNA, 19 nt, synthetic construct
  misc_feature 1..19: note = siRNA sense sequence
  source 1..19: mol_type = other RNA
caatcaagctcttctattt

SEQ ID NO: 32815 - RNA, 19 nt, synthetic construct
  misc_feature 1..19: note = siRNA antisense sequence
  source 1..19: mol_type = other RNA
aaatagaagagcttgattg

SEQ ID NO: 32816 - RNA, 19 nt, synthetic construct
  misc_feature 1..19: note = siRNA sense sequence
  source 1..19: mol_type = other RNA
atcaagctcttctattttg

SEQ ID NO: 32817 - RNA, 19 nt, synthetic construct
  misc_feature 1..19: note = siRNA antisense sequence
  source 1..19: mol_type = other RNA
caaaatagaagagcttgat

SEQ ID NO: 32818 - RNA, 19 nt, synthetic construct
  misc_feature 1..19: note = siRNA sense sequence
  source 1..19: mol_type = other RNA
tcaagctcttctattttgt

SEQ ID NO: 32819 - RNA, 19 nt, synthetic construct
  misc_feature 1..19: note = siRNA antisense sequence
  source 1..19: mol_type = other RNA
acaaaatagaagagcttga

SEQ ID NO: 32820 - RNA, 19 nt, synthetic construct
  misc_feature 1..19: note = siRNA sense sequence
  source 1..19: mol_type = other RNA
caagctcttctattttgtg

SEQ ID NO: 32821 - RNA, 19 nt, synthetic construct
  misc_feature 1..19: note = siRNA antisense sequence
  source 1..19: mol_type = other RNA
cacaaaatagaagagcttg

SEQ ID NO: 32822 - RNA, 19 nt, synthetic construct
  misc_feature 1..19: note = siRNA sense sequence
  source 1..19: mol_type = other RNA
aagctcttctattttgtgc

SEQ ID NO: 32823 - RNA, 19 nt, synthetic construct
  misc_feature 1..19: note = siRNA antisense sequence
  source 1..19: mol_type = other RNA
gcacaaaatagaagagctt

SEQ ID NO: 32824 - RNA, 19 nt, synthetic construct
  misc_feature 1..19: note = siRNA sense sequence
  source 1..19: mol_type = other RNA
agctcttctattttgtgca

SEQ ID NO: 32825 - RNA, 19 nt, synthetic construct
  misc_feature 1..19: note = siRNA antisense sequence
  source 1..19: mol_type = other RNA
tgcacaaaatagaagagct

SEQ ID NO: 32826 - RNA, 19 nt, synthetic construct
  misc_feature 1..19: note = siRNA sense sequence
  source 1..19: mol_type = other RNA
tctctaagaagcaagaatg

SEQ ID NO: 32827 - RNA, 19 nt, synthetic construct
  misc_feature 1..19: note = siRNA antisense sequence
  source 1..19: mol_type = other RNA
cattcttgcttcttagaga

SEQ ID NO: 32828 - RNA, 19 nt, synthetic construct
  misc_feature 1..19: note = siRNA sense sequence
  source 1..19: mol_type = other RNA
ctctaagaagcaagaatgg

SEQ ID NO: 32829 - RNA, 19 nt, synthetic construct
  misc_feature 1..19: note = siRNA antisense sequence
  source 1..19: mol_type = other RNA
ccattcttgcttcttagag

SEQ ID NO: 32830 - RNA, 19 nt, synthetic construct
  misc_feature 1..19: note = siRNA sense sequence
  source 1..19: mol_type = other RNA
tctaagaagcaagaatggc

SEQ ID NO: 32831 - RNA, 19 nt, synthetic construct
  misc_feature 1..19: note = siRNA antisense sequence
  source 1..19: mol_type = other RNA
gccattcttgcttcttaga

SEQ ID NO: 32832 - RNA, 19 nt, synthetic construct
  misc_feature 1..19: note = siRNA sense sequence
  source 1..19: mol_type = other RNA
ctaagaagcaagaatggca

SEQ ID NO: 32833 - RNA, 19 nt, synthetic construct
  misc_feature 1..19: note = siRNA antisense sequence
  source 1..19: mol_type = other RNA
tgccattcttgcttcttag

SEQ ID NO: 32834 - RNA, 19 nt, synthetic construct
  misc_feature 1..19: note = siRNA sense sequence
  source 1..19: mol_type = other RNA
taagaagcaagaatggcac

SEQ ID NO: 32835 - RNA, 19 nt, synthetic construct
  misc_feature 1..19: note = siRNA antisense sequence
  source 1..19: mol_type = other RNA
gtgccattcttgcttctta

SEQ ID NO: 32836 - RNA, 19 nt, synthetic construct
  misc_feature 1..19: note = siRNA sense sequence
  source 1..19: mol_type = other RNA
tggcactgtgatttcattg

SEQ ID NO: 32837 - RNA, 19 nt, synthetic construct
  misc_feature 1..19: note = siRNA antisense sequence
  source 1..19: mol_type = other RNA
caatgaaatcacagtgcca

SEQ ID NO: 32838 - RNA, 19 nt, synthetic construct
  misc_feature 1..19: note = siRNA sense sequence
  source 1..19: mol_type = other RNA
ggcactgtgatttcattgt

SEQ ID NO: 32839 - RNA, 19 nt, synthetic construct
  misc_feature 1..19: note = siRNA antisense sequence
  source 1..19: mol_type = other RNA
acaatgaaatcacagtgcc

SEQ ID NO: 32840 - RNA, 19 nt, synthetic construct
  misc_feature 1..19: note = siRNA sense sequence
  source 1..19: mol_type = other RNA
gcactgtgatttcattgtt

SEQ ID NO: 32841 - RNA, 19 nt, synthetic construct
  misc_feature 1..19: note = siRNA antisense sequence
  source 1..19: mol_type = other RNA
aacaatgaaatcacagtgc

SEQ ID NO: 32842 - RNA, 19 nt, synthetic construct
  misc_feature 1..19: note = siRNA sense sequence
  source 1..19: mol_type = other RNA
tatcctgttactacgtctt

SEQ ID NO: 32843 - RNA, 19 nt, synthetic construct
  misc_feature 1..19: note = siRNA antisense sequence
  source 1..19: mol_type = other RNA
aagacgtagtaacaggata

SEQ ID NO: 32844 - RNA, 19 nt, synthetic construct
  misc_feature 1..19: note = siRNA sense sequence
  source 1..19: mol_type = other RNA
atcctgttactacgtcttc

SEQ ID NO: 32845 - RNA, 19 nt, synthetic construct
  misc_feature 1..19: note = siRNA antisense sequence
  source 1..19: mol_type = other RNA
gaagacgtagtaacaggat

SEQ ID NO: 32846 - RNA, 19 nt, synthetic construct
  misc_feature 1..19: note = siRNA sense sequence
  source 1..19: mol_type = other RNA
tgttactacgtcttcaaat

SEQ ID NO: 32847 - RNA, 19 nt, synthetic construct
  misc_feature 1..19: note = siRNA antisense sequence
  source 1..19: mol_type = other RNA
atttgaagacgtagtaaca

SEQ ID NO: 32848 - RNA, 19 nt, synthetic construct
  misc_feature 1..19: note = siRNA sense sequence
  source 1..19: mol_type = other RNA
gttactacgtcttcaaatg

SEQ ID NO: 32849 - RNA, 19 nt, synthetic construct
  misc_feature 1..19: note = siRNA antisense sequence
  source 1..19: mol_type = other RNA
catttgaagacgtagtaac

SEQ ID NO: 32850 - RNA, 19 nt, synthetic construct
  misc_feature 1..19: note = siRNA sense sequence
  source 1..19: mol_type = other RNA
ttactacgtcttcaaatgt

SEQ ID NO: 32851 - RNA, 19 nt, synthetic construct
  misc_feature 1..19: note = siRNA antisense sequence
  source 1..19: mol_type = other RNA
acatttgaagacgtagtaa

SEQ ID NO: 32852 - RNA, 19 nt, synthetic construct
  misc_feature 1..19: note = siRNA sense sequence
  source 1..19: mol_type = other RNA
tactacgtcttcaaatgta

SEQ ID NO: 32853 - RNA, 19 nt, synthetic construct
  misc_feature 1..19: note = siRNA antisense sequence
  source 1..19: mol_type = other RNA
tacatttgaagacgtagta

SEQ ID NO: 32854 - RNA, 19 nt, synthetic construct
  misc_feature 1..19: note = siRNA sense sequence
  source 1..19: mol_type = other RNA
cgtcttcaaatgtataatg

SEQ ID NO: 32855 - RNA, 19 nt, synthetic construct
  misc_feature 1..19: note = siRNA antisense sequence
  source 1..19: mol_type = other RNA
cattatacatttgaagacg

SEQ ID NO: 32856 - RNA, 19 nt, synthetic construct
  misc_feature 1..19: note = siRNA sense sequence
  source 1..19: mol_type = other RNA
atcataaaatgcttcaagc

SEQ ID NO: 32857 - RNA, 19 nt, synthetic construct
  misc_feature 1..19: note = siRNA antisense sequence
  source 1..19: mol_type = other RNA
gcttgaagcattttatgat

SEQ ID NO: 32858 - RNA, 19 nt, synthetic construct
  misc_feature 1..19: note = siRNA sense sequence
  source 1..19: mol_type = other RNA
atatcaaatagcaatgtgc

SEQ ID NO: 32859 - RNA, 19 nt, synthetic construct
  misc_feature 1..19: note = siRNA antisense sequence
  source 1..19: mol_type = other RNA
gcacattgctatttgatat

SEQ ID NO: 32860 - RNA, 19 nt, synthetic construct
  misc_feature 1..19: note = siRNA sense sequence
  source 1..19: mol_type = other RNA
tatcaaatagcaatgtgcc

SEQ ID NO: 32861 - RNA, 19 nt, synthetic construct
  misc_feature 1..19: note = siRNA antisense sequence
  source 1..19: mol_type = other RNA
ggcacattgctatttgata

SEQ ID NO: 32862 - RNA, 19 nt, synthetic construct
  misc_feature 1..19: note = siRNA sense sequence
  source 1..19: mol_type = other RNA
atcaaatagcaatgtgccc

SEQ ID NO: 32863 - RNA, 19 nt, synthetic construct
  misc_feature 1..19: note = siRNA antisense sequence
  source 1..19: mol_type = other RNA
gggcacattgctatttgat

SEQ ID NO: 32864 - RNA, 19 nt, synthetic construct
  misc_feature 1..19: note = siRNA sense sequence
  source 1..19: mol_type = other RNA
tcaaatagcaatgtgccct

SEQ ID NO: 32865 - RNA, 19 nt, synthetic construct
  misc_feature 1..19: note = siRNA antisense sequence
  source 1..19: mol_type = other RNA
agggcacattgctatttga

SEQ ID NO: 32866 - RNA, 19 nt, synthetic construct
  misc_feature 1..19: note = siRNA sense sequence
  source 1..19: mol_type = other RNA
caaatagcaatgtgccctc

SEQ ID NO: 32867 - RNA, 19 nt, synthetic construct
  misc_feature 1..19: note = siRNA antisense sequence
  source 1..19: mol_type = other RNA
gagggcacattgctatttg

SEQ ID NO: 32868 - RNA, 19 nt, synthetic construct
  misc_feature 1..19: note = siRNA sense sequence
  source 1..19: mol_type = other RNA
caatgtgccctctacccag

SEQ ID NO: 32869 - RNA, 19 nt, synthetic construct
  misc_feature 1..19: note = siRNA antisense sequence
  source 1..19: mol_type = other RNA
ctgggtagagggcacattg

SEQ ID NO: 32870 - RNA, 19 nt, synthetic construct
  misc_feature 1..19: note = siRNA sense sequence
  source 1..19: mol_type = other RNA
aatgtgccctctacccagc

SEQ ID NO: 32871 - RNA, 19 nt, synthetic construct
  misc_feature 1..19: note = siRNA antisense sequence
  source 1..19: mol_type = other RNA
gctgggtagagggcacatt

SEQ ID NO: 32872 - RNA, 19 nt, synthetic construct
  misc_feature 1..19: note = siRNA sense sequence
  source 1..19: mol_type = other RNA
atgtgccctctacccagct

SEQ ID NO: 32873 - RNA, 19 nt, synthetic construct
  misc_feature 1..19: note = siRNA antisense sequence
  source 1..19: mol_type = other RNA
agctgggtagagggcacat

SEQ ID NO: 32874 - RNA, 19 nt, synthetic construct
  misc_feature 1..19: note = siRNA sense sequence
  source 1..19: mol_type = other RNA
tgtgccctctacccagctt

SEQ ID NO: 32875 - RNA, 19 nt, synthetic construct
  misc_feature 1..19: note = siRNA antisense sequence
  source 1..19: mol_type = other RNA
aagctgggtagagggcaca

SEQ ID NO: 32876 - RNA, 19 nt, synthetic construct
  misc_feature 1..19: note = siRNA sense sequence
  source 1..19: mol_type = other RNA
cctctacccagctttgcaa

SEQ ID NO: 32877 - RNA, 19 nt, synthetic construct
  misc_feature 1..19: note = siRNA antisense sequence
  source 1..19: mol_type = other RNA
ttgcaaagctgggtagagg

SEQ ID NO: 32878 - RNA, 19 nt, synthetic construct
  misc_feature 1..19: note = siRNA sense sequence
  source 1..19: mol_type = other RNA
ctctacccagctttgcaaa

SEQ ID NO: 32879 - RNA, 19 nt, synthetic construct
  misc_feature 1..19: note = siRNA antisense sequence
  source 1..19: mol_type = other RNA
tttgcaaagctgggtagag

SEQ ID NO: 32880 - RNA, 19 nt, synthetic construct
  misc_feature 1..19: note = siRNA sense sequence
  source 1..19: mol_type = other RNA
tctacccagctttgcaaaa

SEQ ID NO: 32881 - RNA, 19 nt, synthetic construct
  misc_feature 1..19: note = siRNA antisense sequence
  source 1..19: mol_type = other RNA
ttttgcaaagctgggtaga

SEQ ID NO: 32882 - RNA, 19 nt, synthetic construct
  misc_feature 1..19: note = siRNA sense sequence
  source 1..19: mol_type = other RNA
ctacccagctttgcaaaat

SEQ ID NO: 32883 - RNA, 19 nt, synthetic construct
  misc_feature 1..19: note = siRNA antisense sequence
  source 1..19: mol_type = other RNA
attttgcaaagctgggtag

SEQ ID NO: 32884 - RNA, 19 nt, synthetic construct
  misc_feature 1..19: note = siRNA sense sequence
  source 1..19: mol_type = other RNA
acccagctttgcaaaatct

SEQ ID NO: 32885 - RNA, 19 nt, synthetic construct
  misc_feature 1..19: note = siRNA antisense sequence
  source 1..19: mol_type = other RNA
agattttgcaaagctgggt

SEQ ID NO: 32886 - RNA, 19 nt, synthetic construct
  misc_feature 1..19: note = siRNA sense sequence
  source 1..19: mol_type = other RNA
cccagctttgcaaaatcta

SEQ ID NO: 32887 - RNA, 19 nt, synthetic construct
  misc_feature 1..19: note = siRNA antisense sequence
  source 1..19: mol_type = other RNA
tagattttgcaaagctggg

SEQ ID NO: 32888 - RNA, 19 nt, synthetic construct
  misc_feature 1..19: note = siRNA sense sequence
  source 1..19: mol_type = other RNA
ccagctttgcaaaatctaa

SEQ ID NO: 32889 - RNA, 19 nt, synthetic construct
  misc_feature 1..19: note = siRNA antisense sequence
  source 1..19: mol_type = other RNA
ttagattttgcaaagctgg

SEQ ID NO: 32890 - RNA, 19 nt, synthetic construct
  misc_feature 1..19: note = siRNA sense sequence
  source 1..19: mol_type = other RNA
cagctttgcaaaatctaaa

SEQ ID NO: 32891 - RNA, 19 nt, synthetic construct
  misc_feature 1..19: note = siRNA antisense sequence
  source 1..19: mol_type = other RNA
tttagattttgcaaagctg

SEQ ID NO: 32892 - RNA, 19 nt, synthetic construct
  misc_feature 1..19: note = siRNA sense sequence
  source 1..19: mol_type = other RNA
agcatggctgatgaattaa

SEQ ID NO: 32893 - RNA, 19 nt, synthetic construct
  misc_feature 1..19: note = siRNA antisense sequence
  source 1..19: mol_type = other RNA
ttaattcatcagccatgct

SEQ ID NO: 32894 - RNA, 19 nt, synthetic construct
  misc_feature 1..19: note = siRNA sense sequence
  source 1..19: mol_type = other RNA
gcatggctgatgaattaaa

SEQ ID NO: 32895 - RNA, 19 nt, synthetic construct
  misc_feature 1..19: note = siRNA antisense sequence
  source 1..19: mol_type = other RNA
tttaattcatcagccatgc

SEQ ID NO: 32896 - RNA, 19 nt, synthetic construct
  misc_feature 1..19: note = siRNA sense sequence
  source 1..19: mol_type = other RNA
catggctgatgaattaaat

SEQ ID NO: 32897 - RNA, 19 nt, synthetic construct
  misc_feature 1..19: note = siRNA antisense sequence
  source 1..19: mol_type = other RNA
atttaattcatcagccatg

SEQ ID NO: 32898 - RNA, 19 nt, synthetic construct
  misc_feature 1..19: note = siRNA sense sequence
  source 1..19: mol_type = other RNA
aaccgtagaggaggctgtc

SEQ ID NO: 32899 - RNA, 19 nt, synthetic construct
  misc_feature 1..19: note = siRNA antisense sequence
  source 1..19: mol_type = other RNA
gacagcctcctctacggtt

SEQ ID NO: 32900 - RNA, 19 nt, synthetic construct
  misc_feature 1..19: note = siRNA sense sequence
  source 1..19: mol_type = other RNA
accgtagaggaggctgtct

SEQ ID NO: 32901 - RNA, 19 nt, synthetic construct
  misc_feature 1..19: note = siRNA antisense sequence
  source 1..19: mol_type = other RNA
agacagcctcctctacggt

SEQ ID NO: 32902 - RNA, 19 nt, synthetic construct
  misc_feature 1..19: note = siRNA sense sequence
  source 1..19: mol_type = other RNA
agaggaggctgtctacact

SEQ ID NO: 32903 - RNA, 19 nt, synthetic construct
  misc_feature 1..19: note = siRNA antisense sequence
  source 1..19: mol_type = other RNA
agtgtagacagcctcctct

SEQ ID NO: 32904 - RNA, 19 nt, synthetic construct
  misc_feature 1..19: note = siRNA sense sequence
  source 1..19: mol_type = other RNA
gaggaggctgtctacactc

SEQ ID NO: 32905 - RNA, 19 nt, synthetic construct
  misc_feature 1..19: note = siRNA antisense sequence
  source 1..19: mol_type = other RNA
gagtgtagacagcctcctc

SEQ ID NO: 32906 - RNA, 19 nt, synthetic construct
  misc_feature 1..19: note = siRNA sense sequence
  source 1..19: mol_type = other RNA
ctgtctacactccagcgcc

SEQ ID NO: 32907 - RNA, 19 nt, synthetic construct
  misc_feature 1..19: note = siRNA antisense sequence
  source 1..19: mol_type = other RNA
ggcgctggagtgtagacag

SEQ ID NO: 32908 - RNA, 19 nt, synthetic construct
  misc_feature 1..19: note = siRNA sense sequence
  source 1..19: mol_type = other RNA
tgtctacactccagcgcca

SEQ ID NO: 32909 - RNA, 19 nt, synthetic construct
  misc_feature 1..19: note = siRNA antisense sequence
  source 1..19: mol_type = other RNA
tggcgctggagtgtagaca

SEQ ID NO: 32910 - RNA, 19 nt, synthetic construct
  misc_feature 1..19: note = siRNA sense sequence
  source 1..19: mol_type = other RNA
gtctacactccagcgccag

SEQ ID NO: 32911 - RNA, 19 nt, synthetic construct
  misc_feature 1..19: note = siRNA antisense sequence
  source 1..19: mol_type = other RNA
ctggcgctggagtgtagac

SEQ ID NO: 32912 - RNA, 19 nt, synthetic construct
  misc_feature 1..19: note = siRNA sense sequence
  source 1..19: mol_type = other RNA
tctacactccagcgccagc

SEQ ID NO: 32913 - RNA, 19 nt, synthetic construct
  misc_feature 1..19: note = siRNA antisense sequence
  source 1..19: mol_type = other RNA
gctggcgctggagtgtaga

SEQ ID NO: 32914 - RNA, 19 nt, synthetic construct
  misc_feature 1..19: note = siRNA sense sequence
  source 1..19: mol_type = other RNA
gagcctgacactggacgaa

SEQ ID NO: 32915 - RNA, 19 nt, synthetic construct
  misc_feature 1..19: note = siRNA antisense sequence
  source 1..19: mol_type = other RNA
ttcgtccagtgtcaggctc

SEQ ID NO: 32916 - RNA, 19 nt, synthetic construct
  misc_feature 1..19: note = siRNA sense sequence
  source 1..19: mol_type = other RNA
gtaggcaggctcagttcta

SEQ ID NO: 32917 - RNA, 19 nt, synthetic construct
  misc_feature 1..19: note = siRNA antisense sequence
  source 1..19: mol_type = other RNA
tagaactgagcctgcctac

SEQ ID NO: 32918 - RNA, 19 nt, synthetic construct
  misc_feature 1..19: note = siRNA sense sequence
  source 1..19: mol_type = other RNA
taggcaggctcagttctaa

SEQ ID NO: 32919 - RNA, 19 nt, synthetic construct
  misc_feature 1..19: note = siRNA antisense sequence
  source 1..19: mol_type = other RNA
ttagaactgagcctgccta

SEQ ID NO: 32920 - RNA, 19 nt, synthetic construct
  misc_feature 1..19: note = siRNA sense sequence
  source 1..19: mol_type = other RNA
aggcaggctcagttctaaa

SEQ ID NO: 32921 - RNA, 19 nt, synthetic construct
  misc_feature 1..19: note = siRNA antisense sequence
  source 1..19: mol_type = other RNA
tttagaactgagcctgcct

SEQ ID NO: 32922 - RNA, 19 nt, synthetic construct
  misc_feature 1..19: note = siRNA sense sequence
  source 1..19: mol_type = other RNA
ggcaggctcagttctaaaa

SEQ ID NO: 32923 - RNA, 19 nt, synthetic construct
  misc_feature 1..19: note = siRNA antisense sequence
  source 1..19: mol_type = other RNA
ttttagaactgagcctgcc

SEQ ID NO: 32924 - RNA, 19 nt, synthetic construct
  misc_feature 1..19: note = siRNA sense sequence
  source 1..19: mol_type = other RNA
gcaggctcagttctaaaag

SEQ ID NO: 32925 - RNA, 19 nt, synthetic construct
  misc_feature 1..19: note = siRNA antisense sequence
  source 1..19: mol_type = other RNA
cttttagaactgagcctgc

SEQ ID NO: 32926 - RNA, 19 nt, synthetic construct
  misc_feature 1..19: note = siRNA sense sequence
  source 1..19: mol_type = other RNA
caggctcagttctaaaaga

SEQ ID NO: 32927 - RNA, 19 nt, synthetic construct
  misc_feature 1..19: note = siRNA antisense sequence
  source 1..19: mol_type = other RNA
tcttttagaactgagcctg

SEQ ID NO: 32928 - RNA, 19 nt, synthetic construct
  misc_feature 1..19: note = siRNA sense sequence
  source 1..19: mol_type = other RNA
cacagtgtctccttccaga

SEQ ID NO: 32929 - RNA, 19 nt, synthetic construct
  misc_feature 1..19: note = siRNA antisense sequence
  source 1..19: mol_type = other RNA
tctggaaggagacactgtg

SEQ ID NO: 32930 - RNA, 19 nt, synthetic construct
  misc_feature 1..19: note = siRNA sense sequence
  source 1..19: mol_type = other RNA
tctccttccagactcacca

SEQ ID NO: 32931 - RNA, 19 nt, synthetic construct
  misc_feature 1..19: note = siRNA antisense sequence
  source 1..19: mol_type = other RNA
tggtgagtctggaaggaga

SEQ ID NO: 32932 - RNA, 19 nt, synthetic construct
  misc_feature 1..19: note = siRNA sense sequence
  source 1..19: mol_type = other RNA
ctccttccagactcaccaa

SEQ ID NO: 32933 - RNA, 19 nt, synthetic construct
  misc_feature 1..19: note = siRNA antisense sequence
  source 1..19: mol_type = other RNA
ttggtgagtctggaaggag

SEQ ID NO: 32934 - RNA, 19 nt, synthetic construct
  misc_feature 1..19: note = siRNA sense sequence
  source 1..19: mol_type = other RNA
tccttccagactcaccaat

SEQ ID NO: 32935 - RNA, 19 nt, synthetic construct
  misc_feature 1..19: note = siRNA antisense sequence
  source 1..19: mol_type = other RNA
attggtgagtctggaagga

SEQ ID NO: 32936 - RNA, 19 nt, synthetic construct
  misc_feature 1..19: note = siRNA sense sequence
  source 1..19: mol_type = other RNA
ccttccagactcaccaatc

SEQ ID NO: 32937 - RNA, 19 nt, synthetic construct
  misc_feature 1..19: note = siRNA antisense sequence
  source 1..19: mol_type = other RNA
gattggtgagtctggaagg

SEQ ID NO: 32938 - RNA, 19 nt, synthetic construct
  misc_feature 1..19: note = siRNA sense sequence
  source 1..19: mol_type = other RNA
cttccagactcaccaatca

SEQ ID NO: 32939 - RNA, 19 nt, synthetic construct
  misc_feature 1..19: note = siRNA antisense sequence
  source 1..19: mol_type = other RNA
tgattggtgagtctggaag

SEQ ID NO: 32940 - RNA, 19 nt, synthetic construct
  misc_feature 1..19: note = siRNA sense sequence
  source 1..19: mol_type = other RNA
aaagttagcatttccctct

SEQ ID NO: 32941 - RNA, 19 nt, synthetic construct
  misc_feature 1..19: note = siRNA antisense sequence
  source 1..19: mol_type = other RNA
agagggaaatgctaacttt

SEQ ID NO: 32942 - RNA, 19 nt, synthetic construct
  misc_feature 1..19: note = siRNA sense sequence
  source 1..19: mol_type = other RNA
ttttattcccttttagacc

SEQ ID NO: 32943 - RNA, 19 nt, synthetic construct
  misc_feature 1..19: note = siRNA antisense sequence
  source 1..19: mol_type = other RNA
ggtctaaaagggaataaaa

SEQ ID NO: 32944 - RNA, 19 nt, synthetic construct
  misc_feature 1..19: note = siRNA sense sequence
  source 1..19: mol_type = other RNA
attcccttttagaccctat

SEQ ID NO: 32945 - RNA, 19 nt, synthetic construct
  misc_feature 1..19: note = siRNA antisense sequence
  source 1..19: mol_type = other RNA
atagggtctaaaagggaat

SEQ ID NO: 32946 - RNA, 19 nt, synthetic construct
  misc_feature 1..19: note = siRNA sense sequence
  source 1..19: mol_type = other RNA
ttcccttttagaccctatt

SEQ ID NO: 32947 - RNA, 19 nt, synthetic construct
  misc_feature 1..19: note = siRNA antisense sequence
  source 1..19: mol_type = other RNA
aatagggtctaaaagggaa

SEQ ID NO: 32948 - RNA, 19 nt, synthetic construct
  misc_feature 1..19: note = siRNA sense sequence
  source 1..19: mol_type = other RNA
tcccttttagaccctattt

SEQ ID NO: 32949 - RNA, 19 nt, synthetic construct
  misc_feature 1..19: note = siRNA antisense sequence
  source 1..19: mol_type = other RNA
aaatagggtctaaaaggga

SEQ ID NO: 32950 - RNA, 19 nt, synthetic construct
  misc_feature 1..19: note = siRNA sense sequence
  source 1..19: mol_type = other RNA
cccttttagaccctatttt

SEQ ID NO: 32951 - RNA, 19 nt, synthetic construct
  misc_feature 1..19: note = siRNA antisense sequence
  source 1..19: mol_type = other RNA
aaaatagggtctaaaaggg

SEQ ID NO: 32952 - RNA, 19 nt, synthetic construct
  misc_feature 1..19: note = siRNA sense sequence
  source 1..19: mol_type = other RNA
cccttctcccatgcaaatg

SEQ ID NO: 32953 - RNA, 19 nt, synthetic construct
  misc_feature 1..19: note = siRNA antisense sequence
  source 1..19: mol_type = other RNA
catttgcatgggagaaggg

SEQ ID NO: 32954 - RNA, 19 nt, synthetic construct
  misc_feature 1..19: note = siRNA sense sequence
  source 1..19: mol_type = other RNA
tctcccatgcaaatgtaac

SEQ ID NO: 32955 - RNA, 19 nt, synthetic construct
  misc_feature 1..19: note = siRNA antisense sequence
  source 1..19: mol_type = other RNA
gttacatttgcatgggaga

SEQ ID NO: 32956 - RNA, 19 nt, synthetic construct
  misc_feature 1..19: note = siRNA sense sequence
  source 1..19: mol_type = other RNA
aaatgtaacctctaccctg

SEQ ID NO: 32957 - RNA, 19 nt, synthetic construct
  misc_feature 1..19: note = siRNA antisense sequence
  source 1..19: mol_type = other RNA
cagggtagaggttacattt

SEQ ID NO: 32958 - RNA, 19 nt, synthetic construct
  misc_feature 1..19: note = siRNA sense sequence
  source 1..19: mol_type = other RNA
aatgtaacctctaccctga

SEQ ID NO: 32959 - RNA, 19 nt, synthetic construct
  misc_feature 1..19: note = siRNA antisense sequence
  source 1..19: mol_type = other RNA
tcagggtagaggttacatt

SEQ ID NO: 32960 - RNA, 19 nt, synthetic construct
  misc_feature 1..19: note = siRNA sense sequence
  source 1..19: mol_type = other RNA
atgtaacctctaccctgaa

SEQ ID NO: 32961 - RNA, 19 nt, synthetic construct
  misc_feature 1..19: note = siRNA antisense sequence
  source 1..19: mol_type = other RNA
ttcagggtagaggttacat

SEQ ID NO: 32962 - RNA, 19 nt, synthetic construct
  misc_feature 1..19: note = siRNA sense sequence
  source 1..19: mol_type = other RNA
cctctaccctgaattttaa

SEQ ID NO: 32963 - RNA, 19 nt, synthetic construct
  misc_feature 1..19: note = siRNA antisense sequence
  source 1..19: mol_type = other RNA
ttaaaattcagggtagagg

SEQ ID NO: 32964 - RNA, 19 nt, synthetic construct
  misc_feature 1..19: note = siRNA sense sequence
  source 1..19: mol_type = other RNA
ctctaccctgaattttaag

SEQ ID NO: 32965 - RNA, 19 nt, synthetic construct
  misc_feature 1..19: note = siRNA antisense sequence
  source 1..19: mol_type = other RNA
cttaaaattcagggtagag

SEQ ID NO: 32966 - RNA, 19 nt, synthetic construct
  misc_feature 1..19: note = siRNA sense sequence
  source 1..19: mol_type = other RNA
tctaccctgaattttaaga

SEQ ID NO: 32967 - RNA, 19 nt, synthetic construct
  misc_feature 1..19: note = siRNA antisense sequence
  source 1..19: mol_type = other RNA
tcttaaaattcagggtaga

SEQ ID NO: 32968 - RNA, 19 nt, synthetic construct
  misc_feature 1..19: note = siRNA sense sequence
  source 1..19: mol_type = other RNA
ccctgaattttaagatcct

SEQ ID NO: 32969 - RNA, 19 nt, synthetic construct
  misc_feature 1..19: note = siRNA antisense sequence
  source 1..19: mol_type = other RNA
aggatcttaaaattcaggg

SEQ ID NO: 32970 - RNA, 19 nt, synthetic construct
  misc_feature 1..19: note = siRNA sense sequence
  source 1..19: mol_type = other RNA
cctgaattttaagatcctt

SEQ ID NO: 32971 - RNA, 19 nt, synthetic construct
  misc_feature 1..19: note = siRNA antisense sequence
  source 1..19: mol_type = other RNA
aaggatcttaaaattcagg

SEQ ID NO: 32972 - RNA, 19 nt, synthetic construct
  misc_feature 1..19: note = siRNA sense sequence
  source 1..19: mol_type = other RNA
caaatacttagtcactagt

SEQ ID NO: 32973 - RNA, 19 nt, synthetic construct
  misc_feature 1..19: note = siRNA antisense sequence
  source 1..19: mol_type = other RNA
actagtgactaagtatttg

SEQ ID NO: 32974 - RNA, 19 nt, synthetic construct
  misc_feature 1..19: note = siRNA sense sequence
  source 1..19: mol_type = other RNA
aaatacttagtcactagtg

SEQ ID NO: 32975 - RNA, 19 nt, synthetic construct
  misc_feature 1..19: note = siRNA antisense sequence
  source 1..19: mol_type = other RNA
cactagtgactaagtattt

SEQ ID NO: 32976 - RNA, 19 nt, synthetic construct
  misc_feature 1..19: note = siRNA sense sequence
  source 1..19: mol_type = other RNA
aatacttagtcactagtgt

SEQ ID NO: 32977 - RNA, 19 nt, synthetic construct
  misc_feature 1..19: note = siRNA antisense sequence
  source 1..19: mol_type = other RNA
acactagtgactaagtatt

SEQ ID NO: 32978 - RNA, 19 nt, synthetic construct
  misc_feature 1..19: note = siRNA sense sequence
  source 1..19: mol_type = other RNA
cttagtcactagtgttgtg

SEQ ID NO: 32979 - RNA, 19 nt, synthetic construct
  misc_feature 1..19: note = siRNA antisense sequence
  source 1..19: mol_type = other RNA
cacaacactagtgactaag

SEQ ID NO: 32980 - RNA, 19 nt, synthetic construct
  misc_feature 1..19: note = siRNA sense sequence
  source 1..19: mol_type = other RNA
actagtgttgtgattctaa

SEQ ID NO: 32981 - RNA, 19 nt, synthetic construct
  misc_feature 1..19: note = siRNA antisense sequence
  source 1..19: mol_type = other RNA
ttagaatcacaacactagt

SEQ ID NO: 32982 - RNA, 19 nt, synthetic construct
  misc_feature 1..19: note = siRNA sense sequence
  source 1..19: mol_type = other RNA
ctagtgttgtgattctaag

SEQ ID NO: 32983 - RNA, 19 nt, synthetic construct
  misc_feature 1..19: note = siRNA antisense sequence
  source 1..19: mol_type = other RNA
cttagaatcacaacactag

SEQ ID NO: 32984 - RNA, 19 nt, synthetic construct
  misc_feature 1..19: note = siRNA sense sequence
  source 1..19: mol_type = other RNA
tagtgttgtgattctaagt

SEQ ID NO: 32985 - RNA, 19 nt, synthetic construct
  misc_feature 1..19: note = siRNA antisense sequence
  source 1..19: mol_type = other RNA
acttagaatcacaacacta

SEQ ID NO: 32986 - RNA, 19 nt, synthetic construct
  misc_feature 1..19: note = siRNA sense sequence
  source 1..19: mol_type = other RNA
agtgttgtgattctaagta

SEQ ID NO: 32987 - RNA, 19 nt, synthetic construct
  misc_feature 1..19: note = siRNA antisense sequence
  source 1..19: mol_type = other RNA
tacttagaatcacaacact

SEQ ID NO: 32988 - RNA, 19 nt, synthetic construct
  misc_feature 1..19: note = siRNA sense sequence
  source 1..19: mol_type = other RNA
gtgttgtgattctaagtat

SEQ ID NO: 32989 - RNA, 19 nt, synthetic construct
  misc_feature 1..19: note = siRNA antisense sequence
  source 1..19: mol_type = other RNA
atacttagaatcacaacac

SEQ ID NO: 32990 - RNA, 19 nt, synthetic construct
  misc_feature 1..19: note = siRNA sense sequence
  source 1..19: mol_type = other RNA
tctaagtatcagaatgctt

SEQ ID NO: 32991 - RNA, 19 nt, synthetic construct
  misc_feature 1..19: note = siRNA antisense sequence
  source 1..19: mol_type = other RNA
aagcattctgatacttaga

SEQ ID NO: 32992 - RNA, 19 nt, synthetic construct
  misc_feature 1..19: note = siRNA sense sequence
  source 1..19: mol_type = other RNA
ctaagtatcagaatgcttc

SEQ ID NO: 32993 - RNA, 19 nt, synthetic construct
  misc_feature 1..19: note = siRNA antisense sequence
  source 1..19: mol_type = other RNA
gaagcattctgatacttag

SEQ ID NO: 32994 - RNA, 19 nt, synthetic construct
  misc_feature 1..19: note = siRNA sense sequence
  source 1..19: mol_type = other RNA
taagtatcagaatgcttcc

SEQ ID NO: 32995 - RNA, 19 nt, synthetic construct
  misc_feature 1..19: note = siRNA antisense sequence
  source 1..19: mol_type = other RNA
ggaagcattctgatactta

SEQ ID NO: 32996 - RNA, 19 nt, synthetic construct
  misc_feature 1..19: note = siRNA sense sequence
  source 1..19: mol_type = other RNA
aagtatcagaatgcttcca

SEQ ID NO: 32997 - RNA, 19 nt, synthetic construct
  misc_feature 1..19: note = siRNA antisense sequence
  source 1..19: mol_type = other RNA
tggaagcattctgatactt

SEQ ID NO: 32998 - RNA, 19 nt, synthetic construct
  misc_feature 1..19: note = siRNA sense sequence
  source 1..19: mol_type = other RNA
agtatcagaatgcttccat

SEQ ID NO: 32999 - RNA, 19 nt, synthetic construct
  misc_feature 1..19: note = siRNA antisense sequence
  source 1..19: mol_type = other RNA
atggaagcattctgatact

SEQ ID NO: 33000 - RNA, 19 nt, synthetic construct
  misc_feature 1..19: note = siRNA sense sequence
  source 1..19: mol_type = other RNA
catctgcagttacttcagt

SEQ ID NO: 33001 - RNA, 19 nt, synthetic construct
  misc_feature 1..19: note = siRNA antisense sequence
  source 1..19: mol_type = other RNA
actgaagtaactgcagatg

SEQ ID NO: 33002 - RNA, 19 nt, synthetic construct
  misc_feature 1..19: note = siRNA sense sequence
  source 1..19: mol_type = other RNA
atctgcagttacttcagtt

SEQ ID NO: 33003 - RNA, 19 nt, synthetic construct
  misc_feature 1..19: note = siRNA antisense sequence
  source 1..19: mol_type = other RNA
aactgaagtaactgcagat

SEQ ID NO: 33004 - RNA, 19 nt, synthetic construct
  misc_feature 1..19: note = siRNA sense sequence
  source 1..19: mol_type = other RNA
tctgcagttacttcagttt

SEQ ID NO: 33005 - RNA, 19 nt, synthetic construct
  misc_feature 1..19: note = siRNA antisense sequence
  source 1..19: mol_type = other RNA
aaactgaagtaactgcaga

SEQ ID NO: 33006 - RNA, 19 nt, synthetic construct
  misc_feature 1..19: note = siRNA sense sequence
  source 1..19: mol_type = other RNA
ctgcagttacttcagtttc

SEQ ID NO: 33007 - RNA, 19 nt, synthetic construct
  misc_feature 1..19: note = siRNA antisense sequence
  source 1..19: mol_type = other RNA
gaaactgaagtaactgcag

SEQ ID NO: 33008 - RNA, 19 nt, synthetic construct
  misc_feature 1..19: note = siRNA sense sequence
  source 1..19: mol_type = other RNA
tgcagttacttcagtttca

SEQ ID NO: 33009 - RNA, 19 nt, synthetic construct
  misc_feature 1..19: note = siRNA antisense sequence
  source 1..19: mol_type = other RNA
tgaaactgaagtaactgca

SEQ ID NO: 33010 - RNA, 19 nt, synthetic construct
  misc_feature 1..19: note = siRNA sense sequence
  source 1..19: mol_type = other RNA
gcagttacttcagtttcaa

SEQ ID NO: 33011 - RNA, 19 nt, synthetic construct
  misc_feature 1..19: note = siRNA antisense sequence
  source 1..19: mol_type = other RNA
ttgaaactgaagtaactgc

SEQ ID NO: 33012 - RNA, 19 nt, synthetic construct
  misc_feature 1..19: note = siRNA sense sequence
  source 1..19: mol_type = other RNA
gttacttcagtttcaagat

SEQ ID NO: 33013 - RNA, 19 nt, synthetic construct
  misc_feature 1..19: note = siRNA antisense sequence
  source 1..19: mol_type = other RNA
atcttgaaactgaagtaac

SEQ ID NO: 33014 - RNA, 19 nt, synthetic construct
  misc_feature 1..19: note = siRNA sense sequence
  source 1..19: mol_type = other RNA
tacttcagtttcaagatac

SEQ ID NO: 33015 - RNA, 19 nt, synthetic construct
  misc_feature 1..19: note = siRNA antisense sequence
  source 1..19: mol_type = other RNA
gtatcttgaaactgaagta

SEQ ID NO: 33016 - RNA, 19 nt, synthetic construct
  misc_feature 1..19: note = siRNA sense sequence
  source 1..19: mol_type = other RNA
agatactcttgtagactaa

SEQ ID NO: 33017 - RNA, 19 nt, synthetic construct
  misc_feature 1..19: note = siRNA antisense sequence
  source 1..19: mol_type = other RNA
ttagtctacaagagtatct

SEQ ID NO: 33018 - RNA, 19 nt, synthetic construct
  misc_feature 1..19: note = siRNA sense sequence
  source 1..19: mol_type = other RNA
gatactcttgtagactaat

SEQ ID NO: 33019 - RNA, 19 nt, synthetic construct
  misc_feature 1..19: note = siRNA antisense sequence
  source 1..19: mol_type = other RNA
attagtctacaagagtatc

SEQ ID NO: 33020 - RNA, 19 nt, synthetic construct
  misc_feature 1..19: note = siRNA sense sequence
  source 1..19: mol_type = other RNA
atactcttgtagactaatg

SEQ ID NO: 33021 - RNA, 19 nt, synthetic construct
  misc_feature 1..19: note = siRNA antisense sequence
  source 1..19: mol_type = other RNA
cattagtctacaagagtat

SEQ ID NO: 33022 - RNA, 19 nt, synthetic construct
  misc_feature 1..19: note = siRNA sense sequence
  source 1..19: mol_type = other RNA
tactcttgtagactaatgg

SEQ ID NO: 33023 - RNA, 19 nt, synthetic construct
  misc_feature 1..19: note = siRNA antisense sequence
  source 1..19: mol_type = other RNA
ccattagtctacaagagta

SEQ ID NO: 33024 - RNA, 19 nt, synthetic construct
  misc_feature 1..19: note = siRNA sense sequence
  source 1..19: mol_type = other RNA
actcttgtagactaatgga

SEQ ID NO: 33025 - RNA, 19 nt, synthetic construct
  misc_feature 1..19: note = siRNA antisense sequence
  source 1..19: mol_type = other RNA
tccattagtctacaagagt

SEQ ID NO: 33026 - RNA, 19 nt, synthetic construct
  misc_feature 1..19: note = siRNA sense sequence
  source 1..19: mol_type = other RNA
ctcttgtagactaatggaa

SEQ ID NO: 33027 - RNA, 19 nt, synthetic construct
  misc_feature 1..19: note = siRNA antisense sequence
  source 1..19: mol_type = other RNA
ttccattagtctacaagag

SEQ ID NO: 33028 - RNA, 19 nt, synthetic construct
  misc_feature 1..19: note = siRNA sense sequence
  source 1..19: mol_type = other RNA
aaatagagtttggatcgaa

SEQ ID NO: 33029 - RNA, 19 nt, synthetic construct
  misc_feature 1..19: note = siRNA antisense sequence
  source 1..19: mol_type = other RNA
ttcgatccaaactctattt

SEQ ID NO: 33030 - RNA, 19 nt, synthetic construct
  misc_feature 1..19: note = siRNA sense sequence
  source 1..19: mol_type = other RNA
aatagagtttggatcgaag

SEQ ID NO: 33031 - RNA, 19 nt, synthetic construct
  misc_feature 1..19: note = siRNA antisense sequence
  source 1..19: mol_type = other RNA
cttcgatccaaactctatt

SEQ ID NO: 33032 - RNA, 19 nt, synthetic construct
  misc_feature 1..19: note = siRNA sense sequence
  source 1..19: mol_type = other RNA
atagagtttggatcgaagg

SEQ ID NO: 33033 - RNA, 19 nt, synthetic construct
  misc_feature 1..19: note = siRNA antisense sequence
  source 1..19: mol_type = other RNA
ccttcgatccaaactctat

SEQ ID NO: 33034 - RNA, 19 nt, synthetic construct
  misc_feature 1..19: note = siRNA sense sequence
  source 1..19: mol_type = other RNA
tagagtttggatcgaagga

SEQ ID NO: 33035 - RNA, 19 nt, synthetic construct
  misc_feature 1..19: note = siRNA antisense sequence
  source 1..19: mol_type = other RNA
tccttcgatccaaactcta

SEQ ID NO: 33036 - RNA, 19 nt, synthetic construct
  misc_feature 1..19: note = siRNA sense sequence
  source 1..19: mol_type = other RNA
gtttggatcgaaggatgtt

SEQ ID NO: 33037 - RNA, 19 nt, synthetic construct
  misc_feature 1..19: note = siRNA antisense sequence
  source 1..19: mol_type = other RNA
aacatccttcgatccaaac

SEQ ID NO: 33038 - RNA, 19 nt, synthetic construct
  misc_feature 1..19: note = siRNA sense sequence
  source 1..19: mol_type = other RNA
tttggatcgaaggatgtta

SEQ ID NO: 33039 - RNA, 19 nt, synthetic construct
  misc_feature 1..19: note = siRNA antisense sequence
  source 1..19: mol_type = other RNA
taacatccttcgatccaaa

SEQ ID NO: 33040 - RNA, 19 nt, synthetic construct
  misc_feature 1..19: note = siRNA sense sequence
  source 1..19: mol_type = other RNA
gaaggatgttactgcccaa

SEQ ID NO: 33041 - RNA, 19 nt, synthetic construct
  misc_feature 1..19: note = siRNA antisense sequence
  source 1..19: mol_type = other RNA
ttgggcagtaacatccttc

SEQ ID NO: 33042 - RNA, 19 nt, synthetic construct
  misc_feature 1..19: note = siRNA sense sequence
  source 1..19: mol_type = other RNA
aaggatgttactgcccaac

SEQ ID NO: 33043 - RNA, 19 nt, synthetic construct
  misc_feature 1..19: note = siRNA antisense sequence
  source 1..19: mol_type = other RNA
gttgggcagtaacatcctt

SEQ ID NO: 33044 - RNA, 19 nt, synthetic construct
  misc_feature 1..19: note = siRNA sense sequence
  source 1..19: mol_type = other RNA
aggatgttactgcccaact

SEQ ID NO: 33045 - RNA, 19 nt, synthetic construct
  misc_feature 1..19: note = siRNA antisense sequence
  source 1..19: mol_type = other RNA
agttgggcagtaacatcct

SEQ ID NO: 33046 - RNA, 19 nt, synthetic construct
  misc_feature 1..19: note = siRNA sense sequence
  source 1..19: mol_type = other RNA
ggatgttactgcccaacta

SEQ ID NO: 33047 - RNA, 19 nt, synthetic construct
  misc_feature 1..19: note = siRNA antisense sequence
  source 1..19: mol_type = other RNA
tagttgggcagtaacatcc

SEQ ID NO: 33048 - RNA, 19 nt, synthetic construct
  misc_feature 1..19: note = siRNA sense sequence
  source 1..19: mol_type = other RNA
gatgttactgcccaactaa

SEQ ID NO: 33049 - RNA, 19 nt, synthetic construct
  misc_feature 1..19: note = siRNA antisense sequence
  source 1..19: mol_type = other RNA
ttagttgggcagtaacatc

SEQ ID NO: 33050 - RNA, 19 nt, synthetic construct
  misc_feature 1..19: note = siRNA sense sequence
  source 1..19: mol_type = other RNA
atgttactgcccaactaat

SEQ ID NO: 33051 - RNA, 19 nt, synthetic construct
  misc_feature 1..19: note = siRNA antisense sequence
  source 1..19: mol_type = other RNA
attagttgggcagtaacat

SEQ ID NO: 33052 - RNA, 19 nt, synthetic construct
  misc_feature 1..19: note = siRNA sense sequence
  source 1..19: mol_type = other RNA
tgttactgcccaactaatg

SEQ ID NO: 33053 - RNA, 19 nt, synthetic construct
  misc_feature 1..19: note = siRNA antisense sequence
  source 1..19: mol_type = other RNA
cattagttgggcagtaaca

SEQ ID NO: 33054 - RNA, 19 nt, synthetic construct
  misc_feature 1..19: note = siRNA sense sequence
  source 1..19: mol_type = other RNA
ctgcccaactaatgttcta

SEQ ID NO: 33055 - RNA, 19 nt, synthetic construct
  misc_feature 1..19: note = siRNA antisense sequence
  source 1..19: mol_type = other RNA
tagaacattagttgggcag

SEQ ID NO: 33056 - RNA, 19 nt, synthetic construct
  misc_feature 1..19: note = siRNA sense sequence
  source 1..19: mol_type = other RNA
tgcccaactaatgttctaa

SEQ ID NO: 33057 - RNA, 19 nt, synthetic construct
  misc_feature 1..19: note = siRNA antisense sequence
  source 1..19: mol_type = other RNA
ttagaacattagttgggca

SEQ ID NO: 33058 - RNA, 19 nt, synthetic construct
  misc_feature 1..19: note = siRNA sense sequence
  source 1..19: mol_type = other RNA
gcccaactaatgttctaag

SEQ ID NO: 33059 - RNA, 19 nt, synthetic construct
  misc_feature 1..19: note = siRNA antisense sequence
  source 1..19: mol_type = other RNA
cttagaacattagttgggc

SEQ ID NO: 33060 - RNA, 19 nt, synthetic construct
  misc_feature 1..19: note = siRNA sense sequence
  source 1..19: mol_type = other RNA
cccaactaatgttctaagt

SEQ ID NO: 33061 - RNA, 19 nt, synthetic construct
  misc_feature 1..19: note = siRNA antisense sequence
  source 1..19: mol_type = other RNA
acttagaacattagttggg

SEQ ID NO: 33062 - RNA, 19 nt, synthetic construct
  misc_feature 1..19: note = siRNA sense sequence
  source 1..19: mol_type = other RNA
ccaactaatgttctaagtg

SEQ ID NO: 33063 - RNA, 19 nt, synthetic construct
  misc_feature 1..19: note = siRNA antisense sequence
  source 1..19: mol_type = other RNA
cacttagaacattagttgg

SEQ ID NO: 33064 - RNA, 19 nt, synthetic construct
  misc_feature 1..19: note = siRNA sense sequence
  source 1..19: mol_type = other RNA
aactaatgttctaagtgct

SEQ ID NO: 33065 - RNA, 19 nt, synthetic construct
  misc_feature 1..19: note = siRNA antisense sequence
  source 1..19: mol_type = other RNA
agcacttagaacattagtt

SEQ ID NO: 33066 - RNA, 19 nt, synthetic construct
  misc_feature 1..19: note = siRNA sense sequence
  source 1..19: mol_type = other RNA
gatcatcctggtcttagca

SEQ ID NO: 33067 - RNA, 19 nt, synthetic construct
  misc_feature 1..19: note = siRNA antisense sequence
  source 1..19: mol_type = other RNA
tgctaagaccaggatgatc

SEQ ID NO: 33068 - RNA, 19 nt, synthetic construct
  misc_feature 1..19: note = siRNA sense sequence
  source 1..19: mol_type = other RNA
atcatcctggtcttagcaa

SEQ ID NO: 33069 - RNA, 19 nt, synthetic construct
  misc_feature 1..19: note = siRNA antisense sequence
  source 1..19: mol_type = other RNA
ttgctaagaccaggatgat

SEQ ID NO: 33070 - RNA, 19 nt, synthetic construct
  misc_feature 1..19: note = siRNA sense sequence
  source 1..19: mol_type = other RNA
tcatcctggtcttagcaac

SEQ ID NO: 33071 - RNA, 19 nt, synthetic construct
  misc_feature 1..19: note = siRNA antisense sequence
  source 1..19: mol_type = other RNA
gttgctaagaccaggatga

SEQ ID NO: 33072 - RNA, 19 nt, synthetic construct
  misc_feature 1..19: note = siRNA sense sequence
  source 1..19: mol_type = other RNA
aagttatctctttcctctg

SEQ ID NO: 33073 - RNA, 19 nt, synthetic construct
  misc_feature 1..19: note = siRNA antisense sequence
  source 1..19: mol_type = other RNA
cagaggaaagagataactt

SEQ ID NO: 33074 - RNA, 19 nt, synthetic construct
  misc_feature 1..19: note = siRNA sense sequence
  source 1..19: mol_type = other RNA
agttatctctttcctctga

SEQ ID NO: 33075 - RNA, 19 nt, synthetic construct
  misc_feature 1..19: note = siRNA antisense sequence
  source 1..19: mol_type = other RNA
tcagaggaaagagataact

SEQ ID NO: 33076 - RNA, 19 nt, synthetic construct
  misc_feature 1..19: note = siRNA sense sequence
  source 1..19: mol_type = other RNA
gttatctctttcctctgaa

SEQ ID NO: 33077 - RNA, 19 nt, synthetic construct
  misc_feature 1..19: note = siRNA antisense sequence
  source 1..19: mol_type = other RNA
ttcagaggaaagagataac

SEQ ID NO: 33078 - RNA, 19 nt, synthetic construct
  misc_feature 1..19: note = siRNA sense sequence
  source 1..19: mol_type = other RNA
tgccctttaaaatactttc

SEQ ID NO: 33079 - RNA, 19 nt, synthetic construct
  misc_feature 1..19: note = siRNA antisense sequence
  source 1..19: mol_type = other RNA
gaaagtattttaaagggca

SEQ ID NO: 33080 - RNA, 19 nt, synthetic construct
  misc_feature 1..19: note = siRNA sense sequence
  source 1..19: mol_type = other RNA
gccctttaaaatactttct

SEQ ID NO: 33081 - RNA, 19 nt, synthetic construct
  misc_feature 1..19: note = siRNA antisense sequence
  source 1..19: mol_type = other RNA
agaaagtattttaaagggc

SEQ ID NO: 33082 - RNA, 19 nt, synthetic construct
  misc_feature 1..19: note = siRNA sense sequence
  source 1..19: mol_type = other RNA
ccctttaaaatactttctg

SEQ ID NO: 33083 - RNA, 19 nt, synthetic construct
  misc_feature 1..19: note = siRNA antisense sequence
  source 1..19: mol_type = other RNA
cagaaagtattttaaaggg

SEQ ID NO: 33084 - RNA, 19 nt, synthetic construct
  misc_feature 1..19: note = siRNA sense sequence
  source 1..19: mol_type = other RNA
tctgatttcttttctaagc

SEQ ID NO: 33085 - RNA, 19 nt, synthetic construct
  misc_feature 1..19: note = siRNA antisense sequence
  source 1..19: mol_type = other RNA
gcttagaaaagaaatcaga

SEQ ID NO: 33086 - RNA, 19 nt, synthetic construct
  misc_feature 1..19: note = siRNA sense sequence
  source 1..19: mol_type = other RNA
ctgatttcttttctaagcg

SEQ ID NO: 33087 - RNA, 19 nt, synthetic construct
  misc_feature 1..19: note = siRNA antisense sequence
  source 1..19: mol_type = other RNA
cgcttagaaaagaaatcag

SEQ ID NO: 33088 - RNA, 19 nt, synthetic construct
  misc_feature 1..19: note = siRNA sense sequence
  source 1..19: mol_type = other RNA
tgatttcttttctaagcgt

SEQ ID NO: 33089 - RNA, 19 nt, synthetic construct
  misc_feature 1..19: note = siRNA antisense sequence
  source 1..19: mol_type = other RNA
acgcttagaaaagaaatca

SEQ ID NO: 33090 - RNA, 19 nt, synthetic construct
  misc_feature 1..19: note = siRNA sense sequence
  source 1..19: mol_type = other RNA
gatttcttttctaagcgtt

SEQ ID NO: 33091 - RNA, 19 nt, synthetic construct
  misc_feature 1..19: note = siRNA antisense sequence
  source 1..19: mol_type = other RNA
aacgcttagaaaagaaatc

SEQ ID NO: 33092 - RNA, 19 nt, synthetic construct
  misc_feature 1..19: note = siRNA sense sequence
  source 1..19: mol_type = other RNA
ttcttttctaagcgttttc

SEQ ID NO: 33093 - RNA, 19 nt, synthetic construct
  misc_feature 1..19: note = siRNA antisense sequence
  source 1..19: mol_type = other RNA
gaaaacgcttagaaaagaa

SEQ ID NO: 33094 - RNA, 19 nt, synthetic construct
  misc_feature 1..19: note = siRNA sense sequence
  source 1..19: mol_type = other RNA
tcttttctaagcgttttca

SEQ ID NO: 33095 - RNA, 19 nt, synthetic construct
  misc_feature 1..19: note = siRNA antisense sequence
  source 1..19: mol_type = other RNA
tgaaaacgcttagaaaaga

SEQ ID NO: 33096 - RNA, 19 nt, synthetic construct
  misc_feature 1..19: note = siRNA sense sequence
  source 1..19: mol_type = other RNA
cttttctaagcgttttcag

SEQ ID NO: 33097 - RNA, 19 nt, synthetic construct
  misc_feature 1..19: note = siRNA antisense sequence
  source 1..19: mol_type = other RNA
ctgaaaacgcttagaaaag

SEQ ID NO: 33098 - RNA, 19 nt, synthetic construct
  misc_feature 1..19: note = siRNA sense sequence
  source 1..19: mol_type = other RNA
ttttctaagcgttttcagg

SEQ ID NO: 33099 - RNA, 19 nt, synthetic construct
  misc_feature 1..19: note = siRNA antisense sequence
  source 1..19: mol_type = other RNA
cctgaaaacgcttagaaaa

SEQ ID NO: 33100 - RNA, 19 nt, synthetic construct
  misc_feature 1..19: note = siRNA sense sequence
  source 1..19: mol_type = other RNA
tttctaagcgttttcaggt

SEQ ID NO: 33101 - RNA, 19 nt, synthetic construct
  misc_feature 1..19: note = siRNA antisense sequence
  source 1..19: mol_type = other RNA
acctgaaaacgcttagaaa

SEQ ID NO: 33102 - RNA, 19 nt, synthetic construct
  misc_feature 1..19: note = siRNA sense sequence
  source 1..19: mol_type = other RNA
ttctaagcgttttcaggtg

SEQ ID NO: 33103 - RNA, 19 nt, synthetic construct
  misc_feature 1..19: note = siRNA antisense sequence
  source 1..19: mol_type = other RNA
cacctgaaaacgcttagaa

SEQ ID NO: 33104 - RNA, 19 nt, synthetic construct
  misc_feature 1..19: note = siRNA sense sequence
  source 1..19: mol_type = other RNA
tctaagcgttttcaggtga

SEQ ID NO: 33105 - RNA, 19 nt, synthetic construct
  misc_feature 1..19: note = siRNA antisense sequence
  source 1..19: mol_type = other RNA
tcacctgaaaacgcttaga

SEQ ID NO: 33106 - RNA, 19 nt, synthetic construct
  misc_feature 1..19: note = siRNA sense sequence
  source 1..19: mol_type = other RNA
ctaagcgttttcaggtgaa

SEQ ID NO: 33107 - RNA, 19 nt, synthetic construct
  misc_feature 1..19: note = siRNA antisense sequence
  source 1..19: mol_type = other RNA
ttcacctgaaaacgcttag

SEQ ID NO: 33108 - RNA, 19 nt, synthetic construct
  misc_feature 1..19: note = siRNA sense sequence
  source 1..19: mol_type = other RNA
taagcgttttcaggtgaat

SEQ ID NO: 33109 - RNA, 19 nt, synthetic construct
  misc_feature 1..19: note = siRNA antisense sequence
  source 1..19: mol_type = other RNA
attcacctgaaaacgctta

SEQ ID NO: 33110 - RNA, 19 nt, synthetic construct
  misc_feature 1..19: note = siRNA sense sequence
  source 1..19: mol_type = other RNA
aagcgttttcaggtgaata

SEQ ID NO: 33111 - RNA, 19 nt, synthetic construct
  misc_feature 1..19: note = siRNA antisense sequence
  source 1..19: mol_type = other RNA
tattcacctgaaaacgctt

SEQ ID NO: 33112 - RNA, 19 nt, synthetic construct
  misc_feature 1..19: note = siRNA sense sequence
  source 1..19: mol_type = other RNA
agcgttttcaggtgaataa

SEQ ID NO: 33113 - RNA, 19 nt, synthetic construct
  misc_feature 1..19: note = siRNA antisense sequence
  source 1..19: mol_type = other RNA
ttattcacctgaaaacgct

SEQ ID NO: 33114 - RNA, 19 nt, synthetic construct
  misc_feature 1..19: note = siRNA sense sequence
  source 1..19: mol_type = other RNA
gcgttttcaggtgaataac

SEQ ID NO: 33115 - RNA, 19 nt, synthetic construct
  misc_feature 1..19: note = siRNA antisense sequence
  source 1..19: mol_type = other RNA
gttattcacctgaaaacgc

SEQ ID NO: 33116 - RNA, 19 nt, synthetic construct
  misc_feature 1..19: note = siRNA sense sequence
  source 1..19: mol_type = other RNA
ttctcttcataaaatggac

SEQ ID NO: 33117 - RNA, 19 nt, synthetic construct
  misc_feature 1..19: note = siRNA antisense sequence
  source 1..19: mol_type = other RNA
gtccattttatgaagagaa

SEQ ID NO: 33118 - RNA, 19 nt, synthetic construct
  misc_feature 1..19: note = siRNA sense sequence
  source 1..19: mol_type = other RNA
tctcttcataaaatggaca

SEQ ID NO: 33119 - RNA, 19 nt, synthetic construct
  misc_feature 1..19: note = siRNA antisense sequence
  source 1..19: mol_type = other RNA
tgtccattttatgaagaga

SEQ ID NO: 33120 - RNA, 19 nt, synthetic construct
  misc_feature 1..19: note = siRNA sense sequence
  source 1..19: mol_type = other RNA
ggtagtgaatgatataatg

SEQ ID NO: 33121 - RNA, 19 nt, synthetic construct
  misc_feature 1..19: note = siRNA antisense sequence
  source 1..19: mol_type = other RNA
cattatatcattcactacc

SEQ ID NO: 33122 - RNA, 19 nt, synthetic construct
  misc_feature 1..19: note = siRNA sense sequence
  source 1..19: mol_type = other RNA
gtagtgaatgatataatgg

SEQ ID NO: 33123 - RNA, 19 nt, synthetic construct
  misc_feature 1..19: note = siRNA antisense sequence
  source 1..19: mol_type = other RNA
ccattatatcattcactac

SEQ ID NO: 33124 - RNA, 19 nt, synthetic construct
  misc_feature 1..19: note = siRNA sense sequence
  source 1..19: mol_type = other RNA
ctataataagtagctggga

SEQ ID NO: 33125 - RNA, 19 nt, synthetic construct
  misc_feature 1..19: note = siRNA antisense sequence
  source 1..19: mol_type = other RNA
tcccagctacttattatag

SEQ ID NO: 33126 - RNA, 19 nt, synthetic construct
  misc_feature 1..19: note = siRNA sense sequence
  source 1..19: mol_type = other RNA
tataataagtagctgggaa

SEQ ID NO: 33127 - RNA, 19 nt, synthetic construct
  misc_feature 1..19: note = siRNA antisense sequence
  source 1..19: mol_type = other RNA
ttcccagctacttattata

SEQ ID NO: 33128 - RNA, 19 nt, synthetic construct
  misc_feature 1..19: note = siRNA sense sequence
  source 1..19: mol_type = other RNA
ataataagtagctgggaag

SEQ ID NO: 33129 - RNA, 19 nt, synthetic construct
  misc_feature 1..19: note = siRNA antisense sequence
  source 1..19: mol_type = other RNA
cttcccagctacttattat

SEQ ID NO: 33130 - RNA, 19 nt, synthetic construct
  misc_feature 1..19: note = siRNA sense sequence
  source 1..19: mol_type = other RNA
taataagtagctgggaaga

SEQ ID NO: 33131 - RNA, 19 nt, synthetic construct
  misc_feature 1..19: note = siRNA antisense sequence
  source 1..19: mol_type = other RNA
tcttcccagctacttatta

SEQ ID NO: 33132 - RNA, 19 nt, synthetic construct
  misc_feature 1..19: note = siRNA sense sequence
  source 1..19: mol_type = other RNA
aataagtagctgggaagaa

SEQ ID NO: 33133 - RNA, 19 nt, synthetic construct
  misc_feature 1..19: note = siRNA antisense sequence
  source 1..19: mol_type = other RNA
ttcttcccagctacttatt

SEQ ID NO: 33134 - RNA, 19 nt, synthetic construct
  misc_feature 1..19: note = siRNA sense sequence
  source 1..19: mol_type = other RNA
ataagtagctgggaagaag

SEQ ID NO: 33135 - RNA, 19 nt, synthetic construct
  misc_feature 1..19: note = siRNA antisense sequence
  source 1..19: mol_type = other RNA
cttcttcccagctacttat

SEQ ID NO: 33136 - RNA, 19 nt, synthetic construct
  misc_feature 1..19: note = siRNA sense sequence
  source 1..19: mol_type = other RNA
gtagctgggaagaagcaag

SEQ ID NO: 33137 - RNA, 19 nt, synthetic construct
  misc_feature 1..19: note = siRNA antisense sequence
  source 1..19: mol_type = other RNA
cttgcttcttcccagctac

SEQ ID NO: 33138 - RNA, 19 nt, synthetic construct
  misc_feature 1..19: note = siRNA sense sequence
  source 1..19: mol_type = other RNA
ttttagtttaagtggcagt

SEQ ID NO: 33139 - RNA, 19 nt, synthetic construct
  misc_feature 1..19: note = siRNA antisense sequence
  source 1..19: mol_type = other RNA
actgccacttaaactaaaa

SEQ ID NO: 33140 - RNA, 19 nt, synthetic construct
  misc_feature 1..19: note = siRNA sense sequence
  source 1..19: mol_type = other RNA
agtttaagtggcagtgtat

SEQ ID NO: 33141 - RNA, 19 nt, synthetic construct
  misc_feature 1..19: note = siRNA antisense sequence
  source 1..19: mol_type = other RNA
atacactgccacttaaact

SEQ ID NO: 33142 - RNA, 19 nt, synthetic construct
  misc_feature 1..19: note = siRNA sense sequence
  source 1..19: mol_type = other RNA
gtttaagtggcagtgtatg

SEQ ID NO: 33143 - RNA, 19 nt, synthetic construct
  misc_feature 1..19: note = siRNA antisense sequence
  source 1..19: mol_type = other RNA
catacactgccacttaaac

SEQ ID NO: 33144 - RNA, 19 nt, synthetic construct
  misc_feature 1..19: note = siRNA sense sequence
  source 1..19: mol_type = other RNA
tttaagtggcagtgtatga

SEQ ID NO: 33145 - RNA, 19 nt, synthetic construct
  misc_feature 1..19: note = siRNA antisense sequence
  source 1..19: mol_type = other RNA
tcatacactgccacttaaa

SEQ ID NO: 33146 - RNA, 19 nt, synthetic construct
  misc_feature 1..19: note = siRNA sense sequence
  source 1..19: mol_type = other RNA
agtggcagtgtatgattag

SEQ ID NO: 33147 - RNA, 19 nt, synthetic construct
  misc_feature 1..19: note = siRNA antisense sequence
  source 1..19: mol_type = other RNA
ctaatcatacactgccact

SEQ ID NO: 33148 - RNA, 19 nt, synthetic construct
  misc_feature 1..19: note = siRNA sense sequence
  source 1..19: mol_type = other RNA
tggcagtgtatgattagaa

SEQ ID NO: 33149 - RNA, 19 nt, synthetic construct
  misc_feature 1..19: note = siRNA antisense sequence
  source 1..19: mol_type = other RNA
ttctaatcatacactgcca

SEQ ID NO: 33150 - RNA, 19 nt, synthetic construct
  misc_feature 1..19: note = siRNA sense sequence
  source 1..19: mol_type = other RNA
ggcagtgtatgattagaag

SEQ ID NO: 33151 - RNA, 19 nt, synthetic construct
  misc_feature 1..19: note = siRNA antisense sequence
  source 1..19: mol_type = other RNA
cttctaatcatacactgcc

SEQ ID NO: 33152 - RNA, 19 nt, synthetic construct
  misc_feature 1..19: note = siRNA sense sequence
  source 1..19: mol_type = other RNA
gtgtatgattagaagcagt

SEQ ID NO: 33153 - RNA, 19 nt, synthetic construct
  misc_feature 1..19: note = siRNA antisense sequence
  source 1..19: mol_type = other RNA
actgcttctaatcatacac

SEQ ID NO: 33154 - RNA, 19 nt, synthetic construct
  misc_feature 1..19: note = siRNA sense sequence
  source 1..19: mol_type = other RNA
gtatgattagaagcagtac

SEQ ID NO: 33155 - RNA, 19 nt, synthetic construct
  misc_feature 1..19: note = siRNA antisense sequence
  source 1..19: mol_type = other RNA
gtactgcttctaatcatac

SEQ ID NO: 33156 - RNA, 19 nt, synthetic construct
  misc_feature 1..19: note = siRNA sense sequence
  source 1..19: mol_type = other RNA
tatgattagaagcagtact

SEQ ID NO: 33157 - RNA, 19 nt, synthetic construct
  misc_feature 1..19: note = siRNA antisense sequence
  source 1..19: mol_type = other RNA
agtactgcttctaatcata

SEQ ID NO: 33158 - RNA, 19 nt, synthetic construct
  misc_feature 1..19: note = siRNA sense sequence
  source 1..19: mol_type = other RNA
gattagaagcagtactgag

SEQ ID NO: 33159 - RNA, 19 nt, synthetic construct
  misc_feature 1..19: note = siRNA antisense sequence
  source 1..19: mol_type = other RNA
ctcagtactgcttctaatc

SEQ ID NO: 33160 - RNA, 19 nt, synthetic construct
  misc_feature 1..19: note = siRNA sense sequence
  source 1..19: mol_type = other RNA
aatggcatctctgaatatg

SEQ ID NO: 33161 - RNA, 19 nt, synthetic construct
  misc_feature 1..19: note = siRNA antisense sequence
  source 1..19: mol_type = other RNA
catattcagagatgccatt

SEQ ID NO: 33162 - RNA, 19 nt, synthetic construct
  misc_feature 1..19: note = siRNA sense sequence
  source 1..19: mol_type = other RNA
atggcatctctgaatatgg

SEQ ID NO: 33163 - RNA, 19 nt, synthetic construct
  misc_feature 1..19: note = siRNA antisense sequence
  source 1..19: mol_type = other RNA
ccatattcagagatgccat

SEQ ID NO: 33164 - RNA, 19 nt, synthetic construct
  misc_feature 1..19: note = siRNA sense sequence
  source 1..19: mol_type = other RNA
tggcatctctgaatatgga

SEQ ID NO: 33165 - RNA, 19 nt, synthetic construct
  misc_feature 1..19: note = siRNA antisense sequence
  source 1..19: mol_type = other RNA
tccatattcagagatgcca

SEQ ID NO: 33166 - RNA, 19 nt, synthetic construct
  misc_feature 1..19: note = siRNA sense sequence
  source 1..19: mol_type = other RNA
ggcatctctgaatatggaa

SEQ ID NO: 33167 - RNA, 19 nt, synthetic construct
  misc_feature 1..19: note = siRNA antisense sequence
  source 1..19: mol_type = other RNA
ttccatattcagagatgcc

SEQ ID NO: 33168 - RNA, 19 nt, synthetic construct
  misc_feature 1..19: note = siRNA sense sequence
  source 1..19: mol_type = other RNA
gcatctctgaatatggaat

SEQ ID NO: 33169 - RNA, 19 nt, synthetic construct
  misc_feature 1..19: note = siRNA antisense sequence
  source 1..19: mol_type = other RNA
attccatattcagagatgc

SEQ ID NO: 33170 - RNA, 19 nt, synthetic construct
  misc_feature 1..19: note = siRNA sense sequence
  source 1..19: mol_type = other RNA
catctctgaatatggaatt

SEQ ID NO: 33171 - RNA, 19 nt, synthetic construct
  misc_feature 1..19: note = siRNA antisense sequence
  source 1..19: mol_type = other RNA
aattccatattcagagatg

SEQ ID NO: 33172 - RNA, 19 nt, synthetic construct
  misc_feature 1..19: note = siRNA sense sequence
  source 1..19: mol_type = other RNA
tctctgaatatggaattgc

SEQ ID NO: 33173 - RNA, 19 nt, synthetic construct
  misc_feature 1..19: note = siRNA antisense sequence
  source 1..19: mol_type = other RNA
gcaattccatattcagaga

SEQ ID NO: 33174 - RNA, 19 nt, synthetic construct
  misc_feature 1..19: note = siRNA sense sequence
  source 1..19: mol_type = other RNA
ctctgaatatggaattgct

SEQ ID NO: 33175 - RNA, 19 nt, synthetic construct
  misc_feature 1..19: note = siRNA antisense sequence
  source 1..19: mol_type = other RNA
agcaattccatattcagag

SEQ ID NO: 33176 - RNA, 19 nt, synthetic construct
  misc_feature 1..19: note = siRNA sense sequence
  source 1..19: mol_type = other RNA
ctgaatatggaattgctag

SEQ ID NO: 33177 - RNA, 19 nt, synthetic construct
  misc_feature 1..19: note = siRNA antisense sequence
  source 1..19: mol_type = other RNA
ctagcaattccatattcag

SEQ ID NO: 33178 - RNA, 19 nt, synthetic construct
  misc_feature 1..19: note = siRNA sense sequence
  source 1..19: mol_type = other RNA
tgaatatggaattgctagt

SEQ ID NO: 33179 - RNA, 19 nt, synthetic construct
  misc_feature 1..19: note = siRNA antisense sequence
  source 1..19: mol_type = other RNA
actagcaattccatattca

SEQ ID NO: 33180 - RNA, 19 nt, synthetic construct
  misc_feature 1..19: note = siRNA sense sequence
  source 1..19: mol_type = other RNA
atggaattgctagttaaag

SEQ ID NO: 33181 - RNA, 19 nt, synthetic construct
  misc_feature 1..19: note = siRNA antisense sequence
  source 1..19: mol_type = other RNA
ctttaactagcaattccat

SEQ ID NO: 33182 - RNA, 19 nt, synthetic construct
  misc_feature 1..19: note = siRNA sense sequence
  source 1..19: mol_type = other RNA
tggaattgctagttaaagc

SEQ ID NO: 33183 - RNA, 19 nt, synthetic construct
  misc_feature 1..19: note = siRNA antisense sequence
  source 1..19: mol_type = other RNA
gctttaactagcaattcca

SEQ ID NO: 33184 - RNA, 19 nt, synthetic construct
  misc_feature 1..19: note = siRNA sense sequence
  source 1..19: mol_type = other RNA
gttaaagctactaggtgac

SEQ ID NO: 33185 - RNA, 19 nt, synthetic construct
  misc_feature 1..19: note = siRNA antisense sequence
  source 1..19: mol_type = other RNA
gtcacctagtagctttaac

SEQ ID NO: 33186 - RNA, 19 nt, synthetic construct
  misc_feature 1..19: note = siRNA sense sequence
  source 1..19: mol_type = other RNA
ttaaagctactaggtgact

SEQ ID NO: 33187 - RNA, 19 nt, synthetic construct
  misc_feature 1..19: note = siRNA antisense sequence
  source 1..19: mol_type = other RNA
agtcacctagtagctttaa

SEQ ID NO: 33188 - RNA, 19 nt, synthetic construct
  misc_feature 1..19: note = siRNA sense sequence
  source 1..19: mol_type = other RNA
taaagctactaggtgactc

SEQ ID NO: 33189 - RNA, 19 nt, synthetic construct
  misc_feature 1..19: note = siRNA antisense sequence
  source 1..19: mol_type = other RNA
gagtcacctagtagcttta

SEQ ID NO: 33190 - RNA, 19 nt, synthetic construct
  misc_feature 1..19: note = siRNA sense sequence
  source 1..19: mol_type = other RNA
aaagctactaggtgactct

SEQ ID NO: 33191 - RNA, 19 nt, synthetic construct
  misc_feature 1..19: note = siRNA antisense sequence
  source 1..19: mol_type = other RNA
agagtcacctagtagcttt

SEQ ID NO: 33192 - RNA, 19 nt, synthetic construct
  misc_feature 1..19: note = siRNA sense sequence
  source 1..19: mol_type = other RNA
aagctactaggtgactcta

SEQ ID NO: 33193 - RNA, 19 nt, synthetic construct
  misc_feature 1..19: note = siRNA antisense sequence
  source 1..19: mol_type = other RNA
tagagtcacctagtagctt

SEQ ID NO: 33194 - RNA, 19 nt, synthetic construct
  misc_feature 1..19: note = siRNA sense sequence
  source 1..19: mol_type = other RNA
taggtgactctaggatgga

SEQ ID NO: 33195 - RNA, 19 nt, synthetic construct
  misc_feature 1..19: note = siRNA antisense sequence
  source 1..19: mol_type = other RNA
tccatcctagagtcaccta

SEQ ID NO: 33196 - RNA, 19 nt, synthetic construct
  misc_feature 1..19: note = siRNA sense sequence
  source 1..19: mol_type = other RNA
aggtgactctaggatggac

SEQ ID NO: 33197 - RNA, 19 nt, synthetic construct
  misc_feature 1..19: note = siRNA antisense sequence
  source 1..19: mol_type = other RNA
gtccatcctagagtcacct

SEQ ID NO: 33198 - RNA, 19 nt, synthetic construct
  misc_feature 1..19: note = siRNA sense sequence
  source 1..19: mol_type = other RNA
ggtgactctaggatggaca

SEQ ID NO: 33199 - RNA, 19 nt, synthetic construct
  misc_feature 1..19: note = siRNA antisense sequence
  source 1..19: mol_type = other RNA
tgtccatcctagagtcacc

SEQ ID NO: 33200 - RNA, 19 nt, synthetic construct
  misc_feature 1..19: note = siRNA sense sequence
  source 1..19: mol_type = other RNA
ttttggttttggttgaggt

SEQ ID NO: 33201 - RNA, 19 nt, synthetic construct
  misc_feature 1..19: note = siRNA antisense sequence
  source 1..19: mol_type = other RNA
acctcaaccaaaaccaaaa

SEQ ID NO: 33202 - RNA, 19 nt, synthetic construct
  misc_feature 1..19: note = siRNA sense sequence
  source 1..19: mol_type = other RNA
tttggttttggttgaggta

SEQ ID NO: 33203 - RNA, 19 nt, synthetic construct
  misc_feature 1..19: note = siRNA antisense sequence
  source 1..19: mol_type = other RNA
tacctcaaccaaaaccaaa

SEQ ID NO: 33204 - RNA, 19 nt, synthetic construct
  misc_feature 1..19: note = siRNA sense sequence
  source 1..19: mol_type = other RNA
ttggttttggttgaggtac

SEQ ID NO: 33205 - RNA, 19 nt, synthetic construct
  misc_feature 1..19: note = siRNA antisense sequence
  source 1..19: mol_type = other RNA
gtacctcaaccaaaaccaa

SEQ ID NO: 33206 - RNA, 19 nt, synthetic construct
  misc_feature 1..19: note = siRNA sense sequence
  source 1..19: mol_type = other RNA
tggttttggttgaggtaca

SEQ ID NO: 33207 - RNA, 19 nt, synthetic construct
  misc_feature 1..19: note = siRNA antisense sequence
  source 1..19: mol_type = other RNA
tgtacctcaaccaaaacca

SEQ ID NO: 33208 - RNA, 19 nt, synthetic construct
  misc_feature 1..19: note = siRNA sense sequence
  source 1..19: mol_type = other RNA
ggttttggttgaggtacac

SEQ ID NO: 33209 - RNA, 19 nt, synthetic construct
  misc_feature 1..19: note = siRNA antisense sequence
  source 1..19: mol_type = other RNA
gtgtacctcaaccaaaacc

SEQ ID NO: 33210 - RNA, 19 nt, synthetic construct
  misc_feature 1..19: note = siRNA sense sequence
  source 1..19: mol_type = other RNA
gttttggttgaggtacact

SEQ ID NO: 33211 - RNA, 19 nt, synthetic construct
  misc_feature 1..19: note = siRNA antisense sequence
  source 1..19: mol_type = other RNA
agtgtacctcaaccaaaac

SEQ ID NO: 33212 - RNA, 19 nt, synthetic construct
  misc_feature 1..19: note = siRNA sense sequence
  source 1..19: mol_type = other RNA
ttttggttgaggtacactg

SEQ ID NO: 33213 - RNA, 19 nt, synthetic construct
  misc_feature 1..19: note = siRNA antisense sequence
  source 1..19: mol_type = other RNA
cagtgtacctcaaccaaaa

SEQ ID NO: 33214 - RNA, 19 nt, synthetic construct
  misc_feature 1..19: note = siRNA sense sequence
  source 1..19: mol_type = other RNA
tttggttgaggtacactgt

SEQ ID NO: 33215 - RNA, 19 nt, synthetic construct
  misc_feature 1..19: note = siRNA antisense sequence
  source 1..19: mol_type = other RNA
acagtgtacctcaaccaaa

SEQ ID NO: 33216 - RNA, 19 nt, synthetic construct
  misc_feature 1..19: note = siRNA sense sequence
  source 1..19: mol_type = other RNA
ttggttgaggtacactgtc

SEQ ID NO: 33217 - RNA, 19 nt, synthetic construct
  misc_feature 1..19: note = siRNA antisense sequence
  source 1..19: mol_type = other RNA
gacagtgtacctcaaccaa

SEQ ID NO: 33218 - RNA, 19 nt, synthetic construct
  misc_feature 1..19: note = siRNA sense sequence
  source 1..19: mol_type = other RNA
tggttgaggtacactgtca

SEQ ID NO: 33219 - RNA, 19 nt, synthetic construct
  misc_feature 1..19: note = siRNA antisense sequence
  source 1..19: mol_type = other RNA
tgacagtgtacctcaacca

SEQ ID NO: 33220 - RNA, 19 nt, synthetic construct
  misc_feature 1..19: note = siRNA sense sequence
  source 1..19: mol_type = other RNA
ggttgaggtacactgtcag

SEQ ID NO: 33221 - RNA, 19 nt, synthetic construct
  misc_feature 1..19: note = siRNA antisense sequence
  source 1..19: mol_type = other RNA
ctgacagtgtacctcaacc

SEQ ID NO: 33222 - RNA, 19 nt, synthetic construct
  misc_feature 1..19: note = siRNA sense sequence
  source 1..19: mol_type = other RNA
gttgaggtacactgtcaga

SEQ ID NO: 33223 - RNA, 19 nt, synthetic construct
  misc_feature 1..19: note = siRNA antisense sequence
  source 1..19: mol_type = other RNA
tctgacagtgtacctcaac

SEQ ID NO: 33224 - RNA, 19 nt, synthetic construct
  misc_feature 1..19: note = siRNA sense sequence
  source 1..19: mol_type = other RNA
tgtcagagtgtgcacagta

SEQ ID NO: 33225 - RNA, 19 nt, synthetic construct
  misc_feature 1..19: note = siRNA antisense sequence
  source 1..19: mol_type = other RNA
tactgtgcacactctgaca

SEQ ID NO: 33226 - RNA, 19 nt, synthetic construct
  misc_feature 1..19: note = siRNA sense sequence
  source 1..19: mol_type = other RNA
gtcagagtgtgcacagtat

SEQ ID NO: 33227 - RNA, 19 nt, synthetic construct
  misc_feature 1..19: note = siRNA antisense sequence
  source 1..19: mol_type = other RNA
atactgtgcacactctgac

SEQ ID NO: 33228 - RNA, 19 nt, synthetic construct
  misc_feature 1..19: note = siRNA sense sequence
  source 1..19: mol_type = other RNA
cattttgttagttagcttc

SEQ ID NO: 33229 - RNA, 19 nt, synthetic construct
  misc_feature 1..19: note = siRNA antisense sequence
  source 1..19: mol_type = other RNA
gaagctaactaacaaaatg

SEQ ID NO: 33230 - RNA, 19 nt, synthetic construct
  misc_feature 1..19: note = siRNA sense sequence
  source 1..19: mol_type = other RNA
ttagttagcttcatgaaga

SEQ ID NO: 33231 - RNA, 19 nt, synthetic construct
  misc_feature 1..19: note = siRNA antisense sequence
  source 1..19: mol_type = other RNA
tcttcatgaagctaactaa

SEQ ID NO: 33232 - RNA, 19 nt, synthetic construct
  misc_feature 1..19: note = siRNA sense sequence
  source 1..19: mol_type = other RNA
tagttagcttcatgaagac

SEQ ID NO: 33233 - RNA, 19 nt, synthetic construct
  misc_feature 1..19: note = siRNA antisense sequence
  source 1..19: mol_type = other RNA
gtcttcatgaagctaacta

SEQ ID NO: 33234 - RNA, 19 nt, synthetic construct
  misc_feature 1..19: note = siRNA sense sequence
  source 1..19: mol_type = other RNA
agttagcttcatgaagacc

SEQ ID NO: 33235 - RNA, 19 nt, synthetic construct
  misc_feature 1..19: note = siRNA antisense sequence
  source 1..19: mol_type = other RNA
ggtcttcatgaagctaact

SEQ ID NO: 33236 - RNA, 19 nt, synthetic construct
  misc_feature 1..19: note = siRNA sense sequence
  source 1..19: mol_type = other RNA
gttagcttcatgaagacct

SEQ ID NO: 33237 - RNA, 19 nt, synthetic construct
  misc_feature 1..19: note = siRNA antisense sequence
  source 1..19: mol_type = other RNA
aggtcttcatgaagctaac

SEQ ID NO: 33238 - RNA, 19 nt, synthetic construct
  misc_feature 1..19: note = siRNA sense sequence
  source 1..19: mol_type = other RNA
ttagcttcatgaagacctt

SEQ ID NO: 33239 - RNA, 19 nt, synthetic construct
  misc_feature 1..19: note = siRNA antisense sequence
  source 1..19: mol_type = other RNA
aaggtcttcatgaagctaa

SEQ ID NO: 33240 - RNA, 19 nt, synthetic construct
  misc_feature 1..19: note = siRNA sense sequence
  source 1..19: mol_type = other RNA
tagcttcatgaagacctta

SEQ ID NO: 33241 - RNA, 19 nt, synthetic construct
  misc_feature 1..19: note = siRNA antisense sequence
  source 1..19: mol_type = other RNA
taaggtcttcatgaagcta

SEQ ID NO: 33242 - RNA, 19 nt, synthetic construct
  misc_feature 1..19: note = siRNA sense sequence
  source 1..19: mol_type = other RNA
agcttcatgaagaccttaa

SEQ ID NO: 33243 - RNA, 19 nt, synthetic construct
  misc_feature 1..19: note = siRNA antisense sequence
  source 1..19: mol_type = other RNA
ttaaggtcttcatgaagct

SEQ ID NO: 33244 - RNA, 19 nt, synthetic construct
  misc_feature 1..19: note = siRNA sense sequence
  source 1..19: mol_type = other RNA
gcttcatgaagaccttaat

SEQ ID NO: 33245 - RNA, 19 nt, synthetic construct
  misc_feature 1..19: note = siRNA antisense sequence
  source 1..19: mol_type = other RNA
attaaggtcttcatgaagc

SEQ ID NO: 33246 - RNA, 19 nt, synthetic construct
  misc_feature 1..19: note = siRNA sense sequence
  source 1..19: mol_type = other RNA
cttcatgaagaccttaatt

SEQ ID NO: 33247 - RNA, 19 nt, synthetic construct
  misc_feature 1..19: note = siRNA antisense sequence
  source 1..19: mol_type = other RNA
aattaaggtcttcatgaag

SEQ ID NO: 33248 - RNA, 19 nt, synthetic construct
  misc_feature 1..19: note = siRNA sense sequence
  source 1..19: mol_type = other RNA
aatgttaatgattgaccac

SEQ ID NO: 33249 - RNA, 19 nt, synthetic construct
  misc_feature 1..19: note = siRNA antisense sequence
  source 1..19: mol_type = other RNA
gtggtcaatcattaacatt

SEQ ID NO: 33250 - RNA, 19 nt, synthetic construct
  misc_feature 1..19: note = siRNA sense sequence
  source 1..19: mol_type = other RNA
ttaatgattgaccacttgt

SEQ ID NO: 33251 - RNA, 19 nt, synthetic construct
  misc_feature 1..19: note = siRNA antisense sequence
  source 1..19: mol_type = other RNA
acaagtggtcaatcattaa

SEQ ID NO: 33252 - RNA, 19 nt, synthetic construct
  misc_feature 1..19: note = siRNA sense sequence
  source 1..19: mol_type = other RNA
taatgattgaccacttgtg

SEQ ID NO: 33253 - RNA, 19 nt, synthetic construct
  misc_feature 1..19: note = siRNA antisense sequence
  source 1..19: mol_type = other RNA
cacaagtggtcaatcatta

SEQ ID NO: 33254 - RNA, 19 nt, synthetic construct
  misc_feature 1..19: note = siRNA sense sequence
  source 1..19: mol_type = other RNA
aatgattgaccacttgtgt

SEQ ID NO: 33255 - RNA, 19 nt, synthetic construct
  misc_feature 1..19: note = siRNA antisense sequence
  source 1..19: mol_type = other RNA
acacaagtggtcaatcatt

SEQ ID NO: 33256 - RNA, 19 nt, synthetic construct
  misc_feature 1..19: note = siRNA sense sequence
  source 1..19: mol_type = other RNA
atgattgaccacttgtgtg

SEQ ID NO: 33257 - RNA, 19 nt, synthetic construct
  misc_feature 1..19: note = siRNA antisense sequence
  source 1..19: mol_type = other RNA
cacacaagtggtcaatcat

SEQ ID NO: 33258 - RNA, 19 nt, synthetic construct
  misc_feature 1..19: note = siRNA sense sequence
  source 1..19: mol_type = other RNA
ttgaccacttgtgtgttaa

SEQ ID NO: 33259 - RNA, 19 nt, synthetic construct
  misc_feature 1..19: note = siRNA antisense sequence
  source 1..19: mol_type = other RNA
ttaacacacaagtggtcaa

SEQ ID NO: 33260 - RNA, 19 nt, synthetic construct
  misc_feature 1..19: note = siRNA sense sequence
  source 1..19: mol_type = other RNA
tgaccacttgtgtgttaaa

SEQ ID NO: 33261 - RNA, 19 nt, synthetic construct
  misc_feature 1..19: note = siRNA antisense sequence
  source 1..19: mol_type = other RNA
tttaacacacaagtggtca

SEQ ID NO: 33262 - RNA, 19 nt, synthetic construct
  misc_feature 1..19: note = siRNA sense sequence
  source 1..19: mol_type = other RNA
atttagtcagttgaattcc

SEQ ID NO: 33263 - RNA, 19 nt, synthetic construct
  misc_feature 1..19: note = siRNA antisense sequence
  source 1..19: mol_type = other RNA
ggaattcaactgactaaat

SEQ ID NO: 33264 - RNA, 19 nt, synthetic construct
  misc_feature 1..19: note = siRNA sense sequence
  source 1..19: mol_type = other RNA
tttagtcagttgaattcca

SEQ ID NO: 33265 - RNA, 19 nt, synthetic construct
  misc_feature 1..19: note = siRNA antisense sequence
  source 1..19: mol_type = other RNA
tggaattcaactgactaaa

SEQ ID NO: 33266 - RNA, 19 nt, synthetic construct
  misc_feature 1..19: note = siRNA sense sequence
  source 1..19: mol_type = other RNA
ttagtcagttgaattccat

SEQ ID NO: 33267 - RNA, 19 nt, synthetic construct
  misc_feature 1..19: note = siRNA antisense sequence
  source 1..19: mol_type = other RNA
atggaattcaactgactaa

SEQ ID NO: 33268 - RNA, 19 nt, synthetic construct
  misc_feature 1..19: note = siRNA sense sequence
  source 1..19: mol_type = other RNA
tagtcagttgaattccatc

SEQ ID NO: 33269 - RNA, 19 nt, synthetic construct
  misc_feature 1..19: note = siRNA antisense sequence
  source 1..19: mol_type = other RNA
gatggaattcaactgacta

SEQ ID NO: 33270 - RNA, 19 nt, synthetic construct
  misc_feature 1..19: note = siRNA sense sequence
  source 1..19: mol_type = other RNA
agtcagttgaattccatca

SEQ ID NO: 33271 - RNA, 19 nt, synthetic construct
  misc_feature 1..19: note = siRNA antisense sequence
  source 1..19: mol_type = other RNA
tgatggaattcaactgact

SEQ ID NO: 33272 - RNA, 19 nt, synthetic construct
  misc_feature 1..19: note = siRNA sense sequence
  source 1..19: mol_type = other RNA
gtcagttgaattccatcac

SEQ ID NO: 33273 - RNA, 19 nt, synthetic construct
  misc_feature 1..19: note = siRNA antisense sequence
  source 1..19: mol_type = other RNA
gtgatggaattcaactgac

SEQ ID NO: 33274 - RNA, 19 nt, synthetic construct
  misc_feature 1..19: note = siRNA sense sequence
  source 1..19: mol_type = other RNA
atgaatccgtatattttgc

SEQ ID NO: 33275 - RNA, 19 nt, synthetic construct
  misc_feature 1..19: note = siRNA antisense sequence
  source 1..19: mol_type = other RNA
gcaaaatatacggattcat

SEQ ID NO: 33276 - RNA, 19 nt, synthetic construct
  misc_feature 1..19: note = siRNA sense sequence
  source 1..19: mol_type = other RNA
tgaatccgtatattttgcc

SEQ ID NO: 33277 - RNA, 19 nt, synthetic construct
  misc_feature 1..19: note = siRNA antisense sequence
  source 1..19: mol_type = other RNA
ggcaaaatatacggattca

SEQ ID NO: 33278 - RNA, 19 nt, synthetic construct
  misc_feature 1..19: note = siRNA sense sequence
  source 1..19: mol_type = other RNA
gaatccgtatattttgcct

SEQ ID NO: 33279 - RNA, 19 nt, synthetic construct
  misc_feature 1..19: note = siRNA antisense sequence
  source 1..19: mol_type = other RNA
aggcaaaatatacggattc

SEQ ID NO: 33280 - RNA, 19 nt, synthetic construct
  misc_feature 1..19: note = siRNA sense sequence
  source 1..19: mol_type = other RNA
tctaatacctctttaagtc

SEQ ID NO: 33281 - RNA, 19 nt, synthetic construct
  misc_feature 1..19: note = siRNA antisense sequence
  source 1..19: mol_type = other RNA
gacttaaagaggtattaga

SEQ ID NO: 33282 - RNA, 19 nt, synthetic construct
  misc_feature 1..19: note = siRNA sense sequence
  source 1..19: mol_type = other RNA
acataggtaggcctcattt

SEQ ID NO: 33283 - RNA, 19 nt, synthetic construct
  misc_feature 1..19: note = siRNA antisense sequence
  source 1..19: mol_type = other RNA
aaatgaggcctacctatgt

SEQ ID NO: 33284 - RNA, 19 nt, synthetic construct
  misc_feature 1..19: note = siRNA sense sequence
  source 1..19: mol_type = other RNA
cataggtaggcctcatttt

SEQ ID NO: 33285 - RNA, 19 nt, synthetic construct
  misc_feature 1..19: note = siRNA antisense sequence
  source 1..19: mol_type = other RNA
aaaatgaggcctacctatg

SEQ ID NO: 33286 - RNA, 19 nt, synthetic construct
  misc_feature 1..19: note = siRNA sense sequence
  source 1..19: mol_type = other RNA
ataggtaggcctcatttta

SEQ ID NO: 33287 - RNA, 19 nt, synthetic construct
  misc_feature 1..19: note = siRNA antisense sequence
  source 1..19: mol_type = other RNA
taaaatgaggcctacctat

SEQ ID NO: 33288 - RNA, 19 nt, synthetic construct
  misc_feature 1..19: note = siRNA sense sequence
  source 1..19: mol_type = other RNA
taggtaggcctcattttat

SEQ ID NO: 33289 - RNA, 19 nt, synthetic construct
  misc_feature 1..19: note = siRNA antisense sequence
  source 1..19: mol_type = other RNA
ataaaatgaggcctaccta

SEQ ID NO: 33290 - RNA, 19 nt, synthetic construct
  misc_feature 1..19: note = siRNA sense sequence
  source 1..19: mol_type = other RNA
aggtaggcctcattttatg

SEQ ID NO: 33291 - RNA, 19 nt, synthetic construct
  misc_feature 1..19: note = siRNA antisense sequence
  source 1..19: mol_type = other RNA
cataaaatgaggcctacct

SEQ ID NO: 33292 - RNA, 19 nt, synthetic construct
  misc_feature 1..19: note = siRNA sense sequence
  source 1..19: mol_type = other RNA
ggtaggcctcattttatgt

SEQ ID NO: 33293 - RNA, 19 nt, synthetic construct
  misc_feature 1..19: note = siRNA antisense sequence
  source 1..19: mol_type = other RNA
acataaaatgaggcctacc

SEQ ID NO: 33294 - RNA, 19 nt, synthetic construct
  misc_feature 1..19: note = siRNA sense sequence
  source 1..19: mol_type = other RNA
gtaggcctcattttatgtt

SEQ ID NO: 33295 - RNA, 19 nt, synthetic construct
  misc_feature 1..19: note = siRNA antisense sequence
  source 1..19: mol_type = other RNA
aacataaaatgaggcctac

SEQ ID NO: 33296 - RNA, 19 nt, synthetic construct
  misc_feature 1..19: note = siRNA sense sequence
  source 1..19: mol_type = other RNA
taggcctcattttatgttt

SEQ ID NO: 33297 - RNA, 19 nt, synthetic construct
  misc_feature 1..19: note = siRNA antisense sequence
  source 1..19: mol_type = other RNA
aaacataaaatgaggccta

SEQ ID NO: 33298 - RNA, 19 nt, synthetic construct
  misc_feature 1..19: note = siRNA sense sequence
  source 1..19: mol_type = other RNA
aggcctcattttatgtttt

SEQ ID NO: 33299 - RNA, 19 nt, synthetic construct
  misc_feature 1..19: note = siRNA antisense sequence
  source 1..19: mol_type = other RNA
aaaacataaaatgaggcct

SEQ ID NO: 33300 - RNA, 19 nt, synthetic construct
  misc_feature 1..19: note = siRNA sense sequence
  source 1..19: mol_type = other RNA
ggcctcattttatgttttg

SEQ ID NO: 33301 - RNA, 19 nt, synthetic construct
  misc_feature 1..19: note = siRNA antisense sequence
  source 1..19: mol_type = other RNA
caaaacataaaatgaggcc

SEQ ID NO: 33302 - RNA, 19 nt, synthetic construct
  misc_feature 1..19: note = siRNA sense sequence
  source 1..19: mol_type = other RNA
gcctcattttatgttttga

SEQ ID NO: 33303 - RNA, 19 nt, synthetic construct
  misc_feature 1..19: note = siRNA antisense sequence
  source 1..19: mol_type = other RNA
tcaaaacataaaatgaggc

SEQ ID NO: 33304 - RNA, 19 nt, synthetic construct
  misc_feature 1..19: note = siRNA sense sequence
  source 1..19: mol_type = other RNA
catttgtaaaagtctaggc

SEQ ID NO: 33305 - RNA, 19 nt, synthetic construct
  misc_feature 1..19: note = siRNA antisense sequence
  source 1..19: mol_type = other RNA
gcctagacttttacaaatg

SEQ ID NO: 33306 - RNA, 19 nt, synthetic construct
  misc_feature 1..19: note = siRNA sense sequence
  source 1..19: mol_type = other RNA
atttgtaaaagtctaggca

SEQ ID NO: 33307 - RNA, 19 nt, synthetic construct
  misc_feature 1..19: note = siRNA antisense sequence
  source 1..19: mol_type = other RNA
tgcctagacttttacaaat

SEQ ID NO: 33308 - RNA, 19 nt, synthetic construct
  misc_feature 1..19: note = siRNA sense sequence
  source 1..19: mol_type = other RNA
gtaaaagtctaggcatgct

SEQ ID NO: 33309 - RNA, 19 nt, synthetic construct
  misc_feature 1..19: note = siRNA antisense sequence
  source 1..19: mol_type = other RNA
agcatgcctagacttttac

SEQ ID NO: 33310 - RNA, 19 nt, synthetic construct
  misc_feature 1..19: note = siRNA sense sequence
  source 1..19: mol_type = other RNA
taaaagtctaggcatgctt

SEQ ID NO: 33311 - RNA, 19 nt, synthetic construct
  misc_feature 1..19: note = siRNA antisense sequence
  source 1..19: mol_type = other RNA
aagcatgcctagactttta

SEQ ID NO: 33312 - RNA, 19 nt, synthetic construct
  misc_feature 1..19: note = siRNA sense sequence
  source 1..19: mol_type = other RNA
aaaagtctaggcatgcttc

SEQ ID NO: 33313 - RNA, 19 nt, synthetic construct
  misc_feature 1..19: note = siRNA antisense sequence
  source 1..19: mol_type = other RNA
gaagcatgcctagactttt

SEQ ID NO: 33314 - RNA, 19 nt, synthetic construct
  misc_feature 1..19: note = siRNA sense sequence
  source 1..19: mol_type = other RNA
gtctaggcatgcttcattt

SEQ ID NO: 33315 - RNA, 19 nt, synthetic construct
  misc_feature 1..19: note = siRNA antisense sequence
  source 1..19: mol_type = other RNA
aaatgaagcatgcctagac

SEQ ID NO: 33316 - RNA, 19 nt, synthetic construct
  misc_feature 1..19: note = siRNA sense sequence
  source 1..19: mol_type = other RNA
ggtagataacttaaaatgc

SEQ ID NO: 33317 - RNA, 19 nt, synthetic construct
  misc_feature 1..19: note = siRNA antisense sequence
  source 1..19: mol_type = other RNA
gcattttaagttatctacc

SEQ ID NO: 33318 - RNA, 19 nt, synthetic construct
  misc_feature 1..19: note = siRNA sense sequence
  source 1..19: mol_type = other RNA
gtagataacttaaaatgcc

SEQ ID NO: 33319 - RNA, 19 nt, synthetic construct
  misc_feature 1..19: note = siRNA antisense sequence
  source 1..19: mol_type = other RNA
ggcattttaagttatctac

SEQ ID NO: 33320 - RNA, 19 nt, synthetic construct
  misc_feature 1..19: note = siRNA sense sequence
  source 1..19: mol_type = other RNA
agataacttaaaatgccag

SEQ ID NO: 33321 - RNA, 19 nt, synthetic construct
  misc_feature 1..19: note = siRNA antisense sequence
  source 1..19: mol_type = other RNA
ctggcattttaagttatct

SEQ ID NO: 33322 - RNA, 19 nt, synthetic construct
  misc_feature 1..19: note = siRNA sense sequence
  source 1..19: mol_type = other RNA
ttccagtctaaataatcac

SEQ ID NO: 33323 - RNA, 19 nt, synthetic construct
  misc_feature 1..19: note = siRNA antisense sequence
  source 1..19: mol_type = other RNA
gtgattatttagactggaa

SEQ ID NO: 33324 - RNA, 19 nt, synthetic construct
  misc_feature 1..19: note = siRNA sense sequence
  source 1..19: mol_type = other RNA
tccagtctaaataatcaca

SEQ ID NO: 33325 - RNA, 19 nt, synthetic construct
  misc_feature 1..19: note = siRNA antisense sequence
  source 1..19: mol_type = other RNA
tgtgattatttagactgga

SEQ ID NO: 33326 - RNA, 19 nt, synthetic construct
  misc_feature 1..19: note = siRNA sense sequence
  source 1..19: mol_type = other RNA
ggtgactcacgcctgtaat

SEQ ID NO: 33327 - RNA, 19 nt, synthetic construct
  misc_feature 1..19: note = siRNA antisense sequence
  source 1..19: mol_type = other RNA
attacaggcgtgagtcacc

SEQ ID NO: 33328 - RNA, 19 nt, synthetic construct
  misc_feature 1..19: note = siRNA sense sequence
  source 1..19: mol_type = other RNA
gtgactcacgcctgtaatc

SEQ ID NO: 33329 - RNA, 19 nt, synthetic construct
  misc_feature 1..19: note = siRNA antisense sequence
  source 1..19: mol_type = other RNA
gattacaggcgtgagtcac

SEQ ID NO: 33330 - RNA, 19 nt, synthetic construct
  misc_feature 1..19: note = siRNA sense sequence
  source 1..19: mol_type = other RNA
tgactcacgcctgtaatcc

SEQ ID NO: 33331 - RNA, 19 nt, synthetic construct
  misc_feature 1..19: note = siRNA antisense sequence
  source 1..19: mol_type = other RNA
ggattacaggcgtgagtca

SEQ ID NO: 33332 - RNA, 19 nt, synthetic construct
  misc_feature 1..19: note = siRNA sense sequence
  source 1..19: mol_type = other RNA
gactcacgcctgtaatccc

SEQ ID NO: 33333 - RNA, 19 nt, synthetic construct
  misc_feature 1..19: note = siRNA antisense sequence
  source 1..19: mol_type = other RNA
gggattacaggcgtgagtc

SEQ ID NO: 33334 - RNA, 19 nt, synthetic construct
  misc_feature 1..19: note = siRNA sense sequence
  source 1..19: mol_type = other RNA
acgcctgtaatcccagcac

SEQ ID NO: 33335 - RNA, 19 nt, synthetic construct
  misc_feature 1..19: note = siRNA antisense sequence
  source 1..19: mol_type = other RNA
gtgctgggattacaggcgt

SEQ ID NO: 33336 - RNA, 19 nt, synthetic construct
  misc_feature 1..19: note = siRNA sense sequence
  source 1..19: mol_type = other RNA
tgtaatcccagcacttcag

SEQ ID NO: 33337 - RNA, 19 nt, synthetic construct
  misc_feature 1..19: note = siRNA antisense sequence
  source 1..19: mol_type = other RNA
ctgaagtgctgggattaca

SEQ ID NO: 33338 - RNA, 19 nt, synthetic construct
  misc_feature 1..19: note = siRNA sense sequence
  source 1..19: mol_type = other RNA
gtaatcccagcacttcagg

SEQ ID NO: 33339 - RNA, 19 nt, synthetic construct
  misc_feature 1..19: note = siRNA antisense sequence
  source 1..19: mol_type = other RNA
cctgaagtgctgggattac

SEQ ID NO: 33340 - RNA, 19 nt, synthetic construct
  misc_feature 1..19: note = siRNA sense sequence
  source 1..19: mol_type = other RNA
aggcaggcggatcactcga

SEQ ID NO: 33341 - RNA, 19 nt, synthetic construct
  misc_feature 1..19: note = siRNA antisense sequence
  source 1..19: mol_type = other RNA
tcgagtgatccgcctgcct

SEQ ID NO: 33342 - RNA, 19 nt, synthetic construct
  misc_feature 1..19: note = siRNA sense sequence
  source 1..19: mol_type = other RNA
cgagcccaggagttcaaaa

SEQ ID NO: 33343 - RNA, 19 nt, synthetic construct
  misc_feature 1..19: note = siRNA antisense sequence
  source 1..19: mol_type = other RNA
ttttgaactcctgggctcg

SEQ ID NO: 33344 - RNA, 19 nt, synthetic construct
  misc_feature 1..19: note = siRNA sense sequence
  source 1..19: mol_type = other RNA
gtctgggcaacgtgacgag

SEQ ID NO: 33345 - RNA, 19 nt, synthetic construct
  misc_feature 1..19: note = siRNA antisense sequence
  source 1..19: mol_type = other RNA
ctcgtcacgttgcccagac

SEQ ID NO: 33346 - RNA, 19 nt, synthetic construct
  misc_feature 1..19: note = siRNA sense sequence
  source 1..19: mol_type = other RNA
tctgggcaacgtgacgagc

SEQ ID NO: 33347 - RNA, 19 nt, synthetic construct
  misc_feature 1..19: note = siRNA antisense sequence
  source 1..19: mol_type = other RNA
gctcgtcacgttgcccaga

SEQ ID NO: 33348 - RNA, 19 nt, synthetic construct
  misc_feature 1..19: note = siRNA sense sequence
  source 1..19: mol_type = other RNA
ctgggcaacgtgacgagca

SEQ ID NO: 33349 - RNA, 19 nt, synthetic construct
  misc_feature 1..19: note = siRNA antisense sequence
  source 1..19: mol_type = other RNA
tgctcgtcacgttgcccag

SEQ ID NO: 33350 - RNA, 19 nt, synthetic construct
  misc_feature 1..19: note = siRNA sense sequence
  source 1..19: mol_type = other RNA
tgggcaacgtgacgagcac

SEQ ID NO: 33351 - RNA, 19 nt, synthetic construct
  misc_feature 1..19: note = siRNA antisense sequence
  source 1..19: mol_type = other RNA
gtgctcgtcacgttgccca

SEQ ID NO: 33352 - RNA, 19 nt, synthetic construct
  misc_feature 1..19: note = siRNA sense sequence
  source 1..19: mol_type = other RNA
acgtgacgagcacttttct

SEQ ID NO: 33353 - RNA, 19 nt, synthetic construct
  misc_feature 1..19: note = siRNA antisense sequence
  source 1..19: mol_type = other RNA
agaaaagtgctcgtcacgt

SEQ ID NO: 33354 - RNA, 19 nt, synthetic construct
  misc_feature 1..19: note = siRNA sense sequence
  source 1..19: mol_type = other RNA
cgtgacgagcacttttcta

SEQ ID NO: 33355 - RNA, 19 nt, synthetic construct
  misc_feature 1..19: note = siRNA antisense sequence
  source 1..19: mol_type = other RNA
tagaaaagtgctcgtcacg

SEQ ID NO: 33356 - RNA, 19 nt, synthetic construct
  misc_feature 1..19: note = siRNA sense sequence
  source 1..19: mol_type = other RNA
gtgacgagcacttttctat

SEQ ID NO: 33357 - RNA, 19 nt, synthetic construct
  misc_feature 1..19: note = siRNA antisense sequence
  source 1..19: mol_type = other RNA
atagaaaagtgctcgtcac

SEQ ID NO: 33358 - RNA, 19 nt, synthetic construct
  misc_feature 1..19: note = siRNA sense sequence
  source 1..19: mol_type = other RNA
tgacgagcacttttctata

SEQ ID NO: 33359 - RNA, 19 nt, synthetic construct
  misc_feature 1..19: note = siRNA antisense sequence
  source 1..19: mol_type = other RNA
tatagaaaagtgctcgtca

SEQ ID NO: 33360 - RNA, 19 nt, synthetic construct
  misc_feature 1..19: note = siRNA sense sequence
  source 1..19: mol_type = other RNA
gacgagcacttttctatac

SEQ ID NO: 33361 - RNA, 19 nt, synthetic construct
  misc_feature 1..19: note = siRNA antisense sequence
  source 1..19: mol_type = other RNA
gtatagaaaagtgctcgtc

SEQ ID NO: 33362 - RNA, 19 nt, synthetic construct
  misc_feature 1..19: note = siRNA sense sequence
  source 1..19: mol_type = other RNA
gctgcagtgagccatgatt

SEQ ID NO: 33363 - RNA, 19 nt, synthetic construct
  misc_feature 1..19: note = siRNA antisense sequence
  source 1..19: mol_type = other RNA
aatcatggctcactgcagc

SEQ ID NO: 33364 - RNA, 19 nt, synthetic construct
  misc_feature 1..19: note = siRNA sense sequence
  source 1..19: mol_type = other RNA
ctgcagtgagccatgattg

SEQ ID NO: 33365 - RNA, 19 nt, synthetic construct
  misc_feature 1..19: note = siRNA antisense sequence
  source 1..19: mol_type = other RNA
caatcatggctcactgcag

SEQ ID NO: 33366 - RNA, 19 nt, synthetic construct
  misc_feature 1..19: note = siRNA sense sequence
  source 1..19: mol_type = other RNA
tgcagtgagccatgattgc

SEQ ID NO: 33367 - RNA, 19 nt, synthetic construct
  misc_feature 1..19: note = siRNA antisense sequence
  source 1..19: mol_type = other RNA
gcaatcatggctcactgca

SEQ ID NO: 33368 - RNA, 19 nt, synthetic construct
  misc_feature 1..19: note = siRNA sense sequence
  source 1..19: mol_type = other RNA
gcagtgagccatgattgca

SEQ ID NO: 33369 - RNA, 19 nt, synthetic construct
  misc_feature 1..19: note = siRNA antisense sequence
  source 1..19: mol_type = other RNA
tgcaatcatggctcactgc

SEQ ID NO: 33370 - RNA, 19 nt, synthetic construct
  misc_feature 1..19: note = siRNA sense sequence
  source 1..19: mol_type = other RNA
gcaccactgcatcctaggc

SEQ ID NO: 33371 - RNA, 19 nt, synthetic construct
  misc_feature 1..19: note = siRNA antisense sequence
  source 1..19: mol_type = other RNA
gcctaggatgcagtggtgc

SEQ ID NO: 33372 - RNA, 19 nt, synthetic construct
  misc_feature 1..19: note = siRNA sense sequence
  source 1..19: mol_type = other RNA
actgcatcctaggctgggt

SEQ ID NO: 33373 - RNA, 19 nt, synthetic construct
  misc_feature 1..19: note = siRNA antisense sequence
  source 1..19: mol_type = other RNA
acccagcctaggatgcagt

SEQ ID NO: 33374 - RNA, 19 nt, synthetic construct
  misc_feature 1..19: note = siRNA sense sequence
  source 1..19: mol_type = other RNA
gcatcctaggctgggtgac

SEQ ID NO: 33375 - RNA, 19 nt, synthetic construct
  misc_feature 1..19: note = siRNA antisense sequence
  source 1..19: mol_type = other RNA
gtcacccagcctaggatgc

SEQ ID NO: 33376 - RNA, 19 nt, synthetic construct
  misc_feature 1..19: note = siRNA sense sequence
  source 1..19: mol_type = other RNA
catcctaggctgggtgact

SEQ ID NO: 33377 - RNA, 19 nt, synthetic construct
  misc_feature 1..19: note = siRNA antisense sequence
  source 1..19: mol_type = other RNA
agtcacccagcctaggatg

SEQ ID NO: 33378 - RNA, 19 nt, synthetic construct
  misc_feature 1..19: note = siRNA sense sequence
  source 1..19: mol_type = other RNA
atcctaggctgggtgactg

SEQ ID NO: 33379 - RNA, 19 nt, synthetic construct
  misc_feature 1..19: note = siRNA antisense sequence
  source 1..19: mol_type = other RNA
cagtcacccagcctaggat

SEQ ID NO: 33380 - RNA, 19 nt, synthetic construct
  misc_feature 1..19: note = siRNA sense sequence
  source 1..19: mol_type = other RNA
cctaggctgggtgactgag

SEQ ID NO: 33381 - RNA, 19 nt, synthetic construct
  misc_feature 1..19: note = siRNA antisense sequence
  source 1..19: mol_type = other RNA
ctcagtcacccagcctagg

SEQ ID NO: 33382 - RNA, 19 nt, synthetic construct
  misc_feature 1..19: note = siRNA sense sequence
  source 1..19: mol_type = other RNA
atgttggaatttcactaag

SEQ ID NO: 33383 - RNA, 19 nt, synthetic construct
  misc_feature 1..19: note = siRNA antisense sequence
  source 1..19: mol_type = other RNA
cttagtgaaattccaacat

SEQ ID NO: 33384 - RNA, 19 nt, synthetic construct
  misc_feature 1..19: note = siRNA sense sequence
  source 1..19: mol_type = other RNA
tgttggaatttcactaagt

SEQ ID NO: 33385 - RNA, 19 nt, synthetic construct
  misc_feature 1..19: note = siRNA antisense sequence
  source 1..19: mol_type = other RNA
acttagtgaaattccaaca

SEQ ID NO: 33386 - RNA, 19 nt, synthetic construct
  misc_feature 1..19: note = siRNA sense sequence
  source 1..19: mol_type = other RNA
gttggaatttcactaagtg

SEQ ID NO: 33387 - RNA, 19 nt, synthetic construct
  misc_feature 1..19: note = siRNA antisense sequence
  source 1..19: mol_type = other RNA
cacttagtgaaattccaac

SEQ ID NO: 33388 - RNA, 19 nt, synthetic construct
  misc_feature 1..19: note = siRNA sense sequence
  source 1..19: mol_type = other RNA
cactaagtgaagaatacct

SEQ ID NO: 33389 - RNA, 19 nt, synthetic construct
  misc_feature 1..19: note = siRNA antisense sequence
  source 1..19: mol_type = other RNA
aggtattcttcacttagtg

SEQ ID NO: 33390 - RNA, 19 nt, synthetic construct
  misc_feature 1..19: note = siRNA sense sequence
  source 1..19: mol_type = other RNA
actaagtgaagaatacctg

SEQ ID NO: 33391 - RNA, 19 nt, synthetic construct
  misc_feature 1..19: note = siRNA antisense sequence
  source 1..19: mol_type = other RNA
caggtattcttcacttagt

SEQ ID NO: 33392 - RNA, 19 nt, synthetic construct
  misc_feature 1..19: note = siRNA sense sequence
  source 1..19: mol_type = other RNA
taagtgaagaatacctgtt

SEQ ID NO: 33393 - RNA, 19 nt, synthetic construct
  misc_feature 1..19: note = siRNA antisense sequence
  source 1..19: mol_type = other RNA
aacaggtattcttcactta

SEQ ID NO: 33394 - RNA, 19 nt, synthetic construct
  misc_feature 1..19: note = siRNA sense sequence
  source 1..19: mol_type = other RNA
aagtgaagaatacctgtta

SEQ ID NO: 33395 - RNA, 19 nt, synthetic construct
  misc_feature 1..19: note = siRNA antisense sequence
  source 1..19: mol_type = other RNA
taacaggtattcttcactt

SEQ ID NO: 33396 - RNA, 19 nt, synthetic construct
  misc_feature 1..19: note = siRNA sense sequence
  source 1..19: mol_type = other RNA
gtgaagaatacctgttata

SEQ ID NO: 33397 - RNA, 19 nt, synthetic construct
  misc_feature 1..19: note = siRNA antisense sequence
  source 1..19: mol_type = other RNA
tataacaggtattcttcac

SEQ ID NO: 33398 - RNA, 19 nt, synthetic construct
  misc_feature 1..19: note = siRNA sense sequence
  source 1..19: mol_type = other RNA
atatgttataggtgatacc

SEQ ID NO: 33399 - RNA, 19 nt, synthetic construct
  misc_feature 1..19: note = siRNA antisense sequence
  source 1..19: mol_type = other RNA
ggtatcacctataacatat

SEQ ID NO: 33400 - RNA, 19 nt, synthetic construct
  misc_feature 1..19: note = siRNA sense sequence
  source 1..19: mol_type = other RNA
tatgttataggtgataccg

SEQ ID NO: 33401 - RNA, 19 nt, synthetic construct
  misc_feature 1..19: note = siRNA antisense sequence
  source 1..19: mol_type = other RNA
cggtatcacctataacata

SEQ ID NO: 33402 - RNA, 19 nt, synthetic construct
  misc_feature 1..19: note = siRNA sense sequence
  source 1..19: mol_type = other RNA
atgttataggtgataccgt

SEQ ID NO: 33403 - RNA, 19 nt, synthetic construct
  misc_feature 1..19: note = siRNA antisense sequence
  source 1..19: mol_type = other RNA
acggtatcacctataacat

SEQ ID NO: 33404 - RNA, 19 nt, synthetic construct
  misc_feature 1..19: note = siRNA sense sequence
  source 1..19: mol_type = other RNA
tgttataggtgataccgta

SEQ ID NO: 33405 - RNA, 19 nt, synthetic construct
  misc_feature 1..19: note = siRNA antisense sequence
  source 1..19: mol_type = other RNA
tacggtatcacctataaca

SEQ ID NO: 33406 - RNA, 19 nt, synthetic construct
  misc_feature 1..19: note = siRNA sense sequence
  source 1..19: mol_type = other RNA
gttataggtgataccgtaa

SEQ ID NO: 33407 - RNA, 19 nt, synthetic construct
  misc_feature 1..19: note = siRNA antisense sequence
  source 1..19: mol_type = other RNA
ttacggtatcacctataac

SEQ ID NO: 33408 - RNA, 19 nt, synthetic construct
  misc_feature 1..19: note = siRNA sense sequence
  source 1..19: mol_type = other RNA
ttataggtgataccgtaag

SEQ ID NO: 33409 - RNA, 19 nt, synthetic construct
  misc_feature 1..19: note = siRNA antisense sequence
  source 1..19: mol_type = other RNA
cttacggtatcacctataa

SEQ ID NO: 33410 - RNA, 19 nt, synthetic construct
  misc_feature 1..19: note = siRNA sense sequence
  source 1..19: mol_type = other RNA
tataggtgataccgtaagg

SEQ ID NO: 33411 - RNA, 19 nt, synthetic construct
  misc_feature 1..19: note = siRNA antisense sequence
  source 1..19: mol_type = other RNA
ccttacggtatcacctata

SEQ ID NO: 33412 - RNA, 19 nt, synthetic construct
  misc_feature 1..19: note = siRNA sense sequence
  source 1..19: mol_type = other RNA
ataggtgataccgtaaggc

SEQ ID NO: 33413 - RNA, 19 nt, synthetic construct
  misc_feature 1..19: note = siRNA antisense sequence
  source 1..19: mol_type = other RNA
gccttacggtatcacctat

SEQ ID NO: 33414 - RNA, 19 nt, synthetic construct
  misc_feature 1..19: note = siRNA sense sequence
  source 1..19: mol_type = other RNA
taggtgataccgtaaggca

SEQ ID NO: 33415 - RNA, 19 nt, synthetic construct
  misc_feature 1..19: note = siRNA antisense sequence
  source 1..19: mol_type = other RNA
tgccttacggtatcaccta

SEQ ID NO: 33416 - RNA, 19 nt, synthetic construct
  misc_feature 1..19: note = siRNA sense sequence
  source 1..19: mol_type = other RNA
tgataccgtaaggcatatg

SEQ ID NO: 33417 - RNA, 19 nt, synthetic construct
  misc_feature 1..19: note = siRNA antisense sequence
  source 1..19: mol_type = other RNA
catatgccttacggtatca

SEQ ID NO: 33418 - RNA, 19 nt, synthetic construct
  misc_feature 1..19: note = siRNA sense sequence
  source 1..19: mol_type = other RNA
gataccgtaaggcatatga

SEQ ID NO: 33419 - RNA, 19 nt, synthetic construct
  misc_feature 1..19: note = siRNA antisense sequence
  source 1..19: mol_type = other RNA
tcatatgccttacggtatc

SEQ ID NO: 33420 - RNA, 19 nt, synthetic construct
  misc_feature 1..19: note = siRNA sense sequence
  source 1..19: mol_type = other RNA
ataccgtaaggcatatgaa

SEQ ID NO: 33421 - RNA, 19 nt, synthetic construct
  misc_feature 1..19: note = siRNA antisense sequence
  source 1..19: mol_type = other RNA
ttcatatgccttacggtat

SEQ ID NO: 33422 - RNA, 19 nt, synthetic construct
  misc_feature 1..19: note = siRNA sense sequence
  source 1..19: mol_type = other RNA
taaggcatatgaatgatca

SEQ ID NO: 33423 - RNA, 19 nt, synthetic construct
  misc_feature 1..19: note = siRNA antisense sequence
  source 1..19: mol_type = other RNA
tgatcattcatatgcctta

SEQ ID NO: 33424 - RNA, 19 nt, synthetic construct
  misc_feature 1..19: note = siRNA sense sequence
  source 1..19: mol_type = other RNA
ttactttggctcctaaatt

SEQ ID NO: 33425 - RNA, 19 nt, synthetic construct
  misc_feature 1..19: note = siRNA antisense sequence
  source 1..19: mol_type = other RNA
aatttaggagccaaagtaa

SEQ ID NO: 33426 - RNA, 19 nt, synthetic construct
  misc_feature 1..19: note = siRNA sense sequence
  source 1..19: mol_type = other RNA
tactttggctcctaaattt

SEQ ID NO: 33427 - RNA, 19 nt, synthetic construct
  misc_feature 1..19: note = siRNA antisense sequence
  source 1..19: mol_type = other RNA
aaatttaggagccaaagta

SEQ ID NO: 33428 - RNA, 19 nt, synthetic construct
  misc_feature 1..19: note = siRNA sense sequence
  source 1..19: mol_type = other RNA
aactccaaattgcactatt

SEQ ID NO: 33429 - RNA, 19 nt, synthetic construct
  misc_feature 1..19: note = siRNA antisense sequence
  source 1..19: mol_type = other RNA
aatagtgcaatttggagtt

SEQ ID NO: 33430 - RNA, 19 nt, synthetic construct
  misc_feature 1..19: note = siRNA sense sequence
  source 1..19: mol_type = other RNA
actccaaattgcactatta

SEQ ID NO: 33431 - RNA, 19 nt, synthetic construct
  misc_feature 1..19: note = siRNA antisense sequence
  source 1..19: mol_type = other RNA
taatagtgcaatttggagt

SEQ ID NO: 33432 - RNA, 19 nt, synthetic construct
  misc_feature 1..19: note = siRNA sense sequence
  source 1..19: mol_type = other RNA
ctccaaattgcactattag

SEQ ID NO: 33433 - RNA, 19 nt, synthetic construct
  misc_feature 1..19: note = siRNA antisense sequence
  source 1..19: mol_type = other RNA
ctaatagtgcaatttggag

SEQ ID NO: 33434 - RNA, 19 nt, synthetic construct
  misc_feature 1..19: note = siRNA sense sequence
  source 1..19: mol_type = other RNA
tccaaattgcactattagg

SEQ ID NO: 33435 - RNA, 19 nt, synthetic construct
  misc_feature 1..19: note = siRNA antisense sequence
  source 1..19: mol_type = other RNA
cctaatagtgcaatttgga

SEQ ID NO: 33436 - RNA, 19 nt, synthetic construct
  misc_feature 1..19: note = siRNA sense sequence
  source 1..19: mol_type = other RNA
ccaaattgcactattaggg

SEQ ID NO: 33437 - RNA, 19 nt, synthetic construct
  misc_feature 1..19: note = siRNA antisense sequence
  source 1..19: mol_type = other RNA
ccctaatagtgcaatttgg

SEQ ID NO: 33438 - RNA, 19 nt, synthetic construct
  misc_feature 1..19: note = siRNA sense sequence
  source 1..19: mol_type = other RNA
caaattgcactattaggga

SEQ ID NO: 33439 - RNA, 19 nt, synthetic construct
  misc_feature 1..19: note = siRNA antisense sequence
  source 1..19: mol_type = other RNA
tccctaatagtgcaatttg

SEQ ID NO: 33440 - RNA, 19 nt, synthetic construct
  misc_feature 1..19: note = siRNA sense sequence
  source 1..19: mol_type = other RNA
aaattgcactattagggaa

SEQ ID NO: 33441 - RNA, 19 nt, synthetic construct
  misc_feature 1..19: note = siRNA antisense sequence
  source 1..19: mol_type = other RNA
ttccctaatagtgcaattt

SEQ ID NO: 33442 - RNA, 19 nt, synthetic construct
  misc_feature 1..19: note = siRNA sense sequence
  source 1..19: mol_type = other RNA
agaatagcttttggctctt

SEQ ID NO: 33443 - RNA, 19 nt, synthetic construct
  misc_feature 1..19: note = siRNA antisense sequence
  source 1..19: mol_type = other RNA
aagagccaaaagctattct

SEQ ID NO: 33444 - RNA, 19 nt, synthetic construct
  misc_feature 1..19: note = siRNA sense sequence
  source 1..19: mol_type = other RNA
gaatagcttttggctcttc

SEQ ID NO: 33445 - RNA, 19 nt, synthetic construct
  misc_feature 1..19: note = siRNA antisense sequence
  source 1..19: mol_type = other RNA
gaagagccaaaagctattc

SEQ ID NO: 33446 - RNA, 19 nt, synthetic construct
  misc_feature 1..19: note = siRNA sense sequence
  source 1..19: mol_type = other RNA
aatagcttttggctcttct

SEQ ID NO: 33447 - RNA, 19 nt, synthetic construct
  misc_feature 1..19: note = siRNA antisense sequence
  source 1..19: mol_type = other RNA
agaagagccaaaagctatt

SEQ ID NO: 33448 - RNA, 19 nt, synthetic construct
  misc_feature 1..19: note = siRNA sense sequence
  source 1..19: mol_type = other RNA
atagcttttggctcttctt

SEQ ID NO: 33449 - RNA, 19 nt, synthetic construct
  misc_feature 1..19: note = siRNA antisense sequence
  source 1..19: mol_type = other RNA
aagaagagccaaaagctat

SEQ ID NO: 33450 - RNA, 19 nt, synthetic construct
  misc_feature 1..19: note = siRNA sense sequence
  source 1..19: mol_type = other RNA
tagcttttggctcttcttg

SEQ ID NO: 33451 - RNA, 19 nt, synthetic construct
  misc_feature 1..19: note = siRNA antisense sequence
  source 1..19: mol_type = other RNA
caagaagagccaaaagcta

SEQ ID NO: 33452 - RNA, 19 nt, synthetic construct
  misc_feature 1..19: note = siRNA sense sequence
  source 1..19: mol_type = other RNA
agcttttggctcttcttgt

SEQ ID NO: 33453 - RNA, 19 nt, synthetic construct
  misc_feature 1..19: note = siRNA antisense sequence
  source 1..19: mol_type = other RNA
acaagaagagccaaaagct

SEQ ID NO: 33454 - RNA, 19 nt, synthetic construct
  misc_feature 1..19: note = siRNA sense sequence
  source 1..19: mol_type = other RNA
gcttttggctcttcttgta

SEQ ID NO: 33455 - RNA, 19 nt, synthetic construct
  misc_feature 1..19: note = siRNA antisense sequence
  source 1..19: mol_type = other RNA
tacaagaagagccaaaagc

SEQ ID NO: 33456 - RNA, 19 nt, synthetic construct
  misc_feature 1..19: note = siRNA sense sequence
  source 1..19: mol_type = other RNA
cttttggctcttcttgtac

SEQ ID NO: 33457 - RNA, 19 nt, synthetic construct
  misc_feature 1..19: note = siRNA antisense sequence
  source 1..19: mol_type = other RNA
gtacaagaagagccaaaag

SEQ ID NO: 33458 - RNA, 19 nt, synthetic construct
  misc_feature 1..19: note = siRNA sense sequence
  source 1..19: mol_type = other RNA
ttttggctcttcttgtact

SEQ ID NO: 33459 - RNA, 19 nt, synthetic construct
  misc_feature 1..19: note = siRNA antisense sequence
  source 1..19: mol_type = other RNA
agtacaagaagagccaaaa

SEQ ID NO: 33460 - RNA, 19 nt, synthetic construct
  misc_feature 1..19: note = siRNA sense sequence
  source 1..19: mol_type = other RNA
tttggctcttcttgtacta

SEQ ID NO: 33461 - RNA, 19 nt, synthetic construct
  misc_feature 1..19: note = siRNA antisense sequence
  source 1..19: mol_type = other RNA
tagtacaagaagagccaaa

SEQ ID NO: 33462 - RNA, 19 nt, synthetic construct
  misc_feature 1..19: note = siRNA sense sequence
  source 1..19: mol_type = other RNA
ttggctcttcttgtactat

SEQ ID NO: 33463 - RNA, 19 nt, synthetic construct
  misc_feature 1..19: note = siRNA antisense sequence
  source 1..19: mol_type = other RNA
atagtacaagaagagccaa

SEQ ID NO: 33464 - RNA, 19 nt, synthetic construct
  misc_feature 1..19: note = siRNA sense sequence
  source 1..19: mol_type = other RNA
gctcttcttgtactatttg

SEQ ID NO: 33465 - RNA, 19 nt, synthetic construct
  misc_feature 1..19: note = siRNA antisense sequence
  source 1..19: mol_type = other RNA
caaatagtacaagaagagc

SEQ ID NO: 33466 - RNA, 19 nt, synthetic construct
  misc_feature 1..19: note = siRNA sense sequence
  source 1..19: mol_type = other RNA
ctcttcttgtactatttga

SEQ ID NO: 33467 - RNA, 19 nt, synthetic construct
  misc_feature 1..19: note = siRNA antisense sequence
  source 1..19: mol_type = other RNA
tcaaatagtacaagaagag

SEQ ID NO: 33468 - RNA, 19 nt, synthetic construct
  misc_feature 1..19: note = siRNA sense sequence
  source 1..19: mol_type = other RNA
taactggttactgtcttct

SEQ ID NO: 33469 - RNA, 19 nt, synthetic construct
  misc_feature 1..19: note = siRNA antisense sequence
  source 1..19: mol_type = other RNA
agaagacagtaaccagtta

SEQ ID NO: 33470 - RNA, 19 nt, synthetic construct
  misc_feature 1..19: note = siRNA sense sequence
  source 1..19: mol_type = other RNA
aactggttactgtcttctg

SEQ ID NO: 33471 - RNA, 19 nt, synthetic construct
  misc_feature 1..19: note = siRNA antisense sequence
  source 1..19: mol_type = other RNA
cagaagacagtaaccagtt

SEQ ID NO: 33472 - RNA, 19 nt, synthetic construct
  misc_feature 1..19: note = siRNA sense sequence
  source 1..19: mol_type = other RNA
actggttactgtcttctgc

SEQ ID NO: 33473 - RNA, 19 nt, synthetic construct
  misc_feature 1..19: note = siRNA antisense sequence
  source 1..19: mol_type = other RNA
gcagaagacagtaaccagt

SEQ ID NO: 33474 - RNA, 19 nt, synthetic construct
  misc_feature 1..19: note = siRNA sense sequence
  source 1..19: mol_type = other RNA
ctggttactgtcttctgca

SEQ ID NO: 33475 - RNA, 19 nt, synthetic construct
  misc_feature 1..19: note = siRNA antisense sequence
  source 1..19: mol_type = other RNA
tgcagaagacagtaaccag

SEQ ID NO: 33476 - RNA, 19 nt, synthetic construct
  misc_feature 1..19: note = siRNA sense sequence
  source 1..19: mol_type = other RNA
ttactgtcttctgcacact

SEQ ID NO: 33477 - RNA, 19 nt, synthetic construct
  misc_feature 1..19: note = siRNA antisense sequence
  source 1..19: mol_type = other RNA
agtgtgcagaagacagtaa

SEQ ID NO: 33478 - RNA, 19 nt, synthetic construct
  misc_feature 1..19: note = siRNA sense sequence
  source 1..19: mol_type = other RNA
tactgtcttctgcacactt

SEQ ID NO: 33479 - RNA, 19 nt, synthetic construct
  misc_feature 1..19: note = siRNA antisense sequence
  source 1..19: mol_type = other RNA
aagtgtgcagaagacagta

SEQ ID NO: 33480 - RNA, 19 nt, synthetic construct
  misc_feature 1..19: note = siRNA sense sequence
  source 1..19: mol_type = other RNA
tcttctgcacacttttagg

SEQ ID NO: 33481 - RNA, 19 nt, synthetic construct
  misc_feature 1..19: note = siRNA antisense sequence
  source 1..19: mol_type = other RNA
cctaaaagtgtgcagaaga

SEQ ID NO: 33482 - RNA, 19 nt, synthetic construct
  misc_feature 1..19: note = siRNA sense sequence
  source 1..19: mol_type = other RNA
cttctgcacacttttagga

SEQ ID NO: 33483 - RNA, 19 nt, synthetic construct
  misc_feature 1..19: note = siRNA antisense sequence
  source 1..19: mol_type = other RNA
tcctaaaagtgtgcagaag

SEQ ID NO: 33484 - RNA, 19 nt, synthetic construct
  misc_feature 1..19: note = siRNA sense sequence
  source 1..19: mol_type = other RNA
ttctgcacacttttaggat

SEQ ID NO: 33485 - RNA, 19 nt, synthetic construct
  misc_feature 1..19: note = siRNA antisense sequence
  source 1..19: mol_type = other RNA
atcctaaaagtgtgcagaa

SEQ ID NO: 33486 - RNA, 19 nt, synthetic construct
  misc_feature 1..19: note = siRNA sense sequence
  source 1..19: mol_type = other RNA
ctgcacacttttaggatgt

SEQ ID NO: 33487 - RNA, 19 nt, synthetic construct
  misc_feature 1..19: note = siRNA antisense sequence
  source 1..19: mol_type = other RNA
acatcctaaaagtgtgcag

SEQ ID NO: 33488 - RNA, 19 nt, synthetic construct
  misc_feature 1..19: note = siRNA sense sequence
  source 1..19: mol_type = other RNA
tgcacacttttaggatgtc

SEQ ID NO: 33489 - RNA, 19 nt, synthetic construct
  misc_feature 1..19: note = siRNA antisense sequence
  source 1..19: mol_type = other RNA
gacatcctaaaagtgtgca

SEQ ID NO: 33490 - RNA, 19 nt, synthetic construct
  misc_feature 1..19: note = siRNA sense sequence
  source 1..19: mol_type = other RNA
gcacacttttaggatgtca

SEQ ID NO: 33491 - RNA, 19 nt, synthetic construct
  misc_feature 1..19: note = siRNA antisense sequence
  source 1..19: mol_type = other RNA
tgacatcctaaaagtgtgc

SEQ ID NO: 33492 - RNA, 19 nt, synthetic construct
  misc_feature 1..19: note = siRNA sense sequence
  source 1..19: mol_type = other RNA
acttttaggatgtcattgg

SEQ ID NO: 33493 - RNA, 19 nt, synthetic construct
  misc_feature 1..19: note = siRNA antisense sequence
  source 1..19: mol_type = other RNA
ccaatgacatcctaaaagt

SEQ ID NO: 33494 - RNA, 19 nt, synthetic construct
  misc_feature 1..19: note = siRNA sense sequence
  source 1..19: mol_type = other RNA
ttaggatgtcattggttca

SEQ ID NO: 33495 - RNA, 19 nt, synthetic construct
  misc_feature 1..19: note = siRNA antisense sequence
  source 1..19: mol_type = other RNA
tgaaccaatgacatcctaa

SEQ ID NO: 33496 - RNA, 19 nt, synthetic construct
  misc_feature 1..19: note = siRNA sense sequence
  source 1..19: mol_type = other RNA
taggatgtcattggttcaa

SEQ ID NO: 33497 - RNA, 19 nt, synthetic construct
  misc_feature 1..19: note = siRNA antisense sequence
  source 1..19: mol_type = other RNA
ttgaaccaatgacatccta

SEQ ID NO: 33498 - RNA, 19 nt, synthetic construct
  misc_feature 1..19: note = siRNA sense sequence
  source 1..19: mol_type = other RNA
gttcaatctcagggtcaag

SEQ ID NO: 33499 - RNA, 19 nt, synthetic construct
  misc_feature 1..19: note = siRNA antisense sequence
  source 1..19: mol_type = other RNA
cttgaccctgagattgaac

SEQ ID NO: 33500 - RNA, 19 nt, synthetic construct
  misc_feature 1..19: note = siRNA sense sequence
  source 1..19: mol_type = other RNA
ttcaatctcagggtcaagt

SEQ ID NO: 33501 - RNA, 19 nt, synthetic construct
  misc_feature 1..19: note = siRNA antisense sequence
  source 1..19: mol_type = other RNA
acttgaccctgagattgaa

SEQ ID NO: 33502 - RNA, 19 nt, synthetic construct
  misc_feature 1..19: note = siRNA sense sequence
  source 1..19: mol_type = other RNA
tcaatctcagggtcaagtc

SEQ ID NO: 33503 - RNA, 19 nt, synthetic construct
  misc_feature 1..19: note = siRNA antisense sequence
  source 1..19: mol_type = other RNA
gacttgaccctgagattga

SEQ ID NO: 33504 - RNA, 19 nt, synthetic construct
  misc_feature 1..19: note = siRNA sense sequence
  source 1..19: mol_type = other RNA
caatctcagggtcaagtct

SEQ ID NO: 33505 - RNA, 19 nt, synthetic construct
  misc_feature 1..19: note = siRNA antisense sequence
  source 1..19: mol_type = other RNA
agacttgaccctgagattg

SEQ ID NO: 33506 - RNA, 19 nt, synthetic construct
  misc_feature 1..19: note = siRNA sense sequence
  source 1..19: mol_type = other RNA
aatctcagggtcaagtctt

SEQ ID NO: 33507 - RNA, 19 nt, synthetic construct
  misc_feature 1..19: note = siRNA antisense sequence
  source 1..19: mol_type = other RNA
aagacttgaccctgagatt

SEQ ID NO: 33508 - RNA, 19 nt, synthetic construct
  misc_feature 1..19: note = siRNA sense sequence
  source 1..19: mol_type = other RNA
ggtcaagtcttacccaact

SEQ ID NO: 33509 - RNA, 19 nt, synthetic construct
  misc_feature 1..19: note = siRNA antisense sequence
  source 1..19: mol_type = other RNA
agttgggtaagacttgacc

SEQ ID NO: 33510 - RNA, 19 nt, synthetic construct
  misc_feature 1..19: note = siRNA sense sequence
  source 1..19: mol_type = other RNA
gtcaagtcttacccaactg

SEQ ID NO: 33511 - RNA, 19 nt, synthetic construct
  misc_feature 1..19: note = siRNA antisense sequence
  source 1..19: mol_type = other RNA
cagttgggtaagacttgac

SEQ ID NO: 33512 - RNA, 19 nt, synthetic construct
  misc_feature 1..19: note = siRNA sense sequence
  source 1..19: mol_type = other RNA
tcaagtcttacccaactgt

SEQ ID NO: 33513 - RNA, 19 nt, synthetic construct
  misc_feature 1..19: note = siRNA antisense sequence
  source 1..19: mol_type = other RNA
acagttgggtaagacttga

SEQ ID NO: 33514 - RNA, 19 nt, synthetic construct
  misc_feature 1..19: note = siRNA sense sequence
  source 1..19: mol_type = other RNA
caagtcttacccaactgtc

SEQ ID NO: 33515 - RNA, 19 nt, synthetic construct
  misc_feature 1..19: note = siRNA antisense sequence
  source 1..19: mol_type = other RNA
gacagttgggtaagacttg

SEQ ID NO: 33516 - RNA, 19 nt, synthetic construct
  misc_feature 1..19: note = siRNA sense sequence
  source 1..19: mol_type = other RNA
aagtcttacccaactgtcc

SEQ ID NO: 33517 - RNA, 19 nt, synthetic construct
  misc_feature 1..19: note = siRNA antisense sequence
  source 1..19: mol_type = other RNA
ggacagttgggtaagactt

SEQ ID NO: 33518 - RNA, 19 nt, synthetic construct
  misc_feature 1..19: note = siRNA sense sequence
  source 1..19: mol_type = other RNA
agtcttacccaactgtcct

SEQ ID NO: 33519 - RNA, 19 nt, synthetic construct
  misc_feature 1..19: note = siRNA antisense sequence
  source 1..19: mol_type = other RNA
aggacagttgggtaagact

SEQ ID NO: 33520 - RNA, 19 nt, synthetic construct
  misc_feature 1..19: note = siRNA sense sequence
  source 1..19: mol_type = other RNA
gtcttacccaactgtccta

SEQ ID NO: 33521 - RNA, 19 nt, synthetic construct
  misc_feature 1..19: note = siRNA antisense sequence
  source 1..19: mol_type = other RNA
taggacagttgggtaagac

SEQ ID NO: 33522 - RNA, 19 nt, synthetic construct
  misc_feature 1..19: note = siRNA sense sequence
  source 1..19: mol_type = other RNA
tcttacccaactgtcctat

SEQ ID NO: 33523 - RNA, 19 nt, synthetic construct
  misc_feature 1..19: note = siRNA antisense sequence
  source 1..19: mol_type = other RNA
ataggacagttgggtaaga

SEQ ID NO: 33524 - RNA, 19 nt, synthetic construct
  misc_feature 1..19: note = siRNA sense sequence
  source 1..19: mol_type = other RNA
cttacccaactgtcctatg

SEQ ID NO: 33525 - RNA, 19 nt, synthetic construct
  misc_feature 1..19: note = siRNA antisense sequence
  source 1..19: mol_type = other RNA
cataggacagttgggtaag

SEQ ID NO: 33526 - RNA, 19 nt, synthetic construct
  misc_feature 1..19: note = siRNA sense sequence
  source 1..19: mol_type = other RNA
cccaactgtcctatgtact

SEQ ID NO: 33527 - RNA, 19 nt, synthetic construct
  misc_feature 1..19: note = siRNA antisense sequence
  source 1..19: mol_type = other RNA
agtacataggacagttggg

SEQ ID NO: 33528 - RNA, 19 nt, synthetic construct
  misc_feature 1..19: note = siRNA sense sequence
  source 1..19: mol_type = other RNA
ccaactgtcctatgtactc

SEQ ID NO: 33529 - RNA, 19 nt, synthetic construct
  misc_feature 1..19: note = siRNA antisense sequence
  source 1..19: mol_type = other RNA
gagtacataggacagttgg

SEQ ID NO: 33530 - RNA, 19 nt, synthetic construct
  misc_feature 1..19: note = siRNA sense sequence
  source 1..19: mol_type = other RNA
caactgtcctatgtactct

SEQ ID NO: 33531 - RNA, 19 nt, synthetic construct
  misc_feature 1..19: note = siRNA antisense sequence
  source 1..19: mol_type = other RNA
agagtacataggacagttg

SEQ ID NO: 33532 - RNA, 19 nt, synthetic construct
  misc_feature 1..19: note = siRNA sense sequence
  source 1..19: mol_type = other RNA
tgtcctatgtactctgtcc

SEQ ID NO: 33533 - RNA, 19 nt, synthetic construct
  misc_feature 1..19: note = siRNA antisense sequence
  source 1..19: mol_type = other RNA
ggacagagtacataggaca

SEQ ID NO: 33534 - RNA, 19 nt, synthetic construct
  misc_feature 1..19: note = siRNA sense sequence
  source 1..19: mol_type = other RNA
gtcctatgtactctgtcca

SEQ ID NO: 33535 - RNA, 19 nt, synthetic construct
  misc_feature 1..19: note = siRNA antisense sequence
  source 1..19: mol_type = other RNA
tggacagagtacataggac

SEQ ID NO: 33536 - RNA, 19 nt, synthetic construct
  misc_feature 1..19: note = siRNA sense sequence
  source 1..19: mol_type = other RNA
tcctatgtactctgtccat

SEQ ID NO: 33537 - RNA, 19 nt, synthetic construct
  misc_feature 1..19: note = siRNA antisense sequence
  source 1..19: mol_type = other RNA
atggacagagtacatagga

SEQ ID NO: 33538 - RNA, 19 nt, synthetic construct
  misc_feature 1..19: note = siRNA sense sequence
  source 1..19: mol_type = other RNA
cctatgtactctgtccatt

SEQ ID NO: 33539 - RNA, 19 nt, synthetic construct
  misc_feature 1..19: note = siRNA antisense sequence
  source 1..19: mol_type = other RNA
aatggacagagtacatagg

SEQ ID NO: 33540 - RNA, 19 nt, synthetic construct
  misc_feature 1..19: note = siRNA sense sequence
  source 1..19: mol_type = other RNA
ctatgtactctgtccattc

SEQ ID NO: 33541 - RNA, 19 nt, synthetic construct
  misc_feature 1..19: note = siRNA antisense sequence
  source 1..19: mol_type = other RNA
gaatggacagagtacatag

SEQ ID NO: 33542 - RNA, 19 nt, synthetic construct
  misc_feature 1..19: note = siRNA sense sequence
  source 1..19: mol_type = other RNA
tatgtactctgtccattca

SEQ ID NO: 33543 - RNA, 19 nt, synthetic construct
  misc_feature 1..19: note = siRNA antisense sequence
  source 1..19: mol_type = other RNA
tgaatggacagagtacata

SEQ ID NO: 33544 - RNA, 19 nt, synthetic construct
  misc_feature 1..19: note = siRNA sense sequence
  source 1..19: mol_type = other RNA
atgtactctgtccattcat

SEQ ID NO: 33545 - RNA, 19 nt, synthetic construct
  misc_feature 1..19: note = siRNA antisense sequence
  source 1..19: mol_type = other RNA
atgaatggacagagtacat

SEQ ID NO: 33546 - RNA, 19 nt, synthetic construct
  misc_feature 1..19: note = siRNA sense sequence
  source 1..19: mol_type = other RNA
tgtactctgtccattcatg

SEQ ID NO: 33547 - RNA, 19 nt, synthetic construct
  misc_feature 1..19: note = siRNA antisense sequence
  source 1..19: mol_type = other RNA
catgaatggacagagtaca

SEQ ID NO: 33548 - RNA, 19 nt, synthetic construct
  misc_feature 1..19: note = siRNA sense sequence
  source 1..19: mol_type = other RNA
gtactctgtccattcatgc

SEQ ID NO: 33549 - RNA, 19 nt, synthetic construct
  misc_feature 1..19: note = siRNA antisense sequence
  source 1..19: mol_type = other RNA
gcatgaatggacagagtac

SEQ ID NO: 33550 - RNA, 19 nt, synthetic construct
  misc_feature 1..19: note = siRNA sense sequence
  source 1..19: mol_type = other RNA
tactctgtccattcatgcc

SEQ ID NO: 33551 - RNA, 19 nt, synthetic construct
  misc_feature 1..19: note = siRNA antisense sequence
  source 1..19: mol_type = other RNA
ggcatgaatggacagagta

SEQ ID NO: 33552 - RNA, 19 nt, synthetic construct
  misc_feature 1..19: note = siRNA sense sequence
  source 1..19: mol_type = other RNA
actctgtccattcatgcct

SEQ ID NO: 33553 - RNA, 19 nt, synthetic construct
  misc_feature 1..19: note = siRNA antisense sequence
  source 1..19: mol_type = other RNA
aggcatgaatggacagagt

SEQ ID NO: 33554 - RNA, 19 nt, synthetic construct
  misc_feature 1..19: note = siRNA sense sequence
  source 1..19: mol_type = other RNA
tgtccattcatgccttaaa

SEQ ID NO: 33555 - RNA, 19 nt, synthetic construct
  misc_feature 1..19: note = siRNA antisense sequence
  source 1..19: mol_type = other RNA
tttaaggcatgaatggaca

SEQ ID NO: 33556 - RNA, 19 nt, synthetic construct
  misc_feature 1..19: note = siRNA sense sequence
  source 1..19: mol_type = other RNA
gtccattcatgccttaaaa

SEQ ID NO: 33557 - RNA, 19 nt, synthetic construct
  misc_feature 1..19: note = siRNA antisense sequence
  source 1..19: mol_type = other RNA
ttttaaggcatgaatggac

SEQ ID NO: 33558 - RNA, 19 nt, synthetic construct
  misc_feature 1..19: note = siRNA sense sequence
  source 1..19: mol_type = other RNA
aagttgtacctttattagc

SEQ ID NO: 33559 - RNA, 19 nt, synthetic construct
  misc_feature 1..19: note = siRNA antisense sequence
  source 1..19: mol_type = other RNA
gctaataaaggtacaactt

SEQ ID NO: 33560 - RNA, 19 nt, synthetic construct
  misc_feature 1..19: note = siRNA sense sequence
  source 1..19: mol_type = other RNA
agttgtacctttattagca

SEQ ID NO: 33561 - RNA, 19 nt, synthetic construct
  misc_feature 1..19: note = siRNA antisense sequence
  source 1..19: mol_type = other RNA
tgctaataaaggtacaact

SEQ ID NO: 33562 - RNA, 19 nt, synthetic construct
  misc_feature 1..19: note = siRNA sense sequence
  source 1..19: mol_type = other RNA
gttgtacctttattagcag

SEQ ID NO: 33563 - RNA, 19 nt, synthetic construct
  misc_feature 1..19: note = siRNA antisense sequence
  source 1..19: mol_type = other RNA
ctgctaataaaggtacaac

SEQ ID NO: 33564 - RNA, 19 nt, synthetic construct
  misc_feature 1..19: note = siRNA sense sequence
  source 1..19: mol_type = other RNA
cttctcagtaagatatgtg

SEQ ID NO: 33565 - RNA, 19 nt, synthetic construct
  misc_feature 1..19: note = siRNA antisense sequence
  source 1..19: mol_type = other RNA
cacatatcttactgagaag

SEQ ID NO: 33566 - RNA, 19 nt, synthetic construct
  misc_feature 1..19: note = siRNA sense sequence
  source 1..19: mol_type = other RNA
cagtaagatatgtgagctg

SEQ ID NO: 33567 - RNA, 19 nt, synthetic construct
  misc_feature 1..19: note = siRNA antisense sequence
  source 1..19: mol_type = other RNA
cagctcacatatcttactg

SEQ ID NO: 33568 - RNA, 19 nt, synthetic construct
  misc_feature 1..19: note = siRNA sense sequence
  source 1..19: mol_type = other RNA
agtaagatatgtgagctgg

SEQ ID NO: 33569 - RNA, 19 nt, synthetic construct
  misc_feature 1..19: note = siRNA antisense sequence
  source 1..19: mol_type = other RNA
ccagctcacatatcttact

SEQ ID NO: 33570 - RNA, 19 nt, synthetic construct
  misc_feature 1..19: note = siRNA sense sequence
  source 1..19: mol_type = other RNA
gtaagatatgtgagctggc

SEQ ID NO: 33571 - RNA, 19 nt, synthetic construct
  misc_feature 1..19: note = siRNA antisense sequence
  source 1..19: mol_type = other RNA
gccagctcacatatcttac

SEQ ID NO: 33572 - RNA, 19 nt, synthetic construct
  misc_feature 1..19: note = siRNA sense sequence
  source 1..19: mol_type = other RNA
taagatatgtgagctggca

SEQ ID NO: 33573 - RNA, 19 nt, synthetic construct
  misc_feature 1..19: note = siRNA antisense sequence
  source 1..19: mol_type = other RNA
tgccagctcacatatctta

SEQ ID NO: 33574 - RNA, 19 nt, synthetic construct
  misc_feature 1..19: note = siRNA sense sequence
  source 1..19: mol_type = other RNA
aagatatgtgagctggcaa

SEQ ID NO: 33575 - RNA, 19 nt, synthetic construct
  misc_feature 1..19: note = siRNA antisense sequence
  source 1..19: mol_type = other RNA
ttgccagctcacatatctt

SEQ ID NO: 33576 - RNA, 19 nt, synthetic construct
  misc_feature 1..19: note = siRNA sense sequence
  source 1..19: mol_type = other RNA
agatatgtgagctggcaac

SEQ ID NO: 33577 - RNA, 19 nt, synthetic construct
  misc_feature 1..19: note = siRNA antisense sequence
  source 1..19: mol_type = other RNA
gttgccagctcacatatct

SEQ ID NO: 33578 - RNA, 19 nt, synthetic construct
  misc_feature 1..19: note = siRNA sense sequence
  source 1..19: mol_type = other RNA
cacattgccaatcctatgg

SEQ ID NO: 33579 - RNA, 19 nt, synthetic construct
  misc_feature 1..19: note = siRNA antisense sequence
  source 1..19: mol_type = other RNA
ccataggattggcaatgtg

SEQ ID NO: 33580 - RNA, 19 nt, synthetic construct
  misc_feature 1..19: note = siRNA sense sequence
  source 1..19: mol_type = other RNA
acattgccaatcctatggt

SEQ ID NO: 33581 - RNA, 19 nt, synthetic construct
  misc_feature 1..19: note = siRNA antisense sequence
  source 1..19: mol_type = other RNA
accataggattggcaatgt

SEQ ID NO: 33582 - RNA, 19 nt, synthetic construct
  misc_feature 1..19: note = siRNA sense sequence
  source 1..19: mol_type = other RNA
cattgccaatcctatggtt

SEQ ID NO: 33583 - RNA, 19 nt, synthetic construct
  misc_feature 1..19: note = siRNA antisense sequence
  source 1..19: mol_type = other RNA
aaccataggattggcaatg

SEQ ID NO: 33584 - RNA, 19 nt, synthetic construct
  misc_feature 1..19: note = siRNA sense sequence
  source 1..19: mol_type = other RNA
attgccaatcctatggtta

SEQ ID NO: 33585 - RNA, 19 nt, synthetic construct
  misc_feature 1..19: note = siRNA antisense sequence
  source 1..19: mol_type = other RNA
taaccataggattggcaat

SEQ ID NO: 33586 - RNA, 19 nt, synthetic construct
  misc_feature 1..19: note = siRNA sense sequence
  source 1..19: mol_type = other RNA
ttgccaatcctatggttat

SEQ ID NO: 33587 - RNA, 19 nt, synthetic construct
  misc_feature 1..19: note = siRNA antisense sequence
  source 1..19: mol_type = other RNA
ataaccataggattggcaa

SEQ ID NO: 33588 - RNA, 19 nt, synthetic construct
  misc_feature 1..19: note = siRNA sense sequence
  source 1..19: mol_type = other RNA
tgccaatcctatggttatt

SEQ ID NO: 33589 - RNA, 19 nt, synthetic construct
  misc_feature 1..19: note = siRNA antisense sequence
  source 1..19: mol_type = other RNA
aataaccataggattggca

SEQ ID NO: 33590 - RNA, 19 nt, synthetic construct
  misc_feature 1..19: note = siRNA sense sequence
  source 1..19: mol_type = other RNA
gccaatcctatggttattt

SEQ ID NO: 33591 - RNA, 19 nt, synthetic construct
  misc_feature 1..19: note = siRNA antisense sequence
  source 1..19: mol_type = other RNA
aaataaccataggattggc

SEQ ID NO: 33592 - RNA, 19 nt, synthetic construct
  misc_feature 1..19: note = siRNA sense sequence
  source 1..19: mol_type = other RNA
caataggtagtttcatggg

SEQ ID NO: 33593 - RNA, 19 nt, synthetic construct
  misc_feature 1..19: note = siRNA antisense sequence
  source 1..19: mol_type = other RNA
cccatgaaactacctattg

SEQ ID NO: 33594 - RNA, 19 nt, synthetic construct
  misc_feature 1..19: note = siRNA sense sequence
  source 1..19: mol_type = other RNA
aataggtagtttcatgggt

SEQ ID NO: 33595 - RNA, 19 nt, synthetic construct
  misc_feature 1..19: note = siRNA antisense sequence
  source 1..19: mol_type = other RNA
acccatgaaactacctatt

SEQ ID NO: 33596 - RNA, 19 nt, synthetic construct
  misc_feature 1..19: note = siRNA sense sequence
  source 1..19: mol_type = other RNA
ataggtagtttcatgggtc

SEQ ID NO: 33597 - RNA, 19 nt, synthetic construct
  misc_feature 1..19: note = siRNA antisense sequence
  source 1..19: mol_type = other RNA
gacccatgaaactacctat

SEQ ID NO: 33598 - RNA, 19 nt, synthetic construct
  misc_feature 1..19: note = siRNA sense sequence
  source 1..19: mol_type = other RNA
taggtagtttcatgggtca

SEQ ID NO: 33599 - RNA, 19 nt, synthetic construct
  misc_feature 1..19: note = siRNA antisense sequence
  source 1..19: mol_type = other RNA
tgacccatgaaactaccta

SEQ ID NO: 33600 - RNA, 19 nt, synthetic construct
  misc_feature 1..19: note = siRNA sense sequence
  source 1..19: mol_type = other RNA
aggtagtttcatgggtcag

SEQ ID NO: 33601 - RNA, 19 nt, synthetic construct
  misc_feature 1..19: note = siRNA antisense sequence
  source 1..19: mol_type = other RNA
ctgacccatgaaactacct

SEQ ID NO: 33602 - RNA, 19 nt, synthetic construct
  misc_feature 1..19: note = siRNA sense sequence
  source 1..19: mol_type = other RNA
ggtagtttcatgggtcagg

SEQ ID NO: 33603 - RNA, 19 nt, synthetic construct
  misc_feature 1..19: note = siRNA antisense sequence
  source 1..19: mol_type = other RNA
cctgacccatgaaactacc

SEQ ID NO: 33604 - RNA, 19 nt, synthetic construct
  misc_feature 1..19: note = siRNA sense sequence
  source 1..19: mol_type = other RNA
ttcagttctctaatttcca

SEQ ID NO: 33605 - RNA, 19 nt, synthetic construct
  misc_feature 1..19: note = siRNA antisense sequence
  source 1..19: mol_type = other RNA
tggaaattagagaactgaa

SEQ ID NO: 33606 - RNA, 19 nt, synthetic construct
  misc_feature 1..19: note = siRNA sense sequence
  source 1..19: mol_type = other RNA
tcagttctctaatttccac

SEQ ID NO: 33607 - RNA, 19 nt, synthetic construct
  misc_feature 1..19: note = siRNA antisense sequence
  source 1..19: mol_type = other RNA
gtggaaattagagaactga

SEQ ID NO: 33608 - RNA, 19 nt, synthetic construct
  misc_feature 1..19: note = siRNA sense sequence
  source 1..19: mol_type = other RNA
agaagtaagataactcact

SEQ ID NO: 33609 - RNA, 19 nt, synthetic construct
  misc_feature 1..19: note = siRNA antisense sequence
  source 1..19: mol_type = other RNA
agtgagttatcttacttct

SEQ ID NO: 33610 - RNA, 19 nt, synthetic construct
  misc_feature 1..19: note = siRNA sense sequence
  source 1..19: mol_type = other RNA
gaagtaagataactcactg

SEQ ID NO: 33611 - RNA, 19 nt, synthetic construct
  misc_feature 1..19: note = siRNA antisense sequence
  source 1..19: mol_type = other RNA
cagtgagttatcttacttc

SEQ ID NO: 33612 - RNA, 19 nt, synthetic construct
  misc_feature 1..19: note = siRNA sense sequence
  source 1..19: mol_type = other RNA
aagtaagataactcactgt

SEQ ID NO: 33613 - RNA, 19 nt, synthetic construct
  misc_feature 1..19: note = siRNA antisense sequence
  source 1..19: mol_type = other RNA
acagtgagttatcttactt

SEQ ID NO: 33614 - RNA, 19 nt, synthetic construct
  misc_feature 1..19: note = siRNA sense sequence
  source 1..19: mol_type = other RNA
agtaagataactcactgtc

SEQ ID NO: 33615 - RNA, 19 nt, synthetic construct
  misc_feature 1..19: note = siRNA antisense sequence
  source 1..19: mol_type = other RNA
gacagtgagttatcttact

SEQ ID NO: 33616 - RNA, 19 nt, synthetic construct
  misc_feature 1..19: note = siRNA sense sequence
  source 1..19: mol_type = other RNA
gtaagataactcactgtcc

SEQ ID NO: 33617 - RNA, 19 nt, synthetic construct
  misc_feature 1..19: note = siRNA antisense sequence
  source 1..19: mol_type = other RNA
ggacagtgagttatcttac

SEQ ID NO: 33618 - RNA, 19 nt, synthetic construct
  misc_feature 1..19: note = siRNA sense sequence
  source 1..19: mol_type = other RNA
taagataactcactgtccc

SEQ ID NO: 33619 - RNA, 19 nt, synthetic construct
  misc_feature 1..19: note = siRNA antisense sequence
  source 1..19: mol_type = other RNA
gggacagtgagttatctta

SEQ ID NO: 33620 - RNA, 19 nt, synthetic construct
  misc_feature 1..19: note = siRNA sense sequence
  source 1..19: mol_type = other RNA
aagataactcactgtccct

SEQ ID NO: 33621 - RNA, 19 nt, synthetic construct
  misc_feature 1..19: note = siRNA antisense sequence
  source 1..19: mol_type = other RNA
agggacagtgagttatctt

SEQ ID NO: 33622 - RNA, 19 nt, synthetic construct
  misc_feature 1..19: note = siRNA sense sequence
  source 1..19: mol_type = other RNA
agataactcactgtcccta

SEQ ID NO: 33623 - RNA, 19 nt, synthetic construct
  misc_feature 1..19: note = siRNA antisense sequence
  source 1..19: mol_type = other RNA
tagggacagtgagttatct

SEQ ID NO: 33624 - RNA, 19 nt, synthetic construct
  misc_feature 1..19: note = siRNA sense sequence
  source 1..19: mol_type = other RNA
gataactcactgtccctag

SEQ ID NO: 33625 - RNA, 19 nt, synthetic construct
  misc_feature 1..19: note = siRNA antisense sequence
  source 1..19: mol_type = other RNA
ctagggacagtgagttatc

SEQ ID NO: 33626 - RNA, 19 nt, synthetic construct
  misc_feature 1..19: note = siRNA sense sequence
  source 1..19: mol_type = other RNA
ataactcactgtccctagg

SEQ ID NO: 33627 - RNA, 19 nt, synthetic construct
  misc_feature 1..19: note = siRNA antisense sequence
  source 1..19: mol_type = other RNA
cctagggacagtgagttat

SEQ ID NO: 33628 - RNA, 19 nt, synthetic construct
  misc_feature 1..19: note = siRNA sense sequence
  source 1..19: mol_type = other RNA
taactcactgtccctaggt

SEQ ID NO: 33629 - RNA, 19 nt, synthetic construct
  misc_feature 1..19: note = siRNA antisense sequence
  source 1..19: mol_type = other RNA
acctagggacagtgagtta

SEQ ID NO: 33630 - RNA, 19 nt, synthetic construct
  misc_feature 1..19: note = siRNA sense sequence
  source 1..19: mol_type = other RNA
aactcactgtccctaggtg

SEQ ID NO: 33631 - RNA, 19 nt, synthetic construct
  misc_feature 1..19: note = siRNA antisense sequence
  source 1..19: mol_type = other RNA
cacctagggacagtgagtt

SEQ ID NO: 33632 - RNA, 19 nt, synthetic construct
  misc_feature 1..19: note = siRNA sense sequence
  source 1..19: mol_type = other RNA
cactgtccctaggtgaagc

SEQ ID NO: 33633 - RNA, 19 nt, synthetic construct
  misc_feature 1..19: note = siRNA antisense sequence
  source 1..19: mol_type = other RNA
gcttcacctagggacagtg

SEQ ID NO: 33634 - RNA, 19 nt, synthetic construct
  misc_feature 1..19: note = siRNA sense sequence
  source 1..19: mol_type = other RNA
actgtccctaggtgaagca

SEQ ID NO: 33635 - RNA, 19 nt, synthetic construct
  misc_feature 1..19: note = siRNA antisense sequence
  source 1..19: mol_type = other RNA
tgcttcacctagggacagt

SEQ ID NO: 33636 - RNA, 19 nt, synthetic construct
  misc_feature 1..19: note = siRNA sense sequence
  source 1..19: mol_type = other RNA
ctgtccctaggtgaagcaa

SEQ ID NO: 33637 - RNA, 19 nt, synthetic construct
  misc_feature 1..19: note = siRNA antisense sequence
  source 1..19: mol_type = other RNA
ttgcttcacctagggacag

SEQ ID NO: 33638 - RNA, 19 nt, synthetic construct
  misc_feature 1..19: note = siRNA sense sequence
  source 1..19: mol_type = other RNA
tgtccctaggtgaagcaat

SEQ ID NO: 33639 - RNA, 19 nt, synthetic construct
  misc_feature 1..19: note = siRNA antisense sequence
  source 1..19: mol_type = other RNA
attgcttcacctagggaca

SEQ ID NO: 33640 - RNA, 19 nt, synthetic construct
  misc_feature 1..19: note = siRNA sense sequence
  source 1..19: mol_type = other RNA
gtccctaggtgaagcaatg

SEQ ID NO: 33641 - RNA, 19 nt, synthetic construct
  misc_feature 1..19: note = siRNA antisense sequence
  source 1..19: mol_type = other RNA
cattgcttcacctagggac

SEQ ID NO: 33642 - RNA, 19 nt, synthetic construct
  misc_feature 1..19: note = siRNA sense sequence
  source 1..19: mol_type = other RNA
tccctaggtgaagcaatga

SEQ ID NO: 33643 - RNA, 19 nt, synthetic construct
  misc_feature 1..19: note = siRNA antisense sequence
  source 1..19: mol_type = other RNA
tcattgcttcacctaggga

SEQ ID NO: 33644 - RNA, 19 nt, synthetic construct
  misc_feature 1..19: note = siRNA sense sequence
  source 1..19: mol_type = other RNA
ccctaggtgaagcaatgaa

SEQ ID NO: 33645 - RNA, 19 nt, synthetic construct
  misc_feature 1..19: note = siRNA antisense sequence
  source 1..19: mol_type = other RNA
ttcattgcttcacctaggg

SEQ ID NO: 33646 - RNA, 19 nt, synthetic construct
  misc_feature 1..19: note = siRNA sense sequence
  source 1..19: mol_type = other RNA
aagtaagtgaagtagtaac

SEQ ID NO: 33647 - RNA, 19 nt, synthetic construct
  misc_feature 1..19: note = siRNA antisense sequence
  source 1..19: mol_type = other RNA
gttactacttcacttactt

SEQ ID NO: 33648 - RNA, 19 nt, synthetic construct
  misc_feature 1..19: note = siRNA sense sequence
  source 1..19: mol_type = other RNA
agtaagtgaagtagtaact

SEQ ID NO: 33649 - RNA, 19 nt, synthetic construct
  misc_feature 1..19: note = siRNA antisense sequence
  source 1..19: mol_type = other RNA
agttactacttcacttact

SEQ ID NO: 33650 - RNA, 19 nt, synthetic construct
  misc_feature 1..19: note = siRNA sense sequence
  source 1..19: mol_type = other RNA
tgaagtagtaactgtgtct

SEQ ID NO: 33651 - RNA, 19 nt, synthetic construct
  misc_feature 1..19: note = siRNA antisense sequence
  source 1..19: mol_type = other RNA
agacacagttactacttca

SEQ ID NO: 33652 - RNA, 19 nt, synthetic construct
  misc_feature 1..19: note = siRNA sense sequence
  source 1..19: mol_type = other RNA
gaagtagtaactgtgtctc

SEQ ID NO: 33653 - RNA, 19 nt, synthetic construct
  misc_feature 1..19: note = siRNA antisense sequence
  source 1..19: mol_type = other RNA
gagacacagttactacttc

SEQ ID NO: 33654 - RNA, 19 nt, synthetic construct
  misc_feature 1..19: note = siRNA sense sequence
  source 1..19: mol_type = other RNA
agtaactgtgtctcctgtt

SEQ ID NO: 33655 - RNA, 19 nt, synthetic construct
  misc_feature 1..19: note = siRNA antisense sequence
  source 1..19: mol_type = other RNA
aacaggagacacagttact

SEQ ID NO: 33656 - RNA, 19 nt, synthetic construct
  misc_feature 1..19: note = siRNA sense sequence
  source 1..19: mol_type = other RNA
gtaactgtgtctcctgttt

SEQ ID NO: 33657 - RNA, 19 nt, synthetic construct
  misc_feature 1..19: note = siRNA antisense sequence
  source 1..19: mol_type = other RNA
aaacaggagacacagttac

SEQ ID NO: 33658 - RNA, 19 nt, synthetic construct
  misc_feature 1..19: note = siRNA sense sequence
  source 1..19: mol_type = other RNA
gtgtctcctgtttcaccct

SEQ ID NO: 33659 - RNA, 19 nt, synthetic construct
  misc_feature 1..19: note = siRNA antisense sequence
  source 1..19: mol_type = other RNA
agggtgaaacaggagacac

SEQ ID NO: 33660 - RNA, 19 nt, synthetic construct
  misc_feature 1..19: note = siRNA sense sequence
  source 1..19: mol_type = other RNA
tgtctcctgtttcaccctc

SEQ ID NO: 33661 - RNA, 19 nt, synthetic construct
  misc_feature 1..19: note = siRNA antisense sequence
  source 1..19: mol_type = other RNA
gagggtgaaacaggagaca

SEQ ID NO: 33662 - RNA, 19 nt, synthetic construct
  misc_feature 1..19: note = siRNA sense sequence
  source 1..19: mol_type = other RNA
gtctcctgtttcaccctca

SEQ ID NO: 33663 - RNA, 19 nt, synthetic construct
  misc_feature 1..19: note = siRNA antisense sequence
  source 1..19: mol_type = other RNA
tgagggtgaaacaggagac

SEQ ID NO: 33664 - RNA, 19 nt, synthetic construct
  misc_feature 1..19: note = siRNA sense sequence
  source 1..19: mol_type = other RNA
ctcctgtttcaccctcatg

SEQ ID NO: 33665 - RNA, 19 nt, synthetic construct
  misc_feature 1..19: note = siRNA antisense sequence
  source 1..19: mol_type = other RNA
catgagggtgaaacaggag

SEQ ID NO: 33666 - RNA, 19 nt, synthetic construct
  misc_feature 1..19: note = siRNA sense sequence
  source 1..19: mol_type = other RNA
cctgtttcaccctcatgct

SEQ ID NO: 33667 - RNA, 19 nt, synthetic construct
  misc_feature 1..19: note = siRNA antisense sequence
  source 1..19: mol_type = other RNA
agcatgagggtgaaacagg

SEQ ID NO: 33668 - RNA, 19 nt, synthetic construct
  misc_feature 1..19: note = siRNA sense sequence
  source 1..19: mol_type = other RNA
ctgtttcaccctcatgctt

SEQ ID NO: 33669 - RNA, 19 nt, synthetic construct
  misc_feature 1..19: note = siRNA antisense sequence
  source 1..19: mol_type = other RNA
aagcatgagggtgaaacag

SEQ ID NO: 33670 - RNA, 19 nt, synthetic construct
  misc_feature 1..19: note = siRNA sense sequence
  source 1..19: mol_type = other RNA
tgtttcaccctcatgcttg

SEQ ID NO: 33671 - RNA, 19 nt, synthetic construct
  misc_feature 1..19: note = siRNA antisense sequence
  source 1..19: mol_type = other RNA
caagcatgagggtgaaaca

SEQ ID NO: 33672 - RNA, 19 nt, synthetic construct
  misc_feature 1..19: note = siRNA sense sequence
  source 1..19: mol_type = other RNA
gtttcaccctcatgcttgg

SEQ ID NO: 33673 - RNA, 19 nt, synthetic construct
  misc_feature 1..19: note = siRNA antisense sequence
  source 1..19: mol_type = other RNA
ccaagcatgagggtgaaac

SEQ ID NO: 33674 - RNA, 19 nt, synthetic construct
  misc_feature 1..19: note = siRNA sense sequence
  source 1..19: mol_type = other RNA
tttcaccctcatgcttgga

SEQ ID NO: 33675 - RNA, 19 nt, synthetic construct
  misc_feature 1..19: note = siRNA antisense sequence
  source 1..19: mol_type = other RNA
tccaagcatgagggtgaaa

SEQ ID NO: 33676 - RNA, 19 nt, synthetic construct
  misc_feature 1..19: note = siRNA sense sequence
  source 1..19: mol_type = other RNA
ttcaccctcatgcttggaa

SEQ ID NO: 33677 - RNA, 19 nt, synthetic construct
  misc_feature 1..19: note = siRNA antisense sequence
  source 1..19: mol_type = other RNA
ttccaagcatgagggtgaa

SEQ ID NO: 33678 - RNA, 19 nt, synthetic construct
  misc_feature 1..19: note = siRNA sense sequence
  source 1..19: mol_type = other RNA
acatgtgtatgccttcaaa

SEQ ID NO: 33679 - RNA, 19 nt, synthetic construct
  misc_feature 1..19: note = siRNA antisense sequence
  source 1..19: mol_type = other RNA
tttgaaggcatacacatgt

SEQ ID NO: 33680 - RNA, 19 nt, synthetic construct
  misc_feature 1..19: note = siRNA sense sequence
  source 1..19: mol_type = other RNA
catgtgtatgccttcaaaa

SEQ ID NO: 33681 - RNA, 19 nt, synthetic construct
  misc_feature 1..19: note = siRNA antisense sequence
  source 1..19: mol_type = other RNA
ttttgaaggcatacacatg

SEQ ID NO: 33682 - RNA, 19 nt, synthetic construct
  misc_feature 1..19: note = siRNA sense sequence
  source 1..19: mol_type = other RNA
atgtgtatgccttcaaaag

SEQ ID NO: 33683 - RNA, 19 nt, synthetic construct
  misc_feature 1..19: note = siRNA antisense sequence
  source 1..19: mol_type = other RNA
cttttgaaggcatacacat

SEQ ID NO: 33684 - RNA, 19 nt, synthetic construct
  misc_feature 1..19: note = siRNA sense sequence
  source 1..19: mol_type = other RNA
tgtgtatgccttcaaaagc

SEQ ID NO: 33685 - RNA, 19 nt, synthetic construct
  misc_feature 1..19: note = siRNA antisense sequence
  source 1..19: mol_type = other RNA
gcttttgaaggcatacaca

SEQ ID NO: 33686 - RNA, 19 nt, synthetic construct
  misc_feature 1..19: note = siRNA sense sequence
  source 1..19: mol_type = other RNA
tgccttcaaaagctcacat

SEQ ID NO: 33687 - RNA, 19 nt, synthetic construct
  misc_feature 1..19: note = siRNA antisense sequence
  source 1..19: mol_type = other RNA
atgtgagcttttgaaggca

SEQ ID NO: 33688 - RNA, 19 nt, synthetic construct
  misc_feature 1..19: note = siRNA sense sequence
  source 1..19: mol_type = other RNA
gccttcaaaagctcacatc

SEQ ID NO: 33689 - RNA, 19 nt, synthetic construct
  misc_feature 1..19: note = siRNA antisense sequence
  source 1..19: mol_type = other RNA
gatgtgagcttttgaaggc

SEQ ID NO: 33690 - RNA, 19 nt, synthetic construct
  misc_feature 1..19: note = siRNA sense sequence
  source 1..19: mol_type = other RNA
ccttcaaaagctcacatcc

SEQ ID NO: 33691 - RNA, 19 nt, synthetic construct
  misc_feature 1..19: note = siRNA antisense sequence
  source 1..19: mol_type = other RNA
ggatgtgagcttttgaagg

SEQ ID NO: 33692 - RNA, 19 nt, synthetic construct
  misc_feature 1..19: note = siRNA sense sequence
  source 1..19: mol_type = other RNA
cttcaaaagctcacatcca

SEQ ID NO: 33693 - RNA, 19 nt, synthetic construct
  misc_feature 1..19: note = siRNA antisense sequence
  source 1..19: mol_type = other RNA
tggatgtgagcttttgaag

SEQ ID NO: 33694 - RNA, 19 nt, synthetic construct
  misc_feature 1..19: note = siRNA sense sequence
  source 1..19: mol_type = other RNA
ttcaaaagctcacatccaa

SEQ ID NO: 33695 - RNA, 19 nt, synthetic construct
  misc_feature 1..19: note = siRNA antisense sequence
  source 1..19: mol_type = other RNA
ttggatgtgagcttttgaa

SEQ ID NO: 33696 - RNA, 19 nt, synthetic construct
  misc_feature 1..19: note = siRNA sense sequence
  source 1..19: mol_type = other RNA
tcaaaagctcacatccaag

SEQ ID NO: 33697 - RNA, 19 nt, synthetic construct
  misc_feature 1..19: note = siRNA antisense sequence
  source 1..19: mol_type = other RNA
cttggatgtgagcttttga

SEQ ID NO: 33698 - RNA, 19 nt, synthetic construct
  misc_feature 1..19: note = siRNA sense sequence
  source 1..19: mol_type = other RNA
caaaagctcacatccaagt

SEQ ID NO: 33699 - RNA, 19 nt, synthetic construct
  misc_feature 1..19: note = siRNA antisense sequence
  source 1..19: mol_type = other RNA
acttggatgtgagcttttg

SEQ ID NO: 33700 - RNA, 19 nt, synthetic construct
  misc_feature 1..19: note = siRNA sense sequence
  source 1..19: mol_type = other RNA
aaaagctcacatccaagtc

SEQ ID NO: 33701 - RNA, 19 nt, synthetic construct
  misc_feature 1..19: note = siRNA antisense sequence
  source 1..19: mol_type = other RNA
gacttggatgtgagctttt

SEQ ID NO: 33702 - RNA, 19 nt, synthetic construct
  misc_feature 1..19: note = siRNA sense sequence
  source 1..19: mol_type = other RNA
aaagctcacatccaagtca

SEQ ID NO: 33703 - RNA, 19 nt, synthetic construct
  misc_feature 1..19: note = siRNA antisense sequence
  source 1..19: mol_type = other RNA
tgacttggatgtgagcttt

SEQ ID NO: 33704 - RNA, 19 nt, synthetic construct
  misc_feature 1..19: note = siRNA sense sequence
  source 1..19: mol_type = other RNA
aagctcacatccaagtcat

SEQ ID NO: 33705 - RNA, 19 nt, synthetic construct
  misc_feature 1..19: note = siRNA antisense sequence
  source 1..19: mol_type = other RNA
atgacttggatgtgagctt

SEQ ID NO: 33706 - RNA, 19 nt, synthetic construct
  misc_feature 1..19: note = siRNA sense sequence
  source 1..19: mol_type = other RNA
agctcacatccaagtcatc

SEQ ID NO: 33707 - RNA, 19 nt, synthetic construct
  misc_feature 1..19: note = siRNA antisense sequence
  source 1..19: mol_type = other RNA
gatgacttggatgtgagct

SEQ ID NO: 33708 - RNA, 19 nt, synthetic construct
  misc_feature 1..19: note = siRNA sense sequence
  source 1..19: mol_type = other RNA
ctcacatccaagtcatcca

SEQ ID NO: 33709 - RNA, 19 nt, synthetic construct
  misc_feature 1..19: note = siRNA antisense sequence
  source 1..19: mol_type = other RNA
tggatgacttggatgtgag

SEQ ID NO: 33710 - RNA, 19 nt, synthetic construct
  misc_feature 1..19: note = siRNA sense sequence
  source 1..19: mol_type = other RNA
tcacatccaagtcatccag

SEQ ID NO: 33711 - RNA, 19 nt, synthetic construct
  misc_feature 1..19: note = siRNA antisense sequence
  source 1..19: mol_type = other RNA
ctggatgacttggatgtga

SEQ ID NO: 33712 - RNA, 19 nt, synthetic construct
  misc_feature 1..19: note = siRNA sense sequence
  source 1..19: mol_type = other RNA
cacatccaagtcatccaga

SEQ ID NO: 33713 - RNA, 19 nt, synthetic construct
  misc_feature 1..19: note = siRNA antisense sequence
  source 1..19: mol_type = other RNA
tctggatgacttggatgtg

SEQ ID NO: 33714 - RNA, 19 nt, synthetic construct
  misc_feature 1..19: note = siRNA sense sequence
  source 1..19: mol_type = other RNA
acatccaagtcatccagaa

SEQ ID NO: 33715 - RNA, 19 nt, synthetic construct
  misc_feature 1..19: note = siRNA antisense sequence
  source 1..19: mol_type = other RNA
ttctggatgacttggatgt

SEQ ID NO: 33716 - RNA, 19 nt, synthetic construct
  misc_feature 1..19: note = siRNA sense sequence
  source 1..19: mol_type = other RNA
agcctgttaaatagtatag

SEQ ID NO: 33717 - RNA, 19 nt, synthetic construct
  misc_feature 1..19: note = siRNA antisense sequence
  source 1..19: mol_type = other RNA
ctatactatttaacaggct

SEQ ID NO: 33718 - RNA, 19 nt, synthetic construct
  misc_feature 1..19: note = siRNA sense sequence
  source 1..19: mol_type = other RNA
gcctgttaaatagtatagg

SEQ ID NO: 33719 - RNA, 19 nt, synthetic construct
  misc_feature 1..19: note = siRNA antisense sequence
  source 1..19: mol_type = other RNA
cctatactatttaacaggc

SEQ ID NO: 33720 - RNA, 19 nt, synthetic construct
  misc_feature 1..19: note = siRNA sense sequence
  source 1..19: mol_type = other RNA
caatggaatctcttagtgc

SEQ ID NO: 33721 - RNA, 19 nt, synthetic construct
  misc_feature 1..19: note = siRNA antisense sequence
  source 1..19: mol_type = other RNA
gcactaagagattccattg

SEQ ID NO: 33722 - RNA, 19 nt, synthetic construct
  misc_feature 1..19: note = siRNA sense sequence
  source 1..19: mol_type = other RNA
aatggaatctcttagtgcc

SEQ ID NO: 33723 - RNA, 19 nt, synthetic construct
  misc_feature 1..19: note = siRNA antisense sequence
  source 1..19: mol_type = other RNA
ggcactaagagattccatt

SEQ ID NO: 33724 - RNA, 19 nt, synthetic construct
  misc_feature 1..19: note = siRNA sense sequence
  source 1..19: mol_type = other RNA
atggaatctcttagtgcct

SEQ ID NO: 33725 - RNA, 19 nt, synthetic construct
  misc_feature 1..19: note = siRNA antisense sequence
  source 1..19: mol_type = other RNA
aggcactaagagattccat

SEQ ID NO: 33726 - RNA, 19 nt, synthetic construct
  misc_feature 1..19: note = siRNA sense sequence
  source 1..19: mol_type = other RNA
gaatctcttagtgcctgga

SEQ ID NO: 33727 - RNA, 19 nt, synthetic construct
  misc_feature 1..19: note = siRNA antisense sequence
  source 1..19: mol_type = other RNA
tccaggcactaagagattc

SEQ ID NO: 33728 - RNA, 19 nt, synthetic construct
  misc_feature 1..19: note = siRNA sense sequence
  source 1..19: mol_type = other RNA
aatctcttagtgcctggaa

SEQ ID NO: 33729 - RNA, 19 nt, synthetic construct
  misc_feature 1..19: note = siRNA antisense sequence
  source 1..19: mol_type = other RNA
ttccaggcactaagagatt

SEQ ID NO: 33730 - RNA, 19 nt, synthetic construct
  misc_feature 1..19: note = siRNA sense sequence
  source 1..19: mol_type = other RNA
atctcttagtgcctggaat

SEQ ID NO: 33731 - RNA, 19 nt, synthetic construct
  misc_feature 1..19: note = siRNA antisense sequence
  source 1..19: mol_type = other RNA
attccaggcactaagagat

SEQ ID NO: 33732 - RNA, 19 nt, synthetic construct
  misc_feature 1..19: note = siRNA sense sequence
  source 1..19: mol_type = other RNA
tctcttagtgcctggaatt

SEQ ID NO: 33733 - RNA, 19 nt, synthetic construct
  misc_feature 1..19: note = siRNA antisense sequence
  source 1..19: mol_type = other RNA
aattccaggcactaagaga

SEQ ID NO: 33734 - RNA, 19 nt, synthetic construct
  misc_feature 1..19: note = siRNA sense sequence
  source 1..19: mol_type = other RNA
ttagtgcctggaatttgca

SEQ ID NO: 33735 - RNA, 19 nt, synthetic construct
  misc_feature 1..19: note = siRNA antisense sequence
  source 1..19: mol_type = other RNA
tgcaaattccaggcactaa

SEQ ID NO: 33736 - RNA, 19 nt, synthetic construct
  misc_feature 1..19: note = siRNA sense sequence
  source 1..19: mol_type = other RNA
tagtgcctggaatttgcaa

SEQ ID NO: 33737 - RNA, 19 nt, synthetic construct
  misc_feature 1..19: note = siRNA antisense sequence
  source 1..19: mol_type = other RNA
ttgcaaattccaggcacta

SEQ ID NO: 33738 - RNA, 19 nt, synthetic construct
  misc_feature 1..19: note = siRNA sense sequence
  source 1..19: mol_type = other RNA
atttgcaattgccagttaa

SEQ ID NO: 33739 - RNA, 19 nt, synthetic construct
  misc_feature 1..19: note = siRNA antisense sequence
  source 1..19: mol_type = other RNA
ttaactggcaattgcaaat

SEQ ID NO: 33740 - RNA, 19 nt, synthetic construct
  misc_feature 1..19: note = siRNA sense sequence
  source 1..19: mol_type = other RNA
tttgcaattgccagttaaa

SEQ ID NO: 33741 - RNA, 19 nt, synthetic construct
  misc_feature 1..19: note = siRNA antisense sequence
  source 1..19: mol_type = other RNA
tttaactggcaattgcaaa

SEQ ID NO: 33742 - RNA, 19 nt, synthetic construct
  misc_feature 1..19: note = siRNA sense sequence
  source 1..19: mol_type = other RNA
ttgcaattgccagttaaag

SEQ ID NO: 33743 - RNA, 19 nt, synthetic construct
  misc_feature 1..19: note = siRNA antisense sequence
  source 1..19: mol_type = other RNA
ctttaactggcaattgcaa

SEQ ID NO: 33744 - RNA, 19 nt, synthetic construct
  misc_feature 1..19: note = siRNA sense sequence
  source 1..19: mol_type = other RNA
tgcaattgccagttaaagc

SEQ ID NO: 33745 - RNA, 19 nt, synthetic construct
  misc_feature 1..19: note = siRNA antisense sequence
  source 1..19: mol_type = other RNA
gctttaactggcaattgca

SEQ ID NO: 33746 - RNA, 19 nt, synthetic construct
  misc_feature 1..19: note = siRNA sense sequence
  source 1..19: mol_type = other RNA
attgccagttaaagctagt

SEQ ID NO: 33747 - RNA, 19 nt, synthetic construct
  misc_feature 1..19: note = siRNA antisense sequence
  source 1..19: mol_type = other RNA
actagctttaactggcaat

SEQ ID NO: 33748 - RNA, 19 nt, synthetic construct
  misc_feature 1..19: note = siRNA sense sequence
  source 1..19: mol_type = other RNA
ttgccagttaaagctagta

SEQ ID NO: 33749 - RNA, 19 nt, synthetic construct
  misc_feature 1..19: note = siRNA antisense sequence
  source 1..19: mol_type = other RNA
tactagctttaactggcaa

SEQ ID NO: 33750 - RNA, 19 nt, synthetic construct
  misc_feature 1..19: note = siRNA sense sequence
  source 1..19: mol_type = other RNA
tgccagttaaagctagtag

SEQ ID NO: 33751 - RNA, 19 nt, synthetic construct
  misc_feature 1..19: note = siRNA antisense sequence
  source 1..19: mol_type = other RNA
ctactagctttaactggca

SEQ ID NO: 33752 - RNA, 19 nt, synthetic construct
  misc_feature 1..19: note = siRNA sense sequence
  source 1..19: mol_type = other RNA
gccagttaaagctagtagg

SEQ ID NO: 33753 - RNA, 19 nt, synthetic construct
  misc_feature 1..19: note = siRNA antisense sequence
  source 1..19: mol_type = other RNA
cctactagctttaactggc

SEQ ID NO: 33754 - RNA, 19 nt, synthetic construct
  misc_feature 1..19: note = siRNA sense sequence
  source 1..19: mol_type = other RNA
ccagttaaagctagtaggt

SEQ ID NO: 33755 - RNA, 19 nt, synthetic construct
  misc_feature 1..19: note = siRNA antisense sequence
  source 1..19: mol_type = other RNA
acctactagctttaactgg

SEQ ID NO: 33756 - RNA, 19 nt, synthetic construct
  misc_feature 1..19: note = siRNA sense sequence
  source 1..19: mol_type = other RNA
cagttaaagctagtaggta

SEQ ID NO: 33757 - RNA, 19 nt, synthetic construct
  misc_feature 1..19: note = siRNA antisense sequence
  source 1..19: mol_type = other RNA
tacctactagctttaactg

SEQ ID NO: 33758 - RNA, 19 nt, synthetic construct
  misc_feature 1..19: note = siRNA sense sequence
  source 1..19: mol_type = other RNA
agttaaagctagtaggtaa

SEQ ID NO: 33759 - RNA, 19 nt, synthetic construct
  misc_feature 1..19: note = siRNA antisense sequence
  source 1..19: mol_type = other RNA
ttacctactagctttaact

SEQ ID NO: 33760 - RNA, 19 nt, synthetic construct
  misc_feature 1..19: note = siRNA sense sequence
  source 1..19: mol_type = other RNA
gttaaagctagtaggtaaa

SEQ ID NO: 33761 - RNA, 19 nt, synthetic construct
  misc_feature 1..19: note = siRNA antisense sequence
  source 1..19: mol_type = other RNA
tttacctactagctttaac

SEQ ID NO: 33762 - RNA, 19 nt, synthetic construct
  misc_feature 1..19: note = siRNA sense sequence
  source 1..19: mol_type = other RNA
ttttacagtgtatactacc

SEQ ID NO: 33763 - RNA, 19 nt, synthetic construct
  misc_feature 1..19: note = siRNA antisense sequence
  source 1..19: mol_type = other RNA
ggtagtatacactgtaaaa

SEQ ID NO: 33764 - RNA, 19 nt, synthetic construct
  misc_feature 1..19: note = siRNA sense sequence
  source 1..19: mol_type = other RNA
cagtgtatactacctcttt

SEQ ID NO: 33765 - RNA, 19 nt, synthetic construct
  misc_feature 1..19: note = siRNA antisense sequence
  source 1..19: mol_type = other RNA
aaagaggtagtatacactg

SEQ ID NO: 33766 - RNA, 19 nt, synthetic construct
  misc_feature 1..19: note = siRNA sense sequence
  source 1..19: mol_type = other RNA
agtgtatactacctctttg

SEQ ID NO: 33767 - RNA, 19 nt, synthetic construct
  misc_feature 1..19: note = siRNA antisense sequence
  source 1..19: mol_type = other RNA
caaagaggtagtatacact

SEQ ID NO: 33768 - RNA, 19 nt, synthetic construct
  misc_feature 1..19: note = siRNA sense sequence
  source 1..19: mol_type = other RNA
gtgtatactacctctttgc

SEQ ID NO: 33769 - RNA, 19 nt, synthetic construct
  misc_feature 1..19: note = siRNA antisense sequence
  source 1..19: mol_type = other RNA
gcaaagaggtagtatacac

SEQ ID NO: 33770 - RNA, 19 nt, synthetic construct
  misc_feature 1..19: note = siRNA sense sequence
  source 1..19: mol_type = other RNA
tgtatactacctctttgct

SEQ ID NO: 33771 - RNA, 19 nt, synthetic construct
  misc_feature 1..19: note = siRNA antisense sequence
  source 1..19: mol_type = other RNA
agcaaagaggtagtataca

SEQ ID NO: 33772 - RNA, 19 nt, synthetic construct
  misc_feature 1..19: note = siRNA sense sequence
  source 1..19: mol_type = other RNA
gtatactacctctttgctt

SEQ ID NO: 33773 - RNA, 19 nt, synthetic construct
  misc_feature 1..19: note = siRNA antisense sequence
  source 1..19: mol_type = other RNA
aagcaaagaggtagtatac

SEQ ID NO: 33774 - RNA, 19 nt, synthetic construct
  misc_feature 1..19: note = siRNA sense sequence
  source 1..19: mol_type = other RNA
tatactacctctttgcttt

SEQ ID NO: 33775 - RNA, 19 nt, synthetic construct
  misc_feature 1..19: note = siRNA antisense sequence
  source 1..19: mol_type = other RNA
aaagcaaagaggtagtata

SEQ ID NO: 33776 - RNA, 19 nt, synthetic construct
  misc_feature 1..19: note = siRNA sense sequence
  source 1..19: mol_type = other RNA
ctttgctttactgaccctc

SEQ ID NO: 33777 - RNA, 19 nt, synthetic construct
  misc_feature 1..19: note = siRNA antisense sequence
  source 1..19: mol_type = other RNA
gagggtcagtaaagcaaag

SEQ ID NO: 33778 - RNA, 19 nt, synthetic construct
  misc_feature 1..19: note = siRNA sense sequence
  source 1..19: mol_type = other RNA
acgcctgctgtgtatacta

SEQ ID NO: 33779 - RNA, 19 nt, synthetic construct
  misc_feature 1..19: note = siRNA antisense sequence
  source 1..19: mol_type = other RNA
tagtatacacagcaggcgt

SEQ ID NO: 33780 - RNA, 19 nt, synthetic construct
  misc_feature 1..19: note = siRNA sense sequence
  source 1..19: mol_type = other RNA
cgcctgctgtgtatactaa

SEQ ID NO: 33781 - RNA, 19 nt, synthetic construct
  misc_feature 1..19: note = siRNA antisense sequence
  source 1..19: mol_type = other RNA
ttagtatacacagcaggcg

SEQ ID NO: 33782 - RNA, 19 nt, synthetic construct
  misc_feature 1..19: note = siRNA sense sequence
  source 1..19: mol_type = other RNA
gcctgctgtgtatactaac

SEQ ID NO: 33783 - RNA, 19 nt, synthetic construct
  misc_feature 1..19: note = siRNA antisense sequence
  source 1..19: mol_type = other RNA
gttagtatacacagcaggc

SEQ ID NO: 33784 - RNA, 19 nt, synthetic construct
  misc_feature 1..19: note = siRNA sense sequence
  source 1..19: mol_type = other RNA
aatacctttataactggca

SEQ ID NO: 33785 - RNA, 19 nt, synthetic construct
  misc_feature 1..19: note = siRNA antisense sequence
  source 1..19: mol_type = other RNA
tgccagttataaaggtatt

SEQ ID NO: 33786 - RNA, 19 nt, synthetic construct
  misc_feature 1..19: note = siRNA sense sequence
  source 1..19: mol_type = other RNA
atacctttataactggcaa

SEQ ID NO: 33787 - RNA, 19 nt, synthetic construct
  misc_feature 1..19: note = siRNA antisense sequence
  source 1..19: mol_type = other RNA
ttgccagttataaaggtat

SEQ ID NO: 33788 - RNA, 19 nt, synthetic construct
  misc_feature 1..19: note = siRNA sense sequence
  source 1..19: mol_type = other RNA
ataactggcaatatcttac

SEQ ID NO: 33789 - RNA, 19 nt, synthetic construct
  misc_feature 1..19: note = siRNA antisense sequence
  source 1..19: mol_type = other RNA
gtaagatattgccagttat

SEQ ID NO: 33790 - RNA, 19 nt, synthetic construct
  misc_feature 1..19: note = siRNA sense sequence
  source 1..19: mol_type = other RNA
taactggcaatatcttact

SEQ ID NO: 33791 - RNA, 19 nt, synthetic construct
  misc_feature 1..19: note = siRNA antisense sequence
  source 1..19: mol_type = other RNA
agtaagatattgccagtta

SEQ ID NO: 33792 - RNA, 19 nt, synthetic construct
  misc_feature 1..19: note = siRNA sense sequence
  source 1..19: mol_type = other RNA
gattcttatacatgcaaag

SEQ ID NO: 33793 - RNA, 19 nt, synthetic construct
  misc_feature 1..19: note = siRNA antisense sequence
  source 1..19: mol_type = other RNA
ctttgcatgtataagaatc

SEQ ID NO: 33794 - RNA, 19 nt, synthetic construct
  misc_feature 1..19: note = siRNA sense sequence
  source 1..19: mol_type = other RNA
ttcttatacatgcaaaggc

SEQ ID NO: 33795 - RNA, 19 nt, synthetic construct
  misc_feature 1..19: note = siRNA antisense sequence
  source 1..19: mol_type = other RNA
gcctttgcatgtataagaa

SEQ ID NO: 33796 - RNA, 19 nt, synthetic construct
  misc_feature 1..19: note = siRNA sense sequence
  source 1..19: mol_type = other RNA
tcttatacatgcaaaggct

SEQ ID NO: 33797 - RNA, 19 nt, synthetic construct
  misc_feature 1..19: note = siRNA antisense sequence
  source 1..19: mol_type = other RNA
agcctttgcatgtataaga

SEQ ID NO: 33798 - RNA, 19 nt, synthetic construct
  misc_feature 1..19: note = siRNA sense sequence
  source 1..19: mol_type = other RNA
cttatacatgcaaaggctt

SEQ ID NO: 33799 - RNA, 19 nt, synthetic construct
  misc_feature 1..19: note = siRNA antisense sequence
  source 1..19: mol_type = other RNA
aagcctttgcatgtataag

SEQ ID NO: 33800 - RNA, 19 nt, synthetic construct
  misc_feature 1..19: note = siRNA sense sequence
  source 1..19: mol_type = other RNA
ttatacatgcaaaggctta

SEQ ID NO: 33801 - RNA, 19 nt, synthetic construct
  misc_feature 1..19: note = siRNA antisense sequence
  source 1..19: mol_type = other RNA
taagcctttgcatgtataa

SEQ ID NO: 33802 - RNA, 19 nt, synthetic construct
  misc_feature 1..19: note = siRNA sense sequence
  source 1..19: mol_type = other RNA
tatacatgcaaaggcttac

SEQ ID NO: 33803 - RNA, 19 nt, synthetic construct
  misc_feature 1..19: note = siRNA antisense sequence
  source 1..19: mol_type = other RNA
gtaagcctttgcatgtata

SEQ ID NO: 33804 - RNA, 19 nt, synthetic construct
  misc_feature 1..19: note = siRNA sense sequence
  source 1..19: mol_type = other RNA
atacatgcaaaggcttaca

SEQ ID NO: 33805 - RNA, 19 nt, synthetic construct
  misc_feature 1..19: note = siRNA antisense sequence
  source 1..19: mol_type = other RNA
tgtaagcctttgcatgtat

SEQ ID NO: 33806 - RNA, 19 nt, synthetic construct
  misc_feature 1..19: note = siRNA sense sequence
  source 1..19: mol_type = other RNA
tacttaaataggatgccac

SEQ ID NO: 33807 - RNA, 19 nt, synthetic construct
  misc_feature 1..19: note = siRNA antisense sequence
  source 1..19: mol_type = other RNA
gtggcatcctatttaagta

SEQ ID NO: 33808 - RNA, 19 nt, synthetic construct
  misc_feature 1..19: note = siRNA sense sequence
  source 1..19: mol_type = other RNA
acttaaataggatgccacc

SEQ ID NO: 33809 - RNA, 19 nt, synthetic construct
  misc_feature 1..19: note = siRNA antisense sequence
  source 1..19: mol_type = other RNA
ggtggcatcctatttaagt

SEQ ID NO: 33810 - RNA, 19 nt, synthetic construct
  misc_feature 1..19: note = siRNA sense sequence
  source 1..19: mol_type = other RNA
taggatgccaccctgcttt

SEQ ID NO: 33811 - RNA, 19 nt, synthetic construct
  misc_feature 1..19: note = siRNA antisense sequence
  source 1..19: mol_type = other RNA
aaagcagggtggcatccta

SEQ ID NO: 33812 - RNA, 19 nt, synthetic construct
  misc_feature 1..19: note = siRNA sense sequence
  source 1..19: mol_type = other RNA
caccctgctttgttttgaa

SEQ ID NO: 33813 - RNA, 19 nt, synthetic construct
  misc_feature 1..19: note = siRNA antisense sequence
  source 1..19: mol_type = other RNA
ttcaaaacaaagcagggtg

SEQ ID NO: 33814 - RNA, 19 nt, synthetic construct
  misc_feature 1..19: note = siRNA sense sequence
  source 1..19: mol_type = other RNA
accctgctttgttttgaag

SEQ ID NO: 33815 - RNA, 19 nt, synthetic construct
  misc_feature 1..19: note = siRNA antisense sequence
  source 1..19: mol_type = other RNA
cttcaaaacaaagcagggt

SEQ ID NO: 33816 - RNA, 19 nt, synthetic construct
  misc_feature 1..19: note = siRNA sense sequence
  source 1..19: mol_type = other RNA
tatgcagtgctccatgctg

SEQ ID NO: 33817 - RNA, 19 nt, synthetic construct
  misc_feature 1..19: note = siRNA antisense sequence
  source 1..19: mol_type = other RNA
cagcatggagcactgcata

SEQ ID NO: 33818 - RNA, 19 nt, synthetic construct
  misc_feature 1..19: note = siRNA sense sequence
  source 1..19: mol_type = other RNA
atgcagtgctccatgctgt

SEQ ID NO: 33819 - RNA, 19 nt, synthetic construct
  misc_feature 1..19: note = siRNA antisense sequence
  source 1..19: mol_type = other RNA
acagcatggagcactgcat

SEQ ID NO: 33820 - RNA, 19 nt, synthetic construct
  misc_feature 1..19: note = siRNA sense sequence
  source 1..19: mol_type = other RNA
tgcagtgctccatgctgtg

SEQ ID NO: 33821 - RNA, 19 nt, synthetic construct
  misc_feature 1..19: note = siRNA antisense sequence
  source 1..19: mol_type = other RNA
cacagcatggagcactgca

SEQ ID NO: 33822 - RNA, 19 nt, synthetic construct
  misc_feature 1..19: note = siRNA sense sequence
  source 1..19: mol_type = other RNA
gcagtgctccatgctgtgc

SEQ ID NO: 33823 - RNA, 19 nt, synthetic construct
  misc_feature 1..19: note = siRNA antisense sequence
  source 1..19: mol_type = other RNA
gcacagcatggagcactgc

SEQ ID NO: 33824 - RNA, 19 nt, synthetic construct
  misc_feature 1..19: note = siRNA sense sequence
  source 1..19: mol_type = other RNA
cagtgctccatgctgtgca

SEQ ID NO: 33825 - RNA, 19 nt, synthetic construct
  misc_feature 1..19: note = siRNA antisense sequence
  source 1..19: mol_type = other RNA
tgcacagcatggagcactg

SEQ ID NO: 33826 - RNA, 19 nt, synthetic construct
  misc_feature 1..19: note = siRNA sense sequence
  source 1..19: mol_type = other RNA
catgctgtgcagtcacgga

SEQ ID NO: 33827 - RNA, 19 nt, synthetic construct
  misc_feature 1..19: note = siRNA antisense sequence
  source 1..19: mol_type = other RNA
tccgtgactgcacagcatg

SEQ ID NO: 33828 - RNA, 19 nt, synthetic construct
  misc_feature 1..19: note = siRNA sense sequence
  source 1..19: mol_type = other RNA
atgctgtgcagtcacggaa

SEQ ID NO: 33829 - RNA, 19 nt, synthetic construct
  misc_feature 1..19: note = siRNA antisense sequence
  source 1..19: mol_type = other RNA
ttccgtgactgcacagcat

SEQ ID NO: 33830 - RNA, 19 nt, synthetic construct
  misc_feature 1..19: note = siRNA sense sequence
  source 1..19: mol_type = other RNA
aaattaatgagttcagcgt

SEQ ID NO: 33831 - RNA, 19 nt, synthetic construct
  misc_feature 1..19: note = siRNA antisense sequence
  source 1..19: mol_type = other RNA
acgctgaactcattaattt

SEQ ID NO: 33832 - RNA, 19 nt, synthetic construct
  misc_feature 1..19: note = siRNA sense sequence
  source 1..19: mol_type = other RNA
aattaatgagttcagcgtt

SEQ ID NO: 33833 - RNA, 19 nt, synthetic construct
  misc_feature 1..19: note = siRNA antisense sequence
  source 1..19: mol_type = other RNA
aacgctgaactcattaatt

SEQ ID NO: 33834 - RNA, 19 nt, synthetic construct
  misc_feature 1..19: note = siRNA sense sequence
  source 1..19: mol_type = other RNA
attaatgagttcagcgttc

SEQ ID NO: 33835 - RNA, 19 nt, synthetic construct
  misc_feature 1..19: note = siRNA antisense sequence
  source 1..19: mol_type = other RNA
gaacgctgaactcattaat

SEQ ID NO: 33836 - RNA, 19 nt, synthetic construct
  misc_feature 1..19: note = siRNA sense sequence
  source 1..19: mol_type = other RNA
ttaatgagttcagcgttca

SEQ ID NO: 33837 - RNA, 19 nt, synthetic construct
  misc_feature 1..19: note = siRNA antisense sequence
  source 1..19: mol_type = other RNA
tgaacgctgaactcattaa

SEQ ID NO: 33838 - RNA, 19 nt, synthetic construct
  misc_feature 1..19: note = siRNA sense sequence
  source 1..19: mol_type = other RNA
taatgagttcagcgttcag

SEQ ID NO: 33839 - RNA, 19 nt, synthetic construct
  misc_feature 1..19: note = siRNA antisense sequence
  source 1..19: mol_type = other RNA
ctgaacgctgaactcatta

SEQ ID NO: 33840 - RNA, 19 nt, synthetic construct
  misc_feature 1..19: note = siRNA sense sequence
  source 1..19: mol_type = other RNA
aatgagttcagcgttcagg

SEQ ID NO: 33841 - RNA, 19 nt, synthetic construct
  misc_feature 1..19: note = siRNA antisense sequence
  source 1..19: mol_type = other RNA
cctgaacgctgaactcatt

SEQ ID NO: 33842 - RNA, 19 nt, synthetic construct
  misc_feature 1..19: note = siRNA sense sequence
  source 1..19: mol_type = other RNA
tcagcgttcaggatgccag

SEQ ID NO: 33843 - RNA, 19 nt, synthetic construct
  misc_feature 1..19: note = siRNA antisense sequence
  source 1..19: mol_type = other RNA
ctggcatcctgaacgctga

SEQ ID NO: 33844 - RNA, 19 nt, synthetic construct
  misc_feature 1..19: note = siRNA sense sequence
  source 1..19: mol_type = other RNA
cagagttctgtgctcatgt

SEQ ID NO: 33845 - RNA, 19 nt, synthetic construct
  misc_feature 1..19: note = siRNA antisense sequence
  source 1..19: mol_type = other RNA
acatgagcacagaactctg

SEQ ID NO: 33846 - RNA, 19 nt, synthetic construct
  misc_feature 1..19: note = siRNA sense sequence
  source 1..19: mol_type = other RNA
agagttctgtgctcatgtg

SEQ ID NO: 33847 - RNA, 19 nt, synthetic construct
  misc_feature 1..19: note = siRNA antisense sequence
  source 1..19: mol_type = other RNA
cacatgagcacagaactct

SEQ ID NO: 33848 - RNA, 19 nt, synthetic construct
  misc_feature 1..19: note = siRNA sense sequence
  source 1..19: mol_type = other RNA
gagttctgtgctcatgtgg

SEQ ID NO: 33849 - RNA, 19 nt, synthetic construct
  misc_feature 1..19: note = siRNA antisense sequence
  source 1..19: mol_type = other RNA
ccacatgagcacagaactc

SEQ ID NO: 33850 - RNA, 19 nt, synthetic construct
  misc_feature 1..19: note = siRNA sense sequence
  source 1..19: mol_type = other RNA
agttctgtgctcatgtggc

SEQ ID NO: 33851 - RNA, 19 nt, synthetic construct
  misc_feature 1..19: note = siRNA antisense sequence
  source 1..19: mol_type = other RNA
gccacatgagcacagaact

SEQ ID NO: 33852 - RNA, 19 nt, synthetic construct
  misc_feature 1..19: note = siRNA sense sequence
  source 1..19: mol_type = other RNA
gttctgtgctcatgtggct

SEQ ID NO: 33853 - RNA, 19 nt, synthetic construct
  misc_feature 1..19: note = siRNA antisense sequence
  source 1..19: mol_type = other RNA
agccacatgagcacagaac

SEQ ID NO: 33854 - RNA, 19 nt, synthetic construct
  misc_feature 1..19: note = siRNA sense sequence
  source 1..19: mol_type = other RNA
tctgtgctcatgtggctta

SEQ ID NO: 33855 - RNA, 19 nt, synthetic construct
  misc_feature 1..19: note = siRNA antisense sequence
  source 1..19: mol_type = other RNA
taagccacatgagcacaga

SEQ ID NO: 33856 - RNA, 19 nt, synthetic construct
  misc_feature 1..19: note = siRNA sense sequence
  source 1..19: mol_type = other RNA
ctgtgctcatgtggcttac

SEQ ID NO: 33857 - RNA, 19 nt, synthetic construct
  misc_feature 1..19: note = siRNA antisense sequence
  source 1..19: mol_type = other RNA
gtaagccacatgagcacag

SEQ ID NO: 33858 - RNA, 19 nt, synthetic construct
  misc_feature 1..19: note = siRNA sense sequence
  source 1..19: mol_type = other RNA
tgtgctcatgtggcttaca

SEQ ID NO: 33859 - RNA, 19 nt, synthetic construct
  misc_feature 1..19: note = siRNA antisense sequence
  source 1..19: mol_type = other RNA
tgtaagccacatgagcaca

SEQ ID NO: 33860 - RNA, 19 nt, synthetic construct
  misc_feature 1..19: note = siRNA sense sequence
  source 1..19: mol_type = other RNA
gtgctcatgtggcttacac

SEQ ID NO: 33861 - RNA, 19 nt, synthetic construct
  misc_feature 1..19: note = siRNA antisense sequence
  source 1..19: mol_type = other RNA
gtgtaagccacatgagcac

SEQ ID NO: 33862 - RNA, 19 nt, synthetic construct
  misc_feature 1..19: note = siRNA sense sequence
  source 1..19: mol_type = other RNA
cacagtgggatccagggac

SEQ ID NO: 33863 - RNA, 19 nt, synthetic construct
  misc_feature 1..19: note = siRNA antisense sequence
  source 1..19: mol_type = other RNA
gtccctggatcccactgtg

SEQ ID NO: 33864 - RNA, 19 nt, synthetic construct
  misc_feature 1..19: note = siRNA sense sequence
  source 1..19: mol_type = other RNA
atgatgctgatgtggtgaa

SEQ ID NO: 33865 - RNA, 19 nt, synthetic construct
  misc_feature 1..19: note = siRNA antisense sequence
  source 1..19: mol_type = other RNA
ttcaccacatcagcatcat

SEQ ID NO: 33866 - RNA, 19 nt, synthetic construct
  misc_feature 1..19: note = siRNA sense sequence
  source 1..19: mol_type = other RNA
tgatgctgatgtggtgaag

SEQ ID NO: 33867 - RNA, 19 nt, synthetic construct
  misc_feature 1..19: note = siRNA antisense sequence
  source 1..19: mol_type = other RNA
cttcaccacatcagcatca

SEQ ID NO: 33868 - RNA, 19 nt, synthetic construct
  misc_feature 1..19: note = siRNA sense sequence
  source 1..19: mol_type = other RNA
gatcaagagtaggtctgag

SEQ ID NO: 33869 - RNA, 19 nt, synthetic construct
  misc_feature 1..19: note = siRNA antisense sequence
  source 1..19: mol_type = other RNA
ctcagacctactcttgatc

SEQ ID NO: 33870 - RNA, 19 nt, synthetic construct
  misc_feature 1..19: note = siRNA sense sequence
  source 1..19: mol_type = other RNA
atttgtggtgggaggatat

SEQ ID NO: 33871 - RNA, 19 nt, synthetic construct
  misc_feature 1..19: note = siRNA antisense sequence
  source 1..19: mol_type = other RNA
atatcctcccaccacaaat

SEQ ID NO: 33872 - RNA, 19 nt, synthetic construct
  misc_feature 1..19: note = siRNA sense sequence
  source 1..19: mol_type = other RNA
tttgtggtgggaggatatg

SEQ ID NO: 33873 - RNA, 19 nt, synthetic construct
  misc_feature 1..19: note = siRNA antisense sequence
  source 1..19: mol_type = other RNA
catatcctcccaccacaaa

SEQ ID NO: 33874 - RNA, 19 nt, synthetic construct
  misc_feature 1..19: note = siRNA sense sequence
  source 1..19: mol_type = other RNA
ttgtggtgggaggatatgg

SEQ ID NO: 33875 - RNA, 19 nt, synthetic construct
  misc_feature 1..19: note = siRNA antisense sequence
  source 1..19: mol_type = other RNA
ccatatcctcccaccacaa

SEQ ID NO: 33876 - RNA, 19 nt, synthetic construct
  misc_feature 1..19: note = siRNA sense sequence
  source 1..19: mol_type = other RNA
gagcagatgtctgtagata

SEQ ID NO: 33877 - RNA, 19 nt, synthetic construct
  misc_feature 1..19: note = siRNA antisense sequence
  source 1..19: mol_type = other RNA
tatctacagacatctgctc

SEQ ID NO: 33878 - RNA, 19 nt, synthetic construct
  misc_feature 1..19: note = siRNA sense sequence
  source 1..19: mol_type = other RNA
agcagatgtctgtagatac

SEQ ID NO: 33879 - RNA, 19 nt, synthetic construct
  misc_feature 1..19: note = siRNA antisense sequence
  source 1..19: mol_type = other RNA
gtatctacagacatctgct

SEQ ID NO: 33880 - RNA, 19 nt, synthetic construct
  misc_feature 1..19: note = siRNA sense sequence
  source 1..19: mol_type = other RNA
gcagatgtctgtagatact

SEQ ID NO: 33881 - RNA, 19 nt, synthetic construct
  misc_feature 1..19: note = siRNA antisense sequence
  source 1..19: mol_type = other RNA
agtatctacagacatctgc

SEQ ID NO: 33882 - RNA, 19 nt, synthetic construct
  misc_feature 1..19: note = siRNA sense sequence
  source 1..19: mol_type = other RNA
cagatgtctgtagatacta

SEQ ID NO: 33883 - RNA, 19 nt, synthetic construct
  misc_feature 1..19: note = siRNA antisense sequence
  source 1..19: mol_type = other RNA
tagtatctacagacatctg

SEQ ID NO: 33884 - RNA, 19 nt, synthetic construct
  misc_feature 1..19: note = siRNA sense sequence
  source 1..19: mol_type = other RNA
ctctaggagttattctggg

SEQ ID NO: 33885 - RNA, 19 nt, synthetic construct
  misc_feature 1..19: note = siRNA antisense sequence
  source 1..19: mol_type = other RNA
cccagaataactcctagag

SEQ ID NO: 33886 - RNA, 19 nt, synthetic construct
  misc_feature 1..19: note = siRNA sense sequence
  source 1..19: mol_type = other RNA
tctaggagttattctgggt

SEQ ID NO: 33887 - RNA, 19 nt, synthetic construct
  misc_feature 1..19: note = siRNA antisense sequence
  source 1..19: mol_type = other RNA
acccagaataactcctaga

SEQ ID NO: 33888 - RNA, 19 nt, synthetic construct
  misc_feature 1..19: note = siRNA sense sequence
  source 1..19: mol_type = other RNA
ctaggagttattctgggta

SEQ ID NO: 33889 - RNA, 19 nt, synthetic construct
  misc_feature 1..19: note = siRNA antisense sequence
  source 1..19: mol_type = other RNA
tacccagaataactcctag

SEQ ID NO: 33890 - RNA, 19 nt, synthetic construct
  misc_feature 1..19: note = siRNA sense sequence
  source 1..19: mol_type = other RNA
taggagttattctgggtag

SEQ ID NO: 33891 - RNA, 19 nt, synthetic construct
  misc_feature 1..19: note = siRNA antisense sequence
  source 1..19: mol_type = other RNA
ctacccagaataactccta

SEQ ID NO: 33892 - RNA, 19 nt, synthetic construct
  misc_feature 1..19: note = siRNA sense sequence
  source 1..19: mol_type = other RNA
aggagttattctgggtagc

SEQ ID NO: 33893 - RNA, 19 nt, synthetic construct
  misc_feature 1..19: note = siRNA antisense sequence
  source 1..19: mol_type = other RNA
gctacccagaataactcct

SEQ ID NO: 33894 - RNA, 19 nt, synthetic construct
  misc_feature 1..19: note = siRNA sense sequence
  source 1..19: mol_type = other RNA
ggagttattctgggtagca

SEQ ID NO: 33895 - RNA, 19 nt, synthetic construct
  misc_feature 1..19: note = siRNA antisense sequence
  source 1..19: mol_type = other RNA
tgctacccagaataactcc

SEQ ID NO: 33896 - RNA, 19 nt, synthetic construct
  misc_feature 1..19: note = siRNA sense sequence
  source 1..19: mol_type = other RNA
gagttattctgggtagcac

SEQ ID NO: 33897 - RNA, 19 nt, synthetic construct
  misc_feature 1..19: note = siRNA antisense sequence
  source 1..19: mol_type = other RNA
gtgctacccagaataactc

SEQ ID NO: 33898 - RNA, 19 nt, synthetic construct
  misc_feature 1..19: note = siRNA sense sequence
  source 1..19: mol_type = other RNA
attctgggtagcacttata

SEQ ID NO: 33899 - RNA, 19 nt, synthetic construct
  misc_feature 1..19: note = siRNA antisense sequence
  source 1..19: mol_type = other RNA
tataagtgctacccagaat

SEQ ID NO: 33900 - RNA, 19 nt, synthetic construct
  misc_feature 1..19: note = siRNA sense sequence
  source 1..19: mol_type = other RNA
ttctgggtagcacttataa

SEQ ID NO: 33901 - RNA, 19 nt, synthetic construct
  misc_feature 1..19: note = siRNA antisense sequence
  source 1..19: mol_type = other RNA
ttataagtgctacccagaa

SEQ ID NO: 33902 - RNA, 19 nt, synthetic construct
  misc_feature 1..19: note = siRNA sense sequence
  source 1..19: mol_type = other RNA
tctgggtagcacttataaa

SEQ ID NO: 33903 - RNA, 19 nt, synthetic construct
  misc_feature 1..19: note = siRNA antisense sequence
  source 1..19: mol_type = other RNA
tttataagtgctacccaga

SEQ ID NO: 33904 - RNA, 19 nt, synthetic construct
  misc_feature 1..19: note = siRNA sense sequence
  source 1..19: mol_type = other RNA
ctgggtagcacttataaaa

SEQ ID NO: 33905 - RNA, 19 nt, synthetic construct
  misc_feature 1..19: note = siRNA antisense sequence
  source 1..19: mol_type = other RNA
ttttataagtgctacccag

SEQ ID NO: 33906 - RNA, 19 nt, synthetic construct
  misc_feature 1..19: note = siRNA sense sequence
  source 1..19: mol_type = other RNA
tgggtagcacttataaaat

SEQ ID NO: 33907 - RNA, 19 nt, synthetic construct
  misc_feature 1..19: note = siRNA antisense sequence
  source 1..19: mol_type = other RNA
attttataagtgctaccca

SEQ ID NO: 33908 - RNA, 19 nt, synthetic construct
  misc_feature 1..19: note = siRNA sense sequence
  source 1..19: mol_type = other RNA
gggtagcacttataaaatg

SEQ ID NO: 33909 - RNA, 19 nt, synthetic construct
  misc_feature 1..19: note = siRNA antisense sequence
  source 1..19: mol_type = other RNA
cattttataagtgctaccc

SEQ ID NO: 33910 - RNA, 19 nt, synthetic construct
  misc_feature 1..19: note = siRNA sense sequence
  source 1..19: mol_type = other RNA
ggtagcacttataaaatgg

SEQ ID NO: 33911 - RNA, 19 nt, synthetic construct
  misc_feature 1..19: note = siRNA antisense sequence
  source 1..19: mol_type = other RNA
ccattttataagtgctacc

SEQ ID NO: 33912 - RNA, 19 nt, synthetic construct
  misc_feature 1..19: note = siRNA sense sequence
  source 1..19: mol_type = other RNA
gtagcacttataaaatggg

SEQ ID NO: 33913 - RNA, 19 nt, synthetic construct
  misc_feature 1..19: note = siRNA antisense sequence
  source 1..19: mol_type = other RNA
cccattttataagtgctac

SEQ ID NO: 33914 - RNA, 19 nt, synthetic construct
  misc_feature 1..19: note = siRNA sense sequence
  source 1..19: mol_type = other RNA
tagcacttataaaatggga

SEQ ID NO: 33915 - RNA, 19 nt, synthetic construct
  misc_feature 1..19: note = siRNA antisense sequence
  source 1..19: mol_type = other RNA
tcccattttataagtgcta

SEQ ID NO: 33916 - RNA, 19 nt, synthetic construct
  misc_feature 1..19: note = siRNA sense sequence
  source 1..19: mol_type = other RNA
agcacttataaaatgggac

SEQ ID NO: 33917 - RNA, 19 nt, synthetic construct
  misc_feature 1..19: note = siRNA antisense sequence
  source 1..19: mol_type = other RNA
gtcccattttataagtgct

SEQ ID NO: 33918 - RNA, 19 nt, synthetic construct
  misc_feature 1..19: note = siRNA sense sequence
  source 1..19: mol_type = other RNA
acagccagaatgaccttta

SEQ ID NO: 33919 - RNA, 19 nt, synthetic construct
  misc_feature 1..19: note = siRNA antisense sequence
  source 1..19: mol_type = other RNA
taaaggtcattctggctgt

SEQ ID NO: 33920 - RNA, 19 nt, synthetic construct
  misc_feature 1..19: note = siRNA sense sequence
  source 1..19: mol_type = other RNA
cagaatgacctttatactg

SEQ ID NO: 33921 - RNA, 19 nt, synthetic construct
  misc_feature 1..19: note = siRNA antisense sequence
  source 1..19: mol_type = other RNA
cagtataaaggtcattctg

SEQ ID NO: 33922 - RNA, 19 nt, synthetic construct
  misc_feature 1..19: note = siRNA sense sequence
  source 1..19: mol_type = other RNA
agaatgacctttatactga

SEQ ID NO: 33923 - RNA, 19 nt, synthetic construct
  misc_feature 1..19: note = siRNA antisense sequence
  source 1..19: mol_type = other RNA
tcagtataaaggtcattct

SEQ ID NO: 33924 - RNA, 19 nt, synthetic construct
  misc_feature 1..19: note = siRNA sense sequence
  source 1..19: mol_type = other RNA
gaatgacctttatactgaa

SEQ ID NO: 33925 - RNA, 19 nt, synthetic construct
  misc_feature 1..19: note = siRNA antisense sequence
  source 1..19: mol_type = other RNA
ttcagtataaaggtcattc

SEQ ID NO: 33926 - RNA, 19 nt, synthetic construct
  misc_feature 1..19: note = siRNA sense sequence
  source 1..19: mol_type = other RNA
cttttgatttattccatcc

SEQ ID NO: 33927 - RNA, 19 nt, synthetic construct
  misc_feature 1..19: note = siRNA antisense sequence
  source 1..19: mol_type = other RNA
ggatggaataaatcaaaag

SEQ ID NO: 33928 - RNA, 19 nt, synthetic construct
  misc_feature 1..19: note = siRNA sense sequence
  source 1..19: mol_type = other RNA
tttgatttattccatcctg

SEQ ID NO: 33929 - RNA, 19 nt, synthetic construct
  misc_feature 1..19: note = siRNA antisense sequence
  source 1..19: mol_type = other RNA
caggatggaataaatcaaa

SEQ ID NO: 33930 - RNA, 19 nt, synthetic construct
  misc_feature 1..19: note = siRNA sense sequence
  source 1..19: mol_type = other RNA
ttgatttattccatcctgt

SEQ ID NO: 33931 - RNA, 19 nt, synthetic construct
  misc_feature 1..19: note = siRNA antisense sequence
  source 1..19: mol_type = other RNA
acaggatggaataaatcaa

SEQ ID NO: 33932 - RNA, 19 nt, synthetic construct
  misc_feature 1..19: note = siRNA sense sequence
  source 1..19: mol_type = other RNA
ttccttgcctcctttccac

SEQ ID NO: 33933 - RNA, 19 nt, synthetic construct
  misc_feature 1..19: note = siRNA antisense sequence
  source 1..19: mol_type = other RNA
gtggaaaggaggcaaggaa

SEQ ID NO: 33934 - RNA, 19 nt, synthetic construct
  misc_feature 1..19: note = siRNA sense sequence
  source 1..19: mol_type = other RNA
tccttgcctcctttccacc

SEQ ID NO: 33935 - RNA, 19 nt, synthetic construct
  misc_feature 1..19: note = siRNA antisense sequence
  source 1..19: mol_type = other RNA
ggtggaaaggaggcaagga

SEQ ID NO: 33936 - RNA, 19 nt, synthetic construct
  misc_feature 1..19: note = siRNA sense sequence
  source 1..19: mol_type = other RNA
ttgcctcctttccaccaga

SEQ ID NO: 33937 - RNA, 19 nt, synthetic construct
  misc_feature 1..19: note = siRNA antisense sequence
  source 1..19: mol_type = other RNA
tctggtggaaaggaggcaa

SEQ ID NO: 33938 - RNA, 19 nt, synthetic construct
  misc_feature 1..19: note = siRNA sense sequence
  source 1..19: mol_type = other RNA
gcctcctttccaccagaca

SEQ ID NO: 33939 - RNA, 19 nt, synthetic construct
  misc_feature 1..19: note = siRNA antisense sequence
  source 1..19: mol_type = other RNA
tgtctggtggaaaggaggc

SEQ ID NO: 33940 - RNA, 19 nt, synthetic construct
  misc_feature 1..19: note = siRNA sense sequence
  source 1..19: mol_type = other RNA
cacactcactttgaagttc

SEQ ID NO: 33941 - RNA, 19 nt, synthetic construct
  misc_feature 1..19: note = siRNA antisense sequence
  source 1..19: mol_type = other RNA
gaacttcaaagtgagtgtg

SEQ ID NO: 33942 - RNA, 19 nt, synthetic construct
  misc_feature 1..19: note = siRNA sense sequence
  source 1..19: mol_type = other RNA
agacccacaggactttagc

SEQ ID NO: 33943 - RNA, 19 nt, synthetic construct
  misc_feature 1..19: note = siRNA antisense sequence
  source 1..19: mol_type = other RNA
gctaaagtcctgtgggtct

SEQ ID NO: 33944 - RNA, 19 nt, synthetic construct
  misc_feature 1..19: note = siRNA sense sequence
  source 1..19: mol_type = other RNA
gacccacaggactttagca

SEQ ID NO: 33945 - RNA, 19 nt, synthetic construct
  misc_feature 1..19: note = siRNA antisense sequence
  source 1..19: mol_type = other RNA
tgctaaagtcctgtgggtc

SEQ ID NO: 33946 - RNA, 19 nt, synthetic construct
  misc_feature 1..19: note = siRNA sense sequence
  source 1..19: mol_type = other RNA
acccacaggactttagcac

SEQ ID NO: 33947 - RNA, 19 nt, synthetic construct
  misc_feature 1..19: note = siRNA antisense sequence
  source 1..19: mol_type = other RNA
gtgctaaagtcctgtgggt

SEQ ID NO: 33948 - RNA, 19 nt, synthetic construct
  misc_feature 1..19: note = siRNA sense sequence
  source 1..19: mol_type = other RNA
caattcgcttgctatggca

SEQ ID NO: 33949 - RNA, 19 nt, synthetic construct
  misc_feature 1..19: note = siRNA antisense sequence
  source 1..19: mol_type = other RNA
tgccatagcaagcgaattg

SEQ ID NO: 33950 - RNA, 19 nt, synthetic construct
  misc_feature 1..19: note = siRNA sense sequence
  source 1..19: mol_type = other RNA
tgctatggcaagatgaagt

SEQ ID NO: 33951 - RNA, 19 nt, synthetic construct
  misc_feature 1..19: note = siRNA antisense sequence
  source 1..19: mol_type = other RNA
acttcatcttgccatagca

SEQ ID NO: 33952 - RNA, 19 nt, synthetic construct
  misc_feature 1..19: note = siRNA sense sequence
  source 1..19: mol_type = other RNA
gctatggcaagatgaagtt

SEQ ID NO: 33953 - RNA, 19 nt, synthetic construct
  misc_feature 1..19: note = siRNA antisense sequence
  source 1..19: mol_type = other RNA
aacttcatcttgccatagc

SEQ ID NO: 33954 - RNA, 19 nt, synthetic construct
  misc_feature 1..19: note = siRNA sense sequence
  source 1..19: mol_type = other RNA
ctatggcaagatgaagtta

SEQ ID NO: 33955 - RNA, 19 nt, synthetic construct
  misc_feature 1..19: note = siRNA antisense sequence
  source 1..19: mol_type = other RNA
taacttcatcttgccatag

SEQ ID NO: 33956 - RNA, 19 nt, synthetic construct
  misc_feature 1..19: note = siRNA sense sequence
  source 1..19: mol_type = other RNA
tatggcaagatgaagttaa

SEQ ID NO: 33957 - RNA, 19 nt, synthetic construct
  misc_feature 1..19: note = siRNA antisense sequence
  source 1..19: mol_type = other RNA
ttaacttcatcttgccata

SEQ ID NO: 33958 - RNA, 19 nt, synthetic construct
  misc_feature 1..19: note = siRNA sense sequence
  source 1..19: mol_type = other RNA
tggcaagatgaagttaaaa

SEQ ID NO: 33959 - RNA, 19 nt, synthetic construct
  misc_feature 1..19: note = siRNA antisense sequence
  source 1..19: mol_type = other RNA
ttttaacttcatcttgcca

SEQ ID NO: 33960 - RNA, 19 nt, synthetic construct
  misc_feature 1..19: note = siRNA sense sequence
  source 1..19: mol_type = other RNA
aaaagcagcttcccaggat

SEQ ID NO: 33961 - RNA, 19 nt, synthetic construct
  misc_feature 1..19: note = siRNA antisense sequence
  source 1..19: mol_type = other RNA
atcctgggaagctgctttt

SEQ ID NO: 33962 - RNA, 19 nt, synthetic construct
  misc_feature 1..19: note = siRNA sense sequence
  source 1..19: mol_type = other RNA
cttaaatactgaggtgttt

SEQ ID NO: 33963 - RNA, 19 nt, synthetic construct
  misc_feature 1..19: note = siRNA antisense sequence
  source 1..19: mol_type = other RNA
aaacacctcagtatttaag

SEQ ID NO: 33964 - RNA, 19 nt, synthetic construct
  misc_feature 1..19: note = siRNA sense sequence
  source 1..19: mol_type = other RNA
atactgaggtgtttatttg

SEQ ID NO: 33965 - RNA, 19 nt, synthetic construct
  misc_feature 1..19: note = siRNA antisense sequence
  source 1..19: mol_type = other RNA
caaataaacacctcagtat

SEQ ID NO: 33966 - RNA, 19 nt, synthetic construct
  misc_feature 1..19: note = siRNA sense sequence
  source 1..19: mol_type = other RNA
tactgaggtgtttatttgg

SEQ ID NO: 33967 - RNA, 19 nt, synthetic construct
  misc_feature 1..19: note = siRNA antisense sequence
  source 1..19: mol_type = other RNA
ccaaataaacacctcagta

SEQ ID NO: 33968 - RNA, 19 nt, synthetic construct
  misc_feature 1..19: note = siRNA sense sequence
  source 1..19: mol_type = other RNA
ctgaggtgtttatttggat

SEQ ID NO: 33969 - RNA, 19 nt, synthetic construct
  misc_feature 1..19: note = siRNA antisense sequence
  source 1..19: mol_type = other RNA
atccaaataaacacctcag

SEQ ID NO: 33970 - RNA, 19 nt, synthetic construct
  misc_feature 1..19: note = siRNA sense sequence
  source 1..19: mol_type = other RNA
tgaggtgtttatttggatt

SEQ ID NO: 33971 - RNA, 19 nt, synthetic construct
  misc_feature 1..19: note = siRNA antisense sequence
  source 1..19: mol_type = other RNA
aatccaaataaacacctca

SEQ ID NO: 33972 - RNA, 19 nt, synthetic construct
  misc_feature 1..19: note = siRNA sense sequence
  source 1..19: mol_type = other RNA
gaggtgtttatttggattt

SEQ ID NO: 33973 - RNA, 19 nt, synthetic construct
  misc_feature 1..19: note = siRNA antisense sequence
  source 1..19: mol_type = other RNA
aaatccaaataaacacctc

SEQ ID NO: 33974 - RNA, 19 nt, synthetic construct
  misc_feature 1..19: note = siRNA sense sequence
  source 1..19: mol_type = other RNA
ggtgtttatttggatttgc

SEQ ID NO: 33975 - RNA, 19 nt, synthetic construct
  misc_feature 1..19: note = siRNA antisense sequence
  source 1..19: mol_type = other RNA
gcaaatccaaataaacacc

SEQ ID NO: 33976 - RNA, 19 nt, synthetic construct
  misc_feature 1..19: note = siRNA sense sequence
  source 1..19: mol_type = other RNA
aacttgttgatggaggtag

SEQ ID NO: 33977 - RNA, 19 nt, synthetic construct
  misc_feature 1..19: note = siRNA antisense sequence
  source 1..19: mol_type = other RNA
ctacctccatcaacaagtt

SEQ ID NO: 33978 - RNA, 19 nt, synthetic construct
  misc_feature 1..19: note = siRNA sense sequence
  source 1..19: mol_type = other RNA
acttgttgatggaggtagg

SEQ ID NO: 33979 - RNA, 19 nt, synthetic construct
  misc_feature 1..19: note = siRNA antisense sequence
  source 1..19: mol_type = other RNA
cctacctccatcaacaagt

SEQ ID NO: 33980 - RNA, 19 nt, synthetic construct
  misc_feature 1..19: note = siRNA sense sequence
  source 1..19: mol_type = other RNA
cttgttgatggaggtaggt

SEQ ID NO: 33981 - RNA, 19 nt, synthetic construct
  misc_feature 1..19: note = siRNA antisense sequence
  source 1..19: mol_type = other RNA
acctacctccatcaacaag

SEQ ID NO: 33982 - RNA, 19 nt, synthetic construct
  misc_feature 1..19: note = siRNA sense sequence
  source 1..19: mol_type = other RNA
ttgttgatggaggtaggta

SEQ ID NO: 33983 - RNA, 19 nt, synthetic construct
  misc_feature 1..19: note = siRNA antisense sequence
  source 1..19: mol_type = other RNA
tacctacctccatcaacaa

SEQ ID NO: 33984 - RNA, 19 nt, synthetic construct
  misc_feature 1..19: note = siRNA sense sequence
  source 1..19: mol_type = other RNA
tgatggaggtaggtatctt

SEQ ID NO: 33985 - RNA, 19 nt, synthetic construct
  misc_feature 1..19: note = siRNA antisense sequence
  source 1..19: mol_type = other RNA
aagatacctacctccatca

SEQ ID NO: 33986 - RNA, 19 nt, synthetic construct
  misc_feature 1..19: note = siRNA sense sequence
  source 1..19: mol_type = other RNA
atggaggtaggtatcttgc

SEQ ID NO: 33987 - RNA, 19 nt, synthetic construct
  misc_feature 1..19: note = siRNA antisense sequence
  source 1..19: mol_type = other RNA
gcaagatacctacctccat

SEQ ID NO: 33988 - RNA, 19 nt, synthetic construct
  misc_feature 1..19: note = siRNA sense sequence
  source 1..19: mol_type = other RNA
tggaggtaggtatcttgct

SEQ ID NO: 33989 - RNA, 19 nt, synthetic construct
  misc_feature 1..19: note = siRNA antisense sequence
  source 1..19: mol_type = other RNA
agcaagatacctacctcca

SEQ ID NO: 33990 - RNA, 19 nt, synthetic construct
  misc_feature 1..19: note = siRNA sense sequence
  source 1..19: mol_type = other RNA
ggaggtaggtatcttgctg

SEQ ID NO: 33991 - RNA, 19 nt, synthetic construct
  misc_feature 1..19: note = siRNA antisense sequence
  source 1..19: mol_type = other RNA
cagcaagatacctacctcc

SEQ ID NO: 33992 - RNA, 19 nt, synthetic construct
  misc_feature 1..19: note = siRNA sense sequence
  source 1..19: mol_type = other RNA
gaggtaggtatcttgctga

SEQ ID NO: 33993 - RNA, 19 nt, synthetic construct
  misc_feature 1..19: note = siRNA antisense sequence
  source 1..19: mol_type = other RNA
tcagcaagatacctacctc

SEQ ID NO: 33994 - RNA, 19 nt, synthetic construct
  misc_feature 1..19: note = siRNA sense sequence
  source 1..19: mol_type = other RNA
aggtaggtatcttgctgac

SEQ ID NO: 33995 - RNA, 19 nt, synthetic construct
  misc_feature 1..19: note = siRNA antisense sequence
  source 1..19: mol_type = other RNA
gtcagcaagatacctacct

SEQ ID NO: 33996 - RNA, 19 nt, synthetic construct
  misc_feature 1..19: note = siRNA sense sequence
  source 1..19: mol_type = other RNA
ggtaggtatcttgctgaca

SEQ ID NO: 33997 - RNA, 19 nt, synthetic construct
  misc_feature 1..19: note = siRNA antisense sequence
  source 1..19: mol_type = other RNA
tgtcagcaagatacctacc

SEQ ID NO: 33998 - RNA, 19 nt, synthetic construct
  misc_feature 1..19: note = siRNA sense sequence
  source 1..19: mol_type = other RNA
gtaggtatcttgctgacat

SEQ ID NO: 33999 - RNA, 19 nt, synthetic construct
  misc_feature 1..19: note = siRNA antisense sequence
  source 1..19: mol_type = other RNA
atgtcagcaagatacctac

SEQ ID NO: 34000 - RNA, 19 nt, synthetic construct
  misc_feature 1..19: note = siRNA sense sequence
  source 1..19: mol_type = other RNA
taggtatcttgctgacata

SEQ ID NO: 34001 - RNA, 19 nt, synthetic construct
  misc_feature 1..19: note = siRNA antisense sequence
  source 1..19: mol_type = other RNA
tatgtcagcaagataccta

SEQ ID NO: 34002 - RNA, 19 nt, synthetic construct
  misc_feature 1..19: note = siRNA sense sequence
  source 1..19: mol_type = other RNA
aggtatcttgctgacatat

SEQ ID NO: 34003 - RNA, 19 nt, synthetic construct
  misc_feature 1..19: note = siRNA antisense sequence
  source 1..19: mol_type = other RNA
atatgtcagcaagatacct

SEQ ID NO: 34004 - RNA, 19 nt, synthetic construct
  misc_feature 1..19: note = siRNA sense sequence
  source 1..19: mol_type = other RNA
gtatcttgctgacatatta

SEQ ID NO: 34005 - RNA, 19 nt, synthetic construct
  misc_feature 1..19: note = siRNA antisense sequence
  source 1..19: mol_type = other RNA
taatatgtcagcaagatac

SEQ ID NO: 34006 - RNA, 19 nt, synthetic construct
  misc_feature 1..19: note = siRNA sense sequence
  source 1..19: mol_type = other RNA
tatcttgctgacatattac

SEQ ID NO: 34007 - RNA, 19 nt, synthetic construct
  misc_feature 1..19: note = siRNA antisense sequence
  source 1..19: mol_type = other RNA
gtaatatgtcagcaagata

SEQ ID NO: 34008 - RNA, 19 nt, synthetic construct
  misc_feature 1..19: note = siRNA sense sequence
  source 1..19: mol_type = other RNA
atcttgctgacatattaca

SEQ ID NO: 34009 - RNA, 19 nt, synthetic construct
  misc_feature 1..19: note = siRNA antisense sequence
  source 1..19: mol_type = other RNA
tgtaatatgtcagcaagat

SEQ ID NO: 34010 - RNA, 19 nt, synthetic construct
  misc_feature 1..19: note = siRNA sense sequence
  source 1..19: mol_type = other RNA
tgctgacatattacatcat

SEQ ID NO: 34011 - RNA, 19 nt, synthetic construct
  misc_feature 1..19: note = siRNA antisense sequence
  source 1..19: mol_type = other RNA
atgatgtaatatgtcagca

SEQ ID NO: 34012 - RNA, 19 nt, synthetic construct
  misc_feature 1..19: note = siRNA sense sequence
  source 1..19: mol_type = other RNA
gctgacatattacatcatt

SEQ ID NO: 34013 - RNA, 19 nt, synthetic construct
  misc_feature 1..19: note = siRNA antisense sequence
  source 1..19: mol_type = other RNA
aatgatgtaatatgtcagc

SEQ ID NO: 34014 - RNA, 19 nt, synthetic construct
  misc_feature 1..19: note = siRNA sense sequence
  source 1..19: mol_type = other RNA
ttagtaagatttcttgagc

SEQ ID NO: 34015 - RNA, 19 nt, synthetic construct
  misc_feature 1..19: note = siRNA antisense sequence
  source 1..19: mol_type = other RNA
gctcaagaaatcttactaa

SEQ ID NO: 34016 - RNA, 19 nt, synthetic construct
  misc_feature 1..19: note = siRNA sense sequence
  source 1..19: mol_type = other RNA
gatttcttgagccagattt

SEQ ID NO: 34017 - RNA, 19 nt, synthetic construct
  misc_feature 1..19: note = siRNA antisense sequence
  source 1..19: mol_type = other RNA
aaatctggctcaagaaatc

SEQ ID NO: 34018 - RNA, 19 nt, synthetic construct
  misc_feature 1..19: note = siRNA sense sequence
  source 1..19: mol_type = other RNA
atttcttgagccagatttt

SEQ ID NO: 34019 - RNA, 19 nt, synthetic construct
  misc_feature 1..19: note = siRNA antisense sequence
  source 1..19: mol_type = other RNA
aaaatctggctcaagaaat

SEQ ID NO: 34020 - RNA, 19 nt, synthetic construct
  misc_feature 1..19: note = siRNA sense sequence
  source 1..19: mol_type = other RNA
tttcttgagccagattttc

SEQ ID NO: 34021 - RNA, 19 nt, synthetic construct
  misc_feature 1..19: note = siRNA antisense sequence
  source 1..19: mol_type = other RNA
gaaaatctggctcaagaaa

SEQ ID NO: 34022 - RNA, 19 nt, synthetic construct
  misc_feature 1..19: note = siRNA sense sequence
  source 1..19: mol_type = other RNA
ttgagccagattttcttct

SEQ ID NO: 34023 - RNA, 19 nt, synthetic construct
  misc_feature 1..19: note = siRNA antisense sequence
  source 1..19: mol_type = other RNA
agaagaaaatctggctcaa

SEQ ID NO: 34024 - RNA, 19 nt, synthetic construct
  misc_feature 1..19: note = siRNA sense sequence
  source 1..19: mol_type = other RNA
tgagccagattttcttctt

SEQ ID NO: 34025 - RNA, 19 nt, synthetic construct
  misc_feature 1..19: note = siRNA antisense sequence
  source 1..19: mol_type = other RNA
aagaagaaaatctggctca

SEQ ID NO: 34026 - RNA, 19 nt, synthetic construct
  misc_feature 1..19: note = siRNA sense sequence
  source 1..19: mol_type = other RNA
gagccagattttcttctta

SEQ ID NO: 34027 - RNA, 19 nt, synthetic construct
  misc_feature 1..19: note = siRNA antisense sequence
  source 1..19: mol_type = other RNA
taagaagaaaatctggctc

SEQ ID NO: 34028 - RNA, 19 nt, synthetic construct
  misc_feature 1..19: note = siRNA sense sequence
  source 1..19: mol_type = other RNA
cattaattgtattgggaag

SEQ ID NO: 34029 - RNA, 19 nt, synthetic construct
  misc_feature 1..19: note = siRNA antisense sequence
  source 1..19: mol_type = other RNA
cttcccaatacaattaatg

SEQ ID NO: 34030 - RNA, 19 nt, synthetic construct
  misc_feature 1..19: note = siRNA sense sequence
  source 1..19: mol_type = other RNA
aattgtattgggaagttcc

SEQ ID NO: 34031 - RNA, 19 nt, synthetic construct
  misc_feature 1..19: note = siRNA antisense sequence
  source 1..19: mol_type = other RNA
ggaacttcccaatacaatt

SEQ ID NO: 34032 - RNA, 19 nt, synthetic construct
  misc_feature 1..19: note = siRNA sense sequence
  source 1..19: mol_type = other RNA
attgtattgggaagttcca

SEQ ID NO: 34033 - RNA, 19 nt, synthetic construct
  misc_feature 1..19: note = siRNA antisense sequence
  source 1..19: mol_type = other RNA
tggaacttcccaatacaat

SEQ ID NO: 34034 - RNA, 19 nt, synthetic construct
  misc_feature 1..19: note = siRNA sense sequence
  source 1..19: mol_type = other RNA
tgggaagttccaattgttt

SEQ ID NO: 34035 - RNA, 19 nt, synthetic construct
  misc_feature 1..19: note = siRNA antisense sequence
  source 1..19: mol_type = other RNA
aaacaattggaacttccca

SEQ ID NO: 34036 - RNA, 19 nt, synthetic construct
  misc_feature 1..19: note = siRNA sense sequence
  source 1..19: mol_type = other RNA
gggaagttccaattgtttg

SEQ ID NO: 34037 - RNA, 19 nt, synthetic construct
  misc_feature 1..19: note = siRNA antisense sequence
  source 1..19: mol_type = other RNA
caaacaattggaacttccc

SEQ ID NO: 34038 - RNA, 19 nt, synthetic construct
  misc_feature 1..19: note = siRNA sense sequence
  source 1..19: mol_type = other RNA
ggaagttccaattgtttga

SEQ ID NO: 34039 - RNA, 19 nt, synthetic construct
  misc_feature 1..19: note = siRNA antisense sequence
  source 1..19: mol_type = other RNA
tcaaacaattggaacttcc

SEQ ID NO: 34040 - RNA, 19 nt, synthetic construct
  misc_feature 1..19: note = siRNA sense sequence
  source 1..19: mol_type = other RNA
gaagttccaattgtttgaa

SEQ ID NO: 34041 - RNA, 19 nt, synthetic construct
  misc_feature 1..19: note = siRNA antisense sequence
  source 1..19: mol_type = other RNA
ttcaaacaattggaacttc

SEQ ID NO: 34042 - RNA, 19 nt, synthetic construct
  misc_feature 1..19: note = siRNA sense sequence
  source 1..19: mol_type = other RNA
aagttccaattgtttgaag

SEQ ID NO: 34043 - RNA, 19 nt, synthetic construct
  misc_feature 1..19: note = siRNA antisense sequence
  source 1..19: mol_type = other RNA
cttcaaacaattggaactt

SEQ ID NO: 34044 - RNA, 19 nt, synthetic construct
  misc_feature 1..19: note = siRNA sense sequence
  source 1..19: mol_type = other RNA
gacactgagttggatatat

SEQ ID NO: 34045 - RNA, 19 nt, synthetic construct
  misc_feature 1..19: note = siRNA antisense sequence
  source 1..19: mol_type = other RNA
atatatccaactcagtgtc

SEQ ID NO: 34046 - RNA, 19 nt, synthetic construct
  misc_feature 1..19: note = siRNA sense sequence
  source 1..19: mol_type = other RNA
acactgagttggatatatt

SEQ ID NO: 34047 - RNA, 19 nt, synthetic construct
  misc_feature 1..19: note = siRNA antisense sequence
  source 1..19: mol_type = other RNA
aatatatccaactcagtgt

SEQ ID NO: 34048 - RNA, 19 nt, synthetic construct
  misc_feature 1..19: note = siRNA sense sequence
  source 1..19: mol_type = other RNA
cactgagttggatatatta

SEQ ID NO: 34049 - RNA, 19 nt, synthetic construct
  misc_feature 1..19: note = siRNA antisense sequence
  source 1..19: mol_type = other RNA
taatatatccaactcagtg

SEQ ID NO: 34050 - RNA, 19 nt, synthetic construct
  misc_feature 1..19: note = siRNA sense sequence
  source 1..19: mol_type = other RNA
agattatgatgtcatttcc

SEQ ID NO: 34051 - RNA, 19 nt, synthetic construct
  misc_feature 1..19: note = siRNA antisense sequence
  source 1..19: mol_type = other RNA
ggaaatgacatcataatct

SEQ ID NO: 34052 - RNA, 19 nt, synthetic construct
  misc_feature 1..19: note = siRNA sense sequence
  source 1..19: mol_type = other RNA
gattatgatgtcatttcca

SEQ ID NO: 34053 - RNA, 19 nt, synthetic construct
  misc_feature 1..19: note = siRNA antisense sequence
  source 1..19: mol_type = other RNA
tggaaatgacatcataatc

SEQ ID NO: 34054 - RNA, 19 nt, synthetic construct
  misc_feature 1..19: note = siRNA sense sequence
  source 1..19: mol_type = other RNA
atttccaaatggttgtgtt

SEQ ID NO: 34055 - RNA, 19 nt, synthetic construct
  misc_feature 1..19: note = siRNA antisense sequence
  source 1..19: mol_type = other RNA
aacacaaccatttggaaat

SEQ ID NO: 34056 - RNA, 19 nt, synthetic construct
  misc_feature 1..19: note = siRNA sense sequence
  source 1..19: mol_type = other RNA
ttccaaatggttgtgttgc

SEQ ID NO: 34057 - RNA, 19 nt, synthetic construct
  misc_feature 1..19: note = siRNA antisense sequence
  source 1..19: mol_type = other RNA
gcaacacaaccatttggaa

SEQ ID NO: 34058 - RNA, 19 nt, synthetic construct
  misc_feature 1..19: note = siRNA sense sequence
  source 1..19: mol_type = other RNA
tccaaatggttgtgttgct

SEQ ID NO: 34059 - RNA, 19 nt, synthetic construct
  misc_feature 1..19: note = siRNA antisense sequence
  source 1..19: mol_type = other RNA
agcaacacaaccatttgga

SEQ ID NO: 34060 - RNA, 19 nt, synthetic construct
  misc_feature 1..19: note = siRNA sense sequence
  source 1..19: mol_type = other RNA
ccaaatggttgtgttgctt

SEQ ID NO: 34061 - RNA, 19 nt, synthetic construct
  misc_feature 1..19: note = siRNA antisense sequence
  source 1..19: mol_type = other RNA
aagcaacacaaccatttgg

SEQ ID NO: 34062 - RNA, 19 nt, synthetic construct
  misc_feature 1..19: note = siRNA sense sequence
  source 1..19: mol_type = other RNA
caaatggttgtgttgcttc

SEQ ID NO: 34063 - RNA, 19 nt, synthetic construct
  misc_feature 1..19: note = siRNA antisense sequence
  source 1..19: mol_type = other RNA
gaagcaacacaaccatttg

SEQ ID NO: 34064 - RNA, 19 nt, synthetic construct
  misc_feature 1..19: note = siRNA sense sequence
  source 1..19: mol_type = other RNA
aaatggttgtgttgcttct

SEQ ID NO: 34065 - RNA, 19 nt, synthetic construct
  misc_feature 1..19: note = siRNA antisense sequence
  source 1..19: mol_type = other RNA
agaagcaacacaaccattt

SEQ ID NO: 34066 - RNA, 19 nt, synthetic construct
  misc_feature 1..19: note = siRNA sense sequence
  source 1..19: mol_type = other RNA
aatggttgtgttgcttctg

SEQ ID NO: 34067 - RNA, 19 nt, synthetic construct
  misc_feature 1..19: note = siRNA antisense sequence
  source 1..19: mol_type = other RNA
cagaagcaacacaaccatt

SEQ ID NO: 34068 - RNA, 19 nt, synthetic construct
  misc_feature 1..19: note = siRNA sense sequence
  source 1..19: mol_type = other RNA
atggttgtgttgcttctgt

SEQ ID NO: 34069 - RNA, 19 nt, synthetic construct
  misc_feature 1..19: note = siRNA antisense sequence
  source 1..19: mol_type = other RNA
acagaagcaacacaaccat

SEQ ID NO: 34070 - RNA, 19 nt, synthetic construct
  misc_feature 1..19: note = siRNA sense sequence
  source 1..19: mol_type = other RNA
tggttgtgttgcttctgta

SEQ ID NO: 34071 - RNA, 19 nt, synthetic construct
  misc_feature 1..19: note = siRNA antisense sequence
  source 1..19: mol_type = other RNA
tacagaagcaacacaacca

SEQ ID NO: 34072 - RNA, 19 nt, synthetic construct
  misc_feature 1..19: note = siRNA sense sequence
  source 1..19: mol_type = other RNA
ggttgtgttgcttctgtac

SEQ ID NO: 34073 - RNA, 19 nt, synthetic construct
  misc_feature 1..19: note = siRNA antisense sequence
  source 1..19: mol_type = other RNA
gtacagaagcaacacaacc

SEQ ID NO: 34074 - RNA, 19 nt, synthetic construct
  misc_feature 1..19: note = siRNA sense sequence
  source 1..19: mol_type = other RNA
gttgtgttgcttctgtact

SEQ ID NO: 34075 - RNA, 19 nt, synthetic construct
  misc_feature 1..19: note = siRNA antisense sequence
  source 1..19: mol_type = other RNA
agtacagaagcaacacaac

SEQ ID NO: 34076 - RNA, 19 nt, synthetic construct
  misc_feature 1..19: note = siRNA sense sequence
  source 1..19: mol_type = other RNA
ttgtgttgcttctgtactc

SEQ ID NO: 34077 - RNA, 19 nt, synthetic construct
  misc_feature 1..19: note = siRNA antisense sequence
  source 1..19: mol_type = other RNA
gagtacagaagcaacacaa

SEQ ID NO: 34078 - RNA, 19 nt, synthetic construct
  misc_feature 1..19: note = siRNA sense sequence
  source 1..19: mol_type = other RNA
tgtgttgcttctgtactca

SEQ ID NO: 34079 - RNA, 19 nt, synthetic construct
  misc_feature 1..19: note = siRNA antisense sequence
  source 1..19: mol_type = other RNA
tgagtacagaagcaacaca

SEQ ID NO: 34080 - RNA, 19 nt, synthetic construct
  misc_feature 1..19: note = siRNA sense sequence
  source 1..19: mol_type = other RNA
ttgcttctgtactcattgg

SEQ ID NO: 34081 - RNA, 19 nt, synthetic construct
  misc_feature 1..19: note = siRNA antisense sequence
  source 1..19: mol_type = other RNA
ccaatgagtacagaagcaa

SEQ ID NO: 34082 - RNA, 19 nt, synthetic construct
  misc_feature 1..19: note = siRNA sense sequence
  source 1..19: mol_type = other RNA
tgcttctgtactcattggc

SEQ ID NO: 34083 - RNA, 19 nt, synthetic construct
  misc_feature 1..19: note = siRNA antisense sequence
  source 1..19: mol_type = other RNA
gccaatgagtacagaagca

SEQ ID NO: 34084 - RNA, 19 nt, synthetic construct
  misc_feature 1..19: note = siRNA sense sequence
  source 1..19: mol_type = other RNA
gcttctgtactcattggcc

SEQ ID NO: 34085 - RNA, 19 nt, synthetic construct
  misc_feature 1..19: note = siRNA antisense sequence
  source 1..19: mol_type = other RNA
ggccaatgagtacagaagc

SEQ ID NO: 34086 - RNA, 19 nt, synthetic construct
  misc_feature 1..19: note = siRNA sense sequence
  source 1..19: mol_type = other RNA
cttctgtactcattggcca

SEQ ID NO: 34087 - RNA, 19 nt, synthetic construct
  misc_feature 1..19: note = siRNA antisense sequence
  source 1..19: mol_type = other RNA
tggccaatgagtacagaag

SEQ ID NO: 34088 - RNA, 19 nt, synthetic construct
  misc_feature 1..19: note = siRNA sense sequence
  source 1..19: mol_type = other RNA
ttctgtactcattggccaa

SEQ ID NO: 34089 - RNA, 19 nt, synthetic construct
  misc_feature 1..19: note = siRNA antisense sequence
  source 1..19: mol_type = other RNA
ttggccaatgagtacagaa

SEQ ID NO: 34090 - RNA, 19 nt, synthetic construct
  misc_feature 1..19: note = siRNA sense sequence
  source 1..19: mol_type = other RNA
tctgtactcattggccaag

SEQ ID NO: 34091 - RNA, 19 nt, synthetic construct
  misc_feature 1..19: note = siRNA antisense sequence
  source 1..19: mol_type = other RNA
cttggccaatgagtacaga

SEQ ID NO: 34092 - RNA, 19 nt, synthetic construct
  misc_feature 1..19: note = siRNA sense sequence
  source 1..19: mol_type = other RNA
tactcattggccaaggccc

SEQ ID NO: 34093 - RNA, 19 nt, synthetic construct
  misc_feature 1..19: note = siRNA antisense sequence
  source 1..19: mol_type = other RNA
gggccttggccaatgagta

SEQ ID NO: 34094 - RNA, 19 nt, synthetic construct
  misc_feature 1..19: note = siRNA sense sequence
  source 1..19: mol_type = other RNA
actcattggccaaggccct

SEQ ID NO: 34095 - RNA, 19 nt, synthetic construct
  misc_feature 1..19: note = siRNA antisense sequence
  source 1..19: mol_type = other RNA
agggccttggccaatgagt

SEQ ID NO: 34096 - RNA, 19 nt, synthetic construct
  misc_feature 1..19: note = siRNA sense sequence
  source 1..19: mol_type = other RNA
catatctttaccactagag

SEQ ID NO: 34097 - RNA, 19 nt, synthetic construct
  misc_feature 1..19: note = siRNA antisense sequence
  source 1..19: mol_type = other RNA
ctctagtggtaaagatatg

SEQ ID NO: 34098 - RNA, 19 nt, synthetic construct
  misc_feature 1..19: note = siRNA sense sequence
  source 1..19: mol_type = other RNA
atatctttaccactagagg

SEQ ID NO: 34099 - RNA, 19 nt, synthetic construct
  misc_feature 1..19: note = siRNA antisense sequence
  source 1..19: mol_type = other RNA
cctctagtggtaaagatat

SEQ ID NO: 34100 - RNA, 19 nt, synthetic construct
  misc_feature 1..19: note = siRNA sense sequence
  source 1..19: mol_type = other RNA
tatctttaccactagaggt

SEQ ID NO: 34101 - RNA, 19 nt, synthetic construct
  misc_feature 1..19: note = siRNA antisense sequence
  source 1..19: mol_type = other RNA
acctctagtggtaaagata

SEQ ID NO: 34102 - RNA, 19 nt, synthetic construct
  misc_feature 1..19: note = siRNA sense sequence
  source 1..19: mol_type = other RNA
atctttaccactagaggtc

SEQ ID NO: 34103 - RNA, 19 nt, synthetic construct
  misc_feature 1..19: note = siRNA antisense sequence
  source 1..19: mol_type = other RNA
gacctctagtggtaaagat

SEQ ID NO: 34104 - RNA, 19 nt, synthetic construct
  misc_feature 1..19: note = siRNA sense sequence
  source 1..19: mol_type = other RNA
tctttaccactagaggtct

SEQ ID NO: 34105 - RNA, 19 nt, synthetic construct
  misc_feature 1..19: note = siRNA antisense sequence
  source 1..19: mol_type = other RNA
agacctctagtggtaaaga

SEQ ID NO: 34106 - RNA, 19 nt, synthetic construct
  misc_feature 1..19: note = siRNA sense sequence
  source 1..19: mol_type = other RNA
ctttaccactagaggtctg

SEQ ID NO: 34107 - RNA, 19 nt, synthetic construct
  misc_feature 1..19: note = siRNA antisense sequence
  source 1..19: mol_type = other RNA
cagacctctagtggtaaag

SEQ ID NO: 34108 - RNA, 19 nt, synthetic construct
  misc_feature 1..19: note = siRNA sense sequence
  source 1..19: mol_type = other RNA
tttaccactagaggtctgt

SEQ ID NO: 34109 - RNA, 19 nt, synthetic construct
  misc_feature 1..19: note = siRNA antisense sequence
  source 1..19: mol_type = other RNA
acagacctctagtggtaaa

SEQ ID NO: 34110 - RNA, 19 nt, synthetic construct
  misc_feature 1..19: note = siRNA sense sequence
  source 1..19: mol_type = other RNA
ttaccactagaggtctgtg

SEQ ID NO: 34111 - RNA, 19 nt, synthetic construct
  misc_feature 1..19: note = siRNA antisense sequence
  source 1..19: mol_type = other RNA
cacagacctctagtggtaa

SEQ ID NO: 34112 - RNA, 19 nt, synthetic construct
  misc_feature 1..19: note = siRNA sense sequence
  source 1..19: mol_type = other RNA
cactagaggtctgtggctc

SEQ ID NO: 34113 - RNA, 19 nt, synthetic construct
  misc_feature 1..19: note = siRNA antisense sequence
  source 1..19: mol_type = other RNA
gagccacagacctctagtg

SEQ ID NO: 34114 - RNA, 19 nt, synthetic construct
  misc_feature 1..19: note = siRNA sense sequence
  source 1..19: mol_type = other RNA
gtctgtggctcctccttct

SEQ ID NO: 34115 - RNA, 19 nt, synthetic construct
  misc_feature 1..19: note = siRNA antisense sequence
  source 1..19: mol_type = other RNA
agaaggaggagccacagac

SEQ ID NO: 34116 - RNA, 19 nt, synthetic construct
  misc_feature 1..19: note = siRNA sense sequence
  source 1..19: mol_type = other RNA
tctgtggctcctccttctc

SEQ ID NO: 34117 - RNA, 19 nt, synthetic construct
  misc_feature 1..19: note = siRNA antisense sequence
  source 1..19: mol_type = other RNA
gagaaggaggagccacaga

SEQ ID NO: 34118 - RNA, 19 nt, synthetic construct
  misc_feature 1..19: note = siRNA sense sequence
  source 1..19: mol_type = other RNA
ctgtggctcctccttctca

SEQ ID NO: 34119 - RNA, 19 nt, synthetic construct
  misc_feature 1..19: note = siRNA antisense sequence
  source 1..19: mol_type = other RNA
tgagaaggaggagccacag

SEQ ID NO: 34120 - RNA, 19 nt, synthetic construct
  misc_feature 1..19: note = siRNA sense sequence
  source 1..19: mol_type = other RNA
gtggctcctccttctcaag

SEQ ID NO: 34121 - RNA, 19 nt, synthetic construct
  misc_feature 1..19: note = siRNA antisense sequence
  source 1..19: mol_type = other RNA
cttgagaaggaggagccac

SEQ ID NO: 34122 - RNA, 19 nt, synthetic construct
  misc_feature 1..19: note = siRNA sense sequence
  source 1..19: mol_type = other RNA
tcaaggttatggtgctata

SEQ ID NO: 34123 - RNA, 19 nt, synthetic construct
  misc_feature 1..19: note = siRNA antisense sequence
  source 1..19: mol_type = other RNA
tatagcaccataaccttga

SEQ ID NO: 34124 - RNA, 19 nt, synthetic construct
  misc_feature 1..19: note = siRNA sense sequence
  source 1..19: mol_type = other RNA
ctagaatgatgtagtacta

SEQ ID NO: 34125 - RNA, 19 nt, synthetic construct
  misc_feature 1..19: note = siRNA antisense sequence
  source 1..19: mol_type = other RNA
tagtactacatcattctag

SEQ ID NO: 34126 - RNA, 19 nt, synthetic construct
  misc_feature 1..19: note = siRNA sense sequence
  source 1..19: mol_type = other RNA
gaatgatgtagtactatag

SEQ ID NO: 34127 - RNA, 19 nt, synthetic construct
  misc_feature 1..19: note = siRNA antisense sequence
  source 1..19: mol_type = other RNA
ctatagtactacatcattc

SEQ ID NO: 34128 - RNA, 19 nt, synthetic construct
  misc_feature 1..19: note = siRNA sense sequence
  source 1..19: mol_type = other RNA
atgatgtagtactatagag

SEQ ID NO: 34129 - RNA, 19 nt, synthetic construct
  misc_feature 1..19: note = siRNA antisense sequence
  source 1..19: mol_type = other RNA
ctctatagtactacatcat

SEQ ID NO: 34130 - RNA, 19 nt, synthetic construct
  misc_feature 1..19: note = siRNA sense sequence
  source 1..19: mol_type = other RNA
tgatgtagtactatagagt

SEQ ID NO: 34131 - RNA, 19 nt, synthetic construct
  misc_feature 1..19: note = siRNA antisense sequence
  source 1..19: mol_type = other RNA
actctatagtactacatca

SEQ ID NO: 34132 - RNA, 19 nt, synthetic construct
  misc_feature 1..19: note = siRNA sense sequence
  source 1..19: mol_type = other RNA
gatgtagtactatagagtt

SEQ ID NO: 34133 - RNA, 19 nt, synthetic construct
  misc_feature 1..19: note = siRNA antisense sequence
  source 1..19: mol_type = other RNA
aactctatagtactacatc

SEQ ID NO: 34134 - RNA, 19 nt, synthetic construct
  misc_feature 1..19: note = siRNA sense sequence
  source 1..19: mol_type = other RNA
tggattcagttatactttg

SEQ ID NO: 34135 - RNA, 19 nt, synthetic construct
  misc_feature 1..19: note = siRNA antisense sequence
  source 1..19: mol_type = other RNA
caaagtataactgaatcca

SEQ ID NO: 34136 - RNA, 19 nt, synthetic construct
  misc_feature 1..19: note = siRNA sense sequence
  source 1..19: mol_type = other RNA
ggattcagttatactttga

SEQ ID NO: 34137 - RNA, 19 nt, synthetic construct
  misc_feature 1..19: note = siRNA antisense sequence
  source 1..19: mol_type = other RNA
tcaaagtataactgaatcc

SEQ ID NO: 34138 - RNA, 19 nt, synthetic construct
  misc_feature 1..19: note = siRNA sense sequence
  source 1..19: mol_type = other RNA
tcagttatactttgagtca

SEQ ID NO: 34139 - RNA, 19 nt, synthetic construct
  misc_feature 1..19: note = siRNA antisense sequence
  source 1..19: mol_type = other RNA
tgactcaaagtataactga

SEQ ID NO: 34140 - RNA, 19 nt, synthetic construct
  misc_feature 1..19: note = siRNA sense sequence
  source 1..19: mol_type = other RNA
cagttatactttgagtcaa

SEQ ID NO: 34141 - RNA, 19 nt, synthetic construct
  misc_feature 1..19: note = siRNA antisense sequence
  source 1..19: mol_type = other RNA
ttgactcaaagtataactg

SEQ ID NO: 34142 - RNA, 19 nt, synthetic construct
  misc_feature 1..19: note = siRNA sense sequence
  source 1..19: mol_type = other RNA
cttttacagcaaccatata

SEQ ID NO: 34143 - RNA, 19 nt, synthetic construct
  misc_feature 1..19: note = siRNA antisense sequence
  source 1..19: mol_type = other RNA
tatatggttgctgtaaaag

SEQ ID NO: 34144 - RNA, 19 nt, synthetic construct
  misc_feature 1..19: note = siRNA sense sequence
  source 1..19: mol_type = other RNA
acagcaaccatatacatcc

SEQ ID NO: 34145 - RNA, 19 nt, synthetic construct
  misc_feature 1..19: note = siRNA antisense sequence
  source 1..19: mol_type = other RNA
ggatgtatatggttgctgt

SEQ ID NO: 34146 - RNA, 19 nt, synthetic construct
  misc_feature 1..19: note = siRNA sense sequence
  source 1..19: mol_type = other RNA
cagcaaccatatacatcca

SEQ ID NO: 34147 - RNA, 19 nt, synthetic construct
  misc_feature 1..19: note = siRNA antisense sequence
  source 1..19: mol_type = other RNA
tggatgtatatggttgctg

SEQ ID NO: 34148 - RNA, 19 nt, synthetic construct
  misc_feature 1..19: note = siRNA sense sequence
  source 1..19: mol_type = other RNA
agcaaccatatacatccac

SEQ ID NO: 34149 - RNA, 19 nt, synthetic construct
  misc_feature 1..19: note = siRNA antisense sequence
  source 1..19: mol_type = other RNA
gtggatgtatatggttgct

SEQ ID NO: 34150 - RNA, 19 nt, synthetic construct
  misc_feature 1..19: note = siRNA sense sequence
  source 1..19: mol_type = other RNA
gcaaccatatacatccaca

SEQ ID NO: 34151 - RNA, 19 nt, synthetic construct
  misc_feature 1..19: note = siRNA antisense sequence
  source 1..19: mol_type = other RNA
tgtggatgtatatggttgc

SEQ ID NO: 34152 - RNA, 19 nt, synthetic construct
  misc_feature 1..19: note = siRNA sense sequence
  source 1..19: mol_type = other RNA
caaccatatacatccacac

SEQ ID NO: 34153 - RNA, 19 nt, synthetic construct
  misc_feature 1..19: note = siRNA antisense sequence
  source 1..19: mol_type = other RNA
gtgtggatgtatatggttg

SEQ ID NO: 34154 - RNA, 19 nt, synthetic construct
  misc_feature 1..19: note = siRNA sense sequence
  source 1..19: mol_type = other RNA
aaccatatacatccacact

SEQ ID NO: 34155 - RNA, 19 nt, synthetic construct
  misc_feature 1..19: note = siRNA antisense sequence
  source 1..19: mol_type = other RNA
agtgtggatgtatatggtt

SEQ ID NO: 34156 - RNA, 19 nt, synthetic construct
  misc_feature 1..19: note = siRNA sense sequence
  source 1..19: mol_type = other RNA
accatatacatccacactg

SEQ ID NO: 34157 - RNA, 19 nt, synthetic construct
  misc_feature 1..19: note = siRNA antisense sequence
  source 1..19: mol_type = other RNA
cagtgtggatgtatatggt

SEQ ID NO: 34158 - RNA, 19 nt, synthetic construct
  misc_feature 1..19: note = siRNA sense sequence
  source 1..19: mol_type = other RNA
ccatatacatccacactga

SEQ ID NO: 34159 - RNA, 19 nt, synthetic construct
  misc_feature 1..19: note = siRNA antisense sequence
  source 1..19: mol_type = other RNA
tcagtgtggatgtatatgg

SEQ ID NO: 34160 - RNA, 19 nt, synthetic construct
  misc_feature 1..19: note = siRNA sense sequence
  source 1..19: mol_type = other RNA
catatacatccacactgag

SEQ ID NO: 34161 - RNA, 19 nt, synthetic construct
  misc_feature 1..19: note = siRNA antisense sequence
  source 1..19: mol_type = other RNA
ctcagtgtggatgtatatg

SEQ ID NO: 34162 - RNA, 19 nt, synthetic construct
  misc_feature 1..19: note = siRNA sense sequence
  source 1..19: mol_type = other RNA
aaaatttccaacccataag

SEQ ID NO: 34163 - RNA, 19 nt, synthetic construct
  misc_feature 1..19: note = siRNA antisense sequence
  source 1..19: mol_type = other RNA
cttatgggttggaaatttt

SEQ ID NO: 34164 - RNA, 19 nt, synthetic construct
  misc_feature 1..19: note = siRNA sense sequence
  source 1..19: mol_type = other RNA
aaatttccaacccataaga

SEQ ID NO: 34165 - RNA, 19 nt, synthetic construct
  misc_feature 1..19: note = siRNA antisense sequence
  source 1..19: mol_type = other RNA
tcttatgggttggaaattt

SEQ ID NO: 34166 - RNA, 19 nt, synthetic construct
  misc_feature 1..19: note = siRNA sense sequence
  source 1..19: mol_type = other RNA
ttccaacccataagactaa

SEQ ID NO: 34167 - RNA, 19 nt, synthetic construct
  misc_feature 1..19: note = siRNA antisense sequence
  source 1..19: mol_type = other RNA
ttagtcttatgggttggaa

SEQ ID NO: 34168 - RNA, 19 nt, synthetic construct
  misc_feature 1..19: note = siRNA sense sequence
  source 1..19: mol_type = other RNA
ccaacccataagactaata

SEQ ID NO: 34169 - RNA, 19 nt, synthetic construct
  misc_feature 1..19: note = siRNA antisense sequence
  source 1..19: mol_type = other RNA
tattagtcttatgggttgg

SEQ ID NO: 34170 - RNA, 19 nt, synthetic construct
  misc_feature 1..19: note = siRNA sense sequence
  source 1..19: mol_type = other RNA
ttcttccaacctcctgtat

SEQ ID NO: 34171 - RNA, 19 nt, synthetic construct
  misc_feature 1..19: note = siRNA antisense sequence
  source 1..19: mol_type = other RNA
atacaggaggttggaagaa

SEQ ID NO: 34172 - RNA, 19 nt, synthetic construct
  misc_feature 1..19: note = siRNA sense sequence
  source 1..19: mol_type = other RNA
tcttccaacctcctgtatt

SEQ ID NO: 34173 - RNA, 19 nt, synthetic construct
  misc_feature 1..19: note = siRNA antisense sequence
  source 1..19: mol_type = other RNA
aatacaggaggttggaaga

SEQ ID NO: 34174 - RNA, 19 nt, synthetic construct
  misc_feature 1..19: note = siRNA sense sequence
  source 1..19: mol_type = other RNA
cttccaacctcctgtattg

SEQ ID NO: 34175 - RNA, 19 nt, synthetic construct
  misc_feature 1..19: note = siRNA antisense sequence
  source 1..19: mol_type = other RNA
caatacaggaggttggaag

SEQ ID NO: 34176 - RNA, 19 nt, synthetic construct
  misc_feature 1..19: note = siRNA sense sequence
  source 1..19: mol_type = other RNA
ccaacctcctgtattgcct

SEQ ID NO: 34177 - RNA, 19 nt, synthetic construct
  misc_feature 1..19: note = siRNA antisense sequence
  source 1..19: mol_type = other RNA
aggcaatacaggaggttgg

SEQ ID NO: 34178 - RNA, 19 nt, synthetic construct
  misc_feature 1..19: note = siRNA sense sequence
  source 1..19: mol_type = other RNA
cctcctgtattgcctcaaa

SEQ ID NO: 34179 - RNA, 19 nt, synthetic construct
  misc_feature 1..19: note = siRNA antisense sequence
  source 1..19: mol_type = other RNA
tttgaggcaatacaggagg

SEQ ID NO: 34180 - RNA, 19 nt, synthetic construct
  misc_feature 1..19: note = siRNA sense sequence
  source 1..19: mol_type = other RNA
ctcctgtattgcctcaaaa

SEQ ID NO: 34181 - RNA, 19 nt, synthetic construct
  misc_feature 1..19: note = siRNA antisense sequence
  source 1..19: mol_type = other RNA
ttttgaggcaatacaggag

SEQ ID NO: 34182 - RNA, 19 nt, synthetic construct
  misc_feature 1..19: note = siRNA sense sequence
  source 1..19: mol_type = other RNA
tcctgtattgcctcaaaat

SEQ ID NO: 34183 - RNA, 19 nt, synthetic construct
  misc_feature 1..19: note = siRNA antisense sequence
  source 1..19: mol_type = other RNA
attttgaggcaatacagga

SEQ ID NO: 34184 - RNA, 19 nt, synthetic construct
  misc_feature 1..19: note = siRNA sense sequence
  source 1..19: mol_type = other RNA
cctgtattgcctcaaaatg

SEQ ID NO: 34185 - RNA, 19 nt, synthetic construct
  misc_feature 1..19: note = siRNA antisense sequence
  source 1..19: mol_type = other RNA
cattttgaggcaatacagg

SEQ ID NO: 34186 - RNA, 19 nt, synthetic construct
  misc_feature 1..19: note = siRNA sense sequence
  source 1..19: mol_type = other RNA
ctgtattgcctcaaaatgg

SEQ ID NO: 34187 - RNA, 19 nt, synthetic construct
  misc_feature 1..19: note = siRNA antisense sequence
  source 1..19: mol_type = other RNA
ccattttgaggcaatacag

SEQ ID NO: 34188 - RNA, 19 nt, synthetic construct
  misc_feature 1..19: note = siRNA sense sequence
  source 1..19: mol_type = other RNA
tgtattgcctcaaaatgga

SEQ ID NO: 34189 - RNA, 19 nt, synthetic construct
  misc_feature 1..19: note = siRNA antisense sequence
  source 1..19: mol_type = other RNA
tccattttgaggcaataca

SEQ ID NO: 34190 - RNA, 19 nt, synthetic construct
  misc_feature 1..19: note = siRNA sense sequence
  source 1..19: mol_type = other RNA
gtattgcctcaaaatggaa

SEQ ID NO: 34191 - RNA, 19 nt, synthetic construct
  misc_feature 1..19: note = siRNA antisense sequence
  source 1..19: mol_type = other RNA
ttccattttgaggcaatac

SEQ ID NO: 34192 - RNA, 19 nt, synthetic construct
  misc_feature 1..19: note = siRNA sense sequence
  source 1..19: mol_type = other RNA
tattgcctcaaaatggaat

SEQ ID NO: 34193 - RNA, 19 nt, synthetic construct
  misc_feature 1..19: note = siRNA antisense sequence
  source 1..19: mol_type = other RNA
attccattttgaggcaata

SEQ ID NO: 34194 - RNA, 19 nt, synthetic construct
  misc_feature 1..19: note = siRNA sense sequence
  source 1..19: mol_type = other RNA
attgcctcaaaatggaata

SEQ ID NO: 34195 - RNA, 19 nt, synthetic construct
  misc_feature 1..19: note = siRNA antisense sequence
  source 1..19: mol_type = other RNA
tattccattttgaggcaat

SEQ ID NO: 34196 - RNA, 19 nt, synthetic construct
  misc_feature 1..19: note = siRNA sense sequence
  source 1..19: mol_type = other RNA
tatcaccttttagttacag

SEQ ID NO: 34197 - RNA, 19 nt, synthetic construct
  misc_feature 1..19: note = siRNA antisense sequence
  source 1..19: mol_type = other RNA
ctgtaactaaaaggtgata

SEQ ID NO: 34198 - RNA, 19 nt, synthetic construct
  misc_feature 1..19: note = siRNA sense sequence
  source 1..19: mol_type = other RNA
atcaccttttagttacagt

SEQ ID NO: 34199 - RNA, 19 nt, synthetic construct
  misc_feature 1..19: note = siRNA antisense sequence
  source 1..19: mol_type = other RNA
actgtaactaaaaggtgat

SEQ ID NO: 34200 - RNA, 19 nt, synthetic construct
  misc_feature 1..19: note = siRNA sense sequence
  source 1..19: mol_type = other RNA
tcaccttttagttacagtg

SEQ ID NO: 34201 - RNA, 19 nt, synthetic construct
  misc_feature 1..19: note = siRNA antisense sequence
  source 1..19: mol_type = other RNA
cactgtaactaaaaggtga

SEQ ID NO: 34202 - RNA, 19 nt, synthetic construct
  misc_feature 1..19: note = siRNA sense sequence
  source 1..19: mol_type = other RNA
gaatatatgactttaggag

SEQ ID NO: 34203 - RNA, 19 nt, synthetic construct
  misc_feature 1..19: note = siRNA antisense sequence
  source 1..19: mol_type = other RNA
ctcctaaagtcatatattc

SEQ ID NO: 34204 - RNA, 19 nt, synthetic construct
  misc_feature 1..19: note = siRNA sense sequence
  source 1..19: mol_type = other RNA
actttaggagtttatacca

SEQ ID NO: 34205 - RNA, 19 nt, synthetic construct
  misc_feature 1..19: note = siRNA antisense sequence
  source 1..19: mol_type = other RNA
tggtataaactcctaaagt

SEQ ID NO: 34206 - RNA, 19 nt, synthetic construct
  misc_feature 1..19: note = siRNA sense sequence
  source 1..19: mol_type = other RNA
ctttaggagtttataccat

SEQ ID NO: 34207 - RNA, 19 nt, synthetic construct
  misc_feature 1..19: note = siRNA antisense sequence
  source 1..19: mol_type = other RNA
atggtataaactcctaaag

SEQ ID NO: 34208 - RNA, 19 nt, synthetic construct
  misc_feature 1..19: note = siRNA sense sequence
  source 1..19: mol_type = other RNA
tttaggagtttataccatg

SEQ ID NO: 34209 - RNA, 19 nt, synthetic construct
  misc_feature 1..19: note = siRNA antisense sequence
  source 1..19: mol_type = other RNA
catggtataaactcctaaa

SEQ ID NO: 34210 - RNA, 19 nt, synthetic construct
  misc_feature 1..19: note = siRNA sense sequence
  source 1..19: mol_type = other RNA
ttaggagtttataccatgt

SEQ ID NO: 34211 - RNA, 19 nt, synthetic construct
  misc_feature 1..19: note = siRNA antisense sequence
  source 1..19: mol_type = other RNA
acatggtataaactcctaa

SEQ ID NO: 34212 - RNA, 19 nt, synthetic construct
  misc_feature 1..19: note = siRNA sense sequence
  source 1..19: mol_type = other RNA
taggagtttataccatgtg

SEQ ID NO: 34213 - RNA, 19 nt, synthetic construct
  misc_feature 1..19: note = siRNA antisense sequence
  source 1..19: mol_type = other RNA
cacatggtataaactccta

SEQ ID NO: 34214 - RNA, 19 nt, synthetic construct
  misc_feature 1..19: note = siRNA sense sequence
  source 1..19: mol_type = other RNA
agtttataccatgtgaatg

SEQ ID NO: 34215 - RNA, 19 nt, synthetic construct
  misc_feature 1..19: note = siRNA antisense sequence
  source 1..19: mol_type = other RNA
cattcacatggtataaact

SEQ ID NO: 34216 - RNA, 19 nt, synthetic construct
  misc_feature 1..19: note = siRNA sense sequence
  source 1..19: mol_type = other RNA
gggtgaattaactctttcc

SEQ ID NO: 34217 - RNA, 19 nt, synthetic construct
  misc_feature 1..19: note = siRNA antisense sequence
  source 1..19: mol_type = other RNA
ggaaagagttaattcaccc

SEQ ID NO: 34218 - RNA, 19 nt, synthetic construct
  misc_feature 1..19: note = siRNA sense sequence
  source 1..19: mol_type = other RNA
ggtgaattaactctttcca

SEQ ID NO: 34219 - RNA, 19 nt, synthetic construct
  misc_feature 1..19: note = siRNA antisense sequence
  source 1..19: mol_type = other RNA
tggaaagagttaattcacc

SEQ ID NO: 34220 - RNA, 19 nt, synthetic construct
  misc_feature 1..19: note = siRNA sense sequence
  source 1..19: mol_type = other RNA
gtgaattaactctttccac

SEQ ID NO: 34221 - RNA, 19 nt, synthetic construct
  misc_feature 1..19: note = siRNA antisense sequence
  source 1..19: mol_type = other RNA
gtggaaagagttaattcac

SEQ ID NO: 34222 - RNA, 19 nt, synthetic construct
  misc_feature 1..19: note = siRNA sense sequence
  source 1..19: mol_type = other RNA
tgaattaactctttccacc

SEQ ID NO: 34223 - RNA, 19 nt, synthetic construct
  misc_feature 1..19: note = siRNA antisense sequence
  source 1..19: mol_type = other RNA
ggtggaaagagttaattca

SEQ ID NO: 34224 - RNA, 19 nt, synthetic construct
  misc_feature 1..19: note = siRNA sense sequence
  source 1..19: mol_type = other RNA
gaattaactctttccacca

SEQ ID NO: 34225 - RNA, 19 nt, synthetic construct
  misc_feature 1..19: note = siRNA antisense sequence
  source 1..19: mol_type = other RNA
tggtggaaagagttaattc

SEQ ID NO: 34226 - RNA, 19 nt, synthetic construct
  misc_feature 1..19: note = siRNA sense sequence
  source 1..19: mol_type = other RNA
attaactctttccaccagg

SEQ ID NO: 34227 - RNA, 19 nt, synthetic construct
  misc_feature 1..19: note = siRNA antisense sequence
  source 1..19: mol_type = other RNA
cctggtggaaagagttaat

SEQ ID NO: 34228 - RNA, 19 nt, synthetic construct
  misc_feature 1..19: note = siRNA sense sequence
  source 1..19: mol_type = other RNA
ttaactctttccaccagga

SEQ ID NO: 34229 - RNA, 19 nt, synthetic construct
  misc_feature 1..19: note = siRNA antisense sequence
  source 1..19: mol_type = other RNA
tcctggtggaaagagttaa

SEQ ID NO: 34230 - RNA, 19 nt, synthetic construct
  misc_feature 1..19: note = siRNA sense sequence
  source 1..19: mol_type = other RNA
taactctttccaccaggag

SEQ ID NO: 34231 - RNA, 19 nt, synthetic construct
  misc_feature 1..19: note = siRNA antisense sequence
  source 1..19: mol_type = other RNA
ctcctggtggaaagagtta

SEQ ID NO: 34232 - RNA, 19 nt, synthetic construct
  misc_feature 1..19: note = siRNA sense sequence
  source 1..19: mol_type = other RNA
aactctttccaccaggagg

SEQ ID NO: 34233 - RNA, 19 nt, synthetic construct
  misc_feature 1..19: note = siRNA antisense sequence
  source 1..19: mol_type = other RNA
cctcctggtggaaagagtt

SEQ ID NO: 34234 - RNA, 19 nt, synthetic construct
  misc_feature 1..19: note = siRNA sense sequence
  source 1..19: mol_type = other RNA
actctttccaccaggaggc

SEQ ID NO: 34235 - RNA, 19 nt, synthetic construct
  misc_feature 1..19: note = siRNA antisense sequence
  source 1..19: mol_type = other RNA
gcctcctggtggaaagagt

SEQ ID NO: 34236 - RNA, 19 nt, synthetic construct
  misc_feature 1..19: note = siRNA sense sequence
  source 1..19: mol_type = other RNA
ctctttccaccaggaggct

SEQ ID NO: 34237 - RNA, 19 nt, synthetic construct
  misc_feature 1..19: note = siRNA antisense sequence
  source 1..19: mol_type = other RNA
agcctcctggtggaaagag

SEQ ID NO: 34238 - RNA, 19 nt, synthetic construct
  misc_feature 1..19: note = siRNA sense sequence
  source 1..19: mol_type = other RNA
ccaccaggaggctttggca

SEQ ID NO: 34239 - RNA, 19 nt, synthetic construct
  misc_feature 1..19: note = siRNA antisense sequence
  source 1..19: mol_type = other RNA
tgccaaagcctcctggtgg

SEQ ID NO: 34240 - RNA, 19 nt, synthetic construct
  misc_feature 1..19: note = siRNA sense sequence
  source 1..19: mol_type = other RNA
caccaggaggctttggcaa

SEQ ID NO: 34241 - RNA, 19 nt, synthetic construct
  misc_feature 1..19: note = siRNA antisense sequence
  source 1..19: mol_type = other RNA
ttgccaaagcctcctggtg

SEQ ID NO: 34242 - RNA, 19 nt, synthetic construct
  misc_feature 1..19: note = siRNA sense sequence
  source 1..19: mol_type = other RNA
accaggaggctttggcaag

SEQ ID NO: 34243 - RNA, 19 nt, synthetic construct
  misc_feature 1..19: note = siRNA antisense sequence
  source 1..19: mol_type = other RNA
cttgccaaagcctcctggt

SEQ ID NO: 34244 - RNA, 19 nt, synthetic construct
  misc_feature 1..19: note = siRNA sense sequence
  source 1..19: mol_type = other RNA
ccaggaggctttggcaaga

SEQ ID NO: 34245 - RNA, 19 nt, synthetic construct
  misc_feature 1..19: note = siRNA antisense sequence
  source 1..19: mol_type = other RNA
tcttgccaaagcctcctgg

SEQ ID NO: 34246 - RNA, 19 nt, synthetic construct
  misc_feature 1..19: note = siRNA sense sequence
  source 1..19: mol_type = other RNA
gaggctttggcaagaggta

SEQ ID NO: 34247 - RNA, 19 nt, synthetic construct
  misc_feature 1..19: note = siRNA antisense sequence
  source 1..19: mol_type = other RNA
tacctcttgccaaagcctc

SEQ ID NO: 34248 - RNA, 19 nt, synthetic construct
  misc_feature 1..19: note = siRNA sense sequence
  source 1..19: mol_type = other RNA
aggctttggcaagaggtaa

SEQ ID NO: 34249 - RNA, 19 nt, synthetic construct
  misc_feature 1..19: note = siRNA antisense sequence
  source 1..19: mol_type = other RNA
ttacctcttgccaaagcct

SEQ ID NO: 34250 - RNA, 19 nt, synthetic construct
  misc_feature 1..19: note = siRNA sense sequence
  source 1..19: mol_type = other RNA
gctttggcaagaggtaaga

SEQ ID NO: 34251 - RNA, 19 nt, synthetic construct
  misc_feature 1..19: note = siRNA antisense sequence
  source 1..19: mol_type = other RNA
tcttacctcttgccaaagc

SEQ ID NO: 34252 - RNA, 19 nt, synthetic construct
  misc_feature 1..19: note = siRNA sense sequence
  source 1..19: mol_type = other RNA
ctttggcaagaggtaagag

SEQ ID NO: 34253 - RNA, 19 nt, synthetic construct
  misc_feature 1..19: note = siRNA antisense sequence
  source 1..19: mol_type = other RNA
ctcttacctcttgccaaag

SEQ ID NO: 34254 - RNA, 19 nt, synthetic construct
  misc_feature 1..19: note = siRNA sense sequence
  source 1..19: mol_type = other RNA
tttggcaagaggtaagagc

SEQ ID NO: 34255 - RNA, 19 nt, synthetic construct
  misc_feature 1..19: note = siRNA antisense sequence
  source 1..19: mol_type = other RNA
gctcttacctcttgccaaa

SEQ ID NO: 34256 - RNA, 19 nt, synthetic construct
  misc_feature 1..19: note = siRNA sense sequence
  source 1..19: mol_type = other RNA
tggcaagaggtaagagcta

SEQ ID NO: 34257 - RNA, 19 nt, synthetic construct
  misc_feature 1..19: note = siRNA antisense sequence
  source 1..19: mol_type = other RNA
tagctcttacctcttgcca

SEQ ID NO: 34258 - RNA, 19 nt, synthetic construct
  misc_feature 1..19: note = siRNA sense sequence
  source 1..19: mol_type = other RNA
ggcaagaggtaagagctac

SEQ ID NO: 34259 - RNA, 19 nt, synthetic construct
  misc_feature 1..19: note = siRNA antisense sequence
  source 1..19: mol_type = other RNA
gtagctcttacctcttgcc

SEQ ID NO: 34260 - RNA, 19 nt, synthetic construct
  misc_feature 1..19: note = siRNA sense sequence
  source 1..19: mol_type = other RNA
gtaagagctaccaagaatg

SEQ ID NO: 34261 - RNA, 19 nt, synthetic construct
  misc_feature 1..19: note = siRNA antisense sequence
  source 1..19: mol_type = other RNA
cattcttggtagctcttac

SEQ ID NO: 34262 - RNA, 19 nt, synthetic construct
  misc_feature 1..19: note = siRNA sense sequence
  source 1..19: mol_type = other RNA
gagctaccaagaatgtacc

SEQ ID NO: 34263 - RNA, 19 nt, synthetic construct
  misc_feature 1..19: note = siRNA antisense sequence
  source 1..19: mol_type = other RNA
ggtacattcttggtagctc

SEQ ID NO: 34264 - RNA, 19 nt, synthetic construct
  misc_feature 1..19: note = siRNA sense sequence
  source 1..19: mol_type = other RNA
taccaagaatgtaccaggg

SEQ ID NO: 34265 - RNA, 19 nt, synthetic construct
  misc_feature 1..19: note = siRNA antisense sequence
  source 1..19: mol_type = other RNA
ccctggtacattcttggta

SEQ ID NO: 34266 - RNA, 19 nt, synthetic construct
  misc_feature 1..19: note = siRNA sense sequence
  source 1..19: mol_type = other RNA
agaatgtaccagggctcag

SEQ ID NO: 34267 - RNA, 19 nt, synthetic construct
  misc_feature 1..19: note = siRNA antisense sequence
  source 1..19: mol_type = other RNA
ctgagccctggtacattct

SEQ ID NO: 34268 - RNA, 19 nt, synthetic construct
  misc_feature 1..19: note = siRNA sense sequence
  source 1..19: mol_type = other RNA
gaatgtaccagggctcagg

SEQ ID NO: 34269 - RNA, 19 nt, synthetic construct
  misc_feature 1..19: note = siRNA antisense sequence
  source 1..19: mol_type = other RNA
cctgagccctggtacattc

SEQ ID NO: 34270 - RNA, 19 nt, synthetic construct
  misc_feature 1..19: note = siRNA sense sequence
  source 1..19: mol_type = other RNA
aatgtaccagggctcaggc

SEQ ID NO: 34271 - RNA, 19 nt, synthetic construct
  misc_feature 1..19: note = siRNA antisense sequence
  source 1..19: mol_type = other RNA
gcctgagccctggtacatt

SEQ ID NO: 34272 - RNA, 19 nt, synthetic construct
  misc_feature 1..19: note = siRNA sense sequence
  source 1..19: mol_type = other RNA
atgtaccagggctcaggct

SEQ ID NO: 34273 - RNA, 19 nt, synthetic construct
  misc_feature 1..19: note = siRNA antisense sequence
  source 1..19: mol_type = other RNA
agcctgagccctggtacat

SEQ ID NO: 34274 - RNA, 19 nt, synthetic construct
  misc_feature 1..19: note = siRNA sense sequence
  source 1..19: mol_type = other RNA
tgtaccagggctcaggctt

SEQ ID NO: 34275 - RNA, 19 nt, synthetic construct
  misc_feature 1..19: note = siRNA antisense sequence
  source 1..19: mol_type = other RNA
aagcctgagccctggtaca

SEQ ID NO: 34276 - RNA, 19 nt, synthetic construct
  misc_feature 1..19: note = siRNA sense sequence
  source 1..19: mol_type = other RNA
gtaccagggctcaggcttg

SEQ ID NO: 34277 - RNA, 19 nt, synthetic construct
  misc_feature 1..19: note = siRNA antisense sequence
  source 1..19: mol_type = other RNA
caagcctgagccctggtac

SEQ ID NO: 34278 - RNA, 19 nt, synthetic construct
  misc_feature 1..19: note = siRNA sense sequence
  source 1..19: mol_type = other RNA
taccagggctcaggcttgg

SEQ ID NO: 34279 - RNA, 19 nt, synthetic construct
  misc_feature 1..19: note = siRNA antisense sequence
  source 1..19: mol_type = other RNA
ccaagcctgagccctggta

SEQ ID NO: 34280 - RNA, 19 nt, synthetic construct
  misc_feature 1..19: note = siRNA sense sequence
  source 1..19: mol_type = other RNA
ctctccagctcttcattat

SEQ ID NO: 34281 - RNA, 19 nt, synthetic construct
  misc_feature 1..19: note = siRNA antisense sequence
  source 1..19: mol_type = other RNA
ataatgaagagctggagag

SEQ ID NO: 34282 - RNA, 19 nt, synthetic construct
  misc_feature 1..19: note = siRNA sense sequence
  source 1..19: mol_type = other RNA
tcttcattatagagctcat

SEQ ID NO: 34283 - RNA, 19 nt, synthetic construct
  misc_feature 1..19: note = siRNA antisense sequence
  source 1..19: mol_type = other RNA
atgagctctataatgaaga

SEQ ID NO: 34284 - RNA, 19 nt, synthetic construct
  misc_feature 1..19: note = siRNA sense sequence
  source 1..19: mol_type = other RNA
cttcattatagagctcata

SEQ ID NO: 34285 - RNA, 19 nt, synthetic construct
  misc_feature 1..19: note = siRNA antisense sequence
  source 1..19: mol_type = other RNA
tatgagctctataatgaag

SEQ ID NO: 34286 - RNA, 19 nt, synthetic construct
  misc_feature 1..19: note = siRNA sense sequence
  source 1..19: mol_type = other RNA
ttcattatagagctcatac

SEQ ID NO: 34287 - RNA, 19 nt, synthetic construct
  misc_feature 1..19: note = siRNA antisense sequence
  source 1..19: mol_type = other RNA
gtatgagctctataatgaa

SEQ ID NO: 34288 - RNA, 19 nt, synthetic construct
  misc_feature 1..19: note = siRNA sense sequence
  source 1..19: mol_type = other RNA
tcattatagagctcatact

SEQ ID NO: 34289 - RNA, 19 nt, synthetic construct
  misc_feature 1..19: note = siRNA antisense sequence
  source 1..19: mol_type = other RNA
agtatgagctctataatga

SEQ ID NO: 34290 - RNA, 19 nt, synthetic construct
  misc_feature 1..19: note = siRNA sense sequence
  source 1..19: mol_type = other RNA
cattatagagctcatactt

SEQ ID NO: 34291 - RNA, 19 nt, synthetic construct
  misc_feature 1..19: note = siRNA antisense sequence
  source 1..19: mol_type = other RNA
aagtatgagctctataatg

SEQ ID NO: 34292 - RNA, 19 nt, synthetic construct
  misc_feature 1..19: note = siRNA sense sequence
  source 1..19: mol_type = other RNA
ttatagagctcatactttc

SEQ ID NO: 34293 - RNA, 19 nt, synthetic construct
  misc_feature 1..19: note = siRNA antisense sequence
  source 1..19: mol_type = other RNA
gaaagtatgagctctataa

SEQ ID NO: 34294 - RNA, 19 nt, synthetic construct
  misc_feature 1..19: note = siRNA sense sequence
  source 1..19: mol_type = other RNA
tatagagctcatactttct

SEQ ID NO: 34295 - RNA, 19 nt, synthetic construct
  misc_feature 1..19: note = siRNA antisense sequence
  source 1..19: mol_type = other RNA
agaaagtatgagctctata

SEQ ID NO: 34296 - RNA, 19 nt, synthetic construct
  misc_feature 1..19: note = siRNA sense sequence
  source 1..19: mol_type = other RNA
agagctcatactttctaga

SEQ ID NO: 34297 - RNA, 19 nt, synthetic construct
  misc_feature 1..19: note = siRNA antisense sequence
  source 1..19: mol_type = other RNA
tctagaaagtatgagctct

SEQ ID NO: 34298 - RNA, 19 nt, synthetic construct
  misc_feature 1..19: note = siRNA sense sequence
  source 1..19: mol_type = other RNA
gagctcatactttctagat

SEQ ID NO: 34299 - RNA, 19 nt, synthetic construct
  misc_feature 1..19: note = siRNA antisense sequence
  source 1..19: mol_type = other RNA
atctagaaagtatgagctc

SEQ ID NO: 34300 - RNA, 19 nt, synthetic construct
  misc_feature 1..19: note = siRNA sense sequence
  source 1..19: mol_type = other RNA
agctcatactttctagata

SEQ ID NO: 34301 - RNA, 19 nt, synthetic construct
  misc_feature 1..19: note = siRNA antisense sequence
  source 1..19: mol_type = other RNA
tatctagaaagtatgagct

SEQ ID NO: 34302 - RNA, 19 nt, synthetic construct
  misc_feature 1..19: note = siRNA sense sequence
  source 1..19: mol_type = other RNA
gctcatactttctagatat

SEQ ID NO: 34303 - RNA, 19 nt, synthetic construct
  misc_feature 1..19: note = siRNA antisense sequence
  source 1..19: mol_type = other RNA
atatctagaaagtatgagc

SEQ ID NO: 34304 - RNA, 19 nt, synthetic construct
  misc_feature 1..19: note = siRNA sense sequence
  source 1..19: mol_type = other RNA
tactttctagatatgctgt

SEQ ID NO: 34305 - RNA, 19 nt, synthetic construct
  misc_feature 1..19: note = siRNA antisense sequence
  source 1..19: mol_type = other RNA
acagcatatctagaaagta

SEQ ID NO: 34306 - RNA, 19 nt, synthetic construct
  misc_feature 1..19: note = siRNA sense sequence
  source 1..19: mol_type = other RNA
gattctcaggtggttcagg

SEQ ID NO: 34307 - RNA, 19 nt, synthetic construct
  misc_feature 1..19: note = siRNA antisense sequence
  source 1..19: mol_type = other RNA
cctgaaccacctgagaatc

SEQ ID NO: 34308 - RNA, 19 nt, synthetic construct
  misc_feature 1..19: note = siRNA sense sequence
  source 1..19: mol_type = other RNA
attctcaggtggttcaggt

SEQ ID NO: 34309 - RNA, 19 nt, synthetic construct
  misc_feature 1..19: note = siRNA antisense sequence
  source 1..19: mol_type = other RNA
acctgaaccacctgagaat

SEQ ID NO: 34310 - RNA, 19 nt, synthetic construct
  misc_feature 1..19: note = siRNA sense sequence
  source 1..19: mol_type = other RNA
ttctcaggtggttcaggtc

SEQ ID NO: 34311 - RNA, 19 nt, synthetic construct
  misc_feature 1..19: note = siRNA antisense sequence
  source 1..19: mol_type = other RNA
gacctgaaccacctgagaa

SEQ ID NO: 34312 - RNA, 19 nt, synthetic construct
  misc_feature 1..19: note = siRNA sense sequence
  source 1..19: mol_type = other RNA
tctcaggtggttcaggtcg

SEQ ID NO: 34313 - RNA, 19 nt, synthetic construct
  misc_feature 1..19: note = siRNA antisense sequence
  source 1..19: mol_type = other RNA
cgacctgaaccacctgaga

SEQ ID NO: 34314 - RNA, 19 nt, synthetic construct
  misc_feature 1..19: note = siRNA sense sequence
  source 1..19: mol_type = other RNA
ctcaggtggttcaggtcgg

SEQ ID NO: 34315 - RNA, 19 nt, synthetic construct
  misc_feature 1..19: note = siRNA antisense sequence
  source 1..19: mol_type = other RNA
ccgacctgaaccacctgag

SEQ ID NO: 34316 - RNA, 19 nt, synthetic construct
  misc_feature 1..19: note = siRNA sense sequence
  source 1..19: mol_type = other RNA
tcaggtggttcaggtcggt

SEQ ID NO: 34317 - RNA, 19 nt, synthetic construct
  misc_feature 1..19: note = siRNA antisense sequence
  source 1..19: mol_type = other RNA
accgacctgaaccacctga

SEQ ID NO: 34318 - RNA, 19 nt, synthetic construct
  misc_feature 1..19: note = siRNA sense sequence
  source 1..19: mol_type = other RNA
caggtggttcaggtcggtg

SEQ ID NO: 34319 - RNA, 19 nt, synthetic construct
  misc_feature 1..19: note = siRNA antisense sequence
  source 1..19: mol_type = other RNA
caccgacctgaaccacctg

SEQ ID NO: 34320 - RNA, 19 nt, synthetic construct
  misc_feature 1..19: note = siRNA sense sequence
  source 1..19: mol_type = other RNA
aggtggttcaggtcggtga

SEQ ID NO: 34321 - RNA, 19 nt, synthetic construct
  misc_feature 1..19: note = siRNA antisense sequence
  source 1..19: mol_type = other RNA
tcaccgacctgaaccacct

SEQ ID NO: 34322 - RNA, 19 nt, synthetic construct
  misc_feature 1..19: note = siRNA sense sequence
  source 1..19: mol_type = other RNA
tcaggtcggtgaattcctt

SEQ ID NO: 34323 - RNA, 19 nt, synthetic construct
  misc_feature 1..19: note = siRNA antisense sequence
  source 1..19: mol_type = other RNA
aaggaattcaccgacctga

SEQ ID NO: 34324 - RNA, 19 nt, synthetic construct
  misc_feature 1..19: note = siRNA sense sequence
  source 1..19: mol_type = other RNA
caggtcggtgaattcctta

SEQ ID NO: 34325 - RNA, 19 nt, synthetic construct
  misc_feature 1..19: note = siRNA antisense sequence
  source 1..19: mol_type = other RNA
taaggaattcaccgacctg

SEQ ID NO: 34326 - RNA, 19 nt, synthetic construct
  misc_feature 1..19: note = siRNA sense sequence
  source 1..19: mol_type = other RNA
aggtcggtgaattccttag

SEQ ID NO: 34327 - RNA, 19 nt, synthetic construct
  misc_feature 1..19: note = siRNA antisense sequence
  source 1..19: mol_type = other RNA
ctaaggaattcaccgacct

SEQ ID NO: 34328 - RNA, 19 nt, synthetic construct
  misc_feature 1..19: note = siRNA sense sequence
  source 1..19: mol_type = other RNA
ggtcggtgaattccttagt

SEQ ID NO: 34329 - RNA, 19 nt, synthetic construct
  misc_feature 1..19: note = siRNA antisense sequence
  source 1..19: mol_type = other RNA
actaaggaattcaccgacc

SEQ ID NO: 34330 - RNA, 19 nt, synthetic construct
  misc_feature 1..19: note = siRNA sense sequence
  source 1..19: mol_type = other RNA
gtcggtgaattccttagta

SEQ ID NO: 34331 - RNA, 19 nt, synthetic construct
  misc_feature 1..19: note = siRNA antisense sequence
  source 1..19: mol_type = other RNA
tactaaggaattcaccgac

SEQ ID NO: 34332 - RNA, 19 nt, synthetic construct
  misc_feature 1..19: note = siRNA sense sequence
  source 1..19: mol_type = other RNA
tcggtgaattccttagtag

SEQ ID NO: 34333 - RNA, 19 nt, synthetic construct
  misc_feature 1..19: note = siRNA antisense sequence
  source 1..19: mol_type = other RNA
ctactaaggaattcaccga

SEQ ID NO: 34334 - RNA, 19 nt, synthetic construct
  misc_feature 1..19: note = siRNA sense sequence
  source 1..19: mol_type = other RNA
cggtgaattccttagtaga

SEQ ID NO: 34335 - RNA, 19 nt, synthetic construct
  misc_feature 1..19: note = siRNA antisense sequence
  source 1..19: mol_type = other RNA
tctactaaggaattcaccg

SEQ ID NO: 34336 - RNA, 19 nt, synthetic construct
  misc_feature 1..19: note = siRNA sense sequence
  source 1..19: mol_type = other RNA
ggtgaattccttagtagaa

SEQ ID NO: 34337 - RNA, 19 nt, synthetic construct
  misc_feature 1..19: note = siRNA antisense sequence
  source 1..19: mol_type = other RNA
ttctactaaggaattcacc

SEQ ID NO: 34338 - RNA, 19 nt, synthetic construct
  misc_feature 1..19: note = siRNA sense sequence
  source 1..19: mol_type = other RNA
gagtcactgcagggtcacc

SEQ ID NO: 34339 - RNA, 19 nt, synthetic construct
  misc_feature 1..19: note = siRNA antisense sequence
  source 1..19: mol_type = other RNA
ggtgaccctgcagtgactc

SEQ ID NO: 34340 - RNA, 19 nt, synthetic construct
  misc_feature 1..19: note = siRNA sense sequence
  source 1..19: mol_type = other RNA
agtcactgcagggtcaccc

SEQ ID NO: 34341 - RNA, 19 nt, synthetic construct
  misc_feature 1..19: note = siRNA antisense sequence
  source 1..19: mol_type = other RNA
gggtgaccctgcagtgact

SEQ ID NO: 34342 - RNA, 19 nt, synthetic construct
  misc_feature 1..19: note = siRNA sense sequence
  source 1..19: mol_type = other RNA
gggtcaccctgtccttgta

SEQ ID NO: 34343 - RNA, 19 nt, synthetic construct
  misc_feature 1..19: note = siRNA antisense sequence
  source 1..19: mol_type = other RNA
tacaaggacagggtgaccc

SEQ ID NO: 34344 - RNA, 19 nt, synthetic construct
  misc_feature 1..19: note = siRNA sense sequence
  source 1..19: mol_type = other RNA
ggtcaccctgtccttgtaa

SEQ ID NO: 34345 - RNA, 19 nt, synthetic construct
  misc_feature 1..19: note = siRNA antisense sequence
  source 1..19: mol_type = other RNA
ttacaaggacagggtgacc

SEQ ID NO: 34346 - RNA, 19 nt, synthetic construct
  misc_feature 1..19: note = siRNA sense sequence
  source 1..19: mol_type = other RNA
gtcaccctgtccttgtaat

SEQ ID NO: 34347 - RNA, 19 nt, synthetic construct
  misc_feature 1..19: note = siRNA antisense sequence
  source 1..19: mol_type = other RNA
attacaaggacagggtgac

SEQ ID NO: 34348 - RNA, 19 nt, synthetic construct
  misc_feature 1..19: note = siRNA sense sequence
  source 1..19: mol_type = other RNA
tcaccctgtccttgtaata

SEQ ID NO: 34349 - RNA, 19 nt, synthetic construct
  misc_feature 1..19: note = siRNA antisense sequence
  source 1..19: mol_type = other RNA
tattacaaggacagggtga

SEQ ID NO: 34350 - RNA, 19 nt, synthetic construct
  misc_feature 1..19: note = siRNA sense sequence
  source 1..19: mol_type = other RNA
acttgcaacccttaaaata

SEQ ID NO: 34351 - RNA, 19 nt, synthetic construct
  misc_feature 1..19: note = siRNA antisense sequence
  source 1..19: mol_type = other RNA
tattttaagggttgcaagt

SEQ ID NO: 34352 - RNA, 19 nt, synthetic construct
  misc_feature 1..19: note = siRNA sense sequence
  source 1..19: mol_type = other RNA
ccttaaaataggttagagg

SEQ ID NO: 34353 - RNA, 19 nt, synthetic construct
  misc_feature 1..19: note = siRNA antisense sequence
  source 1..19: mol_type = other RNA
cctctaacctattttaagg

SEQ ID NO: 34354 - RNA, 19 nt, synthetic construct
  misc_feature 1..19: note = siRNA sense sequence
  source 1..19: mol_type = other RNA
cttaaaataggttagaggg

SEQ ID NO: 34355 - RNA, 19 nt, synthetic construct
  misc_feature 1..19: note = siRNA antisense sequence
  source 1..19: mol_type = other RNA
ccctctaacctattttaag

SEQ ID NO: 34356 - RNA, 19 nt, synthetic construct
  misc_feature 1..19: note = siRNA sense sequence
  source 1..19: mol_type = other RNA
gggagtaaattttcattag

SEQ ID NO: 34357 - RNA, 19 nt, synthetic construct
  misc_feature 1..19: note = siRNA antisense sequence
  source 1..19: mol_type = other RNA
ctaatgaaaatttactccc

SEQ ID NO: 34358 - RNA, 19 nt, synthetic construct
  misc_feature 1..19: note = siRNA sense sequence
  source 1..19: mol_type = other RNA
caacttgtgattggctcag

SEQ ID NO: 34359 - RNA, 19 nt, synthetic construct
  misc_feature 1..19: note = siRNA antisense sequence
  source 1..19: mol_type = other RNA
ctgagccaatcacaagttg

SEQ ID NO: 34360 - RNA, 19 nt, synthetic construct
  misc_feature 1..19: note = siRNA sense sequence
  source 1..19: mol_type = other RNA
aacttgtgattggctcaga

SEQ ID NO: 34361 - RNA, 19 nt, synthetic construct
  misc_feature 1..19: note = siRNA antisense sequence
  source 1..19: mol_type = other RNA
tctgagccaatcacaagtt

SEQ ID NO: 34362 - RNA, 19 nt, synthetic construct
  misc_feature 1..19: note = siRNA sense sequence
  source 1..19: mol_type = other RNA
acttgtgattggctcagat

SEQ ID NO: 34363 - RNA, 19 nt, synthetic construct
  misc_feature 1..19: note = siRNA antisense sequence
  source 1..19: mol_type = other RNA
atctgagccaatcacaagt

SEQ ID NO: 34364 - RNA, 19 nt, synthetic construct
  misc_feature 1..19: note = siRNA sense sequence
  source 1..19: mol_type = other RNA
cttgtgattggctcagatc

SEQ ID NO: 34365 - RNA, 19 nt, synthetic construct
  misc_feature 1..19: note = siRNA antisense sequence
  source 1..19: mol_type = other RNA
gatctgagccaatcacaag

SEQ ID NO: 34366 - RNA, 19 nt, synthetic construct
  misc_feature 1..19: note = siRNA sense sequence
  source 1..19: mol_type = other RNA
ttgtgattggctcagatcc

SEQ ID NO: 34367 - RNA, 19 nt, synthetic construct
  misc_feature 1..19: note = siRNA antisense sequence
  source 1..19: mol_type = other RNA
ggatctgagccaatcacaa

SEQ ID NO: 34368 - RNA, 19 nt, synthetic construct
  misc_feature 1..19: note = siRNA sense sequence
  source 1..19: mol_type = other RNA
gattggctcagatcctagg

SEQ ID NO: 34369 - RNA, 19 nt, synthetic construct
  misc_feature 1..19: note = siRNA antisense sequence
  source 1..19: mol_type = other RNA
cctaggatctgagccaatc

SEQ ID NO: 34370 - RNA, 19 nt, synthetic construct
  misc_feature 1..19: note = siRNA sense sequence
  source 1..19: mol_type = other RNA
attggctcagatcctaggt

SEQ ID NO: 34371 - RNA, 19 nt, synthetic construct
  misc_feature 1..19: note = siRNA antisense sequence
  source 1..19: mol_type = other RNA
acctaggatctgagccaat

SEQ ID NO: 34372 - RNA, 19 nt, synthetic construct
  misc_feature 1..19: note = siRNA sense sequence
  source 1..19: mol_type = other RNA
ttggctcagatcctaggtg

SEQ ID NO: 34373 - RNA, 19 nt, synthetic construct
  misc_feature 1..19: note = siRNA antisense sequence
  source 1..19: mol_type = other RNA
cacctaggatctgagccaa

SEQ ID NO: 34374 - RNA, 19 nt, synthetic construct
  misc_feature 1..19: note = siRNA sense sequence
  source 1..19: mol_type = other RNA
tggctcagatcctaggtgg

SEQ ID NO: 34375 - RNA, 19 nt, synthetic construct
  misc_feature 1..19: note = siRNA antisense sequence
  source 1..19: mol_type = other RNA
ccacctaggatctgagcca

SEQ ID NO: 34376 - RNA, 19 nt, synthetic construct
  misc_feature 1..19: note = siRNA sense sequence
  source 1..19: mol_type = other RNA
ggctcagatcctaggtggt

SEQ ID NO: 34377 - RNA, 19 nt, synthetic construct
  misc_feature 1..19: note = siRNA antisense sequence
  source 1..19: mol_type = other RNA
accacctaggatctgagcc

SEQ ID NO: 34378 - RNA, 19 nt, synthetic construct
  misc_feature 1..19: note = siRNA sense sequence
  source 1..19: mol_type = other RNA
gctcagatcctaggtggta

SEQ ID NO: 34379 - RNA, 19 nt, synthetic construct
  misc_feature 1..19: note = siRNA antisense sequence
  source 1..19: mol_type = other RNA
taccacctaggatctgagc

SEQ ID NO: 34380 - RNA, 19 nt, synthetic construct
  misc_feature 1..19: note = siRNA sense sequence
  source 1..19: mol_type = other RNA
ctcagatcctaggtggtat

SEQ ID NO: 34381 - RNA, 19 nt, synthetic construct
  misc_feature 1..19: note = siRNA antisense sequence
  source 1..19: mol_type = other RNA
ataccacctaggatctgag

SEQ ID NO: 34382 - RNA, 19 nt, synthetic construct
  misc_feature 1..19: note = siRNA sense sequence
  source 1..19: mol_type = other RNA
cagatcctaggtggtatca

SEQ ID NO: 34383 - RNA, 19 nt, synthetic construct
  misc_feature 1..19: note = siRNA antisense sequence
  source 1..19: mol_type = other RNA
tgataccacctaggatctg

SEQ ID NO: 34384 - RNA, 19 nt, synthetic construct
  misc_feature 1..19: note = siRNA sense sequence
  source 1..19: mol_type = other RNA
agatcctaggtggtatcac

SEQ ID NO: 34385 - RNA, 19 nt, synthetic construct
  misc_feature 1..19: note = siRNA antisense sequence
  source 1..19: mol_type = other RNA
gtgataccacctaggatct

SEQ ID NO: 34386 - RNA, 19 nt, synthetic construct
  misc_feature 1..19: note = siRNA sense sequence
  source 1..19: mol_type = other RNA
gatcctaggtggtatcaca

SEQ ID NO: 34387 - RNA, 19 nt, synthetic construct
  misc_feature 1..19: note = siRNA antisense sequence
  source 1..19: mol_type = other RNA
tgtgataccacctaggatc

SEQ ID NO: 34388 - RNA, 19 nt, synthetic construct
  misc_feature 1..19: note = siRNA sense sequence
  source 1..19: mol_type = other RNA
atcctaggtggtatcacag

SEQ ID NO: 34389 - RNA, 19 nt, synthetic construct
  misc_feature 1..19: note = siRNA antisense sequence
  source 1..19: mol_type = other RNA
ctgtgataccacctaggat

SEQ ID NO: 34390 - RNA, 19 nt, synthetic construct
  misc_feature 1..19: note = siRNA sense sequence
  source 1..19: mol_type = other RNA
tcctaggtggtatcacaga

SEQ ID NO: 34391 - RNA, 19 nt, synthetic construct
  misc_feature 1..19: note = siRNA antisense sequence
  source 1..19: mol_type = other RNA
tctgtgataccacctagga

SEQ ID NO: 34392 - RNA, 19 nt, synthetic construct
  misc_feature 1..19: note = siRNA sense sequence
  source 1..19: mol_type = other RNA
cctaggtggtatcacagat

SEQ ID NO: 34393 - RNA, 19 nt, synthetic construct
  misc_feature 1..19: note = siRNA antisense sequence
  source 1..19: mol_type = other RNA
atctgtgataccacctagg

SEQ ID NO: 34394 - RNA, 19 nt, synthetic construct
  misc_feature 1..19: note = siRNA sense sequence
  source 1..19: mol_type = other RNA
atcacagatatgcatcatg

SEQ ID NO: 34395 - RNA, 19 nt, synthetic construct
  misc_feature 1..19: note = siRNA antisense sequence
  source 1..19: mol_type = other RNA
catgatgcatatctgtgat

SEQ ID NO: 34396 - RNA, 19 nt, synthetic construct
  misc_feature 1..19: note = siRNA sense sequence
  source 1..19: mol_type = other RNA
tcacagatatgcatcatgt

SEQ ID NO: 34397 - RNA, 19 nt, synthetic construct
  misc_feature 1..19: note = siRNA antisense sequence
  source 1..19: mol_type = other RNA
acatgatgcatatctgtga

SEQ ID NO: 34398 - RNA, 19 nt, synthetic construct
  misc_feature 1..19: note = siRNA sense sequence
  source 1..19: mol_type = other RNA
cacagatatgcatcatgtt

SEQ ID NO: 34399 - RNA, 19 nt, synthetic construct
  misc_feature 1..19: note = siRNA antisense sequence
  source 1..19: mol_type = other RNA
aacatgatgcatatctgtg

SEQ ID NO: 34400 - RNA, 19 nt, synthetic construct
  misc_feature 1..19: note = siRNA sense sequence
  source 1..19: mol_type = other RNA
acagatatgcatcatgttt

SEQ ID NO: 34401 - RNA, 19 nt, synthetic construct
  misc_feature 1..19: note = siRNA antisense sequence
  source 1..19: mol_type = other RNA
aaacatgatgcatatctgt

SEQ ID NO: 34402 - RNA, 19 nt, synthetic construct
  misc_feature 1..19: note = siRNA sense sequence
  source 1..19: mol_type = other RNA
cagatatgcatcatgtttt

SEQ ID NO: 34403 - RNA, 19 nt, synthetic construct
  misc_feature 1..19: note = siRNA antisense sequence
  source 1..19: mol_type = other RNA
aaaacatgatgcatatctg

SEQ ID NO: 34404 - RNA, 19 nt, synthetic construct
  misc_feature 1..19: note = siRNA sense sequence
  source 1..19: mol_type = other RNA
agatatgcatcatgttttg

SEQ ID NO: 34405 - RNA, 19 nt, synthetic construct
  misc_feature 1..19: note = siRNA antisense sequence
  source 1..19: mol_type = other RNA
caaaacatgatgcatatct

SEQ ID NO: 34406 - RNA, 19 nt, synthetic construct
  misc_feature 1..19: note = siRNA sense sequence
  source 1..19: mol_type = other RNA
gatatgcatcatgttttga

SEQ ID NO: 34407 - RNA, 19 nt, synthetic construct
  misc_feature 1..19: note = siRNA antisense sequence
  source 1..19: mol_type = other RNA
tcaaaacatgatgcatatc

SEQ ID NO: 34408 - RNA, 19 nt, synthetic construct
  misc_feature 1..19: note = siRNA sense sequence
  source 1..19: mol_type = other RNA
tgcatcatgttttgagcaa

SEQ ID NO: 34409 - RNA, 19 nt, synthetic construct
  misc_feature 1..19: note = siRNA antisense sequence
  source 1..19: mol_type = other RNA
ttgctcaaaacatgatgca

SEQ ID NO: 34410 - RNA, 19 nt, synthetic construct
  misc_feature 1..19: note = siRNA sense sequence
  source 1..19: mol_type = other RNA
gcatcatgttttgagcaac

SEQ ID NO: 34411 - RNA, 19 nt, synthetic construct
  misc_feature 1..19: note = siRNA antisense sequence
  source 1..19: mol_type = other RNA
gttgctcaaaacatgatgc

SEQ ID NO: 34412 - RNA, 19 nt, synthetic construct
  misc_feature 1..19: note = siRNA sense sequence
  source 1..19: mol_type = other RNA
catcatgttttgagcaact

SEQ ID NO: 34413 - RNA, 19 nt, synthetic construct
  misc_feature 1..19: note = siRNA antisense sequence
  source 1..19: mol_type = other RNA
agttgctcaaaacatgatg

SEQ ID NO: 34414 - RNA, 19 nt, synthetic construct
  misc_feature 1..19: note = siRNA sense sequence
  source 1..19: mol_type = other RNA
atcatgttttgagcaactg

SEQ ID NO: 34415 - RNA, 19 nt, synthetic construct
  misc_feature 1..19: note = siRNA antisense sequence
  source 1..19: mol_type = other RNA
cagttgctcaaaacatgat

SEQ ID NO: 34416 - RNA, 19 nt, synthetic construct
  misc_feature 1..19: note = siRNA sense sequence
  source 1..19: mol_type = other RNA
agaatccaaggactctaac

SEQ ID NO: 34417 - RNA, 19 nt, synthetic construct
  misc_feature 1..19: note = siRNA antisense sequence
  source 1..19: mol_type = other RNA
gttagagtccttggattct

SEQ ID NO: 34418 - RNA, 19 nt, synthetic construct
  misc_feature 1..19: note = siRNA sense sequence
  source 1..19: mol_type = other RNA
gaatccaaggactctaact

SEQ ID NO: 34419 - RNA, 19 nt, synthetic construct
  misc_feature 1..19: note = siRNA antisense sequence
  source 1..19: mol_type = other RNA
agttagagtccttggattc

SEQ ID NO: 34420 - RNA, 19 nt, synthetic construct
  misc_feature 1..19: note = siRNA sense sequence
  source 1..19: mol_type = other RNA
aggactctaactgaatgga

SEQ ID NO: 34421 - RNA, 19 nt, synthetic construct
  misc_feature 1..19: note = siRNA antisense sequence
  source 1..19: mol_type = other RNA
tccattcagttagagtcct

SEQ ID NO: 34422 - RNA, 19 nt, synthetic construct
  misc_feature 1..19: note = siRNA sense sequence
  source 1..19: mol_type = other RNA
tctaactgaatggaatggt

SEQ ID NO: 34423 - RNA, 19 nt, synthetic construct
  misc_feature 1..19: note = siRNA antisense sequence
  source 1..19: mol_type = other RNA
accattccattcagttaga

SEQ ID NO: 34424 - RNA, 19 nt, synthetic construct
  misc_feature 1..19: note = siRNA sense sequence
  source 1..19: mol_type = other RNA
ctaactgaatggaatggtg

SEQ ID NO: 34425 - RNA, 19 nt, synthetic construct
  misc_feature 1..19: note = siRNA antisense sequence
  source 1..19: mol_type = other RNA
caccattccattcagttag

SEQ ID NO: 34426 - RNA, 19 nt, synthetic construct
  misc_feature 1..19: note = siRNA sense sequence
  source 1..19: mol_type = other RNA
taactgaatggaatggtgt

SEQ ID NO: 34427 - RNA, 19 nt, synthetic construct
  misc_feature 1..19: note = siRNA antisense sequence
  source 1..19: mol_type = other RNA
acaccattccattcagtta

SEQ ID NO: 34428 - RNA, 19 nt, synthetic construct
  misc_feature 1..19: note = siRNA sense sequence
  source 1..19: mol_type = other RNA
aactgaatggaatggtgtc

SEQ ID NO: 34429 - RNA, 19 nt, synthetic construct
  misc_feature 1..19: note = siRNA antisense sequence
  source 1..19: mol_type = other RNA
gacaccattccattcagtt

SEQ ID NO: 34430 - RNA, 19 nt, synthetic construct
  misc_feature 1..19: note = siRNA sense sequence
  source 1..19: mol_type = other RNA
actgaatggaatggtgtca

SEQ ID NO: 34431 - RNA, 19 nt, synthetic construct
  misc_feature 1..19: note = siRNA antisense sequence
  source 1..19: mol_type = other RNA
tgacaccattccattcagt

SEQ ID NO: 34432 - RNA, 19 nt, synthetic construct
  misc_feature 1..19: note = siRNA sense sequence
  source 1..19: mol_type = other RNA
aatggaatggtgtcatctg

SEQ ID NO: 34433 - RNA, 19 nt, synthetic construct
  misc_feature 1..19: note = siRNA antisense sequence
  source 1..19: mol_type = other RNA
cagatgacaccattccatt

SEQ ID NO: 34434 - RNA, 19 nt, synthetic construct
  misc_feature 1..19: note = siRNA sense sequence
  source 1..19: mol_type = other RNA
atggaatggtgtcatctgt

SEQ ID NO: 34435 - RNA, 19 nt, synthetic construct
  misc_feature 1..19: note = siRNA antisense sequence
  source 1..19: mol_type = other RNA
acagatgacaccattccat

SEQ ID NO: 34436 - RNA, 19 nt, synthetic construct
  misc_feature 1..19: note = siRNA sense sequence
  source 1..19: mol_type = other RNA
tggaatggtgtcatctgta

SEQ ID NO: 34437 - RNA, 19 nt, synthetic construct
  misc_feature 1..19: note = siRNA antisense sequence
  source 1..19: mol_type = other RNA
tacagatgacaccattcca

SEQ ID NO: 34438 - RNA, 19 nt, synthetic construct
  misc_feature 1..19: note = siRNA sense sequence
  source 1..19: mol_type = other RNA
ggaatggtgtcatctgtac

SEQ ID NO: 34439 - RNA, 19 nt, synthetic construct
  misc_feature 1..19: note = siRNA antisense sequence
  source 1..19: mol_type = other RNA
gtacagatgacaccattcc

SEQ ID NO: 34440 - RNA, 19 nt, synthetic construct
  misc_feature 1..19: note = siRNA sense sequence
  source 1..19: mol_type = other RNA
gaatggtgtcatctgtact

SEQ ID NO: 34441 - RNA, 19 nt, synthetic construct
  misc_feature 1..19: note = siRNA antisense sequence
  source 1..19: mol_type = other RNA
agtacagatgacaccattc

SEQ ID NO: 34442 - RNA, 19 nt, synthetic construct
  misc_feature 1..19: note = siRNA sense sequence
  source 1..19: mol_type = other RNA
aatggtgtcatctgtactc

SEQ ID NO: 34443 - RNA, 19 nt, synthetic construct
  misc_feature 1..19: note = siRNA antisense sequence
  source 1..19: mol_type = other RNA
gagtacagatgacaccatt

SEQ ID NO: 34444 - RNA, 19 nt, synthetic construct
  misc_feature 1..19: note = siRNA sense sequence
  source 1..19: mol_type = other RNA
atggtgtcatctgtactcc

SEQ ID NO: 34445 - RNA, 19 nt, synthetic construct
  misc_feature 1..19: note = siRNA antisense sequence
  source 1..19: mol_type = other RNA
ggagtacagatgacaccat

SEQ ID NO: 34446 - RNA, 19 nt, synthetic construct
  misc_feature 1..19: note = siRNA sense sequence
  source 1..19: mol_type = other RNA
tggtgtcatctgtactcct

SEQ ID NO: 34447 - RNA, 19 nt, synthetic construct
  misc_feature 1..19: note = siRNA antisense sequence
  source 1..19: mol_type = other RNA
aggagtacagatgacacca

SEQ ID NO: 34448 - RNA, 19 nt, synthetic construct
  misc_feature 1..19: note = siRNA sense sequence
  source 1..19: mol_type = other RNA
ggtgtcatctgtactcctc

SEQ ID NO: 34449 - RNA, 19 nt, synthetic construct
  misc_feature 1..19: note = siRNA antisense sequence
  source 1..19: mol_type = other RNA
gaggagtacagatgacacc

SEQ ID NO: 34450 - RNA, 19 nt, synthetic construct
  misc_feature 1..19: note = siRNA sense sequence
  source 1..19: mol_type = other RNA
tctgtactcctcctccctg

SEQ ID NO: 34451 - RNA, 19 nt, synthetic construct
  misc_feature 1..19: note = siRNA antisense sequence
  source 1..19: mol_type = other RNA
cagggaggaggagtacaga

SEQ ID NO: 34452 - RNA, 19 nt, synthetic construct
  misc_feature 1..19: note = siRNA sense sequence
  source 1..19: mol_type = other RNA
tactcctcctccctggcta

SEQ ID NO: 34453 - RNA, 19 nt, synthetic construct
  misc_feature 1..19: note = siRNA antisense sequence
  source 1..19: mol_type = other RNA
tagccagggaggaggagta

SEQ ID NO: 34454 - RNA, 19 nt, synthetic construct
  misc_feature 1..19: note = siRNA sense sequence
  source 1..19: mol_type = other RNA
actcctcctccctggctag

SEQ ID NO: 34455 - RNA, 19 nt, synthetic construct
  misc_feature 1..19: note = siRNA antisense sequence
  source 1..19: mol_type = other RNA
ctagccagggaggaggagt

SEQ ID NO: 34456 - RNA, 19 nt, synthetic construct
  misc_feature 1..19: note = siRNA sense sequence
  source 1..19: mol_type = other RNA
tcctcctccctggctagct

SEQ ID NO: 34457 - RNA, 19 nt, synthetic construct
  misc_feature 1..19: note = siRNA antisense sequence
  source 1..19: mol_type = other RNA
agctagccagggaggagga

SEQ ID NO: 34458 - RNA, 19 nt, synthetic construct
  misc_feature 1..19: note = siRNA sense sequence
  source 1..19: mol_type = other RNA
ctcctccctggctagctct

SEQ ID NO: 34459 - RNA, 19 nt, synthetic construct
  misc_feature 1..19: note = siRNA antisense sequence
  source 1..19: mol_type = other RNA
agagctagccagggaggag

SEQ ID NO: 34460 - RNA, 19 nt, synthetic construct
  misc_feature 1..19: note = siRNA sense sequence
  source 1..19: mol_type = other RNA
tcctccctggctagctctt

SEQ ID NO: 34461 - RNA, 19 nt, synthetic construct
  misc_feature 1..19: note = siRNA antisense sequence
  source 1..19: mol_type = other RNA
aagagctagccagggagga

SEQ ID NO: 34462 - RNA, 19 nt, synthetic construct
  misc_feature 1..19: note = siRNA sense sequence
  source 1..19: mol_type = other RNA
cctccctggctagctcttc

SEQ ID NO: 34463 - RNA, 19 nt, synthetic construct
  misc_feature 1..19: note = siRNA antisense sequence
  source 1..19: mol_type = other RNA
gaagagctagccagggagg

SEQ ID NO: 34464 - RNA, 19 nt, synthetic construct
  misc_feature 1..19: note = siRNA sense sequence
  source 1..19: mol_type = other RNA
cctggctagctcttccact

SEQ ID NO: 34465 - RNA, 19 nt, synthetic construct
  misc_feature 1..19: note = siRNA antisense sequence
  source 1..19: mol_type = other RNA
agtggaagagctagccagg

SEQ ID NO: 34466 - RNA, 19 nt, synthetic construct
  misc_feature 1..19: note = siRNA sense sequence
  source 1..19: mol_type = other RNA
ctggctagctcttccactt

SEQ ID NO: 34467 - RNA, 19 nt, synthetic construct
  misc_feature 1..19: note = siRNA antisense sequence
  source 1..19: mol_type = other RNA
aagtggaagagctagccag

SEQ ID NO: 34468 - RNA, 19 nt, synthetic construct
  misc_feature 1..19: note = siRNA sense sequence
  source 1..19: mol_type = other RNA
tggctagctcttccactta

SEQ ID NO: 34469 - RNA, 19 nt, synthetic construct
  misc_feature 1..19: note = siRNA antisense sequence
  source 1..19: mol_type = other RNA
taagtggaagagctagcca

SEQ ID NO: 34470 - RNA, 19 nt, synthetic construct
  misc_feature 1..19: note = siRNA sense sequence
  source 1..19: mol_type = other RNA
gctagctcttccacttaga

SEQ ID NO: 34471 - RNA, 19 nt, synthetic construct
  misc_feature 1..19: note = siRNA antisense sequence
  source 1..19: mol_type = other RNA
tctaagtggaagagctagc

SEQ ID NO: 34472 - RNA, 19 nt, synthetic construct
  misc_feature 1..19: note = siRNA sense sequence
  source 1..19: mol_type = other RNA
ctagctcttccacttagaa

SEQ ID NO: 34473 - RNA, 19 nt, synthetic construct
  misc_feature 1..19: note = siRNA antisense sequence
  source 1..19: mol_type = other RNA
ttctaagtggaagagctag

SEQ ID NO: 34474 - RNA, 19 nt, synthetic construct
  misc_feature 1..19: note = siRNA sense sequence
  source 1..19: mol_type = other RNA
ttccacttagaaggcctga

SEQ ID NO: 34475 - RNA, 19 nt, synthetic construct
  misc_feature 1..19: note = siRNA antisense sequence
  source 1..19: mol_type = other RNA
tcaggccttctaagtggaa

SEQ ID NO: 34476 - RNA, 19 nt, synthetic construct
  misc_feature 1..19: note = siRNA sense sequence
  source 1..19: mol_type = other RNA
tccacttagaaggcctgac

SEQ ID NO: 34477 - RNA, 19 nt, synthetic construct
  misc_feature 1..19: note = siRNA antisense sequence
  source 1..19: mol_type = other RNA
gtcaggccttctaagtgga

SEQ ID NO: 34478 - RNA, 19 nt, synthetic construct
  misc_feature 1..19: note = siRNA sense sequence
  source 1..19: mol_type = other RNA
ccacttagaaggcctgaca

SEQ ID NO: 34479 - RNA, 19 nt, synthetic construct
  misc_feature 1..19: note = siRNA antisense sequence
  source 1..19: mol_type = other RNA
tgtcaggccttctaagtgg

SEQ ID NO: 34480 - RNA, 19 nt, synthetic construct
  misc_feature 1..19: note = siRNA sense sequence
  source 1..19: mol_type = other RNA
cacttagaaggcctgacac

SEQ ID NO: 34481 - RNA, 19 nt, synthetic construct
  misc_feature 1..19: note = siRNA antisense sequence
  source 1..19: mol_type = other RNA
gtgtcaggccttctaagtg

SEQ ID NO: 34482 - RNA, 19 nt, synthetic construct
  misc_feature 1..19: note = siRNA sense sequence
  source 1..19: mol_type = other RNA
acttagaaggcctgacacc

SEQ ID NO: 34483 - RNA, 19 nt, synthetic construct
  misc_feature 1..19: note = siRNA antisense sequence
  source 1..19: mol_type = other RNA
ggtgtcaggccttctaagt

SEQ ID NO: 34484 - RNA, 19 nt, synthetic construct
  misc_feature 1..19: note = siRNA sense sequence
  source 1..19: mol_type = other RNA
cttagaaggcctgacaccc

SEQ ID NO: 34485 - RNA, 19 nt, synthetic construct
  misc_feature 1..19: note = siRNA antisense sequence
  source 1..19: mol_type = other RNA
gggtgtcaggccttctaag

SEQ ID NO: 34486 - RNA, 19 nt, synthetic construct
  misc_feature 1..19: note = siRNA sense sequence
  source 1..19: mol_type = other RNA
ttagaaggcctgacaccct

SEQ ID NO: 34487 - RNA, 19 nt, synthetic construct
  misc_feature 1..19: note = siRNA antisense sequence
  source 1..19: mol_type = other RNA
agggtgtcaggccttctaa

SEQ ID NO: 34488 - RNA, 19 nt, synthetic construct
  misc_feature 1..19: note = siRNA sense sequence
  source 1..19: mol_type = other RNA
gaaggcctgacaccctcat

SEQ ID NO: 34489 - RNA, 19 nt, synthetic construct
  misc_feature 1..19: note = siRNA antisense sequence
  source 1..19: mol_type = other RNA
atgagggtgtcaggccttc

SEQ ID NO: 34490 - RNA, 19 nt, synthetic construct
  misc_feature 1..19: note = siRNA sense sequence
  source 1..19: mol_type = other RNA
aaggcctgacaccctcatc

SEQ ID NO: 34491 - RNA, 19 nt, synthetic construct
  misc_feature 1..19: note = siRNA antisense sequence
  source 1..19: mol_type = other RNA
gatgagggtgtcaggcctt

SEQ ID NO: 34492 - RNA, 19 nt, synthetic construct
  misc_feature 1..19: note = siRNA sense sequence
  source 1..19: mol_type = other RNA
aggcctgacaccctcatct

SEQ ID NO: 34493 - RNA, 19 nt, synthetic construct
  misc_feature 1..19: note = siRNA antisense sequence
  source 1..19: mol_type = other RNA
agatgagggtgtcaggcct

SEQ ID NO: 34494 - RNA, 19 nt, synthetic construct
  misc_feature 1..19: note = siRNA sense sequence
  source 1..19: mol_type = other RNA
ggcctgacaccctcatctt

SEQ ID NO: 34495 - RNA, 19 nt, synthetic construct
  misc_feature 1..19: note = siRNA antisense sequence
  source 1..19: mol_type = other RNA
aagatgagggtgtcaggcc

SEQ ID NO: 34496 - RNA, 19 nt, synthetic construct
  misc_feature 1..19: note = siRNA sense sequence
  source 1..19: mol_type = other RNA
gcctgacaccctcatctta

SEQ ID NO: 34497 - RNA, 19 nt, synthetic construct
  misc_feature 1..19: note = siRNA antisense sequence
  source 1..19: mol_type = other RNA
taagatgagggtgtcaggc

SEQ ID NO: 34498 - RNA, 19 nt, synthetic construct
  misc_feature 1..19: note = siRNA sense sequence
  source 1..19: mol_type = other RNA
cctgacaccctcatcttag

SEQ ID NO: 34499 - RNA, 19 nt, synthetic construct
  misc_feature 1..19: note = siRNA antisense sequence
  source 1..19: mol_type = other RNA
ctaagatgagggtgtcagg

SEQ ID NO: 34500 - RNA, 19 nt, synthetic construct
  misc_feature 1..19: note = siRNA sense sequence
  source 1..19: mol_type = other RNA
acaccctcatcttagattt

SEQ ID NO: 34501 - RNA, 19 nt, synthetic construct
  misc_feature 1..19: note = siRNA antisense sequence
  source 1..19: mol_type = other RNA
aaatctaagatgagggtgt

SEQ ID NO: 34502 - RNA, 19 nt, synthetic construct
  misc_feature 1..19: note = siRNA sense sequence
  source 1..19: mol_type = other RNA
caccctcatcttagatttt

SEQ ID NO: 34503 - RNA, 19 nt, synthetic construct
  misc_feature 1..19: note = siRNA antisense sequence
  source 1..19: mol_type = other RNA
aaaatctaagatgagggtg

SEQ ID NO: 34504 - RNA, 19 nt, synthetic construct
  misc_feature 1..19: note = siRNA sense sequence
  source 1..19: mol_type = other RNA
accctcatcttagattttc

SEQ ID NO: 34505 - RNA, 19 nt, synthetic construct
  misc_feature 1..19: note = siRNA antisense sequence
  source 1..19: mol_type = other RNA
gaaaatctaagatgagggt

SEQ ID NO: 34506 - RNA, 19 nt, synthetic construct
  misc_feature 1..19: note = siRNA sense sequence
  source 1..19: mol_type = other RNA
ccctcatcttagattttct

SEQ ID NO: 34507 - RNA, 19 nt, synthetic construct
  misc_feature 1..19: note = siRNA antisense sequence
  source 1..19: mol_type = other RNA
agaaaatctaagatgaggg

SEQ ID NO: 34508 - RNA, 19 nt, synthetic construct
  misc_feature 1..19: note = siRNA sense sequence
  source 1..19: mol_type = other RNA
cctcatcttagattttctt

SEQ ID NO: 34509 - RNA, 19 nt, synthetic construct
  misc_feature 1..19: note = siRNA antisense sequence
  source 1..19: mol_type = other RNA
aagaaaatctaagatgagg

SEQ ID NO: 34510 - RNA, 19 nt, synthetic construct
  misc_feature 1..19: note = siRNA sense sequence
  source 1..19: mol_type = other RNA
ctcatcttagattttcttc

SEQ ID NO: 34511 - RNA, 19 nt, synthetic construct
  misc_feature 1..19: note = siRNA antisense sequence
  source 1..19: mol_type = other RNA
gaagaaaatctaagatgag

SEQ ID NO: 34512 - RNA, 19 nt, synthetic construct
  misc_feature 1..19: note = siRNA sense sequence
  source 1..19: mol_type = other RNA
gattttcttcatgtatgtc

SEQ ID NO: 34513 - RNA, 19 nt, synthetic construct
  misc_feature 1..19: note = siRNA antisense sequence
  source 1..19: mol_type = other RNA
gacatacatgaagaaaatc

SEQ ID NO: 34514 - RNA, 19 nt, synthetic construct
  misc_feature 1..19: note = siRNA sense sequence
  source 1..19: mol_type = other RNA
tcttcatgtatgtcattgc

SEQ ID NO: 34515 - RNA, 19 nt, synthetic construct
  misc_feature 1..19: note = siRNA antisense sequence
  source 1..19: mol_type = other RNA
gcaatgacatacatgaaga

SEQ ID NO: 34516 - RNA, 19 nt, synthetic construct
  misc_feature 1..19: note = siRNA sense sequence
  source 1..19: mol_type = other RNA
cttcatgtatgtcattgca

SEQ ID NO: 34517 - RNA, 19 nt, synthetic construct
  misc_feature 1..19: note = siRNA antisense sequence
  source 1..19: mol_type = other RNA
tgcaatgacatacatgaag

SEQ ID NO: 34518 - RNA, 19 nt, synthetic construct
  misc_feature 1..19: note = siRNA sense sequence
  source 1..19: mol_type = other RNA
ttcatgtatgtcattgcag

SEQ ID NO: 34519 - RNA, 19 nt, synthetic construct
  misc_feature 1..19: note = siRNA antisense sequence
  source 1..19: mol_type = other RNA
ctgcaatgacatacatgaa

SEQ ID NO: 34520 - RNA, 19 nt, synthetic construct
  misc_feature 1..19: note = siRNA sense sequence
  source 1..19: mol_type = other RNA
tcatgtatgtcattgcagc

SEQ ID NO: 34521 - RNA, 19 nt, synthetic construct
  misc_feature 1..19: note = siRNA antisense sequence
  source 1..19: mol_type = other RNA
gctgcaatgacatacatga

SEQ ID NO: 34522 - RNA, 19 nt, synthetic construct
  misc_feature 1..19: note = siRNA sense sequence
  source 1..19: mol_type = other RNA
tatgtcattgcagccaagt

SEQ ID NO: 34523 - RNA, 19 nt, synthetic construct
  misc_feature 1..19: note = siRNA antisense sequence
  source 1..19: mol_type = other RNA
acttggctgcaatgacata

SEQ ID NO: 34524 - RNA, 19 nt, synthetic construct
  misc_feature 1..19: note = siRNA sense sequence
  source 1..19: mol_type = other RNA
atgtcattgcagccaagtt

SEQ ID NO: 34525 - RNA, 19 nt, synthetic construct
  misc_feature 1..19: note = siRNA antisense sequence
  source 1..19: mol_type = other RNA
aacttggctgcaatgacat

SEQ ID NO: 34526 - RNA, 19 nt, synthetic construct
  misc_feature 1..19: note = siRNA sense sequence
  source 1..19: mol_type = other RNA
gtcattgcagccaagttta

SEQ ID NO: 34527 - RNA, 19 nt, synthetic construct
  misc_feature 1..19: note = siRNA antisense sequence
  source 1..19: mol_type = other RNA
taaacttggctgcaatgac

SEQ ID NO: 34528 - RNA, 19 nt, synthetic construct
  misc_feature 1..19: note = siRNA sense sequence
  source 1..19: mol_type = other RNA
tcattgcagccaagtttag

SEQ ID NO: 34529 - RNA, 19 nt, synthetic construct
  misc_feature 1..19: note = siRNA antisense sequence
  source 1..19: mol_type = other RNA
ctaaacttggctgcaatga

SEQ ID NO: 34530 - RNA, 19 nt, synthetic construct
  misc_feature 1..19: note = siRNA sense sequence
  source 1..19: mol_type = other RNA
cattgcagccaagtttaga

SEQ ID NO: 34531 - RNA, 19 nt, synthetic construct
  misc_feature 1..19: note = siRNA antisense sequence
  source 1..19: mol_type = other RNA
tctaaacttggctgcaatg

SEQ ID NO: 34532 - RNA, 19 nt, synthetic construct
  misc_feature 1..19: note = siRNA sense sequence
  source 1..19: mol_type = other RNA
attgcagccaagtttagaa

SEQ ID NO: 34533 - RNA, 19 nt, synthetic construct
  misc_feature 1..19: note = siRNA antisense sequence
  source 1..19: mol_type = other RNA
ttctaaacttggctgcaat

SEQ ID NO: 34534 - RNA, 19 nt, synthetic construct
  misc_feature 1..19: note = siRNA sense sequence
  source 1..19: mol_type = other RNA
acatacctgtattgtgttt

SEQ ID NO: 34535 - RNA, 19 nt, synthetic construct
  misc_feature 1..19: note = siRNA antisense sequence
  source 1..19: mol_type = other RNA
aaacacaatacaggtatgt

SEQ ID NO: 34536 - RNA, 19 nt, synthetic construct
  misc_feature 1..19: note = siRNA sense sequence
  source 1..19: mol_type = other RNA
acctgtattgtgtttcaag

SEQ ID NO: 34537 - RNA, 19 nt, synthetic construct
  misc_feature 1..19: note = siRNA antisense sequence
  source 1..19: mol_type = other RNA
cttgaaacacaatacaggt

SEQ ID NO: 34538 - RNA, 19 nt, synthetic construct
  misc_feature 1..19: note = siRNA sense sequence
  source 1..19: mol_type = other RNA
cctgtattgtgtttcaaga

SEQ ID NO: 34539 - RNA, 19 nt, synthetic construct
  misc_feature 1..19: note = siRNA antisense sequence
  source 1..19: mol_type = other RNA
tcttgaaacacaatacagg

SEQ ID NO: 34540 - RNA, 19 nt, synthetic construct
  misc_feature 1..19: note = siRNA sense sequence
  source 1..19: mol_type = other RNA
ctgtattgtgtttcaagat

SEQ ID NO: 34541 - RNA, 19 nt, synthetic construct
  misc_feature 1..19: note = siRNA antisense sequence
  source 1..19: mol_type = other RNA
atcttgaaacacaatacag

SEQ ID NO: 34542 - RNA, 19 nt, synthetic construct
  misc_feature 1..19: note = siRNA sense sequence
  source 1..19: mol_type = other RNA
attgtgtttcaagatacag

SEQ ID NO: 34543 - RNA, 19 nt, synthetic construct
  misc_feature 1..19: note = siRNA antisense sequence
  source 1..19: mol_type = other RNA
ctgtatcttgaaacacaat

SEQ ID NO: 34544 - RNA, 19 nt, synthetic construct
  misc_feature 1..19: note = siRNA sense sequence
  source 1..19: mol_type = other RNA
ttgtgtttcaagatacagt

SEQ ID NO: 34545 - RNA, 19 nt, synthetic construct
  misc_feature 1..19: note = siRNA antisense sequence
  source 1..19: mol_type = other RNA
actgtatcttgaaacacaa

SEQ ID NO: 34546 - RNA, 19 nt, synthetic construct
  misc_feature 1..19: note = siRNA sense sequence
  source 1..19: mol_type = other RNA
gtgtttcaagatacagtca

SEQ ID NO: 34547 - RNA, 19 nt, synthetic construct
  misc_feature 1..19: note = siRNA antisense sequence
  source 1..19: mol_type = other RNA
tgactgtatcttgaaacac

SEQ ID NO: 34548 - RNA, 19 nt, synthetic construct
  misc_feature 1..19: note = siRNA sense sequence
  source 1..19: mol_type = other RNA
tgtttcaagatacagtcat

SEQ ID NO: 34549 - RNA, 19 nt, synthetic construct
  misc_feature 1..19: note = siRNA antisense sequence
  source 1..19: mol_type = other RNA
atgactgtatcttgaaaca

SEQ ID NO: 34550 - RNA, 19 nt, synthetic construct
  misc_feature 1..19: note = siRNA sense sequence
  source 1..19: mol_type = other RNA
gtttcaagatacagtcatc

SEQ ID NO: 34551 - RNA, 19 nt, synthetic construct
  misc_feature 1..19: note = siRNA antisense sequence
  source 1..19: mol_type = other RNA
gatgactgtatcttgaaac

SEQ ID NO: 34552 - RNA, 19 nt, synthetic construct
  misc_feature 1..19: note = siRNA sense sequence
  source 1..19: mol_type = other RNA
ttcaagatacagtcatcaa

SEQ ID NO: 34553 - RNA, 19 nt, synthetic construct
  misc_feature 1..19: note = siRNA antisense sequence
  source 1..19: mol_type = other RNA
ttgatgactgtatcttgaa

SEQ ID NO: 34554 - RNA, 19 nt, synthetic construct
  misc_feature 1..19: note = siRNA sense sequence
  source 1..19: mol_type = other RNA
tcaagatacagtcatcaaa

SEQ ID NO: 34555 - RNA, 19 nt, synthetic construct
  misc_feature 1..19: note = siRNA antisense sequence
  source 1..19: mol_type = other RNA
tttgatgactgtatcttga

SEQ ID NO: 34556 - RNA, 19 nt, synthetic construct
  misc_feature 1..19: note = siRNA sense sequence
  source 1..19: mol_type = other RNA
caagatacagtcatcaaaa

SEQ ID NO: 34557 - RNA, 19 nt, synthetic construct
  misc_feature 1..19: note = siRNA antisense sequence
  source 1..19: mol_type = other RNA
ttttgatgactgtatcttg

SEQ ID NO: 34558 - RNA, 19 nt, synthetic construct
  misc_feature 1..19: note = siRNA sense sequence
  source 1..19: mol_type = other RNA
tacagtcatcaaaattagg

SEQ ID NO: 34559 - RNA, 19 nt, synthetic construct
  misc_feature 1..19: note = siRNA antisense sequence
  source 1..19: mol_type = other RNA
cctaattttgatgactgta

SEQ ID NO: 34560 - RNA, 19 nt, synthetic construct
  misc_feature 1..19: note = siRNA sense sequence
  source 1..19: mol_type = other RNA
cagtcatcaaaattaggga

SEQ ID NO: 34561 - RNA, 19 nt, synthetic construct
  misc_feature 1..19: note = siRNA antisense sequence
  source 1..19: mol_type = other RNA
tccctaattttgatgactg

SEQ ID NO: 34562 - RNA, 19 nt, synthetic construct
  misc_feature 1..19: note = siRNA sense sequence
  source 1..19: mol_type = other RNA
agtcatcaaaattagggaa

SEQ ID NO: 34563 - RNA, 19 nt, synthetic construct
  misc_feature 1..19: note = siRNA antisense sequence
  source 1..19: mol_type = other RNA
ttccctaattttgatgact

SEQ ID NO: 34564 - RNA, 19 nt, synthetic construct
  misc_feature 1..19: note = siRNA sense sequence
  source 1..19: mol_type = other RNA
aaaatcaactgccaaatgg

SEQ ID NO: 34565 - RNA, 19 nt, synthetic construct
  misc_feature 1..19: note = siRNA antisense sequence
  source 1..19: mol_type = other RNA
ccatttggcagttgatttt

SEQ ID NO: 34566 - RNA, 19 nt, synthetic construct
  misc_feature 1..19: note = siRNA sense sequence
  source 1..19: mol_type = other RNA
tcaactgccaaatggtata

SEQ ID NO: 34567 - RNA, 19 nt, synthetic construct
  misc_feature 1..19: note = siRNA antisense sequence
  source 1..19: mol_type = other RNA
tataccatttggcagttga

SEQ ID NO: 34568 - RNA, 19 nt, synthetic construct
  misc_feature 1..19: note = siRNA sense sequence
  source 1..19: mol_type = other RNA
caactgccaaatggtatac

SEQ ID NO: 34569 - RNA, 19 nt, synthetic construct
  misc_feature 1..19: note = siRNA antisense sequence
  source 1..19: mol_type = other RNA
gtataccatttggcagttg

SEQ ID NO: 34570 - RNA, 19 nt, synthetic construct
  misc_feature 1..19: note = siRNA sense sequence
  source 1..19: mol_type = other RNA
aactgccaaatggtatact

SEQ ID NO: 34571 - RNA, 19 nt, synthetic construct
  misc_feature 1..19: note = siRNA antisense sequence
  source 1..19: mol_type = other RNA
agtataccatttggcagtt

SEQ ID NO: 34572 - RNA, 19 nt, synthetic construct
  misc_feature 1..19: note = siRNA sense sequence
  source 1..19: mol_type = other RNA
actgccaaatggtatactg

SEQ ID NO: 34573 - RNA, 19 nt, synthetic construct
  misc_feature 1..19: note = siRNA antisense sequence
  source 1..19: mol_type = other RNA
cagtataccatttggcagt

SEQ ID NO: 34574 - RNA, 19 nt, synthetic construct
  misc_feature 1..19: note = siRNA sense sequence
  source 1..19: mol_type = other RNA
ctgccaaatggtatactga

SEQ ID NO: 34575 - RNA, 19 nt, synthetic construct
  misc_feature 1..19: note = siRNA antisense sequence
  source 1..19: mol_type = other RNA
tcagtataccatttggcag

SEQ ID NO: 34576 - RNA, 19 nt, synthetic construct
  misc_feature 1..19: note = siRNA sense sequence
  source 1..19: mol_type = other RNA
gccaaatggtatactgatt

SEQ ID NO: 34577 - RNA, 19 nt, synthetic construct
  misc_feature 1..19: note = siRNA antisense sequence
  source 1..19: mol_type = other RNA
aatcagtataccatttggc

SEQ ID NO: 34578 - RNA, 19 nt, synthetic construct
  misc_feature 1..19: note = siRNA sense sequence
  source 1..19: mol_type = other RNA
ggtatactgattctttgga

SEQ ID NO: 34579 - RNA, 19 nt, synthetic construct
  misc_feature 1..19: note = siRNA antisense sequence
  source 1..19: mol_type = other RNA
tccaaagaatcagtatacc

SEQ ID NO: 34580 - RNA, 19 nt, synthetic construct
  misc_feature 1..19: note = siRNA sense sequence
  source 1..19: mol_type = other RNA
gtatactgattctttggat

SEQ ID NO: 34581 - RNA, 19 nt, synthetic construct
  misc_feature 1..19: note = siRNA antisense sequence
  source 1..19: mol_type = other RNA
atccaaagaatcagtatac

SEQ ID NO: 34582 - RNA, 19 nt, synthetic construct
  misc_feature 1..19: note = siRNA sense sequence
  source 1..19: mol_type = other RNA
atactgattctttggattc

SEQ ID NO: 34583 - RNA, 19 nt, synthetic construct
  misc_feature 1..19: note = siRNA antisense sequence
  source 1..19: mol_type = other RNA
gaatccaaagaatcagtat

SEQ ID NO: 34584 - RNA, 19 nt, synthetic construct
  misc_feature 1..19: note = siRNA sense sequence
  source 1..19: mol_type = other RNA
tactgattctttggattct

SEQ ID NO: 34585 - RNA, 19 nt, synthetic construct
  misc_feature 1..19: note = siRNA antisense sequence
  source 1..19: mol_type = other RNA
agaatccaaagaatcagta

SEQ ID NO: 34586 - RNA, 19 nt, synthetic construct
  misc_feature 1..19: note = siRNA sense sequence
  source 1..19: mol_type = other RNA
actgattctttggattcta

SEQ ID NO: 34587 - RNA, 19 nt, synthetic construct
  misc_feature 1..19: note = siRNA antisense sequence
  source 1..19: mol_type = other RNA
tagaatccaaagaatcagt

SEQ ID NO: 34588 - RNA, 19 nt, synthetic construct
  misc_feature 1..19: note = siRNA sense sequence
  source 1..19: mol_type = other RNA
ctgattctttggattctac

SEQ ID NO: 34589 - RNA, 19 nt, synthetic construct
  misc_feature 1..19: note = siRNA antisense sequence
  source 1..19: mol_type = other RNA
gtagaatccaaagaatcag

SEQ ID NO: 34590 - RNA, 19 nt, synthetic construct
  misc_feature 1..19: note = siRNA sense sequence
  source 1..19: mol_type = other RNA
attctcttttgctaaatgc

SEQ ID NO: 34591 - RNA, 19 nt, synthetic construct
  misc_feature 1..19: note = siRNA antisense sequence
  source 1..19: mol_type = other RNA
gcatttagcaaaagagaat

SEQ ID NO: 34592 - RNA, 19 nt, synthetic construct
  misc_feature 1..19: note = siRNA sense sequence
  source 1..19: mol_type = other RNA
aatttgtatttcttgcagc

SEQ ID NO: 34593 - RNA, 19 nt, synthetic construct
  misc_feature 1..19: note = siRNA antisense sequence
  source 1..19: mol_type = other RNA
gctgcaagaaatacaaatt

SEQ ID NO: 34594 - RNA, 19 nt, synthetic construct
  misc_feature 1..19: note = siRNA sense sequence
  source 1..19: mol_type = other RNA
tttgtatttcttgcagcaa

SEQ ID NO: 34595 - RNA, 19 nt, synthetic construct
  misc_feature 1..19: note = siRNA antisense sequence
  source 1..19: mol_type = other RNA
ttgctgcaagaaatacaaa

SEQ ID NO: 34596 - RNA, 19 nt, synthetic construct
  misc_feature 1..19: note = siRNA sense sequence
  source 1..19: mol_type = other RNA
gtatttcttgcagcaatta

SEQ ID NO: 34597 - RNA, 19 nt, synthetic construct
  misc_feature 1..19: note = siRNA antisense sequence
  source 1..19: mol_type = other RNA
taattgctgcaagaaatac

SEQ ID NO: 34598 - RNA, 19 nt, synthetic construct
  misc_feature 1..19: note = siRNA sense sequence
  source 1..19: mol_type = other RNA
ttcttgcagcaattaatac

SEQ ID NO: 34599 - RNA, 19 nt, synthetic construct
  misc_feature 1..19: note = siRNA antisense sequence
  source 1..19: mol_type = other RNA
gtattaattgctgcaagaa

SEQ ID NO: 34600 - RNA, 19 nt, synthetic construct
  misc_feature 1..19: note = siRNA sense sequence
  source 1..19: mol_type = other RNA
tcttgcagcaattaatacc

SEQ ID NO: 34601 - RNA, 19 nt, synthetic construct
  misc_feature 1..19: note = siRNA antisense sequence
  source 1..19: mol_type = other RNA
ggtattaattgctgcaaga

SEQ ID NO: 34602 - RNA, 19 nt, synthetic construct
  misc_feature 1..19: note = siRNA sense sequence
  source 1..19: mol_type = other RNA
cttgcagcaattaatacct

SEQ ID NO: 34603 - RNA, 19 nt, synthetic construct
  misc_feature 1..19: note = siRNA antisense sequence
  source 1..19: mol_type = other RNA
aggtattaattgctgcaag

SEQ ID NO: 34604 - RNA, 19 nt, synthetic construct
  misc_feature 1..19: note = siRNA sense sequence
  source 1..19: mol_type = other RNA
ttgcagcaattaatacctg

SEQ ID NO: 34605 - RNA, 19 nt, synthetic construct
  misc_feature 1..19: note = siRNA antisense sequence
  source 1..19: mol_type = other RNA
caggtattaattgctgcaa

SEQ ID NO: 34606 - RNA, 19 nt, synthetic construct
  misc_feature 1..19: note = siRNA sense sequence
  source 1..19: mol_type = other RNA
tgcagcaattaatacctga

SEQ ID NO: 34607 - RNA, 19 nt, synthetic construct
  misc_feature 1..19: note = siRNA antisense sequence
  source 1..19: mol_type = other RNA
tcaggtattaattgctgca

SEQ ID NO: 34608 - RNA, 19 nt, synthetic construct
  misc_feature 1..19: note = siRNA sense sequence
  source 1..19: mol_type = other RNA
gcagcaattaatacctgaa

SEQ ID NO: 34609 - RNA, 19 nt, synthetic construct
  misc_feature 1..19: note = siRNA antisense sequence
  source 1..19: mol_type = other RNA
ttcaggtattaattgctgc

SEQ ID NO: 34610 - RNA, 19 nt, synthetic construct
  misc_feature 1..19: note = siRNA sense sequence
  source 1..19: mol_type = other RNA
atgaagtctcactctgtca

SEQ ID NO: 34611 - RNA, 19 nt, synthetic construct
  misc_feature 1..19: note = siRNA antisense sequence
  source 1..19: mol_type = other RNA
tgacagagtgagacttcat

SEQ ID NO: 34612 - RNA, 19 nt, synthetic construct
  misc_feature 1..19: note = siRNA sense sequence
  source 1..19: mol_type = other RNA
agtctcactctgtcaccca

SEQ ID NO: 34613 - RNA, 19 nt, synthetic construct
  misc_feature 1..19: note = siRNA antisense sequence
  source 1..19: mol_type = other RNA
tgggtgacagagtgagact

SEQ ID NO: 34614 - RNA, 19 nt, synthetic construct
  misc_feature 1..19: note = siRNA sense sequence
  source 1..19: mol_type = other RNA
gtctcactctgtcacccag

SEQ ID NO: 34615 - RNA, 19 nt, synthetic construct
  misc_feature 1..19: note = siRNA antisense sequence
  source 1..19: mol_type = other RNA
ctgggtgacagagtgagac

SEQ ID NO: 34616 - RNA, 19 nt, synthetic construct
  misc_feature 1..19: note = siRNA sense sequence
  source 1..19: mol_type = other RNA
tctcactctgtcacccagg

SEQ ID NO: 34617 - RNA, 19 nt, synthetic construct
  misc_feature 1..19: note = siRNA antisense sequence
  source 1..19: mol_type = other RNA
cctgggtgacagagtgaga

SEQ ID NO: 34618 - RNA, 19 nt, synthetic construct
  misc_feature 1..19: note = siRNA sense sequence
  source 1..19: mol_type = other RNA
ctcactctgtcacccaggc

SEQ ID NO: 34619 - RNA, 19 nt, synthetic construct
  misc_feature 1..19: note = siRNA antisense sequence
  source 1..19: mol_type = other RNA
gcctgggtgacagagtgag

SEQ ID NO: 34620 - RNA, 19 nt, synthetic construct
  misc_feature 1..19: note = siRNA sense sequence
  source 1..19: mol_type = other RNA
tcactctgtcacccaggct

SEQ ID NO: 34621 - RNA, 19 nt, synthetic construct
  misc_feature 1..19: note = siRNA antisense sequence
  source 1..19: mol_type = other RNA
agcctgggtgacagagtga

SEQ ID NO: 34622 - RNA, 19 nt, synthetic construct
  misc_feature 1..19: note = siRNA sense sequence
  source 1..19: mol_type = other RNA
cactctgtcacccaggctg

SEQ ID NO: 34623 - RNA, 19 nt, synthetic construct
  misc_feature 1..19: note = siRNA antisense sequence
  source 1..19: mol_type = other RNA
cagcctgggtgacagagtg

SEQ ID NO: 34624 - RNA, 19 nt, synthetic construct
  misc_feature 1..19: note = siRNA sense sequence
  source 1..19: mol_type = other RNA
actctgtcacccaggctgg

SEQ ID NO: 34625 - RNA, 19 nt, synthetic construct
  misc_feature 1..19: note = siRNA antisense sequence
  source 1..19: mol_type = other RNA
ccagcctgggtgacagagt

SEQ ID NO: 34626 - RNA, 19 nt, synthetic construct
  misc_feature 1..19: note = siRNA sense sequence
  source 1..19: mol_type = other RNA
ctctgtcacccaggctgga

SEQ ID NO: 34627 - RNA, 19 nt, synthetic construct
  misc_feature 1..19: note = siRNA antisense sequence
  source 1..19: mol_type = other RNA
tccagcctgggtgacagag

SEQ ID NO: 34628 - RNA, 19 nt, synthetic construct
  misc_feature 1..19: note = siRNA sense sequence
  source 1..19: mol_type = other RNA
tctgtcacccaggctggag

SEQ ID NO: 34629 - RNA, 19 nt, synthetic construct
  misc_feature 1..19: note = siRNA antisense sequence
  source 1..19: mol_type = other RNA
ctccagcctgggtgacaga

SEQ ID NO: 34630 - RNA, 19 nt, synthetic construct
  misc_feature 1..19: note = siRNA sense sequence
  source 1..19: mol_type = other RNA
cagtggcacgatctcggct

SEQ ID NO: 34631 - RNA, 19 nt, synthetic construct
  misc_feature 1..19: note = siRNA antisense sequence
  source 1..19: mol_type = other RNA
agccgagatcgtgccactg

SEQ ID NO: 34632 - RNA, 19 nt, synthetic construct
  misc_feature 1..19: note = siRNA sense sequence
  source 1..19: mol_type = other RNA
agtggcacgatctcggctt

SEQ ID NO: 34633 - RNA, 19 nt, synthetic construct
  misc_feature 1..19: note = siRNA antisense sequence
  source 1..19: mol_type = other RNA
aagccgagatcgtgccact

SEQ ID NO: 34634 - RNA, 19 nt, synthetic construct
  misc_feature 1..19: note = siRNA sense sequence
  source 1..19: mol_type = other RNA
gtggcacgatctcggctta

SEQ ID NO: 34635 - RNA, 19 nt, synthetic construct
  misc_feature 1..19: note = siRNA antisense sequence
  source 1..19: mol_type = other RNA
taagccgagatcgtgccac

SEQ ID NO: 34636 - RNA, 19 nt, synthetic construct
  misc_feature 1..19: note = siRNA sense sequence
  source 1..19: mol_type = other RNA
tggcacgatctcggcttac

SEQ ID NO: 34637 - RNA, 19 nt, synthetic construct
  misc_feature 1..19: note = siRNA antisense sequence
  source 1..19: mol_type = other RNA
gtaagccgagatcgtgcca

SEQ ID NO: 34638 - RNA, 19 nt, synthetic construct
  misc_feature 1..19: note = siRNA sense sequence
  source 1..19: mol_type = other RNA
ggcacgatctcggcttact

SEQ ID NO: 34639 - RNA, 19 nt, synthetic construct
  misc_feature 1..19: note = siRNA antisense sequence
  source 1..19: mol_type = other RNA
agtaagccgagatcgtgcc

SEQ ID NO: 34640 - RNA, 19 nt, synthetic construct
  misc_feature 1..19: note = siRNA sense sequence
  source 1..19: mol_type = other RNA
ttctgcctcccaggttcaa

SEQ ID NO: 34641 - RNA, 19 nt, synthetic construct
  misc_feature 1..19: note = siRNA antisense sequence
  source 1..19: mol_type = other RNA
ttgaacctgggaggcagaa

SEQ ID NO: 34642 - RNA, 19 nt, synthetic construct
  misc_feature 1..19: note = siRNA sense sequence
  source 1..19: mol_type = other RNA
agcctcctgagtagctggg

SEQ ID NO: 34643 - RNA, 19 nt, synthetic construct
  misc_feature 1..19: note = siRNA antisense sequence
  source 1..19: mol_type = other RNA
cccagctactcaggaggct

SEQ ID NO: 34644 - RNA, 19 nt, synthetic construct
  misc_feature 1..19: note = siRNA sense sequence
  source 1..19: mol_type = other RNA
gcctcctgagtagctggga

SEQ ID NO: 34645 - RNA, 19 nt, synthetic construct
  misc_feature 1..19: note = siRNA antisense sequence
  source 1..19: mol_type = other RNA
tcccagctactcaggaggc

SEQ ID NO: 34646 - RNA, 19 nt, synthetic construct
  misc_feature 1..19: note = siRNA sense sequence
  source 1..19: mol_type = other RNA
cctcctgagtagctgggac

SEQ ID NO: 34647 - RNA, 19 nt, synthetic construct
  misc_feature 1..19: note = siRNA antisense sequence
  source 1..19: mol_type = other RNA
gtcccagctactcaggagg

SEQ ID NO: 34648 - RNA, 19 nt, synthetic construct
  misc_feature 1..19: note = siRNA sense sequence
  source 1..19: mol_type = other RNA
ctcctgagtagctgggact

SEQ ID NO: 34649 - RNA, 19 nt, synthetic construct
  misc_feature 1..19: note = siRNA antisense sequence
  source 1..19: mol_type = other RNA
agtcccagctactcaggag

SEQ ID NO: 34650 - RNA, 19 nt, synthetic construct
  misc_feature 1..19: note = siRNA sense sequence
  source 1..19: mol_type = other RNA
tcctgagtagctgggacta

SEQ ID NO: 34651 - RNA, 19 nt, synthetic construct
  misc_feature 1..19: note = siRNA antisense sequence
  source 1..19: mol_type = other RNA
tagtcccagctactcagga

SEQ ID NO: 34652 - RNA, 19 nt, synthetic construct
  misc_feature 1..19: note = siRNA sense sequence
  source 1..19: mol_type = other RNA
tagctgggactacaggtgt

SEQ ID NO: 34653 - RNA, 19 nt, synthetic construct
  misc_feature 1..19: note = siRNA antisense sequence
  source 1..19: mol_type = other RNA
acacctgtagtcccagcta

SEQ ID NO: 34654 - RNA, 19 nt, synthetic construct
  misc_feature 1..19: note = siRNA sense sequence
  source 1..19: mol_type = other RNA
agctgggactacaggtgtg

SEQ ID NO: 34655 - RNA, 19 nt, synthetic construct
  misc_feature 1..19: note = siRNA antisense sequence
  source 1..19: mol_type = other RNA
cacacctgtagtcccagct

SEQ ID NO: 34656 - RNA, 19 nt, synthetic construct
  misc_feature 1..19: note = siRNA sense sequence
  source 1..19: mol_type = other RNA
gctgggactacaggtgtgc

SEQ ID NO: 34657 - RNA, 19 nt, synthetic construct
  misc_feature 1..19: note = siRNA antisense sequence
  source 1..19: mol_type = other RNA
gcacacctgtagtcccagc

SEQ ID NO: 34658 - RNA, 19 nt, synthetic construct
  misc_feature 1..19: note = siRNA sense sequence
  source 1..19: mol_type = other RNA
ctgggactacaggtgtgca

SEQ ID NO: 34659 - RNA, 19 nt, synthetic construct
  misc_feature 1..19: note = siRNA antisense sequence
  source 1..19: mol_type = other RNA
tgcacacctgtagtcccag

SEQ ID NO: 34660 - RNA, 19 nt, synthetic construct
  misc_feature 1..19: note = siRNA sense sequence
  source 1..19: mol_type = other RNA
tgggactacaggtgtgcac

SEQ ID NO: 34661 - RNA, 19 nt, synthetic construct
  misc_feature 1..19: note = siRNA antisense sequence
  source 1..19: mol_type = other RNA
gtgcacacctgtagtccca

SEQ ID NO: 34662 - RNA, 19 nt, synthetic construct
  misc_feature 1..19: note = siRNA sense sequence
  source 1..19: mol_type = other RNA
gggactacaggtgtgcacc

SEQ ID NO: 34663 - RNA, 19 nt, synthetic construct
  misc_feature 1..19: note = siRNA antisense sequence
  source 1..19: mol_type = other RNA
ggtgcacacctgtagtccc

SEQ ID NO: 34664 - RNA, 19 nt, synthetic construct
  misc_feature 1..19: note = siRNA sense sequence
  source 1..19: mol_type = other RNA
ggtttcaccatattggcca

SEQ ID NO: 34665 - RNA, 19 nt, synthetic construct
  misc_feature 1..19: note = siRNA antisense sequence
  source 1..19: mol_type = other RNA
tggccaatatggtgaaacc

SEQ ID NO: 34666 - RNA, 19 nt, synthetic construct
  misc_feature 1..19: note = siRNA sense sequence
  source 1..19: mol_type = other RNA
gtttcaccatattggccag

SEQ ID NO: 34667 - RNA, 19 nt, synthetic construct
  misc_feature 1..19: note = siRNA antisense sequence
  source 1..19: mol_type = other RNA
ctggccaatatggtgaaac

SEQ ID NO: 34668 - RNA, 19 nt, synthetic construct
  misc_feature 1..19: note = siRNA sense sequence
  source 1..19: mol_type = other RNA
caccatattggccaggctg

SEQ ID NO: 34669 - RNA, 19 nt, synthetic construct
  misc_feature 1..19: note = siRNA antisense sequence
  source 1..19: mol_type = other RNA
cagcctggccaatatggtg

SEQ ID NO: 34670 - RNA, 19 nt, synthetic construct
  misc_feature 1..19: note = siRNA sense sequence
  source 1..19: mol_type = other RNA
accatattggccaggctgc

SEQ ID NO: 34671 - RNA, 19 nt, synthetic construct
  misc_feature 1..19: note = siRNA antisense sequence
  source 1..19: mol_type = other RNA
gcagcctggccaatatggt

SEQ ID NO: 34672 - RNA, 19 nt, synthetic construct
  misc_feature 1..19: note = siRNA sense sequence
  source 1..19: mol_type = other RNA
aactcctgaattgaggtga

SEQ ID NO: 34673 - RNA, 19 nt, synthetic construct
  misc_feature 1..19: note = siRNA antisense sequence
  source 1..19: mol_type = other RNA
tcacctcaattcaggagtt

SEQ ID NO: 34674 - RNA, 19 nt, synthetic construct
  misc_feature 1..19: note = siRNA sense sequence
  source 1..19: mol_type = other RNA
attgaggtgatccgcctga

SEQ ID NO: 34675 - RNA, 19 nt, synthetic construct
  misc_feature 1..19: note = siRNA antisense sequence
  source 1..19: mol_type = other RNA
tcaggcggatcacctcaat

SEQ ID NO: 34676 - RNA, 19 nt, synthetic construct
  misc_feature 1..19: note = siRNA sense sequence
  source 1..19: mol_type = other RNA
ttgaggtgatccgcctgac

SEQ ID NO: 34677 - RNA, 19 nt, synthetic construct
  misc_feature 1..19: note = siRNA antisense sequence
  source 1..19: mol_type = other RNA
gtcaggcggatcacctcaa

SEQ ID NO: 34678 - RNA, 19 nt, synthetic construct
  misc_feature 1..19: note = siRNA sense sequence
  source 1..19: mol_type = other RNA
tgaggtgatccgcctgact

SEQ ID NO: 34679 - RNA, 19 nt, synthetic construct
  misc_feature 1..19: note = siRNA antisense sequence
  source 1..19: mol_type = other RNA
agtcaggcggatcacctca

SEQ ID NO: 34680 - RNA, 19 nt, synthetic construct
  misc_feature 1..19: note = siRNA sense sequence
  source 1..19: mol_type = other RNA
gaggtgatccgcctgactt

SEQ ID NO: 34681 - RNA, 19 nt, synthetic construct
  misc_feature 1..19: note = siRNA antisense sequence
  source 1..19: mol_type = other RNA
aagtcaggcggatcacctc

SEQ ID NO: 34682 - RNA, 19 nt, synthetic construct
  misc_feature 1..19: note = siRNA sense sequence
  source 1..19: mol_type = other RNA
aagtgtgagccaccgtgcc

SEQ ID NO: 34683 - RNA, 19 nt, synthetic construct
  misc_feature 1..19: note = siRNA antisense sequence
  source 1..19: mol_type = other RNA
ggcacggtggctcacactt

SEQ ID NO: 34684 - RNA, 19 nt, synthetic construct
  misc_feature 1..19: note = siRNA sense sequence
  source 1..19: mol_type = other RNA
agtgtgagccaccgtgcct

SEQ ID NO: 34685 - RNA, 19 nt, synthetic construct
  misc_feature 1..19: note = siRNA antisense sequence
  source 1..19: mol_type = other RNA
aggcacggtggctcacact

SEQ ID NO: 34686 - RNA, 19 nt, synthetic construct
  misc_feature 1..19: note = siRNA sense sequence
  source 1..19: mol_type = other RNA
caccgtgcctggcttagca

SEQ ID NO: 34687 - RNA, 19 nt, synthetic construct
  misc_feature 1..19: note = siRNA antisense sequence
  source 1..19: mol_type = other RNA
tgctaagccaggcacggtg

SEQ ID NO: 34688 - RNA, 19 nt, synthetic construct
  misc_feature 1..19: note = siRNA sense sequence
  source 1..19: mol_type = other RNA
ccgtgcctggcttagcatc

SEQ ID NO: 34689 - RNA, 19 nt, synthetic construct
  misc_feature 1..19: note = siRNA antisense sequence
  source 1..19: mol_type = other RNA
gatgctaagccaggcacgg

SEQ ID NO: 34690 - RNA, 19 nt, synthetic construct
  misc_feature 1..19: note = siRNA sense sequence
  source 1..19: mol_type = other RNA
cgtgcctggcttagcatca

SEQ ID NO: 34691 - RNA, 19 nt, synthetic construct
  misc_feature 1..19: note = siRNA antisense sequence
  source 1..19: mol_type = other RNA
tgatgctaagccaggcacg

SEQ ID NO: 34692 - RNA, 19 nt, synthetic construct
  misc_feature 1..19: note = siRNA sense sequence
  source 1..19: mol_type = other RNA
gtgcctggcttagcatcat

SEQ ID NO: 34693 - RNA, 19 nt, synthetic construct
  misc_feature 1..19: note = siRNA antisense sequence
  source 1..19: mol_type = other RNA
atgatgctaagccaggcac

SEQ ID NO: 34694 - RNA, 19 nt, synthetic construct
  misc_feature 1..19: note = siRNA sense sequence
  source 1..19: mol_type = other RNA
tgcctggcttagcatcatc

SEQ ID NO: 34695 - RNA, 19 nt, synthetic construct
  misc_feature 1..19: note = siRNA antisense sequence
  source 1..19: mol_type = other RNA
gatgatgctaagccaggca

SEQ ID NO: 34696 - RNA, 19 nt, synthetic construct
  misc_feature 1..19: note = siRNA sense sequence
  source 1..19: mol_type = other RNA
gcctggcttagcatcatct

SEQ ID NO: 34697 - RNA, 19 nt, synthetic construct
  misc_feature 1..19: note = siRNA antisense sequence
  source 1..19: mol_type = other RNA
agatgatgctaagccaggc

SEQ ID NO: 34698 - RNA, 19 nt, synthetic construct
  misc_feature 1..19: note = siRNA sense sequence
  source 1..19: mol_type = other RNA
cctggcttagcatcatctt

SEQ ID NO: 34699 - RNA, 19 nt, synthetic construct
  misc_feature 1..19: note = siRNA antisense sequence
  source 1..19: mol_type = other RNA
aagatgatgctaagccagg

SEQ ID NO: 34700 - RNA, 19 nt, synthetic construct
  misc_feature 1..19: note = siRNA sense sequence
  source 1..19: mol_type = other RNA
ctggcttagcatcatcttt

SEQ ID NO: 34701 - RNA, 19 nt, synthetic construct
  misc_feature 1..19: note = siRNA antisense sequence
  source 1..19: mol_type = other RNA
aaagatgatgctaagccag

SEQ ID NO: 34702 - RNA, 19 nt, synthetic construct
  misc_feature 1..19: note = siRNA sense sequence
  source 1..19: mol_type = other RNA
tggcttagcatcatctttt

SEQ ID NO: 34703 - RNA, 19 nt, synthetic construct
  misc_feature 1..19: note = siRNA antisense sequence
  source 1..19: mol_type = other RNA
aaaagatgatgctaagcca

SEQ ID NO: 34704 - RNA, 19 nt, synthetic construct
  misc_feature 1..19: note = siRNA sense sequence
  source 1..19: mol_type = other RNA
tatgactgtatttccaggc

SEQ ID NO: 34705 - RNA, 19 nt, synthetic construct
  misc_feature 1..19: note = siRNA antisense sequence
  source 1..19: mol_type = other RNA
gcctggaaatacagtcata

SEQ ID NO: 34706 - RNA, 19 nt, synthetic construct
  misc_feature 1..19: note = siRNA sense sequence
  source 1..19: mol_type = other RNA
atgactgtatttccaggcc

SEQ ID NO: 34707 - RNA, 19 nt, synthetic construct
  misc_feature 1..19: note = siRNA antisense sequence
  source 1..19: mol_type = other RNA
ggcctggaaatacagtcat

SEQ ID NO: 34708 - RNA, 19 nt, synthetic construct
  misc_feature 1..19: note = siRNA sense sequence
  source 1..19: mol_type = other RNA
tgactgtatttccaggccc

SEQ ID NO: 34709 - RNA, 19 nt, synthetic construct
  misc_feature 1..19: note = siRNA antisense sequence
  source 1..19: mol_type = other RNA
gggcctggaaatacagtca

SEQ ID NO: 34710 - RNA, 19 nt, synthetic construct
  misc_feature 1..19: note = siRNA sense sequence
  source 1..19: mol_type = other RNA
gactgtatttccaggccct

SEQ ID NO: 34711 - RNA, 19 nt, synthetic construct
  misc_feature 1..19: note = siRNA antisense sequence
  source 1..19: mol_type = other RNA
agggcctggaaatacagtc

SEQ ID NO: 34712 - RNA, 19 nt, synthetic construct
  misc_feature 1..19: note = siRNA sense sequence
  source 1..19: mol_type = other RNA
actgtatttccaggcccta

SEQ ID NO: 34713 - RNA, 19 nt, synthetic construct
  misc_feature 1..19: note = siRNA antisense sequence
  source 1..19: mol_type = other RNA
tagggcctggaaatacagt

SEQ ID NO: 34714 - RNA, 19 nt, synthetic construct
  misc_feature 1..19: note = siRNA sense sequence
  source 1..19: mol_type = other RNA
ctgtatttccaggccctac

SEQ ID NO: 34715 - RNA, 19 nt, synthetic construct
  misc_feature 1..19: note = siRNA antisense sequence
  source 1..19: mol_type = other RNA
gtagggcctggaaatacag

SEQ ID NO: 34716 - RNA, 19 nt, synthetic construct
  misc_feature 1..19: note = siRNA sense sequence
  source 1..19: mol_type = other RNA
tgtatttccaggccctacc

SEQ ID NO: 34717 - RNA, 19 nt, synthetic construct
  misc_feature 1..19: note = siRNA antisense sequence
  source 1..19: mol_type = other RNA
ggtagggcctggaaataca

SEQ ID NO: 34718 - RNA, 19 nt, synthetic construct
  misc_feature 1..19: note = siRNA sense sequence
  source 1..19: mol_type = other RNA
gtatttccaggccctacca

SEQ ID NO: 34719 - RNA, 19 nt, synthetic construct
  misc_feature 1..19: note = siRNA antisense sequence
  source 1..19: mol_type = other RNA
tggtagggcctggaaatac

SEQ ID NO: 34720 - RNA, 19 nt, synthetic construct
  misc_feature 1..19: note = siRNA sense sequence
  source 1..19: mol_type = other RNA
tatttccaggccctaccat

SEQ ID NO: 34721 - RNA, 19 nt, synthetic construct
  misc_feature 1..19: note = siRNA antisense sequence
  source 1..19: mol_type = other RNA
atggtagggcctggaaata

SEQ ID NO: 34722 - RNA, 19 nt, synthetic construct
  misc_feature 1..19: note = siRNA sense sequence
  source 1..19: mol_type = other RNA
atttccaggccctaccata

SEQ ID NO: 34723 - RNA, 19 nt, synthetic construct
  misc_feature 1..19: note = siRNA antisense sequence
  source 1..19: mol_type = other RNA
tatggtagggcctggaaat

SEQ ID NO: 34724 - RNA, 19 nt, synthetic construct
  misc_feature 1..19: note = siRNA sense sequence
  source 1..19: mol_type = other RNA
tttccaggccctaccatat

SEQ ID NO: 34725 - RNA, 19 nt, synthetic construct
  misc_feature 1..19: note = siRNA antisense sequence
  source 1..19: mol_type = other RNA
atatggtagggcctggaaa

SEQ ID NO: 34726 - RNA, 19 nt, synthetic construct
  misc_feature 1..19: note = siRNA sense sequence
  source 1..19: mol_type = other RNA
ttccaggccctaccatata

SEQ ID NO: 34727 - RNA, 19 nt, synthetic construct
  misc_feature 1..19: note = siRNA antisense sequence
  source 1..19: mol_type = other RNA
tatatggtagggcctggaa

SEQ ID NO: 34728 - RNA, 19 nt, synthetic construct
  misc_feature 1..19: note = siRNA sense sequence
  source 1..19: mol_type = other RNA
tccaggccctaccatatat

SEQ ID NO: 34729 - RNA, 19 nt, synthetic construct
  misc_feature 1..19: note = siRNA antisense sequence
  source 1..19: mol_type = other RNA
atatatggtagggcctgga

SEQ ID NO: 34730 - RNA, 19 nt, synthetic construct
  misc_feature 1..19: note = siRNA sense sequence
  source 1..19: mol_type = other RNA
ccaggccctaccatatatt

SEQ ID NO: 34731 - RNA, 19 nt, synthetic construct
  misc_feature 1..19: note = siRNA antisense sequence
  source 1..19: mol_type = other RNA
aatatatggtagggcctgg

SEQ ID NO: 34732 - RNA, 19 nt, synthetic construct
  misc_feature 1..19: note = siRNA sense sequence
  source 1..19: mol_type = other RNA
caggccctaccatatattc

SEQ ID NO: 34733 - RNA, 19 nt, synthetic construct
  misc_feature 1..19: note = siRNA antisense sequence
  source 1..19: mol_type = other RNA
gaatatatggtagggcctg

SEQ ID NO: 34734 - RNA, 19 nt, synthetic construct
  misc_feature 1..19: note = siRNA sense sequence
  source 1..19: mol_type = other RNA
aggccctaccatatattca

SEQ ID NO: 34735 - RNA, 19 nt, synthetic construct
  misc_feature 1..19: note = siRNA antisense sequence
  source 1..19: mol_type = other RNA
tgaatatatggtagggcct

SEQ ID NO: 34736 - RNA, 19 nt, synthetic construct
  misc_feature 1..19: note = siRNA sense sequence
  source 1..19: mol_type = other RNA
ggccctaccatatattcaa

SEQ ID NO: 34737 - RNA, 19 nt, synthetic construct
  misc_feature 1..19: note = siRNA antisense sequence
  source 1..19: mol_type = other RNA
ttgaatatatggtagggcc

SEQ ID NO: 34738 - RNA, 19 nt, synthetic construct
  misc_feature 1..19: note = siRNA sense sequence
  source 1..19: mol_type = other RNA
ccctaccatatattcaatt

SEQ ID NO: 34739 - RNA, 19 nt, synthetic construct
  misc_feature 1..19: note = siRNA antisense sequence
  source 1..19: mol_type = other RNA
aattgaatatatggtaggg

SEQ ID NO: 34740 - RNA, 19 nt, synthetic construct
  misc_feature 1..19: note = siRNA sense sequence
  source 1..19: mol_type = other RNA
cacttggttatatttgtgg

SEQ ID NO: 34741 - RNA, 19 nt, synthetic construct
  misc_feature 1..19: note = siRNA antisense sequence
  source 1..19: mol_type = other RNA
ccacaaatataaccaagtg

SEQ ID NO: 34742 - RNA, 19 nt, synthetic construct
  misc_feature 1..19: note = siRNA sense sequence
  source 1..19: mol_type = other RNA
gttatatttgtggagtagt

SEQ ID NO: 34743 - RNA, 19 nt, synthetic construct
  misc_feature 1..19: note = siRNA antisense sequence
  source 1..19: mol_type = other RNA
actactccacaaatataac

SEQ ID NO: 34744 - RNA, 19 nt, synthetic construct
  misc_feature 1..19: note = siRNA sense sequence
  source 1..19: mol_type = other RNA
ttatatttgtggagtagtg

SEQ ID NO: 34745 - RNA, 19 nt, synthetic construct
  misc_feature 1..19: note = siRNA antisense sequence
  source 1..19: mol_type = other RNA
cactactccacaaatataa

SEQ ID NO: 34746 - RNA, 19 nt, synthetic construct
  misc_feature 1..19: note = siRNA sense sequence
  source 1..19: mol_type = other RNA
tatatttgtggagtagtgg

SEQ ID NO: 34747 - RNA, 19 nt, synthetic construct
  misc_feature 1..19: note = siRNA antisense sequence
  source 1..19: mol_type = other RNA
ccactactccacaaatata

SEQ ID NO: 34748 - RNA, 19 nt, synthetic construct
  misc_feature 1..19: note = siRNA sense sequence
  source 1..19: mol_type = other RNA
atatttgtggagtagtgga

SEQ ID NO: 34749 - RNA, 19 nt, synthetic construct
  misc_feature 1..19: note = siRNA antisense sequence
  source 1..19: mol_type = other RNA
tccactactccacaaatat

SEQ ID NO: 34750 - RNA, 19 nt, synthetic construct
  misc_feature 1..19: note = siRNA sense sequence
  source 1..19: mol_type = other RNA
tatttgtggagtagtggaa

SEQ ID NO: 34751 - RNA, 19 nt, synthetic construct
  misc_feature 1..19: note = siRNA antisense sequence
  source 1..19: mol_type = other RNA
ttccactactccacaaata

SEQ ID NO: 34752 - RNA, 19 nt, synthetic construct
  misc_feature 1..19: note = siRNA sense sequence
  source 1..19: mol_type = other RNA
atttgtggagtagtggaat

SEQ ID NO: 34753 - RNA, 19 nt, synthetic construct
  misc_feature 1..19: note = siRNA antisense sequence
  source 1..19: mol_type = other RNA
attccactactccacaaat

SEQ ID NO: 34754 - RNA, 19 nt, synthetic construct
  misc_feature 1..19: note = siRNA sense sequence
  source 1..19: mol_type = other RNA
ttgtggagtagtggaatat

SEQ ID NO: 34755 - RNA, 19 nt, synthetic construct
  misc_feature 1..19: note = siRNA antisense sequence
  source 1..19: mol_type = other RNA
atattccactactccacaa

SEQ ID NO: 34756 - RNA, 19 nt, synthetic construct
  misc_feature 1..19: note = siRNA sense sequence
  source 1..19: mol_type = other RNA
tgtggagtagtggaatata

SEQ ID NO: 34757 - RNA, 19 nt, synthetic construct
  misc_feature 1..19: note = siRNA antisense sequence
  source 1..19: mol_type = other RNA
tatattccactactccaca

SEQ ID NO: 34758 - RNA, 19 nt, synthetic construct
  misc_feature 1..19: note = siRNA sense sequence
  source 1..19: mol_type = other RNA
gtggagtagtggaatatat

SEQ ID NO: 34759 - RNA, 19 nt, synthetic construct
  misc_feature 1..19: note = siRNA antisense sequence
  source 1..19: mol_type = other RNA
atatattccactactccac

SEQ ID NO: 34760 - RNA, 19 nt, synthetic construct
  misc_feature 1..19: note = siRNA sense sequence
  source 1..19: mol_type = other RNA
tggagtagtggaatatatg

SEQ ID NO: 34761 - RNA, 19 nt, synthetic construct
  misc_feature 1..19: note = siRNA antisense sequence
  source 1..19: mol_type = other RNA
catatattccactactcca

SEQ ID NO: 34762 - RNA, 19 nt, synthetic construct
  misc_feature 1..19: note = siRNA sense sequence
  source 1..19: mol_type = other RNA
ggagtagtggaatatatga

SEQ ID NO: 34763 - RNA, 19 nt, synthetic construct
  misc_feature 1..19: note = siRNA antisense sequence
  source 1..19: mol_type = other RNA
tcatatattccactactcc

SEQ ID NO: 34764 - RNA, 19 nt, synthetic construct
  misc_feature 1..19: note = siRNA sense sequence
  source 1..19: mol_type = other RNA
gagtagtggaatatatgaa

SEQ ID NO: 34765 - RNA, 19 nt, synthetic construct
  misc_feature 1..19: note = siRNA antisense sequence
  source 1..19: mol_type = other RNA
ttcatatattccactactc

SEQ ID NO: 34766 - RNA, 19 nt, synthetic construct
  misc_feature 1..19: note = siRNA sense sequence
  source 1..19: mol_type = other RNA
aaagattagttcctgtatc

SEQ ID NO: 34767 - RNA, 19 nt, synthetic construct
  misc_feature 1..19: note = siRNA antisense sequence
  source 1..19: mol_type = other RNA
gatacaggaactaatcttt

SEQ ID NO: 34768 - RNA, 19 nt, synthetic construct
  misc_feature 1..19: note = siRNA sense sequence
  source 1..19: mol_type = other RNA
attagttcctgtatctcca

SEQ ID NO: 34769 - RNA, 19 nt, synthetic construct
  misc_feature 1..19: note = siRNA antisense sequence
  source 1..19: mol_type = other RNA
tggagatacaggaactaat

SEQ ID NO: 34770 - RNA, 19 nt, synthetic construct
  misc_feature 1..19: note = siRNA sense sequence
  source 1..19: mol_type = other RNA
ttagttcctgtatctccag

SEQ ID NO: 34771 - RNA, 19 nt, synthetic construct
  misc_feature 1..19: note = siRNA antisense sequence
  source 1..19: mol_type = other RNA
ctggagatacaggaactaa

SEQ ID NO: 34772 - RNA, 19 nt, synthetic construct
  misc_feature 1..19: note = siRNA sense sequence
  source 1..19: mol_type = other RNA
ctgtatctccagggatcac

SEQ ID NO: 34773 - RNA, 19 nt, synthetic construct
  misc_feature 1..19: note = siRNA antisense sequence
  source 1..19: mol_type = other RNA
gtgatccctggagatacag

SEQ ID NO: 34774 - RNA, 19 nt, synthetic construct
  misc_feature 1..19: note = siRNA sense sequence
  source 1..19: mol_type = other RNA
tgtatctccagggatcact

SEQ ID NO: 34775 - RNA, 19 nt, synthetic construct
  misc_feature 1..19: note = siRNA antisense sequence
  source 1..19: mol_type = other RNA
agtgatccctggagataca

SEQ ID NO: 34776 - RNA, 19 nt, synthetic construct
  misc_feature 1..19: note = siRNA sense sequence
  source 1..19: mol_type = other RNA
gtatctccagggatcacta

SEQ ID NO: 34777 - RNA, 19 nt, synthetic construct
  misc_feature 1..19: note = siRNA antisense sequence
  source 1..19: mol_type = other RNA
tagtgatccctggagatac

SEQ ID NO: 34778 - RNA, 19 nt, synthetic construct
  misc_feature 1..19: note = siRNA sense sequence
  source 1..19: mol_type = other RNA
tatctccagggatcactat

SEQ ID NO: 34779 - RNA, 19 nt, synthetic construct
  misc_feature 1..19: note = siRNA antisense sequence
  source 1..19: mol_type = other RNA
atagtgatccctggagata

SEQ ID NO: 34780 - RNA, 19 nt, synthetic construct
  misc_feature 1..19: note = siRNA sense sequence
  source 1..19: mol_type = other RNA
atctccagggatcactatc

SEQ ID NO: 34781 - RNA, 19 nt, synthetic construct
  misc_feature 1..19: note = siRNA antisense sequence
  source 1..19: mol_type = other RNA
gatagtgatccctggagat

SEQ ID NO: 34782 - RNA, 19 nt, synthetic construct
  misc_feature 1..19: note = siRNA sense sequence
  source 1..19: mol_type = other RNA
ctccagggatcactatctt

SEQ ID NO: 34783 - RNA, 19 nt, synthetic construct
  misc_feature 1..19: note = siRNA antisense sequence
  source 1..19: mol_type = other RNA
aagatagtgatccctggag

SEQ ID NO: 34784 - RNA, 19 nt, synthetic construct
  misc_feature 1..19: note = siRNA sense sequence
  source 1..19: mol_type = other RNA
tccagggatcactatcttt

SEQ ID NO: 34785 - RNA, 19 nt, synthetic construct
  misc_feature 1..19: note = siRNA antisense sequence
  source 1..19: mol_type = other RNA
aaagatagtgatccctgga

SEQ ID NO: 34786 - RNA, 19 nt, synthetic construct
  misc_feature 1..19: note = siRNA sense sequence
  source 1..19: mol_type = other RNA
ccagggatcactatctttc

SEQ ID NO: 34787 - RNA, 19 nt, synthetic construct
  misc_feature 1..19: note = siRNA antisense sequence
  source 1..19: mol_type = other RNA
gaaagatagtgatccctgg

SEQ ID NO: 34788 - RNA, 19 nt, synthetic construct
  misc_feature 1..19: note = siRNA sense sequence
  source 1..19: mol_type = other RNA
cagggatcactatctttct

SEQ ID NO: 34789 - RNA, 19 nt, synthetic construct
  misc_feature 1..19: note = siRNA antisense sequence
  source 1..19: mol_type = other RNA
agaaagatagtgatccctg

SEQ ID NO: 34790 - RNA, 19 nt, synthetic construct
  misc_feature 1..19: note = siRNA sense sequence
  source 1..19: mol_type = other RNA
agggatcactatctttcta

SEQ ID NO: 34791 - RNA, 19 nt, synthetic construct
  misc_feature 1..19: note = siRNA antisense sequence
  source 1..19: mol_type = other RNA
tagaaagatagtgatccct

SEQ ID NO: 34792 - RNA, 19 nt, synthetic construct
  misc_feature 1..19: note = siRNA sense sequence
  source 1..19: mol_type = other RNA
gggatcactatctttctat

SEQ ID NO: 34793 - RNA, 19 nt, synthetic construct
  misc_feature 1..19: note = siRNA antisense sequence
  source 1..19: mol_type = other RNA
atagaaagatagtgatccc

SEQ ID NO: 34794 - RNA, 19 nt, synthetic construct
  misc_feature 1..19: note = siRNA sense sequence
  source 1..19: mol_type = other RNA
cttgtcttaatcttatgtc

SEQ ID NO: 34795 - RNA, 19 nt, synthetic construct
  misc_feature 1..19: note = siRNA antisense sequence
  source 1..19: mol_type = other RNA
gacataagattaagacaag

SEQ ID NO: 34796 - RNA, 19 nt, synthetic construct
  misc_feature 1..19: note = siRNA sense sequence
  source 1..19: mol_type = other RNA
ctatgatttctcctatttc

SEQ ID NO: 34797 - RNA, 19 nt, synthetic construct
  misc_feature 1..19: note = siRNA antisense sequence
  source 1..19: mol_type = other RNA
gaaataggagaaatcatag

SEQ ID NO: 34798 - RNA, 19 nt, synthetic construct
  misc_feature 1..19: note = siRNA sense sequence
  source 1..19: mol_type = other RNA
tctcctatttctaaattgc

SEQ ID NO: 34799 - RNA, 19 nt, synthetic construct
  misc_feature 1..19: note = siRNA antisense sequence
  source 1..19: mol_type = other RNA
gcaatttagaaataggaga

SEQ ID NO: 34800 - RNA, 19 nt, synthetic construct
  misc_feature 1..19: note = siRNA sense sequence
  source 1..19: mol_type = other RNA
ctcctatttctaaattgca

SEQ ID NO: 34801 - RNA, 19 nt, synthetic construct
  misc_feature 1..19: note = siRNA antisense sequence
  source 1..19: mol_type = other RNA
tgcaatttagaaataggag

SEQ ID NO: 34802 - RNA, 19 nt, synthetic construct
  misc_feature 1..19: note = siRNA sense sequence
  source 1..19: mol_type = other RNA
acatatgtaagaagctact

SEQ ID NO: 34803 - RNA, 19 nt, synthetic construct
  misc_feature 1..19: note = siRNA antisense sequence
  source 1..19: mol_type = other RNA
agtagcttcttacatatgt

SEQ ID NO: 34804 - RNA, 19 nt, synthetic construct
  misc_feature 1..19: note = siRNA sense sequence
  source 1..19: mol_type = other RNA
tttaatacattcccttgtc

SEQ ID NO: 34805 - RNA, 19 nt, synthetic construct
  misc_feature 1..19: note = siRNA antisense sequence
  source 1..19: mol_type = other RNA
gacaagggaatgtattaaa

SEQ ID NO: 34806 - RNA, 19 nt, synthetic construct
  misc_feature 1..19: note = siRNA sense sequence
  source 1..19: mol_type = other RNA
tacattcccttgtcaccat

SEQ ID NO: 34807 - RNA, 19 nt, synthetic construct
  misc_feature 1..19: note = siRNA antisense sequence
  source 1..19: mol_type = other RNA
atggtgacaagggaatgta

SEQ ID NO: 34808 - RNA, 19 nt, synthetic construct
  misc_feature 1..19: note = siRNA sense sequence
  source 1..19: mol_type = other RNA
acattcccttgtcaccatt

SEQ ID NO: 34809 - RNA, 19 nt, synthetic construct
  misc_feature 1..19: note = siRNA antisense sequence
  source 1..19: mol_type = other RNA
aatggtgacaagggaatgt

SEQ ID NO: 34810 - RNA, 19 nt, synthetic construct
  misc_feature 1..19: note = siRNA sense sequence
  source 1..19: mol_type = other RNA
cattcccttgtcaccattt

SEQ ID NO: 34811 - RNA, 19 nt, synthetic construct
  misc_feature 1..19: note = siRNA antisense sequence
  source 1..19: mol_type = other RNA
aaatggtgacaagggaatg

SEQ ID NO: 34812 - RNA, 19 nt, synthetic construct
  misc_feature 1..19: note = siRNA sense sequence
  source 1..19: mol_type = other RNA
attcccttgtcaccattta

SEQ ID NO: 34813 - RNA, 19 nt, synthetic construct
  misc_feature 1..19: note = siRNA antisense sequence
  source 1..19: mol_type = other RNA
taaatggtgacaagggaat

SEQ ID NO: 34814 - RNA, 19 nt, synthetic construct
  misc_feature 1..19: note = siRNA sense sequence
  source 1..19: mol_type = other RNA
ttcccttgtcaccatttat

SEQ ID NO: 34815 - RNA, 19 nt, synthetic construct
  misc_feature 1..19: note = siRNA antisense sequence
  source 1..19: mol_type = other RNA
ataaatggtgacaagggaa

SEQ ID NO: 34816 - RNA, 19 nt, synthetic construct
  misc_feature 1..19: note = siRNA sense sequence
  source 1..19: mol_type = other RNA
tcccttgtcaccatttatt

SEQ ID NO: 34817 - RNA, 19 nt, synthetic construct
  misc_feature 1..19: note = siRNA antisense sequence
  source 1..19: mol_type = other RNA
aataaatggtgacaaggga

SEQ ID NO: 34818 - RNA, 19 nt, synthetic construct
  misc_feature 1..19: note = siRNA sense sequence
  source 1..19: mol_type = other RNA
cccttgtcaccatttattt

SEQ ID NO: 34819 - RNA, 19 nt, synthetic construct
  misc_feature 1..19: note = siRNA antisense sequence
  source 1..19: mol_type = other RNA
aaataaatggtgacaaggg

SEQ ID NO: 34820 - RNA, 19 nt, synthetic construct
  misc_feature 1..19: note = siRNA sense sequence
  source 1..19: mol_type = other RNA
cttgtcaccatttatttga

SEQ ID NO: 34821 - RNA, 19 nt, synthetic construct
  misc_feature 1..19: note = siRNA antisense sequence
  source 1..19: mol_type = other RNA
tcaaataaatggtgacaag

SEQ ID NO: 34822 - RNA, 19 nt, synthetic construct
  misc_feature 1..19: note = siRNA sense sequence
  source 1..19: mol_type = other RNA
tcaccatttatttgatacc

SEQ ID NO: 34823 - RNA, 19 nt, synthetic construct
  misc_feature 1..19: note = siRNA antisense sequence
  source 1..19: mol_type = other RNA
ggtatcaaataaatggtga

SEQ ID NO: 34824 - RNA, 19 nt, synthetic construct
  misc_feature 1..19: note = siRNA sense sequence
  source 1..19: mol_type = other RNA
caccatttatttgataccc

SEQ ID NO: 34825 - RNA, 19 nt, synthetic construct
  misc_feature 1..19: note = siRNA antisense sequence
  source 1..19: mol_type = other RNA
gggtatcaaataaatggtg

SEQ ID NO: 34826 - RNA, 19 nt, synthetic construct
  misc_feature 1..19: note = siRNA sense sequence
  source 1..19: mol_type = other RNA
catttatttgataccctct

SEQ ID NO: 34827 - RNA, 19 nt, synthetic construct
  misc_feature 1..19: note = siRNA antisense sequence
  source 1..19: mol_type = other RNA
agagggtatcaaataaatg

SEQ ID NO: 34828 - RNA, 19 nt, synthetic construct
  misc_feature 1..19: note = siRNA sense sequence
  source 1..19: mol_type = other RNA
ataccctcttgccttggct

SEQ ID NO: 34829 - RNA, 19 nt, synthetic construct
  misc_feature 1..19: note = siRNA antisense sequence
  source 1..19: mol_type = other RNA
agccaaggcaagagggtat

SEQ ID NO: 34830 - RNA, 19 nt, synthetic construct
  misc_feature 1..19: note = siRNA sense sequence
  source 1..19: mol_type = other RNA
accctcttgccttggcttg

SEQ ID NO: 34831 - RNA, 19 nt, synthetic construct
  misc_feature 1..19: note = siRNA antisense sequence
  source 1..19: mol_type = other RNA
caagccaaggcaagagggt

SEQ ID NO: 34832 - RNA, 19 nt, synthetic construct
  misc_feature 1..19: note = siRNA sense sequence
  source 1..19: mol_type = other RNA
tcttgccttggcttggaat

SEQ ID NO: 34833 - RNA, 19 nt, synthetic construct
  misc_feature 1..19: note = siRNA antisense sequence
  source 1..19: mol_type = other RNA
attccaagccaaggcaaga

SEQ ID NO: 34834 - RNA, 19 nt, synthetic construct
  misc_feature 1..19: note = siRNA sense sequence
  source 1..19: mol_type = other RNA
cttgccttggcttggaatt

SEQ ID NO: 34835 - RNA, 19 nt, synthetic construct
  misc_feature 1..19: note = siRNA antisense sequence
  source 1..19: mol_type = other RNA
aattccaagccaaggcaag

SEQ ID NO: 34836 - RNA, 19 nt, synthetic construct
  misc_feature 1..19: note = siRNA sense sequence
  source 1..19: mol_type = other RNA
ccttggcttggaatttgca

SEQ ID NO: 34837 - RNA, 19 nt, synthetic construct
  misc_feature 1..19: note = siRNA antisense sequence
  source 1..19: mol_type = other RNA
tgcaaattccaagccaagg

SEQ ID NO: 34838 - RNA, 19 nt, synthetic construct
  misc_feature 1..19: note = siRNA sense sequence
  source 1..19: mol_type = other RNA
cttggcttggaatttgcaa

SEQ ID NO: 34839 - RNA, 19 nt, synthetic construct
  misc_feature 1..19: note = siRNA antisense sequence
  source 1..19: mol_type = other RNA
ttgcaaattccaagccaag

SEQ ID NO: 34840 - RNA, 19 nt, synthetic construct
  misc_feature 1..19: note = siRNA sense sequence
  source 1..19: mol_type = other RNA
gttgttgaatattcctatc

SEQ ID NO: 34841 - RNA, 19 nt, synthetic construct
  misc_feature 1..19: note = siRNA antisense sequence
  source 1..19: mol_type = other RNA
gataggaatattcaacaac

SEQ ID NO: 34842 - RNA, 19 nt, synthetic construct
  misc_feature 1..19: note = siRNA sense sequence
  source 1..19: mol_type = other RNA
tgttgaatattcctatctg

SEQ ID NO: 34843 - RNA, 19 nt, synthetic construct
  misc_feature 1..19: note = siRNA antisense sequence
  source 1..19: mol_type = other RNA
cagataggaatattcaaca

SEQ ID NO: 34844 - RNA, 19 nt, synthetic construct
  misc_feature 1..19: note = siRNA sense sequence
  source 1..19: mol_type = other RNA
attcctatctggatattac

SEQ ID NO: 34845 - RNA, 19 nt, synthetic construct
  misc_feature 1..19: note = siRNA antisense sequence
  source 1..19: mol_type = other RNA
gtaatatccagataggaat

SEQ ID NO: 34846 - RNA, 19 nt, synthetic construct
  misc_feature 1..19: note = siRNA sense sequence
  source 1..19: mol_type = other RNA
ttcctatctggatattact

SEQ ID NO: 34847 - RNA, 19 nt, synthetic construct
  misc_feature 1..19: note = siRNA antisense sequence
  source 1..19: mol_type = other RNA
agtaatatccagataggaa

SEQ ID NO: 34848 - RNA, 19 nt, synthetic construct
  misc_feature 1..19: note = siRNA sense sequence
  source 1..19: mol_type = other RNA
tcctatctggatattacta

SEQ ID NO: 34849 - RNA, 19 nt, synthetic construct
  misc_feature 1..19: note = siRNA antisense sequence
  source 1..19: mol_type = other RNA
tagtaatatccagatagga

SEQ ID NO: 34850 - RNA, 19 nt, synthetic construct
  misc_feature 1..19: note = siRNA sense sequence
  source 1..19: mol_type = other RNA
tctggatattactagattg

SEQ ID NO: 34851 - RNA, 19 nt, synthetic construct
  misc_feature 1..19: note = siRNA antisense sequence
  source 1..19: mol_type = other RNA
caatctagtaatatccaga

SEQ ID NO: 34852 - RNA, 19 nt, synthetic construct
  misc_feature 1..19: note = siRNA sense sequence
  source 1..19: mol_type = other RNA
ctggatattactagattgg

SEQ ID NO: 34853 - RNA, 19 nt, synthetic construct
  misc_feature 1..19: note = siRNA antisense sequence
  source 1..19: mol_type = other RNA
ccaatctagtaatatccag

SEQ ID NO: 34854 - RNA, 19 nt, synthetic construct
  misc_feature 1..19: note = siRNA sense sequence
  source 1..19: mol_type = other RNA
tggatattactagattggg

SEQ ID NO: 34855 - RNA, 19 nt, synthetic construct
  misc_feature 1..19: note = siRNA antisense sequence
  source 1..19: mol_type = other RNA
cccaatctagtaatatcca

SEQ ID NO: 34856 - RNA, 19 nt, synthetic construct
  misc_feature 1..19: note = siRNA sense sequence
  source 1..19: mol_type = other RNA
ggatattactagattggga

SEQ ID NO: 34857 - RNA, 19 nt, synthetic construct
  misc_feature 1..19: note = siRNA antisense sequence
  source 1..19: mol_type = other RNA
tcccaatctagtaatatcc

SEQ ID NO: 34858 - RNA, 19 nt, synthetic construct
  misc_feature 1..19: note = siRNA sense sequence
  source 1..19: mol_type = other RNA
gatattactagattgggat

SEQ ID NO: 34859 - RNA, 19 nt, synthetic construct
  misc_feature 1..19: note = siRNA antisense sequence
  source 1..19: mol_type = other RNA
atcccaatctagtaatatc

SEQ ID NO: 34860 - RNA, 19 nt, synthetic construct
  misc_feature 1..19: note = siRNA sense sequence
  source 1..19: mol_type = other RNA
attactagattgggatttc

SEQ ID NO: 34861 - RNA, 19 nt, synthetic construct
  misc_feature 1..19: note = siRNA antisense sequence
  source 1..19: mol_type = other RNA
gaaatcccaatctagtaat

SEQ ID NO: 34862 - RNA, 19 nt, synthetic construct
  misc_feature 1..19: note = siRNA sense sequence
  source 1..19: mol_type = other RNA
ttactagattgggatttct

SEQ ID NO: 34863 - RNA, 19 nt, synthetic construct
  misc_feature 1..19: note = siRNA antisense sequence
  source 1..19: mol_type = other RNA
agaaatcccaatctagtaa

SEQ ID NO: 34864 - RNA, 19 nt, synthetic construct
  misc_feature 1..19: note = siRNA sense sequence
  source 1..19: mol_type = other RNA
tactagattgggatttctg

SEQ ID NO: 34865 - RNA, 19 nt, synthetic construct
  misc_feature 1..19: note = siRNA antisense sequence
  source 1..19: mol_type = other RNA
cagaaatcccaatctagta

SEQ ID NO: 34866 - RNA, 19 nt, synthetic construct
  misc_feature 1..19: note = siRNA sense sequence
  source 1..19: mol_type = other RNA
actagattgggatttctga

SEQ ID NO: 34867 - RNA, 19 nt, synthetic construct
  misc_feature 1..19: note = siRNA antisense sequence
  source 1..19: mol_type = other RNA
tcagaaatcccaatctagt

SEQ ID NO: 34868 - RNA, 19 nt, synthetic construct
  misc_feature 1..19: note = siRNA sense sequence
  source 1..19: mol_type = other RNA
ctagattgggatttctgac

SEQ ID NO: 34869 - RNA, 19 nt, synthetic construct
  misc_feature 1..19: note = siRNA antisense sequence
  source 1..19: mol_type = other RNA
gtcagaaatcccaatctag

SEQ ID NO: 34870 - RNA, 19 nt, synthetic construct
  misc_feature 1..19: note = siRNA sense sequence
  source 1..19: mol_type = other RNA
ggatttctgacccacctag

SEQ ID NO: 34871 - RNA, 19 nt, synthetic construct
  misc_feature 1..19: note = siRNA antisense sequence
  source 1..19: mol_type = other RNA
ctaggtgggtcagaaatcc

SEQ ID NO: 34872 - RNA, 19 nt, synthetic construct
  misc_feature 1..19: note = siRNA sense sequence
  source 1..19: mol_type = other RNA
gatttctgacccacctagt

SEQ ID NO: 34873 - RNA, 19 nt, synthetic construct
  misc_feature 1..19: note = siRNA antisense sequence
  source 1..19: mol_type = other RNA
actaggtgggtcagaaatc

SEQ ID NO: 34874 - RNA, 19 nt, synthetic construct
  misc_feature 1..19: note = siRNA sense sequence
  source 1..19: mol_type = other RNA
atttctgacccacctagtc

SEQ ID NO: 34875 - RNA, 19 nt, synthetic construct
  misc_feature 1..19: note = siRNA antisense sequence
  source 1..19: mol_type = other RNA
gactaggtgggtcagaaat

SEQ ID NO: 34876 - RNA, 19 nt, synthetic construct
  misc_feature 1..19: note = siRNA sense sequence
  source 1..19: mol_type = other RNA
tttctgacccacctagtcc

SEQ ID NO: 34877 - RNA, 19 nt, synthetic construct
  misc_feature 1..19: note = siRNA antisense sequence
  source 1..19: mol_type = other RNA
ggactaggtgggtcagaaa

SEQ ID NO: 34878 - RNA, 19 nt, synthetic construct
  misc_feature 1..19: note = siRNA sense sequence
  source 1..19: mol_type = other RNA
ttctgacccacctagtcca

SEQ ID NO: 34879 - RNA, 19 nt, synthetic construct
  misc_feature 1..19: note = siRNA antisense sequence
  source 1..19: mol_type = other RNA
tggactaggtgggtcagaa

SEQ ID NO: 34880 - RNA, 19 nt, synthetic construct
  misc_feature 1..19: note = siRNA sense sequence
  source 1..19: mol_type = other RNA
tctgacccacctagtccaa

SEQ ID NO: 34881 - RNA, 19 nt, synthetic construct
  misc_feature 1..19: note = siRNA antisense sequence
  source 1..19: mol_type = other RNA
ttggactaggtgggtcaga

SEQ ID NO: 34882 - RNA, 19 nt, synthetic construct
  misc_feature 1..19: note = siRNA sense sequence
  source 1..19: mol_type = other RNA
ctgacccacctagtccaaa

SEQ ID NO: 34883 - RNA, 19 nt, synthetic construct
  misc_feature 1..19: note = siRNA antisense sequence
  source 1..19: mol_type = other RNA
tttggactaggtgggtcag

SEQ ID NO: 34884 - RNA, 19 nt, synthetic construct
  misc_feature 1..19: note = siRNA sense sequence
  source 1..19: mol_type = other RNA
cccacctagtccaaagaca

SEQ ID NO: 34885 - RNA, 19 nt, synthetic construct
  misc_feature 1..19: note = siRNA antisense sequence
  source 1..19: mol_type = other RNA
tgtctttggactaggtggg

SEQ ID NO: 34886 - RNA, 19 nt, synthetic construct
  misc_feature 1..19: note = siRNA sense sequence
  source 1..19: mol_type = other RNA
ccacctagtccaaagacag

SEQ ID NO: 34887 - RNA, 19 nt, synthetic construct
  misc_feature 1..19: note = siRNA antisense sequence
  source 1..19: mol_type = other RNA
ctgtctttggactaggtgg

SEQ ID NO: 34888 - RNA, 19 nt, synthetic construct
  misc_feature 1..19: note = siRNA sense sequence
  source 1..19: mol_type = other RNA
cacctagtccaaagacaga

SEQ ID NO: 34889 - RNA, 19 nt, synthetic construct
  misc_feature 1..19: note = siRNA antisense sequence
  source 1..19: mol_type = other RNA
tctgtctttggactaggtg

SEQ ID NO: 34890 - RNA, 19 nt, synthetic construct
  misc_feature 1..19: note = siRNA sense sequence
  source 1..19: mol_type = other RNA
acctagtccaaagacagaa

SEQ ID NO: 34891 - RNA, 19 nt, synthetic construct
  misc_feature 1..19: note = siRNA antisense sequence
  source 1..19: mol_type = other RNA
ttctgtctttggactaggt

SEQ ID NO: 34892 - RNA, 19 nt, synthetic construct
  misc_feature 1..19: note = siRNA sense sequence
  source 1..19: mol_type = other RNA
cctagtccaaagacagaat

SEQ ID NO: 34893 - RNA, 19 nt, synthetic construct
  misc_feature 1..19: note = siRNA antisense sequence
  source 1..19: mol_type = other RNA
attctgtctttggactagg

SEQ ID NO: 34894 - RNA, 19 nt, synthetic construct
  misc_feature 1..19: note = siRNA sense sequence
  source 1..19: mol_type = other RNA
ctagtccaaagacagaatt

SEQ ID NO: 34895 - RNA, 19 nt, synthetic construct
  misc_feature 1..19: note = siRNA antisense sequence
  source 1..19: mol_type = other RNA
aattctgtctttggactag

SEQ ID NO: 34896 - RNA, 19 nt, synthetic construct
  misc_feature 1..19: note = siRNA sense sequence
  source 1..19: mol_type = other RNA
ggctacagtaatactcctt

SEQ ID NO: 34897 - RNA, 19 nt, synthetic construct
  misc_feature 1..19: note = siRNA antisense sequence
  source 1..19: mol_type = other RNA
aaggagtattactgtagcc

SEQ ID NO: 34898 - RNA, 19 nt, synthetic construct
  misc_feature 1..19: note = siRNA sense sequence
  source 1..19: mol_type = other RNA
gctacagtaatactccttg

SEQ ID NO: 34899 - RNA, 19 nt, synthetic construct
  misc_feature 1..19: note = siRNA antisense sequence
  source 1..19: mol_type = other RNA
caaggagtattactgtagc

SEQ ID NO: 34900 - RNA, 19 nt, synthetic construct
  misc_feature 1..19: note = siRNA sense sequence
  source 1..19: mol_type = other RNA
ctacagtaatactccttgg

SEQ ID NO: 34901 - RNA, 19 nt, synthetic construct
  misc_feature 1..19: note = siRNA antisense sequence
  source 1..19: mol_type = other RNA
ccaaggagtattactgtag

SEQ ID NO: 34902 - RNA, 19 nt, synthetic construct
  misc_feature 1..19: note = siRNA sense sequence
  source 1..19: mol_type = other RNA
tacagtaatactccttgga

SEQ ID NO: 34903 - RNA, 19 nt, synthetic construct
  misc_feature 1..19: note = siRNA antisense sequence
  source 1..19: mol_type = other RNA
tccaaggagtattactgta

SEQ ID NO: 34904 - RNA, 19 nt, synthetic construct
  misc_feature 1..19: note = siRNA sense sequence
  source 1..19: mol_type = other RNA
acagtaatactccttggaa

SEQ ID NO: 34905 - RNA, 19 nt, synthetic construct
  misc_feature 1..19: note = siRNA antisense sequence
  source 1..19: mol_type = other RNA
ttccaaggagtattactgt

SEQ ID NO: 34906 - RNA, 19 nt, synthetic construct
  misc_feature 1..19: note = siRNA sense sequence
  source 1..19: mol_type = other RNA
ctctgtcacctccatttat

SEQ ID NO: 34907 - RNA, 19 nt, synthetic construct
  misc_feature 1..19: note = siRNA antisense sequence
  source 1..19: mol_type = other RNA
ataaatggaggtgacagag

SEQ ID NO: 34908 - RNA, 19 nt, synthetic construct
  misc_feature 1..19: note = siRNA sense sequence
  source 1..19: mol_type = other RNA
tctgtcacctccatttatc

SEQ ID NO: 34909 - RNA, 19 nt, synthetic construct
  misc_feature 1..19: note = siRNA antisense sequence
  source 1..19: mol_type = other RNA
gataaatggaggtgacaga

SEQ ID NO: 34910 - RNA, 19 nt, synthetic construct
  misc_feature 1..19: note = siRNA sense sequence
  source 1..19: mol_type = other RNA
ctgtcacctccatttatcc

SEQ ID NO: 34911 - RNA, 19 nt, synthetic construct
  misc_feature 1..19: note = siRNA antisense sequence
  source 1..19: mol_type = other RNA
ggataaatggaggtgacag

SEQ ID NO: 34912 - RNA, 19 nt, synthetic construct
  misc_feature 1..19: note = siRNA sense sequence
  source 1..19: mol_type = other RNA
tgtcacctccatttatcct

SEQ ID NO: 34913 - RNA, 19 nt, synthetic construct
  misc_feature 1..19: note = siRNA antisense sequence
  source 1..19: mol_type = other RNA
aggataaatggaggtgaca

SEQ ID NO: 34914 - RNA, 19 nt, synthetic construct
  misc_feature 1..19: note = siRNA sense sequence
  source 1..19: mol_type = other RNA
gtcacctccatttatcctt

SEQ ID NO: 34915 - RNA, 19 nt, synthetic construct
  misc_feature 1..19: note = siRNA antisense sequence
  source 1..19: mol_type = other RNA
aaggataaatggaggtgac

SEQ ID NO: 34916 - RNA, 19 nt, synthetic construct
  misc_feature 1..19: note = siRNA sense sequence
  source 1..19: mol_type = other RNA
tcacctccatttatccttt

SEQ ID NO: 34917 - RNA, 19 nt, synthetic construct
  misc_feature 1..19: note = siRNA antisense sequence
  source 1..19: mol_type = other RNA
aaaggataaatggaggtga

SEQ ID NO: 34918 - RNA, 19 nt, synthetic construct
  misc_feature 1..19: note = siRNA sense sequence
  source 1..19: mol_type = other RNA
cacctccatttatcctttt

SEQ ID NO: 34919 - RNA, 19 nt, synthetic construct
  misc_feature 1..19: note = siRNA antisense sequence
  source 1..19: mol_type = other RNA
aaaaggataaatggaggtg

SEQ ID NO: 34920 - RNA, 19 nt, synthetic construct
  misc_feature 1..19: note = siRNA sense sequence
  source 1..19: mol_type = other RNA
ctcaaatactccagagcta

SEQ ID NO: 34921 - RNA, 19 nt, synthetic construct
  misc_feature 1..19: note = siRNA antisense sequence
  source 1..19: mol_type = other RNA
tagctctggagtatttgag

SEQ ID NO: 34922 - RNA, 19 nt, synthetic construct
  misc_feature 1..19: note = siRNA sense sequence
  source 1..19: mol_type = other RNA
tcaaatactccagagctac

SEQ ID NO: 34923 - RNA, 19 nt, synthetic construct
  misc_feature 1..19: note = siRNA antisense sequence
  source 1..19: mol_type = other RNA
gtagctctggagtatttga

SEQ ID NO: 34924 - RNA, 19 nt, synthetic construct
  misc_feature 1..19: note = siRNA sense sequence
  source 1..19: mol_type = other RNA
caaatactccagagctaca

SEQ ID NO: 34925 - RNA, 19 nt, synthetic construct
  misc_feature 1..19: note = siRNA antisense sequence
  source 1..19: mol_type = other RNA
tgtagctctggagtatttg

SEQ ID NO: 34926 - RNA, 19 nt, synthetic construct
  misc_feature 1..19: note = siRNA sense sequence
  source 1..19: mol_type = other RNA
tgaggattgttgtgagctg

SEQ ID NO: 34927 - RNA, 19 nt, synthetic construct
  misc_feature 1..19: note = siRNA antisense sequence
  source 1..19: mol_type = other RNA
cagctcacaacaatcctca

SEQ ID NO: 34928 - RNA, 19 nt, synthetic construct
  misc_feature 1..19: note = siRNA sense sequence
  source 1..19: mol_type = other RNA
gaggattgttgtgagctgg

SEQ ID NO: 34929 - RNA, 19 nt, synthetic construct
  misc_feature 1..19: note = siRNA antisense sequence
  source 1..19: mol_type = other RNA
ccagctcacaacaatcctc

SEQ ID NO: 34930 - RNA, 19 nt, synthetic construct
  misc_feature 1..19: note = siRNA sense sequence
  source 1..19: mol_type = other RNA
aggattgttgtgagctggg

SEQ ID NO: 34931 - RNA, 19 nt, synthetic construct
  misc_feature 1..19: note = siRNA antisense sequence
  source 1..19: mol_type = other RNA
cccagctcacaacaatcct

SEQ ID NO: 34932 - RNA, 19 nt, synthetic construct
  misc_feature 1..19: note = siRNA sense sequence
  source 1..19: mol_type = other RNA
gattgttgtgagctgggtt

SEQ ID NO: 34933 - RNA, 19 nt, synthetic construct
  misc_feature 1..19: note = siRNA antisense sequence
  source 1..19: mol_type = other RNA
aacccagctcacaacaatc

SEQ ID NO: 34934 - RNA, 19 nt, synthetic construct
  misc_feature 1..19: note = siRNA sense sequence
  source 1..19: mol_type = other RNA
attgttgtgagctgggttg

SEQ ID NO: 34935 - RNA, 19 nt, synthetic construct
  misc_feature 1..19: note = siRNA antisense sequence
  source 1..19: mol_type = other RNA
caacccagctcacaacaat

SEQ ID NO: 34936 - RNA, 19 nt, synthetic construct
  misc_feature 1..19: note = siRNA sense sequence
  source 1..19: mol_type = other RNA
ttgttgtgagctgggttgt

SEQ ID NO: 34937 - RNA, 19 nt, synthetic construct
  misc_feature 1..19: note = siRNA antisense sequence
  source 1..19: mol_type = other RNA
acaacccagctcacaacaa

SEQ ID NO: 34938 - RNA, 19 nt, synthetic construct
  misc_feature 1..19: note = siRNA sense sequence
  source 1..19: mol_type = other RNA
tgttgtgagctgggttgtt

SEQ ID NO: 34939 - RNA, 19 nt, synthetic construct
  misc_feature 1..19: note = siRNA antisense sequence
  source 1..19: mol_type = other RNA
aacaacccagctcacaaca

SEQ ID NO: 34940 - RNA, 19 nt, synthetic construct
  misc_feature 1..19: note = siRNA sense sequence
  source 1..19: mol_type = other RNA
gttgtgagctgggttgtta

SEQ ID NO: 34941 - RNA, 19 nt, synthetic construct
  misc_feature 1..19: note = siRNA antisense sequence
  source 1..19: mol_type = other RNA
taacaacccagctcacaac

SEQ ID NO: 34942 - RNA, 19 nt, synthetic construct
  misc_feature 1..19: note = siRNA sense sequence
  source 1..19: mol_type = other RNA
ttgtgagctgggttgttat

SEQ ID NO: 34943 - RNA, 19 nt, synthetic construct
  misc_feature 1..19: note = siRNA antisense sequence
  source 1..19: mol_type = other RNA
ataacaacccagctcacaa

SEQ ID NO: 34944 - RNA, 19 nt, synthetic construct
  misc_feature 1..19: note = siRNA sense sequence
  source 1..19: mol_type = other RNA
tgtgagctgggttgttatt

SEQ ID NO: 34945 - RNA, 19 nt, synthetic construct
  misc_feature 1..19: note = siRNA antisense sequence
  source 1..19: mol_type = other RNA
aataacaacccagctcaca

SEQ ID NO: 34946 - RNA, 19 nt, synthetic construct
  misc_feature 1..19: note = siRNA sense sequence
  source 1..19: mol_type = other RNA
gtgagctgggttgttattt

SEQ ID NO: 34947 - RNA, 19 nt, synthetic construct
  misc_feature 1..19: note = siRNA antisense sequence
  source 1..19: mol_type = other RNA
aaataacaacccagctcac

SEQ ID NO: 34948 - RNA, 19 nt, synthetic construct
  misc_feature 1..19: note = siRNA sense sequence
  source 1..19: mol_type = other RNA
tgagctgggttgttatttt

SEQ ID NO: 34949 - RNA, 19 nt, synthetic construct
  misc_feature 1..19: note = siRNA antisense sequence
  source 1..19: mol_type = other RNA
aaaataacaacccagctca

SEQ ID NO: 34950 - RNA, 19 nt, synthetic construct
  misc_feature 1..19: note = siRNA sense sequence
  source 1..19: mol_type = other RNA
ccaactcaatagcacccta

SEQ ID NO: 34951 - RNA, 19 nt, synthetic construct
  misc_feature 1..19: note = siRNA antisense sequence
  source 1..19: mol_type = other RNA
tagggtgctattgagttgg

SEQ ID NO: 34952 - RNA, 19 nt, synthetic construct
  misc_feature 1..19: note = siRNA sense sequence
  source 1..19: mol_type = other RNA
caactcaatagcaccctag

SEQ ID NO: 34953 - RNA, 19 nt, synthetic construct
  misc_feature 1..19: note = siRNA antisense sequence
  source 1..19: mol_type = other RNA
ctagggtgctattgagttg

SEQ ID NO: 34954 - RNA, 19 nt, synthetic construct
  misc_feature 1..19: note = siRNA sense sequence
  source 1..19: mol_type = other RNA
aactcaatagcaccctagt

SEQ ID NO: 34955 - RNA, 19 nt, synthetic construct
  misc_feature 1..19: note = siRNA antisense sequence
  source 1..19: mol_type = other RNA
actagggtgctattgagtt

SEQ ID NO: 34956 - RNA, 19 nt, synthetic construct
  misc_feature 1..19: note = siRNA sense sequence
  source 1..19: mol_type = other RNA
caatagcaccctagttaca

SEQ ID NO: 34957 - RNA, 19 nt, synthetic construct
  misc_feature 1..19: note = siRNA antisense sequence
  source 1..19: mol_type = other RNA
tgtaactagggtgctattg

SEQ ID NO: 34958 - RNA, 19 nt, synthetic construct
  misc_feature 1..19: note = siRNA sense sequence
  source 1..19: mol_type = other RNA
atagcaccctagttacaga

SEQ ID NO: 34959 - RNA, 19 nt, synthetic construct
  misc_feature 1..19: note = siRNA antisense sequence
  source 1..19: mol_type = other RNA
tctgtaactagggtgctat

SEQ ID NO: 34960 - RNA, 19 nt, synthetic construct
  misc_feature 1..19: note = siRNA sense sequence
  source 1..19: mol_type = other RNA
atcctatgatttggcctca

SEQ ID NO: 34961 - RNA, 19 nt, synthetic construct
  misc_feature 1..19: note = siRNA antisense sequence
  source 1..19: mol_type = other RNA
tgaggccaaatcataggat

SEQ ID NO: 34962 - RNA, 19 nt, synthetic construct
  misc_feature 1..19: note = siRNA sense sequence
  source 1..19: mol_type = other RNA
tttggcctcataagatcaa

SEQ ID NO: 34963 - RNA, 19 nt, synthetic construct
  misc_feature 1..19: note = siRNA antisense sequence
  source 1..19: mol_type = other RNA
ttgatcttatgaggccaaa

SEQ ID NO: 34964 - RNA, 19 nt, synthetic construct
  misc_feature 1..19: note = siRNA sense sequence
  source 1..19: mol_type = other RNA
ttggcctcataagatcaat

SEQ ID NO: 34965 - RNA, 19 nt, synthetic construct
  misc_feature 1..19: note = siRNA antisense sequence
  source 1..19: mol_type = other RNA
attgatcttatgaggccaa

SEQ ID NO: 34966 - RNA, 19 nt, synthetic construct
  misc_feature 1..19: note = siRNA sense sequence
  source 1..19: mol_type = other RNA
tggcctcataagatcaatg

SEQ ID NO: 34967 - RNA, 19 nt, synthetic construct
  misc_feature 1..19: note = siRNA antisense sequence
  source 1..19: mol_type = other RNA
cattgatcttatgaggcca

SEQ ID NO: 34968 - RNA, 19 nt, synthetic construct
  misc_feature 1..19: note = siRNA sense sequence
  source 1..19: mol_type = other RNA
ggcctcataagatcaatgt

SEQ ID NO: 34969 - RNA, 19 nt, synthetic construct
  misc_feature 1..19: note = siRNA antisense sequence
  source 1..19: mol_type = other RNA
acattgatcttatgaggcc

SEQ ID NO: 34970 - RNA, 19 nt, synthetic construct
  misc_feature 1..19: note = siRNA sense sequence
  source 1..19: mol_type = other RNA
atcttgcttctgtcattaa

SEQ ID NO: 34971 - RNA, 19 nt, synthetic construct
  misc_feature 1..19: note = siRNA antisense sequence
  source 1..19: mol_type = other RNA
ttaatgacagaagcaagat

SEQ ID NO: 34972 - RNA, 19 nt, synthetic construct
  misc_feature 1..19: note = siRNA sense sequence
  source 1..19: mol_type = other RNA
tcttgcttctgtcattaat

SEQ ID NO: 34973 - RNA, 19 nt, synthetic construct
  misc_feature 1..19: note = siRNA antisense sequence
  source 1..19: mol_type = other RNA
attaatgacagaagcaaga

SEQ ID NO: 34974 - RNA, 19 nt, synthetic construct
  misc_feature 1..19: note = siRNA sense sequence
  source 1..19: mol_type = other RNA
cttgcttctgtcattaatg

SEQ ID NO: 34975 - RNA, 19 nt, synthetic construct
  misc_feature 1..19: note = siRNA antisense sequence
  source 1..19: mol_type = other RNA
cattaatgacagaagcaag

SEQ ID NO: 34976 - RNA, 19 nt, synthetic construct
  misc_feature 1..19: note = siRNA sense sequence
  source 1..19: mol_type = other RNA
ttgcttctgtcattaatgc

SEQ ID NO: 34977 - RNA, 19 nt, synthetic construct
  misc_feature 1..19: note = siRNA antisense sequence
  source 1..19: mol_type = other RNA
gcattaatgacagaagcaa

SEQ ID NO: 34978 - RNA, 19 nt, synthetic construct
  misc_feature 1..19: note = siRNA sense sequence
  source 1..19: mol_type = other RNA
tctgtcattaatgcaacct

SEQ ID NO: 34979 - RNA, 19 nt, synthetic construct
  misc_feature 1..19: note = siRNA antisense sequence
  source 1..19: mol_type = other RNA
aggttgcattaatgacaga

SEQ ID NO: 34980 - RNA, 19 nt, synthetic construct
  misc_feature 1..19: note = siRNA sense sequence
  source 1..19: mol_type = other RNA
ctgtcattaatgcaacctg

SEQ ID NO: 34981 - RNA, 19 nt, synthetic construct
  misc_feature 1..19: note = siRNA antisense sequence
  source 1..19: mol_type = other RNA
caggttgcattaatgacag

SEQ ID NO: 34982 - RNA, 19 nt, synthetic construct
  misc_feature 1..19: note = siRNA sense sequence
  source 1..19: mol_type = other RNA
tgtcattaatgcaacctgg

SEQ ID NO: 34983 - RNA, 19 nt, synthetic construct
  misc_feature 1..19: note = siRNA antisense sequence
  source 1..19: mol_type = other RNA
ccaggttgcattaatgaca

SEQ ID NO: 34984 - RNA, 19 nt, synthetic construct
  misc_feature 1..19: note = siRNA sense sequence
  source 1..19: mol_type = other RNA
gtcattaatgcaacctggc

SEQ ID NO: 34985 - RNA, 19 nt, synthetic construct
  misc_feature 1..19: note = siRNA antisense sequence
  source 1..19: mol_type = other RNA
gccaggttgcattaatgac

SEQ ID NO: 34986 - RNA, 19 nt, synthetic construct
  misc_feature 1..19: note = siRNA sense sequence
  source 1..19: mol_type = other RNA
tcattaatgcaacctggct

SEQ ID NO: 34987 - RNA, 19 nt, synthetic construct
  misc_feature 1..19: note = siRNA antisense sequence
  source 1..19: mol_type = other RNA
agccaggttgcattaatga

SEQ ID NO: 34988 - RNA, 19 nt, synthetic construct
  misc_feature 1..19: note = siRNA sense sequence
  source 1..19: mol_type = other RNA
cattaatgcaacctggctt

SEQ ID NO: 34989 - RNA, 19 nt, synthetic construct
  misc_feature 1..19: note = siRNA antisense sequence
  source 1..19: mol_type = other RNA
aagccaggttgcattaatg

SEQ ID NO: 34990 - RNA, 19 nt, synthetic construct
  misc_feature 1..19: note = siRNA sense sequence
  source 1..19: mol_type = other RNA
attaatgcaacctggcttt

SEQ ID NO: 34991 - RNA, 19 nt, synthetic construct
  misc_feature 1..19: note = siRNA antisense sequence
  source 1..19: mol_type = other RNA
aaagccaggttgcattaat

SEQ ID NO: 34992 - RNA, 19 nt, synthetic construct
  misc_feature 1..19: note = siRNA sense sequence
  source 1..19: mol_type = other RNA
ttaatgcaacctggctttt

SEQ ID NO: 34993 - RNA, 19 nt, synthetic construct
  misc_feature 1..19: note = siRNA antisense sequence
  source 1..19: mol_type = other RNA
aaaagccaggttgcattaa

SEQ ID NO: 34994 - RNA, 19 nt, synthetic construct
  misc_feature 1..19: note = siRNA sense sequence
  source 1..19: mol_type = other RNA
taatgcaacctggcttttg

SEQ ID NO: 34995 - RNA, 19 nt, synthetic construct
  misc_feature 1..19: note = siRNA antisense sequence
  source 1..19: mol_type = other RNA
caaaagccaggttgcatta

SEQ ID NO: 34996 - RNA, 19 nt, synthetic construct
  misc_feature 1..19: note = siRNA sense sequence
  source 1..19: mol_type = other RNA
aatgcaacctggcttttgg

SEQ ID NO: 34997 - RNA, 19 nt, synthetic construct
  misc_feature 1..19: note = siRNA antisense sequence
  source 1..19: mol_type = other RNA
ccaaaagccaggttgcatt

SEQ ID NO: 34998 - RNA, 19 nt, synthetic construct
  misc_feature 1..19: note = siRNA sense sequence
  source 1..19: mol_type = other RNA
atgcaacctggcttttggc

SEQ ID NO: 34999 - RNA, 19 nt, synthetic construct
  misc_feature 1..19: note = siRNA antisense sequence
  source 1..19: mol_type = other RNA
gccaaaagccaggttgcat

SEQ ID NO: 35000 - RNA, 19 nt, synthetic construct
  misc_feature 1..19: note = siRNA sense sequence
  source 1..19: mol_type = other RNA
tgcaacctggcttttggca

SEQ ID NO: 35001 - RNA, 19 nt, synthetic construct
  misc_feature 1..19: note = siRNA antisense sequence
  source 1..19: mol_type = other RNA
tgccaaaagccaggttgca

SEQ ID NO: 35002 - RNA, 19 nt, synthetic construct
  misc_feature 1..19: note = siRNA sense sequence
  source 1..19: mol_type = other RNA
gcaacctggcttttggcaa

SEQ ID NO: 35003 - RNA, 19 nt, synthetic construct
  misc_feature 1..19: note = siRNA antisense sequence
  source 1..19: mol_type = other RNA
ttgccaaaagccaggttgc

SEQ ID NO: 35004 - RNA, 19 nt, synthetic construct
  misc_feature 1..19: note = siRNA sense sequence
  source 1..19: mol_type = other RNA
caacctggcttttggcaaa

SEQ ID NO: 35005 - RNA, 19 nt, synthetic construct
  misc_feature 1..19: note = siRNA antisense sequence
  source 1..19: mol_type = other RNA
tttgccaaaagccaggttg

SEQ ID NO: 35006 - RNA, 19 nt, synthetic construct
  misc_feature 1..19: note = siRNA sense sequence
  source 1..19: mol_type = other RNA
aacctggcttttggcaaat

SEQ ID NO: 35007 - RNA, 19 nt, synthetic construct
  misc_feature 1..19: note = siRNA antisense sequence
  source 1..19: mol_type = other RNA
atttgccaaaagccaggtt

SEQ ID NO: 35008 - RNA, 19 nt, synthetic construct
  misc_feature 1..19: note = siRNA sense sequence
  source 1..19: mol_type = other RNA
acctggcttttggcaaatc

SEQ ID NO: 35009 - RNA, 19 nt, synthetic construct
  misc_feature 1..19: note = siRNA antisense sequence
  source 1..19: mol_type = other RNA
gatttgccaaaagccaggt

SEQ ID NO: 35010 - RNA, 19 nt, synthetic construct
  misc_feature 1..19: note = siRNA sense sequence
  source 1..19: mol_type = other RNA
cctggcttttggcaaatca

SEQ ID NO: 35011 - RNA, 19 nt, synthetic construct
  misc_feature 1..19: note = siRNA antisense sequence
  source 1..19: mol_type = other RNA
tgatttgccaaaagccagg

SEQ ID NO: 35012 - RNA, 19 nt, synthetic construct
  misc_feature 1..19: note = siRNA sense sequence
  source 1..19: mol_type = other RNA
ctggcttttggcaaatcac

SEQ ID NO: 35013 - RNA, 19 nt, synthetic construct
  misc_feature 1..19: note = siRNA antisense sequence
  source 1..19: mol_type = other RNA
gtgatttgccaaaagccag

SEQ ID NO: 35014 - RNA, 19 nt, synthetic construct
  misc_feature 1..19: note = siRNA sense sequence
  source 1..19: mol_type = other RNA
tggcttttggcaaatcact

SEQ ID NO: 35015 - RNA, 19 nt, synthetic construct
  misc_feature 1..19: note = siRNA antisense sequence
  source 1..19: mol_type = other RNA
agtgatttgccaaaagcca

SEQ ID NO: 35016 - RNA, 19 nt, synthetic construct
  misc_feature 1..19: note = siRNA sense sequence
  source 1..19: mol_type = other RNA
ggcttttggcaaatcactc

SEQ ID NO: 35017 - RNA, 19 nt, synthetic construct
  misc_feature 1..19: note = siRNA antisense sequence
  source 1..19: mol_type = other RNA
gagtgatttgccaaaagcc

SEQ ID NO: 35018 - RNA, 19 nt, synthetic construct
  misc_feature 1..19: note = siRNA sense sequence
  source 1..19: mol_type = other RNA
gagcttcagtttcttaata

SEQ ID NO: 35019 - RNA, 19 nt, synthetic construct
  misc_feature 1..19: note = siRNA antisense sequence
  source 1..19: mol_type = other RNA
tattaagaaactgaagctc

SEQ ID NO: 35020 - RNA, 19 nt, synthetic construct
  misc_feature 1..19: note = siRNA sense sequence
  source 1..19: mol_type = other RNA
agcttcagtttcttaatac

SEQ ID NO: 35021 - RNA, 19 nt, synthetic construct
  misc_feature 1..19: note = siRNA antisense sequence
  source 1..19: mol_type = other RNA
gtattaagaaactgaagct

SEQ ID NO: 35022 - RNA, 19 nt, synthetic construct
  misc_feature 1..19: note = siRNA sense sequence
  source 1..19: mol_type = other RNA
gcttcagtttcttaataca

SEQ ID NO: 35023 - RNA, 19 nt, synthetic construct
  misc_feature 1..19: note = siRNA antisense sequence
  source 1..19: mol_type = other RNA
tgtattaagaaactgaagc

SEQ ID NO: 35024 - RNA, 19 nt, synthetic construct
  misc_feature 1..19: note = siRNA sense sequence
  source 1..19: mol_type = other RNA
gggaatgtctgctgtcctg

SEQ ID NO: 35025 - RNA, 19 nt, synthetic construct
  misc_feature 1..19: note = siRNA antisense sequence
  source 1..19: mol_type = other RNA
caggacagcagacattccc

SEQ ID NO: 35026 - RNA, 19 nt, synthetic construct
  misc_feature 1..19: note = siRNA sense sequence
  source 1..19: mol_type = other RNA
ggaatgtctgctgtcctgc

SEQ ID NO: 35027 - RNA, 19 nt, synthetic construct
  misc_feature 1..19: note = siRNA antisense sequence
  source 1..19: mol_type = other RNA
gcaggacagcagacattcc

SEQ ID NO: 35028 - RNA, 19 nt, synthetic construct
  misc_feature 1..19: note = siRNA sense sequence
  source 1..19: mol_type = other RNA
gaatgtctgctgtcctgcc

SEQ ID NO: 35029 - RNA, 19 nt, synthetic construct
  misc_feature 1..19: note = siRNA antisense sequence
  source 1..19: mol_type = other RNA
ggcaggacagcagacattc

SEQ ID NO: 35030 - RNA, 19 nt, synthetic construct
  misc_feature 1..19: note = siRNA sense sequence
  source 1..19: mol_type = other RNA
aatgtctgctgtcctgcct

SEQ ID NO: 35031 - RNA, 19 nt, synthetic construct
  misc_feature 1..19: note = siRNA antisense sequence
  source 1..19: mol_type = other RNA
aggcaggacagcagacatt

SEQ ID NO: 35032 - RNA, 19 nt, synthetic construct
  misc_feature 1..19: note = siRNA sense sequence
  source 1..19: mol_type = other RNA
tctgctgtcctgcctcacc

SEQ ID NO: 35033 - RNA, 19 nt, synthetic construct
  misc_feature 1..19: note = siRNA antisense sequence
  source 1..19: mol_type = other RNA
ggtgaggcaggacagcaga

SEQ ID NO: 35034 - RNA, 19 nt, synthetic construct
  misc_feature 1..19: note = siRNA sense sequence
  source 1..19: mol_type = other RNA
ctgctgtcctgcctcacct

SEQ ID NO: 35035 - RNA, 19 nt, synthetic construct
  misc_feature 1..19: note = siRNA antisense sequence
  source 1..19: mol_type = other RNA
aggtgaggcaggacagcag

SEQ ID NO: 35036 - RNA, 19 nt, synthetic construct
  misc_feature 1..19: note = siRNA sense sequence
  source 1..19: mol_type = other RNA
ctgcctcacctcctcaaat

SEQ ID NO: 35037 - RNA, 19 nt, synthetic construct
  misc_feature 1..19: note = siRNA antisense sequence
  source 1..19: mol_type = other RNA
atttgaggaggtgaggcag

SEQ ID NO: 35038 - RNA, 19 nt, synthetic construct
  misc_feature 1..19: note = siRNA sense sequence
  source 1..19: mol_type = other RNA
gcctcacctcctcaaatta

SEQ ID NO: 35039 - RNA, 19 nt, synthetic construct
  misc_feature 1..19: note = siRNA antisense sequence
  source 1..19: mol_type = other RNA
taatttgaggaggtgaggc

SEQ ID NO: 35040 - RNA, 19 nt, synthetic construct
  misc_feature 1..19: note = siRNA sense sequence
  source 1..19: mol_type = other RNA
ctcacctcctcaaattatt

SEQ ID NO: 35041 - RNA, 19 nt, synthetic construct
  misc_feature 1..19: note = siRNA antisense sequence
  source 1..19: mol_type = other RNA
aataatttgaggaggtgag

SEQ ID NO: 35042 - RNA, 19 nt, synthetic construct
  misc_feature 1..19: note = siRNA sense sequence
  source 1..19: mol_type = other RNA
tcacctcctcaaattattg

SEQ ID NO: 35043 - RNA, 19 nt, synthetic construct
  misc_feature 1..19: note = siRNA antisense sequence
  source 1..19: mol_type = other RNA
caataatttgaggaggtga

SEQ ID NO: 35044 - RNA, 19 nt, synthetic construct
  misc_feature 1..19: note = siRNA sense sequence
  source 1..19: mol_type = other RNA
cactgcagagctgtaggtt

SEQ ID NO: 35045 - RNA, 19 nt, synthetic construct
  misc_feature 1..19: note = siRNA antisense sequence
  source 1..19: mol_type = other RNA
aacctacagctctgcagtg

SEQ ID NO: 35046 - RNA, 19 nt, synthetic construct
  misc_feature 1..19: note = siRNA sense sequence
  source 1..19: mol_type = other RNA
actgcagagctgtaggttg

SEQ ID NO: 35047 - RNA, 19 nt, synthetic construct
  misc_feature 1..19: note = siRNA antisense sequence
  source 1..19: mol_type = other RNA
caacctacagctctgcagt

SEQ ID NO: 35048 - RNA, 19 nt, synthetic construct
  misc_feature 1..19: note = siRNA sense sequence
  source 1..19: mol_type = other RNA
ctgcagagctgtaggttgc

SEQ ID NO: 35049 - RNA, 19 nt, synthetic construct
  misc_feature 1..19: note = siRNA antisense sequence
  source 1..19: mol_type = other RNA
gcaacctacagctctgcag

SEQ ID NO: 35050 - RNA, 19 nt, synthetic construct
  misc_feature 1..19: note = siRNA sense sequence
  source 1..19: mol_type = other RNA
tgcagagctgtaggttgct

SEQ ID NO: 35051 - RNA, 19 nt, synthetic construct
  misc_feature 1..19: note = siRNA antisense sequence
  source 1..19: mol_type = other RNA
agcaacctacagctctgca

SEQ ID NO: 35052 - RNA, 19 nt, synthetic construct
  misc_feature 1..19: note = siRNA sense sequence
  source 1..19: mol_type = other RNA
gcagagctgtaggttgctt

SEQ ID NO: 35053 - RNA, 19 nt, synthetic construct
  misc_feature 1..19: note = siRNA antisense sequence
  source 1..19: mol_type = other RNA
aagcaacctacagctctgc

SEQ ID NO: 35054 - RNA, 19 nt, synthetic construct
  misc_feature 1..19: note = siRNA sense sequence
  source 1..19: mol_type = other RNA
cagagctgtaggttgcttc

SEQ ID NO: 35055 - RNA, 19 nt, synthetic construct
  misc_feature 1..19: note = siRNA antisense sequence
  source 1..19: mol_type = other RNA
gaagcaacctacagctctg

SEQ ID NO: 35056 - RNA, 19 nt, synthetic construct
  misc_feature 1..19: note = siRNA sense sequence
  source 1..19: mol_type = other RNA
gagctgtaggttgcttctc

SEQ ID NO: 35057 - RNA, 19 nt, synthetic construct
  misc_feature 1..19: note = siRNA antisense sequence
  source 1..19: mol_type = other RNA
gagaagcaacctacagctc

SEQ ID NO: 35058 - RNA, 19 nt, synthetic construct
  misc_feature 1..19: note = siRNA sense sequence
  source 1..19: mol_type = other RNA
agctgtaggttgcttctcc

SEQ ID NO: 35059 - RNA, 19 nt, synthetic construct
  misc_feature 1..19: note = siRNA antisense sequence
  source 1..19: mol_type = other RNA
ggagaagcaacctacagct

SEQ ID NO: 35060 - RNA, 19 nt, synthetic construct
  misc_feature 1..19: note = siRNA sense sequence
  source 1..19: mol_type = other RNA
gctgtaggttgcttctccc

SEQ ID NO: 35061 - RNA, 19 nt, synthetic construct
  misc_feature 1..19: note = siRNA antisense sequence
  source 1..19: mol_type = other RNA
gggagaagcaacctacagc

SEQ ID NO: 35062 - RNA, 19 nt, synthetic construct
  misc_feature 1..19: note = siRNA sense sequence
  source 1..19: mol_type = other RNA
ctgtaggttgcttctccct

SEQ ID NO: 35063 - RNA, 19 nt, synthetic construct
  misc_feature 1..19: note = siRNA antisense sequence
  source 1..19: mol_type = other RNA
agggagaagcaacctacag

SEQ ID NO: 35064 - RNA, 19 nt, synthetic construct
  misc_feature 1..19: note = siRNA sense sequence
  source 1..19: mol_type = other RNA
tgtaggttgcttctccctc

SEQ ID NO: 35065 - RNA, 19 nt, synthetic construct
  misc_feature 1..19: note = siRNA antisense sequence
  source 1..19: mol_type = other RNA
gagggagaagcaacctaca

SEQ ID NO: 35066 - RNA, 19 nt, synthetic construct
  misc_feature 1..19: note = siRNA sense sequence
  source 1..19: mol_type = other RNA
gtaggttgcttctccctct

SEQ ID NO: 35067 - RNA, 19 nt, synthetic construct
  misc_feature 1..19: note = siRNA antisense sequence
  source 1..19: mol_type = other RNA
agagggagaagcaacctac

SEQ ID NO: 35068 - RNA, 19 nt, synthetic construct
  misc_feature 1..19: note = siRNA sense sequence
  source 1..19: mol_type = other RNA
taggttgcttctccctctt

SEQ ID NO: 35069 - RNA, 19 nt, synthetic construct
  misc_feature 1..19: note = siRNA antisense sequence
  source 1..19: mol_type = other RNA
aagagggagaagcaaccta

SEQ ID NO: 35070 - RNA, 19 nt, synthetic construct
  misc_feature 1..19: note = siRNA sense sequence
  source 1..19: mol_type = other RNA
aggttgcttctccctcttt

SEQ ID NO: 35071 - RNA, 19 nt, synthetic construct
  misc_feature 1..19: note = siRNA antisense sequence
  source 1..19: mol_type = other RNA
aaagagggagaagcaacct

SEQ ID NO: 35072 - RNA, 19 nt, synthetic construct
  misc_feature 1..19: note = siRNA sense sequence
  source 1..19: mol_type = other RNA
ggttgcttctccctctttc

SEQ ID NO: 35073 - RNA, 19 nt, synthetic construct
  misc_feature 1..19: note = siRNA antisense sequence
  source 1..19: mol_type = other RNA
gaaagagggagaagcaacc

SEQ ID NO: 35074 - RNA, 19 nt, synthetic construct
  misc_feature 1..19: note = siRNA sense sequence
  source 1..19: mol_type = other RNA
ctccctctttctcacttag

SEQ ID NO: 35075 - RNA, 19 nt, synthetic construct
  misc_feature 1..19: note = siRNA antisense sequence
  source 1..19: mol_type = other RNA
ctaagtgagaaagagggag

SEQ ID NO: 35076 - RNA, 19 nt, synthetic construct
  misc_feature 1..19: note = siRNA sense sequence
  source 1..19: mol_type = other RNA
tccctctttctcacttagt

SEQ ID NO: 35077 - RNA, 19 nt, synthetic construct
  misc_feature 1..19: note = siRNA antisense sequence
  source 1..19: mol_type = other RNA
actaagtgagaaagaggga

SEQ ID NO: 35078 - RNA, 19 nt, synthetic construct
  misc_feature 1..19: note = siRNA sense sequence
  source 1..19: mol_type = other RNA
ccctctttctcacttagtt

SEQ ID NO: 35079 - RNA, 19 nt, synthetic construct
  misc_feature 1..19: note = siRNA antisense sequence
  source 1..19: mol_type = other RNA
aactaagtgagaaagaggg

SEQ ID NO: 35080 - RNA, 19 nt, synthetic construct
  misc_feature 1..19: note = siRNA sense sequence
  source 1..19: mol_type = other RNA
cctctttctcacttagttt

SEQ ID NO: 35081 - RNA, 19 nt, synthetic construct
  misc_feature 1..19: note = siRNA antisense sequence
  source 1..19: mol_type = other RNA
aaactaagtgagaaagagg

SEQ ID NO: 35082 - RNA, 19 nt, synthetic construct
  misc_feature 1..19: note = siRNA sense sequence
  source 1..19: mol_type = other RNA
ctctttctcacttagtttt

SEQ ID NO: 35083 - RNA, 19 nt, synthetic construct
  misc_feature 1..19: note = siRNA antisense sequence
  source 1..19: mol_type = other RNA
aaaactaagtgagaaagag

SEQ ID NO: 35084 - RNA, 19 nt, synthetic construct
  misc_feature 1..19: note = siRNA sense sequence
  source 1..19: mol_type = other RNA
ctttctcacttagttttct

SEQ ID NO: 35085 - RNA, 19 nt, synthetic construct
  misc_feature 1..19: note = siRNA antisense sequence
  source 1..19: mol_type = other RNA
agaaaactaagtgagaaag

SEQ ID NO: 35086 - RNA, 19 nt, synthetic construct
  misc_feature 1..19: note = siRNA sense sequence
  source 1..19: mol_type = other RNA
tctcacttagttttcttac

SEQ ID NO: 35087 - RNA, 19 nt, synthetic construct
  misc_feature 1..19: note = siRNA antisense sequence
  source 1..19: mol_type = other RNA
gtaagaaaactaagtgaga

SEQ ID NO: 35088 - RNA, 19 nt, synthetic construct
  misc_feature 1..19: note = siRNA sense sequence
  source 1..19: mol_type = other RNA
ctcacttagttttcttaca

SEQ ID NO: 35089 - RNA, 19 nt, synthetic construct
  misc_feature 1..19: note = siRNA antisense sequence
  source 1..19: mol_type = other RNA
tgtaagaaaactaagtgag

SEQ ID NO: 35090 - RNA, 19 nt, synthetic construct
  misc_feature 1..19: note = siRNA sense sequence
  source 1..19: mol_type = other RNA
tacatatcaaattccatcc

SEQ ID NO: 35091 - RNA, 19 nt, synthetic construct
  misc_feature 1..19: note = siRNA antisense sequence
  source 1..19: mol_type = other RNA
ggatggaatttgatatgta

SEQ ID NO: 35092 - RNA, 19 nt, synthetic construct
  misc_feature 1..19: note = siRNA sense sequence
  source 1..19: mol_type = other RNA
acatatcaaattccatcct

SEQ ID NO: 35093 - RNA, 19 nt, synthetic construct
  misc_feature 1..19: note = siRNA antisense sequence
  source 1..19: mol_type = other RNA
aggatggaatttgatatgt

SEQ ID NO: 35094 - RNA, 19 nt, synthetic construct
  misc_feature 1..19: note = siRNA sense sequence
  source 1..19: mol_type = other RNA
catatcaaattccatcctg

SEQ ID NO: 35095 - RNA, 19 nt, synthetic construct
  misc_feature 1..19: note = siRNA antisense sequence
  source 1..19: mol_type = other RNA
caggatggaatttgatatg

SEQ ID NO: 35096 - RNA, 19 nt, synthetic construct
  misc_feature 1..19: note = siRNA sense sequence
  source 1..19: mol_type = other RNA
gggtaaagtaattgctcac

SEQ ID NO: 35097 - RNA, 19 nt, synthetic construct
  misc_feature 1..19: note = siRNA antisense sequence
  source 1..19: mol_type = other RNA
gtgagcaattactttaccc

SEQ ID NO: 35098 - RNA, 19 nt, synthetic construct
  misc_feature 1..19: note = siRNA sense sequence
  source 1..19: mol_type = other RNA
acaccagcaatttcatctt

SEQ ID NO: 35099 - RNA, 19 nt, synthetic construct
  misc_feature 1..19: note = siRNA antisense sequence
  source 1..19: mol_type = other RNA
aagatgaaattgctggtgt

SEQ ID NO: 35100 - RNA, 19 nt, synthetic construct
  misc_feature 1..19: note = siRNA sense sequence
  source 1..19: mol_type = other RNA
caccagcaatttcatcttt

SEQ ID NO: 35101 - RNA, 19 nt, synthetic construct
  misc_feature 1..19: note = siRNA antisense sequence
  source 1..19: mol_type = other RNA
aaagatgaaattgctggtg

SEQ ID NO: 35102 - RNA, 19 nt, synthetic construct
  misc_feature 1..19: note = siRNA sense sequence
  source 1..19: mol_type = other RNA
taactcttgcatatatagc

SEQ ID NO: 35103 - RNA, 19 nt, synthetic construct
  misc_feature 1..19: note = siRNA antisense sequence
  source 1..19: mol_type = other RNA
gctatatatgcaagagtta

SEQ ID NO: 35104 - RNA, 19 nt, synthetic construct
  misc_feature 1..19: note = siRNA sense sequence
  source 1..19: mol_type = other RNA
aactcttgcatatatagca

SEQ ID NO: 35105 - RNA, 19 nt, synthetic construct
  misc_feature 1..19: note = siRNA antisense sequence
  source 1..19: mol_type = other RNA
tgctatatatgcaagagtt

SEQ ID NO: 35106 - RNA, 19 nt, synthetic construct
  misc_feature 1..19: note = siRNA sense sequence
  source 1..19: mol_type = other RNA
actcttgcatatatagcat

SEQ ID NO: 35107 - RNA, 19 nt, synthetic construct
  misc_feature 1..19: note = siRNA antisense sequence
  source 1..19: mol_type = other RNA
atgctatatatgcaagagt

SEQ ID NO: 35108 - RNA, 19 nt, synthetic construct
  misc_feature 1..19: note = siRNA sense sequence
  source 1..19: mol_type = other RNA
gcaagtcttttcatttctt

SEQ ID NO: 35109 - RNA, 19 nt, synthetic construct
  misc_feature 1..19: note = siRNA antisense sequence
  source 1..19: mol_type = other RNA
aagaaatgaaaagacttgc

SEQ ID NO: 35110 - RNA, 19 nt, synthetic construct
  misc_feature 1..19: note = siRNA sense sequence
  source 1..19: mol_type = other RNA
catttcttttctacttgga

SEQ ID NO: 35111 - RNA, 19 nt, synthetic construct
  misc_feature 1..19: note = siRNA antisense sequence
  source 1..19: mol_type = other RNA
tccaagtagaaaagaaatg

SEQ ID NO: 35112 - RNA, 19 nt, synthetic construct
  misc_feature 1..19: note = siRNA sense sequence
  source 1..19: mol_type = other RNA
atttcttttctacttggac

SEQ ID NO: 35113 - RNA, 19 nt, synthetic construct
  misc_feature 1..19: note = siRNA antisense sequence
  source 1..19: mol_type = other RNA
gtccaagtagaaaagaaat

SEQ ID NO: 35114 - RNA, 19 nt, synthetic construct
  misc_feature 1..19: note = siRNA sense sequence
  source 1..19: mol_type = other RNA
tttcttttctacttggacc

SEQ ID NO: 35115 - RNA, 19 nt, synthetic construct
  misc_feature 1..19: note = siRNA antisense sequence
  source 1..19: mol_type = other RNA
ggtccaagtagaaaagaaa

SEQ ID NO: 35116 - RNA, 19 nt, synthetic construct
  misc_feature 1..19: note = siRNA sense sequence
  source 1..19: mol_type = other RNA
ttcttttctacttggacct

SEQ ID NO: 35117 - RNA, 19 nt, synthetic construct
  misc_feature 1..19: note = siRNA antisense sequence
  source 1..19: mol_type = other RNA
aggtccaagtagaaaagaa

SEQ ID NO: 35118 - RNA, 19 nt, synthetic construct
  misc_feature 1..19: note = siRNA sense sequence
  source 1..19: mol_type = other RNA
tcttttctacttggaccta

SEQ ID NO: 35119 - RNA, 19 nt, synthetic construct
  misc_feature 1..19: note = siRNA antisense sequence
  source 1..19: mol_type = other RNA
taggtccaagtagaaaaga

SEQ ID NO: 35120 - RNA, 19 nt, synthetic construct
  misc_feature 1..19: note = siRNA sense sequence
  source 1..19: mol_type = other RNA
cttttctacttggacctat

SEQ ID NO: 35121 - RNA, 19 nt, synthetic construct
  misc_feature 1..19: note = siRNA antisense sequence
  source 1..19: mol_type = other RNA
ataggtccaagtagaaaag

SEQ ID NO: 35122 - RNA, 19 nt, synthetic construct
  misc_feature 1..19: note = siRNA sense sequence
  source 1..19: mol_type = other RNA
ttttctacttggacctata

SEQ ID NO: 35123 - RNA, 19 nt, synthetic construct
  misc_feature 1..19: note = siRNA antisense sequence
  source 1..19: mol_type = other RNA
tataggtccaagtagaaaa

SEQ ID NO: 35124 - RNA, 19 nt, synthetic construct
  misc_feature 1..19: note = siRNA sense sequence
  source 1..19: mol_type = other RNA
tttctacttggacctataa

SEQ ID NO: 35125 - RNA, 19 nt, synthetic construct
  misc_feature 1..19: note = siRNA antisense sequence
  source 1..19: mol_type = other RNA
ttataggtccaagtagaaa

SEQ ID NO: 35126 - RNA, 19 nt, synthetic construct
  misc_feature 1..19: note = siRNA sense sequence
  source 1..19: mol_type = other RNA
ttctacttggacctataag

SEQ ID NO: 35127 - RNA, 19 nt, synthetic construct
  misc_feature 1..19: note = siRNA antisense sequence
  source 1..19: mol_type = other RNA
cttataggtccaagtagaa

SEQ ID NO: 35128 - RNA, 19 nt, synthetic construct
  misc_feature 1..19: note = siRNA sense sequence
  source 1..19: mol_type = other RNA
cttggacctataagttcta

SEQ ID NO: 35129 - RNA, 19 nt, synthetic construct
  misc_feature 1..19: note = siRNA antisense sequence
  source 1..19: mol_type = other RNA
tagaacttataggtccaag

SEQ ID NO: 35130 - RNA, 19 nt, synthetic construct
  misc_feature 1..19: note = siRNA sense sequence
  source 1..19: mol_type = other RNA
ttggacctataagttctag

SEQ ID NO: 35131 - RNA, 19 nt, synthetic construct
  misc_feature 1..19: note = siRNA antisense sequence
  source 1..19: mol_type = other RNA
ctagaacttataggtccaa

SEQ ID NO: 35132 - RNA, 19 nt, synthetic construct
  misc_feature 1..19: note = siRNA sense sequence
  source 1..19: mol_type = other RNA
tggacctataagttctagc

SEQ ID NO: 35133 - RNA, 19 nt, synthetic construct
  misc_feature 1..19: note = siRNA antisense sequence
  source 1..19: mol_type = other RNA
gctagaacttataggtcca

SEQ ID NO: 35134 - RNA, 19 nt, synthetic construct
  misc_feature 1..19: note = siRNA sense sequence
  source 1..19: mol_type = other RNA
ggacctataagttctagct

SEQ ID NO: 35135 - RNA, 19 nt, synthetic construct
  misc_feature 1..19: note = siRNA antisense sequence
  source 1..19: mol_type = other RNA
agctagaacttataggtcc

SEQ ID NO: 35136 - RNA, 19 nt, synthetic construct
  misc_feature 1..19: note = siRNA sense sequence
  source 1..19: mol_type = other RNA
gacctataagttctagctg

SEQ ID NO: 35137 - RNA, 19 nt, synthetic construct
  misc_feature 1..19: note = siRNA antisense sequence
  source 1..19: mol_type = other RNA
cagctagaacttataggtc

SEQ ID NO: 35138 - RNA, 19 nt, synthetic construct
  misc_feature 1..19: note = siRNA sense sequence
  source 1..19: mol_type = other RNA
acctataagttctagctga

SEQ ID NO: 35139 - RNA, 19 nt, synthetic construct
  misc_feature 1..19: note = siRNA antisense sequence
  source 1..19: mol_type = other RNA
tcagctagaacttataggt

SEQ ID NO: 35140 - RNA, 19 nt, synthetic construct
  misc_feature 1..19: note = siRNA sense sequence
  source 1..19: mol_type = other RNA
cctataagttctagctgaa

SEQ ID NO: 35141 - RNA, 19 nt, synthetic construct
  misc_feature 1..19: note = siRNA antisense sequence
  source 1..19: mol_type = other RNA
ttcagctagaacttatagg

SEQ ID NO: 35142 - RNA, 19 nt, synthetic construct
  misc_feature 1..19: note = siRNA sense sequence
  source 1..19: mol_type = other RNA
ctataagttctagctgaag

SEQ ID NO: 35143 - RNA, 19 nt, synthetic construct
  misc_feature 1..19: note = siRNA antisense sequence
  source 1..19: mol_type = other RNA
cttcagctagaacttatag

SEQ ID NO: 35144 - RNA, 19 nt, synthetic construct
  misc_feature 1..19: note = siRNA sense sequence
  source 1..19: mol_type = other RNA
tataagttctagctgaagt

SEQ ID NO: 35145 - RNA, 19 nt, synthetic construct
  misc_feature 1..19: note = siRNA antisense sequence
  source 1..19: mol_type = other RNA
acttcagctagaacttata

SEQ ID NO: 35146 - RNA, 19 nt, synthetic construct
  misc_feature 1..19: note = siRNA sense sequence
  source 1..19: mol_type = other RNA
taagttctagctgaagtcc

SEQ ID NO: 35147 - RNA, 19 nt, synthetic construct
  misc_feature 1..19: note = siRNA antisense sequence
  source 1..19: mol_type = other RNA
ggacttcagctagaactta

SEQ ID NO: 35148 - RNA, 19 nt, synthetic construct
  misc_feature 1..19: note = siRNA sense sequence
  source 1..19: mol_type = other RNA
aagttctagctgaagtcct

SEQ ID NO: 35149 - RNA, 19 nt, synthetic construct
  misc_feature 1..19: note = siRNA antisense sequence
  source 1..19: mol_type = other RNA
aggacttcagctagaactt

SEQ ID NO: 35150 - RNA, 19 nt, synthetic construct
  misc_feature 1..19: note = siRNA sense sequence
  source 1..19: mol_type = other RNA
gttctagctgaagtccttc

SEQ ID NO: 35151 - RNA, 19 nt, synthetic construct
  misc_feature 1..19: note = siRNA antisense sequence
  source 1..19: mol_type = other RNA
gaaggacttcagctagaac

SEQ ID NO: 35152 - RNA, 19 nt, synthetic construct
  misc_feature 1..19: note = siRNA sense sequence
  source 1..19: mol_type = other RNA
agtccttcaagaagttaga

SEQ ID NO: 35153 - RNA, 19 nt, synthetic construct
  misc_feature 1..19: note = siRNA antisense sequence
  source 1..19: mol_type = other RNA
tctaacttcttgaaggact

SEQ ID NO: 35154 - RNA, 19 nt, synthetic construct
  misc_feature 1..19: note = siRNA sense sequence
  source 1..19: mol_type = other RNA
gtccttcaagaagttagat

SEQ ID NO: 35155 - RNA, 19 nt, synthetic construct
  misc_feature 1..19: note = siRNA antisense sequence
  source 1..19: mol_type = other RNA
atctaacttcttgaaggac

SEQ ID NO: 35156 - RNA, 19 nt, synthetic construct
  misc_feature 1..19: note = siRNA sense sequence
  source 1..19: mol_type = other RNA
aagaagttagatctggagc

SEQ ID NO: 35157 - RNA, 19 nt, synthetic construct
  misc_feature 1..19: note = siRNA antisense sequence
  source 1..19: mol_type = other RNA
gctccagatctaacttctt

SEQ ID NO: 35158 - RNA, 19 nt, synthetic construct
  misc_feature 1..19: note = siRNA sense sequence
  source 1..19: mol_type = other RNA
gaagttagatctggagctc

SEQ ID NO: 35159 - RNA, 19 nt, synthetic construct
  misc_feature 1..19: note = siRNA antisense sequence
  source 1..19: mol_type = other RNA
gagctccagatctaacttc

SEQ ID NO: 35160 - RNA, 19 nt, synthetic construct
  misc_feature 1..19: note = siRNA sense sequence
  source 1..19: mol_type = other RNA
aagttagatctggagctct

SEQ ID NO: 35161 - RNA, 19 nt, synthetic construct
  misc_feature 1..19: note = siRNA antisense sequence
  source 1..19: mol_type = other RNA
agagctccagatctaactt

SEQ ID NO: 35162 - RNA, 19 nt, synthetic construct
  misc_feature 1..19: note = siRNA sense sequence
  source 1..19: mol_type = other RNA
ggacttttctccttactca

SEQ ID NO: 35163 - RNA, 19 nt, synthetic construct
  misc_feature 1..19: note = siRNA antisense sequence
  source 1..19: mol_type = other RNA
tgagtaaggagaaaagtcc

SEQ ID NO: 35164 - RNA, 19 nt, synthetic construct
  misc_feature 1..19: note = siRNA sense sequence
  source 1..19: mol_type = other RNA
ttttctccttactcagact

SEQ ID NO: 35165 - RNA, 19 nt, synthetic construct
  misc_feature 1..19: note = siRNA antisense sequence
  source 1..19: mol_type = other RNA
agtctgagtaaggagaaaa

SEQ ID NO: 35166 - RNA, 19 nt, synthetic construct
  misc_feature 1..19: note = siRNA sense sequence
  source 1..19: mol_type = other RNA
tttctccttactcagactt

SEQ ID NO: 35167 - RNA, 19 nt, synthetic construct
  misc_feature 1..19: note = siRNA antisense sequence
  source 1..19: mol_type = other RNA
aagtctgagtaaggagaaa

SEQ ID NO: 35168 - RNA, 19 nt, synthetic construct
  misc_feature 1..19: note = siRNA sense sequence
  source 1..19: mol_type = other RNA
ttctccttactcagacttt

SEQ ID NO: 35169 - RNA, 19 nt, synthetic construct
  misc_feature 1..19: note = siRNA antisense sequence
  source 1..19: mol_type = other RNA
aaagtctgagtaaggagaa

SEQ ID NO: 35170 - RNA, 19 nt, synthetic construct
  misc_feature 1..19: note = siRNA sense sequence
  source 1..19: mol_type = other RNA
tctccttactcagactttc

SEQ ID NO: 35171 - RNA, 19 nt, synthetic construct
  misc_feature 1..19: note = siRNA antisense sequence
  source 1..19: mol_type = other RNA
gaaagtctgagtaaggaga

SEQ ID NO: 35172 - RNA, 19 nt, synthetic construct
  misc_feature 1..19: note = siRNA sense sequence
  source 1..19: mol_type = other RNA
ctccttactcagactttcc

SEQ ID NO: 35173 - RNA, 19 nt, synthetic construct
  misc_feature 1..19: note = siRNA antisense sequence
  source 1..19: mol_type = other RNA
ggaaagtctgagtaaggag

SEQ ID NO: 35174 - RNA, 19 nt, synthetic construct
  misc_feature 1..19: note = siRNA sense sequence
  source 1..19: mol_type = other RNA
tccttactcagactttcca

SEQ ID NO: 35175 - RNA, 19 nt, synthetic construct
  misc_feature 1..19: note = siRNA antisense sequence
  source 1..19: mol_type = other RNA
tggaaagtctgagtaagga

SEQ ID NO: 35176 - RNA, 19 nt, synthetic construct
  misc_feature 1..19: note = siRNA sense sequence
  source 1..19: mol_type = other RNA
ccttactcagactttccag

SEQ ID NO: 35177 - RNA, 19 nt, synthetic construct
  misc_feature 1..19: note = siRNA antisense sequence
  source 1..19: mol_type = other RNA
ctggaaagtctgagtaagg

SEQ ID NO: 35178 - RNA, 19 nt, synthetic construct
  misc_feature 1..19: note = siRNA sense sequence
  source 1..19: mol_type = other RNA
gcccattgctattgtagaa

SEQ ID NO: 35179 - RNA, 19 nt, synthetic construct
  misc_feature 1..19: note = siRNA antisense sequence
  source 1..19: mol_type = other RNA
ttctacaatagcaatgggc

SEQ ID NO: 35180 - RNA, 19 nt, synthetic construct
  misc_feature 1..19: note = siRNA sense sequence
  source 1..19: mol_type = other RNA
gcagttatgcagactaata

SEQ ID NO: 35181 - RNA, 19 nt, synthetic construct
  misc_feature 1..19: note = siRNA antisense sequence
  source 1..19: mol_type = other RNA
tattagtctgcataactgc

SEQ ID NO: 35182 - RNA, 19 nt, synthetic construct
  misc_feature 1..19: note = siRNA sense sequence
  source 1..19: mol_type = other RNA
cagttatgcagactaatat

SEQ ID NO: 35183 - RNA, 19 nt, synthetic construct
  misc_feature 1..19: note = siRNA antisense sequence
  source 1..19: mol_type = other RNA
atattagtctgcataactg

SEQ ID NO: 35184 - RNA, 19 nt, synthetic construct
  misc_feature 1..19: note = siRNA sense sequence
  source 1..19: mol_type = other RNA
agttatgcagactaatatg

SEQ ID NO: 35185 - RNA, 19 nt, synthetic construct
  misc_feature 1..19: note = siRNA antisense sequence
  source 1..19: mol_type = other RNA
catattagtctgcataact

SEQ ID NO: 35186 - RNA, 19 nt, synthetic construct
  misc_feature 1..19: note = siRNA sense sequence
  source 1..19: mol_type = other RNA
gttatgcagactaatatgt

SEQ ID NO: 35187 - RNA, 19 nt, synthetic construct
  misc_feature 1..19: note = siRNA antisense sequence
  source 1..19: mol_type = other RNA
acatattagtctgcataac

SEQ ID NO: 35188 - RNA, 19 nt, synthetic construct
  misc_feature 1..19: note = siRNA sense sequence
  source 1..19: mol_type = other RNA
ttatgcagactaatatgtg

SEQ ID NO: 35189 - RNA, 19 nt, synthetic construct
  misc_feature 1..19: note = siRNA antisense sequence
  source 1..19: mol_type = other RNA
cacatattagtctgcataa

SEQ ID NO: 35190 - RNA, 19 nt, synthetic construct
  misc_feature 1..19: note = siRNA sense sequence
  source 1..19: mol_type = other RNA
atgcagactaatatgtggc

SEQ ID NO: 35191 - RNA, 19 nt, synthetic construct
  misc_feature 1..19: note = siRNA antisense sequence
  source 1..19: mol_type = other RNA
gccacatattagtctgcat

SEQ ID NO: 35192 - RNA, 19 nt, synthetic construct
  misc_feature 1..19: note = siRNA sense sequence
  source 1..19: mol_type = other RNA
tgcagactaatatgtggct

SEQ ID NO: 35193 - RNA, 19 nt, synthetic construct
  misc_feature 1..19: note = siRNA antisense sequence
  source 1..19: mol_type = other RNA
agccacatattagtctgca

SEQ ID NO: 35194 - RNA, 19 nt, synthetic construct
  misc_feature 1..19: note = siRNA sense sequence
  source 1..19: mol_type = other RNA
gcagactaatatgtggctg

SEQ ID NO: 35195 - RNA, 19 nt, synthetic construct
  misc_feature 1..19: note = siRNA antisense sequence
  source 1..19: mol_type = other RNA
cagccacatattagtctgc

SEQ ID NO: 35196 - RNA, 19 nt, synthetic construct
  misc_feature 1..19: note = siRNA sense sequence
  source 1..19: mol_type = other RNA
cagactaatatgtggctgt

SEQ ID NO: 35197 - RNA, 19 nt, synthetic construct
  misc_feature 1..19: note = siRNA antisense sequence
  source 1..19: mol_type = other RNA
acagccacatattagtctg

SEQ ID NO: 35198 - RNA, 19 nt, synthetic construct
  misc_feature 1..19: note = siRNA sense sequence
  source 1..19: mol_type = other RNA
agactaatatgtggctgtc

SEQ ID NO: 35199 - RNA, 19 nt, synthetic construct
  misc_feature 1..19: note = siRNA antisense sequence
  source 1..19: mol_type = other RNA
gacagccacatattagtct

SEQ ID NO: 35200 - RNA, 19 nt, synthetic construct
  misc_feature 1..19: note = siRNA sense sequence
  source 1..19: mol_type = other RNA
gactaatatgtggctgtct

SEQ ID NO: 35201 - RNA, 19 nt, synthetic construct
  misc_feature 1..19: note = siRNA antisense sequence
  source 1..19: mol_type = other RNA
agacagccacatattagtc

SEQ ID NO: 35202 - RNA, 19 nt, synthetic construct
  misc_feature 1..19: note = siRNA sense sequence
  source 1..19: mol_type = other RNA
actaatatgtggctgtctt

SEQ ID NO: 35203 - RNA, 19 nt, synthetic construct
  misc_feature 1..19: note = siRNA antisense sequence
  source 1..19: mol_type = other RNA
aagacagccacatattagt

SEQ ID NO: 35204 - RNA, 19 nt, synthetic construct
  misc_feature 1..19: note = siRNA sense sequence
  source 1..19: mol_type = other RNA
ctaatatgtggctgtcttc

SEQ ID NO: 35205 - RNA, 19 nt, synthetic construct
  misc_feature 1..19: note = siRNA antisense sequence
  source 1..19: mol_type = other RNA
gaagacagccacatattag

SEQ ID NO: 35206 - RNA, 19 nt, synthetic construct
  misc_feature 1..19: note = siRNA sense sequence
  source 1..19: mol_type = other RNA
taatatgtggctgtcttct

SEQ ID NO: 35207 - RNA, 19 nt, synthetic construct
  misc_feature 1..19: note = siRNA antisense sequence
  source 1..19: mol_type = other RNA
agaagacagccacatatta

SEQ ID NO: 35208 - RNA, 19 nt, synthetic construct
  misc_feature 1..19: note = siRNA sense sequence
  source 1..19: mol_type = other RNA
aatatgtggctgtcttcta

SEQ ID NO: 35209 - RNA, 19 nt, synthetic construct
  misc_feature 1..19: note = siRNA antisense sequence
  source 1..19: mol_type = other RNA
tagaagacagccacatatt

SEQ ID NO: 35210 - RNA, 19 nt, synthetic construct
  misc_feature 1..19: note = siRNA sense sequence
  source 1..19: mol_type = other RNA
atatgtggctgtcttctaa

SEQ ID NO: 35211 - RNA, 19 nt, synthetic construct
  misc_feature 1..19: note = siRNA antisense sequence
  source 1..19: mol_type = other RNA
ttagaagacagccacatat

SEQ ID NO: 35212 - RNA, 19 nt, synthetic construct
  misc_feature 1..19: note = siRNA sense sequence
  source 1..19: mol_type = other RNA
tatgtggctgtcttctaag

SEQ ID NO: 35213 - RNA, 19 nt, synthetic construct
  misc_feature 1..19: note = siRNA antisense sequence
  source 1..19: mol_type = other RNA
cttagaagacagccacata

SEQ ID NO: 35214 - RNA, 19 nt, synthetic construct
  misc_feature 1..19: note = siRNA sense sequence
  source 1..19: mol_type = other RNA
atgtggctgtcttctaagc

SEQ ID NO: 35215 - RNA, 19 nt, synthetic construct
  misc_feature 1..19: note = siRNA antisense sequence
  source 1..19: mol_type = other RNA
gcttagaagacagccacat

SEQ ID NO: 35216 - RNA, 19 nt, synthetic construct
  misc_feature 1..19: note = siRNA sense sequence
  source 1..19: mol_type = other RNA
gctgtcttctaagctcatc

SEQ ID NO: 35217 - RNA, 19 nt, synthetic construct
  misc_feature 1..19: note = siRNA antisense sequence
  source 1..19: mol_type = other RNA
gatgagcttagaagacagc

SEQ ID NO: 35218 - RNA, 19 nt, synthetic construct
  misc_feature 1..19: note = siRNA sense sequence
  source 1..19: mol_type = other RNA
tgtcttctaagctcatcct

SEQ ID NO: 35219 - RNA, 19 nt, synthetic construct
  misc_feature 1..19: note = siRNA antisense sequence
  source 1..19: mol_type = other RNA
aggatgagcttagaagaca

SEQ ID NO: 35220 - RNA, 19 nt, synthetic construct
  misc_feature 1..19: note = siRNA sense sequence
  source 1..19: mol_type = other RNA
gtcttctaagctcatcctc

SEQ ID NO: 35221 - RNA, 19 nt, synthetic construct
  misc_feature 1..19: note = siRNA antisense sequence
  source 1..19: mol_type = other RNA
gaggatgagcttagaagac

SEQ ID NO: 35222 - RNA, 19 nt, synthetic construct
  misc_feature 1..19: note = siRNA sense sequence
  source 1..19: mol_type = other RNA
tctaagctcatcctcatat

SEQ ID NO: 35223 - RNA, 19 nt, synthetic construct
  misc_feature 1..19: note = siRNA antisense sequence
  source 1..19: mol_type = other RNA
atatgaggatgagcttaga

SEQ ID NO: 35224 - RNA, 19 nt, synthetic construct
  misc_feature 1..19: note = siRNA sense sequence
  source 1..19: mol_type = other RNA
agctcatcctcatatcact

SEQ ID NO: 35225 - RNA, 19 nt, synthetic construct
  misc_feature 1..19: note = siRNA antisense sequence
  source 1..19: mol_type = other RNA
agtgatatgaggatgagct

SEQ ID NO: 35226 - RNA, 19 nt, synthetic construct
  misc_feature 1..19: note = siRNA sense sequence
  source 1..19: mol_type = other RNA
gctcatcctcatatcactt

SEQ ID NO: 35227 - RNA, 19 nt, synthetic construct
  misc_feature 1..19: note = siRNA antisense sequence
  source 1..19: mol_type = other RNA
aagtgatatgaggatgagc

SEQ ID NO: 35228 - RNA, 19 nt, synthetic construct
  misc_feature 1..19: note = siRNA sense sequence
  source 1..19: mol_type = other RNA
atcctcatatcactttgta

SEQ ID NO: 35229 - RNA, 19 nt, synthetic construct
  misc_feature 1..19: note = siRNA antisense sequence
  source 1..19: mol_type = other RNA
tacaaagtgatatgaggat

SEQ ID NO: 35230 - RNA, 19 nt, synthetic construct
  misc_feature 1..19: note = siRNA sense sequence
  source 1..19: mol_type = other RNA
tcctcatatcactttgtac

SEQ ID NO: 35231 - RNA, 19 nt, synthetic construct
  misc_feature 1..19: note = siRNA antisense sequence
  source 1..19: mol_type = other RNA
gtacaaagtgatatgagga

SEQ ID NO: 35232 - RNA, 19 nt, synthetic construct
  misc_feature 1..19: note = siRNA sense sequence
  source 1..19: mol_type = other RNA
cctcatatcactttgtact

SEQ ID NO: 35233 - RNA, 19 nt, synthetic construct
  misc_feature 1..19: note = siRNA antisense sequence
  source 1..19: mol_type = other RNA
agtacaaagtgatatgagg

SEQ ID NO: 35234 - RNA, 19 nt, synthetic construct
  misc_feature 1..19: note = siRNA sense sequence
  source 1..19: mol_type = other RNA
ctcatatcactttgtacta

SEQ ID NO: 35235 - RNA, 19 nt, synthetic construct
  misc_feature 1..19: note = siRNA antisense sequence
  source 1..19: mol_type = other RNA
tagtacaaagtgatatgag

SEQ ID NO: 35236 - RNA, 19 nt, synthetic construct
  misc_feature 1..19: note = siRNA sense sequence
  source 1..19: mol_type = other RNA
tatcactttgtactagccc

SEQ ID NO: 35237 - RNA, 19 nt, synthetic construct
  misc_feature 1..19: note = siRNA antisense sequence
  source 1..19: mol_type = other RNA
gggctagtacaaagtgata

SEQ ID NO: 35238 - RNA, 19 nt, synthetic construct
  misc_feature 1..19: note = siRNA sense sequence
  source 1..19: mol_type = other RNA
atcactttgtactagccct

SEQ ID NO: 35239 - RNA, 19 nt, synthetic construct
  misc_feature 1..19: note = siRNA antisense sequence
  source 1..19: mol_type = other RNA
agggctagtacaaagtgat

SEQ ID NO: 35240 - RNA, 19 nt, synthetic construct
  misc_feature 1..19: note = siRNA sense sequence
  source 1..19: mol_type = other RNA
tcactttgtactagccctt

SEQ ID NO: 35241 - RNA, 19 nt, synthetic construct
  misc_feature 1..19: note = siRNA antisense sequence
  source 1..19: mol_type = other RNA
aagggctagtacaaagtga

SEQ ID NO: 35242 - RNA, 19 nt, synthetic construct
  misc_feature 1..19: note = siRNA sense sequence
  source 1..19: mol_type = other RNA
agtggttactactttggat

SEQ ID NO: 35243 - RNA, 19 nt, synthetic construct
  misc_feature 1..19: note = siRNA antisense sequence
  source 1..19: mol_type = other RNA
atccaaagtagtaaccact

SEQ ID NO: 35244 - RNA, 19 nt, synthetic construct
  misc_feature 1..19: note = siRNA sense sequence
  source 1..19: mol_type = other RNA
gtggttactactttggatt

SEQ ID NO: 35245 - RNA, 19 nt, synthetic construct
  misc_feature 1..19: note = siRNA antisense sequence
  source 1..19: mol_type = other RNA
aatccaaagtagtaaccac

SEQ ID NO: 35246 - RNA, 19 nt, synthetic construct
  misc_feature 1..19: note = siRNA sense sequence
  source 1..19: mol_type = other RNA
tggttactactttggattt

SEQ ID NO: 35247 - RNA, 19 nt, synthetic construct
  misc_feature 1..19: note = siRNA antisense sequence
  source 1..19: mol_type = other RNA
aaatccaaagtagtaacca

SEQ ID NO: 35248 - RNA, 19 nt, synthetic construct
  misc_feature 1..19: note = siRNA sense sequence
  source 1..19: mol_type = other RNA
ggttactactttggatttg

SEQ ID NO: 35249 - RNA, 19 nt, synthetic construct
  misc_feature 1..19: note = siRNA antisense sequence
  source 1..19: mol_type = other RNA
caaatccaaagtagtaacc

SEQ ID NO: 35250 - RNA, 19 nt, synthetic construct
  misc_feature 1..19: note = siRNA sense sequence
  source 1..19: mol_type = other RNA
ttactactttggatttgga

SEQ ID NO: 35251 - RNA, 19 nt, synthetic construct
  misc_feature 1..19: note = siRNA antisense sequence
  source 1..19: mol_type = other RNA
tccaaatccaaagtagtaa

SEQ ID NO: 35252 - RNA, 19 nt, synthetic construct
  misc_feature 1..19: note = siRNA sense sequence
  source 1..19: mol_type = other RNA
tactactttggatttggaa

SEQ ID NO: 35253 - RNA, 19 nt, synthetic construct
  misc_feature 1..19: note = siRNA antisense sequence
  source 1..19: mol_type = other RNA
ttccaaatccaaagtagta

SEQ ID NO: 35254 - RNA, 19 nt, synthetic construct
  misc_feature 1..19: note = siRNA sense sequence
  source 1..19: mol_type = other RNA
actactttggatttggaag

SEQ ID NO: 35255 - RNA, 19 nt, synthetic construct
  misc_feature 1..19: note = siRNA antisense sequence
  source 1..19: mol_type = other RNA
cttccaaatccaaagtagt

SEQ ID NO: 35256 - RNA, 19 nt, synthetic construct
  misc_feature 1..19: note = siRNA sense sequence
  source 1..19: mol_type = other RNA
tactttggatttggaagcc

SEQ ID NO: 35257 - RNA, 19 nt, synthetic construct
  misc_feature 1..19: note = siRNA antisense sequence
  source 1..19: mol_type = other RNA
ggcttccaaatccaaagta

SEQ ID NO: 35258 - RNA, 19 nt, synthetic construct
  misc_feature 1..19: note = siRNA sense sequence
  source 1..19: mol_type = other RNA
actttggatttggaagcct

SEQ ID NO: 35259 - RNA, 19 nt, synthetic construct
  misc_feature 1..19: note = siRNA antisense sequence
  source 1..19: mol_type = other RNA
aggcttccaaatccaaagt

SEQ ID NO: 35260 - RNA, 19 nt, synthetic construct
  misc_feature 1..19: note = siRNA sense sequence
  source 1..19: mol_type = other RNA
gatttggaagcctgtggaa

SEQ ID NO: 35261 - RNA, 19 nt, synthetic construct
  misc_feature 1..19: note = siRNA antisense sequence
  source 1..19: mol_type = other RNA
ttccacaggcttccaaatc

SEQ ID NO: 35262 - RNA, 19 nt, synthetic construct
  misc_feature 1..19: note = siRNA sense sequence
  source 1..19: mol_type = other RNA
tgccttcccaagctttctt

SEQ ID NO: 35263 - RNA, 19 nt, synthetic construct
  misc_feature 1..19: note = siRNA antisense sequence
  source 1..19: mol_type = other RNA
aagaaagcttgggaaggca

SEQ ID NO: 35264 - RNA, 19 nt, synthetic construct
  misc_feature 1..19: note = siRNA sense sequence
  source 1..19: mol_type = other RNA
attatagagttgctggcaa

SEQ ID NO: 35265 - RNA, 19 nt, synthetic construct
  misc_feature 1..19: note = siRNA antisense sequence
  source 1..19: mol_type = other RNA
ttgccagcaactctataat

SEQ ID NO: 35266 - RNA, 19 nt, synthetic construct
  misc_feature 1..19: note = siRNA sense sequence
  source 1..19: mol_type = other RNA
tatagagttgctggcaaat

SEQ ID NO: 35267 - RNA, 19 nt, synthetic construct
  misc_feature 1..19: note = siRNA antisense sequence
  source 1..19: mol_type = other RNA
atttgccagcaactctata

SEQ ID NO: 35268 - RNA, 19 nt, synthetic construct
  misc_feature 1..19: note = siRNA sense sequence
  source 1..19: mol_type = other RNA
tagagttgctggcaaatta

SEQ ID NO: 35269 - RNA, 19 nt, synthetic construct
  misc_feature 1..19: note = siRNA antisense sequence
  source 1..19: mol_type = other RNA
taatttgccagcaactcta

SEQ ID NO: 35270 - RNA, 19 nt, synthetic construct
  misc_feature 1..19: note = siRNA sense sequence
  source 1..19: mol_type = other RNA
agagttgctggcaaattaa

SEQ ID NO: 35271 - RNA, 19 nt, synthetic construct
  misc_feature 1..19: note = siRNA antisense sequence
  source 1..19: mol_type = other RNA
ttaatttgccagcaactct

SEQ ID NO: 35272 - RNA, 19 nt, synthetic construct
  misc_feature 1..19: note = siRNA sense sequence
  source 1..19: mol_type = other RNA
gagttgctggcaaattaaa

SEQ ID NO: 35273 - RNA, 19 nt, synthetic construct
  misc_feature 1..19: note = siRNA antisense sequence
  source 1..19: mol_type = other RNA
tttaatttgccagcaactc

SEQ ID NO: 35274 - RNA, 19 nt, synthetic construct
  misc_feature 1..19: note = siRNA sense sequence
  source 1..19: mol_type = other RNA
attactggttttcaattgc

SEQ ID NO: 35275 - RNA, 19 nt, synthetic construct
  misc_feature 1..19: note = siRNA antisense sequence
  source 1..19: mol_type = other RNA
gcaattgaaaaccagtaat

SEQ ID NO: 35276 - RNA, 19 nt, synthetic construct
  misc_feature 1..19: note = siRNA sense sequence
  source 1..19: mol_type = other RNA
ttactggttttcaattgct

SEQ ID NO: 35277 - RNA, 19 nt, synthetic construct
  misc_feature 1..19: note = siRNA antisense sequence
  source 1..19: mol_type = other RNA
agcaattgaaaaccagtaa

SEQ ID NO: 35278 - RNA, 19 nt, synthetic construct
  misc_feature 1..19: note = siRNA sense sequence
  source 1..19: mol_type = other RNA
ggttttcaattgctggtac

SEQ ID NO: 35279 - RNA, 19 nt, synthetic construct
  misc_feature 1..19: note = siRNA antisense sequence
  source 1..19: mol_type = other RNA
gtaccagcaattgaaaacc

SEQ ID NO: 35280 - RNA, 19 nt, synthetic construct
  misc_feature 1..19: note = siRNA sense sequence
  source 1..19: mol_type = other RNA
gttttcaattgctggtaca

SEQ ID NO: 35281 - RNA, 19 nt, synthetic construct
  misc_feature 1..19: note = siRNA antisense sequence
  source 1..19: mol_type = other RNA
tgtaccagcaattgaaaac

SEQ ID NO: 35282 - RNA, 19 nt, synthetic construct
  misc_feature 1..19: note = siRNA sense sequence
  source 1..19: mol_type = other RNA
ttttcaattgctggtacat

SEQ ID NO: 35283 - RNA, 19 nt, synthetic construct
  misc_feature 1..19: note = siRNA antisense sequence
  source 1..19: mol_type = other RNA
atgtaccagcaattgaaaa

SEQ ID NO: 35284 - RNA, 19 nt, synthetic construct
  misc_feature 1..19: note = siRNA sense sequence
  source 1..19: mol_type = other RNA
tttcaattgctggtacatg

SEQ ID NO: 35285 - RNA, 19 nt, synthetic construct
  misc_feature 1..19: note = siRNA antisense sequence
  source 1..19: mol_type = other RNA
catgtaccagcaattgaaa

SEQ ID NO: 35286 - RNA, 19 nt, synthetic construct
  misc_feature 1..19: note = siRNA sense sequence
  source 1..19: mol_type = other RNA
tttgacatctgtcttatct

SEQ ID NO: 35287 - RNA, 19 nt, synthetic construct
  misc_feature 1..19: note = siRNA antisense sequence
  source 1..19: mol_type = other RNA
agataagacagatgtcaaa

SEQ ID NO: 35288 - RNA, 19 nt, synthetic construct
  misc_feature 1..19: note = siRNA sense sequence
  source 1..19: mol_type = other RNA
gacatctgtcttatctatg

SEQ ID NO: 35289 - RNA, 19 nt, synthetic construct
  misc_feature 1..19: note = siRNA antisense sequence
  source 1..19: mol_type = other RNA
catagataagacagatgtc

SEQ ID NO: 35290 - RNA, 19 nt, synthetic construct
  misc_feature 1..19: note = siRNA sense sequence
  source 1..19: mol_type = other RNA
tctatattgtctctgaagc

SEQ ID NO: 35291 - RNA, 19 nt, synthetic construct
  misc_feature 1..19: note = siRNA antisense sequence
  source 1..19: mol_type = other RNA
gcttcagagacaatataga

SEQ ID NO: 35292 - RNA, 19 nt, synthetic construct
  misc_feature 1..19: note = siRNA sense sequence
  source 1..19: mol_type = other RNA
ctatattgtctctgaagcc

SEQ ID NO: 35293 - RNA, 19 nt, synthetic construct
  misc_feature 1..19: note = siRNA antisense sequence
  source 1..19: mol_type = other RNA
ggcttcagagacaatatag

SEQ ID NO: 35294 - RNA, 19 nt, synthetic construct
  misc_feature 1..19: note = siRNA sense sequence
  source 1..19: mol_type = other RNA
tatattgtctctgaagcca

SEQ ID NO: 35295 - RNA, 19 nt, synthetic construct
  misc_feature 1..19: note = siRNA antisense sequence
  source 1..19: mol_type = other RNA
tggcttcagagacaatata

SEQ ID NO: 35296 - RNA, 19 nt, synthetic construct
  misc_feature 1..19: note = siRNA sense sequence
  source 1..19: mol_type = other RNA
atattgtctctgaagccac

SEQ ID NO: 35297 - RNA, 19 nt, synthetic construct
  misc_feature 1..19: note = siRNA antisense sequence
  source 1..19: mol_type = other RNA
gtggcttcagagacaatat

SEQ ID NO: 35298 - RNA, 19 nt, synthetic construct
  misc_feature 1..19: note = siRNA sense sequence
  source 1..19: mol_type = other RNA
tattgtctctgaagccacc

SEQ ID NO: 35299 - RNA, 19 nt, synthetic construct
  misc_feature 1..19: note = siRNA antisense sequence
  source 1..19: mol_type = other RNA
ggtggcttcagagacaata

SEQ ID NO: 35300 - RNA, 19 nt, synthetic construct
  misc_feature 1..19: note = siRNA sense sequence
  source 1..19: mol_type = other RNA
tctctgaagccacctctgt

SEQ ID NO: 35301 - RNA, 19 nt, synthetic construct
  misc_feature 1..19: note = siRNA antisense sequence
  source 1..19: mol_type = other RNA
acagaggtggcttcagaga

SEQ ID NO: 35302 - RNA, 19 nt, synthetic construct
  misc_feature 1..19: note = siRNA sense sequence
  source 1..19: mol_type = other RNA
ctctgaagccacctctgtg

SEQ ID NO: 35303 - RNA, 19 nt, synthetic construct
  misc_feature 1..19: note = siRNA antisense sequence
  source 1..19: mol_type = other RNA
cacagaggtggcttcagag

SEQ ID NO: 35304 - RNA, 19 nt, synthetic construct
  misc_feature 1..19: note = siRNA sense sequence
  source 1..19: mol_type = other RNA
tctgaagccacctctgtgt

SEQ ID NO: 35305 - RNA, 19 nt, synthetic construct
  misc_feature 1..19: note = siRNA antisense sequence
  source 1..19: mol_type = other RNA
acacagaggtggcttcaga

SEQ ID NO: 35306 - RNA, 19 nt, synthetic construct
  misc_feature 1..19: note = siRNA sense sequence
  source 1..19: mol_type = other RNA
tgaagccacctctgtgttt

SEQ ID NO: 35307 - RNA, 19 nt, synthetic construct
  misc_feature 1..19: note = siRNA antisense sequence
  source 1..19: mol_type = other RNA
aaacacagaggtggcttca

SEQ ID NO: 35308 - RNA, 19 nt, synthetic construct
  misc_feature 1..19: note = siRNA sense sequence
  source 1..19: mol_type = other RNA
gaagccacctctgtgtttt

SEQ ID NO: 35309 - RNA, 19 nt, synthetic construct
  misc_feature 1..19: note = siRNA antisense sequence
  source 1..19: mol_type = other RNA
aaaacacagaggtggcttc

SEQ ID NO: 35310 - RNA, 19 nt, synthetic construct
  misc_feature 1..19: note = siRNA sense sequence
  source 1..19: mol_type = other RNA
aagccacctctgtgttttg

SEQ ID NO: 35311 - RNA, 19 nt, synthetic construct
  misc_feature 1..19: note = siRNA antisense sequence
  source 1..19: mol_type = other RNA
caaaacacagaggtggctt

SEQ ID NO: 35312 - RNA, 19 nt, synthetic construct
  misc_feature 1..19: note = siRNA sense sequence
  source 1..19: mol_type = other RNA
agccacctctgtgttttgc

SEQ ID NO: 35313 - RNA, 19 nt, synthetic construct
  misc_feature 1..19: note = siRNA antisense sequence
  source 1..19: mol_type = other RNA
gcaaaacacagaggtggct

SEQ ID NO: 35314 - RNA, 19 nt, synthetic construct
  misc_feature 1..19: note = siRNA sense sequence
  source 1..19: mol_type = other RNA
gccacctctgtgttttgct

SEQ ID NO: 35315 - RNA, 19 nt, synthetic construct
  misc_feature 1..19: note = siRNA antisense sequence
  source 1..19: mol_type = other RNA
agcaaaacacagaggtggc

SEQ ID NO: 35316 - RNA, 19 nt, synthetic construct
  misc_feature 1..19: note = siRNA sense sequence
  source 1..19: mol_type = other RNA
acctctgtgttttgctttt

SEQ ID NO: 35317 - RNA, 19 nt, synthetic construct
  misc_feature 1..19: note = siRNA antisense sequence
  source 1..19: mol_type = other RNA
aaaagcaaaacacagaggt

SEQ ID NO: 35318 - RNA, 19 nt, synthetic construct
  misc_feature 1..19: note = siRNA sense sequence
  source 1..19: mol_type = other RNA
ctctgtgttttgcttttct

SEQ ID NO: 35319 - RNA, 19 nt, synthetic construct
  misc_feature 1..19: note = siRNA antisense sequence
  source 1..19: mol_type = other RNA
agaaaagcaaaacacagag

SEQ ID NO: 35320 - RNA, 19 nt, synthetic construct
  misc_feature 1..19: note = siRNA sense sequence
  source 1..19: mol_type = other RNA
ctgtgttttgcttttctgg

SEQ ID NO: 35321 - RNA, 19 nt, synthetic construct
  misc_feature 1..19: note = siRNA antisense sequence
  source 1..19: mol_type = other RNA
ccagaaaagcaaaacacag

SEQ ID NO: 35322 - RNA, 19 nt, synthetic construct
  misc_feature 1..19: note = siRNA sense sequence
  source 1..19: mol_type = other RNA
tgtgttttgcttttctggg

SEQ ID NO: 35323 - RNA, 19 nt, synthetic construct
  misc_feature 1..19: note = siRNA antisense sequence
  source 1..19: mol_type = other RNA
cccagaaaagcaaaacaca

SEQ ID NO: 35324 - RNA, 19 nt, synthetic construct
  misc_feature 1..19: note = siRNA sense sequence
  source 1..19: mol_type = other RNA
tttgcttttctgggagtgg

SEQ ID NO: 35325 - RNA, 19 nt, synthetic construct
  misc_feature 1..19: note = siRNA antisense sequence
  source 1..19: mol_type = other RNA
ccactcccagaaaagcaaa

SEQ ID NO: 35326 - RNA, 19 nt, synthetic construct
  misc_feature 1..19: note = siRNA sense sequence
  source 1..19: mol_type = other RNA
ttgcttttctgggagtgga

SEQ ID NO: 35327 - RNA, 19 nt, synthetic construct
  misc_feature 1..19: note = siRNA antisense sequence
  source 1..19: mol_type = other RNA
tccactcccagaaaagcaa

SEQ ID NO: 35328 - RNA, 19 nt, synthetic construct
  misc_feature 1..19: note = siRNA sense sequence
  source 1..19: mol_type = other RNA
tgcttttctgggagtggaa

SEQ ID NO: 35329 - RNA, 19 nt, synthetic construct
  misc_feature 1..19: note = siRNA antisense sequence
  source 1..19: mol_type = other RNA
ttccactcccagaaaagca

SEQ ID NO: 35330 - RNA, 19 nt, synthetic construct
  misc_feature 1..19: note = siRNA sense sequence
  source 1..19: mol_type = other RNA
gcttttctgggagtggaag

SEQ ID NO: 35331 - RNA, 19 nt, synthetic construct
  misc_feature 1..19: note = siRNA antisense sequence
  source 1..19: mol_type = other RNA
cttccactcccagaaaagc

SEQ ID NO: 35332 - RNA, 19 nt, synthetic construct
  misc_feature 1..19: note = siRNA sense sequence
  source 1..19: mol_type = other RNA
cttttctgggagtggaagt

SEQ ID NO: 35333 - RNA, 19 nt, synthetic construct
  misc_feature 1..19: note = siRNA antisense sequence
  source 1..19: mol_type = other RNA
acttccactcccagaaaag

SEQ ID NO: 35334 - RNA, 19 nt, synthetic construct
  misc_feature 1..19: note = siRNA sense sequence
  source 1..19: mol_type = other RNA
ttttctgggagtggaagtg

SEQ ID NO: 35335 - RNA, 19 nt, synthetic construct
  misc_feature 1..19: note = siRNA antisense sequence
  source 1..19: mol_type = other RNA
cacttccactcccagaaaa

SEQ ID NO: 35336 - RNA, 19 nt, synthetic construct
  misc_feature 1..19: note = siRNA sense sequence
  source 1..19: mol_type = other RNA
tttctgggagtggaagtgg

SEQ ID NO: 35337 - RNA, 19 nt, synthetic construct
  misc_feature 1..19: note = siRNA antisense sequence
  source 1..19: mol_type = other RNA
ccacttccactcccagaaa

SEQ ID NO: 35338 - RNA, 19 nt, synthetic construct
  misc_feature 1..19: note = siRNA sense sequence
  source 1..19: mol_type = other RNA
ttctgggagtggaagtgga

SEQ ID NO: 35339 - RNA, 19 nt, synthetic construct
  misc_feature 1..19: note = siRNA antisense sequence
  source 1..19: mol_type = other RNA
tccacttccactcccagaa

SEQ ID NO: 35340 - RNA, 19 nt, synthetic construct
  misc_feature 1..19: note = siRNA sense sequence
  source 1..19: mol_type = other RNA
caattttgctttacttctg

SEQ ID NO: 35341 - RNA, 19 nt, synthetic construct
  misc_feature 1..19: note = siRNA antisense sequence
  source 1..19: mol_type = other RNA
cagaagtaaagcaaaattg

SEQ ID NO: 35342 - RNA, 19 nt, synthetic construct
  misc_feature 1..19: note = siRNA sense sequence
  source 1..19: mol_type = other RNA
aattttgctttacttctgg

SEQ ID NO: 35343 - RNA, 19 nt, synthetic construct
  misc_feature 1..19: note = siRNA antisense sequence
  source 1..19: mol_type = other RNA
ccagaagtaaagcaaaatt

SEQ ID NO: 35344 - RNA, 19 nt, synthetic construct
  misc_feature 1..19: note = siRNA sense sequence
  source 1..19: mol_type = other RNA
tttgctttacttctggtac

SEQ ID NO: 35345 - RNA, 19 nt, synthetic construct
  misc_feature 1..19: note = siRNA antisense sequence
  source 1..19: mol_type = other RNA
gtaccagaagtaaagcaaa

SEQ ID NO: 35346 - RNA, 19 nt, synthetic construct
  misc_feature 1..19: note = siRNA sense sequence
  source 1..19: mol_type = other RNA
ttgctttacttctggtaca

SEQ ID NO: 35347 - RNA, 19 nt, synthetic construct
  misc_feature 1..19: note = siRNA antisense sequence
  source 1..19: mol_type = other RNA
tgtaccagaagtaaagcaa

SEQ ID NO: 35348 - RNA, 19 nt, synthetic construct
  misc_feature 1..19: note = siRNA sense sequence
  source 1..19: mol_type = other RNA
tgctttacttctggtacat

SEQ ID NO: 35349 - RNA, 19 nt, synthetic construct
  misc_feature 1..19: note = siRNA antisense sequence
  source 1..19: mol_type = other RNA
atgtaccagaagtaaagca

SEQ ID NO: 35350 - RNA, 19 nt, synthetic construct
  misc_feature 1..19: note = siRNA sense sequence
  source 1..19: mol_type = other RNA
gctttacttctggtacata

SEQ ID NO: 35351 - RNA, 19 nt, synthetic construct
  misc_feature 1..19: note = siRNA antisense sequence
  source 1..19: mol_type = other RNA
tatgtaccagaagtaaagc

SEQ ID NO: 35352 - RNA, 19 nt, synthetic construct
  misc_feature 1..19: note = siRNA sense sequence
  source 1..19: mol_type = other RNA
ctttacttctggtacataa

SEQ ID NO: 35353 - RNA, 19 nt, synthetic construct
  misc_feature 1..19: note = siRNA antisense sequence
  source 1..19: mol_type = other RNA
ttatgtaccagaagtaaag

SEQ ID NO: 35354 - RNA, 19 nt, synthetic construct
  misc_feature 1..19: note = siRNA sense sequence
  source 1..19: mol_type = other RNA
cttctggtacataaaattc

SEQ ID NO: 35355 - RNA, 19 nt, synthetic construct
  misc_feature 1..19: note = siRNA antisense sequence
  source 1..19: mol_type = other RNA
gaattttatgtaccagaag

SEQ ID NO: 35356 - RNA, 19 nt, synthetic construct
  misc_feature 1..19: note = siRNA sense sequence
  source 1..19: mol_type = other RNA
ttctggtacataaaattcc

SEQ ID NO: 35357 - RNA, 19 nt, synthetic construct
  misc_feature 1..19: note = siRNA antisense sequence
  source 1..19: mol_type = other RNA
ggaattttatgtaccagaa

SEQ ID NO: 35358 - RNA, 19 nt, synthetic construct
  misc_feature 1..19: note = siRNA sense sequence
  source 1..19: mol_type = other RNA
tctggtacataaaattcca

SEQ ID NO: 35359 - RNA, 19 nt, synthetic construct
  misc_feature 1..19: note = siRNA antisense sequence
  source 1..19: mol_type = other RNA
tggaattttatgtaccaga

SEQ ID NO: 35360 - RNA, 19 nt, synthetic construct
  misc_feature 1..19: note = siRNA sense sequence
  source 1..19: mol_type = other RNA
ctggtacataaaattccaa

SEQ ID NO: 35361 - RNA, 19 nt, synthetic construct
  misc_feature 1..19: note = siRNA antisense sequence
  source 1..19: mol_type = other RNA
ttggaattttatgtaccag

SEQ ID NO: 35362 - RNA, 19 nt, synthetic construct
  misc_feature 1..19: note = siRNA sense sequence
  source 1..19: mol_type = other RNA
tggtacataaaattccaag

SEQ ID NO: 35363 - RNA, 19 nt, synthetic construct
  misc_feature 1..19: note = siRNA antisense sequence
  source 1..19: mol_type = other RNA
cttggaattttatgtacca

SEQ ID NO: 35364 - RNA, 19 nt, synthetic construct
  misc_feature 1..19: note = siRNA sense sequence
  source 1..19: mol_type = other RNA
tgcttttactgtttactca

SEQ ID NO: 35365 - RNA, 19 nt, synthetic construct
  misc_feature 1..19: note = siRNA antisense sequence
  source 1..19: mol_type = other RNA
tgagtaaacagtaaaagca

SEQ ID NO: 35366 - RNA, 19 nt, synthetic construct
  misc_feature 1..19: note = siRNA sense sequence
  source 1..19: mol_type = other RNA
gcttttactgtttactcac

SEQ ID NO: 35367 - RNA, 19 nt, synthetic construct
  misc_feature 1..19: note = siRNA antisense sequence
  source 1..19: mol_type = other RNA
gtgagtaaacagtaaaagc

SEQ ID NO: 35368 - RNA, 19 nt, synthetic construct
  misc_feature 1..19: note = siRNA sense sequence
  source 1..19: mol_type = other RNA
cttttactgtttactcact

SEQ ID NO: 35369 - RNA, 19 nt, synthetic construct
  misc_feature 1..19: note = siRNA antisense sequence
  source 1..19: mol_type = other RNA
agtgagtaaacagtaaaag

SEQ ID NO: 35370 - RNA, 19 nt, synthetic construct
  misc_feature 1..19: note = siRNA sense sequence
  source 1..19: mol_type = other RNA
ttttactgtttactcactc

SEQ ID NO: 35371 - RNA, 19 nt, synthetic construct
  misc_feature 1..19: note = siRNA antisense sequence
  source 1..19: mol_type = other RNA
gagtgagtaaacagtaaaa

SEQ ID NO: 35372 - RNA, 19 nt, synthetic construct
  misc_feature 1..19: note = siRNA sense sequence
  source 1..19: mol_type = other RNA
actgtttactcactccttt

SEQ ID NO: 35373 - RNA, 19 nt, synthetic construct
  misc_feature 1..19: note = siRNA antisense sequence
  source 1..19: mol_type = other RNA
aaaggagtgagtaaacagt

SEQ ID NO: 35374 - RNA, 19 nt, synthetic construct
  misc_feature 1..19: note = siRNA sense sequence
  source 1..19: mol_type = other RNA
ctgtttactcactccttta

SEQ ID NO: 35375 - RNA, 19 nt, synthetic construct
  misc_feature 1..19: note = siRNA antisense sequence
  source 1..19: mol_type = other RNA
taaaggagtgagtaaacag

SEQ ID NO: 35376 - RNA, 19 nt, synthetic construct
  misc_feature 1..19: note = siRNA sense sequence
  source 1..19: mol_type = other RNA
tgtttactcactcctttaa

SEQ ID NO: 35377 - RNA, 19 nt, synthetic construct
  misc_feature 1..19: note = siRNA antisense sequence
  source 1..19: mol_type = other RNA
ttaaaggagtgagtaaaca

SEQ ID NO: 35378 - RNA, 19 nt, synthetic construct
  misc_feature 1..19: note = siRNA sense sequence
  source 1..19: mol_type = other RNA
ttactcactcctttaaatc

SEQ ID NO: 35379 - RNA, 19 nt, synthetic construct
  misc_feature 1..19: note = siRNA antisense sequence
  source 1..19: mol_type = other RNA
gatttaaaggagtgagtaa

SEQ ID NO: 35380 - RNA, 19 nt, synthetic construct
  misc_feature 1..19: note = siRNA sense sequence
  source 1..19: mol_type = other RNA
actcactcctttaaatcaa

SEQ ID NO: 35381 - RNA, 19 nt, synthetic construct
  misc_feature 1..19: note = siRNA antisense sequence
  source 1..19: mol_type = other RNA
ttgatttaaaggagtgagt

SEQ ID NO: 35382 - RNA, 19 nt, synthetic construct
  misc_feature 1..19: note = siRNA sense sequence
  source 1..19: mol_type = other RNA
ctcactcctttaaatcaaa

SEQ ID NO: 35383 - RNA, 19 nt, synthetic construct
  misc_feature 1..19: note = siRNA antisense sequence
  source 1..19: mol_type = other RNA
tttgatttaaaggagtgag

SEQ ID NO: 35384 - RNA, 19 nt, synthetic construct
  misc_feature 1..19: note = siRNA sense sequence
  source 1..19: mol_type = other RNA
tttatgtcatctcctgttc

SEQ ID NO: 35385 - RNA, 19 nt, synthetic construct
  misc_feature 1..19: note = siRNA antisense sequence
  source 1..19: mol_type = other RNA
gaacaggagatgacataaa

SEQ ID NO: 35386 - RNA, 19 nt, synthetic construct
  misc_feature 1..19: note = siRNA sense sequence
  source 1..19: mol_type = other RNA
ttatgtcatctcctgttct

SEQ ID NO: 35387 - RNA, 19 nt, synthetic construct
  misc_feature 1..19: note = siRNA antisense sequence
  source 1..19: mol_type = other RNA
agaacaggagatgacataa

SEQ ID NO: 35388 - RNA, 19 nt, synthetic construct
  misc_feature 1..19: note = siRNA sense sequence
  source 1..19: mol_type = other RNA
tatgtcatctcctgttctt

SEQ ID NO: 35389 - RNA, 19 nt, synthetic construct
  misc_feature 1..19: note = siRNA antisense sequence
  source 1..19: mol_type = other RNA
aagaacaggagatgacata

SEQ ID NO: 35390 - RNA, 19 nt, synthetic construct
  misc_feature 1..19: note = siRNA sense sequence
  source 1..19: mol_type = other RNA
atgtcatctcctgttcttc

SEQ ID NO: 35391 - RNA, 19 nt, synthetic construct
  misc_feature 1..19: note = siRNA antisense sequence
  source 1..19: mol_type = other RNA
gaagaacaggagatgacat

SEQ ID NO: 35392 - RNA, 19 nt, synthetic construct
  misc_feature 1..19: note = siRNA sense sequence
  source 1..19: mol_type = other RNA
tgttcttcaggctcttcgg

SEQ ID NO: 35393 - RNA, 19 nt, synthetic construct
  misc_feature 1..19: note = siRNA antisense sequence
  source 1..19: mol_type = other RNA
ccgaagagcctgaagaaca

SEQ ID NO: 35394 - RNA, 19 nt, synthetic construct
  misc_feature 1..19: note = siRNA sense sequence
  source 1..19: mol_type = other RNA
gttcttcaggctcttcggt

SEQ ID NO: 35395 - RNA, 19 nt, synthetic construct
  misc_feature 1..19: note = siRNA antisense sequence
  source 1..19: mol_type = other RNA
accgaagagcctgaagaac

SEQ ID NO: 35396 - RNA, 19 nt, synthetic construct
  misc_feature 1..19: note = siRNA sense sequence
  source 1..19: mol_type = other RNA
ttcttcaggctcttcggtg

SEQ ID NO: 35397 - RNA, 19 nt, synthetic construct
  misc_feature 1..19: note = siRNA antisense sequence
  source 1..19: mol_type = other RNA
caccgaagagcctgaagaa

SEQ ID NO: 35398 - RNA, 19 nt, synthetic construct
  misc_feature 1..19: note = siRNA sense sequence
  source 1..19: mol_type = other RNA
tcttcaggctcttcggtgc

SEQ ID NO: 35399 - RNA, 19 nt, synthetic construct
  misc_feature 1..19: note = siRNA antisense sequence
  source 1..19: mol_type = other RNA
gcaccgaagagcctgaaga

SEQ ID NO: 35400 - RNA, 19 nt, synthetic construct
  misc_feature 1..19: note = siRNA sense sequence
  source 1..19: mol_type = other RNA
cttcaggctcttcggtgcc

SEQ ID NO: 35401 - RNA, 19 nt, synthetic construct
  misc_feature 1..19: note = siRNA antisense sequence
  source 1..19: mol_type = other RNA
ggcaccgaagagcctgaag

SEQ ID NO: 35402 - RNA, 19 nt, synthetic construct
  misc_feature 1..19: note = siRNA sense sequence
  source 1..19: mol_type = other RNA
ggctcttcggtgcctcaga

SEQ ID NO: 35403 - RNA, 19 nt, synthetic construct
  misc_feature 1..19: note = siRNA antisense sequence
  source 1..19: mol_type = other RNA
tctgaggcaccgaagagcc

SEQ ID NO: 35404 - RNA, 19 nt, synthetic construct
  misc_feature 1..19: note = siRNA sense sequence
  source 1..19: mol_type = other RNA
gctcttcggtgcctcagaa

SEQ ID NO: 35405 - RNA, 19 nt, synthetic construct
  misc_feature 1..19: note = siRNA antisense sequence
  source 1..19: mol_type = other RNA
ttctgaggcaccgaagagc

SEQ ID NO: 35406 - RNA, 19 nt, synthetic construct
  misc_feature 1..19: note = siRNA sense sequence
  source 1..19: mol_type = other RNA
attgcctgtagaattctaa

SEQ ID NO: 35407 - RNA, 19 nt, synthetic construct
  misc_feature 1..19: note = siRNA antisense sequence
  source 1..19: mol_type = other RNA
ttagaattctacaggcaat

SEQ ID NO: 35408 - RNA, 19 nt, synthetic construct
  misc_feature 1..19: note = siRNA sense sequence
  source 1..19: mol_type = other RNA
ttgcctgtagaattctaag

SEQ ID NO: 35409 - RNA, 19 nt, synthetic construct
  misc_feature 1..19: note = siRNA antisense sequence
  source 1..19: mol_type = other RNA
cttagaattctacaggcaa

SEQ ID NO: 35410 - RNA, 19 nt, synthetic construct
  misc_feature 1..19: note = siRNA sense sequence
  source 1..19: mol_type = other RNA
ctgtagaattctaaggaca

SEQ ID NO: 35411 - RNA, 19 nt, synthetic construct
  misc_feature 1..19: note = siRNA antisense sequence
  source 1..19: mol_type = other RNA
tgtccttagaattctacag

SEQ ID NO: 35412 - RNA, 19 nt, synthetic construct
  misc_feature 1..19: note = siRNA sense sequence
  source 1..19: mol_type = other RNA
tgtagaattctaaggacag

SEQ ID NO: 35413 - RNA, 19 nt, synthetic construct
  misc_feature 1..19: note = siRNA antisense sequence
  source 1..19: mol_type = other RNA
ctgtccttagaattctaca

SEQ ID NO: 35414 - RNA, 19 nt, synthetic construct
  misc_feature 1..19: note = siRNA sense sequence
  source 1..19: mol_type = other RNA
agaattctaaggacaggaa

SEQ ID NO: 35415 - RNA, 19 nt, synthetic construct
  misc_feature 1..19: note = siRNA antisense sequence
  source 1..19: mol_type = other RNA
ttcctgtccttagaattct

SEQ ID NO: 35416 - RNA, 19 nt, synthetic construct
  misc_feature 1..19: note = siRNA sense sequence
  source 1..19: mol_type = other RNA
aactgcttggtcttatgtt

SEQ ID NO: 35417 - RNA, 19 nt, synthetic construct
  misc_feature 1..19: note = siRNA antisense sequence
  source 1..19: mol_type = other RNA
aacataagaccaagcagtt

SEQ ID NO: 35418 - RNA, 19 nt, synthetic construct
  misc_feature 1..19: note = siRNA sense sequence
  source 1..19: mol_type = other RNA
actgcttggtcttatgttg

SEQ ID NO: 35419 - RNA, 19 nt, synthetic construct
  misc_feature 1..19: note = siRNA antisense sequence
  source 1..19: mol_type = other RNA
caacataagaccaagcagt

SEQ ID NO: 35420 - RNA, 19 nt, synthetic construct
  misc_feature 1..19: note = siRNA sense sequence
  source 1..19: mol_type = other RNA
cttggtcttatgttgagga

SEQ ID NO: 35421 - RNA, 19 nt, synthetic construct
  misc_feature 1..19: note = siRNA antisense sequence
  source 1..19: mol_type = other RNA
tcctcaacataagaccaag

SEQ ID NO: 35422 - RNA, 19 nt, synthetic construct
  misc_feature 1..19: note = siRNA sense sequence
  source 1..19: mol_type = other RNA
ttggtcttatgttgaggag

SEQ ID NO: 35423 - RNA, 19 nt, synthetic construct
  misc_feature 1..19: note = siRNA antisense sequence
  source 1..19: mol_type = other RNA
ctcctcaacataagaccaa

SEQ ID NO: 35424 - RNA, 19 nt, synthetic construct
  misc_feature 1..19: note = siRNA sense sequence
  source 1..19: mol_type = other RNA
tggtcttatgttgaggagg

SEQ ID NO: 35425 - RNA, 19 nt, synthetic construct
  misc_feature 1..19: note = siRNA antisense sequence
  source 1..19: mol_type = other RNA
cctcctcaacataagacca

SEQ ID NO: 35426 - RNA, 19 nt, synthetic construct
  misc_feature 1..19: note = siRNA sense sequence
  source 1..19: mol_type = other RNA
ggtcttatgttgaggaggg

SEQ ID NO: 35427 - RNA, 19 nt, synthetic construct
  misc_feature 1..19: note = siRNA antisense sequence
  source 1..19: mol_type = other RNA
ccctcctcaacataagacc

SEQ ID NO: 35428 - RNA, 19 nt, synthetic construct
  misc_feature 1..19: note = siRNA sense sequence
  source 1..19: mol_type = other RNA
attaaagatgatgacatgc

SEQ ID NO: 35429 - RNA, 19 nt, synthetic construct
  misc_feature 1..19: note = siRNA antisense sequence
  source 1..19: mol_type = other RNA
gcatgtcatcatctttaat

SEQ ID NO: 35430 - RNA, 19 nt, synthetic construct
  misc_feature 1..19: note = siRNA sense sequence
  source 1..19: mol_type = other RNA
ttaaagatgatgacatgct

SEQ ID NO: 35431 - RNA, 19 nt, synthetic construct
  misc_feature 1..19: note = siRNA antisense sequence
  source 1..19: mol_type = other RNA
agcatgtcatcatctttaa

SEQ ID NO: 35432 - RNA, 19 nt, synthetic construct
  misc_feature 1..19: note = siRNA sense sequence
  source 1..19: mol_type = other RNA
aaagatgatgacatgctag

SEQ ID NO: 35433 - RNA, 19 nt, synthetic construct
  misc_feature 1..19: note = siRNA antisense sequence
  source 1..19: mol_type = other RNA
ctagcatgtcatcatcttt

SEQ ID NO: 35434 - RNA, 19 nt, synthetic construct
  misc_feature 1..19: note = siRNA sense sequence
  source 1..19: mol_type = other RNA
aaattgaccctgattaaag

SEQ ID NO: 35435 - RNA, 19 nt, synthetic construct
  misc_feature 1..19: note = siRNA antisense sequence
  source 1..19: mol_type = other RNA
ctttaatcagggtcaattt

SEQ ID NO: 35436 - RNA, 19 nt, synthetic construct
  misc_feature 1..19: note = siRNA sense sequence
  source 1..19: mol_type = other RNA
aattgaccctgattaaaga

SEQ ID NO: 35437 - RNA, 19 nt, synthetic construct
  misc_feature 1..19: note = siRNA antisense sequence
  source 1..19: mol_type = other RNA
tctttaatcagggtcaatt

SEQ ID NO: 35438 - RNA, 19 nt, synthetic construct
  misc_feature 1..19: note = siRNA sense sequence
  source 1..19: mol_type = other RNA
ccttttctctacagcatag

SEQ ID NO: 35439 - RNA, 19 nt, synthetic construct
  misc_feature 1..19: note = siRNA antisense sequence
  source 1..19: mol_type = other RNA
ctatgctgtagagaaaagg

SEQ ID NO: 35440 - RNA, 19 nt, synthetic construct
  misc_feature 1..19: note = siRNA sense sequence
  source 1..19: mol_type = other RNA
cttttctctacagcatagt

SEQ ID NO: 35441 - RNA, 19 nt, synthetic construct
  misc_feature 1..19: note = siRNA antisense sequence
  source 1..19: mol_type = other RNA
actatgctgtagagaaaag

SEQ ID NO: 35442 - RNA, 19 nt, synthetic construct
  misc_feature 1..19: note = siRNA sense sequence
  source 1..19: mol_type = other RNA
tttctctacagcatagtga

SEQ ID NO: 35443 - RNA, 19 nt, synthetic construct
  misc_feature 1..19: note = siRNA antisense sequence
  source 1..19: mol_type = other RNA
tcactatgctgtagagaaa

SEQ ID NO: 35444 - RNA, 19 nt, synthetic construct
  misc_feature 1..19: note = siRNA sense sequence
  source 1..19: mol_type = other RNA
ttctctacagcatagtgag

SEQ ID NO: 35445 - RNA, 19 nt, synthetic construct
  misc_feature 1..19: note = siRNA antisense sequence
  source 1..19: mol_type = other RNA
ctcactatgctgtagagaa

SEQ ID NO: 35446 - RNA, 19 nt, synthetic construct
  misc_feature 1..19: note = siRNA sense sequence
  source 1..19: mol_type = other RNA
cattacctgtattgacatt

SEQ ID NO: 35447 - RNA, 19 nt, synthetic construct
  misc_feature 1..19: note = siRNA antisense sequence
  source 1..19: mol_type = other RNA
aatgtcaatacaggtaatg

SEQ ID NO: 35448 - RNA, 19 nt, synthetic construct
  misc_feature 1..19: note = siRNA sense sequence
  source 1..19: mol_type = other RNA
tacctgtattgacattatg

SEQ ID NO: 35449 - RNA, 19 nt, synthetic construct
  misc_feature 1..19: note = siRNA antisense sequence
  source 1..19: mol_type = other RNA
cataatgtcaatacaggta

SEQ ID NO: 35450 - RNA, 19 nt, synthetic construct
  misc_feature 1..19: note = siRNA sense sequence
  source 1..19: mol_type = other RNA
acctgtattgacattatga

SEQ ID NO: 35451 - RNA, 19 nt, synthetic construct
  misc_feature 1..19: note = siRNA antisense sequence
  source 1..19: mol_type = other RNA
tcataatgtcaatacaggt

SEQ ID NO: 35452 - RNA, 19 nt, synthetic construct
  misc_feature 1..19: note = siRNA sense sequence
  source 1..19: mol_type = other RNA
cctgtattgacattatgaa

SEQ ID NO: 35453 - RNA, 19 nt, synthetic construct
  misc_feature 1..19: note = siRNA antisense sequence
  source 1..19: mol_type = other RNA
ttcataatgtcaatacagg

SEQ ID NO: 35454 - RNA, 19 nt, synthetic construct
  misc_feature 1..19: note = siRNA sense sequence
  source 1..19: mol_type = other RNA
ataccacgttacagagctg

SEQ ID NO: 35455 - RNA, 19 nt, synthetic construct
  misc_feature 1..19: note = siRNA antisense sequence
  source 1..19: mol_type = other RNA
cagctctgtaacgtggtat

SEQ ID NO: 35456 - RNA, 19 nt, synthetic construct
  misc_feature 1..19: note = siRNA sense sequence
  source 1..19: mol_type = other RNA
taccacgttacagagctgt

SEQ ID NO: 35457 - RNA, 19 nt, synthetic construct
  misc_feature 1..19: note = siRNA antisense sequence
  source 1..19: mol_type = other RNA
acagctctgtaacgtggta

SEQ ID NO: 35458 - RNA, 19 nt, synthetic construct
  misc_feature 1..19: note = siRNA sense sequence
  source 1..19: mol_type = other RNA
accacgttacagagctgtg

SEQ ID NO: 35459 - RNA, 19 nt, synthetic construct
  misc_feature 1..19: note = siRNA antisense sequence
  source 1..19: mol_type = other RNA
cacagctctgtaacgtggt

SEQ ID NO: 35460 - RNA, 19 nt, synthetic construct
  misc_feature 1..19: note = siRNA sense sequence
  source 1..19: mol_type = other RNA
ccacgttacagagctgtgc

SEQ ID NO: 35461 - RNA, 19 nt, synthetic construct
  misc_feature 1..19: note = siRNA antisense sequence
  source 1..19: mol_type = other RNA
gcacagctctgtaacgtgg

SEQ ID NO: 35462 - RNA, 19 nt, synthetic construct
  misc_feature 1..19: note = siRNA sense sequence
  source 1..19: mol_type = other RNA
cacgttacagagctgtgct

SEQ ID NO: 35463 - RNA, 19 nt, synthetic construct
  misc_feature 1..19: note = siRNA antisense sequence
  source 1..19: mol_type = other RNA
agcacagctctgtaacgtg

SEQ ID NO: 35464 - RNA, 19 nt, synthetic construct
  misc_feature 1..19: note = siRNA sense sequence
  source 1..19: mol_type = other RNA
acgttacagagctgtgctt

SEQ ID NO: 35465 - RNA, 19 nt, synthetic construct
  misc_feature 1..19: note = siRNA antisense sequence
  source 1..19: mol_type = other RNA
aagcacagctctgtaacgt

SEQ ID NO: 35466 - RNA, 19 nt, synthetic construct
  misc_feature 1..19: note = siRNA sense sequence
  source 1..19: mol_type = other RNA
cgttacagagctgtgcttt

SEQ ID NO: 35467 - RNA, 19 nt, synthetic construct
  misc_feature 1..19: note = siRNA antisense sequence
  source 1..19: mol_type = other RNA
aaagcacagctctgtaacg

SEQ ID NO: 35468 - RNA, 19 nt, synthetic construct
  misc_feature 1..19: note = siRNA sense sequence
  source 1..19: mol_type = other RNA
ttcagggaatgtggatagg

SEQ ID NO: 35469 - RNA, 19 nt, synthetic construct
  misc_feature 1..19: note = siRNA antisense sequence
  source 1..19: mol_type = other RNA
cctatccacattccctgaa

SEQ ID NO: 35470 - RNA, 19 nt, synthetic construct
  misc_feature 1..19: note = siRNA sense sequence
  source 1..19: mol_type = other RNA
cagggaatgtggatagggc

SEQ ID NO: 35471 - RNA, 19 nt, synthetic construct
  misc_feature 1..19: note = siRNA antisense sequence
  source 1..19: mol_type = other RNA
gccctatccacattccctg

SEQ ID NO: 35472 - RNA, 19 nt, synthetic construct
  misc_feature 1..19: note = siRNA sense sequence
  source 1..19: mol_type = other RNA
agggaatgtggatagggcc

SEQ ID NO: 35473 - RNA, 19 nt, synthetic construct
  misc_feature 1..19: note = siRNA antisense sequence
  source 1..19: mol_type = other RNA
ggccctatccacattccct

SEQ ID NO: 35474 - RNA, 19 nt, synthetic construct
  misc_feature 1..19: note = siRNA sense sequence
  source 1..19: mol_type = other RNA
gggaatgtggatagggcct

SEQ ID NO: 35475 - RNA, 19 nt, synthetic construct
  misc_feature 1..19: note = siRNA antisense sequence
  source 1..19: mol_type = other RNA
aggccctatccacattccc

SEQ ID NO: 35476 - RNA, 19 nt, synthetic construct
  misc_feature 1..19: note = siRNA sense sequence
  source 1..19: mol_type = other RNA
ggaatgtggatagggcctg

SEQ ID NO: 35477 - RNA, 19 nt, synthetic construct
  misc_feature 1..19: note = siRNA antisense sequence
  source 1..19: mol_type = other RNA
caggccctatccacattcc

SEQ ID NO: 35478 - RNA, 19 nt, synthetic construct
  misc_feature 1..19: note = siRNA sense sequence
  source 1..19: mol_type = other RNA
gaatgtggatagggcctga

SEQ ID NO: 35479 - RNA, 19 nt, synthetic construct
  misc_feature 1..19: note = siRNA antisense sequence
  source 1..19: mol_type = other RNA
tcaggccctatccacattc

SEQ ID NO: 35480 - RNA, 19 nt, synthetic construct
  misc_feature 1..19: note = siRNA sense sequence
  source 1..19: mol_type = other RNA
aatgtggatagggcctgag

SEQ ID NO: 35481 - RNA, 19 nt, synthetic construct
  misc_feature 1..19: note = siRNA antisense sequence
  source 1..19: mol_type = other RNA
ctcaggccctatccacatt

SEQ ID NO: 35482 - RNA, 19 nt, synthetic construct
  misc_feature 1..19: note = siRNA sense sequence
  source 1..19: mol_type = other RNA
atgtggatagggcctgagg

SEQ ID NO: 35483 - RNA, 19 nt, synthetic construct
  misc_feature 1..19: note = siRNA antisense sequence
  source 1..19: mol_type = other RNA
cctcaggccctatccacat

SEQ ID NO: 35484 - RNA, 19 nt, synthetic construct
  misc_feature 1..19: note = siRNA sense sequence
  source 1..19: mol_type = other RNA
tgtggatagggcctgaggt

SEQ ID NO: 35485 - RNA, 19 nt, synthetic construct
  misc_feature 1..19: note = siRNA antisense sequence
  source 1..19: mol_type = other RNA
acctcaggccctatccaca

SEQ ID NO: 35486 - RNA, 19 nt, synthetic construct
  misc_feature 1..19: note = siRNA sense sequence
  source 1..19: mol_type = other RNA
gtggatagggcctgaggtt

SEQ ID NO: 35487 - RNA, 19 nt, synthetic construct
  misc_feature 1..19: note = siRNA antisense sequence
  source 1..19: mol_type = other RNA
aacctcaggccctatccac

SEQ ID NO: 35488 - RNA, 19 nt, synthetic construct
  misc_feature 1..19: note = siRNA sense sequence
  source 1..19: mol_type = other RNA
tggatagggcctgaggttc

SEQ ID NO: 35489 - RNA, 19 nt, synthetic construct
  misc_feature 1..19: note = siRNA antisense sequence
  source 1..19: mol_type = other RNA
gaacctcaggccctatcca

SEQ ID NO: 35490 - RNA, 19 nt, synthetic construct
  misc_feature 1..19: note = siRNA sense sequence
  source 1..19: mol_type = other RNA
ctgaggttctgcattattc

SEQ ID NO: 35491 - RNA, 19 nt, synthetic construct
  misc_feature 1..19: note = siRNA antisense sequence
  source 1..19: mol_type = other RNA
gaataatgcagaacctcag

SEQ ID NO: 35492 - RNA, 19 nt, synthetic construct
  misc_feature 1..19: note = siRNA sense sequence
  source 1..19: mol_type = other RNA
tgaggttctgcattattca

SEQ ID NO: 35493 - RNA, 19 nt, synthetic construct
  misc_feature 1..19: note = siRNA antisense sequence
  source 1..19: mol_type = other RNA
tgaataatgcagaacctca

SEQ ID NO: 35494 - RNA, 19 nt, synthetic construct
  misc_feature 1..19: note = siRNA sense sequence
  source 1..19: mol_type = other RNA
tacagatgctgctggttta

SEQ ID NO: 35495 - RNA, 19 nt, synthetic construct
  misc_feature 1..19: note = siRNA antisense sequence
  source 1..19: mol_type = other RNA
taaaccagcagcatctgta

SEQ ID NO: 35496 - RNA, 19 nt, synthetic construct
  misc_feature 1..19: note = siRNA sense sequence
  source 1..19: mol_type = other RNA
acagatgctgctggtttat

SEQ ID NO: 35497 - RNA, 19 nt, synthetic construct
  misc_feature 1..19: note = siRNA antisense sequence
  source 1..19: mol_type = other RNA
ataaaccagcagcatctgt

SEQ ID NO: 35498 - RNA, 19 nt, synthetic construct
  misc_feature 1..19: note = siRNA sense sequence
  source 1..19: mol_type = other RNA
gatgctgctggtttatgag

SEQ ID NO: 35499 - RNA, 19 nt, synthetic construct
  misc_feature 1..19: note = siRNA antisense sequence
  source 1..19: mol_type = other RNA
ctcataaaccagcagcatc

SEQ ID NO: 35500 - RNA, 19 nt, synthetic construct
  misc_feature 1..19: note = siRNA sense sequence
  source 1..19: mol_type = other RNA
tgctggtttatgagccgtg

SEQ ID NO: 35501 - RNA, 19 nt, synthetic construct
  misc_feature 1..19: note = siRNA antisense sequence
  source 1..19: mol_type = other RNA
cacggctcataaaccagca

SEQ ID NO: 35502 - RNA, 19 nt, synthetic construct
  misc_feature 1..19: note = siRNA sense sequence
  source 1..19: mol_type = other RNA
gctggtttatgagccgtgg

SEQ ID NO: 35503 - RNA, 19 nt, synthetic construct
  misc_feature 1..19: note = siRNA antisense sequence
  source 1..19: mol_type = other RNA
ccacggctcataaaccagc

SEQ ID NO: 35504 - RNA, 19 nt, synthetic construct
  misc_feature 1..19: note = siRNA sense sequence
  source 1..19: mol_type = other RNA
ctggtttatgagccgtggt

SEQ ID NO: 35505 - RNA, 19 nt, synthetic construct
  misc_feature 1..19: note = siRNA antisense sequence
  source 1..19: mol_type = other RNA
accacggctcataaaccag

SEQ ID NO: 35506 - RNA, 19 nt, synthetic construct
  misc_feature 1..19: note = siRNA sense sequence
  source 1..19: mol_type = other RNA
tggtttatgagccgtggtt

SEQ ID NO: 35507 - RNA, 19 nt, synthetic construct
  misc_feature 1..19: note = siRNA antisense sequence
  source 1..19: mol_type = other RNA
aaccacggctcataaacca

SEQ ID NO: 35508 - RNA, 19 nt, synthetic construct
  misc_feature 1..19: note = siRNA sense sequence
  source 1..19: mol_type = other RNA
ggtttatgagccgtggttg

SEQ ID NO: 35509 - RNA, 19 nt, synthetic construct
  misc_feature 1..19: note = siRNA antisense sequence
  source 1..19: mol_type = other RNA
caaccacggctcataaacc

SEQ ID NO: 35510 - RNA, 19 nt, synthetic construct
  misc_feature 1..19: note = siRNA sense sequence
  source 1..19: mol_type = other RNA
gtttatgagccgtggttgg

SEQ ID NO: 35511 - RNA, 19 nt, synthetic construct
  misc_feature 1..19: note = siRNA antisense sequence
  source 1..19: mol_type = other RNA
ccaaccacggctcataaac

SEQ ID NO: 35512 - RNA, 19 nt, synthetic construct
  misc_feature 1..19: note = siRNA sense sequence
  source 1..19: mol_type = other RNA
tttatgagccgtggttggt

SEQ ID NO: 35513 - RNA, 19 nt, synthetic construct
  misc_feature 1..19: note = siRNA antisense sequence
  source 1..19: mol_type = other RNA
accaaccacggctcataaa

SEQ ID NO: 35514 - RNA, 19 nt, synthetic construct
  misc_feature 1..19: note = siRNA sense sequence
  source 1..19: mol_type = other RNA
ttatgagccgtggttggtt

SEQ ID NO: 35515 - RNA, 19 nt, synthetic construct
  misc_feature 1..19: note = siRNA antisense sequence
  source 1..19: mol_type = other RNA
aaccaaccacggctcataa

SEQ ID NO: 35516 - RNA, 19 nt, synthetic construct
  misc_feature 1..19: note = siRNA sense sequence
  source 1..19: mol_type = other RNA
tatgagccgtggttggttt

SEQ ID NO: 35517 - RNA, 19 nt, synthetic construct
  misc_feature 1..19: note = siRNA antisense sequence
  source 1..19: mol_type = other RNA
aaaccaaccacggctcata

SEQ ID NO: 35518 - RNA, 19 nt, synthetic construct
  misc_feature 1..19: note = siRNA sense sequence
  source 1..19: mol_type = other RNA
atgagccgtggttggtttt

SEQ ID NO: 35519 - RNA, 19 nt, synthetic construct
  misc_feature 1..19: note = siRNA antisense sequence
  source 1..19: mol_type = other RNA
aaaaccaaccacggctcat

SEQ ID NO: 35520 - RNA, 19 nt, synthetic construct
  misc_feature 1..19: note = siRNA sense sequence
  source 1..19: mol_type = other RNA
tgagccgtggttggttttc

SEQ ID NO: 35521 - RNA, 19 nt, synthetic construct
  misc_feature 1..19: note = siRNA antisense sequence
  source 1..19: mol_type = other RNA
gaaaaccaaccacggctca

SEQ ID NO: 35522 - RNA, 19 nt, synthetic construct
  misc_feature 1..19: note = siRNA sense sequence
  source 1..19: mol_type = other RNA
gagccgtggttggttttcg

SEQ ID NO: 35523 - RNA, 19 nt, synthetic construct
  misc_feature 1..19: note = siRNA antisense sequence
  source 1..19: mol_type = other RNA
cgaaaaccaaccacggctc

SEQ ID NO: 35524 - RNA, 19 nt, synthetic construct
  misc_feature 1..19: note = siRNA sense sequence
  source 1..19: mol_type = other RNA
agccgtggttggttttcgg

SEQ ID NO: 35525 - RNA, 19 nt, synthetic construct
  misc_feature 1..19: note = siRNA antisense sequence
  source 1..19: mol_type = other RNA
ccgaaaaccaaccacggct

SEQ ID NO: 35526 - RNA, 19 nt, synthetic construct
  misc_feature 1..19: note = siRNA sense sequence
  source 1..19: mol_type = other RNA
gccgtggttggttttcggt

SEQ ID NO: 35527 - RNA, 19 nt, synthetic construct
  misc_feature 1..19: note = siRNA antisense sequence
  source 1..19: mol_type = other RNA
accgaaaaccaaccacggc

SEQ ID NO: 35528 - RNA, 19 nt, synthetic construct
  misc_feature 1..19: note = siRNA sense sequence
  source 1..19: mol_type = other RNA
tggttggttttcggtcatc

SEQ ID NO: 35529 - RNA, 19 nt, synthetic construct
  misc_feature 1..19: note = siRNA antisense sequence
  source 1..19: mol_type = other RNA
gatgaccgaaaaccaacca

SEQ ID NO: 35530 - RNA, 19 nt, synthetic construct
  misc_feature 1..19: note = siRNA sense sequence
  source 1..19: mol_type = other RNA
ggttggttttcggtcatct

SEQ ID NO: 35531 - RNA, 19 nt, synthetic construct
  misc_feature 1..19: note = siRNA antisense sequence
  source 1..19: mol_type = other RNA
agatgaccgaaaaccaacc

SEQ ID NO: 35532 - RNA, 19 nt, synthetic construct
  misc_feature 1..19: note = siRNA sense sequence
  source 1..19: mol_type = other RNA
gttggttttcggtcatctt

SEQ ID NO: 35533 - RNA, 19 nt, synthetic construct
  misc_feature 1..19: note = siRNA antisense sequence
  source 1..19: mol_type = other RNA
aagatgaccgaaaaccaac

SEQ ID NO: 35534 - RNA, 19 nt, synthetic construct
  misc_feature 1..19: note = siRNA sense sequence
  source 1..19: mol_type = other RNA
ttggttttcggtcatcttc

SEQ ID NO: 35535 - RNA, 19 nt, synthetic construct
  misc_feature 1..19: note = siRNA antisense sequence
  source 1..19: mol_type = other RNA
gaagatgaccgaaaaccaa

SEQ ID NO: 35536 - RNA, 19 nt, synthetic construct
  misc_feature 1..19: note = siRNA sense sequence
  source 1..19: mol_type = other RNA
tggttttcggtcatcttct

SEQ ID NO: 35537 - RNA, 19 nt, synthetic construct
  misc_feature 1..19: note = siRNA antisense sequence
  source 1..19: mol_type = other RNA
agaagatgaccgaaaacca

SEQ ID NO: 35538 - RNA, 19 nt, synthetic construct
  misc_feature 1..19: note = siRNA sense sequence
  source 1..19: mol_type = other RNA
ggttttcggtcatcttctt

SEQ ID NO: 35539 - RNA, 19 nt, synthetic construct
  misc_feature 1..19: note = siRNA antisense sequence
  source 1..19: mol_type = other RNA
aagaagatgaccgaaaacc

SEQ ID NO: 35540 - RNA, 19 nt, synthetic construct
  misc_feature 1..19: note = siRNA sense sequence
  source 1..19: mol_type = other RNA
gttttcggtcatcttcttc

SEQ ID NO: 35541 - RNA, 19 nt, synthetic construct
  misc_feature 1..19: note = siRNA antisense sequence
  source 1..19: mol_type = other RNA
gaagaagatgaccgaaaac

SEQ ID NO: 35542 - RNA, 19 nt, synthetic construct
  misc_feature 1..19: note = siRNA sense sequence
  source 1..19: mol_type = other RNA
aaaataattggtggtgatg

SEQ ID NO: 35543 - RNA, 19 nt, synthetic construct
  misc_feature 1..19: note = siRNA antisense sequence
  source 1..19: mol_type = other RNA
catcaccaccaattatttt

SEQ ID NO: 35544 - RNA, 19 nt, synthetic construct
  misc_feature 1..19: note = siRNA sense sequence
  source 1..19: mol_type = other RNA
aaataattggtggtgatgt

SEQ ID NO: 35545 - RNA, 19 nt, synthetic construct
  misc_feature 1..19: note = siRNA antisense sequence
  source 1..19: mol_type = other RNA
acatcaccaccaattattt

SEQ ID NO: 35546 - RNA, 19 nt, synthetic construct
  misc_feature 1..19: note = siRNA sense sequence
  source 1..19: mol_type = other RNA
aataattggtggtgatgtt

SEQ ID NO: 35547 - RNA, 19 nt, synthetic construct
  misc_feature 1..19: note = siRNA antisense sequence
  source 1..19: mol_type = other RNA
aacatcaccaccaattatt

SEQ ID NO: 35548 - RNA, 19 nt, synthetic construct
  misc_feature 1..19: note = siRNA sense sequence
  source 1..19: mol_type = other RNA
taattggtggtgatgttct

SEQ ID NO: 35549 - RNA, 19 nt, synthetic construct
  misc_feature 1..19: note = siRNA antisense sequence
  source 1..19: mol_type = other RNA
agaacatcaccaccaatta

SEQ ID NO: 35550 - RNA, 19 nt, synthetic construct
  misc_feature 1..19: note = siRNA sense sequence
  source 1..19: mol_type = other RNA
aattggtggtgatgttctt

SEQ ID NO: 35551 - RNA, 19 nt, synthetic construct
  misc_feature 1..19: note = siRNA antisense sequence
  source 1..19: mol_type = other RNA
aagaacatcaccaccaatt

SEQ ID NO: 35552 - RNA, 19 nt, synthetic construct
  misc_feature 1..19: note = siRNA sense sequence
  source 1..19: mol_type = other RNA
attggtggtgatgttcttg

SEQ ID NO: 35553 - RNA, 19 nt, synthetic construct
  misc_feature 1..19: note = siRNA antisense sequence
  source 1..19: mol_type = other RNA
caagaacatcaccaccaat

SEQ ID NO: 35554 - RNA, 19 nt, synthetic construct
  misc_feature 1..19: note = siRNA sense sequence
  source 1..19: mol_type = other RNA
ttggtggtgatgttcttgt

SEQ ID NO: 35555 - RNA, 19 nt, synthetic construct
  misc_feature 1..19: note = siRNA antisense sequence
  source 1..19: mol_type = other RNA
acaagaacatcaccaccaa

SEQ ID NO: 35556 - RNA, 19 nt, synthetic construct
  misc_feature 1..19: note = siRNA sense sequence
  source 1..19: mol_type = other RNA
tggtggtgatgttcttgtc

SEQ ID NO: 35557 - RNA, 19 nt, synthetic construct
  misc_feature 1..19: note = siRNA antisense sequence
  source 1..19: mol_type = other RNA
gacaagaacatcaccacca

SEQ ID NO: 35558 - RNA, 19 nt, synthetic construct
  misc_feature 1..19: note = siRNA sense sequence
  source 1..19: mol_type = other RNA
gtggtgatgttcttgtctt

SEQ ID NO: 35559 - RNA, 19 nt, synthetic construct
  misc_feature 1..19: note = siRNA antisense sequence
  source 1..19: mol_type = other RNA
aagacaagaacatcaccac

SEQ ID NO: 35560 - RNA, 19 nt, synthetic construct
  misc_feature 1..19: note = siRNA sense sequence
  source 1..19: mol_type = other RNA
tggtgatgttcttgtcttc

SEQ ID NO: 35561 - RNA, 19 nt, synthetic construct
  misc_feature 1..19: note = siRNA antisense sequence
  source 1..19: mol_type = other RNA
gaagacaagaacatcacca

SEQ ID NO: 35562 - RNA, 19 nt, synthetic construct
  misc_feature 1..19: note = siRNA sense sequence
  source 1..19: mol_type = other RNA
atgttcttgtcttcatctg

SEQ ID NO: 35563 - RNA, 19 nt, synthetic construct
  misc_feature 1..19: note = siRNA antisense sequence
  source 1..19: mol_type = other RNA
cagatgaagacaagaacat

SEQ ID NO: 35564 - RNA, 19 nt, synthetic construct
  misc_feature 1..19: note = siRNA sense sequence
  source 1..19: mol_type = other RNA
gttcttgtcttcatctgtt

SEQ ID NO: 35565 - RNA, 19 nt, synthetic construct
  misc_feature 1..19: note = siRNA antisense sequence
  source 1..19: mol_type = other RNA
aacagatgaagacaagaac

SEQ ID NO: 35566 - RNA, 19 nt, synthetic construct
  misc_feature 1..19: note = siRNA sense sequence
  source 1..19: mol_type = other RNA
cttgtcttcatctgttcaa

SEQ ID NO: 35567 - RNA, 19 nt, synthetic construct
  misc_feature 1..19: note = siRNA antisense sequence
  source 1..19: mol_type = other RNA
ttgaacagatgaagacaag

SEQ ID NO: 35568 - RNA, 19 nt, synthetic construct
  misc_feature 1..19: note = siRNA sense sequence
  source 1..19: mol_type = other RNA
ttgtcttcatctgttcaag

SEQ ID NO: 35569 - RNA, 19 nt, synthetic construct
  misc_feature 1..19: note = siRNA antisense sequence
  source 1..19: mol_type = other RNA
cttgaacagatgaagacaa

SEQ ID NO: 35570 - RNA, 19 nt, synthetic construct
  misc_feature 1..19: note = siRNA sense sequence
  source 1..19: mol_type = other RNA
cttcatctgttcaagagtg

SEQ ID NO: 35571 - RNA, 19 nt, synthetic construct
  misc_feature 1..19: note = siRNA antisense sequence
  source 1..19: mol_type = other RNA
cactcttgaacagatgaag

SEQ ID NO: 35572 - RNA, 19 nt, synthetic construct
  misc_feature 1..19: note = siRNA sense sequence
  source 1..19: mol_type = other RNA
ttcatctgttcaagagtgg

SEQ ID NO: 35573 - RNA, 19 nt, synthetic construct
  misc_feature 1..19: note = siRNA antisense sequence
  source 1..19: mol_type = other RNA
ccactcttgaacagatgaa

SEQ ID NO: 35574 - RNA, 19 nt, synthetic construct
  misc_feature 1..19: note = siRNA sense sequence
  source 1..19: mol_type = other RNA
tcatctgttcaagagtggt

SEQ ID NO: 35575 - RNA, 19 nt, synthetic construct
  misc_feature 1..19: note = siRNA antisense sequence
  source 1..19: mol_type = other RNA
accactcttgaacagatga

SEQ ID NO: 35576 - RNA, 19 nt, synthetic construct
  misc_feature 1..19: note = siRNA sense sequence
  source 1..19: mol_type = other RNA
catctgttcaagagtggtt

SEQ ID NO: 35577 - RNA, 19 nt, synthetic construct
  misc_feature 1..19: note = siRNA antisense sequence
  source 1..19: mol_type = other RNA
aaccactcttgaacagatg

SEQ ID NO: 35578 - RNA, 19 nt, synthetic construct
  misc_feature 1..19: note = siRNA sense sequence
  source 1..19: mol_type = other RNA
atctgttcaagagtggttt

SEQ ID NO: 35579 - RNA, 19 nt, synthetic construct
  misc_feature 1..19: note = siRNA antisense sequence
  source 1..19: mol_type = other RNA
aaaccactcttgaacagat

SEQ ID NO: 35580 - RNA, 19 nt, synthetic construct
  misc_feature 1..19: note = siRNA sense sequence
  source 1..19: mol_type = other RNA
tctgttcaagagtggtttt

SEQ ID NO: 35581 - RNA, 19 nt, synthetic construct
  misc_feature 1..19: note = siRNA antisense sequence
  source 1..19: mol_type = other RNA
aaaaccactcttgaacaga

SEQ ID NO: 35582 - RNA, 19 nt, synthetic construct
  misc_feature 1..19: note = siRNA sense sequence
  source 1..19: mol_type = other RNA
ctgttcaagagtggttttc

SEQ ID NO: 35583 - RNA, 19 nt, synthetic construct
  misc_feature 1..19: note = siRNA antisense sequence
  source 1..19: mol_type = other RNA
gaaaaccactcttgaacag

SEQ ID NO: 35584 - RNA, 19 nt, synthetic construct
  misc_feature 1..19: note = siRNA sense sequence
  source 1..19: mol_type = other RNA
tgttcaagagtggttttca

SEQ ID NO: 35585 - RNA, 19 nt, synthetic construct
  misc_feature 1..19: note = siRNA antisense sequence
  source 1..19: mol_type = other RNA
tgaaaaccactcttgaaca

SEQ ID NO: 35586 - RNA, 19 nt, synthetic construct
  misc_feature 1..19: note = siRNA sense sequence
  source 1..19: mol_type = other RNA
ttcaagagtggttttcaac

SEQ ID NO: 35587 - RNA, 19 nt, synthetic construct
  misc_feature 1..19: note = siRNA antisense sequence
  source 1..19: mol_type = other RNA
gttgaaaaccactcttgaa

SEQ ID NO: 35588 - RNA, 19 nt, synthetic construct
  misc_feature 1..19: note = siRNA sense sequence
  source 1..19: mol_type = other RNA
tcaagagtggttttcaact

SEQ ID NO: 35589 - RNA, 19 nt, synthetic construct
  misc_feature 1..19: note = siRNA antisense sequence
  source 1..19: mol_type = other RNA
agttgaaaaccactcttga

SEQ ID NO: 35590 - RNA, 19 nt, synthetic construct
  misc_feature 1..19: note = siRNA sense sequence
  source 1..19: mol_type = other RNA
caagagtggttttcaactg

SEQ ID NO: 35591 - RNA, 19 nt, synthetic construct
  misc_feature 1..19: note = siRNA antisense sequence
  source 1..19: mol_type = other RNA
cagttgaaaaccactcttg

SEQ ID NO: 35592 - RNA, 19 nt, synthetic construct
  misc_feature 1..19: note = siRNA sense sequence
  source 1..19: mol_type = other RNA
caattttggcctcatggga

SEQ ID NO: 35593 - RNA, 19 nt, synthetic construct
  misc_feature 1..19: note = siRNA antisense sequence
  source 1..19: mol_type = other RNA
tcccatgaggccaaaattg

SEQ ID NO: 35594 - RNA, 19 nt, synthetic construct
  misc_feature 1..19: note = siRNA sense sequence
  source 1..19: mol_type = other RNA
aattttggcctcatgggaa

SEQ ID NO: 35595 - RNA, 19 nt, synthetic construct
  misc_feature 1..19: note = siRNA antisense sequence
  source 1..19: mol_type = other RNA
ttcccatgaggccaaaatt

SEQ ID NO: 35596 - RNA, 19 nt, synthetic construct
  misc_feature 1..19: note = siRNA sense sequence
  source 1..19: mol_type = other RNA
ttttggcctcatgggaatt

SEQ ID NO: 35597 - RNA, 19 nt, synthetic construct
  misc_feature 1..19: note = siRNA antisense sequence
  source 1..19: mol_type = other RNA
aattcccatgaggccaaaa

SEQ ID NO: 35598 - RNA, 19 nt, synthetic construct
  misc_feature 1..19: note = siRNA sense sequence
  source 1..19: mol_type = other RNA
gcctcatgggaatttggct

SEQ ID NO: 35599 - RNA, 19 nt, synthetic construct
  misc_feature 1..19: note = siRNA antisense sequence
  source 1..19: mol_type = other RNA
agccaaattcccatgaggc

SEQ ID NO: 35600 - RNA, 19 nt, synthetic construct
  misc_feature 1..19: note = siRNA sense sequence
  source 1..19: mol_type = other RNA
cctcatgggaatttggctg

SEQ ID NO: 35601 - RNA, 19 nt, synthetic construct
  misc_feature 1..19: note = siRNA antisense sequence
  source 1..19: mol_type = other RNA
cagccaaattcccatgagg

SEQ ID NO: 35602 - RNA, 19 nt, synthetic construct
  misc_feature 1..19: note = siRNA sense sequence
  source 1..19: mol_type = other RNA
ctcatgggaatttggctgt

SEQ ID NO: 35603 - RNA, 19 nt, synthetic construct
  misc_feature 1..19: note = siRNA antisense sequence
  source 1..19: mol_type = other RNA
acagccaaattcccatgag

SEQ ID NO: 35604 - RNA, 19 nt, synthetic construct
  misc_feature 1..19: note = siRNA sense sequence
  source 1..19: mol_type = other RNA
tcatgggaatttggctgtg

SEQ ID NO: 35605 - RNA, 19 nt, synthetic construct
  misc_feature 1..19: note = siRNA antisense sequence
  source 1..19: mol_type = other RNA
cacagccaaattcccatga

SEQ ID NO: 35606 - RNA, 19 nt, synthetic construct
  misc_feature 1..19: note = siRNA sense sequence
  source 1..19: mol_type = other RNA
catgggaatttggctgtgt

SEQ ID NO: 35607 - RNA, 19 nt, synthetic construct
  misc_feature 1..19: note = siRNA antisense sequence
  source 1..19: mol_type = other RNA
acacagccaaattcccatg

SEQ ID NO: 35608 - RNA, 19 nt, synthetic construct
  misc_feature 1..19: note = siRNA sense sequence
  source 1..19: mol_type = other RNA
tgggaatttggctgtgtct

SEQ ID NO: 35609 - RNA, 19 nt, synthetic construct
  misc_feature 1..19: note = siRNA antisense sequence
  source 1..19: mol_type = other RNA
agacacagccaaattccca

SEQ ID NO: 35610 - RNA, 19 nt, synthetic construct
  misc_feature 1..19: note = siRNA sense sequence
  source 1..19: mol_type = other RNA
gggaatttggctgtgtctg

SEQ ID NO: 35611 - RNA, 19 nt, synthetic construct
  misc_feature 1..19: note = siRNA antisense sequence
  source 1..19: mol_type = other RNA
cagacacagccaaattccc

SEQ ID NO: 35612 - RNA, 19 nt, synthetic construct
  misc_feature 1..19: note = siRNA sense sequence
  source 1..19: mol_type = other RNA
ggaatttggctgtgtctgg

SEQ ID NO: 35613 - RNA, 19 nt, synthetic construct
  misc_feature 1..19: note = siRNA antisense sequence
  source 1..19: mol_type = other RNA
ccagacacagccaaattcc

SEQ ID NO: 35614 - RNA, 19 nt, synthetic construct
  misc_feature 1..19: note = siRNA sense sequence
  source 1..19: mol_type = other RNA
gaatttggctgtgtctgga

SEQ ID NO: 35615 - RNA, 19 nt, synthetic construct
  misc_feature 1..19: note = siRNA antisense sequence
  source 1..19: mol_type = other RNA
tccagacacagccaaattc

SEQ ID NO: 35616 - RNA, 19 nt, synthetic construct
  misc_feature 1..19: note = siRNA sense sequence
  source 1..19: mol_type = other RNA
catgaagtgctattggctt

SEQ ID NO: 35617 - RNA, 19 nt, synthetic construct
  misc_feature 1..19: note = siRNA antisense sequence
  source 1..19: mol_type = other RNA
aagccaatagcacttcatg

SEQ ID NO: 35618 - RNA, 19 nt, synthetic construct
  misc_feature 1..19: note = siRNA sense sequence
  source 1..19: mol_type = other RNA
agtgctattggcttcatgt

SEQ ID NO: 35619 - RNA, 19 nt, synthetic construct
  misc_feature 1..19: note = siRNA antisense sequence
  source 1..19: mol_type = other RNA
acatgaagccaatagcact

SEQ ID NO: 35620 - RNA, 19 nt, synthetic construct
  misc_feature 1..19: note = siRNA sense sequence
  source 1..19: mol_type = other RNA
gctattggcttcatgtggg

SEQ ID NO: 35621 - RNA, 19 nt, synthetic construct
  misc_feature 1..19: note = siRNA antisense sequence
  source 1..19: mol_type = other RNA
cccacatgaagccaatagc

SEQ ID NO: 35622 - RNA, 19 nt, synthetic construct
  misc_feature 1..19: note = siRNA sense sequence
  source 1..19: mol_type = other RNA
ctattggcttcatgtgggt

SEQ ID NO: 35623 - RNA, 19 nt, synthetic construct
  misc_feature 1..19: note = siRNA antisense sequence
  source 1..19: mol_type = other RNA
acccacatgaagccaatag

SEQ ID NO: 35624 - RNA, 19 nt, synthetic construct
  misc_feature 1..19: note = siRNA sense sequence
  source 1..19: mol_type = other RNA
tattggcttcatgtgggta

SEQ ID NO: 35625 - RNA, 19 nt, synthetic construct
  misc_feature 1..19: note = siRNA antisense sequence
  source 1..19: mol_type = other RNA
tacccacatgaagccaata

SEQ ID NO: 35626 - RNA, 19 nt, synthetic construct
  misc_feature 1..19: note = siRNA sense sequence
  source 1..19: mol_type = other RNA
attggcttcatgtgggtag

SEQ ID NO: 35627 - RNA, 19 nt, synthetic construct
  misc_feature 1..19: note = siRNA antisense sequence
  source 1..19: mol_type = other RNA
ctacccacatgaagccaat

SEQ ID NO: 35628 - RNA, 19 nt, synthetic construct
  misc_feature 1..19: note = siRNA sense sequence
  source 1..19: mol_type = other RNA
ttggcttcatgtgggtagg

SEQ ID NO: 35629 - RNA, 19 nt, synthetic construct
  misc_feature 1..19: note = siRNA antisense sequence
  source 1..19: mol_type = other RNA
cctacccacatgaagccaa

SEQ ID NO: 35630 - RNA, 19 nt, synthetic construct
  misc_feature 1..19: note = siRNA sense sequence
  source 1..19: mol_type = other RNA
tggcttcatgtgggtaggg

SEQ ID NO: 35631 - RNA, 19 nt, synthetic construct
  misc_feature 1..19: note = siRNA antisense sequence
  source 1..19: mol_type = other RNA
ccctacccacatgaagcca

SEQ ID NO: 35632 - RNA, 19 nt, synthetic construct
  misc_feature 1..19: note = siRNA sense sequence
  source 1..19: mol_type = other RNA
acactctatagtataaagg

SEQ ID NO: 35633 - RNA, 19 nt, synthetic construct
  misc_feature 1..19: note = siRNA antisense sequence
  source 1..19: mol_type = other RNA
cctttatactatagagtgt

SEQ ID NO: 35634 - RNA, 19 nt, synthetic construct
  misc_feature 1..19: note = siRNA sense sequence
  source 1..19: mol_type = other RNA
cactctatagtataaagga

SEQ ID NO: 35635 - RNA, 19 nt, synthetic construct
  misc_feature 1..19: note = siRNA antisense sequence
  source 1..19: mol_type = other RNA
tcctttatactatagagtg

SEQ ID NO: 35636 - RNA, 19 nt, synthetic construct
  misc_feature 1..19: note = siRNA sense sequence
  source 1..19: mol_type = other RNA
tatagtataaaggatagcc

SEQ ID NO: 35637 - RNA, 19 nt, synthetic construct
  misc_feature 1..19: note = siRNA antisense sequence
  source 1..19: mol_type = other RNA
ggctatcctttatactata

SEQ ID NO: 35638 - RNA, 19 nt, synthetic construct
  misc_feature 1..19: note = siRNA sense sequence
  source 1..19: mol_type = other RNA
atagtataaaggatagccc

SEQ ID NO: 35639 - RNA, 19 nt, synthetic construct
  misc_feature 1..19: note = siRNA antisense sequence
  source 1..19: mol_type = other RNA
gggctatcctttatactat

SEQ ID NO: 35640 - RNA, 19 nt, synthetic construct
  misc_feature 1..19: note = siRNA sense sequence
  source 1..19: mol_type = other RNA
caagaattttctgacccaa

SEQ ID NO: 35641 - RNA, 19 nt, synthetic construct
  misc_feature 1..19: note = siRNA antisense sequence
  source 1..19: mol_type = other RNA
ttgggtcagaaaattcttg

SEQ ID NO: 35642 - RNA, 19 nt, synthetic construct
  misc_feature 1..19: note = siRNA sense sequence
  source 1..19: mol_type = other RNA
tgaatagttccaaagttga

SEQ ID NO: 35643 - RNA, 19 nt, synthetic construct
  misc_feature 1..19: note = siRNA antisense sequence
  source 1..19: mol_type = other RNA
tcaactttggaactattca

SEQ ID NO: 35644 - RNA, 19 nt, synthetic construct
  misc_feature 1..19: note = siRNA sense sequence
  source 1..19: mol_type = other RNA
gaatagttccaaagttgag

SEQ ID NO: 35645 - RNA, 19 nt, synthetic construct
  misc_feature 1..19: note = siRNA antisense sequence
  source 1..19: mol_type = other RNA
ctcaactttggaactattc

SEQ ID NO: 35646 - RNA, 19 nt, synthetic construct
  misc_feature 1..19: note = siRNA sense sequence
  source 1..19: mol_type = other RNA
agagcaaagaataggagca

SEQ ID NO: 35647 - RNA, 19 nt, synthetic construct
  misc_feature 1..19: note = siRNA antisense sequence
  source 1..19: mol_type = other RNA
tgctcctattctttgctct

SEQ ID NO: 35648 - RNA, 19 nt, synthetic construct
  misc_feature 1..19: note = siRNA sense sequence
  source 1..19: mol_type = other RNA
gagcaaagaataggagcat

SEQ ID NO: 35649 - RNA, 19 nt, synthetic construct
  misc_feature 1..19: note = siRNA antisense sequence
  source 1..19: mol_type = other RNA
atgctcctattctttgctc

SEQ ID NO: 35650 - RNA, 19 nt, synthetic construct
  misc_feature 1..19: note = siRNA sense sequence
  source 1..19: mol_type = other RNA
agcaaagaataggagcatc

SEQ ID NO: 35651 - RNA, 19 nt, synthetic construct
  misc_feature 1..19: note = siRNA antisense sequence
  source 1..19: mol_type = other RNA
gatgctcctattctttgct

SEQ ID NO: 35652 - RNA, 19 nt, synthetic construct
  misc_feature 1..19: note = siRNA sense sequence
  source 1..19: mol_type = other RNA
gcaaagaataggagcatct

SEQ ID NO: 35653 - RNA, 19 nt, synthetic construct
  misc_feature 1..19: note = siRNA antisense sequence
  source 1..19: mol_type = other RNA
agatgctcctattctttgc

SEQ ID NO: 35654 - RNA, 19 nt, synthetic construct
  misc_feature 1..19: note = siRNA sense sequence
  source 1..19: mol_type = other RNA
caaagaataggagcatcta

SEQ ID NO: 35655 - RNA, 19 nt, synthetic construct
  misc_feature 1..19: note = siRNA antisense sequence
  source 1..19: mol_type = other RNA
tagatgctcctattctttg

SEQ ID NO: 35656 - RNA, 19 nt, synthetic construct
  misc_feature 1..19: note = siRNA sense sequence
  source 1..19: mol_type = other RNA
aataggagcatctactaca

SEQ ID NO: 35657 - RNA, 19 nt, synthetic construct
  misc_feature 1..19: note = siRNA antisense sequence
  source 1..19: mol_type = other RNA
tgtagtagatgctcctatt

SEQ ID NO: 35658 - RNA, 19 nt, synthetic construct
  misc_feature 1..19: note = siRNA sense sequence
  source 1..19: mol_type = other RNA
ataggagcatctactacag

SEQ ID NO: 35659 - RNA, 19 nt, synthetic construct
  misc_feature 1..19: note = siRNA antisense sequence
  source 1..19: mol_type = other RNA
ctgtagtagatgctcctat

SEQ ID NO: 35660 - RNA, 19 nt, synthetic construct
  misc_feature 1..19: note = siRNA sense sequence
  source 1..19: mol_type = other RNA
taggagcatctactacagt

SEQ ID NO: 35661 - RNA, 19 nt, synthetic construct
  misc_feature 1..19: note = siRNA antisense sequence
  source 1..19: mol_type = other RNA
actgtagtagatgctccta

SEQ ID NO: 35662 - RNA, 19 nt, synthetic construct
  misc_feature 1..19: note = siRNA sense sequence
  source 1..19: mol_type = other RNA
aggagcatctactacagtc

SEQ ID NO: 35663 - RNA, 19 nt, synthetic construct
  misc_feature 1..19: note = siRNA antisense sequence
  source 1..19: mol_type = other RNA
gactgtagtagatgctcct

SEQ ID NO: 35664 - RNA, 19 nt, synthetic construct
  misc_feature 1..19: note = siRNA sense sequence
  source 1..19: mol_type = other RNA
ggagcatctactacagtca

SEQ ID NO: 35665 - RNA, 19 nt, synthetic construct
  misc_feature 1..19: note = siRNA antisense sequence
  source 1..19: mol_type = other RNA
tgactgtagtagatgctcc

SEQ ID NO: 35666 - RNA, 19 nt, synthetic construct
  misc_feature 1..19: note = siRNA sense sequence
  source 1..19: mol_type = other RNA
agcatctactacagtcatg

SEQ ID NO: 35667 - RNA, 19 nt, synthetic construct
  misc_feature 1..19: note = siRNA antisense sequence
  source 1..19: mol_type = other RNA
catgactgtagtagatgct

SEQ ID NO: 35668 - RNA, 19 nt, synthetic construct
  misc_feature 1..19: note = siRNA sense sequence
  source 1..19: mol_type = other RNA
catctactacagtcatgca

SEQ ID NO: 35669 - RNA, 19 nt, synthetic construct
  misc_feature 1..19: note = siRNA antisense sequence
  source 1..19: mol_type = other RNA
tgcatgactgtagtagatg

SEQ ID NO: 35670 - RNA, 19 nt, synthetic construct
  misc_feature 1..19: note = siRNA sense sequence
  source 1..19: mol_type = other RNA
atctactacagtcatgcat

SEQ ID NO: 35671 - RNA, 19 nt, synthetic construct
  misc_feature 1..19: note = siRNA antisense sequence
  source 1..19: mol_type = other RNA
atgcatgactgtagtagat

SEQ ID NO: 35672 - RNA, 19 nt, synthetic construct
  misc_feature 1..19: note = siRNA sense sequence
  source 1..19: mol_type = other RNA
tctactacagtcatgcatc

SEQ ID NO: 35673 - RNA, 19 nt, synthetic construct
  misc_feature 1..19: note = siRNA antisense sequence
  source 1..19: mol_type = other RNA
gatgcatgactgtagtaga

SEQ ID NO: 35674 - RNA, 19 nt, synthetic construct
  misc_feature 1..19: note = siRNA sense sequence
  source 1..19: mol_type = other RNA
ctactacagtcatgcatca

SEQ ID NO: 35675 - RNA, 19 nt, synthetic construct
  misc_feature 1..19: note = siRNA antisense sequence
  source 1..19: mol_type = other RNA
tgatgcatgactgtagtag

SEQ ID NO: 35676 - RNA, 19 nt, synthetic construct
  misc_feature 1..19: note = siRNA sense sequence
  source 1..19: mol_type = other RNA
acagtcatgcatcacctag

SEQ ID NO: 35677 - RNA, 19 nt, synthetic construct
  misc_feature 1..19: note = siRNA antisense sequence
  source 1..19: mol_type = other RNA
ctaggtgatgcatgactgt

SEQ ID NO: 35678 - RNA, 19 nt, synthetic construct
  misc_feature 1..19: note = siRNA sense sequence
  source 1..19: mol_type = other RNA
cagtcatgcatcacctagc

SEQ ID NO: 35679 - RNA, 19 nt, synthetic construct
  misc_feature 1..19: note = siRNA antisense sequence
  source 1..19: mol_type = other RNA
gctaggtgatgcatgactg

SEQ ID NO: 35680 - RNA, 19 nt, synthetic construct
  misc_feature 1..19: note = siRNA sense sequence
  source 1..19: mol_type = other RNA
agtcatgcatcacctagca

SEQ ID NO: 35681 - RNA, 19 nt, synthetic construct
  misc_feature 1..19: note = siRNA antisense sequence
  source 1..19: mol_type = other RNA
tgctaggtgatgcatgact

SEQ ID NO: 35682 - RNA, 19 nt, synthetic construct
  misc_feature 1..19: note = siRNA sense sequence
  source 1..19: mol_type = other RNA
gtcatgcatcacctagcac

SEQ ID NO: 35683 - RNA, 19 nt, synthetic construct
  misc_feature 1..19: note = siRNA antisense sequence
  source 1..19: mol_type = other RNA
gtgctaggtgatgcatgac

SEQ ID NO: 35684 - RNA, 19 nt, synthetic construct
  misc_feature 1..19: note = siRNA sense sequence
  source 1..19: mol_type = other RNA
ctagcactagggatgtgtt

SEQ ID NO: 35685 - RNA, 19 nt, synthetic construct
  misc_feature 1..19: note = siRNA antisense sequence
  source 1..19: mol_type = other RNA
aacacatccctagtgctag

SEQ ID NO: 35686 - RNA, 19 nt, synthetic construct
  misc_feature 1..19: note = siRNA sense sequence
  source 1..19: mol_type = other RNA
tagcactagggatgtgttc

SEQ ID NO: 35687 - RNA, 19 nt, synthetic construct
  misc_feature 1..19: note = siRNA antisense sequence
  source 1..19: mol_type = other RNA
gaacacatccctagtgcta

SEQ ID NO: 35688 - RNA, 19 nt, synthetic construct
  misc_feature 1..19: note = siRNA sense sequence
  source 1..19: mol_type = other RNA
agcactagggatgtgttct

SEQ ID NO: 35689 - RNA, 19 nt, synthetic construct
  misc_feature 1..19: note = siRNA antisense sequence
  source 1..19: mol_type = other RNA
agaacacatccctagtgct

SEQ ID NO: 35690 - RNA, 19 nt, synthetic construct
  misc_feature 1..19: note = siRNA sense sequence
  source 1..19: mol_type = other RNA
gcactagggatgtgttctg

SEQ ID NO: 35691 - RNA, 19 nt, synthetic construct
  misc_feature 1..19: note = siRNA antisense sequence
  source 1..19: mol_type = other RNA
cagaacacatccctagtgc

SEQ ID NO: 35692 - RNA, 19 nt, synthetic construct
  misc_feature 1..19: note = siRNA sense sequence
  source 1..19: mol_type = other RNA
cactagggatgtgttctgc

SEQ ID NO: 35693 - RNA, 19 nt, synthetic construct
  misc_feature 1..19: note = siRNA antisense sequence
  source 1..19: mol_type = other RNA
gcagaacacatccctagtg

SEQ ID NO: 35694 - RNA, 19 nt, synthetic construct
  misc_feature 1..19: note = siRNA sense sequence
  source 1..19: mol_type = other RNA
actagggatgtgttctgca

SEQ ID NO: 35695 - RNA, 19 nt, synthetic construct
  misc_feature 1..19: note = siRNA antisense sequence
  source 1..19: mol_type = other RNA
tgcagaacacatccctagt

SEQ ID NO: 35696 - RNA, 19 nt, synthetic construct
  misc_feature 1..19: note = siRNA sense sequence
  source 1..19: mol_type = other RNA
ctagggatgtgttctgcaa

SEQ ID NO: 35697 - RNA, 19 nt, synthetic construct
  misc_feature 1..19: note = siRNA antisense sequence
  source 1..19: mol_type = other RNA
ttgcagaacacatccctag

SEQ ID NO: 35698 - RNA, 19 nt, synthetic construct
  misc_feature 1..19: note = siRNA sense sequence
  source 1..19: mol_type = other RNA
tagggatgtgttctgcaaa

SEQ ID NO: 35699 - RNA, 19 nt, synthetic construct
  misc_feature 1..19: note = siRNA antisense sequence
  source 1..19: mol_type = other RNA
tttgcagaacacatcccta

SEQ ID NO: 35700 - RNA, 19 nt, synthetic construct
  misc_feature 1..19: note = siRNA sense sequence
  source 1..19: mol_type = other RNA
cattgtgcgaatatcatag

SEQ ID NO: 35701 - RNA, 19 nt, synthetic construct
  misc_feature 1..19: note = siRNA antisense sequence
  source 1..19: mol_type = other RNA
ctatgatattcgcacaatg

SEQ ID NO: 35702 - RNA, 19 nt, synthetic construct
  misc_feature 1..19: note = siRNA sense sequence
  source 1..19: mol_type = other RNA
ttgtgcgaatatcatagag

SEQ ID NO: 35703 - RNA, 19 nt, synthetic construct
  misc_feature 1..19: note = siRNA antisense sequence
  source 1..19: mol_type = other RNA
ctctatgatattcgcacaa

SEQ ID NO: 35704 - RNA, 19 nt, synthetic construct
  misc_feature 1..19: note = siRNA sense sequence
  source 1..19: mol_type = other RNA
tgtgcgaatatcatagagt

SEQ ID NO: 35705 - RNA, 19 nt, synthetic construct
  misc_feature 1..19: note = siRNA antisense sequence
  source 1..19: mol_type = other RNA
actctatgatattcgcaca

SEQ ID NO: 35706 - RNA, 19 nt, synthetic construct
  misc_feature 1..19: note = siRNA sense sequence
  source 1..19: mol_type = other RNA
ctagatggtagagctacac

SEQ ID NO: 35707 - RNA, 19 nt, synthetic construct
  misc_feature 1..19: note = siRNA antisense sequence
  source 1..19: mol_type = other RNA
gtgtagctctaccatctag

SEQ ID NO: 35708 - RNA, 19 nt, synthetic construct
  misc_feature 1..19: note = siRNA sense sequence
  source 1..19: mol_type = other RNA
acatctaggctgtatatcg

SEQ ID NO: 35709 - RNA, 19 nt, synthetic construct
  misc_feature 1..19: note = siRNA antisense sequence
  source 1..19: mol_type = other RNA
cgatatacagcctagatgt

SEQ ID NO: 35710 - RNA, 19 nt, synthetic construct
  misc_feature 1..19: note = siRNA sense sequence
  source 1..19: mol_type = other RNA
catctaggctgtatatcgc

SEQ ID NO: 35711 - RNA, 19 nt, synthetic construct
  misc_feature 1..19: note = siRNA antisense sequence
  source 1..19: mol_type = other RNA
gcgatatacagcctagatg

SEQ ID NO: 35712 - RNA, 19 nt, synthetic construct
  misc_feature 1..19: note = siRNA sense sequence
  source 1..19: mol_type = other RNA
atctaggctgtatatcgcc

SEQ ID NO: 35713 - RNA, 19 nt, synthetic construct
  misc_feature 1..19: note = siRNA antisense sequence
  source 1..19: mol_type = other RNA
ggcgatatacagcctagat

SEQ ID NO: 35714 - RNA, 19 nt, synthetic construct
  misc_feature 1..19: note = siRNA sense sequence
  source 1..19: mol_type = other RNA
tgtatatcgcctatgtctt

SEQ ID NO: 35715 - RNA, 19 nt, synthetic construct
  misc_feature 1..19: note = siRNA antisense sequence
  source 1..19: mol_type = other RNA
aagacataggcgatataca

SEQ ID NO: 35716 - RNA, 19 nt, synthetic construct
  misc_feature 1..19: note = siRNA sense sequence
  source 1..19: mol_type = other RNA
gtatatcgcctatgtcttc

SEQ ID NO: 35717 - RNA, 19 nt, synthetic construct
  misc_feature 1..19: note = siRNA antisense sequence
  source 1..19: mol_type = other RNA
gaagacataggcgatatac

SEQ ID NO: 35718 - RNA, 19 nt, synthetic construct
  misc_feature 1..19: note = siRNA sense sequence
  source 1..19: mol_type = other RNA
tatatcgcctatgtcttct

SEQ ID NO: 35719 - RNA, 19 nt, synthetic construct
  misc_feature 1..19: note = siRNA antisense sequence
  source 1..19: mol_type = other RNA
agaagacataggcgatata

SEQ ID NO: 35720 - RNA, 19 nt, synthetic construct
  misc_feature 1..19: note = siRNA sense sequence
  source 1..19: mol_type = other RNA
atatcgcctatgtcttcta

SEQ ID NO: 35721 - RNA, 19 nt, synthetic construct
  misc_feature 1..19: note = siRNA antisense sequence
  source 1..19: mol_type = other RNA
tagaagacataggcgatat

SEQ ID NO: 35722 - RNA, 19 nt, synthetic construct
  misc_feature 1..19: note = siRNA sense sequence
  source 1..19: mol_type = other RNA
tatcgcctatgtcttctag

SEQ ID NO: 35723 - RNA, 19 nt, synthetic construct
  misc_feature 1..19: note = siRNA antisense sequence
  source 1..19: mol_type = other RNA
ctagaagacataggcgata

SEQ ID NO: 35724 - RNA, 19 nt, synthetic construct
  misc_feature 1..19: note = siRNA sense sequence
  source 1..19: mol_type = other RNA
ctatgtcttctaggctaca

SEQ ID NO: 35725 - RNA, 19 nt, synthetic construct
  misc_feature 1..19: note = siRNA antisense sequence
  source 1..19: mol_type = other RNA
tgtagcctagaagacatag

SEQ ID NO: 35726 - RNA, 19 nt, synthetic construct
  misc_feature 1..19: note = siRNA sense sequence
  source 1..19: mol_type = other RNA
tatgtcttctaggctacag

SEQ ID NO: 35727 - RNA, 19 nt, synthetic construct
  misc_feature 1..19: note = siRNA antisense sequence
  source 1..19: mol_type = other RNA
ctgtagcctagaagacata

SEQ ID NO: 35728 - RNA, 19 nt, synthetic construct
  misc_feature 1..19: note = siRNA sense sequence
  source 1..19: mol_type = other RNA
atgtcttctaggctacaga

SEQ ID NO: 35729 - RNA, 19 nt, synthetic construct
  misc_feature 1..19: note = siRNA antisense sequence
  source 1..19: mol_type = other RNA
tctgtagcctagaagacat

SEQ ID NO: 35730 - RNA, 19 nt, synthetic construct
  misc_feature 1..19: note = siRNA sense sequence
  source 1..19: mol_type = other RNA
cttctaggctacagacctc

SEQ ID NO: 35731 - RNA, 19 nt, synthetic construct
  misc_feature 1..19: note = siRNA antisense sequence
  source 1..19: mol_type = other RNA
gaggtctgtagcctagaag

SEQ ID NO: 35732 - RNA, 19 nt, synthetic construct
  misc_feature 1..19: note = siRNA sense sequence
  source 1..19: mol_type = other RNA
ttctaggctacagacctct

SEQ ID NO: 35733 - RNA, 19 nt, synthetic construct
  misc_feature 1..19: note = siRNA antisense sequence
  source 1..19: mol_type = other RNA
agaggtctgtagcctagaa

SEQ ID NO: 35734 - RNA, 19 nt, synthetic construct
  misc_feature 1..19: note = siRNA sense sequence
  source 1..19: mol_type = other RNA
atactgtatactgtaggtc

SEQ ID NO: 35735 - RNA, 19 nt, synthetic construct
  misc_feature 1..19: note = siRNA antisense sequence
  source 1..19: mol_type = other RNA
gacctacagtatacagtat

SEQ ID NO: 35736 - RNA, 19 nt, synthetic construct
  misc_feature 1..19: note = siRNA sense sequence
  source 1..19: mol_type = other RNA
agtgactcacacctgtaat

SEQ ID NO: 35737 - RNA, 19 nt, synthetic construct
  misc_feature 1..19: note = siRNA antisense sequence
  source 1..19: mol_type = other RNA
attacaggtgtgagtcact

SEQ ID NO: 35738 - RNA, 19 nt, synthetic construct
  misc_feature 1..19: note = siRNA sense sequence
  source 1..19: mol_type = other RNA
gtgactcacacctgtaatc

SEQ ID NO: 35739 - RNA, 19 nt, synthetic construct
  misc_feature 1..19: note = siRNA antisense sequence
  source 1..19: mol_type = other RNA
gattacaggtgtgagtcac

SEQ ID NO: 35740 - RNA, 19 nt, synthetic construct
  misc_feature 1..19: note = siRNA sense sequence
  source 1..19: mol_type = other RNA
tgactcacacctgtaatcc

SEQ ID NO: 35741 - RNA, 19 nt, synthetic construct
  misc_feature 1..19: note = siRNA antisense sequence
  source 1..19: mol_type = other RNA
ggattacaggtgtgagtca

SEQ ID NO: 35742 - RNA, 19 nt, synthetic construct
  misc_feature 1..19: note = siRNA sense sequence
  source 1..19: mol_type = other RNA
gactcacacctgtaatccc

SEQ ID NO: 35743 - RNA, 19 nt, synthetic construct
  misc_feature 1..19: note = siRNA antisense sequence
  source 1..19: mol_type = other RNA
gggattacaggtgtgagtc

SEQ ID NO: 35744 - RNA, 19 nt, synthetic construct
  misc_feature 1..19: note = siRNA sense sequence
  source 1..19: mol_type = other RNA
acacctgtaatcccagcac

SEQ ID NO: 35745 - RNA, 19 nt, synthetic construct
  misc_feature 1..19: note = siRNA antisense sequence
  source 1..19: mol_type = other RNA
gtgctgggattacaggtgt

SEQ ID NO: 35746 - RNA, 19 nt, synthetic construct
  misc_feature 1..19: note = siRNA sense sequence
  source 1..19: mol_type = other RNA
tgtaatcccagcacttctg

SEQ ID NO: 35747 - RNA, 19 nt, synthetic construct
  misc_feature 1..19: note = siRNA antisense sequence
  source 1..19: mol_type = other RNA
cagaagtgctgggattaca

SEQ ID NO: 35748 - RNA, 19 nt, synthetic construct
  misc_feature 1..19: note = siRNA sense sequence
  source 1..19: mol_type = other RNA
cttctggaggccaaggcag

SEQ ID NO: 35749 - RNA, 19 nt, synthetic construct
  misc_feature 1..19: note = siRNA antisense sequence
  source 1..19: mol_type = other RNA
ctgccttggcctccagaag

SEQ ID NO: 35750 - RNA, 19 nt, synthetic construct
  misc_feature 1..19: note = siRNA sense sequence
  source 1..19: mol_type = other RNA
ttctggaggccaaggcagg

SEQ ID NO: 35751 - RNA, 19 nt, synthetic construct
  misc_feature 1..19: note = siRNA antisense sequence
  source 1..19: mol_type = other RNA
cctgccttggcctccagaa

SEQ ID NO: 35752 - RNA, 19 nt, synthetic construct
  misc_feature 1..19: note = siRNA sense sequence
  source 1..19: mol_type = other RNA
tctggaggccaaggcaggt

SEQ ID NO: 35753 - RNA, 19 nt, synthetic construct
  misc_feature 1..19: note = siRNA antisense sequence
  source 1..19: mol_type = other RNA
acctgccttggcctccaga

SEQ ID NO: 35754 - RNA, 19 nt, synthetic construct
  misc_feature 1..19: note = siRNA sense sequence
  source 1..19: mol_type = other RNA
ctggaggccaaggcaggta

SEQ ID NO: 35755 - RNA, 19 nt, synthetic construct
  misc_feature 1..19: note = siRNA antisense sequence
  source 1..19: mol_type = other RNA
tacctgccttggcctccag

SEQ ID NO: 35756 - RNA, 19 nt, synthetic construct
  misc_feature 1..19: note = siRNA sense sequence
  source 1..19: mol_type = other RNA
tggaggccaaggcaggtag

SEQ ID NO: 35757 - RNA, 19 nt, synthetic construct
  misc_feature 1..19: note = siRNA antisense sequence
  source 1..19: mol_type = other RNA
ctacctgccttggcctcca

SEQ ID NO: 35758 - RNA, 19 nt, synthetic construct
  misc_feature 1..19: note = siRNA sense sequence
  source 1..19: mol_type = other RNA
ggaggccaaggcaggtaga

SEQ ID NO: 35759 - RNA, 19 nt, synthetic construct
  misc_feature 1..19: note = siRNA antisense sequence
  source 1..19: mol_type = other RNA
tctacctgccttggcctcc

SEQ ID NO: 35760 - RNA, 19 nt, synthetic construct
  misc_feature 1..19: note = siRNA sense sequence
  source 1..19: mol_type = other RNA
gaggccaaggcaggtagat

SEQ ID NO: 35761 - RNA, 19 nt, synthetic construct
  misc_feature 1..19: note = siRNA antisense sequence
  source 1..19: mol_type = other RNA
atctacctgccttggcctc

SEQ ID NO: 35762 - RNA, 19 nt, synthetic construct
  misc_feature 1..19: note = siRNA sense sequence
  source 1..19: mol_type = other RNA
aggccaaggcaggtagatc

SEQ ID NO: 35763 - RNA, 19 nt, synthetic construct
  misc_feature 1..19: note = siRNA antisense sequence
  source 1..19: mol_type = other RNA
gatctacctgccttggcct

SEQ ID NO: 35764 - RNA, 19 nt, synthetic construct
  misc_feature 1..19: note = siRNA sense sequence
  source 1..19: mol_type = other RNA
gtgtcaggcacctgtaatc

SEQ ID NO: 35765 - RNA, 19 nt, synthetic construct
  misc_feature 1..19: note = siRNA antisense sequence
  source 1..19: mol_type = other RNA
gattacaggtgcctgacac

SEQ ID NO: 35766 - RNA, 19 nt, synthetic construct
  misc_feature 1..19: note = siRNA sense sequence
  source 1..19: mol_type = other RNA
tgtcaggcacctgtaatct

SEQ ID NO: 35767 - RNA, 19 nt, synthetic construct
  misc_feature 1..19: note = siRNA antisense sequence
  source 1..19: mol_type = other RNA
agattacaggtgcctgaca

SEQ ID NO: 35768 - RNA, 19 nt, synthetic construct
  misc_feature 1..19: note = siRNA sense sequence
  source 1..19: mol_type = other RNA
gtcaggcacctgtaatctc

SEQ ID NO: 35769 - RNA, 19 nt, synthetic construct
  misc_feature 1..19: note = siRNA antisense sequence
  source 1..19: mol_type = other RNA
gagattacaggtgcctgac

SEQ ID NO: 35770 - RNA, 19 nt, synthetic construct
  misc_feature 1..19: note = siRNA sense sequence
  source 1..19: mol_type = other RNA
tcaggcacctgtaatctca

SEQ ID NO: 35771 - RNA, 19 nt, synthetic construct
  misc_feature 1..19: note = siRNA antisense sequence
  source 1..19: mol_type = other RNA
tgagattacaggtgcctga

SEQ ID NO: 35772 - RNA, 19 nt, synthetic construct
  misc_feature 1..19: note = siRNA sense sequence
  source 1..19: mol_type = other RNA
caggcacctgtaatctcag

SEQ ID NO: 35773 - RNA, 19 nt, synthetic construct
  misc_feature 1..19: note = siRNA antisense sequence
  source 1..19: mol_type = other RNA
ctgagattacaggtgcctg

SEQ ID NO: 35774 - RNA, 19 nt, synthetic construct
  misc_feature 1..19: note = siRNA sense sequence
  source 1..19: mol_type = other RNA
cacctgtaatctcagctac

SEQ ID NO: 35775 - RNA, 19 nt, synthetic construct
  misc_feature 1..19: note = siRNA antisense sequence
  source 1..19: mol_type = other RNA
gtagctgagattacaggtg

SEQ ID NO: 35776 - RNA, 19 nt, synthetic construct
  misc_feature 1..19: note = siRNA sense sequence
  source 1..19: mol_type = other RNA
acctgtaatctcagctact

SEQ ID NO: 35777 - RNA, 19 nt, synthetic construct
  misc_feature 1..19: note = siRNA antisense sequence
  source 1..19: mol_type = other RNA
agtagctgagattacaggt

SEQ ID NO: 35778 - RNA, 19 nt, synthetic construct
  misc_feature 1..19: note = siRNA sense sequence
  source 1..19: mol_type = other RNA
cctgtaatctcagctactc

SEQ ID NO: 35779 - RNA, 19 nt, synthetic construct
  misc_feature 1..19: note = siRNA antisense sequence
  source 1..19: mol_type = other RNA
gagtagctgagattacagg

SEQ ID NO: 35780 - RNA, 19 nt, synthetic construct
  misc_feature 1..19: note = siRNA sense sequence
  source 1..19: mol_type = other RNA
ctgtaatctcagctactca

SEQ ID NO: 35781 - RNA, 19 nt, synthetic construct
  misc_feature 1..19: note = siRNA antisense sequence
  source 1..19: mol_type = other RNA
tgagtagctgagattacag

SEQ ID NO: 35782 - RNA, 19 nt, synthetic construct
  misc_feature 1..19: note = siRNA sense sequence
  source 1..19: mol_type = other RNA
taaagcattagtgtgtcta

SEQ ID NO: 35783 - RNA, 19 nt, synthetic construct
  misc_feature 1..19: note = siRNA antisense sequence
  source 1..19: mol_type = other RNA
tagacacactaatgcttta

SEQ ID NO: 35784 - RNA, 19 nt, synthetic construct
  misc_feature 1..19: note = siRNA sense sequence
  source 1..19: mol_type = other RNA
aaggtacactaaagctatt

SEQ ID NO: 35785 - RNA, 19 nt, synthetic construct
  misc_feature 1..19: note = siRNA antisense sequence
  source 1..19: mol_type = other RNA
aatagctttagtgtacctt

SEQ ID NO: 35786 - RNA, 19 nt, synthetic construct
  misc_feature 1..19: note = siRNA sense sequence
  source 1..19: mol_type = other RNA
aggtacactaaagctattg

SEQ ID NO: 35787 - RNA, 19 nt, synthetic construct
  misc_feature 1..19: note = siRNA antisense sequence
  source 1..19: mol_type = other RNA
caatagctttagtgtacct

SEQ ID NO: 35788 - RNA, 19 nt, synthetic construct
  misc_feature 1..19: note = siRNA sense sequence
  source 1..19: mol_type = other RNA
cttatgacaccaccattgt

SEQ ID NO: 35789 - RNA, 19 nt, synthetic construct
  misc_feature 1..19: note = siRNA antisense sequence
  source 1..19: mol_type = other RNA
acaatggtggtgtcataag

SEQ ID NO: 35790 - RNA, 19 nt, synthetic construct
  misc_feature 1..19: note = siRNA sense sequence
  source 1..19: mol_type = other RNA
atgcagtttgtcattaacc

SEQ ID NO: 35791 - RNA, 19 nt, synthetic construct
  misc_feature 1..19: note = siRNA antisense sequence
  source 1..19: mol_type = other RNA
ggttaatgacaaactgcat

SEQ ID NO: 35792 - RNA, 19 nt, synthetic construct
  misc_feature 1..19: note = siRNA sense sequence
  source 1..19: mol_type = other RNA
gcagtgcatgactatttag

SEQ ID NO: 35793 - RNA, 19 nt, synthetic construct
  misc_feature 1..19: note = siRNA antisense sequence
  source 1..19: mol_type = other RNA
ctaaatagtcatgcactgc

SEQ ID NO: 35794 - RNA, 19 nt, synthetic construct
  misc_feature 1..19: note = siRNA sense sequence
  source 1..19: mol_type = other RNA
cagtgcatgactatttagt

SEQ ID NO: 35795 - RNA, 19 nt, synthetic construct
  misc_feature 1..19: note = siRNA antisense sequence
  source 1..19: mol_type = other RNA
actaaatagtcatgcactg

SEQ ID NO: 35796 - RNA, 19 nt, synthetic construct
  misc_feature 1..19: note = siRNA sense sequence
  source 1..19: mol_type = other RNA
agtgcatgactatttagtt

SEQ ID NO: 35797 - RNA, 19 nt, synthetic construct
  misc_feature 1..19: note = siRNA antisense sequence
  source 1..19: mol_type = other RNA
aactaaatagtcatgcact

SEQ ID NO: 35798 - RNA, 19 nt, synthetic construct
  misc_feature 1..19: note = siRNA sense sequence
  source 1..19: mol_type = other RNA
gtgcatgactatttagttt

SEQ ID NO: 35799 - RNA, 19 nt, synthetic construct
  misc_feature 1..19: note = siRNA antisense sequence
  source 1..19: mol_type = other RNA
aaactaaatagtcatgcac

SEQ ID NO: 35800 - RNA, 19 nt, synthetic construct
  misc_feature 1..19: note = siRNA sense sequence
  source 1..19: mol_type = other RNA
gcatgactatttagtttag

SEQ ID NO: 35801 - RNA, 19 nt, synthetic construct
  misc_feature 1..19: note = siRNA antisense sequence
  source 1..19: mol_type = other RNA
ctaaactaaatagtcatgc

SEQ ID NO: 35802 - RNA, 19 nt, synthetic construct
  misc_feature 1..19: note = siRNA sense sequence
  source 1..19: mol_type = other RNA
agagtaagcagcatttaaa

SEQ ID NO: 35803 - RNA, 19 nt, synthetic construct
  misc_feature 1..19: note = siRNA antisense sequence
  source 1..19: mol_type = other RNA
tttaaatgctgcttactct

SEQ ID NO: 35804 - RNA, 19 nt, synthetic construct
  misc_feature 1..19: note = siRNA sense sequence
  source 1..19: mol_type = other RNA
gagtaagcagcatttaaaa

SEQ ID NO: 35805 - RNA, 19 nt, synthetic construct
  misc_feature 1..19: note = siRNA antisense sequence
  source 1..19: mol_type = other RNA
ttttaaatgctgcttactc

SEQ ID NO: 35806 - RNA, 19 nt, synthetic construct
  misc_feature 1..19: note = siRNA sense sequence
  source 1..19: mol_type = other RNA
agactattatgcagaagat

SEQ ID NO: 35807 - RNA, 19 nt, synthetic construct
  misc_feature 1..19: note = siRNA antisense sequence
  source 1..19: mol_type = other RNA
atcttctgcataatagtct

SEQ ID NO: 35808 - RNA, 19 nt, synthetic construct
  misc_feature 1..19: note = siRNA sense sequence
  source 1..19: mol_type = other RNA
gactattatgcagaagatg

SEQ ID NO: 35809 - RNA, 19 nt, synthetic construct
  misc_feature 1..19: note = siRNA antisense sequence
  source 1..19: mol_type = other RNA
catcttctgcataatagtc

SEQ ID NO: 35810 - RNA, 19 nt, synthetic construct
  misc_feature 1..19: note = siRNA sense sequence
  source 1..19: mol_type = other RNA
actattatgcagaagatgg

SEQ ID NO: 35811 - RNA, 19 nt, synthetic construct
  misc_feature 1..19: note = siRNA antisense sequence
  source 1..19: mol_type = other RNA
ccatcttctgcataatagt

SEQ ID NO: 35812 - RNA, 19 nt, synthetic construct
  misc_feature 1..19: note = siRNA sense sequence
  source 1..19: mol_type = other RNA
ctattatgcagaagatggt

SEQ ID NO: 35813 - RNA, 19 nt, synthetic construct
  misc_feature 1..19: note = siRNA antisense sequence
  source 1..19: mol_type = other RNA
accatcttctgcataatag

SEQ ID NO: 35814 - RNA, 19 nt, synthetic construct
  misc_feature 1..19: note = siRNA sense sequence
  source 1..19: mol_type = other RNA
ttatgcagaagatggtaac

SEQ ID NO: 35815 - RNA, 19 nt, synthetic construct
  misc_feature 1..19: note = siRNA antisense sequence
  source 1..19: mol_type = other RNA
gttaccatcttctgcataa

SEQ ID NO: 35816 - RNA, 19 nt, synthetic construct
  misc_feature 1..19: note = siRNA sense sequence
  source 1..19: mol_type = other RNA
aagatggtaaccagctgtt

SEQ ID NO: 35817 - RNA, 19 nt, synthetic construct
  misc_feature 1..19: note = siRNA antisense sequence
  source 1..19: mol_type = other RNA
aacagctggttaccatctt

SEQ ID NO: 35818 - RNA, 19 nt, synthetic construct
  misc_feature 1..19: note = siRNA sense sequence
  source 1..19: mol_type = other RNA
gtaaccagctgttctctat

SEQ ID NO: 35819 - RNA, 19 nt, synthetic construct
  misc_feature 1..19: note = siRNA antisense sequence
  source 1..19: mol_type = other RNA
atagagaacagctggttac

SEQ ID NO: 35820 - RNA, 19 nt, synthetic construct
  misc_feature 1..19: note = siRNA sense sequence
  source 1..19: mol_type = other RNA
taaccagctgttctctatc

SEQ ID NO: 35821 - RNA, 19 nt, synthetic construct
  misc_feature 1..19: note = siRNA antisense sequence
  source 1..19: mol_type = other RNA
gatagagaacagctggtta

SEQ ID NO: 35822 - RNA, 19 nt, synthetic construct
  misc_feature 1..19: note = siRNA sense sequence
  source 1..19: mol_type = other RNA
aaccagctgttctctatca

SEQ ID NO: 35823 - RNA, 19 nt, synthetic construct
  misc_feature 1..19: note = siRNA antisense sequence
  source 1..19: mol_type = other RNA
tgatagagaacagctggtt

SEQ ID NO: 35824 - RNA, 19 nt, synthetic construct
  misc_feature 1..19: note = siRNA sense sequence
  source 1..19: mol_type = other RNA
accagctgttctctatcac

SEQ ID NO: 35825 - RNA, 19 nt, synthetic construct
  misc_feature 1..19: note = siRNA antisense sequence
  source 1..19: mol_type = other RNA
gtgatagagaacagctggt

SEQ ID NO: 35826 - RNA, 19 nt, synthetic construct
  misc_feature 1..19: note = siRNA sense sequence
  source 1..19: mol_type = other RNA
ccagctgttctctatcacg

SEQ ID NO: 35827 - RNA, 19 nt, synthetic construct
  misc_feature 1..19: note = siRNA antisense sequence
  source 1..19: mol_type = other RNA
cgtgatagagaacagctgg

SEQ ID NO: 35828 - RNA, 19 nt, synthetic construct
  misc_feature 1..19: note = siRNA sense sequence
  source 1..19: mol_type = other RNA
cagctgttctctatcacgc

SEQ ID NO: 35829 - RNA, 19 nt, synthetic construct
  misc_feature 1..19: note = siRNA antisense sequence
  source 1..19: mol_type = other RNA
gcgtgatagagaacagctg

SEQ ID NO: 35830 - RNA, 19 nt, synthetic construct
  misc_feature 1..19: note = siRNA sense sequence
  source 1..19: mol_type = other RNA
agctgttctctatcacgct

SEQ ID NO: 35831 - RNA, 19 nt, synthetic construct
  misc_feature 1..19: note = siRNA antisense sequence
  source 1..19: mol_type = other RNA
agcgtgatagagaacagct

SEQ ID NO: 35832 - RNA, 19 nt, synthetic construct
  misc_feature 1..19: note = siRNA sense sequence
  source 1..19: mol_type = other RNA
gctgttctctatcacgctg

SEQ ID NO: 35833 - RNA, 19 nt, synthetic construct
  misc_feature 1..19: note = siRNA antisense sequence
  source 1..19: mol_type = other RNA
cagcgtgatagagaacagc

SEQ ID NO: 35834 - RNA, 19 nt, synthetic construct
  misc_feature 1..19: note = siRNA sense sequence
  source 1..19: mol_type = other RNA
ctgttctctatcacgctgg

SEQ ID NO: 35835 - RNA, 19 nt, synthetic construct
  misc_feature 1..19: note = siRNA antisense sequence
  source 1..19: mol_type = other RNA
ccagcgtgatagagaacag

SEQ ID NO: 35836 - RNA, 19 nt, synthetic construct
  misc_feature 1..19: note = siRNA sense sequence
  source 1..19: mol_type = other RNA
tgttctctatcacgctgga

SEQ ID NO: 35837 - RNA, 19 nt, synthetic construct
  misc_feature 1..19: note = siRNA antisense sequence
  source 1..19: mol_type = other RNA
tccagcgtgatagagaaca

SEQ ID NO: 35838 - RNA, 19 nt, synthetic construct
  misc_feature 1..19: note = siRNA sense sequence
  source 1..19: mol_type = other RNA
gttctctatcacgctggaa

SEQ ID NO: 35839 - RNA, 19 nt, synthetic construct
  misc_feature 1..19: note = siRNA antisense sequence
  source 1..19: mol_type = other RNA
ttccagcgtgatagagaac

SEQ ID NO: 35840 - RNA, 19 nt, synthetic construct
  misc_feature 1..19: note = siRNA sense sequence
  source 1..19: mol_type = other RNA
ttctctatcacgctggaag

SEQ ID NO: 35841 - RNA, 19 nt, synthetic construct
  misc_feature 1..19: note = siRNA antisense sequence
  source 1..19: mol_type = other RNA
cttccagcgtgatagagaa

SEQ ID NO: 35842 - RNA, 19 nt, synthetic construct
  misc_feature 1..19: note = siRNA sense sequence
  source 1..19: mol_type = other RNA
tctctatcacgctggaaga

SEQ ID NO: 35843 - RNA, 19 nt, synthetic construct
  misc_feature 1..19: note = siRNA antisense sequence
  source 1..19: mol_type = other RNA
tcttccagcgtgatagaga

SEQ ID NO: 35844 - RNA, 19 nt, synthetic construct
  misc_feature 1..19: note = siRNA sense sequence
  source 1..19: mol_type = other RNA
ctctatcacgctggaagaa

SEQ ID NO: 35845 - RNA, 19 nt, synthetic construct
  misc_feature 1..19: note = siRNA antisense sequence
  source 1..19: mol_type = other RNA
ttcttccagcgtgatagag

SEQ ID NO: 35846 - RNA, 19 nt, synthetic construct
  misc_feature 1..19: note = siRNA sense sequence
  source 1..19: mol_type = other RNA
tctatcacgctggaagaat

SEQ ID NO: 35847 - RNA, 19 nt, synthetic construct
  misc_feature 1..19: note = siRNA antisense sequence
  source 1..19: mol_type = other RNA
attcttccagcgtgataga

SEQ ID NO: 35848 - RNA, 19 nt, synthetic construct
  misc_feature 1..19: note = siRNA sense sequence
  source 1..19: mol_type = other RNA
ctatcacgctggaagaatg

SEQ ID NO: 35849 - RNA, 19 nt, synthetic construct
  misc_feature 1..19: note = siRNA antisense sequence
  source 1..19: mol_type = other RNA
cattcttccagcgtgatag

SEQ ID NO: 35850 - RNA, 19 nt, synthetic construct
  misc_feature 1..19: note = siRNA sense sequence
  source 1..19: mol_type = other RNA
aaatgtacataaaaggacc

SEQ ID NO: 35851 - RNA, 19 nt, synthetic construct
  misc_feature 1..19: note = siRNA antisense sequence
  source 1..19: mol_type = other RNA
ggtccttttatgtacattt

SEQ ID NO: 35852 - RNA, 19 nt, synthetic construct
  misc_feature 1..19: note = siRNA sense sequence
  source 1..19: mol_type = other RNA
aatgtacataaaaggaccc

SEQ ID NO: 35853 - RNA, 19 nt, synthetic construct
  misc_feature 1..19: note = siRNA antisense sequence
  source 1..19: mol_type = other RNA
gggtccttttatgtacatt

SEQ ID NO: 35854 - RNA, 19 nt, synthetic construct
  misc_feature 1..19: note = siRNA sense sequence
  source 1..19: mol_type = other RNA
atgtacataaaaggacccg

SEQ ID NO: 35855 - RNA, 19 nt, synthetic construct
  misc_feature 1..19: note = siRNA antisense sequence
  source 1..19: mol_type = other RNA
cgggtccttttatgtacat

SEQ ID NO: 35856 - RNA, 19 nt, synthetic construct
  misc_feature 1..19: note = siRNA sense sequence
  source 1..19: mol_type = other RNA
tgtacataaaaggacccgt

SEQ ID NO: 35857 - RNA, 19 nt, synthetic construct
  misc_feature 1..19: note = siRNA antisense sequence
  source 1..19: mol_type = other RNA
acgggtccttttatgtaca

SEQ ID NO: 35858 - RNA, 19 nt, synthetic construct
  misc_feature 1..19: note = siRNA sense sequence
  source 1..19: mol_type = other RNA
gtacataaaaggacccgtg

SEQ ID NO: 35859 - RNA, 19 nt, synthetic construct
  misc_feature 1..19: note = siRNA antisense sequence
  source 1..19: mol_type = other RNA
cacgggtccttttatgtac

SEQ ID NO: 35860 - RNA, 19 nt, synthetic construct
  misc_feature 1..19: note = siRNA sense sequence
  source 1..19: mol_type = other RNA
tacataaaaggacccgtgc

SEQ ID NO: 35861 - RNA, 19 nt, synthetic construct
  misc_feature 1..19: note = siRNA antisense sequence
  source 1..19: mol_type = other RNA
gcacgggtccttttatgta

SEQ ID NO: 35862 - RNA, 19 nt, synthetic construct
  misc_feature 1..19: note = siRNA sense sequence
  source 1..19: mol_type = other RNA
acataaaaggacccgtgca

SEQ ID NO: 35863 - RNA, 19 nt, synthetic construct
  misc_feature 1..19: note = siRNA antisense sequence
  source 1..19: mol_type = other RNA
tgcacgggtccttttatgt

SEQ ID NO: 35864 - RNA, 19 nt, synthetic construct
  misc_feature 1..19: note = siRNA sense sequence
  source 1..19: mol_type = other RNA
cataaaaggacccgtgcaa

SEQ ID NO: 35865 - RNA, 19 nt, synthetic construct
  misc_feature 1..19: note = siRNA antisense sequence
  source 1..19: mol_type = other RNA
ttgcacgggtccttttatg

SEQ ID NO: 35866 - RNA, 19 nt, synthetic construct
  misc_feature 1..19: note = siRNA sense sequence
  source 1..19: mol_type = other RNA
gacccgtgcaattcaccca

SEQ ID NO: 35867 - RNA, 19 nt, synthetic construct
  misc_feature 1..19: note = siRNA antisense sequence
  source 1..19: mol_type = other RNA
tgggtgaattgcacgggtc

SEQ ID NO: 35868 - RNA, 19 nt, synthetic construct
  misc_feature 1..19: note = siRNA sense sequence
  source 1..19: mol_type = other RNA
acccgtgcaattcacccat

SEQ ID NO: 35869 - RNA, 19 nt, synthetic construct
  misc_feature 1..19: note = siRNA antisense sequence
  source 1..19: mol_type = other RNA
atgggtgaattgcacgggt

SEQ ID NO: 35870 - RNA, 19 nt, synthetic construct
  misc_feature 1..19: note = siRNA sense sequence
  source 1..19: mol_type = other RNA
cccgtgcaattcacccatt

SEQ ID NO: 35871 - RNA, 19 nt, synthetic construct
  misc_feature 1..19: note = siRNA antisense sequence
  source 1..19: mol_type = other RNA
aatgggtgaattgcacggg

SEQ ID NO: 35872 - RNA, 19 nt, synthetic construct
  misc_feature 1..19: note = siRNA sense sequence
  source 1..19: mol_type = other RNA
ccgtgcaattcacccattc

SEQ ID NO: 35873 - RNA, 19 nt, synthetic construct
  misc_feature 1..19: note = siRNA antisense sequence
  source 1..19: mol_type = other RNA
gaatgggtgaattgcacgg

SEQ ID NO: 35874 - RNA, 19 nt, synthetic construct
  misc_feature 1..19: note = siRNA sense sequence
  source 1..19: mol_type = other RNA
cgtgcaattcacccattct

SEQ ID NO: 35875 - RNA, 19 nt, synthetic construct
  misc_feature 1..19: note = siRNA antisense sequence
  source 1..19: mol_type = other RNA
agaatgggtgaattgcacg

SEQ ID NO: 35876 - RNA, 19 nt, synthetic construct
  misc_feature 1..19: note = siRNA sense sequence
  source 1..19: mol_type = other RNA
gtgcaattcacccattctt

SEQ ID NO: 35877 - RNA, 19 nt, synthetic construct
  misc_feature 1..19: note = siRNA antisense sequence
  source 1..19: mol_type = other RNA
aagaatgggtgaattgcac

SEQ ID NO: 35878 - RNA, 19 nt, synthetic construct
  misc_feature 1..19: note = siRNA sense sequence
  source 1..19: mol_type = other RNA
caaatctcttcatgatctt

SEQ ID NO: 35879 - RNA, 19 nt, synthetic construct
  misc_feature 1..19: note = siRNA antisense sequence
  source 1..19: mol_type = other RNA
aagatcatgaagagatttg

SEQ ID NO: 35880 - RNA, 19 nt, synthetic construct
  misc_feature 1..19: note = siRNA sense sequence
  source 1..19: mol_type = other RNA
aaatctcttcatgatcttg

SEQ ID NO: 35881 - RNA, 19 nt, synthetic construct
  misc_feature 1..19: note = siRNA antisense sequence
  source 1..19: mol_type = other RNA
caagatcatgaagagattt

SEQ ID NO: 35882 - RNA, 19 nt, synthetic construct
  misc_feature 1..19: note = siRNA sense sequence
  source 1..19: mol_type = other RNA
tctcttcatgatcttgcaa

SEQ ID NO: 35883 - RNA, 19 nt, synthetic construct
  misc_feature 1..19: note = siRNA antisense sequence
  source 1..19: mol_type = other RNA
ttgcaagatcatgaagaga

SEQ ID NO: 35884 - RNA, 19 nt, synthetic construct
  misc_feature 1..19: note = siRNA sense sequence
  source 1..19: mol_type = other RNA
tcttcatgatcttgcaacc

SEQ ID NO: 35885 - RNA, 19 nt, synthetic construct
  misc_feature 1..19: note = siRNA antisense sequence
  source 1..19: mol_type = other RNA
ggttgcaagatcatgaaga

SEQ ID NO: 35886 - RNA, 19 nt, synthetic construct
  misc_feature 1..19: note = siRNA sense sequence
  source 1..19: mol_type = other RNA
cttcatgatcttgcaacca

SEQ ID NO: 35887 - RNA, 19 nt, synthetic construct
  misc_feature 1..19: note = siRNA antisense sequence
  source 1..19: mol_type = other RNA
tggttgcaagatcatgaag

SEQ ID NO: 35888 - RNA, 19 nt, synthetic construct
  misc_feature 1..19: note = siRNA sense sequence
  source 1..19: mol_type = other RNA
atgatcttgcaaccatatt

SEQ ID NO: 35889 - RNA, 19 nt, synthetic construct
  misc_feature 1..19: note = siRNA antisense sequence
  source 1..19: mol_type = other RNA
aatatggttgcaagatcat

SEQ ID NO: 35890 - RNA, 19 nt, synthetic construct
  misc_feature 1..19: note = siRNA sense sequence
  source 1..19: mol_type = other RNA
tgatcttgcaaccatattt

SEQ ID NO: 35891 - RNA, 19 nt, synthetic construct
  misc_feature 1..19: note = siRNA antisense sequence
  source 1..19: mol_type = other RNA
aaatatggttgcaagatca

SEQ ID NO: 35892 - RNA, 19 nt, synthetic construct
  misc_feature 1..19: note = siRNA sense sequence
  source 1..19: mol_type = other RNA
gatcttgcaaccatatttg

SEQ ID NO: 35893 - RNA, 19 nt, synthetic construct
  misc_feature 1..19: note = siRNA antisense sequence
  source 1..19: mol_type = other RNA
caaatatggttgcaagatc

SEQ ID NO: 35894 - RNA, 19 nt, synthetic construct
  misc_feature 1..19: note = siRNA sense sequence
  source 1..19: mol_type = other RNA
atcttgcaaccatatttgt

SEQ ID NO: 35895 - RNA, 19 nt, synthetic construct
  misc_feature 1..19: note = siRNA antisense sequence
  source 1..19: mol_type = other RNA
acaaatatggttgcaagat

SEQ ID NO: 35896 - RNA, 19 nt, synthetic construct
  misc_feature 1..19: note = siRNA sense sequence
  source 1..19: mol_type = other RNA
cttgcaaccatatttgtcc

SEQ ID NO: 35897 - RNA, 19 nt, synthetic construct
  misc_feature 1..19: note = siRNA antisense sequence
  source 1..19: mol_type = other RNA
ggacaaatatggttgcaag

SEQ ID NO: 35898 - RNA, 19 nt, synthetic construct
  misc_feature 1..19: note = siRNA sense sequence
  source 1..19: mol_type = other RNA
ttgcaaccatatttgtcct

SEQ ID NO: 35899 - RNA, 19 nt, synthetic construct
  misc_feature 1..19: note = siRNA antisense sequence
  source 1..19: mol_type = other RNA
aggacaaatatggttgcaa

SEQ ID NO: 35900 - RNA, 19 nt, synthetic construct
  misc_feature 1..19: note = siRNA sense sequence
  source 1..19: mol_type = other RNA
tgcaaccatatttgtcctg

SEQ ID NO: 35901 - RNA, 19 nt, synthetic construct
  misc_feature 1..19: note = siRNA antisense sequence
  source 1..19: mol_type = other RNA
caggacaaatatggttgca

SEQ ID NO: 35902 - RNA, 19 nt, synthetic construct
  misc_feature 1..19: note = siRNA sense sequence
  source 1..19: mol_type = other RNA
accatatttgtcctggcct

SEQ ID NO: 35903 - RNA, 19 nt, synthetic construct
  misc_feature 1..19: note = siRNA antisense sequence
  source 1..19: mol_type = other RNA
aggccaggacaaatatggt

SEQ ID NO: 35904 - RNA, 19 nt, synthetic construct
  misc_feature 1..19: note = siRNA sense sequence
  source 1..19: mol_type = other RNA
ccatatttgtcctggcctg

SEQ ID NO: 35905 - RNA, 19 nt, synthetic construct
  misc_feature 1..19: note = siRNA antisense sequence
  source 1..19: mol_type = other RNA
caggccaggacaaatatgg

SEQ ID NO: 35906 - RNA, 19 nt, synthetic construct
  misc_feature 1..19: note = siRNA sense sequence
  source 1..19: mol_type = other RNA
catatttgtcctggcctgt

SEQ ID NO: 35907 - RNA, 19 nt, synthetic construct
  misc_feature 1..19: note = siRNA antisense sequence
  source 1..19: mol_type = other RNA
acaggccaggacaaatatg

SEQ ID NO: 35908 - RNA, 19 nt, synthetic construct
  misc_feature 1..19: note = siRNA sense sequence
  source 1..19: mol_type = other RNA
atatttgtcctggcctgtg

SEQ ID NO: 35909 - RNA, 19 nt, synthetic construct
  misc_feature 1..19: note = siRNA antisense sequence
  source 1..19: mol_type = other RNA
cacaggccaggacaaatat

SEQ ID NO: 35910 - RNA, 19 nt, synthetic construct
  misc_feature 1..19: note = siRNA sense sequence
  source 1..19: mol_type = other RNA
tatttgtcctggcctgtgt

SEQ ID NO: 35911 - RNA, 19 nt, synthetic construct
  misc_feature 1..19: note = siRNA antisense sequence
  source 1..19: mol_type = other RNA
acacaggccaggacaaata

SEQ ID NO: 35912 - RNA, 19 nt, synthetic construct
  misc_feature 1..19: note = siRNA sense sequence
  source 1..19: mol_type = other RNA
atttgtcctggcctgtgtc

SEQ ID NO: 35913 - RNA, 19 nt, synthetic construct
  misc_feature 1..19: note = siRNA antisense sequence
  source 1..19: mol_type = other RNA
gacacaggccaggacaaat

SEQ ID NO: 35914 - RNA, 19 nt, synthetic construct
  misc_feature 1..19: note = siRNA sense sequence
  source 1..19: mol_type = other RNA
tttgtcctggcctgtgtct

SEQ ID NO: 35915 - RNA, 19 nt, synthetic construct
  misc_feature 1..19: note = siRNA antisense sequence
  source 1..19: mol_type = other RNA
agacacaggccaggacaaa

SEQ ID NO: 35916 - RNA, 19 nt, synthetic construct
  misc_feature 1..19: note = siRNA sense sequence
  source 1..19: mol_type = other RNA
ttgtcctggcctgtgtctt

SEQ ID NO: 35917 - RNA, 19 nt, synthetic construct
  misc_feature 1..19: note = siRNA antisense sequence
  source 1..19: mol_type = other RNA
aagacacaggccaggacaa

SEQ ID NO: 35918 - RNA, 19 nt, synthetic construct
  misc_feature 1..19: note = siRNA sense sequence
  source 1..19: mol_type = other RNA
ctggcctgtgtcttaatac

SEQ ID NO: 35919 - RNA, 19 nt, synthetic construct
  misc_feature 1..19: note = siRNA antisense sequence
  source 1..19: mol_type = other RNA
gtattaagacacaggccag

SEQ ID NO: 35920 - RNA, 19 nt, synthetic construct
  misc_feature 1..19: note = siRNA sense sequence
  source 1..19: mol_type = other RNA
tggcctgtgtcttaatact

SEQ ID NO: 35921 - RNA, 19 nt, synthetic construct
  misc_feature 1..19: note = siRNA antisense sequence
  source 1..19: mol_type = other RNA
agtattaagacacaggcca

SEQ ID NO: 35922 - RNA, 19 nt, synthetic construct
  misc_feature 1..19: note = siRNA sense sequence
  source 1..19: mol_type = other RNA
ggcctgtgtcttaatactt

SEQ ID NO: 35923 - RNA, 19 nt, synthetic construct
  misc_feature 1..19: note = siRNA antisense sequence
  source 1..19: mol_type = other RNA
aagtattaagacacaggcc

SEQ ID NO: 35924 - RNA, 19 nt, synthetic construct
  misc_feature 1..19: note = siRNA sense sequence
  source 1..19: mol_type = other RNA
gcctgtgtcttaatacttg

SEQ ID NO: 35925 - RNA, 19 nt, synthetic construct
  misc_feature 1..19: note = siRNA antisense sequence
  source 1..19: mol_type = other RNA
caagtattaagacacaggc

SEQ ID NO: 35926 - RNA, 19 nt, synthetic construct
  misc_feature 1..19: note = siRNA sense sequence
  source 1..19: mol_type = other RNA
cctgtgtcttaatacttgc

SEQ ID NO: 35927 - RNA, 19 nt, synthetic construct
  misc_feature 1..19: note = siRNA antisense sequence
  source 1..19: mol_type = other RNA
gcaagtattaagacacagg

SEQ ID NO: 35928 - RNA, 19 nt, synthetic construct
  misc_feature 1..19: note = siRNA sense sequence
  source 1..19: mol_type = other RNA
ctgtgtcttaatacttgca

SEQ ID NO: 35929 - RNA, 19 nt, synthetic construct
  misc_feature 1..19: note = siRNA antisense sequence
  source 1..19: mol_type = other RNA
tgcaagtattaagacacag

SEQ ID NO: 35930 - RNA, 19 nt, synthetic construct
  misc_feature 1..19: note = siRNA sense sequence
  source 1..19: mol_type = other RNA
tgtgtcttaatacttgcag

SEQ ID NO: 35931 - RNA, 19 nt, synthetic construct
  misc_feature 1..19: note = siRNA antisense sequence
  source 1..19: mol_type = other RNA
ctgcaagtattaagacaca

SEQ ID NO: 35932 - RNA, 19 nt, synthetic construct
  misc_feature 1..19: note = siRNA sense sequence
  source 1..19: mol_type = other RNA
gtgtcttaatacttgcaga

SEQ ID NO: 35933 - RNA, 19 nt, synthetic construct
  misc_feature 1..19: note = siRNA antisense sequence
  source 1..19: mol_type = other RNA
tctgcaagtattaagacac

SEQ ID NO: 35934 - RNA, 19 nt, synthetic construct
  misc_feature 1..19: note = siRNA sense sequence
  source 1..19: mol_type = other RNA
tgtcttaatacttgcagag

SEQ ID NO: 35935 - RNA, 19 nt, synthetic construct
  misc_feature 1..19: note = siRNA antisense sequence
  source 1..19: mol_type = other RNA
ctctgcaagtattaagaca

SEQ ID NO: 35936 - RNA, 19 nt, synthetic construct
  misc_feature 1..19: note = siRNA sense sequence
  source 1..19: mol_type = other RNA
cacattttcttttcactgc

SEQ ID NO: 35937 - RNA, 19 nt, synthetic construct
  misc_feature 1..19: note = siRNA antisense sequence
  source 1..19: mol_type = other RNA
gcagtgaaaagaaaatgtg

SEQ ID NO: 35938 - RNA, 19 nt, synthetic construct
  misc_feature 1..19: note = siRNA sense sequence
  source 1..19: mol_type = other RNA
ttcttttcactgccaaatc

SEQ ID NO: 35939 - RNA, 19 nt, synthetic construct
  misc_feature 1..19: note = siRNA antisense sequence
  source 1..19: mol_type = other RNA
gatttggcagtgaaaagaa

SEQ ID NO: 35940 - RNA, 19 nt, synthetic construct
  misc_feature 1..19: note = siRNA sense sequence
  source 1..19: mol_type = other RNA
cttttcactgccaaatctc

SEQ ID NO: 35941 - RNA, 19 nt, synthetic construct
  misc_feature 1..19: note = siRNA antisense sequence
  source 1..19: mol_type = other RNA
gagatttggcagtgaaaag

SEQ ID NO: 35942 - RNA, 19 nt, synthetic construct
  misc_feature 1..19: note = siRNA sense sequence
  source 1..19: mol_type = other RNA
tttcactgccaaatctcat

SEQ ID NO: 35943 - RNA, 19 nt, synthetic construct
  misc_feature 1..19: note = siRNA antisense sequence
  source 1..19: mol_type = other RNA
atgagatttggcagtgaaa

SEQ ID NO: 35944 - RNA, 19 nt, synthetic construct
  misc_feature 1..19: note = siRNA sense sequence
  source 1..19: mol_type = other RNA
ttcactgccaaatctcatc

SEQ ID NO: 35945 - RNA, 19 nt, synthetic construct
  misc_feature 1..19: note = siRNA antisense sequence
  source 1..19: mol_type = other RNA
gatgagatttggcagtgaa

SEQ ID NO: 35946 - RNA, 19 nt, synthetic construct
  misc_feature 1..19: note = siRNA sense sequence
  source 1..19: mol_type = other RNA
tcactgccaaatctcatct

SEQ ID NO: 35947 - RNA, 19 nt, synthetic construct
  misc_feature 1..19: note = siRNA antisense sequence
  source 1..19: mol_type = other RNA
agatgagatttggcagtga

SEQ ID NO: 35948 - RNA, 19 nt, synthetic construct
  misc_feature 1..19: note = siRNA sense sequence
  source 1..19: mol_type = other RNA
tgccaaatctcatctcttt

SEQ ID NO: 35949 - RNA, 19 nt, synthetic construct
  misc_feature 1..19: note = siRNA antisense sequence
  source 1..19: mol_type = other RNA
aaagagatgagatttggca

SEQ ID NO: 35950 - RNA, 19 nt, synthetic construct
  misc_feature 1..19: note = siRNA sense sequence
  source 1..19: mol_type = other RNA
gccaaatctcatctctttc

SEQ ID NO: 35951 - RNA, 19 nt, synthetic construct
  misc_feature 1..19: note = siRNA antisense sequence
  source 1..19: mol_type = other RNA
gaaagagatgagatttggc

SEQ ID NO: 35952 - RNA, 19 nt, synthetic construct
  misc_feature 1..19: note = siRNA sense sequence
  source 1..19: mol_type = other RNA
tctcatctctttctccctt

SEQ ID NO: 35953 - RNA, 19 nt, synthetic construct
  misc_feature 1..19: note = siRNA antisense sequence
  source 1..19: mol_type = other RNA
aagggagaaagagatgaga

SEQ ID NO: 35954 - RNA, 19 nt, synthetic construct
  misc_feature 1..19: note = siRNA sense sequence
  source 1..19: mol_type = other RNA
ctatctccataaaatcttc

SEQ ID NO: 35955 - RNA, 19 nt, synthetic construct
  misc_feature 1..19: note = siRNA antisense sequence
  source 1..19: mol_type = other RNA
gaagattttatggagatag

SEQ ID NO: 35956 - RNA, 19 nt, synthetic construct
  misc_feature 1..19: note = siRNA sense sequence
  source 1..19: mol_type = other RNA
ctccataaaatcttcctta

SEQ ID NO: 35957 - RNA, 19 nt, synthetic construct
  misc_feature 1..19: note = siRNA antisense sequence
  source 1..19: mol_type = other RNA
taaggaagattttatggag

SEQ ID NO: 35958 - RNA, 19 nt, synthetic construct
  misc_feature 1..19: note = siRNA sense sequence
  source 1..19: mol_type = other RNA
ccataaaatcttccttaac

SEQ ID NO: 35959 - RNA, 19 nt, synthetic construct
  misc_feature 1..19: note = siRNA antisense sequence
  source 1..19: mol_type = other RNA
gttaaggaagattttatgg

SEQ ID NO: 35960 - RNA, 19 nt, synthetic construct
  misc_feature 1..19: note = siRNA sense sequence
  source 1..19: mol_type = other RNA
cttccttaactaagatgaa

SEQ ID NO: 35961 - RNA, 19 nt, synthetic construct
  misc_feature 1..19: note = siRNA antisense sequence
  source 1..19: mol_type = other RNA
ttcatcttagttaaggaag

SEQ ID NO: 35962 - RNA, 19 nt, synthetic construct
  misc_feature 1..19: note = siRNA sense sequence
  source 1..19: mol_type = other RNA
atagttgccagttcatctt

SEQ ID NO: 35963 - RNA, 19 nt, synthetic construct
  misc_feature 1..19: note = siRNA antisense sequence
  source 1..19: mol_type = other RNA
aagatgaactggcaactat

SEQ ID NO: 35964 - RNA, 19 nt, synthetic construct
  misc_feature 1..19: note = siRNA sense sequence
  source 1..19: mol_type = other RNA
tagttgccagttcatcttt

SEQ ID NO: 35965 - RNA, 19 nt, synthetic construct
  misc_feature 1..19: note = siRNA antisense sequence
  source 1..19: mol_type = other RNA
aaagatgaactggcaacta

SEQ ID NO: 35966 - RNA, 19 nt, synthetic construct
  misc_feature 1..19: note = siRNA sense sequence
  source 1..19: mol_type = other RNA
agttgccagttcatcttta

SEQ ID NO: 35967 - RNA, 19 nt, synthetic construct
  misc_feature 1..19: note = siRNA antisense sequence
  source 1..19: mol_type = other RNA
taaagatgaactggcaact

SEQ ID NO: 35968 - RNA, 19 nt, synthetic construct
  misc_feature 1..19: note = siRNA sense sequence
  source 1..19: mol_type = other RNA
gttgccagttcatctttaa

SEQ ID NO: 35969 - RNA, 19 nt, synthetic construct
  misc_feature 1..19: note = siRNA antisense sequence
  source 1..19: mol_type = other RNA
ttaaagatgaactggcaac

SEQ ID NO: 35970 - RNA, 19 nt, synthetic construct
  misc_feature 1..19: note = siRNA sense sequence
  source 1..19: mol_type = other RNA
ttgccagttcatctttaac

SEQ ID NO: 35971 - RNA, 19 nt, synthetic construct
  misc_feature 1..19: note = siRNA antisense sequence
  source 1..19: mol_type = other RNA
gttaaagatgaactggcaa

SEQ ID NO: 35972 - RNA, 19 nt, synthetic construct
  misc_feature 1..19: note = siRNA sense sequence
  source 1..19: mol_type = other RNA
gttcatctttaactagagc

SEQ ID NO: 35973 - RNA, 19 nt, synthetic construct
  misc_feature 1..19: note = siRNA antisense sequence
  source 1..19: mol_type = other RNA
gctctagttaaagatgaac

SEQ ID NO: 35974 - RNA, 19 nt, synthetic construct
  misc_feature 1..19: note = siRNA sense sequence
  source 1..19: mol_type = other RNA
ttcatctttaactagagct

SEQ ID NO: 35975 - RNA, 19 nt, synthetic construct
  misc_feature 1..19: note = siRNA antisense sequence
  source 1..19: mol_type = other RNA
agctctagttaaagatgaa

SEQ ID NO: 35976 - RNA, 19 nt, synthetic construct
  misc_feature 1..19: note = siRNA sense sequence
  source 1..19: mol_type = other RNA
tcatctttaactagagctg

SEQ ID NO: 35977 - RNA, 19 nt, synthetic construct
  misc_feature 1..19: note = siRNA antisense sequence
  source 1..19: mol_type = other RNA
cagctctagttaaagatga

SEQ ID NO: 35978 - RNA, 19 nt, synthetic construct
  misc_feature 1..19: note = siRNA sense sequence
  source 1..19: mol_type = other RNA
catctttaactagagctgg

SEQ ID NO: 35979 - RNA, 19 nt, synthetic construct
  misc_feature 1..19: note = siRNA antisense sequence
  source 1..19: mol_type = other RNA
ccagctctagttaaagatg

SEQ ID NO: 35980 - RNA, 19 nt, synthetic construct
  misc_feature 1..19: note = siRNA sense sequence
  source 1..19: mol_type = other RNA
atctttaactagagctggc

SEQ ID NO: 35981 - RNA, 19 nt, synthetic construct
  misc_feature 1..19: note = siRNA antisense sequence
  source 1..19: mol_type = other RNA
gccagctctagttaaagat

SEQ ID NO: 35982 - RNA, 19 nt, synthetic construct
  misc_feature 1..19: note = siRNA sense sequence
  source 1..19: mol_type = other RNA
tctttaactagagctggca

SEQ ID NO: 35983 - RNA, 19 nt, synthetic construct
  misc_feature 1..19: note = siRNA antisense sequence
  source 1..19: mol_type = other RNA
tgccagctctagttaaaga

SEQ ID NO: 35984 - RNA, 19 nt, synthetic construct
  misc_feature 1..19: note = siRNA sense sequence
  source 1..19: mol_type = other RNA
ctttaactagagctggcat

SEQ ID NO: 35985 - RNA, 19 nt, synthetic construct
  misc_feature 1..19: note = siRNA antisense sequence
  source 1..19: mol_type = other RNA
atgccagctctagttaaag

SEQ ID NO: 35986 - RNA, 19 nt, synthetic construct
  misc_feature 1..19: note = siRNA sense sequence
  source 1..19: mol_type = other RNA
tttaactagagctggcata

SEQ ID NO: 35987 - RNA, 19 nt, synthetic construct
  misc_feature 1..19: note = siRNA antisense sequence
  source 1..19: mol_type = other RNA
tatgccagctctagttaaa

SEQ ID NO: 35988 - RNA, 19 nt, synthetic construct
  misc_feature 1..19: note = siRNA sense sequence
  source 1..19: mol_type = other RNA
ttaactagagctggcatac

SEQ ID NO: 35989 - RNA, 19 nt, synthetic construct
  misc_feature 1..19: note = siRNA antisense sequence
  source 1..19: mol_type = other RNA
gtatgccagctctagttaa

SEQ ID NO: 35990 - RNA, 19 nt, synthetic construct
  misc_feature 1..19: note = siRNA sense sequence
  source 1..19: mol_type = other RNA
taactagagctggcatact

SEQ ID NO: 35991 - RNA, 19 nt, synthetic construct
  misc_feature 1..19: note = siRNA antisense sequence
  source 1..19: mol_type = other RNA
agtatgccagctctagtta

SEQ ID NO: 35992 - RNA, 19 nt, synthetic construct
  misc_feature 1..19: note = siRNA sense sequence
  source 1..19: mol_type = other RNA
aactagagctggcatactt

SEQ ID NO: 35993 - RNA, 19 nt, synthetic construct
  misc_feature 1..19: note = siRNA antisense sequence
  source 1..19: mol_type = other RNA
aagtatgccagctctagtt

SEQ ID NO: 35994 - RNA, 19 nt, synthetic construct
  misc_feature 1..19: note = siRNA sense sequence
  source 1..19: mol_type = other RNA
actagagctggcatacttc

SEQ ID NO: 35995 - RNA, 19 nt, synthetic construct
  misc_feature 1..19: note = siRNA antisense sequence
  source 1..19: mol_type = other RNA
gaagtatgccagctctagt

SEQ ID NO: 35996 - RNA, 19 nt, synthetic construct
  misc_feature 1..19: note = siRNA sense sequence
  source 1..19: mol_type = other RNA
ctagagctggcatacttct

SEQ ID NO: 35997 - RNA, 19 nt, synthetic construct
  misc_feature 1..19: note = siRNA antisense sequence
  source 1..19: mol_type = other RNA
agaagtatgccagctctag

SEQ ID NO: 35998 - RNA, 19 nt, synthetic construct
  misc_feature 1..19: note = siRNA sense sequence
  source 1..19: mol_type = other RNA
tagagctggcatacttctt

SEQ ID NO: 35999 - RNA, 19 nt, synthetic construct
  misc_feature 1..19: note = siRNA antisense sequence
  source 1..19: mol_type = other RNA
aagaagtatgccagctcta

SEQ ID NO: 36000 - RNA, 19 nt, synthetic construct
  misc_feature 1..19: note = siRNA sense sequence
  source 1..19: mol_type = other RNA
agagctggcatacttcttc

SEQ ID NO: 36001 - RNA, 19 nt, synthetic construct
  misc_feature 1..19: note = siRNA antisense sequence
  source 1..19: mol_type = other RNA
gaagaagtatgccagctct

SEQ ID NO: 36002 - RNA, 19 nt, synthetic construct
  misc_feature 1..19: note = siRNA sense sequence
  source 1..19: mol_type = other RNA
ggcatacttcttccttcaa

SEQ ID NO: 36003 - RNA, 19 nt, synthetic construct
  misc_feature 1..19: note = siRNA antisense sequence
  source 1..19: mol_type = other RNA
ttgaaggaagaagtatgcc

SEQ ID NO: 36004 - RNA, 19 nt, synthetic construct
  misc_feature 1..19: note = siRNA sense sequence
  source 1..19: mol_type = other RNA
gcatacttcttccttcaac

SEQ ID NO: 36005 - RNA, 19 nt, synthetic construct
  misc_feature 1..19: note = siRNA antisense sequence
  source 1..19: mol_type = other RNA
gttgaaggaagaagtatgc

SEQ ID NO: 36006 - RNA, 19 nt, synthetic construct
  misc_feature 1..19: note = siRNA sense sequence
  source 1..19: mol_type = other RNA
aaaatatgttactgcccat

SEQ ID NO: 36007 - RNA, 19 nt, synthetic construct
  misc_feature 1..19: note = siRNA antisense sequence
  source 1..19: mol_type = other RNA
atgggcagtaacatatttt

SEQ ID NO: 36008 - RNA, 19 nt, synthetic construct
  misc_feature 1..19: note = siRNA sense sequence
  source 1..19: mol_type = other RNA
aaatatgttactgcccatc

SEQ ID NO: 36009 - RNA, 19 nt, synthetic construct
  misc_feature 1..19: note = siRNA antisense sequence
  source 1..19: mol_type = other RNA
gatgggcagtaacatattt

SEQ ID NO: 36010 - RNA, 19 nt, synthetic construct
  misc_feature 1..19: note = siRNA sense sequence
  source 1..19: mol_type = other RNA
aatatgttactgcccatct

SEQ ID NO: 36011 - RNA, 19 nt, synthetic construct
  misc_feature 1..19: note = siRNA antisense sequence
  source 1..19: mol_type = other RNA
agatgggcagtaacatatt

SEQ ID NO: 36012 - RNA, 19 nt, synthetic construct
  misc_feature 1..19: note = siRNA sense sequence
  source 1..19: mol_type = other RNA
atatgttactgcccatctg

SEQ ID NO: 36013 - RNA, 19 nt, synthetic construct
  misc_feature 1..19: note = siRNA antisense sequence
  source 1..19: mol_type = other RNA
cagatgggcagtaacatat

SEQ ID NO: 36014 - RNA, 19 nt, synthetic construct
  misc_feature 1..19: note = siRNA sense sequence
  source 1..19: mol_type = other RNA
tatgttactgcccatctgt

SEQ ID NO: 36015 - RNA, 19 nt, synthetic construct
  misc_feature 1..19: note = siRNA antisense sequence
  source 1..19: mol_type = other RNA
acagatgggcagtaacata

SEQ ID NO: 36016 - RNA, 19 nt, synthetic construct
  misc_feature 1..19: note = siRNA sense sequence
  source 1..19: mol_type = other RNA
atgttactgcccatctgtg

SEQ ID NO: 36017 - RNA, 19 nt, synthetic construct
  misc_feature 1..19: note = siRNA antisense sequence
  source 1..19: mol_type = other RNA
cacagatgggcagtaacat

SEQ ID NO: 36018 - RNA, 19 nt, synthetic construct
  misc_feature 1..19: note = siRNA sense sequence
  source 1..19: mol_type = other RNA
tgttactgcccatctgtgt

SEQ ID NO: 36019 - RNA, 19 nt, synthetic construct
  misc_feature 1..19: note = siRNA antisense sequence
  source 1..19: mol_type = other RNA
acacagatgggcagtaaca

SEQ ID NO: 36020 - RNA, 19 nt, synthetic construct
  misc_feature 1..19: note = siRNA sense sequence
  source 1..19: mol_type = other RNA
gttactgcccatctgtgta

SEQ ID NO: 36021 - RNA, 19 nt, synthetic construct
  misc_feature 1..19: note = siRNA antisense sequence
  source 1..19: mol_type = other RNA
tacacagatgggcagtaac

SEQ ID NO: 36022 - RNA, 19 nt, synthetic construct
  misc_feature 1..19: note = siRNA sense sequence
  source 1..19: mol_type = other RNA
ttactgcccatctgtgtac

SEQ ID NO: 36023 - RNA, 19 nt, synthetic construct
  misc_feature 1..19: note = siRNA antisense sequence
  source 1..19: mol_type = other RNA
gtacacagatgggcagtaa

SEQ ID NO: 36024 - RNA, 19 nt, synthetic construct
  misc_feature 1..19: note = siRNA sense sequence
  source 1..19: mol_type = other RNA
aaggagttgtgctagattt

SEQ ID NO: 36025 - RNA, 19 nt, synthetic construct
  misc_feature 1..19: note = siRNA antisense sequence
  source 1..19: mol_type = other RNA
aaatctagcacaactcctt

SEQ ID NO: 36026 - RNA, 19 nt, synthetic construct
  misc_feature 1..19: note = siRNA sense sequence
  source 1..19: mol_type = other RNA
aggagttgtgctagatttt

SEQ ID NO: 36027 - RNA, 19 nt, synthetic construct
  misc_feature 1..19: note = siRNA antisense sequence
  source 1..19: mol_type = other RNA
aaaatctagcacaactcct

SEQ ID NO: 36028 - RNA, 19 nt, synthetic construct
  misc_feature 1..19: note = siRNA sense sequence
  source 1..19: mol_type = other RNA
ggagttgtgctagattttg

SEQ ID NO: 36029 - RNA, 19 nt, synthetic construct
  misc_feature 1..19: note = siRNA antisense sequence
  source 1..19: mol_type = other RNA
caaaatctagcacaactcc

SEQ ID NO: 36030 - RNA, 19 nt, synthetic construct
  misc_feature 1..19: note = siRNA sense sequence
  source 1..19: mol_type = other RNA
gagttgtgctagattttga

SEQ ID NO: 36031 - RNA, 19 nt, synthetic construct
  misc_feature 1..19: note = siRNA antisense sequence
  source 1..19: mol_type = other RNA
tcaaaatctagcacaactc

SEQ ID NO: 36032 - RNA, 19 nt, synthetic construct
  misc_feature 1..19: note = siRNA sense sequence
  source 1..19: mol_type = other RNA
gttgtgctagattttgata

SEQ ID NO: 36033 - RNA, 19 nt, synthetic construct
  misc_feature 1..19: note = siRNA antisense sequence
  source 1..19: mol_type = other RNA
tatcaaaatctagcacaac

SEQ ID NO: 36034 - RNA, 19 nt, synthetic construct
  misc_feature 1..19: note = siRNA sense sequence
  source 1..19: mol_type = other RNA
gtgctagattttgataaag

SEQ ID NO: 36035 - RNA, 19 nt, synthetic construct
  misc_feature 1..19: note = siRNA antisense sequence
  source 1..19: mol_type = other RNA
ctttatcaaaatctagcac

SEQ ID NO: 36036 - RNA, 19 nt, synthetic construct
  misc_feature 1..19: note = siRNA sense sequence
  source 1..19: mol_type = other RNA
tgctagattttgataaagg

SEQ ID NO: 36037 - RNA, 19 nt, synthetic construct
  misc_feature 1..19: note = siRNA antisense sequence
  source 1..19: mol_type = other RNA
cctttatcaaaatctagca

SEQ ID NO: 36038 - RNA, 19 nt, synthetic construct
  misc_feature 1..19: note = siRNA sense sequence
  source 1..19: mol_type = other RNA
gctagattttgataaagga

SEQ ID NO: 36039 - RNA, 19 nt, synthetic construct
  misc_feature 1..19: note = siRNA antisense sequence
  source 1..19: mol_type = other RNA
tcctttatcaaaatctagc

SEQ ID NO: 36040 - RNA, 19 nt, synthetic construct
  misc_feature 1..19: note = siRNA sense sequence
  source 1..19: mol_type = other RNA
aaagattacttctaggtag

SEQ ID NO: 36041 - RNA, 19 nt, synthetic construct
  misc_feature 1..19: note = siRNA antisense sequence
  source 1..19: mol_type = other RNA
ctacctagaagtaatcttt

SEQ ID NO: 36042 - RNA, 19 nt, synthetic construct
  misc_feature 1..19: note = siRNA sense sequence
  source 1..19: mol_type = other RNA
agattacttctaggtaggg

SEQ ID NO: 36043 - RNA, 19 nt, synthetic construct
  misc_feature 1..19: note = siRNA antisense sequence
  source 1..19: mol_type = other RNA
ccctacctagaagtaatct

SEQ ID NO: 36044 - RNA, 19 nt, synthetic construct
  misc_feature 1..19: note = siRNA sense sequence
  source 1..19: mol_type = other RNA
gattacttctaggtaggga

SEQ ID NO: 36045 - RNA, 19 nt, synthetic construct
  misc_feature 1..19: note = siRNA antisense sequence
  source 1..19: mol_type = other RNA
tccctacctagaagtaatc

SEQ ID NO: 36046 - RNA, 19 nt, synthetic construct
  misc_feature 1..19: note = siRNA sense sequence
  source 1..19: mol_type = other RNA
acttctaggtagggaggtc

SEQ ID NO: 36047 - RNA, 19 nt, synthetic construct
  misc_feature 1..19: note = siRNA antisense sequence
  source 1..19: mol_type = other RNA
gacctccctacctagaagt

SEQ ID NO: 36048 - RNA, 19 nt, synthetic construct
  misc_feature 1..19: note = siRNA sense sequence
  source 1..19: mol_type = other RNA
ctaggtagggaggtcaaga

SEQ ID NO: 36049 - RNA, 19 nt, synthetic construct
  misc_feature 1..19: note = siRNA antisense sequence
  source 1..19: mol_type = other RNA
tcttgacctccctacctag

SEQ ID NO: 36050 - RNA, 19 nt, synthetic construct
  misc_feature 1..19: note = siRNA sense sequence
  source 1..19: mol_type = other RNA
taggtagggaggtcaagaa

SEQ ID NO: 36051 - RNA, 19 nt, synthetic construct
  misc_feature 1..19: note = siRNA antisense sequence
  source 1..19: mol_type = other RNA
ttcttgacctccctaccta

SEQ ID NO: 36052 - RNA, 19 nt, synthetic construct
  misc_feature 1..19: note = siRNA sense sequence
  source 1..19: mol_type = other RNA
caaatagatatatgggtgt

SEQ ID NO: 36053 - RNA, 19 nt, synthetic construct
  misc_feature 1..19: note = siRNA antisense sequence
  source 1..19: mol_type = other RNA
acacccatatatctatttg

SEQ ID NO: 36054 - RNA, 19 nt, synthetic construct
  misc_feature 1..19: note = siRNA sense sequence
  source 1..19: mol_type = other RNA
aagcagttactattgtcgc

SEQ ID NO: 36055 - RNA, 19 nt, synthetic construct
  misc_feature 1..19: note = siRNA antisense sequence
  source 1..19: mol_type = other RNA
gcgacaatagtaactgctt

SEQ ID NO: 36056 - RNA, 19 nt, synthetic construct
  misc_feature 1..19: note = siRNA sense sequence
  source 1..19: mol_type = other RNA
agcagttactattgtcgcc

SEQ ID NO: 36057 - RNA, 19 nt, synthetic construct
  misc_feature 1..19: note = siRNA antisense sequence
  source 1..19: mol_type = other RNA
ggcgacaatagtaactgct

SEQ ID NO: 36058 - RNA, 19 nt, synthetic construct
  misc_feature 1..19: note = siRNA sense sequence
  source 1..19: mol_type = other RNA
gcagttactattgtcgcca

SEQ ID NO: 36059 - RNA, 19 nt, synthetic construct
  misc_feature 1..19: note = siRNA antisense sequence
  source 1..19: mol_type = other RNA
tggcgacaatagtaactgc

SEQ ID NO: 36060 - RNA, 19 nt, synthetic construct
  misc_feature 1..19: note = siRNA sense sequence
  source 1..19: mol_type = other RNA
cagttactattgtcgccaa

SEQ ID NO: 36061 - RNA, 19 nt, synthetic construct
  misc_feature 1..19: note = siRNA antisense sequence
  source 1..19: mol_type = other RNA
ttggcgacaatagtaactg

SEQ ID NO: 36062 - RNA, 19 nt, synthetic construct
  misc_feature 1..19: note = siRNA sense sequence
  source 1..19: mol_type = other RNA
agttactattgtcgccaaa

SEQ ID NO: 36063 - RNA, 19 nt, synthetic construct
  misc_feature 1..19: note = siRNA antisense sequence
  source 1..19: mol_type = other RNA
tttggcgacaatagtaact

SEQ ID NO: 36064 - RNA, 19 nt, synthetic construct
  misc_feature 1..19: note = siRNA sense sequence
  source 1..19: mol_type = other RNA
gttactattgtcgccaaaa

SEQ ID NO: 36065 - RNA, 19 nt, synthetic construct
  misc_feature 1..19: note = siRNA antisense sequence
  source 1..19: mol_type = other RNA
ttttggcgacaatagtaac

SEQ ID NO: 36066 - RNA, 19 nt, synthetic construct
  misc_feature 1..19: note = siRNA sense sequence
  source 1..19: mol_type = other RNA
ttactattgtcgccaaaat

SEQ ID NO: 36067 - RNA, 19 nt, synthetic construct
  misc_feature 1..19: note = siRNA antisense sequence
  source 1..19: mol_type = other RNA
attttggcgacaatagtaa

SEQ ID NO: 36068 - RNA, 19 nt, synthetic construct
  misc_feature 1..19: note = siRNA sense sequence
  source 1..19: mol_type = other RNA
tactattgtcgccaaaatt

SEQ ID NO: 36069 - RNA, 19 nt, synthetic construct
  misc_feature 1..19: note = siRNA antisense sequence
  source 1..19: mol_type = other RNA
aattttggcgacaatagta

SEQ ID NO: 36070 - RNA, 19 nt, synthetic construct
  misc_feature 1..19: note = siRNA sense sequence
  source 1..19: mol_type = other RNA
actattgtcgccaaaattt

SEQ ID NO: 36071 - RNA, 19 nt, synthetic construct
  misc_feature 1..19: note = siRNA antisense sequence
  source 1..19: mol_type = other RNA
aaattttggcgacaatagt

SEQ ID NO: 36072 - RNA, 19 nt, synthetic construct
  misc_feature 1..19: note = siRNA sense sequence
  source 1..19: mol_type = other RNA
ctattgtcgccaaaattta

SEQ ID NO: 36073 - RNA, 19 nt, synthetic construct
  misc_feature 1..19: note = siRNA antisense sequence
  source 1..19: mol_type = other RNA
taaattttggcgacaatag

SEQ ID NO: 36074 - RNA, 19 nt, synthetic construct
  misc_feature 1..19: note = siRNA sense sequence
  source 1..19: mol_type = other RNA
ttgtcgccaaaatttaaag

SEQ ID NO: 36075 - RNA, 19 nt, synthetic construct
  misc_feature 1..19: note = siRNA antisense sequence
  source 1..19: mol_type = other RNA
ctttaaattttggcgacaa

SEQ ID NO: 36076 - RNA, 19 nt, synthetic construct
  misc_feature 1..19: note = siRNA sense sequence
  source 1..19: mol_type = other RNA
tgtcgccaaaatttaaaga

SEQ ID NO: 36077 - RNA, 19 nt, synthetic construct
  misc_feature 1..19: note = siRNA antisense sequence
  source 1..19: mol_type = other RNA
tctttaaattttggcgaca

SEQ ID NO: 36078 - RNA, 19 nt, synthetic construct
  misc_feature 1..19: note = siRNA sense sequence
  source 1..19: mol_type = other RNA
gtcgccaaaatttaaagat

SEQ ID NO: 36079 - RNA, 19 nt, synthetic construct
  misc_feature 1..19: note = siRNA antisense sequence
  source 1..19: mol_type = other RNA
atctttaaattttggcgac

SEQ ID NO: 36080 - RNA, 19 nt, synthetic construct
  misc_feature 1..19: note = siRNA sense sequence
  source 1..19: mol_type = other RNA
ataaattagagtagtgtgg

SEQ ID NO: 36081 - RNA, 19 nt, synthetic construct
  misc_feature 1..19: note = siRNA antisense sequence
  source 1..19: mol_type = other RNA
ccacactactctaatttat

SEQ ID NO: 36082 - RNA, 19 nt, synthetic construct
  misc_feature 1..19: note = siRNA sense sequence
  source 1..19: mol_type = other RNA
taaattagagtagtgtgga

SEQ ID NO: 36083 - RNA, 19 nt, synthetic construct
  misc_feature 1..19: note = siRNA antisense sequence
  source 1..19: mol_type = other RNA
tccacactactctaattta

SEQ ID NO: 36084 - RNA, 19 nt, synthetic construct
  misc_feature 1..19: note = siRNA sense sequence
  source 1..19: mol_type = other RNA
aaattagagtagtgtggat

SEQ ID NO: 36085 - RNA, 19 nt, synthetic construct
  misc_feature 1..19: note = siRNA antisense sequence
  source 1..19: mol_type = other RNA
atccacactactctaattt

SEQ ID NO: 36086 - RNA, 19 nt, synthetic construct
  misc_feature 1..19: note = siRNA sense sequence
  source 1..19: mol_type = other RNA
aattagagtagtgtggatt

SEQ ID NO: 36087 - RNA, 19 nt, synthetic construct
  misc_feature 1..19: note = siRNA antisense sequence
  source 1..19: mol_type = other RNA
aatccacactactctaatt

SEQ ID NO: 36088 - RNA, 19 nt, synthetic construct
  misc_feature 1..19: note = siRNA sense sequence
  source 1..19: mol_type = other RNA
attagagtagtgtggattt

SEQ ID NO: 36089 - RNA, 19 nt, synthetic construct
  misc_feature 1..19: note = siRNA antisense sequence
  source 1..19: mol_type = other RNA
aaatccacactactctaat

SEQ ID NO: 36090 - RNA, 19 nt, synthetic construct
  misc_feature 1..19: note = siRNA sense sequence
  source 1..19: mol_type = other RNA
ttagagtagtgtggattta

SEQ ID NO: 36091 - RNA, 19 nt, synthetic construct
  misc_feature 1..19: note = siRNA antisense sequence
  source 1..19: mol_type = other RNA
taaatccacactactctaa

SEQ ID NO: 36092 - RNA, 19 nt, synthetic construct
  misc_feature 1..19: note = siRNA sense sequence
  source 1..19: mol_type = other RNA
tagagtagtgtggatttaa

SEQ ID NO: 36093 - RNA, 19 nt, synthetic construct
  misc_feature 1..19: note = siRNA antisense sequence
  source 1..19: mol_type = other RNA
ttaaatccacactactcta

SEQ ID NO: 36094 - RNA, 19 nt, synthetic construct
  misc_feature 1..19: note = siRNA sense sequence
  source 1..19: mol_type = other RNA
agagtagtgtggatttaaa

SEQ ID NO: 36095 - RNA, 19 nt, synthetic construct
  misc_feature 1..19: note = siRNA antisense sequence
  source 1..19: mol_type = other RNA
tttaaatccacactactct

SEQ ID NO: 36096 - RNA, 19 nt, synthetic construct
  misc_feature 1..19: note = siRNA sense sequence
  source 1..19: mol_type = other RNA
gagtagtgtggatttaaag

SEQ ID NO: 36097 - RNA, 19 nt, synthetic construct
  misc_feature 1..19: note = siRNA antisense sequence
  source 1..19: mol_type = other RNA
ctttaaatccacactactc

SEQ ID NO: 36098 - RNA, 19 nt, synthetic construct
  misc_feature 1..19: note = siRNA sense sequence
  source 1..19: mol_type = other RNA
agtagtgtggatttaaagt

SEQ ID NO: 36099 - RNA, 19 nt, synthetic construct
  misc_feature 1..19: note = siRNA antisense sequence
  source 1..19: mol_type = other RNA
actttaaatccacactact

SEQ ID NO: 36100 - RNA, 19 nt, synthetic construct
  misc_feature 1..19: note = siRNA sense sequence
  source 1..19: mol_type = other RNA
aaaagttcatagtgagcaa

SEQ ID NO: 36101 - RNA, 19 nt, synthetic construct
  misc_feature 1..19: note = siRNA antisense sequence
  source 1..19: mol_type = other RNA
ttgctcactatgaactttt

SEQ ID NO: 36102 - RNA, 19 nt, synthetic construct
  misc_feature 1..19: note = siRNA sense sequence
  source 1..19: mol_type = other RNA
aaagttcatagtgagcaag

SEQ ID NO: 36103 - RNA, 19 nt, synthetic construct
  misc_feature 1..19: note = siRNA antisense sequence
  source 1..19: mol_type = other RNA
cttgctcactatgaacttt

SEQ ID NO: 36104 - RNA, 19 nt, synthetic construct
  misc_feature 1..19: note = siRNA sense sequence
  source 1..19: mol_type = other RNA
aagttcatagtgagcaagg

SEQ ID NO: 36105 - RNA, 19 nt, synthetic construct
  misc_feature 1..19: note = siRNA antisense sequence
  source 1..19: mol_type = other RNA
ccttgctcactatgaactt

SEQ ID NO: 36106 - RNA, 19 nt, synthetic construct
  misc_feature 1..19: note = siRNA sense sequence
  source 1..19: mol_type = other RNA
agttcatagtgagcaaggg

SEQ ID NO: 36107 - RNA, 19 nt, synthetic construct
  misc_feature 1..19: note = siRNA antisense sequence
  source 1..19: mol_type = other RNA
cccttgctcactatgaact

SEQ ID NO: 36108 - RNA, 19 nt, synthetic construct
  misc_feature 1..19: note = siRNA sense sequence
  source 1..19: mol_type = other RNA
gttcatagtgagcaagggt

SEQ ID NO: 36109 - RNA, 19 nt, synthetic construct
  misc_feature 1..19: note = siRNA antisense sequence
  source 1..19: mol_type = other RNA
acccttgctcactatgaac

SEQ ID NO: 36110 - RNA, 19 nt, synthetic construct
  misc_feature 1..19: note = siRNA sense sequence
  source 1..19: mol_type = other RNA
ttcatagtgagcaagggtt

SEQ ID NO: 36111 - RNA, 19 nt, synthetic construct
  misc_feature 1..19: note = siRNA antisense sequence
  source 1..19: mol_type = other RNA
aacccttgctcactatgaa

SEQ ID NO: 36112 - RNA, 19 nt, synthetic construct
  misc_feature 1..19: note = siRNA sense sequence
  source 1..19: mol_type = other RNA
catagtgagcaagggttaa

SEQ ID NO: 36113 - RNA, 19 nt, synthetic construct
  misc_feature 1..19: note = siRNA antisense sequence
  source 1..19: mol_type = other RNA
ttaacccttgctcactatg

SEQ ID NO: 36114 - RNA, 19 nt, synthetic construct
  misc_feature 1..19: note = siRNA sense sequence
  source 1..19: mol_type = other RNA
atagtgagcaagggttaaa

SEQ ID NO: 36115 - RNA, 19 nt, synthetic construct
  misc_feature 1..19: note = siRNA antisense sequence
  source 1..19: mol_type = other RNA
tttaacccttgctcactat

SEQ ID NO: 36116 - RNA, 19 nt, synthetic construct
  misc_feature 1..19: note = siRNA sense sequence
  source 1..19: mol_type = other RNA
tagtgagcaagggttaaaa

SEQ ID NO: 36117 - RNA, 19 nt, synthetic construct
  misc_feature 1..19: note = siRNA antisense sequence
  source 1..19: mol_type = other RNA
ttttaacccttgctcacta

SEQ ID NO: 36118 - RNA, 19 nt, synthetic construct
  misc_feature 1..19: note = siRNA sense sequence
  source 1..19: mol_type = other RNA
agtgagcaagggttaaaat

SEQ ID NO: 36119 - RNA, 19 nt, synthetic construct
  misc_feature 1..19: note = siRNA antisense sequence
  source 1..19: mol_type = other RNA
attttaacccttgctcact

SEQ ID NO: 36120 - RNA, 19 nt, synthetic construct
  misc_feature 1..19: note = siRNA sense sequence
  source 1..19: mol_type = other RNA
gtgagcaagggttaaaata

SEQ ID NO: 36121 - RNA, 19 nt, synthetic construct
  misc_feature 1..19: note = siRNA antisense sequence
  source 1..19: mol_type = other RNA
tattttaacccttgctcac

SEQ ID NO: 36122 - RNA, 19 nt, synthetic construct
  misc_feature 1..19: note = siRNA sense sequence
  source 1..19: mol_type = other RNA
tgagcaagggttaaaatat

SEQ ID NO: 36123 - RNA, 19 nt, synthetic construct
  misc_feature 1..19: note = siRNA antisense sequence
  source 1..19: mol_type = other RNA
atattttaacccttgctca

SEQ ID NO: 36124 - RNA, 19 nt, synthetic construct
  misc_feature 1..19: note = siRNA sense sequence
  source 1..19: mol_type = other RNA
gagcaagggttaaaatatt

SEQ ID NO: 36125 - RNA, 19 nt, synthetic construct
  misc_feature 1..19: note = siRNA antisense sequence
  source 1..19: mol_type = other RNA
aatattttaacccttgctc

SEQ ID NO: 36126 - RNA, 19 nt, synthetic construct
  misc_feature 1..19: note = siRNA sense sequence
  source 1..19: mol_type = other RNA
gcaagggttaaaatattag

SEQ ID NO: 36127 - RNA, 19 nt, synthetic construct
  misc_feature 1..19: note = siRNA antisense sequence
  source 1..19: mol_type = other RNA
ctaatattttaacccttgc

SEQ ID NO: 36128 - RNA, 19 nt, synthetic construct
  misc_feature 1..19: note = siRNA sense sequence
  source 1..19: mol_type = other RNA
gggttaaaatattagagtg

SEQ ID NO: 36129 - RNA, 19 nt, synthetic construct
  misc_feature 1..19: note = siRNA antisense sequence
  source 1..19: mol_type = other RNA
cactctaatattttaaccc

SEQ ID NO: 36130 - RNA, 19 nt, synthetic construct
  misc_feature 1..19: note = siRNA sense sequence
  source 1..19: mol_type = other RNA
ttagagtgatttaatccac

SEQ ID NO: 36131 - RNA, 19 nt, synthetic construct
  misc_feature 1..19: note = siRNA antisense sequence
  source 1..19: mol_type = other RNA
gtggattaaatcactctaa

SEQ ID NO: 36132 - RNA, 19 nt, synthetic construct
  misc_feature 1..19: note = siRNA sense sequence
  source 1..19: mol_type = other RNA
ttttcaggatctatgtggc

SEQ ID NO: 36133 - RNA, 19 nt, synthetic construct
  misc_feature 1..19: note = siRNA antisense sequence
  source 1..19: mol_type = other RNA
gccacatagatcctgaaaa

SEQ ID NO: 36134 - RNA, 19 nt, synthetic construct
  misc_feature 1..19: note = siRNA sense sequence
  source 1..19: mol_type = other RNA
tttcaggatctatgtggct

SEQ ID NO: 36135 - RNA, 19 nt, synthetic construct
  misc_feature 1..19: note = siRNA antisense sequence
  source 1..19: mol_type = other RNA
agccacatagatcctgaaa

SEQ ID NO: 36136 - RNA, 19 nt, synthetic construct
  misc_feature 1..19: note = siRNA sense sequence
  source 1..19: mol_type = other RNA
ttcaggatctatgtggcta

SEQ ID NO: 36137 - RNA, 19 nt, synthetic construct
  misc_feature 1..19: note = siRNA antisense sequence
  source 1..19: mol_type = other RNA
tagccacatagatcctgaa

SEQ ID NO: 36138 - RNA, 19 nt, synthetic construct
  misc_feature 1..19: note = siRNA sense sequence
  source 1..19: mol_type = other RNA
tcaggatctatgtggctat

SEQ ID NO: 36139 - RNA, 19 nt, synthetic construct
  misc_feature 1..19: note = siRNA antisense sequence
  source 1..19: mol_type = other RNA
atagccacatagatcctga

SEQ ID NO: 36140 - RNA, 19 nt, synthetic construct
  misc_feature 1..19: note = siRNA sense sequence
  source 1..19: mol_type = other RNA
caggatctatgtggctata

SEQ ID NO: 36141 - RNA, 19 nt, synthetic construct
  misc_feature 1..19: note = siRNA antisense sequence
  source 1..19: mol_type = other RNA
tatagccacatagatcctg

SEQ ID NO: 36142 - RNA, 19 nt, synthetic construct
  misc_feature 1..19: note = siRNA sense sequence
  source 1..19: mol_type = other RNA
aggatctatgtggctatat

SEQ ID NO: 36143 - RNA, 19 nt, synthetic construct
  misc_feature 1..19: note = siRNA antisense sequence
  source 1..19: mol_type = other RNA
atatagccacatagatcct

SEQ ID NO: 36144 - RNA, 19 nt, synthetic construct
  misc_feature 1..19: note = siRNA sense sequence
  source 1..19: mol_type = other RNA
ggatctatgtggctatatg

SEQ ID NO: 36145 - RNA, 19 nt, synthetic construct
  misc_feature 1..19: note = siRNA antisense sequence
  source 1..19: mol_type = other RNA
catatagccacatagatcc

SEQ ID NO: 36146 - RNA, 19 nt, synthetic construct
  misc_feature 1..19: note = siRNA sense sequence
  source 1..19: mol_type = other RNA
gatctatgtggctatatgg

SEQ ID NO: 36147 - RNA, 19 nt, synthetic construct
  misc_feature 1..19: note = siRNA antisense sequence
  source 1..19: mol_type = other RNA
ccatatagccacatagatc

SEQ ID NO: 36148 - RNA, 19 nt, synthetic construct
  misc_feature 1..19: note = siRNA sense sequence
  source 1..19: mol_type = other RNA
gaagactgaatttagccac

SEQ ID NO: 36149 - RNA, 19 nt, synthetic construct
  misc_feature 1..19: note = siRNA antisense sequence
  source 1..19: mol_type = other RNA
gtggctaaattcagtcttc

SEQ ID NO: 36150 - RNA, 19 nt, synthetic construct
  misc_feature 1..19: note = siRNA sense sequence
  source 1..19: mol_type = other RNA
aagactgaatttagccacc

SEQ ID NO: 36151 - RNA, 19 nt, synthetic construct
  misc_feature 1..19: note = siRNA antisense sequence
  source 1..19: mol_type = other RNA
ggtggctaaattcagtctt

SEQ ID NO: 36152 - RNA, 19 nt, synthetic construct
  misc_feature 1..19: note = siRNA sense sequence
  source 1..19: mol_type = other RNA
agactgaatttagccacct

SEQ ID NO: 36153 - RNA, 19 nt, synthetic construct
  misc_feature 1..19: note = siRNA antisense sequence
  source 1..19: mol_type = other RNA
aggtggctaaattcagtct

SEQ ID NO: 36154 - RNA, 19 nt, synthetic construct
  misc_feature 1..19: note = siRNA sense sequence
  source 1..19: mol_type = other RNA
gactgaatttagccacctc

SEQ ID NO: 36155 - RNA, 19 nt, synthetic construct
  misc_feature 1..19: note = siRNA antisense sequence
  source 1..19: mol_type = other RNA
gaggtggctaaattcagtc

SEQ ID NO: 36156 - RNA, 19 nt, synthetic construct
  misc_feature 1..19: note = siRNA sense sequence
  source 1..19: mol_type = other RNA
actgaatttagccacctct

SEQ ID NO: 36157 - RNA, 19 nt, synthetic construct
  misc_feature 1..19: note = siRNA antisense sequence
  source 1..19: mol_type = other RNA
agaggtggctaaattcagt

SEQ ID NO: 36158 - RNA, 19 nt, synthetic construct
  misc_feature 1..19: note = siRNA sense sequence
  source 1..19: mol_type = other RNA
ctgaatttagccacctctg

SEQ ID NO: 36159 - RNA, 19 nt, synthetic construct
  misc_feature 1..19: note = siRNA antisense sequence
  source 1..19: mol_type = other RNA
cagaggtggctaaattcag

SEQ ID NO: 36160 - RNA, 19 nt, synthetic construct
  misc_feature 1..19: note = siRNA sense sequence
  source 1..19: mol_type = other RNA
tgaatttagccacctctga

SEQ ID NO: 36161 - RNA, 19 nt, synthetic construct
  misc_feature 1..19: note = siRNA antisense sequence
  source 1..19: mol_type = other RNA
tcagaggtggctaaattca

SEQ ID NO: 36162 - RNA, 19 nt, synthetic construct
  misc_feature 1..19: note = siRNA sense sequence
  source 1..19: mol_type = other RNA
gaatttagccacctctgaa

SEQ ID NO: 36163 - RNA, 19 nt, synthetic construct
  misc_feature 1..19: note = siRNA antisense sequence
  source 1..19: mol_type = other RNA
ttcagaggtggctaaattc

SEQ ID NO: 36164 - RNA, 19 nt, synthetic construct
  misc_feature 1..19: note = siRNA sense sequence
  source 1..19: mol_type = other RNA
agccacctctgaatgtacc

SEQ ID NO: 36165 - RNA, 19 nt, synthetic construct
  misc_feature 1..19: note = siRNA antisense sequence
  source 1..19: mol_type = other RNA
ggtacattcagaggtggct

SEQ ID NO: 36166 - RNA, 19 nt, synthetic construct
  misc_feature 1..19: note = siRNA sense sequence
  source 1..19: mol_type = other RNA
gccacctctgaatgtacct

SEQ ID NO: 36167 - RNA, 19 nt, synthetic construct
  misc_feature 1..19: note = siRNA antisense sequence
  source 1..19: mol_type = other RNA
aggtacattcagaggtggc

SEQ ID NO: 36168 - RNA, 19 nt, synthetic construct
  misc_feature 1..19: note = siRNA sense sequence
  source 1..19: mol_type = other RNA
ccacctctgaatgtacctg

SEQ ID NO: 36169 - RNA, 19 nt, synthetic construct
  misc_feature 1..19: note = siRNA antisense sequence
  source 1..19: mol_type = other RNA
caggtacattcagaggtgg

SEQ ID NO: 36170 - RNA, 19 nt, synthetic construct
  misc_feature 1..19: note = siRNA sense sequence
  source 1..19: mol_type = other RNA
cacctctgaatgtacctga

SEQ ID NO: 36171 - RNA, 19 nt, synthetic construct
  misc_feature 1..19: note = siRNA antisense sequence
  source 1..19: mol_type = other RNA
tcaggtacattcagaggtg

SEQ ID NO: 36172 - RNA, 19 nt, synthetic construct
  misc_feature 1..19: note = siRNA sense sequence
  source 1..19: mol_type = other RNA
acctctgaatgtacctgat

SEQ ID NO: 36173 - RNA, 19 nt, synthetic construct
  misc_feature 1..19: note = siRNA antisense sequence
  source 1..19: mol_type = other RNA
atcaggtacattcagaggt

SEQ ID NO: 36174 - RNA, 19 nt, synthetic construct
  misc_feature 1..19: note = siRNA sense sequence
  source 1..19: mol_type = other RNA
cctctgaatgtacctgatg

SEQ ID NO: 36175 - RNA, 19 nt, synthetic construct
  misc_feature 1..19: note = siRNA antisense sequence
  source 1..19: mol_type = other RNA
catcaggtacattcagagg

SEQ ID NO: 36176 - RNA, 19 nt, synthetic construct
  misc_feature 1..19: note = siRNA sense sequence
  source 1..19: mol_type = other RNA
ctctgaatgtacctgatga

SEQ ID NO: 36177 - RNA, 19 nt, synthetic construct
  misc_feature 1..19: note = siRNA antisense sequence
  source 1..19: mol_type = other RNA
tcatcaggtacattcagag

SEQ ID NO: 36178 - RNA, 19 nt, synthetic construct
  misc_feature 1..19: note = siRNA sense sequence
  source 1..19: mol_type = other RNA
tctgaatgtacctgatgag

SEQ ID NO: 36179 - RNA, 19 nt, synthetic construct
  misc_feature 1..19: note = siRNA antisense sequence
  source 1..19: mol_type = other RNA
ctcatcaggtacattcaga

SEQ ID NO: 36180 - RNA, 19 nt, synthetic construct
  misc_feature 1..19: note = siRNA sense sequence
  source 1..19: mol_type = other RNA
tgaatgtacctgatgaggc

SEQ ID NO: 36181 - RNA, 19 nt, synthetic construct
  misc_feature 1..19: note = siRNA antisense sequence
  source 1..19: mol_type = other RNA
gcctcatcaggtacattca

SEQ ID NO: 36182 - RNA, 19 nt, synthetic construct
  misc_feature 1..19: note = siRNA sense sequence
  source 1..19: mol_type = other RNA
gaatgtacctgatgaggct

SEQ ID NO: 36183 - RNA, 19 nt, synthetic construct
  misc_feature 1..19: note = siRNA antisense sequence
  source 1..19: mol_type = other RNA
agcctcatcaggtacattc

SEQ ID NO: 36184 - RNA, 19 nt, synthetic construct
  misc_feature 1..19: note = siRNA sense sequence
  source 1..19: mol_type = other RNA
aatgtacctgatgaggctc

SEQ ID NO: 36185 - RNA, 19 nt, synthetic construct
  misc_feature 1..19: note = siRNA antisense sequence
  source 1..19: mol_type = other RNA
gagcctcatcaggtacatt

SEQ ID NO: 36186 - RNA, 19 nt, synthetic construct
  misc_feature 1..19: note = siRNA sense sequence
  source 1..19: mol_type = other RNA
atgtacctgatgaggctct

SEQ ID NO: 36187 - RNA, 19 nt, synthetic construct
  misc_feature 1..19: note = siRNA antisense sequence
  source 1..19: mol_type = other RNA
agagcctcatcaggtacat

SEQ ID NO: 36188 - RNA, 19 nt, synthetic construct
  misc_feature 1..19: note = siRNA sense sequence
  source 1..19: mol_type = other RNA
tacctgatgaggctctgta

SEQ ID NO: 36189 - RNA, 19 nt, synthetic construct
  misc_feature 1..19: note = siRNA antisense sequence
  source 1..19: mol_type = other RNA
tacagagcctcatcaggta

SEQ ID NO: 36190 - RNA, 19 nt, synthetic construct
  misc_feature 1..19: note = siRNA sense sequence
  source 1..19: mol_type = other RNA
acctgatgaggctctgtaa

SEQ ID NO: 36191 - RNA, 19 nt, synthetic construct
  misc_feature 1..19: note = siRNA antisense sequence
  source 1..19: mol_type = other RNA
ttacagagcctcatcaggt

SEQ ID NO: 36192 - RNA, 19 nt, synthetic construct
  misc_feature 1..19: note = siRNA sense sequence
  source 1..19: mol_type = other RNA
cctgatgaggctctgtaat

SEQ ID NO: 36193 - RNA, 19 nt, synthetic construct
  misc_feature 1..19: note = siRNA antisense sequence
  source 1..19: mol_type = other RNA
attacagagcctcatcagg

SEQ ID NO: 36194 - RNA, 19 nt, synthetic construct
  misc_feature 1..19: note = siRNA sense sequence
  source 1..19: mol_type = other RNA
ctgatgaggctctgtaatt

SEQ ID NO: 36195 - RNA, 19 nt, synthetic construct
  misc_feature 1..19: note = siRNA antisense sequence
  source 1..19: mol_type = other RNA
aattacagagcctcatcag

SEQ ID NO: 36196 - RNA, 19 nt, synthetic construct
  misc_feature 1..19: note = siRNA sense sequence
  source 1..19: mol_type = other RNA
gatgaggctctgtaatttt

SEQ ID NO: 36197 - RNA, 19 nt, synthetic construct
  misc_feature 1..19: note = siRNA antisense sequence
  source 1..19: mol_type = other RNA
aaaattacagagcctcatc

SEQ ID NO: 36198 - RNA, 19 nt, synthetic construct
  misc_feature 1..19: note = siRNA sense sequence
  source 1..19: mol_type = other RNA
atgaggctctgtaatttta

SEQ ID NO: 36199 - RNA, 19 nt, synthetic construct
  misc_feature 1..19: note = siRNA antisense sequence
  source 1..19: mol_type = other RNA
taaaattacagagcctcat

SEQ ID NO: 36200 - RNA, 19 nt, synthetic construct
  misc_feature 1..19: note = siRNA sense sequence
  source 1..19: mol_type = other RNA
tgaggctctgtaattttat

SEQ ID NO: 36201 - RNA, 19 nt, synthetic construct
  misc_feature 1..19: note = siRNA antisense sequence
  source 1..19: mol_type = other RNA
ataaaattacagagcctca

SEQ ID NO: 36202 - RNA, 19 nt, synthetic construct
  misc_feature 1..19: note = siRNA sense sequence
  source 1..19: mol_type = other RNA
tgtttgtttgtttgtttgg

SEQ ID NO: 36203 - RNA, 19 nt, synthetic construct
  misc_feature 1..19: note = siRNA antisense sequence
  source 1..19: mol_type = other RNA
ccaaacaaacaaacaaaca

SEQ ID NO: 36204 - RNA, 19 nt, synthetic construct
  misc_feature 1..19: note = siRNA sense sequence
  source 1..19: mol_type = other RNA
gtttgtttgtttgtttggt

SEQ ID NO: 36205 - RNA, 19 nt, synthetic construct
  misc_feature 1..19: note = siRNA antisense sequence
  source 1..19: mol_type = other RNA
accaaacaaacaaacaaac

SEQ ID NO: 36206 - RNA, 19 nt, synthetic construct
  misc_feature 1..19: note = siRNA sense sequence
  source 1..19: mol_type = other RNA
aatcttggctcactgcaac

SEQ ID NO: 36207 - RNA, 19 nt, synthetic construct
  misc_feature 1..19: note = siRNA antisense sequence
  source 1..19: mol_type = other RNA
gttgcagtgagccaagatt

SEQ ID NO: 36208 - RNA, 19 nt, synthetic construct
  misc_feature 1..19: note = siRNA sense sequence
  source 1..19: mol_type = other RNA
atcttggctcactgcaacc

SEQ ID NO: 36209 - RNA, 19 nt, synthetic construct
  misc_feature 1..19: note = siRNA antisense sequence
  source 1..19: mol_type = other RNA
ggttgcagtgagccaagat

SEQ ID NO: 36210 - RNA, 19 nt, synthetic construct
  misc_feature 1..19: note = siRNA sense sequence
  source 1..19: mol_type = other RNA
tcttggctcactgcaacct

SEQ ID NO: 36211 - RNA, 19 nt, synthetic construct
  misc_feature 1..19: note = siRNA antisense sequence
  source 1..19: mol_type = other RNA
aggttgcagtgagccaaga

SEQ ID NO: 36212 - RNA, 19 nt, synthetic construct
  misc_feature 1..19: note = siRNA sense sequence
  source 1..19: mol_type = other RNA
ggctcactgcaacctctgt

SEQ ID NO: 36213 - RNA, 19 nt, synthetic construct
  misc_feature 1..19: note = siRNA antisense sequence
  source 1..19: mol_type = other RNA
acagaggttgcagtgagcc

SEQ ID NO: 36214 - RNA, 19 nt, synthetic construct
  misc_feature 1..19: note = siRNA sense sequence
  source 1..19: mol_type = other RNA
gctcactgcaacctctgtc

SEQ ID NO: 36215 - RNA, 19 nt, synthetic construct
  misc_feature 1..19: note = siRNA antisense sequence
  source 1..19: mol_type = other RNA
gacagaggttgcagtgagc

SEQ ID NO: 36216 - RNA, 19 nt, synthetic construct
  misc_feature 1..19: note = siRNA sense sequence
  source 1..19: mol_type = other RNA
ctcactgcaacctctgtct

SEQ ID NO: 36217 - RNA, 19 nt, synthetic construct
  misc_feature 1..19: note = siRNA antisense sequence
  source 1..19: mol_type = other RNA
agacagaggttgcagtgag

SEQ ID NO: 36218 - RNA, 19 nt, synthetic construct
  misc_feature 1..19: note = siRNA sense sequence
  source 1..19: mol_type = other RNA
tcactgcaacctctgtctc

SEQ ID NO: 36219 - RNA, 19 nt, synthetic construct
  misc_feature 1..19: note = siRNA antisense sequence
  source 1..19: mol_type = other RNA
gagacagaggttgcagtga

SEQ ID NO: 36220 - RNA, 19 nt, synthetic construct
  misc_feature 1..19: note = siRNA sense sequence
  source 1..19: mol_type = other RNA
ctctgtctcccaggttcaa

SEQ ID NO: 36221 - RNA, 19 nt, synthetic construct
  misc_feature 1..19: note = siRNA antisense sequence
  source 1..19: mol_type = other RNA
ttgaacctgggagacagag

SEQ ID NO: 36222 - RNA, 19 nt, synthetic construct
  misc_feature 1..19: note = siRNA sense sequence
  source 1..19: mol_type = other RNA
tctgtctcccaggttcaag

SEQ ID NO: 36223 - RNA, 19 nt, synthetic construct
  misc_feature 1..19: note = siRNA antisense sequence
  source 1..19: mol_type = other RNA
cttgaacctgggagacaga

SEQ ID NO: 36224 - RNA, 19 nt, synthetic construct
  misc_feature 1..19: note = siRNA sense sequence
  source 1..19: mol_type = other RNA
ctgtctcccaggttcaagc

SEQ ID NO: 36225 - RNA, 19 nt, synthetic construct
  misc_feature 1..19: note = siRNA antisense sequence
  source 1..19: mol_type = other RNA
gcttgaacctgggagacag

SEQ ID NO: 36226 - RNA, 19 nt, synthetic construct
  misc_feature 1..19: note = siRNA sense sequence
  source 1..19: mol_type = other RNA
tgtctcccaggttcaagcg

SEQ ID NO: 36227 - RNA, 19 nt, synthetic construct
  misc_feature 1..19: note = siRNA antisense sequence
  source 1..19: mol_type = other RNA
cgcttgaacctgggagaca

SEQ ID NO: 36228 - RNA, 19 nt, synthetic construct
  misc_feature 1..19: note = siRNA sense sequence
  source 1..19: mol_type = other RNA
gtctcccaggttcaagcgg

SEQ ID NO: 36229 - RNA, 19 nt, synthetic construct
  misc_feature 1..19: note = siRNA antisense sequence
  source 1..19: mol_type = other RNA
ccgcttgaacctgggagac

SEQ ID NO: 36230 - RNA, 19 nt, synthetic construct
  misc_feature 1..19: note = siRNA sense sequence
  source 1..19: mol_type = other RNA
tctcccaggttcaagcggt

SEQ ID NO: 36231 - RNA, 19 nt, synthetic construct
  misc_feature 1..19: note = siRNA antisense sequence
  source 1..19: mol_type = other RNA
accgcttgaacctgggaga

SEQ ID NO: 36232 - RNA, 19 nt, synthetic construct
  misc_feature 1..19: note = siRNA sense sequence
  source 1..19: mol_type = other RNA
ctcccaggttcaagcggtg

SEQ ID NO: 36233 - RNA, 19 nt, synthetic construct
  misc_feature 1..19: note = siRNA antisense sequence
  source 1..19: mol_type = other RNA
caccgcttgaacctgggag

SEQ ID NO: 36234 - RNA, 19 nt, synthetic construct
  misc_feature 1..19: note = siRNA sense sequence
  source 1..19: mol_type = other RNA
tcccaggttcaagcggtgc

SEQ ID NO: 36235 - RNA, 19 nt, synthetic construct
  misc_feature 1..19: note = siRNA antisense sequence
  source 1..19: mol_type = other RNA
gcaccgcttgaacctggga

SEQ ID NO: 36236 - RNA, 19 nt, synthetic construct
  misc_feature 1..19: note = siRNA sense sequence
  source 1..19: mol_type = other RNA
ccaccacacctggctaata

SEQ ID NO: 36237 - RNA, 19 nt, synthetic construct
  misc_feature 1..19: note = siRNA antisense sequence
  source 1..19: mol_type = other RNA
tattagccaggtgtggtgg

SEQ ID NO: 36238 - RNA, 19 nt, synthetic construct
  misc_feature 1..19: note = siRNA sense sequence
  source 1..19: mol_type = other RNA
caccacacctggctaatat

SEQ ID NO: 36239 - RNA, 19 nt, synthetic construct
  misc_feature 1..19: note = siRNA antisense sequence
  source 1..19: mol_type = other RNA
atattagccaggtgtggtg

SEQ ID NO: 36240 - RNA, 19 nt, synthetic construct
  misc_feature 1..19: note = siRNA sense sequence
  source 1..19: mol_type = other RNA
accacacctggctaatatt

SEQ ID NO: 36241 - RNA, 19 nt, synthetic construct
  misc_feature 1..19: note = siRNA antisense sequence
  source 1..19: mol_type = other RNA
aatattagccaggtgtggt

SEQ ID NO: 36242 - RNA, 19 nt, synthetic construct
  misc_feature 1..19: note = siRNA sense sequence
  source 1..19: mol_type = other RNA
ccacacctggctaatattt

SEQ ID NO: 36243 - RNA, 19 nt, synthetic construct
  misc_feature 1..19: note = siRNA antisense sequence
  source 1..19: mol_type = other RNA
aaatattagccaggtgtgg

SEQ ID NO: 36244 - RNA, 19 nt, synthetic construct
  misc_feature 1..19: note = siRNA sense sequence
  source 1..19: mol_type = other RNA
cacacctggctaatatttg

SEQ ID NO: 36245 - RNA, 19 nt, synthetic construct
  misc_feature 1..19: note = siRNA antisense sequence
  source 1..19: mol_type = other RNA
caaatattagccaggtgtg

SEQ ID NO: 36246 - RNA, 19 nt, synthetic construct
  misc_feature 1..19: note = siRNA sense sequence
  source 1..19: mol_type = other RNA
ctgttgaccaggttagcct

SEQ ID NO: 36247 - RNA, 19 nt, synthetic construct
  misc_feature 1..19: note = siRNA antisense sequence
  source 1..19: mol_type = other RNA
aggctaacctggtcaacag

SEQ ID NO: 36248 - RNA, 19 nt, synthetic construct
  misc_feature 1..19: note = siRNA sense sequence
  source 1..19: mol_type = other RNA
tgaccaggttagcctcaaa

SEQ ID NO: 36249 - RNA, 19 nt, synthetic construct
  misc_feature 1..19: note = siRNA antisense sequence
  source 1..19: mol_type = other RNA
tttgaggctaacctggtca

SEQ ID NO: 36250 - RNA, 19 nt, synthetic construct
  misc_feature 1..19: note = siRNA sense sequence
  source 1..19: mol_type = other RNA
ctgacctcaggtgatccac

SEQ ID NO: 36251 - RNA, 19 nt, synthetic construct
  misc_feature 1..19: note = siRNA antisense sequence
  source 1..19: mol_type = other RNA
gtggatcacctgaggtcag

SEQ ID NO: 36252 - RNA, 19 nt, synthetic construct
  misc_feature 1..19: note = siRNA sense sequence
  source 1..19: mol_type = other RNA
gtgatccacccacctctca

SEQ ID NO: 36253 - RNA, 19 nt, synthetic construct
  misc_feature 1..19: note = siRNA antisense sequence
  source 1..19: mol_type = other RNA
tgagaggtgggtggatcac

SEQ ID NO: 36254 - RNA, 19 nt, synthetic construct
  misc_feature 1..19: note = siRNA sense sequence
  source 1..19: mol_type = other RNA
tgatccacccacctctcaa

SEQ ID NO: 36255 - RNA, 19 nt, synthetic construct
  misc_feature 1..19: note = siRNA antisense sequence
  source 1..19: mol_type = other RNA
ttgagaggtgggtggatca

SEQ ID NO: 36256 - RNA, 19 nt, synthetic construct
  misc_feature 1..19: note = siRNA sense sequence
  source 1..19: mol_type = other RNA
gatccacccacctctcaaa

SEQ ID NO: 36257 - RNA, 19 nt, synthetic construct
  misc_feature 1..19: note = siRNA antisense sequence
  source 1..19: mol_type = other RNA
tttgagaggtgggtggatc

SEQ ID NO: 36258 - RNA, 19 nt, synthetic construct
  misc_feature 1..19: note = siRNA sense sequence
  source 1..19: mol_type = other RNA
atccacccacctctcaaag

SEQ ID NO: 36259 - RNA, 19 nt, synthetic construct
  misc_feature 1..19: note = siRNA antisense sequence
  source 1..19: mol_type = other RNA
ctttgagaggtgggtggat

SEQ ID NO: 36260 - RNA, 19 nt, synthetic construct
  misc_feature 1..19: note = siRNA sense sequence
  source 1..19: mol_type = other RNA
tccacccacctctcaaagt

SEQ ID NO: 36261 - RNA, 19 nt, synthetic construct
  misc_feature 1..19: note = siRNA antisense sequence
  source 1..19: mol_type = other RNA
actttgagaggtgggtgga

SEQ ID NO: 36262 - RNA, 19 nt, synthetic construct
  misc_feature 1..19: note = siRNA sense sequence
  source 1..19: mol_type = other RNA
ccacccacctctcaaagtg

SEQ ID NO: 36263 - RNA, 19 nt, synthetic construct
  misc_feature 1..19: note = siRNA antisense sequence
  source 1..19: mol_type = other RNA
cactttgagaggtgggtgg

SEQ ID NO: 36264 - RNA, 19 nt, synthetic construct
  misc_feature 1..19: note = siRNA sense sequence
  source 1..19: mol_type = other RNA
cacccacctctcaaagtgc

SEQ ID NO: 36265 - RNA, 19 nt, synthetic construct
  misc_feature 1..19: note = siRNA antisense sequence
  source 1..19: mol_type = other RNA
gcactttgagaggtgggtg

SEQ ID NO: 36266 - RNA, 19 nt, synthetic construct
  misc_feature 1..19: note = siRNA sense sequence
  source 1..19: mol_type = other RNA
acccacctctcaaagtgct

SEQ ID NO: 36267 - RNA, 19 nt, synthetic construct
  misc_feature 1..19: note = siRNA antisense sequence
  source 1..19: mol_type = other RNA
agcactttgagaggtgggt

SEQ ID NO: 36268 - RNA, 19 nt, synthetic construct
  misc_feature 1..19: note = siRNA sense sequence
  source 1..19: mol_type = other RNA
cctctcaaagtgctgggat

SEQ ID NO: 36269 - RNA, 19 nt, synthetic construct
  misc_feature 1..19: note = siRNA antisense sequence
  source 1..19: mol_type = other RNA
atcccagcactttgagagg

SEQ ID NO: 36270 - RNA, 19 nt, synthetic construct
  misc_feature 1..19: note = siRNA sense sequence
  source 1..19: mol_type = other RNA
ctctcaaagtgctgggatt

SEQ ID NO: 36271 - RNA, 19 nt, synthetic construct
  misc_feature 1..19: note = siRNA antisense sequence
  source 1..19: mol_type = other RNA
aatcccagcactttgagag

SEQ ID NO: 36272 - RNA, 19 nt, synthetic construct
  misc_feature 1..19: note = siRNA sense sequence
  source 1..19: mol_type = other RNA
tctcaaagtgctgggatta

SEQ ID NO: 36273 - RNA, 19 nt, synthetic construct
  misc_feature 1..19: note = siRNA antisense sequence
  source 1..19: mol_type = other RNA
taatcccagcactttgaga

SEQ ID NO: 36274 - RNA, 19 nt, synthetic construct
  misc_feature 1..19: note = siRNA sense sequence
  source 1..19: mol_type = other RNA
ctcaaagtgctgggattac

SEQ ID NO: 36275 - RNA, 19 nt, synthetic construct
  misc_feature 1..19: note = siRNA antisense sequence
  source 1..19: mol_type = other RNA
gtaatcccagcactttgag

SEQ ID NO: 36276 - RNA, 19 nt, synthetic construct
  misc_feature 1..19: note = siRNA sense sequence
  source 1..19: mol_type = other RNA
attcttagttacatctagg

SEQ ID NO: 36277 - RNA, 19 nt, synthetic construct
  misc_feature 1..19: note = siRNA antisense sequence
  source 1..19: mol_type = other RNA
cctagatgtaactaagaat

SEQ ID NO: 36278 - RNA, 19 nt, synthetic construct
  misc_feature 1..19: note = siRNA sense sequence
  source 1..19: mol_type = other RNA
ttcttagttacatctagga

SEQ ID NO: 36279 - RNA, 19 nt, synthetic construct
  misc_feature 1..19: note = siRNA antisense sequence
  source 1..19: mol_type = other RNA
tcctagatgtaactaagaa

SEQ ID NO: 36280 - RNA, 19 nt, synthetic construct
  misc_feature 1..19: note = siRNA sense sequence
  source 1..19: mol_type = other RNA
tcttagttacatctaggag

SEQ ID NO: 36281 - RNA, 19 nt, synthetic construct
  misc_feature 1..19: note = siRNA antisense sequence
  source 1..19: mol_type = other RNA
ctcctagatgtaactaaga

SEQ ID NO: 36282 - RNA, 19 nt, synthetic construct
  misc_feature 1..19: note = siRNA sense sequence
  source 1..19: mol_type = other RNA
ccagtaccaaagcaggaat

SEQ ID NO: 36283 - RNA, 19 nt, synthetic construct
  misc_feature 1..19: note = siRNA antisense sequence
  source 1..19: mol_type = other RNA
attcctgctttggtactgg

SEQ ID NO: 36284 - RNA, 19 nt, synthetic construct
  misc_feature 1..19: note = siRNA sense sequence
  source 1..19: mol_type = other RNA
cagtaccaaagcaggaatt

SEQ ID NO: 36285 - RNA, 19 nt, synthetic construct
  misc_feature 1..19: note = siRNA antisense sequence
  source 1..19: mol_type = other RNA
aattcctgctttggtactg

SEQ ID NO: 36286 - RNA, 19 nt, synthetic construct
  misc_feature 1..19: note = siRNA sense sequence
  source 1..19: mol_type = other RNA
aaagcaggaatttggcacc

SEQ ID NO: 36287 - RNA, 19 nt, synthetic construct
  misc_feature 1..19: note = siRNA antisense sequence
  source 1..19: mol_type = other RNA
ggtgccaaattcctgcttt

SEQ ID NO: 36288 - RNA, 19 nt, synthetic construct
  misc_feature 1..19: note = siRNA sense sequence
  source 1..19: mol_type = other RNA
aagcaggaatttggcacca

SEQ ID NO: 36289 - RNA, 19 nt, synthetic construct
  misc_feature 1..19: note = siRNA antisense sequence
  source 1..19: mol_type = other RNA
tggtgccaaattcctgctt

SEQ ID NO: 36290 - RNA, 19 nt, synthetic construct
  misc_feature 1..19: note = siRNA sense sequence
  source 1..19: mol_type = other RNA
gcaggaatttggcaccatc

SEQ ID NO: 36291 - RNA, 19 nt, synthetic construct
  misc_feature 1..19: note = siRNA antisense sequence
  source 1..19: mol_type = other RNA
gatggtgccaaattcctgc

SEQ ID NO: 36292 - RNA, 19 nt, synthetic construct
  misc_feature 1..19: note = siRNA sense sequence
  source 1..19: mol_type = other RNA
aggaatttggcaccatcca

SEQ ID NO: 36293 - RNA, 19 nt, synthetic construct
  misc_feature 1..19: note = siRNA antisense sequence
  source 1..19: mol_type = other RNA
tggatggtgccaaattcct

SEQ ID NO: 36294 - RNA, 19 nt, synthetic construct
  misc_feature 1..19: note = siRNA sense sequence
  source 1..19: mol_type = other RNA
gaatttggcaccatccatt

SEQ ID NO: 36295 - RNA, 19 nt, synthetic construct
  misc_feature 1..19: note = siRNA antisense sequence
  source 1..19: mol_type = other RNA
aatggatggtgccaaattc

SEQ ID NO: 36296 - RNA, 19 nt, synthetic construct
  misc_feature 1..19: note = siRNA sense sequence
  source 1..19: mol_type = other RNA
aatttggcaccatccattt

SEQ ID NO: 36297 - RNA, 19 nt, synthetic construct
  misc_feature 1..19: note = siRNA antisense sequence
  source 1..19: mol_type = other RNA
aaatggatggtgccaaatt

SEQ ID NO: 36298 - RNA, 19 nt, synthetic construct
  misc_feature 1..19: note = siRNA sense sequence
  source 1..19: mol_type = other RNA
atttggcaccatccatttg

SEQ ID NO: 36299 - RNA, 19 nt, synthetic construct
  misc_feature 1..19: note = siRNA antisense sequence
  source 1..19: mol_type = other RNA
caaatggatggtgccaaat

SEQ ID NO: 36300 - RNA, 19 nt, synthetic construct
  misc_feature 1..19: note = siRNA sense sequence
  source 1..19: mol_type = other RNA
tttggcaccatccatttga

SEQ ID NO: 36301 - RNA, 19 nt, synthetic construct
  misc_feature 1..19: note = siRNA antisense sequence
  source 1..19: mol_type = other RNA
tcaaatggatggtgccaaa

SEQ ID NO: 36302 - RNA, 19 nt, synthetic construct
  misc_feature 1..19: note = siRNA sense sequence
  source 1..19: mol_type = other RNA
cctcatcaaatatgtagta

SEQ ID NO: 36303 - RNA, 19 nt, synthetic construct
  misc_feature 1..19: note = siRNA antisense sequence
  source 1..19: mol_type = other RNA
tactacatatttgatgagg

SEQ ID NO: 36304 - RNA, 19 nt, synthetic construct
  misc_feature 1..19: note = siRNA sense sequence
  source 1..19: mol_type = other RNA
tcaaatatgtagtatgtgc

SEQ ID NO: 36305 - RNA, 19 nt, synthetic construct
  misc_feature 1..19: note = siRNA antisense sequence
  source 1..19: mol_type = other RNA
gcacatactacatatttga

SEQ ID NO: 36306 - RNA, 19 nt, synthetic construct
  misc_feature 1..19: note = siRNA sense sequence
  source 1..19: mol_type = other RNA
caaatatgtagtatgtgcc

SEQ ID NO: 36307 - RNA, 19 nt, synthetic construct
  misc_feature 1..19: note = siRNA antisense sequence
  source 1..19: mol_type = other RNA
ggcacatactacatatttg

SEQ ID NO: 36308 - RNA, 19 nt, synthetic construct
  misc_feature 1..19: note = siRNA sense sequence
  source 1..19: mol_type = other RNA
aaatatgtagtatgtgcca

SEQ ID NO: 36309 - RNA, 19 nt, synthetic construct
  misc_feature 1..19: note = siRNA antisense sequence
  source 1..19: mol_type = other RNA
tggcacatactacatattt

SEQ ID NO: 36310 - RNA, 19 nt, synthetic construct
  misc_feature 1..19: note = siRNA sense sequence
  source 1..19: mol_type = other RNA
ggcactgggtagacccttt

SEQ ID NO: 36311 - RNA, 19 nt, synthetic construct
  misc_feature 1..19: note = siRNA antisense sequence
  source 1..19: mol_type = other RNA
aaagggtctacccagtgcc

SEQ ID NO: 36312 - RNA, 19 nt, synthetic construct
  misc_feature 1..19: note = siRNA sense sequence
  source 1..19: mol_type = other RNA
gcactgggtagacccttta

SEQ ID NO: 36313 - RNA, 19 nt, synthetic construct
  misc_feature 1..19: note = siRNA antisense sequence
  source 1..19: mol_type = other RNA
taaagggtctacccagtgc

SEQ ID NO: 36314 - RNA, 19 nt, synthetic construct
  misc_feature 1..19: note = siRNA sense sequence
  source 1..19: mol_type = other RNA
cactgggtagaccctttag

SEQ ID NO: 36315 - RNA, 19 nt, synthetic construct
  misc_feature 1..19: note = siRNA antisense sequence
  source 1..19: mol_type = other RNA
ctaaagggtctacccagtg

SEQ ID NO: 36316 - RNA, 19 nt, synthetic construct
  misc_feature 1..19: note = siRNA sense sequence
  source 1..19: mol_type = other RNA
actgggtagaccctttaga

SEQ ID NO: 36317 - RNA, 19 nt, synthetic construct
  misc_feature 1..19: note = siRNA antisense sequence
  source 1..19: mol_type = other RNA
tctaaagggtctacccagt

SEQ ID NO: 36318 - RNA, 19 nt, synthetic construct
  misc_feature 1..19: note = siRNA sense sequence
  source 1..19: mol_type = other RNA
ctgggtagaccctttagat

SEQ ID NO: 36319 - RNA, 19 nt, synthetic construct
  misc_feature 1..19: note = siRNA antisense sequence
  source 1..19: mol_type = other RNA
atctaaagggtctacccag

SEQ ID NO: 36320 - RNA, 19 nt, synthetic construct
  misc_feature 1..19: note = siRNA sense sequence
  source 1..19: mol_type = other RNA
tgggtagaccctttagata

SEQ ID NO: 36321 - RNA, 19 nt, synthetic construct
  misc_feature 1..19: note = siRNA antisense sequence
  source 1..19: mol_type = other RNA
tatctaaagggtctaccca

SEQ ID NO: 36322 - RNA, 19 nt, synthetic construct
  misc_feature 1..19: note = siRNA sense sequence
  source 1..19: mol_type = other RNA
gggtagaccctttagatat

SEQ ID NO: 36323 - RNA, 19 nt, synthetic construct
  misc_feature 1..19: note = siRNA antisense sequence
  source 1..19: mol_type = other RNA
atatctaaagggtctaccc

SEQ ID NO: 36324 - RNA, 19 nt, synthetic construct
  misc_feature 1..19: note = siRNA sense sequence
  source 1..19: mol_type = other RNA
ggtagaccctttagatata

SEQ ID NO: 36325 - RNA, 19 nt, synthetic construct
  misc_feature 1..19: note = siRNA antisense sequence
  source 1..19: mol_type = other RNA
tatatctaaagggtctacc

SEQ ID NO: 36326 - RNA, 19 nt, synthetic construct
  misc_feature 1..19: note = siRNA sense sequence
  source 1..19: mol_type = other RNA
gtagaccctttagatatat

SEQ ID NO: 36327 - RNA, 19 nt, synthetic construct
  misc_feature 1..19: note = siRNA antisense sequence
  source 1..19: mol_type = other RNA
atatatctaaagggtctac

SEQ ID NO: 36328 - RNA, 19 nt, synthetic construct
  misc_feature 1..19: note = siRNA sense sequence
  source 1..19: mol_type = other RNA
tagaccctttagatatatc

SEQ ID NO: 36329 - RNA, 19 nt, synthetic construct
  misc_feature 1..19: note = siRNA antisense sequence
  source 1..19: mol_type = other RNA
gatatatctaaagggtcta

SEQ ID NO: 36330 - RNA, 19 nt, synthetic construct
  misc_feature 1..19: note = siRNA sense sequence
  source 1..19: mol_type = other RNA
caactggtgaatttatcaa

SEQ ID NO: 36331 - RNA, 19 nt, synthetic construct
  misc_feature 1..19: note = siRNA antisense sequence
  source 1..19: mol_type = other RNA
ttgataaattcaccagttg

SEQ ID NO: 36332 - RNA, 19 nt, synthetic construct
  misc_feature 1..19: note = siRNA sense sequence
  source 1..19: mol_type = other RNA
aactggtgaatttatcaac

SEQ ID NO: 36333 - RNA, 19 nt, synthetic construct
  misc_feature 1..19: note = siRNA antisense sequence
  source 1..19: mol_type = other RNA
gttgataaattcaccagtt

SEQ ID NO: 36334 - RNA, 19 nt, synthetic construct
  misc_feature 1..19: note = siRNA sense sequence
  source 1..19: mol_type = other RNA
atttccatccaattaagga

SEQ ID NO: 36335 - RNA, 19 nt, synthetic construct
  misc_feature 1..19: note = siRNA antisense sequence
  source 1..19: mol_type = other RNA
tccttaattggatggaaat

SEQ ID NO: 36336 - RNA, 19 nt, synthetic construct
  misc_feature 1..19: note = siRNA sense sequence
  source 1..19: mol_type = other RNA
tccatccaattaaggaagg

SEQ ID NO: 36337 - RNA, 19 nt, synthetic construct
  misc_feature 1..19: note = siRNA antisense sequence
  source 1..19: mol_type = other RNA
ccttccttaattggatgga

SEQ ID NO: 36338 - RNA, 19 nt, synthetic construct
  misc_feature 1..19: note = siRNA sense sequence
  source 1..19: mol_type = other RNA
ccatccaattaaggaaggg

SEQ ID NO: 36339 - RNA, 19 nt, synthetic construct
  misc_feature 1..19: note = siRNA antisense sequence
  source 1..19: mol_type = other RNA
cccttccttaattggatgg

SEQ ID NO: 36340 - RNA, 19 nt, synthetic construct
  misc_feature 1..19: note = siRNA sense sequence
  source 1..19: mol_type = other RNA
acagagcaaatctcaggcc

SEQ ID NO: 36341 - RNA, 19 nt, synthetic construct
  misc_feature 1..19: note = siRNA antisense sequence
  source 1..19: mol_type = other RNA
ggcctgagatttgctctgt

SEQ ID NO: 36342 - RNA, 19 nt, synthetic construct
  misc_feature 1..19: note = siRNA sense sequence
  source 1..19: mol_type = other RNA
cagagcaaatctcaggcct

SEQ ID NO: 36343 - RNA, 19 nt, synthetic construct
  misc_feature 1..19: note = siRNA antisense sequence
  source 1..19: mol_type = other RNA
aggcctgagatttgctctg

SEQ ID NO: 36344 - RNA, 19 nt, synthetic construct
  misc_feature 1..19: note = siRNA sense sequence
  source 1..19: mol_type = other RNA
agagcaaatctcaggcctg

SEQ ID NO: 36345 - RNA, 19 nt, synthetic construct
  misc_feature 1..19: note = siRNA antisense sequence
  source 1..19: mol_type = other RNA
caggcctgagatttgctct

SEQ ID NO: 36346 - RNA, 19 nt, synthetic construct
  misc_feature 1..19: note = siRNA sense sequence
  source 1..19: mol_type = other RNA
gagcaaatctcaggcctgc

SEQ ID NO: 36347 - RNA, 19 nt, synthetic construct
  misc_feature 1..19: note = siRNA antisense sequence
  source 1..19: mol_type = other RNA
gcaggcctgagatttgctc

SEQ ID NO: 36348 - RNA, 19 nt, synthetic construct
  misc_feature 1..19: note = siRNA sense sequence
  source 1..19: mol_type = other RNA
agcaaatctcaggcctgca

SEQ ID NO: 36349 - RNA, 19 nt, synthetic construct
  misc_feature 1..19: note = siRNA antisense sequence
  source 1..19: mol_type = other RNA
tgcaggcctgagatttgct

SEQ ID NO: 36350 - RNA, 19 nt, synthetic construct
  misc_feature 1..19: note = siRNA sense sequence
  source 1..19: mol_type = other RNA
caaatctcaggcctgcata

SEQ ID NO: 36351 - RNA, 19 nt, synthetic construct
  misc_feature 1..19: note = siRNA antisense sequence
  source 1..19: mol_type = other RNA
tatgcaggcctgagatttg

SEQ ID NO: 36352 - RNA, 19 nt, synthetic construct
  misc_feature 1..19: note = siRNA sense sequence
  source 1..19: mol_type = other RNA
aaatctcaggcctgcatag

SEQ ID NO: 36353 - RNA, 19 nt, synthetic construct
  misc_feature 1..19: note = siRNA antisense sequence
  source 1..19: mol_type = other RNA
ctatgcaggcctgagattt

SEQ ID NO: 36354 - RNA, 19 nt, synthetic construct
  misc_feature 1..19: note = siRNA sense sequence
  source 1..19: mol_type = other RNA
aatctcaggcctgcatagg

SEQ ID NO: 36355 - RNA, 19 nt, synthetic construct
  misc_feature 1..19: note = siRNA antisense sequence
  source 1..19: mol_type = other RNA
cctatgcaggcctgagatt

SEQ ID NO: 36356 - RNA, 19 nt, synthetic construct
  misc_feature 1..19: note = siRNA sense sequence
  source 1..19: mol_type = other RNA
caggcctgcataggaagcc

SEQ ID NO: 36357 - RNA, 19 nt, synthetic construct
  misc_feature 1..19: note = siRNA antisense sequence
  source 1..19: mol_type = other RNA
ggcttcctatgcaggcctg

SEQ ID NO: 36358 - RNA, 19 nt, synthetic construct
  misc_feature 1..19: note = siRNA sense sequence
  source 1..19: mol_type = other RNA
aggcctgcataggaagcca

SEQ ID NO: 36359 - RNA, 19 nt, synthetic construct
  misc_feature 1..19: note = siRNA antisense sequence
  source 1..19: mol_type = other RNA
tggcttcctatgcaggcct

SEQ ID NO: 36360 - RNA, 19 nt, synthetic construct
  misc_feature 1..19: note = siRNA sense sequence
  source 1..19: mol_type = other RNA
cataggaagccatctctga

SEQ ID NO: 36361 - RNA, 19 nt, synthetic construct
  misc_feature 1..19: note = siRNA antisense sequence
  source 1..19: mol_type = other RNA
tcagagatggcttcctatg

SEQ ID NO: 36362 - RNA, 19 nt, synthetic construct
  misc_feature 1..19: note = siRNA sense sequence
  source 1..19: mol_type = other RNA
ataggaagccatctctgag

SEQ ID NO: 36363 - RNA, 19 nt, synthetic construct
  misc_feature 1..19: note = siRNA antisense sequence
  source 1..19: mol_type = other RNA
ctcagagatggcttcctat

SEQ ID NO: 36364 - RNA, 19 nt, synthetic construct
  misc_feature 1..19: note = siRNA sense sequence
  source 1..19: mol_type = other RNA
gaagccatctctgagtgga

SEQ ID NO: 36365 - RNA, 19 nt, synthetic construct
  misc_feature 1..19: note = siRNA antisense sequence
  source 1..19: mol_type = other RNA
tccactcagagatggcttc

SEQ ID NO: 36366 - RNA, 19 nt, synthetic construct
  misc_feature 1..19: note = siRNA sense sequence
  source 1..19: mol_type = other RNA
aagccatctctgagtggag

SEQ ID NO: 36367 - RNA, 19 nt, synthetic construct
  misc_feature 1..19: note = siRNA antisense sequence
  source 1..19: mol_type = other RNA
ctccactcagagatggctt

SEQ ID NO: 36368 - RNA, 19 nt, synthetic construct
  misc_feature 1..19: note = siRNA sense sequence
  source 1..19: mol_type = other RNA
tttccttttgaagcagcaa

SEQ ID NO: 36369 - RNA, 19 nt, synthetic construct
  misc_feature 1..19: note = siRNA antisense sequence
  source 1..19: mol_type = other RNA
ttgctgcttcaaaaggaaa

SEQ ID NO: 36370 - RNA, 19 nt, synthetic construct
  misc_feature 1..19: note = siRNA sense sequence
  source 1..19: mol_type = other RNA
ttccttttgaagcagcaag

SEQ ID NO: 36371 - RNA, 19 nt, synthetic construct
  misc_feature 1..19: note = siRNA antisense sequence
  source 1..19: mol_type = other RNA
cttgctgcttcaaaaggaa

SEQ ID NO: 36372 - RNA, 19 nt, synthetic construct
  misc_feature 1..19: note = siRNA sense sequence
  source 1..19: mol_type = other RNA
cttttgaagcagcaaggac

SEQ ID NO: 36373 - RNA, 19 nt, synthetic construct
  misc_feature 1..19: note = siRNA antisense sequence
  source 1..19: mol_type = other RNA
gtccttgctgcttcaaaag

SEQ ID NO: 36374 - RNA, 19 nt, synthetic construct
  misc_feature 1..19: note = siRNA sense sequence
  source 1..19: mol_type = other RNA
ttttgaagcagcaaggaca

SEQ ID NO: 36375 - RNA, 19 nt, synthetic construct
  misc_feature 1..19: note = siRNA antisense sequence
  source 1..19: mol_type = other RNA
tgtccttgctgcttcaaaa

SEQ ID NO: 36376 - RNA, 19 nt, synthetic construct
  misc_feature 1..19: note = siRNA sense sequence
  source 1..19: mol_type = other RNA
tataaagctttacatggtg

SEQ ID NO: 36377 - RNA, 19 nt, synthetic construct
  misc_feature 1..19: note = siRNA antisense sequence
  source 1..19: mol_type = other RNA
caccatgtaaagctttata

SEQ ID NO: 36378 - RNA, 19 nt, synthetic construct
  misc_feature 1..19: note = siRNA sense sequence
  source 1..19: mol_type = other RNA
ataaagctttacatggtga

SEQ ID NO: 36379 - RNA, 19 nt, synthetic construct
  misc_feature 1..19: note = siRNA antisense sequence
  source 1..19: mol_type = other RNA
tcaccatgtaaagctttat

SEQ ID NO: 36380 - RNA, 19 nt, synthetic construct
  misc_feature 1..19: note = siRNA sense sequence
  source 1..19: mol_type = other RNA
taaagctttacatggtgat

SEQ ID NO: 36381 - RNA, 19 nt, synthetic construct
  misc_feature 1..19: note = siRNA antisense sequence
  source 1..19: mol_type = other RNA
atcaccatgtaaagcttta

SEQ ID NO: 36382 - RNA, 19 nt, synthetic construct
  misc_feature 1..19: note = siRNA sense sequence
  source 1..19: mol_type = other RNA
tggtgatatgtgcattctc

SEQ ID NO: 36383 - RNA, 19 nt, synthetic construct
  misc_feature 1..19: note = siRNA antisense sequence
  source 1..19: mol_type = other RNA
gagaatgcacatatcacca

SEQ ID NO: 36384 - RNA, 19 nt, synthetic construct
  misc_feature 1..19: note = siRNA sense sequence
  source 1..19: mol_type = other RNA
ggtgatatgtgcattctct

SEQ ID NO: 36385 - RNA, 19 nt, synthetic construct
  misc_feature 1..19: note = siRNA antisense sequence
  source 1..19: mol_type = other RNA
agagaatgcacatatcacc

SEQ ID NO: 36386 - RNA, 19 nt, synthetic construct
  misc_feature 1..19: note = siRNA sense sequence
  source 1..19: mol_type = other RNA
gatatgtgcattctctgta

SEQ ID NO: 36387 - RNA, 19 nt, synthetic construct
  misc_feature 1..19: note = siRNA antisense sequence
  source 1..19: mol_type = other RNA
tacagagaatgcacatatc

SEQ ID NO: 36388 - RNA, 19 nt, synthetic construct
  misc_feature 1..19: note = siRNA sense sequence
  source 1..19: mol_type = other RNA
tgtgcattctctgtagttg

SEQ ID NO: 36389 - RNA, 19 nt, synthetic construct
  misc_feature 1..19: note = siRNA antisense sequence
  source 1..19: mol_type = other RNA
caactacagagaatgcaca

SEQ ID NO: 36390 - RNA, 19 nt, synthetic construct
  misc_feature 1..19: note = siRNA sense sequence
  source 1..19: mol_type = other RNA
gtgcattctctgtagttga

SEQ ID NO: 36391 - RNA, 19 nt, synthetic construct
  misc_feature 1..19: note = siRNA antisense sequence
  source 1..19: mol_type = other RNA
tcaactacagagaatgcac

SEQ ID NO: 36392 - RNA, 19 nt, synthetic construct
  misc_feature 1..19: note = siRNA sense sequence
  source 1..19: mol_type = other RNA
tgcattctctgtagttgaa

SEQ ID NO: 36393 - RNA, 19 nt, synthetic construct
  misc_feature 1..19: note = siRNA antisense sequence
  source 1..19: mol_type = other RNA
ttcaactacagagaatgca

SEQ ID NO: 36394 - RNA, 19 nt, synthetic construct
  misc_feature 1..19: note = siRNA sense sequence
  source 1..19: mol_type = other RNA
aatgagctgttcagagttc

SEQ ID NO: 36395 - RNA, 19 nt, synthetic construct
  misc_feature 1..19: note = siRNA antisense sequence
  source 1..19: mol_type = other RNA
gaactctgaacagctcatt

SEQ ID NO: 36396 - RNA, 19 nt, synthetic construct
  misc_feature 1..19: note = siRNA sense sequence
  source 1..19: mol_type = other RNA
agctgttcagagttcattg

SEQ ID NO: 36397 - RNA, 19 nt, synthetic construct
  misc_feature 1..19: note = siRNA antisense sequence
  source 1..19: mol_type = other RNA
caatgaactctgaacagct

SEQ ID NO: 36398 - RNA, 19 nt, synthetic construct
  misc_feature 1..19: note = siRNA sense sequence
  source 1..19: mol_type = other RNA
gctgttcagagttcattga

SEQ ID NO: 36399 - RNA, 19 nt, synthetic construct
  misc_feature 1..19: note = siRNA antisense sequence
  source 1..19: mol_type = other RNA
tcaatgaactctgaacagc

SEQ ID NO: 36400 - RNA, 19 nt, synthetic construct
  misc_feature 1..19: note = siRNA sense sequence
  source 1..19: mol_type = other RNA
ctgttcagagttcattgat

SEQ ID NO: 36401 - RNA, 19 nt, synthetic construct
  misc_feature 1..19: note = siRNA antisense sequence
  source 1..19: mol_type = other RNA
atcaatgaactctgaacag

SEQ ID NO: 36402 - RNA, 19 nt, synthetic construct
  misc_feature 1..19: note = siRNA sense sequence
  source 1..19: mol_type = other RNA
tgttcagagttcattgatg

SEQ ID NO: 36403 - RNA, 19 nt, synthetic construct
  misc_feature 1..19: note = siRNA antisense sequence
  source 1..19: mol_type = other RNA
catcaatgaactctgaaca

SEQ ID NO: 36404 - RNA, 19 nt, synthetic construct
  misc_feature 1..19: note = siRNA sense sequence
  source 1..19: mol_type = other RNA
gttcagagttcattgatgg

SEQ ID NO: 36405 - RNA, 19 nt, synthetic construct
  misc_feature 1..19: note = siRNA antisense sequence
  source 1..19: mol_type = other RNA
ccatcaatgaactctgaac

SEQ ID NO: 36406 - RNA, 19 nt, synthetic construct
  misc_feature 1..19: note = siRNA sense sequence
  source 1..19: mol_type = other RNA
ttcagagttcattgatggc

SEQ ID NO: 36407 - RNA, 19 nt, synthetic construct
  misc_feature 1..19: note = siRNA antisense sequence
  source 1..19: mol_type = other RNA
gccatcaatgaactctgaa

SEQ ID NO: 36408 - RNA, 19 nt, synthetic construct
  misc_feature 1..19: note = siRNA sense sequence
  source 1..19: mol_type = other RNA
tcagagttcattgatggcc

SEQ ID NO: 36409 - RNA, 19 nt, synthetic construct
  misc_feature 1..19: note = siRNA antisense sequence
  source 1..19: mol_type = other RNA
ggccatcaatgaactctga

SEQ ID NO: 36410 - RNA, 19 nt, synthetic construct
  misc_feature 1..19: note = siRNA sense sequence
  source 1..19: mol_type = other RNA
cagagttcattgatggcca

SEQ ID NO: 36411 - RNA, 19 nt, synthetic construct
  misc_feature 1..19: note = siRNA antisense sequence
  source 1..19: mol_type = other RNA
tggccatcaatgaactctg

SEQ ID NO: 36412 - RNA, 19 nt, synthetic construct
  misc_feature 1..19: note = siRNA sense sequence
  source 1..19: mol_type = other RNA
agagttcattgatggccat

SEQ ID NO: 36413 - RNA, 19 nt, synthetic construct
  misc_feature 1..19: note = siRNA antisense sequence
  source 1..19: mol_type = other RNA
atggccatcaatgaactct

SEQ ID NO: 36414 - RNA, 19 nt, synthetic construct
  misc_feature 1..19: note = siRNA sense sequence
  source 1..19: mol_type = other RNA
gagttcattgatggccatg

SEQ ID NO: 36415 - RNA, 19 nt, synthetic construct
  misc_feature 1..19: note = siRNA antisense sequence
  source 1..19: mol_type = other RNA
catggccatcaatgaactc

SEQ ID NO: 36416 - RNA, 19 nt, synthetic construct
  misc_feature 1..19: note = siRNA sense sequence
  source 1..19: mol_type = other RNA
agttcattgatggccatgg

SEQ ID NO: 36417 - RNA, 19 nt, synthetic construct
  misc_feature 1..19: note = siRNA antisense sequence
  source 1..19: mol_type = other RNA
ccatggccatcaatgaact

SEQ ID NO: 36418 - RNA, 19 nt, synthetic construct
  misc_feature 1..19: note = siRNA sense sequence
  source 1..19: mol_type = other RNA
gttcattgatggccatggt

SEQ ID NO: 36419 - RNA, 19 nt, synthetic construct
  misc_feature 1..19: note = siRNA antisense sequence
  source 1..19: mol_type = other RNA
accatggccatcaatgaac

SEQ ID NO: 36420 - RNA, 19 nt, synthetic construct
  misc_feature 1..19: note = siRNA sense sequence
  source 1..19: mol_type = other RNA
ttcattgatggccatggtt

SEQ ID NO: 36421 - RNA, 19 nt, synthetic construct
  misc_feature 1..19: note = siRNA antisense sequence
  source 1..19: mol_type = other RNA
aaccatggccatcaatgaa

SEQ ID NO: 36422 - RNA, 19 nt, synthetic construct
  misc_feature 1..19: note = siRNA sense sequence
  source 1..19: mol_type = other RNA
attgatggccatggttttc

SEQ ID NO: 36423 - RNA, 19 nt, synthetic construct
  misc_feature 1..19: note = siRNA antisense sequence
  source 1..19: mol_type = other RNA
gaaaaccatggccatcaat

SEQ ID NO: 36424 - RNA, 19 nt, synthetic construct
  misc_feature 1..19: note = siRNA sense sequence
  source 1..19: mol_type = other RNA
ttgatggccatggttttct

SEQ ID NO: 36425 - RNA, 19 nt, synthetic construct
  misc_feature 1..19: note = siRNA antisense sequence
  source 1..19: mol_type = other RNA
agaaaaccatggccatcaa

SEQ ID NO: 36426 - RNA, 19 nt, synthetic construct
  misc_feature 1..19: note = siRNA sense sequence
  source 1..19: mol_type = other RNA
tgatggccatggttttctg

SEQ ID NO: 36427 - RNA, 19 nt, synthetic construct
  misc_feature 1..19: note = siRNA antisense sequence
  source 1..19: mol_type = other RNA
cagaaaaccatggccatca

SEQ ID NO: 36428 - RNA, 19 nt, synthetic construct
  misc_feature 1..19: note = siRNA sense sequence
  source 1..19: mol_type = other RNA
gatggccatggttttctgc

SEQ ID NO: 36429 - RNA, 19 nt, synthetic construct
  misc_feature 1..19: note = siRNA antisense sequence
  source 1..19: mol_type = other RNA
gcagaaaaccatggccatc

SEQ ID NO: 36430 - RNA, 19 nt, synthetic construct
  misc_feature 1..19: note = siRNA sense sequence
  source 1..19: mol_type = other RNA
atggccatggttttctgca

SEQ ID NO: 36431 - RNA, 19 nt, synthetic construct
  misc_feature 1..19: note = siRNA antisense sequence
  source 1..19: mol_type = other RNA
tgcagaaaaccatggccat

SEQ ID NO: 36432 - RNA, 19 nt, synthetic construct
  misc_feature 1..19: note = siRNA sense sequence
  source 1..19: mol_type = other RNA
ccatggttttctgcagggc

SEQ ID NO: 36433 - RNA, 19 nt, synthetic construct
  misc_feature 1..19: note = siRNA antisense sequence
  source 1..19: mol_type = other RNA
gccctgcagaaaaccatgg

SEQ ID NO: 36434 - RNA, 19 nt, synthetic construct
  misc_feature 1..19: note = siRNA sense sequence
  source 1..19: mol_type = other RNA
gttttctgcagggctcact

SEQ ID NO: 36435 - RNA, 19 nt, synthetic construct
  misc_feature 1..19: note = siRNA antisense sequence
  source 1..19: mol_type = other RNA
agtgagccctgcagaaaac

SEQ ID NO: 36436 - RNA, 19 nt, synthetic construct
  misc_feature 1..19: note = siRNA sense sequence
  source 1..19: mol_type = other RNA
ttttctgcagggctcactg

SEQ ID NO: 36437 - RNA, 19 nt, synthetic construct
  misc_feature 1..19: note = siRNA antisense sequence
  source 1..19: mol_type = other RNA
cagtgagccctgcagaaaa

SEQ ID NO: 36438 - RNA, 19 nt, synthetic construct
  misc_feature 1..19: note = siRNA sense sequence
  source 1..19: mol_type = other RNA
aactatctgcaactgtatt

SEQ ID NO: 36439 - RNA, 19 nt, synthetic construct
  misc_feature 1..19: note = siRNA antisense sequence
  source 1..19: mol_type = other RNA
aatacagttgcagatagtt

SEQ ID NO: 36440 - RNA, 19 nt, synthetic construct
  misc_feature 1..19: note = siRNA sense sequence
  source 1..19: mol_type = other RNA
actatctgcaactgtatta

SEQ ID NO: 36441 - RNA, 19 nt, synthetic construct
  misc_feature 1..19: note = siRNA antisense sequence
  source 1..19: mol_type = other RNA
taatacagttgcagatagt

SEQ ID NO: 36442 - RNA, 19 nt, synthetic construct
  misc_feature 1..19: note = siRNA sense sequence
  source 1..19: mol_type = other RNA
ctatctgcaactgtattag

SEQ ID NO: 36443 - RNA, 19 nt, synthetic construct
  misc_feature 1..19: note = siRNA antisense sequence
  source 1..19: mol_type = other RNA
ctaatacagttgcagatag

SEQ ID NO: 36444 - RNA, 19 nt, synthetic construct
  misc_feature 1..19: note = siRNA sense sequence
  source 1..19: mol_type = other RNA
tatctgcaactgtattagt

SEQ ID NO: 36445 - RNA, 19 nt, synthetic construct
  misc_feature 1..19: note = siRNA antisense sequence
  source 1..19: mol_type = other RNA
actaatacagttgcagata

SEQ ID NO: 36446 - RNA, 19 nt, synthetic construct
  misc_feature 1..19: note = siRNA sense sequence
  source 1..19: mol_type = other RNA
atctgcaactgtattagtc

SEQ ID NO: 36447 - RNA, 19 nt, synthetic construct
  misc_feature 1..19: note = siRNA antisense sequence
  source 1..19: mol_type = other RNA
gactaatacagttgcagat

SEQ ID NO: 36448 - RNA, 19 nt, synthetic construct
  misc_feature 1..19: note = siRNA sense sequence
  source 1..19: mol_type = other RNA
tctgcaactgtattagtca

SEQ ID NO: 36449 - RNA, 19 nt, synthetic construct
  misc_feature 1..19: note = siRNA antisense sequence
  source 1..19: mol_type = other RNA
tgactaatacagttgcaga

SEQ ID NO: 36450 - RNA, 19 nt, synthetic construct
  misc_feature 1..19: note = siRNA sense sequence
  source 1..19: mol_type = other RNA
ctgcaactgtattagtcat

SEQ ID NO: 36451 - RNA, 19 nt, synthetic construct
  misc_feature 1..19: note = siRNA antisense sequence
  source 1..19: mol_type = other RNA
atgactaatacagttgcag

SEQ ID NO: 36452 - RNA, 19 nt, synthetic construct
  misc_feature 1..19: note = siRNA sense sequence
  source 1..19: mol_type = other RNA
tgcaactgtattagtcata

SEQ ID NO: 36453 - RNA, 19 nt, synthetic construct
  misc_feature 1..19: note = siRNA antisense sequence
  source 1..19: mol_type = other RNA
tatgactaatacagttgca

SEQ ID NO: 36454 - RNA, 19 nt, synthetic construct
  misc_feature 1..19: note = siRNA sense sequence
  source 1..19: mol_type = other RNA
gcaactgtattagtcatat

SEQ ID NO: 36455 - RNA, 19 nt, synthetic construct
  misc_feature 1..19: note = siRNA antisense sequence
  source 1..19: mol_type = other RNA
atatgactaatacagttgc

SEQ ID NO: 36456 - RNA, 19 nt, synthetic construct
  misc_feature 1..19: note = siRNA sense sequence
  source 1..19: mol_type = other RNA
agtcatatatgaatctgag

SEQ ID NO: 36457 - RNA, 19 nt, synthetic construct
  misc_feature 1..19: note = siRNA antisense sequence
  source 1..19: mol_type = other RNA
ctcagattcatatatgact

SEQ ID NO: 36458 - RNA, 19 nt, synthetic construct
  misc_feature 1..19: note = siRNA sense sequence
  source 1..19: mol_type = other RNA
atatgaatctgagtttctg

SEQ ID NO: 36459 - RNA, 19 nt, synthetic construct
  misc_feature 1..19: note = siRNA antisense sequence
  source 1..19: mol_type = other RNA
cagaaactcagattcatat

SEQ ID NO: 36460 - RNA, 19 nt, synthetic construct
  misc_feature 1..19: note = siRNA sense sequence
  source 1..19: mol_type = other RNA
atgaatctgagtttctgcc

SEQ ID NO: 36461 - RNA, 19 nt, synthetic construct
  misc_feature 1..19: note = siRNA antisense sequence
  source 1..19: mol_type = other RNA
ggcagaaactcagattcat

SEQ ID NO: 36462 - RNA, 19 nt, synthetic construct
  misc_feature 1..19: note = siRNA sense sequence
  source 1..19: mol_type = other RNA
atctgagtttctgcctgct

SEQ ID NO: 36463 - RNA, 19 nt, synthetic construct
  misc_feature 1..19: note = siRNA antisense sequence
  source 1..19: mol_type = other RNA
agcaggcagaaactcagat

SEQ ID NO: 36464 - RNA, 19 nt, synthetic construct
  misc_feature 1..19: note = siRNA sense sequence
  source 1..19: mol_type = other RNA
tctgagtttctgcctgctc

SEQ ID NO: 36465 - RNA, 19 nt, synthetic construct
  misc_feature 1..19: note = siRNA antisense sequence
  source 1..19: mol_type = other RNA
gagcaggcagaaactcaga

SEQ ID NO: 36466 - RNA, 19 nt, synthetic construct
  misc_feature 1..19: note = siRNA sense sequence
  source 1..19: mol_type = other RNA
ctgagtttctgcctgctct

SEQ ID NO: 36467 - RNA, 19 nt, synthetic construct
  misc_feature 1..19: note = siRNA antisense sequence
  source 1..19: mol_type = other RNA
agagcaggcagaaactcag

SEQ ID NO: 36468 - RNA, 19 nt, synthetic construct
  misc_feature 1..19: note = siRNA sense sequence
  source 1..19: mol_type = other RNA
tgagtttctgcctgctctt

SEQ ID NO: 36469 - RNA, 19 nt, synthetic construct
  misc_feature 1..19: note = siRNA antisense sequence
  source 1..19: mol_type = other RNA
aagagcaggcagaaactca

SEQ ID NO: 36470 - RNA, 19 nt, synthetic construct
  misc_feature 1..19: note = siRNA sense sequence
  source 1..19: mol_type = other RNA
gagtttctgcctgctcttt

SEQ ID NO: 36471 - RNA, 19 nt, synthetic construct
  misc_feature 1..19: note = siRNA antisense sequence
  source 1..19: mol_type = other RNA
aaagagcaggcagaaactc

SEQ ID NO: 36472 - RNA, 19 nt, synthetic construct
  misc_feature 1..19: note = siRNA sense sequence
  source 1..19: mol_type = other RNA
agtttctgcctgctctttt

SEQ ID NO: 36473 - RNA, 19 nt, synthetic construct
  misc_feature 1..19: note = siRNA antisense sequence
  source 1..19: mol_type = other RNA
aaaagagcaggcagaaact

SEQ ID NO: 36474 - RNA, 19 nt, synthetic construct
  misc_feature 1..19: note = siRNA sense sequence
  source 1..19: mol_type = other RNA
gtttctgcctgctcttttc

SEQ ID NO: 36475 - RNA, 19 nt, synthetic construct
  misc_feature 1..19: note = siRNA antisense sequence
  source 1..19: mol_type = other RNA
gaaaagagcaggcagaaac

SEQ ID NO: 36476 - RNA, 19 nt, synthetic construct
  misc_feature 1..19: note = siRNA sense sequence
  source 1..19: mol_type = other RNA
tttctgcctgctcttttcc

SEQ ID NO: 36477 - RNA, 19 nt, synthetic construct
  misc_feature 1..19: note = siRNA antisense sequence
  source 1..19: mol_type = other RNA
ggaaaagagcaggcagaaa

SEQ ID NO: 36478 - RNA, 19 nt, synthetic construct
  misc_feature 1..19: note = siRNA sense sequence
  source 1..19: mol_type = other RNA
ttctgcctgctcttttcca

SEQ ID NO: 36479 - RNA, 19 nt, synthetic construct
  misc_feature 1..19: note = siRNA antisense sequence
  source 1..19: mol_type = other RNA
tggaaaagagcaggcagaa

SEQ ID NO: 36480 - RNA, 19 nt, synthetic construct
  misc_feature 1..19: note = siRNA sense sequence
  source 1..19: mol_type = other RNA
ctgcctgctcttttccaca

SEQ ID NO: 36481 - RNA, 19 nt, synthetic construct
  misc_feature 1..19: note = siRNA antisense sequence
  source 1..19: mol_type = other RNA
tgtggaaaagagcaggcag

SEQ ID NO: 36482 - RNA, 19 nt, synthetic construct
  misc_feature 1..19: note = siRNA sense sequence
  source 1..19: mol_type = other RNA
tgcctgctcttttccacac

SEQ ID NO: 36483 - RNA, 19 nt, synthetic construct
  misc_feature 1..19: note = siRNA antisense sequence
  source 1..19: mol_type = other RNA
gtgtggaaaagagcaggca

SEQ ID NO: 36484 - RNA, 19 nt, synthetic construct
  misc_feature 1..19: note = siRNA sense sequence
  source 1..19: mol_type = other RNA
cctcagctctaggaatggt

SEQ ID NO: 36485 - RNA, 19 nt, synthetic construct
  misc_feature 1..19: note = siRNA antisense sequence
  source 1..19: mol_type = other RNA
accattcctagagctgagg

SEQ ID NO: 36486 - RNA, 19 nt, synthetic construct
  misc_feature 1..19: note = siRNA sense sequence
  source 1..19: mol_type = other RNA
ctcagctctaggaatggta

SEQ ID NO: 36487 - RNA, 19 nt, synthetic construct
  misc_feature 1..19: note = siRNA antisense sequence
  source 1..19: mol_type = other RNA
taccattcctagagctgag

SEQ ID NO: 36488 - RNA, 19 nt, synthetic construct
  misc_feature 1..19: note = siRNA sense sequence
  source 1..19: mol_type = other RNA
tcagctctaggaatggtac

SEQ ID NO: 36489 - RNA, 19 nt, synthetic construct
  misc_feature 1..19: note = siRNA antisense sequence
  source 1..19: mol_type = other RNA
gtaccattcctagagctga

SEQ ID NO: 36490 - RNA, 19 nt, synthetic construct
  misc_feature 1..19: note = siRNA sense sequence
  source 1..19: mol_type = other RNA
cagctctaggaatggtaca

SEQ ID NO: 36491 - RNA, 19 nt, synthetic construct
  misc_feature 1..19: note = siRNA antisense sequence
  source 1..19: mol_type = other RNA
tgtaccattcctagagctg

SEQ ID NO: 36492 - RNA, 19 nt, synthetic construct
  misc_feature 1..19: note = siRNA sense sequence
  source 1..19: mol_type = other RNA
agctctaggaatggtacag

SEQ ID NO: 36493 - RNA, 19 nt, synthetic construct
  misc_feature 1..19: note = siRNA antisense sequence
  source 1..19: mol_type = other RNA
ctgtaccattcctagagct

SEQ ID NO: 36494 - RNA, 19 nt, synthetic construct
  misc_feature 1..19: note = siRNA sense sequence
  source 1..19: mol_type = other RNA
gctctaggaatggtacaga

SEQ ID NO: 36495 - RNA, 19 nt, synthetic construct
  misc_feature 1..19: note = siRNA antisense sequence
  source 1..19: mol_type = other RNA
tctgtaccattcctagagc

SEQ ID NO: 36496 - RNA, 19 nt, synthetic construct
  misc_feature 1..19: note = siRNA sense sequence
  source 1..19: mol_type = other RNA
ctctaggaatggtacagat

SEQ ID NO: 36497 - RNA, 19 nt, synthetic construct
  misc_feature 1..19: note = siRNA antisense sequence
  source 1..19: mol_type = other RNA
atctgtaccattcctagag

SEQ ID NO: 36498 - RNA, 19 nt, synthetic construct
  misc_feature 1..19: note = siRNA sense sequence
  source 1..19: mol_type = other RNA
tctaggaatggtacagata

SEQ ID NO: 36499 - RNA, 19 nt, synthetic construct
  misc_feature 1..19: note = siRNA antisense sequence
  source 1..19: mol_type = other RNA
tatctgtaccattcctaga

SEQ ID NO: 36500 - RNA, 19 nt, synthetic construct
  misc_feature 1..19: note = siRNA sense sequence
  source 1..19: mol_type = other RNA
ctaggaatggtacagatat

SEQ ID NO: 36501 - RNA, 19 nt, synthetic construct
  misc_feature 1..19: note = siRNA antisense sequence
  source 1..19: mol_type = other RNA
atatctgtaccattcctag

SEQ ID NO: 36502 - RNA, 19 nt, synthetic construct
  misc_feature 1..19: note = siRNA sense sequence
  source 1..19: mol_type = other RNA
ggaatggtacagatattaa

SEQ ID NO: 36503 - RNA, 19 nt, synthetic construct
  misc_feature 1..19: note = siRNA antisense sequence
  source 1..19: mol_type = other RNA
ttaatatctgtaccattcc

SEQ ID NO: 36504 - RNA, 19 nt, synthetic construct
  misc_feature 1..19: note = siRNA sense sequence
  source 1..19: mol_type = other RNA
agttctagggtacatgtgc

SEQ ID NO: 36505 - RNA, 19 nt, synthetic construct
  misc_feature 1..19: note = siRNA antisense sequence
  source 1..19: mol_type = other RNA
gcacatgtaccctagaact

SEQ ID NO: 36506 - RNA, 19 nt, synthetic construct
  misc_feature 1..19: note = siRNA sense sequence
  source 1..19: mol_type = other RNA
gttctagggtacatgtgca

SEQ ID NO: 36507 - RNA, 19 nt, synthetic construct
  misc_feature 1..19: note = siRNA antisense sequence
  source 1..19: mol_type = other RNA
tgcacatgtaccctagaac

SEQ ID NO: 36508 - RNA, 19 nt, synthetic construct
  misc_feature 1..19: note = siRNA sense sequence
  source 1..19: mol_type = other RNA
ttctagggtacatgtgcac

SEQ ID NO: 36509 - RNA, 19 nt, synthetic construct
  misc_feature 1..19: note = siRNA antisense sequence
  source 1..19: mol_type = other RNA
gtgcacatgtaccctagaa

SEQ ID NO: 36510 - RNA, 19 nt, synthetic construct
  misc_feature 1..19: note = siRNA sense sequence
  source 1..19: mol_type = other RNA
tctagggtacatgtgcaca

SEQ ID NO: 36511 - RNA, 19 nt, synthetic construct
  misc_feature 1..19: note = siRNA antisense sequence
  source 1..19: mol_type = other RNA
tgtgcacatgtaccctaga

SEQ ID NO: 36512 - RNA, 19 nt, synthetic construct
  misc_feature 1..19: note = siRNA sense sequence
  source 1..19: mol_type = other RNA
ttacattaggtatatctcc

SEQ ID NO: 36513 - RNA, 19 nt, synthetic construct
  misc_feature 1..19: note = siRNA antisense sequence
  source 1..19: mol_type = other RNA
ggagatatacctaatgtaa

SEQ ID NO: 36514 - RNA, 19 nt, synthetic construct
  misc_feature 1..19: note = siRNA sense sequence
  source 1..19: mol_type = other RNA
tacattaggtatatctcct

SEQ ID NO: 36515 - RNA, 19 nt, synthetic construct
  misc_feature 1..19: note = siRNA antisense sequence
  source 1..19: mol_type = other RNA
aggagatatacctaatgta

SEQ ID NO: 36516 - RNA, 19 nt, synthetic construct
  misc_feature 1..19: note = siRNA sense sequence
  source 1..19: mol_type = other RNA
aggtatatctcctaatgct

SEQ ID NO: 36517 - RNA, 19 nt, synthetic construct
  misc_feature 1..19: note = siRNA antisense sequence
  source 1..19: mol_type = other RNA
agcattaggagatatacct

SEQ ID NO: 36518 - RNA, 19 nt, synthetic construct
  misc_feature 1..19: note = siRNA sense sequence
  source 1..19: mol_type = other RNA
ctgcggtgtgtgatgttcc

SEQ ID NO: 36519 - RNA, 19 nt, synthetic construct
  misc_feature 1..19: note = siRNA antisense sequence
  source 1..19: mol_type = other RNA
ggaacatcacacaccgcag

SEQ ID NO: 36520 - RNA, 19 nt, synthetic construct
  misc_feature 1..19: note = siRNA sense sequence
  source 1..19: mol_type = other RNA
aattcccacctatgagtga

SEQ ID NO: 36521 - RNA, 19 nt, synthetic construct
  misc_feature 1..19: note = siRNA antisense sequence
  source 1..19: mol_type = other RNA
tcactcataggtgggaatt

SEQ ID NO: 36522 - RNA, 19 nt, synthetic construct
  misc_feature 1..19: note = siRNA sense sequence
  source 1..19: mol_type = other RNA
attcccacctatgagtgag

SEQ ID NO: 36523 - RNA, 19 nt, synthetic construct
  misc_feature 1..19: note = siRNA antisense sequence
  source 1..19: mol_type = other RNA
ctcactcataggtgggaat

SEQ ID NO: 36524 - RNA, 19 nt, synthetic construct
  misc_feature 1..19: note = siRNA sense sequence
  source 1..19: mol_type = other RNA
atggtttccagcttcatcc

SEQ ID NO: 36525 - RNA, 19 nt, synthetic construct
  misc_feature 1..19: note = siRNA antisense sequence
  source 1..19: mol_type = other RNA
ggatgaagctggaaaccat

SEQ ID NO: 36526 - RNA, 19 nt, synthetic construct
  misc_feature 1..19: note = siRNA sense sequence
  source 1..19: mol_type = other RNA
tggtttccagcttcatcca

SEQ ID NO: 36527 - RNA, 19 nt, synthetic construct
  misc_feature 1..19: note = siRNA antisense sequence
  source 1..19: mol_type = other RNA
tggatgaagctggaaacca

SEQ ID NO: 36528 - RNA, 19 nt, synthetic construct
  misc_feature 1..19: note = siRNA sense sequence
  source 1..19: mol_type = other RNA
ggtttccagcttcatccat

SEQ ID NO: 36529 - RNA, 19 nt, synthetic construct
  misc_feature 1..19: note = siRNA antisense sequence
  source 1..19: mol_type = other RNA
atggatgaagctggaaacc

SEQ ID NO: 36530 - RNA, 19 nt, synthetic construct
  misc_feature 1..19: note = siRNA sense sequence
  source 1..19: mol_type = other RNA
tccagcttcatccatgtcc

SEQ ID NO: 36531 - RNA, 19 nt, synthetic construct
  misc_feature 1..19: note = siRNA antisense sequence
  source 1..19: mol_type = other RNA
ggacatggatgaagctgga

SEQ ID NO: 36532 - RNA, 19 nt, synthetic construct
  misc_feature 1..19: note = siRNA sense sequence
  source 1..19: mol_type = other RNA
ccagcttcatccatgtccc

SEQ ID NO: 36533 - RNA, 19 nt, synthetic construct
  misc_feature 1..19: note = siRNA antisense sequence
  source 1..19: mol_type = other RNA
gggacatggatgaagctgg

SEQ ID NO: 36534 - RNA, 19 nt, synthetic construct
  misc_feature 1..19: note = siRNA sense sequence
  source 1..19: mol_type = other RNA
cagcttcatccatgtccct

SEQ ID NO: 36535 - RNA, 19 nt, synthetic construct
  misc_feature 1..19: note = siRNA antisense sequence
  source 1..19: mol_type = other RNA
agggacatggatgaagctg

SEQ ID NO: 36536 - RNA, 19 nt, synthetic construct
  misc_feature 1..19: note = siRNA sense sequence
  source 1..19: mol_type = other RNA
agcttcatccatgtcccta

SEQ ID NO: 36537 - RNA, 19 nt, synthetic construct
  misc_feature 1..19: note = siRNA antisense sequence
  source 1..19: mol_type = other RNA
tagggacatggatgaagct

SEQ ID NO: 36538 - RNA, 19 nt, synthetic construct
  misc_feature 1..19: note = siRNA sense sequence
  source 1..19: mol_type = other RNA
gcttcatccatgtccctac

SEQ ID NO: 36539 - RNA, 19 nt, synthetic construct
  misc_feature 1..19: note = siRNA antisense sequence
  source 1..19: mol_type = other RNA
gtagggacatggatgaagc

SEQ ID NO: 36540 - RNA, 19 nt, synthetic construct
  misc_feature 1..19: note = siRNA sense sequence
  source 1..19: mol_type = other RNA
atggctgcatagtattcca

SEQ ID NO: 36541 - RNA, 19 nt, synthetic construct
  misc_feature 1..19: note = siRNA antisense sequence
  source 1..19: mol_type = other RNA
tggaatactatgcagccat

SEQ ID NO: 36542 - RNA, 19 nt, synthetic construct
  misc_feature 1..19: note = siRNA sense sequence
  source 1..19: mol_type = other RNA
tggctgcatagtattccat

SEQ ID NO: 36543 - RNA, 19 nt, synthetic construct
  misc_feature 1..19: note = siRNA antisense sequence
  source 1..19: mol_type = other RNA
atggaatactatgcagcca

SEQ ID NO: 36544 - RNA, 19 nt, synthetic construct
  misc_feature 1..19: note = siRNA sense sequence
  source 1..19: mol_type = other RNA
tgcatagtattccatggtg

SEQ ID NO: 36545 - RNA, 19 nt, synthetic construct
  misc_feature 1..19: note = siRNA antisense sequence
  source 1..19: mol_type = other RNA
caccatggaatactatgca

SEQ ID NO: 36546 - RNA, 19 nt, synthetic construct
  misc_feature 1..19: note = siRNA sense sequence
  source 1..19: mol_type = other RNA
gcatagtattccatggtgt

SEQ ID NO: 36547 - RNA, 19 nt, synthetic construct
  misc_feature 1..19: note = siRNA antisense sequence
  source 1..19: mol_type = other RNA
acaccatggaatactatgc

SEQ ID NO: 36548 - RNA, 19 nt, synthetic construct
  misc_feature 1..19: note = siRNA sense sequence
  source 1..19: mol_type = other RNA
ctacattttcttaatccag

SEQ ID NO: 36549 - RNA, 19 nt, synthetic construct
  misc_feature 1..19: note = siRNA antisense sequence
  source 1..19: mol_type = other RNA
ctggattaagaaaatgtag

SEQ ID NO: 36550 - RNA, 19 nt, synthetic construct
  misc_feature 1..19: note = siRNA sense sequence
  source 1..19: mol_type = other RNA
acattttcttaatccagtc

SEQ ID NO: 36551 - RNA, 19 nt, synthetic construct
  misc_feature 1..19: note = siRNA antisense sequence
  source 1..19: mol_type = other RNA
gactggattaagaaaatgt

SEQ ID NO: 36552 - RNA, 19 nt, synthetic construct
  misc_feature 1..19: note = siRNA sense sequence
  source 1..19: mol_type = other RNA
ttcttaatccagtctatcg

SEQ ID NO: 36553 - RNA, 19 nt, synthetic construct
  misc_feature 1..19: note = siRNA antisense sequence
  source 1..19: mol_type = other RNA
cgatagactggattaagaa

SEQ ID NO: 36554 - RNA, 19 nt, synthetic construct
  misc_feature 1..19: note = siRNA sense sequence
  source 1..19: mol_type = other RNA
tcttaatccagtctatcgt

SEQ ID NO: 36555 - RNA, 19 nt, synthetic construct
  misc_feature 1..19: note = siRNA antisense sequence
  source 1..19: mol_type = other RNA
acgatagactggattaaga

SEQ ID NO: 36556 - RNA, 19 nt, synthetic construct
  misc_feature 1..19: note = siRNA sense sequence
  source 1..19: mol_type = other RNA
cttaatccagtctatcgtt

SEQ ID NO: 36557 - RNA, 19 nt, synthetic construct
  misc_feature 1..19: note = siRNA antisense sequence
  source 1..19: mol_type = other RNA
aacgatagactggattaag

SEQ ID NO: 36558 - RNA, 19 nt, synthetic construct
  misc_feature 1..19: note = siRNA sense sequence
  source 1..19: mol_type = other RNA
ttaatccagtctatcgttg

SEQ ID NO: 36559 - RNA, 19 nt, synthetic construct
  misc_feature 1..19: note = siRNA antisense sequence
  source 1..19: mol_type = other RNA
caacgatagactggattaa

SEQ ID NO: 36560 - RNA, 19 nt, synthetic construct
  misc_feature 1..19: note = siRNA sense sequence
  source 1..19: mol_type = other RNA
taatccagtctatcgttga

SEQ ID NO: 36561 - RNA, 19 nt, synthetic construct
  misc_feature 1..19: note = siRNA antisense sequence
  source 1..19: mol_type = other RNA
tcaacgatagactggatta

SEQ ID NO: 36562 - RNA, 19 nt, synthetic construct
  misc_feature 1..19: note = siRNA sense sequence
  source 1..19: mol_type = other RNA
gttgatggacatttgggtt

SEQ ID NO: 36563 - RNA, 19 nt, synthetic construct
  misc_feature 1..19: note = siRNA antisense sequence
  source 1..19: mol_type = other RNA
aacccaaatgtccatcaac

SEQ ID NO: 36564 - RNA, 19 nt, synthetic construct
  misc_feature 1..19: note = siRNA sense sequence
  source 1..19: mol_type = other RNA
ttgatggacatttgggttg

SEQ ID NO: 36565 - RNA, 19 nt, synthetic construct
  misc_feature 1..19: note = siRNA antisense sequence
  source 1..19: mol_type = other RNA
caacccaaatgtccatcaa

SEQ ID NO: 36566 - RNA, 19 nt, synthetic construct
  misc_feature 1..19: note = siRNA sense sequence
  source 1..19: mol_type = other RNA
tgatggacatttgggttgg

SEQ ID NO: 36567 - RNA, 19 nt, synthetic construct
  misc_feature 1..19: note = siRNA antisense sequence
  source 1..19: mol_type = other RNA
ccaacccaaatgtccatca

SEQ ID NO: 36568 - RNA, 19 nt, synthetic construct
  misc_feature 1..19: note = siRNA sense sequence
  source 1..19: mol_type = other RNA
gatggacatttgggttggt

SEQ ID NO: 36569 - RNA, 19 nt, synthetic construct
  misc_feature 1..19: note = siRNA antisense sequence
  source 1..19: mol_type = other RNA
accaacccaaatgtccatc

SEQ ID NO: 36570 - RNA, 19 nt, synthetic construct
  misc_feature 1..19: note = siRNA sense sequence
  source 1..19: mol_type = other RNA
atggacatttgggttggtt

SEQ ID NO: 36571 - RNA, 19 nt, synthetic construct
  misc_feature 1..19: note = siRNA antisense sequence
  source 1..19: mol_type = other RNA
aaccaacccaaatgtccat

SEQ ID NO: 36572 - RNA, 19 nt, synthetic construct
  misc_feature 1..19: note = siRNA sense sequence
  source 1..19: mol_type = other RNA
tggacatttgggttggttc

SEQ ID NO: 36573 - RNA, 19 nt, synthetic construct
  misc_feature 1..19: note = siRNA antisense sequence
  source 1..19: mol_type = other RNA
gaaccaacccaaatgtcca

SEQ ID NO: 36574 - RNA, 19 nt, synthetic construct
  misc_feature 1..19: note = siRNA sense sequence
  source 1..19: mol_type = other RNA
ggacatttgggttggttcc

SEQ ID NO: 36575 - RNA, 19 nt, synthetic construct
  misc_feature 1..19: note = siRNA antisense sequence
  source 1..19: mol_type = other RNA
ggaaccaacccaaatgtcc

SEQ ID NO: 36576 - RNA, 19 nt, synthetic construct
  misc_feature 1..19: note = siRNA sense sequence
  source 1..19: mol_type = other RNA
gacatttgggttggttcca

SEQ ID NO: 36577 - RNA, 19 nt, synthetic construct
  misc_feature 1..19: note = siRNA antisense sequence
  source 1..19: mol_type = other RNA
tggaaccaacccaaatgtc

SEQ ID NO: 36578 - RNA, 19 nt, synthetic construct
  misc_feature 1..19: note = siRNA sense sequence
  source 1..19: mol_type = other RNA
tgggttggttccaagtctt

SEQ ID NO: 36579 - RNA, 19 nt, synthetic construct
  misc_feature 1..19: note = siRNA antisense sequence
  source 1..19: mol_type = other RNA
aagacttggaaccaaccca

SEQ ID NO: 36580 - RNA, 19 nt, synthetic construct
  misc_feature 1..19: note = siRNA sense sequence
  source 1..19: mol_type = other RNA
ttggttccaagtctttgct

SEQ ID NO: 36581 - RNA, 19 nt, synthetic construct
  misc_feature 1..19: note = siRNA antisense sequence
  source 1..19: mol_type = other RNA
agcaaagacttggaaccaa

SEQ ID NO: 36582 - RNA, 19 nt, synthetic construct
  misc_feature 1..19: note = siRNA sense sequence
  source 1..19: mol_type = other RNA
tggttccaagtctttgcta

SEQ ID NO: 36583 - RNA, 19 nt, synthetic construct
  misc_feature 1..19: note = siRNA antisense sequence
  source 1..19: mol_type = other RNA
tagcaaagacttggaacca

SEQ ID NO: 36584 - RNA, 19 nt, synthetic construct
  misc_feature 1..19: note = siRNA sense sequence
  source 1..19: mol_type = other RNA
ggttccaagtctttgctat

SEQ ID NO: 36585 - RNA, 19 nt, synthetic construct
  misc_feature 1..19: note = siRNA antisense sequence
  source 1..19: mol_type = other RNA
atagcaaagacttggaacc

SEQ ID NO: 36586 - RNA, 19 nt, synthetic construct
  misc_feature 1..19: note = siRNA sense sequence
  source 1..19: mol_type = other RNA
gttccaagtctttgctatt

SEQ ID NO: 36587 - RNA, 19 nt, synthetic construct
  misc_feature 1..19: note = siRNA antisense sequence
  source 1..19: mol_type = other RNA
aatagcaaagacttggaac

SEQ ID NO: 36588 - RNA, 19 nt, synthetic construct
  misc_feature 1..19: note = siRNA sense sequence
  source 1..19: mol_type = other RNA
ttccaagtctttgctattg

SEQ ID NO: 36589 - RNA, 19 nt, synthetic construct
  misc_feature 1..19: note = siRNA antisense sequence
  source 1..19: mol_type = other RNA
caatagcaaagacttggaa

SEQ ID NO: 36590 - RNA, 19 nt, synthetic construct
  misc_feature 1..19: note = siRNA sense sequence
  source 1..19: mol_type = other RNA
tgcatgtgtctttatagca

SEQ ID NO: 36591 - RNA, 19 nt, synthetic construct
  misc_feature 1..19: note = siRNA antisense sequence
  source 1..19: mol_type = other RNA
tgctataaagacacatgca

SEQ ID NO: 36592 - RNA, 19 nt, synthetic construct
  misc_feature 1..19: note = siRNA sense sequence
  source 1..19: mol_type = other RNA
gcatgtgtctttatagcag

SEQ ID NO: 36593 - RNA, 19 nt, synthetic construct
  misc_feature 1..19: note = siRNA antisense sequence
  source 1..19: mol_type = other RNA
ctgctataaagacacatgc

SEQ ID NO: 36594 - RNA, 19 nt, synthetic construct
  misc_feature 1..19: note = siRNA sense sequence
  source 1..19: mol_type = other RNA
catgtgtctttatagcagc

SEQ ID NO: 36595 - RNA, 19 nt, synthetic construct
  misc_feature 1..19: note = siRNA antisense sequence
  source 1..19: mol_type = other RNA
gctgctataaagacacatg

SEQ ID NO: 36596 - RNA, 19 nt, synthetic construct
  misc_feature 1..19: note = siRNA sense sequence
  source 1..19: mol_type = other RNA
atgtgtctttatagcagca

SEQ ID NO: 36597 - RNA, 19 nt, synthetic construct
  misc_feature 1..19: note = siRNA antisense sequence
  source 1..19: mol_type = other RNA
tgctgctataaagacacat

SEQ ID NO: 36598 - RNA, 19 nt, synthetic construct
  misc_feature 1..19: note = siRNA sense sequence
  source 1..19: mol_type = other RNA
tctttatagcagcatgatt

SEQ ID NO: 36599 - RNA, 19 nt, synthetic construct
  misc_feature 1..19: note = siRNA antisense sequence
  source 1..19: mol_type = other RNA
aatcatgctgctataaaga

SEQ ID NO: 36600 - RNA, 19 nt, synthetic construct
  misc_feature 1..19: note = siRNA sense sequence
  source 1..19: mol_type = other RNA
ggatggctgggtcaaatgg

SEQ ID NO: 36601 - RNA, 19 nt, synthetic construct
  misc_feature 1..19: note = siRNA antisense sequence
  source 1..19: mol_type = other RNA
ccatttgacccagccatcc

SEQ ID NO: 36602 - RNA, 19 nt, synthetic construct
  misc_feature 1..19: note = siRNA sense sequence
  source 1..19: mol_type = other RNA
gatggctgggtcaaatggt

SEQ ID NO: 36603 - RNA, 19 nt, synthetic construct
  misc_feature 1..19: note = siRNA antisense sequence
  source 1..19: mol_type = other RNA
accatttgacccagccatc

SEQ ID NO: 36604 - RNA, 19 nt, synthetic construct
  misc_feature 1..19: note = siRNA sense sequence
  source 1..19: mol_type = other RNA
atggctgggtcaaatggta

SEQ ID NO: 36605 - RNA, 19 nt, synthetic construct
  misc_feature 1..19: note = siRNA antisense sequence
  source 1..19: mol_type = other RNA
taccatttgacccagccat

SEQ ID NO: 36606 - RNA, 19 nt, synthetic construct
  misc_feature 1..19: note = siRNA sense sequence
  source 1..19: mol_type = other RNA
tggctgggtcaaatggtat

SEQ ID NO: 36607 - RNA, 19 nt, synthetic construct
  misc_feature 1..19: note = siRNA antisense sequence
  source 1..19: mol_type = other RNA
ataccatttgacccagcca

SEQ ID NO: 36608 - RNA, 19 nt, synthetic construct
  misc_feature 1..19: note = siRNA sense sequence
  source 1..19: mol_type = other RNA
ggctgggtcaaatggtatt

SEQ ID NO: 36609 - RNA, 19 nt, synthetic construct
  misc_feature 1..19: note = siRNA antisense sequence
  source 1..19: mol_type = other RNA
aataccatttgacccagcc

SEQ ID NO: 36610 - RNA, 19 nt, synthetic construct
  misc_feature 1..19: note = siRNA sense sequence
  source 1..19: mol_type = other RNA
atggtatttctagttctag

SEQ ID NO: 36611 - RNA, 19 nt, synthetic construct
  misc_feature 1..19: note = siRNA antisense sequence
  source 1..19: mol_type = other RNA
ctagaactagaaataccat

SEQ ID NO: 36612 - RNA, 19 nt, synthetic construct
  misc_feature 1..19: note = siRNA sense sequence
  source 1..19: mol_type = other RNA
agtaatacagttaagagtg

SEQ ID NO: 36613 - RNA, 19 nt, synthetic construct
  misc_feature 1..19: note = siRNA antisense sequence
  source 1..19: mol_type = other RNA
cactcttaactgtattact

SEQ ID NO: 36614 - RNA, 19 nt, synthetic construct
  misc_feature 1..19: note = siRNA sense sequence
  source 1..19: mol_type = other RNA
gtaatacagttaagagtgg

SEQ ID NO: 36615 - RNA, 19 nt, synthetic construct
  misc_feature 1..19: note = siRNA antisense sequence
  source 1..19: mol_type = other RNA
ccactcttaactgtattac

SEQ ID NO: 36616 - RNA, 19 nt, synthetic construct
  misc_feature 1..19: note = siRNA sense sequence
  source 1..19: mol_type = other RNA
taatacagttaagagtgga

SEQ ID NO: 36617 - RNA, 19 nt, synthetic construct
  misc_feature 1..19: note = siRNA antisense sequence
  source 1..19: mol_type = other RNA
tccactcttaactgtatta

SEQ ID NO: 36618 - RNA, 19 nt, synthetic construct
  misc_feature 1..19: note = siRNA sense sequence
  source 1..19: mol_type = other RNA
aatacagttaagagtggag

SEQ ID NO: 36619 - RNA, 19 nt, synthetic construct
  misc_feature 1..19: note = siRNA antisense sequence
  source 1..19: mol_type = other RNA
ctccactcttaactgtatt

SEQ ID NO: 36620 - RNA, 19 nt, synthetic construct
  misc_feature 1..19: note = siRNA sense sequence
  source 1..19: mol_type = other RNA
agaccttccttgagttttc

SEQ ID NO: 36621 - RNA, 19 nt, synthetic construct
  misc_feature 1..19: note = siRNA antisense sequence
  source 1..19: mol_type = other RNA
gaaaactcaaggaaggtct

SEQ ID NO: 36622 - RNA, 19 nt, synthetic construct
  misc_feature 1..19: note = siRNA sense sequence
  source 1..19: mol_type = other RNA
gaccttccttgagttttca

SEQ ID NO: 36623 - RNA, 19 nt, synthetic construct
  misc_feature 1..19: note = siRNA antisense sequence
  source 1..19: mol_type = other RNA
tgaaaactcaaggaaggtc

SEQ ID NO: 36624 - RNA, 19 nt, synthetic construct
  misc_feature 1..19: note = siRNA sense sequence
  source 1..19: mol_type = other RNA
cttccttgagttttcattc

SEQ ID NO: 36625 - RNA, 19 nt, synthetic construct
  misc_feature 1..19: note = siRNA antisense sequence
  source 1..19: mol_type = other RNA
gaatgaaaactcaaggaag

SEQ ID NO: 36626 - RNA, 19 nt, synthetic construct
  misc_feature 1..19: note = siRNA sense sequence
  source 1..19: mol_type = other RNA
ttccttgagttttcattct

SEQ ID NO: 36627 - RNA, 19 nt, synthetic construct
  misc_feature 1..19: note = siRNA antisense sequence
  source 1..19: mol_type = other RNA
agaatgaaaactcaaggaa

SEQ ID NO: 36628 - RNA, 19 nt, synthetic construct
  misc_feature 1..19: note = siRNA sense sequence
  source 1..19: mol_type = other RNA
ctttcgatggtaaccttaa

SEQ ID NO: 36629 - RNA, 19 nt, synthetic construct
  misc_feature 1..19: note = siRNA antisense sequence
  source 1..19: mol_type = other RNA
ttaaggttaccatcgaaag

SEQ ID NO: 36630 - RNA, 19 nt, synthetic construct
  misc_feature 1..19: note = siRNA sense sequence
  source 1..19: mol_type = other RNA
tttcgatggtaaccttaac

SEQ ID NO: 36631 - RNA, 19 nt, synthetic construct
  misc_feature 1..19: note = siRNA antisense sequence
  source 1..19: mol_type = other RNA
gttaaggttaccatcgaaa

SEQ ID NO: 36632 - RNA, 19 nt, synthetic construct
  misc_feature 1..19: note = siRNA sense sequence
  source 1..19: mol_type = other RNA
ttcgatggtaaccttaacc

SEQ ID NO: 36633 - RNA, 19 nt, synthetic construct
  misc_feature 1..19: note = siRNA antisense sequence
  source 1..19: mol_type = other RNA
ggttaaggttaccatcgaa

SEQ ID NO: 36634 - RNA, 19 nt, synthetic construct
  misc_feature 1..19: note = siRNA sense sequence
  source 1..19: mol_type = other RNA
ggtaaccttaaccatgcct

SEQ ID NO: 36635 - RNA, 19 nt, synthetic construct
  misc_feature 1..19: note = siRNA antisense sequence
  source 1..19: mol_type = other RNA
aggcatggttaaggttacc

SEQ ID NO: 36636 - RNA, 19 nt, synthetic construct
  misc_feature 1..19: note = siRNA sense sequence
  source 1..19: mol_type = other RNA
acatgatggactcttagtt

SEQ ID NO: 36637 - RNA, 19 nt, synthetic construct
  misc_feature 1..19: note = siRNA antisense sequence
  source 1..19: mol_type = other RNA
aactaagagtccatcatgt

SEQ ID NO: 36638 - RNA, 19 nt, synthetic construct
  misc_feature 1..19: note = siRNA sense sequence
  source 1..19: mol_type = other RNA
catgatggactcttagtta

SEQ ID NO: 36639 - RNA, 19 nt, synthetic construct
  misc_feature 1..19: note = siRNA antisense sequence
  source 1..19: mol_type = other RNA
taactaagagtccatcatg

SEQ ID NO: 36640 - RNA, 19 nt, synthetic construct
  misc_feature 1..19: note = siRNA sense sequence
  source 1..19: mol_type = other RNA
atgatggactcttagttaa

SEQ ID NO: 36641 - RNA, 19 nt, synthetic construct
  misc_feature 1..19: note = siRNA antisense sequence
  source 1..19: mol_type = other RNA
ttaactaagagtccatcat

SEQ ID NO: 36642 - RNA, 19 nt, synthetic construct
  misc_feature 1..19: note = siRNA sense sequence
  source 1..19: mol_type = other RNA
tgatggactcttagttaac

SEQ ID NO: 36643 - RNA, 19 nt, synthetic construct
  misc_feature 1..19: note = siRNA antisense sequence
  source 1..19: mol_type = other RNA
gttaactaagagtccatca

SEQ ID NO: 36644 - RNA, 19 nt, synthetic construct
  misc_feature 1..19: note = siRNA sense sequence
  source 1..19: mol_type = other RNA
gatggactcttagttaact

SEQ ID NO: 36645 - RNA, 19 nt, synthetic construct
  misc_feature 1..19: note = siRNA antisense sequence
  source 1..19: mol_type = other RNA
agttaactaagagtccatc

SEQ ID NO: 36646 - RNA, 19 nt, synthetic construct
  misc_feature 1..19: note = siRNA sense sequence
  source 1..19: mol_type = other RNA
atggactcttagttaactc

SEQ ID NO: 36647 - RNA, 19 nt, synthetic construct
  misc_feature 1..19: note = siRNA antisense sequence
  source 1..19: mol_type = other RNA
gagttaactaagagtccat

SEQ ID NO: 36648 - RNA, 19 nt, synthetic construct
  misc_feature 1..19: note = siRNA sense sequence
  source 1..19: mol_type = other RNA
tggactcttagttaactct

SEQ ID NO: 36649 - RNA, 19 nt, synthetic construct
  misc_feature 1..19: note = siRNA antisense sequence
  source 1..19: mol_type = other RNA
agagttaactaagagtcca

SEQ ID NO: 36650 - RNA, 19 nt, synthetic construct
  misc_feature 1..19: note = siRNA sense sequence
  source 1..19: mol_type = other RNA
ggactcttagttaactcta

SEQ ID NO: 36651 - RNA, 19 nt, synthetic construct
  misc_feature 1..19: note = siRNA antisense sequence
  source 1..19: mol_type = other RNA
tagagttaactaagagtcc

SEQ ID NO: 36652 - RNA, 19 nt, synthetic construct
  misc_feature 1..19: note = siRNA sense sequence
  source 1..19: mol_type = other RNA
gactcttagttaactctat

SEQ ID NO: 36653 - RNA, 19 nt, synthetic construct
  misc_feature 1..19: note = siRNA antisense sequence
  source 1..19: mol_type = other RNA
atagagttaactaagagtc

SEQ ID NO: 36654 - RNA, 19 nt, synthetic construct
  misc_feature 1..19: note = siRNA sense sequence
  source 1..19: mol_type = other RNA
actcttagttaactctatg

SEQ ID NO: 36655 - RNA, 19 nt, synthetic construct
  misc_feature 1..19: note = siRNA antisense sequence
  source 1..19: mol_type = other RNA
catagagttaactaagagt

SEQ ID NO: 36656 - RNA, 19 nt, synthetic construct
  misc_feature 1..19: note = siRNA sense sequence
  source 1..19: mol_type = other RNA
ctctatgtaactggatttt

SEQ ID NO: 36657 - RNA, 19 nt, synthetic construct
  misc_feature 1..19: note = siRNA antisense sequence
  source 1..19: mol_type = other RNA
aaaatccagttacatagag

SEQ ID NO: 36658 - RNA, 19 nt, synthetic construct
  misc_feature 1..19: note = siRNA sense sequence
  source 1..19: mol_type = other RNA
tctatgtaactggattttg

SEQ ID NO: 36659 - RNA, 19 nt, synthetic construct
  misc_feature 1..19: note = siRNA antisense sequence
  source 1..19: mol_type = other RNA
caaaatccagttacataga

SEQ ID NO: 36660 - RNA, 19 nt, synthetic construct
  misc_feature 1..19: note = siRNA sense sequence
  source 1..19: mol_type = other RNA
ttttctcctaaagttgttc

SEQ ID NO: 36661 - RNA, 19 nt, synthetic construct
  misc_feature 1..19: note = siRNA antisense sequence
  source 1..19: mol_type = other RNA
gaacaactttaggagaaaa

SEQ ID NO: 36662 - RNA, 19 nt, synthetic construct
  misc_feature 1..19: note = siRNA sense sequence
  source 1..19: mol_type = other RNA
tttctcctaaagttgttct

SEQ ID NO: 36663 - RNA, 19 nt, synthetic construct
  misc_feature 1..19: note = siRNA antisense sequence
  source 1..19: mol_type = other RNA
agaacaactttaggagaaa

SEQ ID NO: 36664 - RNA, 19 nt, synthetic construct
  misc_feature 1..19: note = siRNA sense sequence
  source 1..19: mol_type = other RNA
ttctcctaaagttgttcta

SEQ ID NO: 36665 - RNA, 19 nt, synthetic construct
  misc_feature 1..19: note = siRNA antisense sequence
  source 1..19: mol_type = other RNA
tagaacaactttaggagaa

SEQ ID NO: 36666 - RNA, 19 nt, synthetic construct
  misc_feature 1..19: note = siRNA sense sequence
  source 1..19: mol_type = other RNA
tctcctaaagttgttctac

SEQ ID NO: 36667 - RNA, 19 nt, synthetic construct
  misc_feature 1..19: note = siRNA antisense sequence
  source 1..19: mol_type = other RNA
gtagaacaactttaggaga

SEQ ID NO: 36668 - RNA, 19 nt, synthetic construct
  misc_feature 1..19: note = siRNA sense sequence
  source 1..19: mol_type = other RNA
ctcctaaagttgttctacg

SEQ ID NO: 36669 - RNA, 19 nt, synthetic construct
  misc_feature 1..19: note = siRNA antisense sequence
  source 1..19: mol_type = other RNA
cgtagaacaactttaggag

SEQ ID NO: 36670 - RNA, 19 nt, synthetic construct
  misc_feature 1..19: note = siRNA sense sequence
  source 1..19: mol_type = other RNA
tcctaaagttgttctacgc

SEQ ID NO: 36671 - RNA, 19 nt, synthetic construct
  misc_feature 1..19: note = siRNA antisense sequence
  source 1..19: mol_type = other RNA
gcgtagaacaactttagga

SEQ ID NO: 36672 - RNA, 19 nt, synthetic construct
  misc_feature 1..19: note = siRNA sense sequence
  source 1..19: mol_type = other RNA
cctaaagttgttctacgct

SEQ ID NO: 36673 - RNA, 19 nt, synthetic construct
  misc_feature 1..19: note = siRNA antisense sequence
  source 1..19: mol_type = other RNA
agcgtagaacaactttagg

SEQ ID NO: 36674 - RNA, 19 nt, synthetic construct
  misc_feature 1..19: note = siRNA sense sequence
  source 1..19: mol_type = other RNA
ctaaagttgttctacgctg

SEQ ID NO: 36675 - RNA, 19 nt, synthetic construct
  misc_feature 1..19: note = siRNA antisense sequence
  source 1..19: mol_type = other RNA
cagcgtagaacaactttag

SEQ ID NO: 36676 - RNA, 19 nt, synthetic construct
  misc_feature 1..19: note = siRNA sense sequence
  source 1..19: mol_type = other RNA
taaagttgttctacgctgc

SEQ ID NO: 36677 - RNA, 19 nt, synthetic construct
  misc_feature 1..19: note = siRNA antisense sequence
  source 1..19: mol_type = other RNA
gcagcgtagaacaacttta

SEQ ID NO: 36678 - RNA, 19 nt, synthetic construct
  misc_feature 1..19: note = siRNA sense sequence
  source 1..19: mol_type = other RNA
cgctgctgcgtatcattca

SEQ ID NO: 36679 - RNA, 19 nt, synthetic construct
  misc_feature 1..19: note = siRNA antisense sequence
  source 1..19: mol_type = other RNA
tgaatgatacgcagcagcg

SEQ ID NO: 36680 - RNA, 19 nt, synthetic construct
  misc_feature 1..19: note = siRNA sense sequence
  source 1..19: mol_type = other RNA
gctgcgtatcattcaatgt

SEQ ID NO: 36681 - RNA, 19 nt, synthetic construct
  misc_feature 1..19: note = siRNA antisense sequence
  source 1..19: mol_type = other RNA
acattgaatgatacgcagc

SEQ ID NO: 36682 - RNA, 19 nt, synthetic construct
  misc_feature 1..19: note = siRNA sense sequence
  source 1..19: mol_type = other RNA
aattcaatgactttcagcg

SEQ ID NO: 36683 - RNA, 19 nt, synthetic construct
  misc_feature 1..19: note = siRNA antisense sequence
  source 1..19: mol_type = other RNA
cgctgaaagtcattgaatt

SEQ ID NO: 36684 - RNA, 19 nt, synthetic construct
  misc_feature 1..19: note = siRNA sense sequence
  source 1..19: mol_type = other RNA
attcaatgactttcagcgg

SEQ ID NO: 36685 - RNA, 19 nt, synthetic construct
  misc_feature 1..19: note = siRNA antisense sequence
  source 1..19: mol_type = other RNA
ccgctgaaagtcattgaat

SEQ ID NO: 36686 - RNA, 19 nt, synthetic construct
  misc_feature 1..19: note = siRNA sense sequence
  source 1..19: mol_type = other RNA
ttcaatgactttcagcggc

SEQ ID NO: 36687 - RNA, 19 nt, synthetic construct
  misc_feature 1..19: note = siRNA antisense sequence
  source 1..19: mol_type = other RNA
gccgctgaaagtcattgaa

SEQ ID NO: 36688 - RNA, 19 nt, synthetic construct
  misc_feature 1..19: note = siRNA sense sequence
  source 1..19: mol_type = other RNA
cccggtggaagacatgttt

SEQ ID NO: 36689 - RNA, 19 nt, synthetic construct
  misc_feature 1..19: note = siRNA antisense sequence
  source 1..19: mol_type = other RNA
aaacatgtcttccaccggg

SEQ ID NO: 36690 - RNA, 19 nt, synthetic construct
  misc_feature 1..19: note = siRNA sense sequence
  source 1..19: mol_type = other RNA
ccggtggaagacatgtttg

SEQ ID NO: 36691 - RNA, 19 nt, synthetic construct
  misc_feature 1..19: note = siRNA antisense sequence
  source 1..19: mol_type = other RNA
caaacatgtcttccaccgg

SEQ ID NO: 36692 - RNA, 19 nt, synthetic construct
  misc_feature 1..19: note = siRNA sense sequence
  source 1..19: mol_type = other RNA
cggtggaagacatgtttgg

SEQ ID NO: 36693 - RNA, 19 nt, synthetic construct
  misc_feature 1..19: note = siRNA antisense sequence
  source 1..19: mol_type = other RNA
ccaaacatgtcttccaccg

SEQ ID NO: 36694 - RNA, 19 nt, synthetic construct
  misc_feature 1..19: note = siRNA sense sequence
  source 1..19: mol_type = other RNA
ggtggaagacatgtttgga

SEQ ID NO: 36695 - RNA, 19 nt, synthetic construct
  misc_feature 1..19: note = siRNA antisense sequence
  source 1..19: mol_type = other RNA
tccaaacatgtcttccacc

SEQ ID NO: 36696 - RNA, 19 nt, synthetic construct
  misc_feature 1..19: note = siRNA sense sequence
  source 1..19: mol_type = other RNA
gtggaagacatgtttggat

SEQ ID NO: 36697 - RNA, 19 nt, synthetic construct
  misc_feature 1..19: note = siRNA antisense sequence
  source 1..19: mol_type = other RNA
atccaaacatgtcttccac

SEQ ID NO: 36698 - RNA, 19 nt, synthetic construct
  misc_feature 1..19: note = siRNA sense sequence
  source 1..19: mol_type = other RNA
ggaagacatgtttggatat

SEQ ID NO: 36699 - RNA, 19 nt, synthetic construct
  misc_feature 1..19: note = siRNA antisense sequence
  source 1..19: mol_type = other RNA
atatccaaacatgtcttcc

SEQ ID NO: 36700 - RNA, 19 nt, synthetic construct
  misc_feature 1..19: note = siRNA sense sequence
  source 1..19: mol_type = other RNA
gtttggatatactgttcaa

SEQ ID NO: 36701 - RNA, 19 nt, synthetic construct
  misc_feature 1..19: note = siRNA antisense sequence
  source 1..19: mol_type = other RNA
ttgaacagtatatccaaac

SEQ ID NO: 36702 - RNA, 19 nt, synthetic construct
  misc_feature 1..19: note = siRNA sense sequence
  source 1..19: mol_type = other RNA
tttggatatactgttcaac

SEQ ID NO: 36703 - RNA, 19 nt, synthetic construct
  misc_feature 1..19: note = siRNA antisense sequence
  source 1..19: mol_type = other RNA
gttgaacagtatatccaaa

SEQ ID NO: 36704 - RNA, 19 nt, synthetic construct
  misc_feature 1..19: note = siRNA sense sequence
  source 1..19: mol_type = other RNA
aaaatggtaagccagtggg

SEQ ID NO: 36705 - RNA, 19 nt, synthetic construct
  misc_feature 1..19: note = siRNA antisense sequence
  source 1..19: mol_type = other RNA
cccactggcttaccatttt

SEQ ID NO: 36706 - RNA, 19 nt, synthetic construct
  misc_feature 1..19: note = siRNA sense sequence
  source 1..19: mol_type = other RNA
aaatggtaagccagtgggt

SEQ ID NO: 36707 - RNA, 19 nt, synthetic construct
  misc_feature 1..19: note = siRNA antisense sequence
  source 1..19: mol_type = other RNA
acccactggcttaccattt

SEQ ID NO: 36708 - RNA, 19 nt, synthetic construct
  misc_feature 1..19: note = siRNA sense sequence
  source 1..19: mol_type = other RNA
aatggtaagccagtgggtt

SEQ ID NO: 36709 - RNA, 19 nt, synthetic construct
  misc_feature 1..19: note = siRNA antisense sequence
  source 1..19: mol_type = other RNA
aacccactggcttaccatt

SEQ ID NO: 36710 - RNA, 19 nt, synthetic construct
  misc_feature 1..19: note = siRNA sense sequence
  source 1..19: mol_type = other RNA
atggtaagccagtgggttt

SEQ ID NO: 36711 - RNA, 19 nt, synthetic construct
  misc_feature 1..19: note = siRNA antisense sequence
  source 1..19: mol_type = other RNA
aaacccactggcttaccat

SEQ ID NO: 36712 - RNA, 19 nt, synthetic construct
  misc_feature 1..19: note = siRNA sense sequence
  source 1..19: mol_type = other RNA
tggtaagccagtgggtttt

SEQ ID NO: 36713 - RNA, 19 nt, synthetic construct
  misc_feature 1..19: note = siRNA antisense sequence
  source 1..19: mol_type = other RNA
aaaacccactggcttacca

SEQ ID NO: 36714 - RNA, 19 nt, synthetic construct
  misc_feature 1..19: note = siRNA sense sequence
  source 1..19: mol_type = other RNA
ggtaagccagtgggttttg

SEQ ID NO: 36715 - RNA, 19 nt, synthetic construct
  misc_feature 1..19: note = siRNA antisense sequence
  source 1..19: mol_type = other RNA
caaaacccactggcttacc

SEQ ID NO: 36716 - RNA, 19 nt, synthetic construct
  misc_feature 1..19: note = siRNA sense sequence
  source 1..19: mol_type = other RNA
gtaagccagtgggttttgt

SEQ ID NO: 36717 - RNA, 19 nt, synthetic construct
  misc_feature 1..19: note = siRNA antisense sequence
  source 1..19: mol_type = other RNA
acaaaacccactggcttac

SEQ ID NO: 36718 - RNA, 19 nt, synthetic construct
  misc_feature 1..19: note = siRNA sense sequence
  source 1..19: mol_type = other RNA
atgcagtctagtcatttgg

SEQ ID NO: 36719 - RNA, 19 nt, synthetic construct
  misc_feature 1..19: note = siRNA antisense sequence
  source 1..19: mol_type = other RNA
ccaaatgactagactgcat

SEQ ID NO: 36720 - RNA, 19 nt, synthetic construct
  misc_feature 1..19: note = siRNA sense sequence
  source 1..19: mol_type = other RNA
tgcagtctagtcatttggc

SEQ ID NO: 36721 - RNA, 19 nt, synthetic construct
  misc_feature 1..19: note = siRNA antisense sequence
  source 1..19: mol_type = other RNA
gccaaatgactagactgca

SEQ ID NO: 36722 - RNA, 19 nt, synthetic construct
  misc_feature 1..19: note = siRNA sense sequence
  source 1..19: mol_type = other RNA
gcagtctagtcatttggca

SEQ ID NO: 36723 - RNA, 19 nt, synthetic construct
  misc_feature 1..19: note = siRNA antisense sequence
  source 1..19: mol_type = other RNA
tgccaaatgactagactgc

SEQ ID NO: 36724 - RNA, 19 nt, synthetic construct
  misc_feature 1..19: note = siRNA sense sequence
  source 1..19: mol_type = other RNA
cagtctagtcatttggcaa

SEQ ID NO: 36725 - RNA, 19 nt, synthetic construct
  misc_feature 1..19: note = siRNA antisense sequence
  source 1..19: mol_type = other RNA
ttgccaaatgactagactg

SEQ ID NO: 36726 - RNA, 19 nt, synthetic construct
  misc_feature 1..19: note = siRNA sense sequence
  source 1..19: mol_type = other RNA
agtctagtcatttggcaat

SEQ ID NO: 36727 - RNA, 19 nt, synthetic construct
  misc_feature 1..19: note = siRNA antisense sequence
  source 1..19: mol_type = other RNA
attgccaaatgactagact

SEQ ID NO: 36728 - RNA, 19 nt, synthetic construct
  misc_feature 1..19: note = siRNA sense sequence
  source 1..19: mol_type = other RNA
atttggcaatggaagctaa

SEQ ID NO: 36729 - RNA, 19 nt, synthetic construct
  misc_feature 1..19: note = siRNA antisense sequence
  source 1..19: mol_type = other RNA
ttagcttccattgccaaat

SEQ ID NO: 36730 - RNA, 19 nt, synthetic construct
  misc_feature 1..19: note = siRNA sense sequence
  source 1..19: mol_type = other RNA
tttggcaatggaagctaac

SEQ ID NO: 36731 - RNA, 19 nt, synthetic construct
  misc_feature 1..19: note = siRNA antisense sequence
  source 1..19: mol_type = other RNA
gttagcttccattgccaaa

SEQ ID NO: 36732 - RNA, 19 nt, synthetic construct
  misc_feature 1..19: note = siRNA sense sequence
  source 1..19: mol_type = other RNA
ttggcaatggaagctaact

SEQ ID NO: 36733 - RNA, 19 nt, synthetic construct
  misc_feature 1..19: note = siRNA antisense sequence
  source 1..19: mol_type = other RNA
agttagcttccattgccaa

SEQ ID NO: 36734 - RNA, 19 nt, synthetic construct
  misc_feature 1..19: note = siRNA sense sequence
  source 1..19: mol_type = other RNA
tggcaatggaagctaactt

SEQ ID NO: 36735 - RNA, 19 nt, synthetic construct
  misc_feature 1..19: note = siRNA antisense sequence
  source 1..19: mol_type = other RNA
aagttagcttccattgcca

SEQ ID NO: 36736 - RNA, 19 nt, synthetic construct
  misc_feature 1..19: note = siRNA sense sequence
  source 1..19: mol_type = other RNA
ggcaatggaagctaactta

SEQ ID NO: 36737 - RNA, 19 nt, synthetic construct
  misc_feature 1..19: note = siRNA antisense sequence
  source 1..19: mol_type = other RNA
taagttagcttccattgcc

SEQ ID NO: 36738 - RNA, 19 nt, synthetic construct
  misc_feature 1..19: note = siRNA sense sequence
  source 1..19: mol_type = other RNA
gcaatggaagctaacttaa

SEQ ID NO: 36739 - RNA, 19 nt, synthetic construct
  misc_feature 1..19: note = siRNA antisense sequence
  source 1..19: mol_type = other RNA
ttaagttagcttccattgc

SEQ ID NO: 36740 - RNA, 19 nt, synthetic construct
  misc_feature 1..19: note = siRNA sense sequence
  source 1..19: mol_type = other RNA
caatggaagctaacttaaa

SEQ ID NO: 36741 - RNA, 19 nt, synthetic construct
  misc_feature 1..19: note = siRNA antisense sequence
  source 1..19: mol_type = other RNA
tttaagttagcttccattg

SEQ ID NO: 36742 - RNA, 19 nt, synthetic construct
  misc_feature 1..19: note = siRNA sense sequence
  source 1..19: mol_type = other RNA
atggaagctaacttaaagt

SEQ ID NO: 36743 - RNA, 19 nt, synthetic construct
  misc_feature 1..19: note = siRNA antisense sequence
  source 1..19: mol_type = other RNA
actttaagttagcttccat

SEQ ID NO: 36744 - RNA, 19 nt, synthetic construct
  misc_feature 1..19: note = siRNA sense sequence
  source 1..19: mol_type = other RNA
tggaagctaacttaaagta

SEQ ID NO: 36745 - RNA, 19 nt, synthetic construct
  misc_feature 1..19: note = siRNA antisense sequence
  source 1..19: mol_type = other RNA
tactttaagttagcttcca

SEQ ID NO: 36746 - RNA, 19 nt, synthetic construct
  misc_feature 1..19: note = siRNA sense sequence
  source 1..19: mol_type = other RNA
ggaagctaacttaaagtaa

SEQ ID NO: 36747 - RNA, 19 nt, synthetic construct
  misc_feature 1..19: note = siRNA antisense sequence
  source 1..19: mol_type = other RNA
ttactttaagttagcttcc

SEQ ID NO: 36748 - RNA, 19 nt, synthetic construct
  misc_feature 1..19: note = siRNA sense sequence
  source 1..19: mol_type = other RNA
aattccttggcaatattag

SEQ ID NO: 36749 - RNA, 19 nt, synthetic construct
  misc_feature 1..19: note = siRNA antisense sequence
  source 1..19: mol_type = other RNA
ctaatattgccaaggaatt

SEQ ID NO: 36750 - RNA, 19 nt, synthetic construct
  misc_feature 1..19: note = siRNA sense sequence
  source 1..19: mol_type = other RNA
attccttggcaatattaga

SEQ ID NO: 36751 - RNA, 19 nt, synthetic construct
  misc_feature 1..19: note = siRNA antisense sequence
  source 1..19: mol_type = other RNA
tctaatattgccaaggaat

SEQ ID NO: 36752 - RNA, 19 nt, synthetic construct
  misc_feature 1..19: note = siRNA sense sequence
  source 1..19: mol_type = other RNA
ttccttggcaatattagag

SEQ ID NO: 36753 - RNA, 19 nt, synthetic construct
  misc_feature 1..19: note = siRNA antisense sequence
  source 1..19: mol_type = other RNA
ctctaatattgccaaggaa

SEQ ID NO: 36754 - RNA, 19 nt, synthetic construct
  misc_feature 1..19: note = siRNA sense sequence
  source 1..19: mol_type = other RNA
tccttggcaatattagagg

SEQ ID NO: 36755 - RNA, 19 nt, synthetic construct
  misc_feature 1..19: note = siRNA antisense sequence
  source 1..19: mol_type = other RNA
cctctaatattgccaagga

SEQ ID NO: 36756 - RNA, 19 nt, synthetic construct
  misc_feature 1..19: note = siRNA sense sequence
  source 1..19: mol_type = other RNA
ccttggcaatattagagga

SEQ ID NO: 36757 - RNA, 19 nt, synthetic construct
  misc_feature 1..19: note = siRNA antisense sequence
  source 1..19: mol_type = other RNA
tcctctaatattgccaagg

SEQ ID NO: 36758 - RNA, 19 nt, synthetic construct
  misc_feature 1..19: note = siRNA sense sequence
  source 1..19: mol_type = other RNA
ggcaatattagaggaagcg

SEQ ID NO: 36759 - RNA, 19 nt, synthetic construct
  misc_feature 1..19: note = siRNA antisense sequence
  source 1..19: mol_type = other RNA
cgcttcctctaatattgcc

SEQ ID NO: 36760 - RNA, 19 nt, synthetic construct
  misc_feature 1..19: note = siRNA sense sequence
  source 1..19: mol_type = other RNA
gcaatattagaggaagcga

SEQ ID NO: 36761 - RNA, 19 nt, synthetic construct
  misc_feature 1..19: note = siRNA antisense sequence
  source 1..19: mol_type = other RNA
tcgcttcctctaatattgc

SEQ ID NO: 36762 - RNA, 19 nt, synthetic construct
  misc_feature 1..19: note = siRNA sense sequence
  source 1..19: mol_type = other RNA
caatattagaggaagcgat

SEQ ID NO: 36763 - RNA, 19 nt, synthetic construct
  misc_feature 1..19: note = siRNA antisense sequence
  source 1..19: mol_type = other RNA
atcgcttcctctaatattg

SEQ ID NO: 36764 - RNA, 19 nt, synthetic construct
  misc_feature 1..19: note = siRNA sense sequence
  source 1..19: mol_type = other RNA
aatattagaggaagcgatt

SEQ ID NO: 36765 - RNA, 19 nt, synthetic construct
  misc_feature 1..19: note = siRNA antisense sequence
  source 1..19: mol_type = other RNA
aatcgcttcctctaatatt

SEQ ID NO: 36766 - RNA, 19 nt, synthetic construct
  misc_feature 1..19: note = siRNA sense sequence
  source 1..19: mol_type = other RNA
atattagaggaagcgatta

SEQ ID NO: 36767 - RNA, 19 nt, synthetic construct
  misc_feature 1..19: note = siRNA antisense sequence
  source 1..19: mol_type = other RNA
taatcgcttcctctaatat

SEQ ID NO: 36768 - RNA, 19 nt, synthetic construct
  misc_feature 1..19: note = siRNA sense sequence
  source 1..19: mol_type = other RNA
tattagaggaagcgattag

SEQ ID NO: 36769 - RNA, 19 nt, synthetic construct
  misc_feature 1..19: note = siRNA antisense sequence
  source 1..19: mol_type = other RNA
ctaatcgcttcctctaata

SEQ ID NO: 36770 - RNA, 19 nt, synthetic construct
  misc_feature 1..19: note = siRNA sense sequence
  source 1..19: mol_type = other RNA
attagaggaagcgattagt

SEQ ID NO: 36771 - RNA, 19 nt, synthetic construct
  misc_feature 1..19: note = siRNA antisense sequence
  source 1..19: mol_type = other RNA
actaatcgcttcctctaat

SEQ ID NO: 36772 - RNA, 19 nt, synthetic construct
  misc_feature 1..19: note = siRNA sense sequence
  source 1..19: mol_type = other RNA
ttagaggaagcgattagtg

SEQ ID NO: 36773 - RNA, 19 nt, synthetic construct
  misc_feature 1..19: note = siRNA antisense sequence
  source 1..19: mol_type = other RNA
cactaatcgcttcctctaa

SEQ ID NO: 36774 - RNA, 19 nt, synthetic construct
  misc_feature 1..19: note = siRNA sense sequence
  source 1..19: mol_type = other RNA
tagaggaagcgattagtga

SEQ ID NO: 36775 - RNA, 19 nt, synthetic construct
  misc_feature 1..19: note = siRNA antisense sequence
  source 1..19: mol_type = other RNA
tcactaatcgcttcctcta

SEQ ID NO: 36776 - RNA, 19 nt, synthetic construct
  misc_feature 1..19: note = siRNA sense sequence
  source 1..19: mol_type = other RNA
aagcgattagtgatttctg

SEQ ID NO: 36777 - RNA, 19 nt, synthetic construct
  misc_feature 1..19: note = siRNA antisense sequence
  source 1..19: mol_type = other RNA
cagaaatcactaatcgctt

SEQ ID NO: 36778 - RNA, 19 nt, synthetic construct
  misc_feature 1..19: note = siRNA sense sequence
  source 1..19: mol_type = other RNA
agcgattagtgatttctgt

SEQ ID NO: 36779 - RNA, 19 nt, synthetic construct
  misc_feature 1..19: note = siRNA antisense sequence
  source 1..19: mol_type = other RNA
acagaaatcactaatcgct

SEQ ID NO: 36780 - RNA, 19 nt, synthetic construct
  misc_feature 1..19: note = siRNA sense sequence
  source 1..19: mol_type = other RNA
gcgattagtgatttctgtt

SEQ ID NO: 36781 - RNA, 19 nt, synthetic construct
  misc_feature 1..19: note = siRNA antisense sequence
  source 1..19: mol_type = other RNA
aacagaaatcactaatcgc

SEQ ID NO: 36782 - RNA, 19 nt, synthetic construct
  misc_feature 1..19: note = siRNA sense sequence
  source 1..19: mol_type = other RNA
cgattagtgatttctgttg

SEQ ID NO: 36783 - RNA, 19 nt, synthetic construct
  misc_feature 1..19: note = siRNA antisense sequence
  source 1..19: mol_type = other RNA
caacagaaatcactaatcg

SEQ ID NO: 36784 - RNA, 19 nt, synthetic construct
  misc_feature 1..19: note = siRNA sense sequence
  source 1..19: mol_type = other RNA
tagtgatttctgttgatgc

SEQ ID NO: 36785 - RNA, 19 nt, synthetic construct
  misc_feature 1..19: note = siRNA antisense sequence
  source 1..19: mol_type = other RNA
gcatcaacagaaatcacta

SEQ ID NO: 36786 - RNA, 19 nt, synthetic construct
  misc_feature 1..19: note = siRNA sense sequence
  source 1..19: mol_type = other RNA
agtgatttctgttgatgcc

SEQ ID NO: 36787 - RNA, 19 nt, synthetic construct
  misc_feature 1..19: note = siRNA antisense sequence
  source 1..19: mol_type = other RNA
ggcatcaacagaaatcact

SEQ ID NO: 36788 - RNA, 19 nt, synthetic construct
  misc_feature 1..19: note = siRNA sense sequence
  source 1..19: mol_type = other RNA
gtgatttctgttgatgcct

SEQ ID NO: 36789 - RNA, 19 nt, synthetic construct
  misc_feature 1..19: note = siRNA antisense sequence
  source 1..19: mol_type = other RNA
aggcatcaacagaaatcac

SEQ ID NO: 36790 - RNA, 19 nt, synthetic construct
  misc_feature 1..19: note = siRNA sense sequence
  source 1..19: mol_type = other RNA
tgatttctgttgatgcctg

SEQ ID NO: 36791 - RNA, 19 nt, synthetic construct
  misc_feature 1..19: note = siRNA antisense sequence
  source 1..19: mol_type = other RNA
caggcatcaacagaaatca

SEQ ID NO: 36792 - RNA, 19 nt, synthetic construct
  misc_feature 1..19: note = siRNA sense sequence
  source 1..19: mol_type = other RNA
gatttctgttgatgcctgg

SEQ ID NO: 36793 - RNA, 19 nt, synthetic construct
  misc_feature 1..19: note = siRNA antisense sequence
  source 1..19: mol_type = other RNA
ccaggcatcaacagaaatc

SEQ ID NO: 36794 - RNA, 19 nt, synthetic construct
  misc_feature 1..19: note = siRNA sense sequence
  source 1..19: mol_type = other RNA
ctgttgatgcctggattga

SEQ ID NO: 36795 - RNA, 19 nt, synthetic construct
  misc_feature 1..19: note = siRNA antisense sequence
  source 1..19: mol_type = other RNA
tcaatccaggcatcaacag

SEQ ID NO: 36796 - RNA, 19 nt, synthetic construct
  misc_feature 1..19: note = siRNA sense sequence
  source 1..19: mol_type = other RNA
tgttgatgcctggattgac

SEQ ID NO: 36797 - RNA, 19 nt, synthetic construct
  misc_feature 1..19: note = siRNA antisense sequence
  source 1..19: mol_type = other RNA
gtcaatccaggcatcaaca

SEQ ID NO: 36798 - RNA, 19 nt, synthetic construct
  misc_feature 1..19: note = siRNA sense sequence
  source 1..19: mol_type = other RNA
gttgatgcctggattgacc

SEQ ID NO: 36799 - RNA, 19 nt, synthetic construct
  misc_feature 1..19: note = siRNA antisense sequence
  source 1..19: mol_type = other RNA
ggtcaatccaggcatcaac

SEQ ID NO: 36800 - RNA, 19 nt, synthetic construct
  misc_feature 1..19: note = siRNA sense sequence
  source 1..19: mol_type = other RNA
atgcctggattgacctcaa

SEQ ID NO: 36801 - RNA, 19 nt, synthetic construct
  misc_feature 1..19: note = siRNA antisense sequence
  source 1..19: mol_type = other RNA
ttgaggtcaatccaggcat

SEQ ID NO: 36802 - RNA, 19 nt, synthetic construct
  misc_feature 1..19: note = siRNA sense sequence
  source 1..19: mol_type = other RNA
tgcctggattgacctcaag

SEQ ID NO: 36803 - RNA, 19 nt, synthetic construct
  misc_feature 1..19: note = siRNA antisense sequence
  source 1..19: mol_type = other RNA
cttgaggtcaatccaggca

SEQ ID NO: 36804 - RNA, 19 nt, synthetic construct
  misc_feature 1..19: note = siRNA sense sequence
  source 1..19: mol_type = other RNA
gcctggattgacctcaagg

SEQ ID NO: 36805 - RNA, 19 nt, synthetic construct
  misc_feature 1..19: note = siRNA antisense sequence
  source 1..19: mol_type = other RNA
ccttgaggtcaatccaggc

SEQ ID NO: 36806 - RNA, 19 nt, synthetic construct
  misc_feature 1..19: note = siRNA sense sequence
  source 1..19: mol_type = other RNA
cctggattgacctcaagga

SEQ ID NO: 36807 - RNA, 19 nt, synthetic construct
  misc_feature 1..19: note = siRNA antisense sequence
  source 1..19: mol_type = other RNA
tccttgaggtcaatccagg

SEQ ID NO: 36808 - RNA, 19 nt, synthetic construct
  misc_feature 1..19: note = siRNA sense sequence
  source 1..19: mol_type = other RNA
ctggattgacctcaaggaa

SEQ ID NO: 36809 - RNA, 19 nt, synthetic construct
  misc_feature 1..19: note = siRNA antisense sequence
  source 1..19: mol_type = other RNA
ttccttgaggtcaatccag

SEQ ID NO: 36810 - RNA, 19 nt, synthetic construct
  misc_feature 1..19: note = siRNA sense sequence
  source 1..19: mol_type = other RNA
tggattgacctcaaggaag

SEQ ID NO: 36811 - RNA, 19 nt, synthetic construct
  misc_feature 1..19: note = siRNA antisense sequence
  source 1..19: mol_type = other RNA
cttccttgaggtcaatcca

SEQ ID NO: 36812 - RNA, 19 nt, synthetic construct
  misc_feature 1..19: note = siRNA sense sequence
  source 1..19: mol_type = other RNA
ggattgacctcaaggaagg

SEQ ID NO: 36813 - RNA, 19 nt, synthetic construct
  misc_feature 1..19: note = siRNA antisense sequence
  source 1..19: mol_type = other RNA
ccttccttgaggtcaatcc

SEQ ID NO: 36814 - RNA, 19 nt, synthetic construct
  misc_feature 1..19: note = siRNA sense sequence
  source 1..19: mol_type = other RNA
cctcaaggaaggtctgtat

SEQ ID NO: 36815 - RNA, 19 nt, synthetic construct
  misc_feature 1..19: note = siRNA antisense sequence
  source 1..19: mol_type = other RNA
atacagaccttccttgagg

SEQ ID NO: 36816 - RNA, 19 nt, synthetic construct
  misc_feature 1..19: note = siRNA sense sequence
  source 1..19: mol_type = other RNA
ctcaaggaaggtctgtatc

SEQ ID NO: 36817 - RNA, 19 nt, synthetic construct
  misc_feature 1..19: note = siRNA antisense sequence
  source 1..19: mol_type = other RNA
gatacagaccttccttgag

SEQ ID NO: 36818 - RNA, 19 nt, synthetic construct
  misc_feature 1..19: note = siRNA sense sequence
  source 1..19: mol_type = other RNA
tcaaggaaggtctgtatcc

SEQ ID NO: 36819 - RNA, 19 nt, synthetic construct
  misc_feature 1..19: note = siRNA antisense sequence
  source 1..19: mol_type = other RNA
ggatacagaccttccttga

SEQ ID NO: 36820 - RNA, 19 nt, synthetic construct
  misc_feature 1..19: note = siRNA sense sequence
  source 1..19: mol_type = other RNA
ggaaggtctgtatccaaaa

SEQ ID NO: 36821 - RNA, 19 nt, synthetic construct
  misc_feature 1..19: note = siRNA antisense sequence
  source 1..19: mol_type = other RNA
ttttggatacagaccttcc

SEQ ID NO: 36822 - RNA, 19 nt, synthetic construct
  misc_feature 1..19: note = siRNA sense sequence
  source 1..19: mol_type = other RNA
tgttctcatttcagagtag

SEQ ID NO: 36823 - RNA, 19 nt, synthetic construct
  misc_feature 1..19: note = siRNA antisense sequence
  source 1..19: mol_type = other RNA
ctactctgaaatgagaaca

SEQ ID NO: 36824 - RNA, 19 nt, synthetic construct
  misc_feature 1..19: note = siRNA sense sequence
  source 1..19: mol_type = other RNA
gttctcatttcagagtagc

SEQ ID NO: 36825 - RNA, 19 nt, synthetic construct
  misc_feature 1..19: note = siRNA antisense sequence
  source 1..19: mol_type = other RNA
gctactctgaaatgagaac

SEQ ID NO: 36826 - RNA, 19 nt, synthetic construct
  misc_feature 1..19: note = siRNA sense sequence
  source 1..19: mol_type = other RNA
ttctcatttcagagtagct

SEQ ID NO: 36827 - RNA, 19 nt, synthetic construct
  misc_feature 1..19: note = siRNA antisense sequence
  source 1..19: mol_type = other RNA
agctactctgaaatgagaa

SEQ ID NO: 36828 - RNA, 19 nt, synthetic construct
  misc_feature 1..19: note = siRNA sense sequence
  source 1..19: mol_type = other RNA
tctcatttcagagtagctt

SEQ ID NO: 36829 - RNA, 19 nt, synthetic construct
  misc_feature 1..19: note = siRNA antisense sequence
  source 1..19: mol_type = other RNA
aagctactctgaaatgaga

SEQ ID NO: 36830 - RNA, 19 nt, synthetic construct
  misc_feature 1..19: note = siRNA sense sequence
  source 1..19: mol_type = other RNA
catttcagagtagcttaaa

SEQ ID NO: 36831 - RNA, 19 nt, synthetic construct
  misc_feature 1..19: note = siRNA antisense sequence
  source 1..19: mol_type = other RNA
tttaagctactctgaaatg

SEQ ID NO: 36832 - RNA, 19 nt, synthetic construct
  misc_feature 1..19: note = siRNA sense sequence
  source 1..19: mol_type = other RNA
tttcagagtagcttaaatg

SEQ ID NO: 36833 - RNA, 19 nt, synthetic construct
  misc_feature 1..19: note = siRNA antisense sequence
  source 1..19: mol_type = other RNA
catttaagctactctgaaa

SEQ ID NO: 36834 - RNA, 19 nt, synthetic construct
  misc_feature 1..19: note = siRNA sense sequence
  source 1..19: mol_type = other RNA
ttcagagtagcttaaatgc

SEQ ID NO: 36835 - RNA, 19 nt, synthetic construct
  misc_feature 1..19: note = siRNA antisense sequence
  source 1..19: mol_type = other RNA
gcatttaagctactctgaa

SEQ ID NO: 36836 - RNA, 19 nt, synthetic construct
  misc_feature 1..19: note = siRNA sense sequence
  source 1..19: mol_type = other RNA
tagcttaaatgcacttgtt

SEQ ID NO: 36837 - RNA, 19 nt, synthetic construct
  misc_feature 1..19: note = siRNA antisense sequence
  source 1..19: mol_type = other RNA
aacaagtgcatttaagcta

SEQ ID NO: 36838 - RNA, 19 nt, synthetic construct
  misc_feature 1..19: note = siRNA sense sequence
  source 1..19: mol_type = other RNA
agcttaaatgcacttgttt

SEQ ID NO: 36839 - RNA, 19 nt, synthetic construct
  misc_feature 1..19: note = siRNA antisense sequence
  source 1..19: mol_type = other RNA
aaacaagtgcatttaagct

SEQ ID NO: 36840 - RNA, 19 nt, synthetic construct
  misc_feature 1..19: note = siRNA sense sequence
  source 1..19: mol_type = other RNA
gcttaaatgcacttgtttg

SEQ ID NO: 36841 - RNA, 19 nt, synthetic construct
  misc_feature 1..19: note = siRNA antisense sequence
  source 1..19: mol_type = other RNA
caaacaagtgcatttaagc

SEQ ID NO: 36842 - RNA, 19 nt, synthetic construct
  misc_feature 1..19: note = siRNA sense sequence
  source 1..19: mol_type = other RNA
attcagtaggaaggattcg

SEQ ID NO: 36843 - RNA, 19 nt, synthetic construct
  misc_feature 1..19: note = siRNA antisense sequence
  source 1..19: mol_type = other RNA
cgaatccttcctactgaat

SEQ ID NO: 36844 - RNA, 19 nt, synthetic construct
  misc_feature 1..19: note = siRNA sense sequence
  source 1..19: mol_type = other RNA
ttcagtaggaaggattcgg

SEQ ID NO: 36845 - RNA, 19 nt, synthetic construct
  misc_feature 1..19: note = siRNA antisense sequence
  source 1..19: mol_type = other RNA
ccgaatccttcctactgaa

SEQ ID NO: 36846 - RNA, 19 nt, synthetic construct
  misc_feature 1..19: note = siRNA sense sequence
  source 1..19: mol_type = other RNA
tcagtaggaaggattcgga

SEQ ID NO: 36847 - RNA, 19 nt, synthetic construct
  misc_feature 1..19: note = siRNA antisense sequence
  source 1..19: mol_type = other RNA
tccgaatccttcctactga

SEQ ID NO: 36848 - RNA, 19 nt, synthetic construct
  misc_feature 1..19: note = siRNA sense sequence
  source 1..19: mol_type = other RNA
cagtaggaaggattcggag

SEQ ID NO: 36849 - RNA, 19 nt, synthetic construct
  misc_feature 1..19: note = siRNA antisense sequence
  source 1..19: mol_type = other RNA
ctccgaatccttcctactg

SEQ ID NO: 36850 - RNA, 19 nt, synthetic construct
  misc_feature 1..19: note = siRNA sense sequence
  source 1..19: mol_type = other RNA
agtaggaaggattcggagg

SEQ ID NO: 36851 - RNA, 19 nt, synthetic construct
  misc_feature 1..19: note = siRNA antisense sequence
  source 1..19: mol_type = other RNA
cctccgaatccttcctact

SEQ ID NO: 36852 - RNA, 19 nt, synthetic construct
  misc_feature 1..19: note = siRNA sense sequence
  source 1..19: mol_type = other RNA
gtaggaaggattcggaggc

SEQ ID NO: 36853 - RNA, 19 nt, synthetic construct
  misc_feature 1..19: note = siRNA antisense sequence
  source 1..19: mol_type = other RNA
gcctccgaatccttcctac

SEQ ID NO: 36854 - RNA, 19 nt, synthetic construct
  misc_feature 1..19: note = siRNA sense sequence
  source 1..19: mol_type = other RNA
taggaaggattcggaggca

SEQ ID NO: 36855 - RNA, 19 nt, synthetic construct
  misc_feature 1..19: note = siRNA antisense sequence
  source 1..19: mol_type = other RNA
tgcctccgaatccttccta

SEQ ID NO: 36856 - RNA, 19 nt, synthetic construct
  misc_feature 1..19: note = siRNA sense sequence
  source 1..19: mol_type = other RNA
aggaaggattcggaggcaa

SEQ ID NO: 36857 - RNA, 19 nt, synthetic construct
  misc_feature 1..19: note = siRNA antisense sequence
  source 1..19: mol_type = other RNA
ttgcctccgaatccttcct

SEQ ID NO: 36858 - RNA, 19 nt, synthetic construct
  misc_feature 1..19: note = siRNA sense sequence
  source 1..19: mol_type = other RNA
ggaaggattcggaggcaaa

SEQ ID NO: 36859 - RNA, 19 nt, synthetic construct
  misc_feature 1..19: note = siRNA antisense sequence
  source 1..19: mol_type = other RNA
tttgcctccgaatccttcc

SEQ ID NO: 36860 - RNA, 19 nt, synthetic construct
  misc_feature 1..19: note = siRNA sense sequence
  source 1..19: mol_type = other RNA
gaaggattcggaggcaaat

SEQ ID NO: 36861 - RNA, 19 nt, synthetic construct
  misc_feature 1..19: note = siRNA antisense sequence
  source 1..19: mol_type = other RNA
atttgcctccgaatccttc

SEQ ID NO: 36862 - RNA, 19 nt, synthetic construct
  misc_feature 1..19: note = siRNA sense sequence
  source 1..19: mol_type = other RNA
aaggattcggaggcaaatg

SEQ ID NO: 36863 - RNA, 19 nt, synthetic construct
  misc_feature 1..19: note = siRNA antisense sequence
  source 1..19: mol_type = other RNA
catttgcctccgaatcctt

SEQ ID NO: 36864 - RNA, 19 nt, synthetic construct
  misc_feature 1..19: note = siRNA sense sequence
  source 1..19: mol_type = other RNA
cacacttccgtgagtttgg

SEQ ID NO: 36865 - RNA, 19 nt, synthetic construct
  misc_feature 1..19: note = siRNA antisense sequence
  source 1..19: mol_type = other RNA
ccaaactcacggaagtgtg

SEQ ID NO: 36866 - RNA, 19 nt, synthetic construct
  misc_feature 1..19: note = siRNA sense sequence
  source 1..19: mol_type = other RNA
acacttccgtgagtttggt

SEQ ID NO: 36867 - RNA, 19 nt, synthetic construct
  misc_feature 1..19: note = siRNA antisense sequence
  source 1..19: mol_type = other RNA
accaaactcacggaagtgt

SEQ ID NO: 36868 - RNA, 19 nt, synthetic construct
  misc_feature 1..19: note = siRNA sense sequence
  source 1..19: mol_type = other RNA
cacttccgtgagtttggtc

SEQ ID NO: 36869 - RNA, 19 nt, synthetic construct
  misc_feature 1..19: note = siRNA antisense sequence
  source 1..19: mol_type = other RNA
gaccaaactcacggaagtg

SEQ ID NO: 36870 - RNA, 19 nt, synthetic construct
  misc_feature 1..19: note = siRNA sense sequence
  source 1..19: mol_type = other RNA
acttccgtgagtttggtct

SEQ ID NO: 36871 - RNA, 19 nt, synthetic construct
  misc_feature 1..19: note = siRNA antisense sequence
  source 1..19: mol_type = other RNA
agaccaaactcacggaagt

SEQ ID NO: 36872 - RNA, 19 nt, synthetic construct
  misc_feature 1..19: note = siRNA sense sequence
  source 1..19: mol_type = other RNA
cttccgtgagtttggtctt

SEQ ID NO: 36873 - RNA, 19 nt, synthetic construct
  misc_feature 1..19: note = siRNA antisense sequence
  source 1..19: mol_type = other RNA
aagaccaaactcacggaag

SEQ ID NO: 36874 - RNA, 19 nt, synthetic construct
  misc_feature 1..19: note = siRNA sense sequence
  source 1..19: mol_type = other RNA
cgtgagtttggtctttact

SEQ ID NO: 36875 - RNA, 19 nt, synthetic construct
  misc_feature 1..19: note = siRNA antisense sequence
  source 1..19: mol_type = other RNA
agtaaagaccaaactcacg

SEQ ID NO: 36876 - RNA, 19 nt, synthetic construct
  misc_feature 1..19: note = siRNA sense sequence
  source 1..19: mol_type = other RNA
ctttactgatctactgagc

SEQ ID NO: 36877 - RNA, 19 nt, synthetic construct
  misc_feature 1..19: note = siRNA antisense sequence
  source 1..19: mol_type = other RNA
gctcagtagatcagtaaag

SEQ ID NO: 36878 - RNA, 19 nt, synthetic construct
  misc_feature 1..19: note = siRNA sense sequence
  source 1..19: mol_type = other RNA
tttactgatctactgagct

SEQ ID NO: 36879 - RNA, 19 nt, synthetic construct
  misc_feature 1..19: note = siRNA antisense sequence
  source 1..19: mol_type = other RNA
agctcagtagatcagtaaa

SEQ ID NO: 36880 - RNA, 19 nt, synthetic construct
  misc_feature 1..19: note = siRNA sense sequence
  source 1..19: mol_type = other RNA
ctgatctactgagcttggt

SEQ ID NO: 36881 - RNA, 19 nt, synthetic construct
  misc_feature 1..19: note = siRNA antisense sequence
  source 1..19: mol_type = other RNA
accaagctcagtagatcag

SEQ ID NO: 36882 - RNA, 19 nt, synthetic construct
  misc_feature 1..19: note = siRNA sense sequence
  source 1..19: mol_type = other RNA
tgatctactgagcttggtc

SEQ ID NO: 36883 - RNA, 19 nt, synthetic construct
  misc_feature 1..19: note = siRNA antisense sequence
  source 1..19: mol_type = other RNA
gaccaagctcagtagatca

SEQ ID NO: 36884 - RNA, 19 nt, synthetic construct
  misc_feature 1..19: note = siRNA sense sequence
  source 1..19: mol_type = other RNA
gatctactgagcttggtct

SEQ ID NO: 36885 - RNA, 19 nt, synthetic construct
  misc_feature 1..19: note = siRNA antisense sequence
  source 1..19: mol_type = other RNA
agaccaagctcagtagatc

SEQ ID NO: 36886 - RNA, 19 nt, synthetic construct
  misc_feature 1..19: note = siRNA sense sequence
  source 1..19: mol_type = other RNA
atctactgagcttggtcta

SEQ ID NO: 36887 - RNA, 19 nt, synthetic construct
  misc_feature 1..19: note = siRNA antisense sequence
  source 1..19: mol_type = other RNA
tagaccaagctcagtagat

SEQ ID NO: 36888 - RNA, 19 nt, synthetic construct
  misc_feature 1..19: note = siRNA sense sequence
  source 1..19: mol_type = other RNA
tctactgagcttggtctaa

SEQ ID NO: 36889 - RNA, 19 nt, synthetic construct
  misc_feature 1..19: note = siRNA antisense sequence
  source 1..19: mol_type = other RNA
ttagaccaagctcagtaga

SEQ ID NO: 36890 - RNA, 19 nt, synthetic construct
  misc_feature 1..19: note = siRNA sense sequence
  source 1..19: mol_type = other RNA
ctactgagcttggtctaat

SEQ ID NO: 36891 - RNA, 19 nt, synthetic construct
  misc_feature 1..19: note = siRNA antisense sequence
  source 1..19: mol_type = other RNA
attagaccaagctcagtag

SEQ ID NO: 36892 - RNA, 19 nt, synthetic construct
  misc_feature 1..19: note = siRNA sense sequence
  source 1..19: mol_type = other RNA
tactgagcttggtctaatg

SEQ ID NO: 36893 - RNA, 19 nt, synthetic construct
  misc_feature 1..19: note = siRNA antisense sequence
  source 1..19: mol_type = other RNA
cattagaccaagctcagta

SEQ ID NO: 36894 - RNA, 19 nt, synthetic construct
  misc_feature 1..19: note = siRNA sense sequence
  source 1..19: mol_type = other RNA
agcttggtctaatgtttat

SEQ ID NO: 36895 - RNA, 19 nt, synthetic construct
  misc_feature 1..19: note = siRNA antisense sequence
  source 1..19: mol_type = other RNA
ataaacattagaccaagct

SEQ ID NO: 36896 - RNA, 19 nt, synthetic construct
  misc_feature 1..19: note = siRNA sense sequence
  source 1..19: mol_type = other RNA
aactttattgggtttctgg

SEQ ID NO: 36897 - RNA, 19 nt, synthetic construct
  misc_feature 1..19: note = siRNA antisense sequence
  source 1..19: mol_type = other RNA
ccagaaacccaataaagtt

SEQ ID NO: 36898 - RNA, 19 nt, synthetic construct
  misc_feature 1..19: note = siRNA sense sequence
  source 1..19: mol_type = other RNA
actttattgggtttctggt

SEQ ID NO: 36899 - RNA, 19 nt, synthetic construct
  misc_feature 1..19: note = siRNA antisense sequence
  source 1..19: mol_type = other RNA
accagaaacccaataaagt

SEQ ID NO: 36900 - RNA, 19 nt, synthetic construct
  misc_feature 1..19: note = siRNA sense sequence
  source 1..19: mol_type = other RNA
ctttattgggtttctggta

SEQ ID NO: 36901 - RNA, 19 nt, synthetic construct
  misc_feature 1..19: note = siRNA antisense sequence
  source 1..19: mol_type = other RNA
taccagaaacccaataaag

SEQ ID NO: 36902 - RNA, 19 nt, synthetic construct
  misc_feature 1..19: note = siRNA sense sequence
  source 1..19: mol_type = other RNA
tttattgggtttctggtat

SEQ ID NO: 36903 - RNA, 19 nt, synthetic construct
  misc_feature 1..19: note = siRNA antisense sequence
  source 1..19: mol_type = other RNA
ataccagaaacccaataaa

SEQ ID NO: 36904 - RNA, 19 nt, synthetic construct
  misc_feature 1..19: note = siRNA sense sequence
  source 1..19: mol_type = other RNA
taagttcattgtagatagg

SEQ ID NO: 36905 - RNA, 19 nt, synthetic construct
  misc_feature 1..19: note = siRNA antisense sequence
  source 1..19: mol_type = other RNA
cctatctacaatgaactta

SEQ ID NO: 36906 - RNA, 19 nt, synthetic construct
  misc_feature 1..19: note = siRNA sense sequence
  source 1..19: mol_type = other RNA
agatggagtcttgctctgt

SEQ ID NO: 36907 - RNA, 19 nt, synthetic construct
  misc_feature 1..19: note = siRNA antisense sequence
  source 1..19: mol_type = other RNA
acagagcaagactccatct

SEQ ID NO: 36908 - RNA, 19 nt, synthetic construct
  misc_feature 1..19: note = siRNA sense sequence
  source 1..19: mol_type = other RNA
gatggagtcttgctctgtc

SEQ ID NO: 36909 - RNA, 19 nt, synthetic construct
  misc_feature 1..19: note = siRNA antisense sequence
  source 1..19: mol_type = other RNA
gacagagcaagactccatc

SEQ ID NO: 36910 - RNA, 19 nt, synthetic construct
  misc_feature 1..19: note = siRNA sense sequence
  source 1..19: mol_type = other RNA
atggagtcttgctctgtca

SEQ ID NO: 36911 - RNA, 19 nt, synthetic construct
  misc_feature 1..19: note = siRNA antisense sequence
  source 1..19: mol_type = other RNA
tgacagagcaagactccat

SEQ ID NO: 36912 - RNA, 19 nt, synthetic construct
  misc_feature 1..19: note = siRNA sense sequence
  source 1..19: mol_type = other RNA
agtcttgctctgtcaccca

SEQ ID NO: 36913 - RNA, 19 nt, synthetic construct
  misc_feature 1..19: note = siRNA antisense sequence
  source 1..19: mol_type = other RNA
tgggtgacagagcaagact

SEQ ID NO: 36914 - RNA, 19 nt, synthetic construct
  misc_feature 1..19: note = siRNA sense sequence
  source 1..19: mol_type = other RNA
gtcttgctctgtcacccag

SEQ ID NO: 36915 - RNA, 19 nt, synthetic construct
  misc_feature 1..19: note = siRNA antisense sequence
  source 1..19: mol_type = other RNA
ctgggtgacagagcaagac

SEQ ID NO: 36916 - RNA, 19 nt, synthetic construct
  misc_feature 1..19: note = siRNA sense sequence
  source 1..19: mol_type = other RNA
tcttgctctgtcacccagg

SEQ ID NO: 36917 - RNA, 19 nt, synthetic construct
  misc_feature 1..19: note = siRNA antisense sequence
  source 1..19: mol_type = other RNA
cctgggtgacagagcaaga

SEQ ID NO: 36918 - RNA, 19 nt, synthetic construct
  misc_feature 1..19: note = siRNA sense sequence
  source 1..19: mol_type = other RNA
cttgctctgtcacccaggc

SEQ ID NO: 36919 - RNA, 19 nt, synthetic construct
  misc_feature 1..19: note = siRNA antisense sequence
  source 1..19: mol_type = other RNA
gcctgggtgacagagcaag

SEQ ID NO: 36920 - RNA, 19 nt, synthetic construct
  misc_feature 1..19: note = siRNA sense sequence
  source 1..19: mol_type = other RNA
ttgctctgtcacccaggct

SEQ ID NO: 36921 - RNA, 19 nt, synthetic construct
  misc_feature 1..19: note = siRNA antisense sequence
  source 1..19: mol_type = other RNA
agcctgggtgacagagcaa

SEQ ID NO: 36922 - RNA, 19 nt, synthetic construct
  misc_feature 1..19: note = siRNA sense sequence
  source 1..19: mol_type = other RNA
tgctctgtcacccaggctg

SEQ ID NO: 36923 - RNA, 19 nt, synthetic construct
  misc_feature 1..19: note = siRNA antisense sequence
  source 1..19: mol_type = other RNA
cagcctgggtgacagagca

SEQ ID NO: 36924 - RNA, 19 nt, synthetic construct
  misc_feature 1..19: note = siRNA sense sequence
  source 1..19: mol_type = other RNA
ctctgtcacccaggctgga

SEQ ID NO: 36925 - RNA, 19 nt, synthetic construct
  misc_feature 1..19: note = siRNA antisense sequence
  source 1..19: mol_type = other RNA
tccagcctgggtgacagag

SEQ ID NO: 36926 - RNA, 19 nt, synthetic construct
  misc_feature 1..19: note = siRNA sense sequence
  source 1..19: mol_type = other RNA
tctgtcacccaggctggag

SEQ ID NO: 36927 - RNA, 19 nt, synthetic construct
  misc_feature 1..19: note = siRNA antisense sequence
  source 1..19: mol_type = other RNA
ctccagcctgggtgacaga

SEQ ID NO: 36928 - RNA, 19 nt, synthetic construct
  misc_feature 1..19: note = siRNA sense sequence
  source 1..19: mol_type = other RNA
tcacccaggctggagtaca

SEQ ID NO: 36929 - RNA, 19 nt, synthetic construct
  misc_feature 1..19: note = siRNA antisense sequence
  source 1..19: mol_type = other RNA
tgtactccagcctgggtga

SEQ ID NO: 36930 - RNA, 19 nt, synthetic construct
  misc_feature 1..19: note = siRNA sense sequence
  source 1..19: mol_type = other RNA
cacccaggctggagtacag

SEQ ID NO: 36931 - RNA, 19 nt, synthetic construct
  misc_feature 1..19: note = siRNA antisense sequence
  source 1..19: mol_type = other RNA
ctgtactccagcctgggtg

SEQ ID NO: 36932 - RNA, 19 nt, synthetic construct
  misc_feature 1..19: note = siRNA sense sequence
  source 1..19: mol_type = other RNA
acccaggctggagtacagt

SEQ ID NO: 36933 - RNA, 19 nt, synthetic construct
  misc_feature 1..19: note = siRNA antisense sequence
  source 1..19: mol_type = other RNA
actgtactccagcctgggt

SEQ ID NO: 36934 - RNA, 19 nt, synthetic construct
  misc_feature 1..19: note = siRNA sense sequence
  source 1..19: mol_type = other RNA
cccaggctggagtacagtg

SEQ ID NO: 36935 - RNA, 19 nt, synthetic construct
  misc_feature 1..19: note = siRNA antisense sequence
  source 1..19: mol_type = other RNA
cactgtactccagcctggg

SEQ ID NO: 36936 - RNA, 19 nt, synthetic construct
  misc_feature 1..19: note = siRNA sense sequence
  source 1..19: mol_type = other RNA
ccaggctggagtacagtgg

SEQ ID NO: 36937 - RNA, 19 nt, synthetic construct
  misc_feature 1..19: note = siRNA antisense sequence
  source 1..19: mol_type = other RNA
ccactgtactccagcctgg

SEQ ID NO: 36938 - RNA, 19 nt, synthetic construct
  misc_feature 1..19: note = siRNA sense sequence
  source 1..19: mol_type = other RNA
caggctggagtacagtgga

SEQ ID NO: 36939 - RNA, 19 nt, synthetic construct
  misc_feature 1..19: note = siRNA antisense sequence
  source 1..19: mol_type = other RNA
tccactgtactccagcctg

SEQ ID NO: 36940 - RNA, 19 nt, synthetic construct
  misc_feature 1..19: note = siRNA sense sequence
  source 1..19: mol_type = other RNA
aggctggagtacagtggag

SEQ ID NO: 36941 - RNA, 19 nt, synthetic construct
  misc_feature 1..19: note = siRNA antisense sequence
  source 1..19: mol_type = other RNA
ctccactgtactccagcct

SEQ ID NO: 36942 - RNA, 19 nt, synthetic construct
  misc_feature 1..19: note = siRNA sense sequence
  source 1..19: mol_type = other RNA
ggctggagtacagtggagc

SEQ ID NO: 36943 - RNA, 19 nt, synthetic construct
  misc_feature 1..19: note = siRNA antisense sequence
  source 1..19: mol_type = other RNA
gctccactgtactccagcc

SEQ ID NO: 36944 - RNA, 19 nt, synthetic construct
  misc_feature 1..19: note = siRNA sense sequence
  source 1..19: mol_type = other RNA
gctggagtacagtggagcg

SEQ ID NO: 36945 - RNA, 19 nt, synthetic construct
  misc_feature 1..19: note = siRNA antisense sequence
  source 1..19: mol_type = other RNA
cgctccactgtactccagc

SEQ ID NO: 36946 - RNA, 19 nt, synthetic construct
  misc_feature 1..19: note = siRNA sense sequence
  source 1..19: mol_type = other RNA
ctggagtacagtggagcga

SEQ ID NO: 36947 - RNA, 19 nt, synthetic construct
  misc_feature 1..19: note = siRNA antisense sequence
  source 1..19: mol_type = other RNA
tcgctccactgtactccag

SEQ ID NO: 36948 - RNA, 19 nt, synthetic construct
  misc_feature 1..19: note = siRNA sense sequence
  source 1..19: mol_type = other RNA
ctccgcctcctgggttcaa

SEQ ID NO: 36949 - RNA, 19 nt, synthetic construct
  misc_feature 1..19: note = siRNA antisense sequence
  source 1..19: mol_type = other RNA
ttgaacccaggaggcggag

SEQ ID NO: 36950 - RNA, 19 nt, synthetic construct
  misc_feature 1..19: note = siRNA sense sequence
  source 1..19: mol_type = other RNA
tccgcctcctgggttcaag

SEQ ID NO: 36951 - RNA, 19 nt, synthetic construct
  misc_feature 1..19: note = siRNA antisense sequence
  source 1..19: mol_type = other RNA
cttgaacccaggaggcgga

SEQ ID NO: 36952 - RNA, 19 nt, synthetic construct
  misc_feature 1..19: note = siRNA sense sequence
  source 1..19: mol_type = other RNA
cctgcctcagcctcctagt

SEQ ID NO: 36953 - RNA, 19 nt, synthetic construct
  misc_feature 1..19: note = siRNA antisense sequence
  source 1..19: mol_type = other RNA
actaggaggctgaggcagg

SEQ ID NO: 36954 - RNA, 19 nt, synthetic construct
  misc_feature 1..19: note = siRNA sense sequence
  source 1..19: mol_type = other RNA
ctgcctcagcctcctagta

SEQ ID NO: 36955 - RNA, 19 nt, synthetic construct
  misc_feature 1..19: note = siRNA antisense sequence
  source 1..19: mol_type = other RNA
tactaggaggctgaggcag

SEQ ID NO: 36956 - RNA, 19 nt, synthetic construct
  misc_feature 1..19: note = siRNA sense sequence
  source 1..19: mol_type = other RNA
tgcctcagcctcctagtag

SEQ ID NO: 36957 - RNA, 19 nt, synthetic construct
  misc_feature 1..19: note = siRNA antisense sequence
  source 1..19: mol_type = other RNA
ctactaggaggctgaggca

SEQ ID NO: 36958 - RNA, 19 nt, synthetic construct
  misc_feature 1..19: note = siRNA sense sequence
  source 1..19: mol_type = other RNA
ctcctagtagctgggatta

SEQ ID NO: 36959 - RNA, 19 nt, synthetic construct
  misc_feature 1..19: note = siRNA antisense sequence
  source 1..19: mol_type = other RNA
taatcccagctactaggag

SEQ ID NO: 36960 - RNA, 19 nt, synthetic construct
  misc_feature 1..19: note = siRNA sense sequence
  source 1..19: mol_type = other RNA
tcctagtagctgggattac

SEQ ID NO: 36961 - RNA, 19 nt, synthetic construct
  misc_feature 1..19: note = siRNA antisense sequence
  source 1..19: mol_type = other RNA
gtaatcccagctactagga

SEQ ID NO: 36962 - RNA, 19 nt, synthetic construct
  misc_feature 1..19: note = siRNA sense sequence
  source 1..19: mol_type = other RNA
cctagtagctgggattaca

SEQ ID NO: 36963 - RNA, 19 nt, synthetic construct
  misc_feature 1..19: note = siRNA antisense sequence
  source 1..19: mol_type = other RNA
tgtaatcccagctactagg

SEQ ID NO: 36964 - RNA, 19 nt, synthetic construct
  misc_feature 1..19: note = siRNA sense sequence
  source 1..19: mol_type = other RNA
ctagtagctgggattacag

SEQ ID NO: 36965 - RNA, 19 nt, synthetic construct
  misc_feature 1..19: note = siRNA antisense sequence
  source 1..19: mol_type = other RNA
ctgtaatcccagctactag

SEQ ID NO: 36966 - RNA, 19 nt, synthetic construct
  misc_feature 1..19: note = siRNA sense sequence
  source 1..19: mol_type = other RNA
tagctgggattacaggcgt

SEQ ID NO: 36967 - RNA, 19 nt, synthetic construct
  misc_feature 1..19: note = siRNA antisense sequence
  source 1..19: mol_type = other RNA
acgcctgtaatcccagcta

SEQ ID NO: 36968 - RNA, 19 nt, synthetic construct
  misc_feature 1..19: note = siRNA sense sequence
  source 1..19: mol_type = other RNA
agctgggattacaggcgtg

SEQ ID NO: 36969 - RNA, 19 nt, synthetic construct
  misc_feature 1..19: note = siRNA antisense sequence
  source 1..19: mol_type = other RNA
cacgcctgtaatcccagct

SEQ ID NO: 36970 - RNA, 19 nt, synthetic construct
  misc_feature 1..19: note = siRNA sense sequence
  source 1..19: mol_type = other RNA
gctgggattacaggcgtgt

SEQ ID NO: 36971 - RNA, 19 nt, synthetic construct
  misc_feature 1..19: note = siRNA antisense sequence
  source 1..19: mol_type = other RNA
acacgcctgtaatcccagc

SEQ ID NO: 36972 - RNA, 19 nt, synthetic construct
  misc_feature 1..19: note = siRNA sense sequence
  source 1..19: mol_type = other RNA
gacacggtttcaccatgtt

SEQ ID NO: 36973 - RNA, 19 nt, synthetic construct
  misc_feature 1..19: note = siRNA antisense sequence
  source 1..19: mol_type = other RNA
aacatggtgaaaccgtgtc

SEQ ID NO: 36974 - RNA, 19 nt, synthetic construct
  misc_feature 1..19: note = siRNA sense sequence
  source 1..19: mol_type = other RNA
acacggtttcaccatgttg

SEQ ID NO: 36975 - RNA, 19 nt, synthetic construct
  misc_feature 1..19: note = siRNA antisense sequence
  source 1..19: mol_type = other RNA
caacatggtgaaaccgtgt

SEQ ID NO: 36976 - RNA, 19 nt, synthetic construct
  misc_feature 1..19: note = siRNA sense sequence
  source 1..19: mol_type = other RNA
cacggtttcaccatgttgg

SEQ ID NO: 36977 - RNA, 19 nt, synthetic construct
  misc_feature 1..19: note = siRNA antisense sequence
  source 1..19: mol_type = other RNA
ccaacatggtgaaaccgtg

SEQ ID NO: 36978 - RNA, 19 nt, synthetic construct
  misc_feature 1..19: note = siRNA sense sequence
  source 1..19: mol_type = other RNA
ccatgttggtcaggctggt

SEQ ID NO: 36979 - RNA, 19 nt, synthetic construct
  misc_feature 1..19: note = siRNA antisense sequence
  source 1..19: mol_type = other RNA
accagcctgaccaacatgg

SEQ ID NO: 36980 - RNA, 19 nt, synthetic construct
  misc_feature 1..19: note = siRNA sense sequence
  source 1..19: mol_type = other RNA
catgttggtcaggctggtc

SEQ ID NO: 36981 - RNA, 19 nt, synthetic construct
  misc_feature 1..19: note = siRNA antisense sequence
  source 1..19: mol_type = other RNA
gaccagcctgaccaacatg

SEQ ID NO: 36982 - RNA, 19 nt, synthetic construct
  misc_feature 1..19: note = siRNA sense sequence
  source 1..19: mol_type = other RNA
atgttggtcaggctggtct

SEQ ID NO: 36983 - RNA, 19 nt, synthetic construct
  misc_feature 1..19: note = siRNA antisense sequence
  source 1..19: mol_type = other RNA
agaccagcctgaccaacat

SEQ ID NO: 36984 - RNA, 19 nt, synthetic construct
  misc_feature 1..19: note = siRNA sense sequence
  source 1..19: mol_type = other RNA
tgttggtcaggctggtctt

SEQ ID NO: 36985 - RNA, 19 nt, synthetic construct
  misc_feature 1..19: note = siRNA antisense sequence
  source 1..19: mol_type = other RNA
aagaccagcctgaccaaca

SEQ ID NO: 36986 - RNA, 19 nt, synthetic construct
  misc_feature 1..19: note = siRNA sense sequence
  source 1..19: mol_type = other RNA
gttggtcaggctggtcttg

SEQ ID NO: 36987 - RNA, 19 nt, synthetic construct
  misc_feature 1..19: note = siRNA antisense sequence
  source 1..19: mol_type = other RNA
caagaccagcctgaccaac

SEQ ID NO: 36988 - RNA, 19 nt, synthetic construct
  misc_feature 1..19: note = siRNA sense sequence
  source 1..19: mol_type = other RNA
ttggtcaggctggtcttga

SEQ ID NO: 36989 - RNA, 19 nt, synthetic construct
  misc_feature 1..19: note = siRNA antisense sequence
  source 1..19: mol_type = other RNA
tcaagaccagcctgaccaa

SEQ ID NO: 36990 - RNA, 19 nt, synthetic construct
  misc_feature 1..19: note = siRNA sense sequence
  source 1..19: mol_type = other RNA
tggtcaggctggtcttgaa

SEQ ID NO: 36991 - RNA, 19 nt, synthetic construct
  misc_feature 1..19: note = siRNA antisense sequence
  source 1..19: mol_type = other RNA
ttcaagaccagcctgacca

SEQ ID NO: 36992 - RNA, 19 nt, synthetic construct
  misc_feature 1..19: note = siRNA sense sequence
  source 1..19: mol_type = other RNA
ggtcaggctggtcttgaat

SEQ ID NO: 36993 - RNA, 19 nt, synthetic construct
  misc_feature 1..19: note = siRNA antisense sequence
  source 1..19: mol_type = other RNA
attcaagaccagcctgacc

SEQ ID NO: 36994 - RNA, 19 nt, synthetic construct
  misc_feature 1..19: note = siRNA sense sequence
  source 1..19: mol_type = other RNA
gtcaggctggtcttgaatt

SEQ ID NO: 36995 - RNA, 19 nt, synthetic construct
  misc_feature 1..19: note = siRNA antisense sequence
  source 1..19: mol_type = other RNA
aattcaagaccagcctgac

SEQ ID NO: 36996 - RNA, 19 nt, synthetic construct
  misc_feature 1..19: note = siRNA sense sequence
  source 1..19: mol_type = other RNA
ttttgacctcgtgatccac

SEQ ID NO: 36997 - RNA, 19 nt, synthetic construct
  misc_feature 1..19: note = siRNA antisense sequence
  source 1..19: mol_type = other RNA
gtggatcacgaggtcaaaa

SEQ ID NO: 36998 - RNA, 19 nt, synthetic construct
  misc_feature 1..19: note = siRNA sense sequence
  source 1..19: mol_type = other RNA
tttgacctcgtgatccacc

SEQ ID NO: 36999 - RNA, 19 nt, synthetic construct
  misc_feature 1..19: note = siRNA antisense sequence
  source 1..19: mol_type = other RNA
ggtggatcacgaggtcaaa

SEQ ID NO: 37000 - RNA, 19 nt, synthetic construct
  misc_feature 1..19: note = siRNA sense sequence
  source 1..19: mol_type = other RNA
tcgtgatccacccacctca

SEQ ID NO: 37001 - RNA, 19 nt, synthetic construct
  misc_feature 1..19: note = siRNA antisense sequence
  source 1..19: mol_type = other RNA
tgaggtgggtggatcacga

SEQ ID NO: 37002 - RNA, 19 nt, synthetic construct
  misc_feature 1..19: note = siRNA sense sequence
  source 1..19: mol_type = other RNA
cgtgatccacccacctcag

SEQ ID NO: 37003 - RNA, 19 nt, synthetic construct
  misc_feature 1..19: note = siRNA antisense sequence
  source 1..19: mol_type = other RNA
ctgaggtgggtggatcacg

SEQ ID NO: 37004 - RNA, 19 nt, synthetic construct
  misc_feature 1..19: note = siRNA sense sequence
  source 1..19: mol_type = other RNA
gtgctgggattacaggcgt

SEQ ID NO: 37005 - RNA, 19 nt, synthetic construct
  misc_feature 1..19: note = siRNA antisense sequence
  source 1..19: mol_type = other RNA
acgcctgtaatcccagcac

SEQ ID NO: 37006 - RNA, 19 nt, synthetic construct
  misc_feature 1..19: note = siRNA sense sequence
  source 1..19: mol_type = other RNA
tgctgggattacaggcgtg

SEQ ID NO: 37007 - RNA, 19 nt, synthetic construct
  misc_feature 1..19: note = siRNA antisense sequence
  source 1..19: mol_type = other RNA
cacgcctgtaatcccagca

SEQ ID NO: 37008 - RNA, 19 nt, synthetic construct
  misc_feature 1..19: note = siRNA sense sequence
  source 1..19: mol_type = other RNA
gctgggattacaggcgtga

SEQ ID NO: 37009 - RNA, 19 nt, synthetic construct
  misc_feature 1..19: note = siRNA antisense sequence
  source 1..19: mol_type = other RNA
tcacgcctgtaatcccagc

SEQ ID NO: 37010 - RNA, 19 nt, synthetic construct
  misc_feature 1..19: note = siRNA sense sequence
  source 1..19: mol_type = other RNA
ctgggattacaggcgtgag

SEQ ID NO: 37011 - RNA, 19 nt, synthetic construct
  misc_feature 1..19: note = siRNA antisense sequence
  source 1..19: mol_type = other RNA
ctcacgcctgtaatcccag

SEQ ID NO: 37012 - RNA, 19 nt, synthetic construct
  misc_feature 1..19: note = siRNA sense sequence
  source 1..19: mol_type = other RNA
tgggattacaggcgtgagc

SEQ ID NO: 37013 - RNA, 19 nt, synthetic construct
  misc_feature 1..19: note = siRNA antisense sequence
  source 1..19: mol_type = other RNA
gctcacgcctgtaatccca

SEQ ID NO: 37014 - RNA, 19 nt, synthetic construct
  misc_feature 1..19: note = siRNA sense sequence
  source 1..19: mol_type = other RNA
ccatagcacctggccgtag

SEQ ID NO: 37015 - RNA, 19 nt, synthetic construct
  misc_feature 1..19: note = siRNA antisense sequence
  source 1..19: mol_type = other RNA
ctacggccaggtgctatgg

SEQ ID NO: 37016 - RNA, 19 nt, synthetic construct
  misc_feature 1..19: note = siRNA sense sequence
  source 1..19: mol_type = other RNA
catagcacctggccgtaga

SEQ ID NO: 37017 - RNA, 19 nt, synthetic construct
  misc_feature 1..19: note = siRNA antisense sequence
  source 1..19: mol_type = other RNA
tctacggccaggtgctatg

SEQ ID NO: 37018 - RNA, 19 nt, synthetic construct
  misc_feature 1..19: note = siRNA sense sequence
  source 1..19: mol_type = other RNA
atagcacctggccgtagat

SEQ ID NO: 37019 - RNA, 19 nt, synthetic construct
  misc_feature 1..19: note = siRNA antisense sequence
  source 1..19: mol_type = other RNA
atctacggccaggtgctat

SEQ ID NO: 37020 - RNA, 19 nt, synthetic construct
  misc_feature 1..19: note = siRNA sense sequence
  source 1..19: mol_type = other RNA
tagcacctggccgtagata

SEQ ID NO: 37021 - RNA, 19 nt, synthetic construct
  misc_feature 1..19: note = siRNA antisense sequence
  source 1..19: mol_type = other RNA
tatctacggccaggtgcta

SEQ ID NO: 37022 - RNA, 19 nt, synthetic construct
  misc_feature 1..19: note = siRNA sense sequence
  source 1..19: mol_type = other RNA
agcacctggccgtagatat

SEQ ID NO: 37023 - RNA, 19 nt, synthetic construct
  misc_feature 1..19: note = siRNA antisense sequence
  source 1..19: mol_type = other RNA
atatctacggccaggtgct

SEQ ID NO: 37024 - RNA, 19 nt, synthetic construct
  misc_feature 1..19: note = siRNA sense sequence
  source 1..19: mol_type = other RNA
gcacctggccgtagatatg

SEQ ID NO: 37025 - RNA, 19 nt, synthetic construct
  misc_feature 1..19: note = siRNA antisense sequence
  source 1..19: mol_type = other RNA
catatctacggccaggtgc

SEQ ID NO: 37026 - RNA, 19 nt, synthetic construct
  misc_feature 1..19: note = siRNA sense sequence
  source 1..19: mol_type = other RNA
cacctggccgtagatatga

SEQ ID NO: 37027 - RNA, 19 nt, synthetic construct
  misc_feature 1..19: note = siRNA antisense sequence
  source 1..19: mol_type = other RNA
tcatatctacggccaggtg

SEQ ID NO: 37028 - RNA, 19 nt, synthetic construct
  misc_feature 1..19: note = siRNA sense sequence
  source 1..19: mol_type = other RNA
gtttaattggacattctag

SEQ ID NO: 37029 - RNA, 19 nt, synthetic construct
  misc_feature 1..19: note = siRNA antisense sequence
  source 1..19: mol_type = other RNA
ctagaatgtccaattaaac

SEQ ID NO: 37030 - RNA, 19 nt, synthetic construct
  misc_feature 1..19: note = siRNA sense sequence
  source 1..19: mol_type = other RNA
tttaattggacattctagg

SEQ ID NO: 37031 - RNA, 19 nt, synthetic construct
  misc_feature 1..19: note = siRNA antisense sequence
  source 1..19: mol_type = other RNA
cctagaatgtccaattaaa

SEQ ID NO: 37032 - RNA, 19 nt, synthetic construct
  misc_feature 1..19: note = siRNA sense sequence
  source 1..19: mol_type = other RNA
ttaattggacattctagga

SEQ ID NO: 37033 - RNA, 19 nt, synthetic construct
  misc_feature 1..19: note = siRNA antisense sequence
  source 1..19: mol_type = other RNA
tcctagaatgtccaattaa

SEQ ID NO: 37034 - RNA, 19 nt, synthetic construct
  misc_feature 1..19: note = siRNA sense sequence
  source 1..19: mol_type = other RNA
aaagaagagcagtagctaa

SEQ ID NO: 37035 - RNA, 19 nt, synthetic construct
  misc_feature 1..19: note = siRNA antisense sequence
  source 1..19: mol_type = other RNA
ttagctactgctcttcttt

SEQ ID NO: 37036 - RNA, 19 nt, synthetic construct
  misc_feature 1..19: note = siRNA sense sequence
  source 1..19: mol_type = other RNA
aagaagagcagtagctaaa

SEQ ID NO: 37037 - RNA, 19 nt, synthetic construct
  misc_feature 1..19: note = siRNA antisense sequence
  source 1..19: mol_type = other RNA
tttagctactgctcttctt

SEQ ID NO: 37038 - RNA, 19 nt, synthetic construct
  misc_feature 1..19: note = siRNA sense sequence
  source 1..19: mol_type = other RNA
agtagctgtaataataagc

SEQ ID NO: 37039 - RNA, 19 nt, synthetic construct
  misc_feature 1..19: note = siRNA antisense sequence
  source 1..19: mol_type = other RNA
gcttattattacagctact

SEQ ID NO: 37040 - RNA, 19 nt, synthetic construct
  misc_feature 1..19: note = siRNA sense sequence
  source 1..19: mol_type = other RNA
gtagctgtaataataagca

SEQ ID NO: 37041 - RNA, 19 nt, synthetic construct
  misc_feature 1..19: note = siRNA antisense sequence
  source 1..19: mol_type = other RNA
tgcttattattacagctac

SEQ ID NO: 37042 - RNA, 19 nt, synthetic construct
  misc_feature 1..19: note = siRNA sense sequence
  source 1..19: mol_type = other RNA
atgtggattttctgcattt

SEQ ID NO: 37043 - RNA, 19 nt, synthetic construct
  misc_feature 1..19: note = siRNA antisense sequence
  source 1..19: mol_type = other RNA
aaatgcagaaaatccacat

SEQ ID NO: 37044 - RNA, 19 nt, synthetic construct
  misc_feature 1..19: note = siRNA sense sequence
  source 1..19: mol_type = other RNA
tgtggattttctgcatttt

SEQ ID NO: 37045 - RNA, 19 nt, synthetic construct
  misc_feature 1..19: note = siRNA antisense sequence
  source 1..19: mol_type = other RNA
aaaatgcagaaaatccaca

SEQ ID NO: 37046 - RNA, 19 nt, synthetic construct
  misc_feature 1..19: note = siRNA sense sequence
  source 1..19: mol_type = other RNA
gtggattttctgcattttg

SEQ ID NO: 37047 - RNA, 19 nt, synthetic construct
  misc_feature 1..19: note = siRNA antisense sequence
  source 1..19: mol_type = other RNA
caaaatgcagaaaatccac

SEQ ID NO: 37048 - RNA, 19 nt, synthetic construct
  misc_feature 1..19: note = siRNA sense sequence
  source 1..19: mol_type = other RNA
tggattttctgcattttgt

SEQ ID NO: 37049 - RNA, 19 nt, synthetic construct
  misc_feature 1..19: note = siRNA antisense sequence
  source 1..19: mol_type = other RNA
acaaaatgcagaaaatcca

SEQ ID NO: 37050 - RNA, 19 nt, synthetic construct
  misc_feature 1..19: note = siRNA sense sequence
  source 1..19: mol_type = other RNA
tgataataatgccctaaag

SEQ ID NO: 37051 - RNA, 19 nt, synthetic construct
  misc_feature 1..19: note = siRNA antisense sequence
  source 1..19: mol_type = other RNA
ctttagggcattattatca

SEQ ID NO: 37052 - RNA, 19 nt, synthetic construct
  misc_feature 1..19: note = siRNA sense sequence
  source 1..19: mol_type = other RNA
gataataatgccctaaaga

SEQ ID NO: 37053 - RNA, 19 nt, synthetic construct
  misc_feature 1..19: note = siRNA antisense sequence
  source 1..19: mol_type = other RNA
tctttagggcattattatc

SEQ ID NO: 37054 - RNA, 19 nt, synthetic construct
  misc_feature 1..19: note = siRNA sense sequence
  source 1..19: mol_type = other RNA
ataataatgccctaaagac

SEQ ID NO: 37055 - RNA, 19 nt, synthetic construct
  misc_feature 1..19: note = siRNA antisense sequence
  source 1..19: mol_type = other RNA
gtctttagggcattattat

SEQ ID NO: 37056 - RNA, 19 nt, synthetic construct
  misc_feature 1..19: note = siRNA sense sequence
  source 1..19: mol_type = other RNA
taataatgccctaaagact

SEQ ID NO: 37057 - RNA, 19 nt, synthetic construct
  misc_feature 1..19: note = siRNA antisense sequence
  source 1..19: mol_type = other RNA
agtctttagggcattatta

SEQ ID NO: 37058 - RNA, 19 nt, synthetic construct
  misc_feature 1..19: note = siRNA sense sequence
  source 1..19: mol_type = other RNA
ataatgccctaaagactat

SEQ ID NO: 37059 - RNA, 19 nt, synthetic construct
  misc_feature 1..19: note = siRNA antisense sequence
  source 1..19: mol_type = other RNA
atagtctttagggcattat

SEQ ID NO: 37060 - RNA, 19 nt, synthetic construct
  misc_feature 1..19: note = siRNA sense sequence
  source 1..19: mol_type = other RNA
taatgccctaaagactata

SEQ ID NO: 37061 - RNA, 19 nt, synthetic construct
  misc_feature 1..19: note = siRNA antisense sequence
  source 1..19: mol_type = other RNA
tatagtctttagggcatta

SEQ ID NO: 37062 - RNA, 19 nt, synthetic construct
  misc_feature 1..19: note = siRNA sense sequence
  source 1..19: mol_type = other RNA
aatgccctaaagactataa

SEQ ID NO: 37063 - RNA, 19 nt, synthetic construct
  misc_feature 1..19: note = siRNA antisense sequence
  source 1..19: mol_type = other RNA
ttatagtctttagggcatt

SEQ ID NO: 37064 - RNA, 19 nt, synthetic construct
  misc_feature 1..19: note = siRNA sense sequence
  source 1..19: mol_type = other RNA
atgccctaaagactataaa

SEQ ID NO: 37065 - RNA, 19 nt, synthetic construct
  misc_feature 1..19: note = siRNA antisense sequence
  source 1..19: mol_type = other RNA
tttatagtctttagggcat

SEQ ID NO: 37066 - RNA, 19 nt, synthetic construct
  misc_feature 1..19: note = siRNA sense sequence
  source 1..19: mol_type = other RNA
aaagtaatgagttctcaca

SEQ ID NO: 37067 - RNA, 19 nt, synthetic construct
  misc_feature 1..19: note = siRNA antisense sequence
  source 1..19: mol_type = other RNA
tgtgagaactcattacttt

SEQ ID NO: 37068 - RNA, 19 nt, synthetic construct
  misc_feature 1..19: note = siRNA sense sequence
  source 1..19: mol_type = other RNA
aagtaatgagttctcacat

SEQ ID NO: 37069 - RNA, 19 nt, synthetic construct
  misc_feature 1..19: note = siRNA antisense sequence
  source 1..19: mol_type = other RNA
atgtgagaactcattactt

SEQ ID NO: 37070 - RNA, 19 nt, synthetic construct
  misc_feature 1..19: note = siRNA sense sequence
  source 1..19: mol_type = other RNA
ttcactcttttattctcct

SEQ ID NO: 37071 - RNA, 19 nt, synthetic construct
  misc_feature 1..19: note = siRNA antisense sequence
  source 1..19: mol_type = other RNA
aggagaataaaagagtgaa

SEQ ID NO: 37072 - RNA, 19 nt, synthetic construct
  misc_feature 1..19: note = siRNA sense sequence
  source 1..19: mol_type = other RNA
cactcttttattctcctta

SEQ ID NO: 37073 - RNA, 19 nt, synthetic construct
  misc_feature 1..19: note = siRNA antisense sequence
  source 1..19: mol_type = other RNA
taaggagaataaaagagtg

SEQ ID NO: 37074 - RNA, 19 nt, synthetic construct
  misc_feature 1..19: note = siRNA sense sequence
  source 1..19: mol_type = other RNA
actcttttattctccttac

SEQ ID NO: 37075 - RNA, 19 nt, synthetic construct
  misc_feature 1..19: note = siRNA antisense sequence
  source 1..19: mol_type = other RNA
gtaaggagaataaaagagt

SEQ ID NO: 37076 - RNA, 19 nt, synthetic construct
  misc_feature 1..19: note = siRNA sense sequence
  source 1..19: mol_type = other RNA
ctcttttattctccttaca

SEQ ID NO: 37077 - RNA, 19 nt, synthetic construct
  misc_feature 1..19: note = siRNA antisense sequence
  source 1..19: mol_type = other RNA
tgtaaggagaataaaagag

SEQ ID NO: 37078 - RNA, 19 nt, synthetic construct
  misc_feature 1..19: note = siRNA sense sequence
  source 1..19: mol_type = other RNA
ttaagttccctttccctcc

SEQ ID NO: 37079 - RNA, 19 nt, synthetic construct
  misc_feature 1..19: note = siRNA antisense sequence
  source 1..19: mol_type = other RNA
ggagggaaagggaacttaa

SEQ ID NO: 37080 - RNA, 19 nt, synthetic construct
  misc_feature 1..19: note = siRNA sense sequence
  source 1..19: mol_type = other RNA
taagttccctttccctccc

SEQ ID NO: 37081 - RNA, 19 nt, synthetic construct
  misc_feature 1..19: note = siRNA antisense sequence
  source 1..19: mol_type = other RNA
gggagggaaagggaactta

SEQ ID NO: 37082 - RNA, 19 nt, synthetic construct
  misc_feature 1..19: note = siRNA sense sequence
  source 1..19: mol_type = other RNA
cctttccctccctcctata

SEQ ID NO: 37083 - RNA, 19 nt, synthetic construct
  misc_feature 1..19: note = siRNA antisense sequence
  source 1..19: mol_type = other RNA
tataggagggagggaaagg

SEQ ID NO: 37084 - RNA, 19 nt, synthetic construct
  misc_feature 1..19: note = siRNA sense sequence
  source 1..19: mol_type = other RNA
ctttccctccctcctatac

SEQ ID NO: 37085 - RNA, 19 nt, synthetic construct
  misc_feature 1..19: note = siRNA antisense sequence
  source 1..19: mol_type = other RNA
gtataggagggagggaaag

SEQ ID NO: 37086 - RNA, 19 nt, synthetic construct
  misc_feature 1..19: note = siRNA sense sequence
  source 1..19: mol_type = other RNA
ccctcctatactctccacc

SEQ ID NO: 37087 - RNA, 19 nt, synthetic construct
  misc_feature 1..19: note = siRNA antisense sequence
  source 1..19: mol_type = other RNA
ggtggagagtataggaggg

SEQ ID NO: 37088 - RNA, 19 nt, synthetic construct
  misc_feature 1..19: note = siRNA sense sequence
  source 1..19: mol_type = other RNA
cctatactctccacccatc

SEQ ID NO: 37089 - RNA, 19 nt, synthetic construct
  misc_feature 1..19: note = siRNA antisense sequence
  source 1..19: mol_type = other RNA
gatgggtggagagtatagg

SEQ ID NO: 37090 - RNA, 19 nt, synthetic construct
  misc_feature 1..19: note = siRNA sense sequence
  source 1..19: mol_type = other RNA
ctatactctccacccatcc

SEQ ID NO: 37091 - RNA, 19 nt, synthetic construct
  misc_feature 1..19: note = siRNA antisense sequence
  source 1..19: mol_type = other RNA
ggatgggtggagagtatag

SEQ ID NO: 37092 - RNA, 19 nt, synthetic construct
  misc_feature 1..19: note = siRNA sense sequence
  source 1..19: mol_type = other RNA
tatactctccacccatccc

SEQ ID NO: 37093 - RNA, 19 nt, synthetic construct
  misc_feature 1..19: note = siRNA antisense sequence
  source 1..19: mol_type = other RNA
gggatgggtggagagtata

SEQ ID NO: 37094 - RNA, 19 nt, synthetic construct
  misc_feature 1..19: note = siRNA sense sequence
  source 1..19: mol_type = other RNA
ctctccacccatcccattc

SEQ ID NO: 37095 - RNA, 19 nt, synthetic construct
  misc_feature 1..19: note = siRNA antisense sequence
  source 1..19: mol_type = other RNA
gaatgggatgggtggagag

SEQ ID NO: 37096 - RNA, 19 nt, synthetic construct
  misc_feature 1..19: note = siRNA sense sequence
  source 1..19: mol_type = other RNA
aaggttaaatgagtacagc

SEQ ID NO: 37097 - RNA, 19 nt, synthetic construct
  misc_feature 1..19: note = siRNA antisense sequence
  source 1..19: mol_type = other RNA
gctgtactcatttaacctt

SEQ ID NO: 37098 - RNA, 19 nt, synthetic construct
  misc_feature 1..19: note = siRNA sense sequence
  source 1..19: mol_type = other RNA
ttaaatgagtacagccctc

SEQ ID NO: 37099 - RNA, 19 nt, synthetic construct
  misc_feature 1..19: note = siRNA antisense sequence
  source 1..19: mol_type = other RNA
gagggctgtactcatttaa

SEQ ID NO: 37100 - RNA, 19 nt, synthetic construct
  misc_feature 1..19: note = siRNA sense sequence
  source 1..19: mol_type = other RNA
taaatgagtacagccctcc

SEQ ID NO: 37101 - RNA, 19 nt, synthetic construct
  misc_feature 1..19: note = siRNA antisense sequence
  source 1..19: mol_type = other RNA
ggagggctgtactcattta

SEQ ID NO: 37102 - RNA, 19 nt, synthetic construct
  misc_feature 1..19: note = siRNA sense sequence
  source 1..19: mol_type = other RNA
aaatgagtacagccctccc

SEQ ID NO: 37103 - RNA, 19 nt, synthetic construct
  misc_feature 1..19: note = siRNA antisense sequence
  source 1..19: mol_type = other RNA
gggagggctgtactcattt

SEQ ID NO: 37104 - RNA, 19 nt, synthetic construct
  misc_feature 1..19: note = siRNA sense sequence
  source 1..19: mol_type = other RNA
aatgagtacagccctccct

SEQ ID NO: 37105 - RNA, 19 nt, synthetic construct
  misc_feature 1..19: note = siRNA antisense sequence
  source 1..19: mol_type = other RNA
agggagggctgtactcatt

SEQ ID NO: 37106 - RNA, 19 nt, synthetic construct
  misc_feature 1..19: note = siRNA sense sequence
  source 1..19: mol_type = other RNA
atgagtacagccctccctc

SEQ ID NO: 37107 - RNA, 19 nt, synthetic construct
  misc_feature 1..19: note = siRNA antisense sequence
  source 1..19: mol_type = other RNA
gagggagggctgtactcat

SEQ ID NO: 37108 - RNA, 19 nt, synthetic construct
  misc_feature 1..19: note = siRNA sense sequence
  source 1..19: mol_type = other RNA
tacagccctccctctagac

SEQ ID NO: 37109 - RNA, 19 nt, synthetic construct
  misc_feature 1..19: note = siRNA antisense sequence
  source 1..19: mol_type = other RNA
gtctagagggagggctgta

SEQ ID NO: 37110 - RNA, 19 nt, synthetic construct
  misc_feature 1..19: note = siRNA sense sequence
  source 1..19: mol_type = other RNA
acagccctccctctagaca

SEQ ID NO: 37111 - RNA, 19 nt, synthetic construct
  misc_feature 1..19: note = siRNA antisense sequence
  source 1..19: mol_type = other RNA
tgtctagagggagggctgt

SEQ ID NO: 37112 - RNA, 19 nt, synthetic construct
  misc_feature 1..19: note = siRNA sense sequence
  source 1..19: mol_type = other RNA
cagccctccctctagacac

SEQ ID NO: 37113 - RNA, 19 nt, synthetic construct
  misc_feature 1..19: note = siRNA antisense sequence
  source 1..19: mol_type = other RNA
gtgtctagagggagggctg

SEQ ID NO: 37114 - RNA, 19 nt, synthetic construct
  misc_feature 1..19: note = siRNA sense sequence
  source 1..19: mol_type = other RNA
agccctccctctagacacc

SEQ ID NO: 37115 - RNA, 19 nt, synthetic construct
  misc_feature 1..19: note = siRNA antisense sequence
  source 1..19: mol_type = other RNA
ggtgtctagagggagggct

SEQ ID NO: 37116 - RNA, 19 nt, synthetic construct
  misc_feature 1..19: note = siRNA sense sequence
  source 1..19: mol_type = other RNA
ccctccctctagacaccag

SEQ ID NO: 37117 - RNA, 19 nt, synthetic construct
  misc_feature 1..19: note = siRNA antisense sequence
  source 1..19: mol_type = other RNA
ctggtgtctagagggaggg

SEQ ID NO: 37118 - RNA, 19 nt, synthetic construct
  misc_feature 1..19: note = siRNA sense sequence
  source 1..19: mol_type = other RNA
tagacaccagctttattct

SEQ ID NO: 37119 - RNA, 19 nt, synthetic construct
  misc_feature 1..19: note = siRNA antisense sequence
  source 1..19: mol_type = other RNA
agaataaagctggtgtcta

SEQ ID NO: 37120 - RNA, 19 nt, synthetic construct
  misc_feature 1..19: note = siRNA sense sequence
  source 1..19: mol_type = other RNA
agacaccagctttattctt

SEQ ID NO: 37121 - RNA, 19 nt, synthetic construct
  misc_feature 1..19: note = siRNA antisense sequence
  source 1..19: mol_type = other RNA
aagaataaagctggtgtct

SEQ ID NO: 37122 - RNA, 19 nt, synthetic construct
  misc_feature 1..19: note = siRNA sense sequence
  source 1..19: mol_type = other RNA
ccagctttattcttttagg

SEQ ID NO: 37123 - RNA, 19 nt, synthetic construct
  misc_feature 1..19: note = siRNA antisense sequence
  source 1..19: mol_type = other RNA
cctaaaagaataaagctgg

SEQ ID NO: 37124 - RNA, 19 nt, synthetic construct
  misc_feature 1..19: note = siRNA sense sequence
  source 1..19: mol_type = other RNA
cagctttattcttttagga

SEQ ID NO: 37125 - RNA, 19 nt, synthetic construct
  misc_feature 1..19: note = siRNA antisense sequence
  source 1..19: mol_type = other RNA
tcctaaaagaataaagctg

SEQ ID NO: 37126 - RNA, 19 nt, synthetic construct
  misc_feature 1..19: note = siRNA sense sequence
  source 1..19: mol_type = other RNA
attataccttcaattcagg

SEQ ID NO: 37127 - RNA, 19 nt, synthetic construct
  misc_feature 1..19: note = siRNA antisense sequence
  source 1..19: mol_type = other RNA
cctgaattgaaggtataat

SEQ ID NO: 37128 - RNA, 19 nt, synthetic construct
  misc_feature 1..19: note = siRNA sense sequence
  source 1..19: mol_type = other RNA
tcaattcaggtacctctgg

SEQ ID NO: 37129 - RNA, 19 nt, synthetic construct
  misc_feature 1..19: note = siRNA antisense sequence
  source 1..19: mol_type = other RNA
ccagaggtacctgaattga

SEQ ID NO: 37130 - RNA, 19 nt, synthetic construct
  misc_feature 1..19: note = siRNA sense sequence
  source 1..19: mol_type = other RNA
caattcaggtacctctggg

SEQ ID NO: 37131 - RNA, 19 nt, synthetic construct
  misc_feature 1..19: note = siRNA antisense sequence
  source 1..19: mol_type = other RNA
cccagaggtacctgaattg

SEQ ID NO: 37132 - RNA, 19 nt, synthetic construct
  misc_feature 1..19: note = siRNA sense sequence
  source 1..19: mol_type = other RNA
aattcaggtacctctggga

SEQ ID NO: 37133 - RNA, 19 nt, synthetic construct
  misc_feature 1..19: note = siRNA antisense sequence
  source 1..19: mol_type = other RNA
tcccagaggtacctgaatt

SEQ ID NO: 37134 - RNA, 19 nt, synthetic construct
  misc_feature 1..19: note = siRNA sense sequence
  source 1..19: mol_type = other RNA
agaataatggtgagtagac

SEQ ID NO: 37135 - RNA, 19 nt, synthetic construct
  misc_feature 1..19: note = siRNA antisense sequence
  source 1..19: mol_type = other RNA
gtctactcaccattattct

SEQ ID NO: 37136 - RNA, 19 nt, synthetic construct
  misc_feature 1..19: note = siRNA sense sequence
  source 1..19: mol_type = other RNA
gaataatggtgagtagacc

SEQ ID NO: 37137 - RNA, 19 nt, synthetic construct
  misc_feature 1..19: note = siRNA antisense sequence
  source 1..19: mol_type = other RNA
ggtctactcaccattattc

SEQ ID NO: 37138 - RNA, 19 nt, synthetic construct
  misc_feature 1..19: note = siRNA sense sequence
  source 1..19: mol_type = other RNA
ccaactggtcagactttgt

SEQ ID NO: 37139 - RNA, 19 nt, synthetic construct
  misc_feature 1..19: note = siRNA antisense sequence
  source 1..19: mol_type = other RNA
acaaagtctgaccagttgg

SEQ ID NO: 37140 - RNA, 19 nt, synthetic construct
  misc_feature 1..19: note = siRNA sense sequence
  source 1..19: mol_type = other RNA
caactggtcagactttgtg

SEQ ID NO: 37141 - RNA, 19 nt, synthetic construct
  misc_feature 1..19: note = siRNA antisense sequence
  source 1..19: mol_type = other RNA
cacaaagtctgaccagttg

SEQ ID NO: 37142 - RNA, 19 nt, synthetic construct
  misc_feature 1..19: note = siRNA sense sequence
  source 1..19: mol_type = other RNA
aactggtcagactttgtgc

SEQ ID NO: 37143 - RNA, 19 nt, synthetic construct
  misc_feature 1..19: note = siRNA antisense sequence
  source 1..19: mol_type = other RNA
gcacaaagtctgaccagtt

SEQ ID NO: 37144 - RNA, 19 nt, synthetic construct
  misc_feature 1..19: note = siRNA sense sequence
  source 1..19: mol_type = other RNA
actggtcagactttgtgcg

SEQ ID NO: 37145 - RNA, 19 nt, synthetic construct
  misc_feature 1..19: note = siRNA antisense sequence
  source 1..19: mol_type = other RNA
cgcacaaagtctgaccagt

SEQ ID NO: 37146 - RNA, 19 nt, synthetic construct
  misc_feature 1..19: note = siRNA sense sequence
  source 1..19: mol_type = other RNA
ctggtcagactttgtgcgt

SEQ ID NO: 37147 - RNA, 19 nt, synthetic construct
  misc_feature 1..19: note = siRNA antisense sequence
  source 1..19: mol_type = other RNA
acgcacaaagtctgaccag

SEQ ID NO: 37148 - RNA, 19 nt, synthetic construct
  misc_feature 1..19: note = siRNA sense sequence
  source 1..19: mol_type = other RNA
tggtcagactttgtgcgta

SEQ ID NO: 37149 - RNA, 19 nt, synthetic construct
  misc_feature 1..19: note = siRNA antisense sequence
  source 1..19: mol_type = other RNA
tacgcacaaagtctgacca

SEQ ID NO: 37150 - RNA, 19 nt, synthetic construct
  misc_feature 1..19: note = siRNA sense sequence
  source 1..19: mol_type = other RNA
ggtcagactttgtgcgtaa

SEQ ID NO: 37151 - RNA, 19 nt, synthetic construct
  misc_feature 1..19: note = siRNA antisense sequence
  source 1..19: mol_type = other RNA
ttacgcacaaagtctgacc

SEQ ID NO: 37152 - RNA, 19 nt, synthetic construct
  misc_feature 1..19: note = siRNA sense sequence
  source 1..19: mol_type = other RNA
gtcagactttgtgcgtaag

SEQ ID NO: 37153 - RNA, 19 nt, synthetic construct
  misc_feature 1..19: note = siRNA antisense sequence
  source 1..19: mol_type = other RNA
cttacgcacaaagtctgac

SEQ ID NO: 37154 - RNA, 19 nt, synthetic construct
  misc_feature 1..19: note = siRNA sense sequence
  source 1..19: mol_type = other RNA
tcagactttgtgcgtaagc

SEQ ID NO: 37155 - RNA, 19 nt, synthetic construct
  misc_feature 1..19: note = siRNA antisense sequence
  source 1..19: mol_type = other RNA
gcttacgcacaaagtctga

SEQ ID NO: 37156 - RNA, 19 nt, synthetic construct
  misc_feature 1..19: note = siRNA sense sequence
  source 1..19: mol_type = other RNA
actttgtgcgtaagctata

SEQ ID NO: 37157 - RNA, 19 nt, synthetic construct
  misc_feature 1..19: note = siRNA antisense sequence
  source 1..19: mol_type = other RNA
tatagcttacgcacaaagt

SEQ ID NO: 37158 - RNA, 19 nt, synthetic construct
  misc_feature 1..19: note = siRNA sense sequence
  source 1..19: mol_type = other RNA
ctttgtgcgtaagctataa

SEQ ID NO: 37159 - RNA, 19 nt, synthetic construct
  misc_feature 1..19: note = siRNA antisense sequence
  source 1..19: mol_type = other RNA
ttatagcttacgcacaaag

SEQ ID NO: 37160 - RNA, 19 nt, synthetic construct
  misc_feature 1..19: note = siRNA sense sequence
  source 1..19: mol_type = other RNA
tttgtgcgtaagctataat

SEQ ID NO: 37161 - RNA, 19 nt, synthetic construct
  misc_feature 1..19: note = siRNA antisense sequence
  source 1..19: mol_type = other RNA
attatagcttacgcacaaa

SEQ ID NO: 37162 - RNA, 19 nt, synthetic construct
  misc_feature 1..19: note = siRNA sense sequence
  source 1..19: mol_type = other RNA
ttgtgcgtaagctataata

SEQ ID NO: 37163 - RNA, 19 nt, synthetic construct
  misc_feature 1..19: note = siRNA antisense sequence
  source 1..19: mol_type = other RNA
tattatagcttacgcacaa

SEQ ID NO: 37164 - RNA, 19 nt, synthetic construct
  misc_feature 1..19: note = siRNA sense sequence
  source 1..19: mol_type = other RNA
tgtgcgtaagctataataa

SEQ ID NO: 37165 - RNA, 19 nt, synthetic construct
  misc_feature 1..19: note = siRNA antisense sequence
  source 1..19: mol_type = other RNA
ttattatagcttacgcaca

SEQ ID NO: 37166 - RNA, 19 nt, synthetic construct
  misc_feature 1..19: note = siRNA sense sequence
  source 1..19: mol_type = other RNA
gtgcgtaagctataataaa

SEQ ID NO: 37167 - RNA, 19 nt, synthetic construct
  misc_feature 1..19: note = siRNA antisense sequence
  source 1..19: mol_type = other RNA
tttattatagcttacgcac

SEQ ID NO: 37168 - RNA, 19 nt, synthetic construct
  misc_feature 1..19: note = siRNA sense sequence
  source 1..19: mol_type = other RNA
aatgcagtacatgttattc

SEQ ID NO: 37169 - RNA, 19 nt, synthetic construct
  misc_feature 1..19: note = siRNA antisense sequence
  source 1..19: mol_type = other RNA
gaataacatgtactgcatt

SEQ ID NO: 37170 - RNA, 19 nt, synthetic construct
  misc_feature 1..19: note = siRNA sense sequence
  source 1..19: mol_type = other RNA
atgcagtacatgttattct

SEQ ID NO: 37171 - RNA, 19 nt, synthetic construct
  misc_feature 1..19: note = siRNA antisense sequence
  source 1..19: mol_type = other RNA
agaataacatgtactgcat

SEQ ID NO: 37172 - RNA, 19 nt, synthetic construct
  misc_feature 1..19: note = siRNA sense sequence
  source 1..19: mol_type = other RNA
tgcagtacatgttattctt

SEQ ID NO: 37173 - RNA, 19 nt, synthetic construct
  misc_feature 1..19: note = siRNA antisense sequence
  source 1..19: mol_type = other RNA
aagaataacatgtactgca

SEQ ID NO: 37174 - RNA, 19 nt, synthetic construct
  misc_feature 1..19: note = siRNA sense sequence
  source 1..19: mol_type = other RNA
gcagtacatgttattctta

SEQ ID NO: 37175 - RNA, 19 nt, synthetic construct
  misc_feature 1..19: note = siRNA antisense sequence
  source 1..19: mol_type = other RNA
taagaataacatgtactgc

SEQ ID NO: 37176 - RNA, 19 nt, synthetic construct
  misc_feature 1..19: note = siRNA sense sequence
  source 1..19: mol_type = other RNA
ttttaaagaggagtatagc

SEQ ID NO: 37177 - RNA, 19 nt, synthetic construct
  misc_feature 1..19: note = siRNA antisense sequence
  source 1..19: mol_type = other RNA
gctatactcctctttaaaa

SEQ ID NO: 37178 - RNA, 19 nt, synthetic construct
  misc_feature 1..19: note = siRNA sense sequence
  source 1..19: mol_type = other RNA
tttaaagaggagtatagca

SEQ ID NO: 37179 - RNA, 19 nt, synthetic construct
  misc_feature 1..19: note = siRNA antisense sequence
  source 1..19: mol_type = other RNA
tgctatactcctctttaaa

SEQ ID NO: 37180 - RNA, 19 nt, synthetic construct
  misc_feature 1..19: note = siRNA sense sequence
  source 1..19: mol_type = other RNA
ttaaagaggagtatagcaa

SEQ ID NO: 37181 - RNA, 19 nt, synthetic construct
  misc_feature 1..19: note = siRNA antisense sequence
  source 1..19: mol_type = other RNA
ttgctatactcctctttaa

SEQ ID NO: 37182 - RNA, 19 nt, synthetic construct
  misc_feature 1..19: note = siRNA sense sequence
  source 1..19: mol_type = other RNA
taaagaggagtatagcaaa

SEQ ID NO: 37183 - RNA, 19 nt, synthetic construct
  misc_feature 1..19: note = siRNA antisense sequence
  source 1..19: mol_type = other RNA
tttgctatactcctcttta

SEQ ID NO: 37184 - RNA, 19 nt, synthetic construct
  misc_feature 1..19: note = siRNA sense sequence
  source 1..19: mol_type = other RNA
aaagaggagtatagcaaat

SEQ ID NO: 37185 - RNA, 19 nt, synthetic construct
  misc_feature 1..19: note = siRNA antisense sequence
  source 1..19: mol_type = other RNA
atttgctatactcctcttt

SEQ ID NO: 37186 - RNA, 19 nt, synthetic construct
  misc_feature 1..19: note = siRNA sense sequence
  source 1..19: mol_type = other RNA
aagaggagtatagcaaata

SEQ ID NO: 37187 - RNA, 19 nt, synthetic construct
  misc_feature 1..19: note = siRNA antisense sequence
  source 1..19: mol_type = other RNA
tatttgctatactcctctt

SEQ ID NO: 37188 - RNA, 19 nt, synthetic construct
  misc_feature 1..19: note = siRNA sense sequence
  source 1..19: mol_type = other RNA
ggagtatagcaaatagcaa

SEQ ID NO: 37189 - RNA, 19 nt, synthetic construct
  misc_feature 1..19: note = siRNA antisense sequence
  source 1..19: mol_type = other RNA
ttgctatttgctatactcc

SEQ ID NO: 37190 - RNA, 19 nt, synthetic construct
  misc_feature 1..19: note = siRNA sense sequence
  source 1..19: mol_type = other RNA
gagtatagcaaatagcaag

SEQ ID NO: 37191 - RNA, 19 nt, synthetic construct
  misc_feature 1..19: note = siRNA antisense sequence
  source 1..19: mol_type = other RNA
cttgctatttgctatactc

SEQ ID NO: 37192 - RNA, 19 nt, synthetic construct
  misc_feature 1..19: note = siRNA sense sequence
  source 1..19: mol_type = other RNA
agtatagcaaatagcaagc

SEQ ID NO: 37193 - RNA, 19 nt, synthetic construct
  misc_feature 1..19: note = siRNA antisense sequence
  source 1..19: mol_type = other RNA
gcttgctatttgctatact

SEQ ID NO: 37194 - RNA, 19 nt, synthetic construct
  misc_feature 1..19: note = siRNA sense sequence
  source 1..19: mol_type = other RNA
gtatagcaaatagcaagct

SEQ ID NO: 37195 - RNA, 19 nt, synthetic construct
  misc_feature 1..19: note = siRNA antisense sequence
  source 1..19: mol_type = other RNA
agcttgctatttgctatac

SEQ ID NO: 37196 - RNA, 19 nt, synthetic construct
  misc_feature 1..19: note = siRNA sense sequence
  source 1..19: mol_type = other RNA
tatagcaaatagcaagctt

SEQ ID NO: 37197 - RNA, 19 nt, synthetic construct
  misc_feature 1..19: note = siRNA antisense sequence
  source 1..19: mol_type = other RNA
aagcttgctatttgctata

SEQ ID NO: 37198 - RNA, 19 nt, synthetic construct
  misc_feature 1..19: note = siRNA sense sequence
  source 1..19: mol_type = other RNA
caaatagcaagctttaaga

SEQ ID NO: 37199 - RNA, 19 nt, synthetic construct
  misc_feature 1..19: note = siRNA antisense sequence
  source 1..19: mol_type = other RNA
tcttaaagcttgctatttg

SEQ ID NO: 37200 - RNA, 19 nt, synthetic construct
  misc_feature 1..19: note = siRNA sense sequence
  source 1..19: mol_type = other RNA
tagcaagctttaagactta

SEQ ID NO: 37201 - RNA, 19 nt, synthetic construct
  misc_feature 1..19: note = siRNA antisense sequence
  source 1..19: mol_type = other RNA
taagtcttaaagcttgcta

SEQ ID NO: 37202 - RNA, 19 nt, synthetic construct
  misc_feature 1..19: note = siRNA sense sequence
  source 1..19: mol_type = other RNA
tgaagtatctcttttaagg

SEQ ID NO: 37203 - RNA, 19 nt, synthetic construct
  misc_feature 1..19: note = siRNA antisense sequence
  source 1..19: mol_type = other RNA
ccttaaaagagatacttca

SEQ ID NO: 37204 - RNA, 19 nt, synthetic construct
  misc_feature 1..19: note = siRNA sense sequence
  source 1..19: mol_type = other RNA
cctgtatgttttctttctt

SEQ ID NO: 37205 - RNA, 19 nt, synthetic construct
  misc_feature 1..19: note = siRNA antisense sequence
  source 1..19: mol_type = other RNA
aagaaagaaaacatacagg

SEQ ID NO: 37206 - RNA, 19 nt, synthetic construct
  misc_feature 1..19: note = siRNA sense sequence
  source 1..19: mol_type = other RNA
ttttctttcttatccagtc

SEQ ID NO: 37207 - RNA, 19 nt, synthetic construct
  misc_feature 1..19: note = siRNA antisense sequence
  source 1..19: mol_type = other RNA
gactggataagaaagaaaa

SEQ ID NO: 37208 - RNA, 19 nt, synthetic construct
  misc_feature 1..19: note = siRNA sense sequence
  source 1..19: mol_type = other RNA
tttctttcttatccagtcc

SEQ ID NO: 37209 - RNA, 19 nt, synthetic construct
  misc_feature 1..19: note = siRNA antisense sequence
  source 1..19: mol_type = other RNA
ggactggataagaaagaaa

SEQ ID NO: 37210 - RNA, 19 nt, synthetic construct
  misc_feature 1..19: note = siRNA sense sequence
  source 1..19: mol_type = other RNA
ttctttcttatccagtcct

SEQ ID NO: 37211 - RNA, 19 nt, synthetic construct
  misc_feature 1..19: note = siRNA antisense sequence
  source 1..19: mol_type = other RNA
aggactggataagaaagaa

SEQ ID NO: 37212 - RNA, 19 nt, synthetic construct
  misc_feature 1..19: note = siRNA sense sequence
  source 1..19: mol_type = other RNA
tctttcttatccagtcctg

SEQ ID NO: 37213 - RNA, 19 nt, synthetic construct
  misc_feature 1..19: note = siRNA antisense sequence
  source 1..19: mol_type = other RNA
caggactggataagaaaga

SEQ ID NO: 37214 - RNA, 19 nt, synthetic construct
  misc_feature 1..19: note = siRNA sense sequence
  source 1..19: mol_type = other RNA
ctttcttatccagtcctgt

SEQ ID NO: 37215 - RNA, 19 nt, synthetic construct
  misc_feature 1..19: note = siRNA antisense sequence
  source 1..19: mol_type = other RNA
acaggactggataagaaag

SEQ ID NO: 37216 - RNA, 19 nt, synthetic construct
  misc_feature 1..19: note = siRNA sense sequence
  source 1..19: mol_type = other RNA
ttttagaagccttagtgcc

SEQ ID NO: 37217 - RNA, 19 nt, synthetic construct
  misc_feature 1..19: note = siRNA antisense sequence
  source 1..19: mol_type = other RNA
ggcactaaggcttctaaaa

SEQ ID NO: 37218 - RNA, 19 nt, synthetic construct
  misc_feature 1..19: note = siRNA sense sequence
  source 1..19: mol_type = other RNA
tttagaagccttagtgccc

SEQ ID NO: 37219 - RNA, 19 nt, synthetic construct
  misc_feature 1..19: note = siRNA antisense sequence
  source 1..19: mol_type = other RNA
gggcactaaggcttctaaa

SEQ ID NO: 37220 - RNA, 19 nt, synthetic construct
  misc_feature 1..19: note = siRNA sense sequence
  source 1..19: mol_type = other RNA
catttgatctctttagtca

SEQ ID NO: 37221 - RNA, 19 nt, synthetic construct
  misc_feature 1..19: note = siRNA antisense sequence
  source 1..19: mol_type = other RNA
tgactaaagagatcaaatg

SEQ ID NO: 37222 - RNA, 19 nt, synthetic construct
  misc_feature 1..19: note = siRNA sense sequence
  source 1..19: mol_type = other RNA
tgatctctttagtcactgt

SEQ ID NO: 37223 - RNA, 19 nt, synthetic construct
  misc_feature 1..19: note = siRNA antisense sequence
  source 1..19: mol_type = other RNA
acagtgactaaagagatca

SEQ ID NO: 37224 - RNA, 19 nt, synthetic construct
  misc_feature 1..19: note = siRNA sense sequence
  source 1..19: mol_type = other RNA
tcactgtttctcatgataa

SEQ ID NO: 37225 - RNA, 19 nt, synthetic construct
  misc_feature 1..19: note = siRNA antisense sequence
  source 1..19: mol_type = other RNA
ttatcatgagaaacagtga

SEQ ID NO: 37226 - RNA, 19 nt, synthetic construct
  misc_feature 1..19: note = siRNA sense sequence
  source 1..19: mol_type = other RNA
cactgtttctcatgataag

SEQ ID NO: 37227 - RNA, 19 nt, synthetic construct
  misc_feature 1..19: note = siRNA antisense sequence
  source 1..19: mol_type = other RNA
cttatcatgagaaacagtg

SEQ ID NO: 37228 - RNA, 19 nt, synthetic construct
  misc_feature 1..19: note = siRNA sense sequence
  source 1..19: mol_type = other RNA
tttccaccctctaaattct

SEQ ID NO: 37229 - RNA, 19 nt, synthetic construct
  misc_feature 1..19: note = siRNA antisense sequence
  source 1..19: mol_type = other RNA
agaatttagagggtggaaa

SEQ ID NO: 37230 - RNA, 19 nt, synthetic construct
  misc_feature 1..19: note = siRNA sense sequence
  source 1..19: mol_type = other RNA
tccaccctctaaattctac

SEQ ID NO: 37231 - RNA, 19 nt, synthetic construct
  misc_feature 1..19: note = siRNA antisense sequence
  source 1..19: mol_type = other RNA
gtagaatttagagggtgga

SEQ ID NO: 37232 - RNA, 19 nt, synthetic construct
  misc_feature 1..19: note = siRNA sense sequence
  source 1..19: mol_type = other RNA
caccctctaaattctacag

SEQ ID NO: 37233 - RNA, 19 nt, synthetic construct
  misc_feature 1..19: note = siRNA antisense sequence
  source 1..19: mol_type = other RNA
ctgtagaatttagagggtg

SEQ ID NO: 37234 - RNA, 19 nt, synthetic construct
  misc_feature 1..19: note = siRNA sense sequence
  source 1..19: mol_type = other RNA
accctctaaattctacagt

SEQ ID NO: 37235 - RNA, 19 nt, synthetic construct
  misc_feature 1..19: note = siRNA antisense sequence
  source 1..19: mol_type = other RNA
actgtagaatttagagggt

SEQ ID NO: 37236 - RNA, 19 nt, synthetic construct
  misc_feature 1..19: note = siRNA sense sequence
  source 1..19: mol_type = other RNA
ccctctaaattctacagtc

SEQ ID NO: 37237 - RNA, 19 nt, synthetic construct
  misc_feature 1..19: note = siRNA antisense sequence
  source 1..19: mol_type = other RNA
gactgtagaatttagaggg

SEQ ID NO: 37238 - RNA, 19 nt, synthetic construct
  misc_feature 1..19: note = siRNA sense sequence
  source 1..19: mol_type = other RNA
cctctaaattctacagtcc

SEQ ID NO: 37239 - RNA, 19 nt, synthetic construct
  misc_feature 1..19: note = siRNA antisense sequence
  source 1..19: mol_type = other RNA
ggactgtagaatttagagg

SEQ ID NO: 37240 - RNA, 19 nt, synthetic construct
  misc_feature 1..19: note = siRNA sense sequence
  source 1..19: mol_type = other RNA
ctctaaattctacagtccc

SEQ ID NO: 37241 - RNA, 19 nt, synthetic construct
  misc_feature 1..19: note = siRNA antisense sequence
  source 1..19: mol_type = other RNA
gggactgtagaatttagag

SEQ ID NO: 37242 - RNA, 19 nt, synthetic construct
  misc_feature 1..19: note = siRNA sense sequence
  source 1..19: mol_type = other RNA
tctaaattctacagtccct

SEQ ID NO: 37243 - RNA, 19 nt, synthetic construct
  misc_feature 1..19: note = siRNA antisense sequence
  source 1..19: mol_type = other RNA
agggactgtagaatttaga

SEQ ID NO: 37244 - RNA, 19 nt, synthetic construct
  misc_feature 1..19: note = siRNA sense sequence
  source 1..19: mol_type = other RNA
ctaaattctacagtccctc

SEQ ID NO: 37245 - RNA, 19 nt, synthetic construct
  misc_feature 1..19: note = siRNA antisense sequence
  source 1..19: mol_type = other RNA
gagggactgtagaatttag

SEQ ID NO: 37246 - RNA, 19 nt, synthetic construct
  misc_feature 1..19: note = siRNA sense sequence
  source 1..19: mol_type = other RNA
cagtccctcctttcaaggc

SEQ ID NO: 37247 - RNA, 19 nt, synthetic construct
  misc_feature 1..19: note = siRNA antisense sequence
  source 1..19: mol_type = other RNA
gccttgaaaggagggactg

SEQ ID NO: 37248 - RNA, 19 nt, synthetic construct
  misc_feature 1..19: note = siRNA sense sequence
  source 1..19: mol_type = other RNA
agtccctcctttcaaggca

SEQ ID NO: 37249 - RNA, 19 nt, synthetic construct
  misc_feature 1..19: note = siRNA antisense sequence
  source 1..19: mol_type = other RNA
tgccttgaaaggagggact

SEQ ID NO: 37250 - RNA, 19 nt, synthetic construct
  misc_feature 1..19: note = siRNA sense sequence
  source 1..19: mol_type = other RNA
gtccctcctttcaaggcac

SEQ ID NO: 37251 - RNA, 19 nt, synthetic construct
  misc_feature 1..19: note = siRNA antisense sequence
  source 1..19: mol_type = other RNA
gtgccttgaaaggagggac

SEQ ID NO: 37252 - RNA, 19 nt, synthetic construct
  misc_feature 1..19: note = siRNA sense sequence
  source 1..19: mol_type = other RNA
tccctcctttcaaggcacc

SEQ ID NO: 37253 - RNA, 19 nt, synthetic construct
  misc_feature 1..19: note = siRNA antisense sequence
  source 1..19: mol_type = other RNA
ggtgccttgaaaggaggga

SEQ ID NO: 37254 - RNA, 19 nt, synthetic construct
  misc_feature 1..19: note = siRNA sense sequence
  source 1..19: mol_type = other RNA
ccctcctttcaaggcacca

SEQ ID NO: 37255 - RNA, 19 nt, synthetic construct
  misc_feature 1..19: note = siRNA antisense sequence
  source 1..19: mol_type = other RNA
tggtgccttgaaaggaggg

SEQ ID NO: 37256 - RNA, 19 nt, synthetic construct
  misc_feature 1..19: note = siRNA sense sequence
  source 1..19: mol_type = other RNA
cctcctttcaaggcaccag

SEQ ID NO: 37257 - RNA, 19 nt, synthetic construct
  misc_feature 1..19: note = siRNA antisense sequence
  source 1..19: mol_type = other RNA
ctggtgccttgaaaggagg

SEQ ID NO: 37258 - RNA, 19 nt, synthetic construct
  misc_feature 1..19: note = siRNA sense sequence
  source 1..19: mol_type = other RNA
ctcctttcaaggcaccaga

SEQ ID NO: 37259 - RNA, 19 nt, synthetic construct
  misc_feature 1..19: note = siRNA antisense sequence
  source 1..19: mol_type = other RNA
tctggtgccttgaaaggag

SEQ ID NO: 37260 - RNA, 19 nt, synthetic construct
  misc_feature 1..19: note = siRNA sense sequence
  source 1..19: mol_type = other RNA
tcctttcaaggcaccagaa

SEQ ID NO: 37261 - RNA, 19 nt, synthetic construct
  misc_feature 1..19: note = siRNA antisense sequence
  source 1..19: mol_type = other RNA
ttctggtgccttgaaagga

SEQ ID NO: 37262 - RNA, 19 nt, synthetic construct
  misc_feature 1..19: note = siRNA sense sequence
  source 1..19: mol_type = other RNA
cctttcaaggcaccagaag

SEQ ID NO: 37263 - RNA, 19 nt, synthetic construct
  misc_feature 1..19: note = siRNA antisense sequence
  source 1..19: mol_type = other RNA
cttctggtgccttgaaagg

SEQ ID NO: 37264 - RNA, 19 nt, synthetic construct
  misc_feature 1..19: note = siRNA sense sequence
  source 1..19: mol_type = other RNA
ctttcaaggcaccagaagt

SEQ ID NO: 37265 - RNA, 19 nt, synthetic construct
  misc_feature 1..19: note = siRNA antisense sequence
  source 1..19: mol_type = other RNA
acttctggtgccttgaaag

SEQ ID NO: 37266 - RNA, 19 nt, synthetic construct
  misc_feature 1..19: note = siRNA sense sequence
  source 1..19: mol_type = other RNA
tttcaaggcaccagaagtc

SEQ ID NO: 37267 - RNA, 19 nt, synthetic construct
  misc_feature 1..19: note = siRNA antisense sequence
  source 1..19: mol_type = other RNA
gacttctggtgccttgaaa

SEQ ID NO: 37268 - RNA, 19 nt, synthetic construct
  misc_feature 1..19: note = siRNA sense sequence
  source 1..19: mol_type = other RNA
ttcaaggcaccagaagtca

SEQ ID NO: 37269 - RNA, 19 nt, synthetic construct
  misc_feature 1..19: note = siRNA antisense sequence
  source 1..19: mol_type = other RNA
tgacttctggtgccttgaa

SEQ ID NO: 37270 - RNA, 19 nt, synthetic construct
  misc_feature 1..19: note = siRNA sense sequence
  source 1..19: mol_type = other RNA
tcaaggcaccagaagtcaa

SEQ ID NO: 37271 - RNA, 19 nt, synthetic construct
  misc_feature 1..19: note = siRNA antisense sequence
  source 1..19: mol_type = other RNA
ttgacttctggtgccttga

SEQ ID NO: 37272 - RNA, 19 nt, synthetic construct
  misc_feature 1..19: note = siRNA sense sequence
  source 1..19: mol_type = other RNA
caaggcaccagaagtcaaa

SEQ ID NO: 37273 - RNA, 19 nt, synthetic construct
  misc_feature 1..19: note = siRNA antisense sequence
  source 1..19: mol_type = other RNA
tttgacttctggtgccttg

SEQ ID NO: 37274 - RNA, 19 nt, synthetic construct
  misc_feature 1..19: note = siRNA sense sequence
  source 1..19: mol_type = other RNA
aaggcaccagaagtcaaag

SEQ ID NO: 37275 - RNA, 19 nt, synthetic construct
  misc_feature 1..19: note = siRNA antisense sequence
  source 1..19: mol_type = other RNA
ctttgacttctggtgcctt

SEQ ID NO: 37276 - RNA, 19 nt, synthetic construct
  misc_feature 1..19: note = siRNA sense sequence
  source 1..19: mol_type = other RNA
aggcaccagaagtcaaagc

SEQ ID NO: 37277 - RNA, 19 nt, synthetic construct
  misc_feature 1..19: note = siRNA antisense sequence
  source 1..19: mol_type = other RNA
gctttgacttctggtgcct

SEQ ID NO: 37278 - RNA, 19 nt, synthetic construct
  misc_feature 1..19: note = siRNA sense sequence
  source 1..19: mol_type = other RNA
ggcaccagaagtcaaagca

SEQ ID NO: 37279 - RNA, 19 nt, synthetic construct
  misc_feature 1..19: note = siRNA antisense sequence
  source 1..19: mol_type = other RNA
tgctttgacttctggtgcc

SEQ ID NO: 37280 - RNA, 19 nt, synthetic construct
  misc_feature 1..19: note = siRNA sense sequence
  source 1..19: mol_type = other RNA
gcaccagaagtcaaagcaa

SEQ ID NO: 37281 - RNA, 19 nt, synthetic construct
  misc_feature 1..19: note = siRNA antisense sequence
  source 1..19: mol_type = other RNA
ttgctttgacttctggtgc

SEQ ID NO: 37282 - RNA, 19 nt, synthetic construct
  misc_feature 1..19: note = siRNA sense sequence
  source 1..19: mol_type = other RNA
accagaagtcaaagcaatg

SEQ ID NO: 37283 - RNA, 19 nt, synthetic construct
  misc_feature 1..19: note = siRNA antisense sequence
  source 1..19: mol_type = other RNA
cattgctttgacttctggt

SEQ ID NO: 37284 - RNA, 19 nt, synthetic construct
  misc_feature 1..19: note = siRNA sense sequence
  source 1..19: mol_type = other RNA
ccagaagtcaaagcaatgg

SEQ ID NO: 37285 - RNA, 19 nt, synthetic construct
  misc_feature 1..19: note = siRNA antisense sequence
  source 1..19: mol_type = other RNA
ccattgctttgacttctgg

SEQ ID NO: 37286 - RNA, 19 nt, synthetic construct
  misc_feature 1..19: note = siRNA sense sequence
  source 1..19: mol_type = other RNA
cagaagtcaaagcaatgga

SEQ ID NO: 37287 - RNA, 19 nt, synthetic construct
  misc_feature 1..19: note = siRNA antisense sequence
  source 1..19: mol_type = other RNA
tccattgctttgacttctg

SEQ ID NO: 37288 - RNA, 19 nt, synthetic construct
  misc_feature 1..19: note = siRNA sense sequence
  source 1..19: mol_type = other RNA
agaagtcaaagcaatggaa

SEQ ID NO: 37289 - RNA, 19 nt, synthetic construct
  misc_feature 1..19: note = siRNA antisense sequence
  source 1..19: mol_type = other RNA
ttccattgctttgacttct

SEQ ID NO: 37290 - RNA, 19 nt, synthetic construct
  misc_feature 1..19: note = siRNA sense sequence
  source 1..19: mol_type = other RNA
ctgaatgaagccttgatgt

SEQ ID NO: 37291 - RNA, 19 nt, synthetic construct
  misc_feature 1..19: note = siRNA antisense sequence
  source 1..19: mol_type = other RNA
acatcaaggcttcattcag

SEQ ID NO: 37292 - RNA, 19 nt, synthetic construct
  misc_feature 1..19: note = siRNA sense sequence
  source 1..19: mol_type = other RNA
tgaatgaagccttgatgtc

SEQ ID NO: 37293 - RNA, 19 nt, synthetic construct
  misc_feature 1..19: note = siRNA antisense sequence
  source 1..19: mol_type = other RNA
gacatcaaggcttcattca

SEQ ID NO: 37294 - RNA, 19 nt, synthetic construct
  misc_feature 1..19: note = siRNA sense sequence
  source 1..19: mol_type = other RNA
gaatgaagccttgatgtca

SEQ ID NO: 37295 - RNA, 19 nt, synthetic construct
  misc_feature 1..19: note = siRNA antisense sequence
  source 1..19: mol_type = other RNA
tgacatcaaggcttcattc

SEQ ID NO: 37296 - RNA, 19 nt, synthetic construct
  misc_feature 1..19: note = siRNA sense sequence
  source 1..19: mol_type = other RNA
cttcctaaggttattctat

SEQ ID NO: 37297 - RNA, 19 nt, synthetic construct
  misc_feature 1..19: note = siRNA antisense sequence
  source 1..19: mol_type = other RNA
atagaataaccttaggaag

SEQ ID NO: 37298 - RNA, 19 nt, synthetic construct
  misc_feature 1..19: note = siRNA sense sequence
  source 1..19: mol_type = other RNA
ttcctaaggttattctatc

SEQ ID NO: 37299 - RNA, 19 nt, synthetic construct
  misc_feature 1..19: note = siRNA antisense sequence
  source 1..19: mol_type = other RNA
gatagaataaccttaggaa

SEQ ID NO: 37300 - RNA, 19 nt, synthetic construct
  misc_feature 1..19: note = siRNA sense sequence
  source 1..19: mol_type = other RNA
tcctaaggttattctatct

SEQ ID NO: 37301 - RNA, 19 nt, synthetic construct
  misc_feature 1..19: note = siRNA antisense sequence
  source 1..19: mol_type = other RNA
agatagaataaccttagga

SEQ ID NO: 37302 - RNA, 19 nt, synthetic construct
  misc_feature 1..19: note = siRNA sense sequence
  source 1..19: mol_type = other RNA
cctaaggttattctatctt

SEQ ID NO: 37303 - RNA, 19 nt, synthetic construct
  misc_feature 1..19: note = siRNA antisense sequence
  source 1..19: mol_type = other RNA
aagatagaataaccttagg

SEQ ID NO: 37304 - RNA, 19 nt, synthetic construct
  misc_feature 1..19: note = siRNA sense sequence
  source 1..19: mol_type = other RNA
ggttattctatctttgtag

SEQ ID NO: 37305 - RNA, 19 nt, synthetic construct
  misc_feature 1..19: note = siRNA antisense sequence
  source 1..19: mol_type = other RNA
ctacaaagatagaataacc

SEQ ID NO: 37306 - RNA, 19 nt, synthetic construct
  misc_feature 1..19: note = siRNA sense sequence
  source 1..19: mol_type = other RNA
aaagttaaggtatggatga

SEQ ID NO: 37307 - RNA, 19 nt, synthetic construct
  misc_feature 1..19: note = siRNA antisense sequence
  source 1..19: mol_type = other RNA
tcatccataccttaacttt

SEQ ID NO: 37308 - RNA, 19 nt, synthetic construct
  misc_feature 1..19: note = siRNA sense sequence
  source 1..19: mol_type = other RNA
aagttaaggtatggatgag

SEQ ID NO: 37309 - RNA, 19 nt, synthetic construct
  misc_feature 1..19: note = siRNA antisense sequence
  source 1..19: mol_type = other RNA
ctcatccataccttaactt

SEQ ID NO: 37310 - RNA, 19 nt, synthetic construct
  misc_feature 1..19: note = siRNA sense sequence
  source 1..19: mol_type = other RNA
agttaaggtatggatgagg

SEQ ID NO: 37311 - RNA, 19 nt, synthetic construct
  misc_feature 1..19: note = siRNA antisense sequence
  source 1..19: mol_type = other RNA
cctcatccataccttaact

SEQ ID NO: 37312 - RNA, 19 nt, synthetic construct
  misc_feature 1..19: note = siRNA sense sequence
  source 1..19: mol_type = other RNA
gttaaggtatggatgagga

SEQ ID NO: 37313 - RNA, 19 nt, synthetic construct
  misc_feature 1..19: note = siRNA antisense sequence
  source 1..19: mol_type = other RNA
tcctcatccataccttaac

SEQ ID NO: 37314 - RNA, 19 nt, synthetic construct
  misc_feature 1..19: note = siRNA sense sequence
  source 1..19: mol_type = other RNA
caaaagagtgcatagattg

SEQ ID NO: 37315 - RNA, 19 nt, synthetic construct
  misc_feature 1..19: note = siRNA antisense sequence
  source 1..19: mol_type = other RNA
caatctatgcactcttttg

SEQ ID NO: 37316 - RNA, 19 nt, synthetic construct
  misc_feature 1..19: note = siRNA sense sequence
  source 1..19: mol_type = other RNA
aaaagagtgcatagattgg

SEQ ID NO: 37317 - RNA, 19 nt, synthetic construct
  misc_feature 1..19: note = siRNA antisense sequence
  source 1..19: mol_type = other RNA
ccaatctatgcactctttt

SEQ ID NO: 37318 - RNA, 19 nt, synthetic construct
  misc_feature 1..19: note = siRNA sense sequence
  source 1..19: mol_type = other RNA
aaagagtgcatagattgga

SEQ ID NO: 37319 - RNA, 19 nt, synthetic construct
  misc_feature 1..19: note = siRNA antisense sequence
  source 1..19: mol_type = other RNA
tccaatctatgcactcttt

SEQ ID NO: 37320 - RNA, 19 nt, synthetic construct
  misc_feature 1..19: note = siRNA sense sequence
  source 1..19: mol_type = other RNA
aagagtgcatagattggat

SEQ ID NO: 37321 - RNA, 19 nt, synthetic construct
  misc_feature 1..19: note = siRNA antisense sequence
  source 1..19: mol_type = other RNA
atccaatctatgcactctt

SEQ ID NO: 37322 - RNA, 19 nt, synthetic construct
  misc_feature 1..19: note = siRNA sense sequence
  source 1..19: mol_type = other RNA
agagtgcatagattggata

SEQ ID NO: 37323 - RNA, 19 nt, synthetic construct
  misc_feature 1..19: note = siRNA antisense sequence
  source 1..19: mol_type = other RNA
tatccaatctatgcactct

SEQ ID NO: 37324 - RNA, 19 nt, synthetic construct
  misc_feature 1..19: note = siRNA sense sequence
  source 1..19: mol_type = other RNA
gagtgcatagattggatag

SEQ ID NO: 37325 - RNA, 19 nt, synthetic construct
  misc_feature 1..19: note = siRNA antisense sequence
  source 1..19: mol_type = other RNA
ctatccaatctatgcactc

SEQ ID NO: 37326 - RNA, 19 nt, synthetic construct
  misc_feature 1..19: note = siRNA sense sequence
  source 1..19: mol_type = other RNA
agtgcatagattggatagt

SEQ ID NO: 37327 - RNA, 19 nt, synthetic construct
  misc_feature 1..19: note = siRNA antisense sequence
  source 1..19: mol_type = other RNA
actatccaatctatgcact

SEQ ID NO: 37328 - RNA, 19 nt, synthetic construct
  misc_feature 1..19: note = siRNA sense sequence
  source 1..19: mol_type = other RNA
gtgcatagattggatagta

SEQ ID NO: 37329 - RNA, 19 nt, synthetic construct
  misc_feature 1..19: note = siRNA antisense sequence
  source 1..19: mol_type = other RNA
tactatccaatctatgcac

SEQ ID NO: 37330 - RNA, 19 nt, synthetic construct
  misc_feature 1..19: note = siRNA sense sequence
  source 1..19: mol_type = other RNA
tgcatagattggatagtaa

SEQ ID NO: 37331 - RNA, 19 nt, synthetic construct
  misc_feature 1..19: note = siRNA antisense sequence
  source 1..19: mol_type = other RNA
ttactatccaatctatgca

SEQ ID NO: 37332 - RNA, 19 nt, synthetic construct
  misc_feature 1..19: note = siRNA sense sequence
  source 1..19: mol_type = other RNA
aacgatgttgctaatggtc

SEQ ID NO: 37333 - RNA, 19 nt, synthetic construct
  misc_feature 1..19: note = siRNA antisense sequence
  source 1..19: mol_type = other RNA
gaccattagcaacatcgtt

SEQ ID NO: 37334 - RNA, 19 nt, synthetic construct
  misc_feature 1..19: note = siRNA sense sequence
  source 1..19: mol_type = other RNA
acgatgttgctaatggtct

SEQ ID NO: 37335 - RNA, 19 nt, synthetic construct
  misc_feature 1..19: note = siRNA antisense sequence
  source 1..19: mol_type = other RNA
agaccattagcaacatcgt

SEQ ID NO: 37336 - RNA, 19 nt, synthetic construct
  misc_feature 1..19: note = siRNA sense sequence
  source 1..19: mol_type = other RNA
cgatgttgctaatggtctg

SEQ ID NO: 37337 - RNA, 19 nt, synthetic construct
  misc_feature 1..19: note = siRNA antisense sequence
  source 1..19: mol_type = other RNA
cagaccattagcaacatcg

SEQ ID NO: 37338 - RNA, 19 nt, synthetic construct
  misc_feature 1..19: note = siRNA sense sequence
  source 1..19: mol_type = other RNA
gatgttgctaatggtctgt

SEQ ID NO: 37339 - RNA, 19 nt, synthetic construct
  misc_feature 1..19: note = siRNA antisense sequence
  source 1..19: mol_type = other RNA
acagaccattagcaacatc

SEQ ID NO: 37340 - RNA, 19 nt, synthetic construct
  misc_feature 1..19: note = siRNA sense sequence
  source 1..19: mol_type = other RNA
tgttgctaatggtctgtct

SEQ ID NO: 37341 - RNA, 19 nt, synthetic construct
  misc_feature 1..19: note = siRNA antisense sequence
  source 1..19: mol_type = other RNA
agacagaccattagcaaca

SEQ ID NO: 37342 - RNA, 19 nt, synthetic construct
  misc_feature 1..19: note = siRNA sense sequence
  source 1..19: mol_type = other RNA
gttgctaatggtctgtctg

SEQ ID NO: 37343 - RNA, 19 nt, synthetic construct
  misc_feature 1..19: note = siRNA antisense sequence
  source 1..19: mol_type = other RNA
cagacagaccattagcaac

SEQ ID NO: 37344 - RNA, 19 nt, synthetic construct
  misc_feature 1..19: note = siRNA sense sequence
  source 1..19: mol_type = other RNA
ttgctaatggtctgtctga

SEQ ID NO: 37345 - RNA, 19 nt, synthetic construct
  misc_feature 1..19: note = siRNA antisense sequence
  source 1..19: mol_type = other RNA
tcagacagaccattagcaa

SEQ ID NO: 37346 - RNA, 19 nt, synthetic construct
  misc_feature 1..19: note = siRNA sense sequence
  source 1..19: mol_type = other RNA
tgctaatggtctgtctgaa

SEQ ID NO: 37347 - RNA, 19 nt, synthetic construct
  misc_feature 1..19: note = siRNA antisense sequence
  source 1..19: mol_type = other RNA
ttcagacagaccattagca

SEQ ID NO: 37348 - RNA, 19 nt, synthetic construct
  misc_feature 1..19: note = siRNA sense sequence
  source 1..19: mol_type = other RNA
gtctgtctgaatgaatcta

SEQ ID NO: 37349 - RNA, 19 nt, synthetic construct
  misc_feature 1..19: note = siRNA antisense sequence
  source 1..19: mol_type = other RNA
tagattcattcagacagac

SEQ ID NO: 37350 - RNA, 19 nt, synthetic construct
  misc_feature 1..19: note = siRNA sense sequence
  source 1..19: mol_type = other RNA
gtctgaatgaatctacact

SEQ ID NO: 37351 - RNA, 19 nt, synthetic construct
  misc_feature 1..19: note = siRNA antisense sequence
  source 1..19: mol_type = other RNA
agtgtagattcattcagac

SEQ ID NO: 37352 - RNA, 19 nt, synthetic construct
  misc_feature 1..19: note = siRNA sense sequence
  source 1..19: mol_type = other RNA
tctgaatgaatctacactg

SEQ ID NO: 37353 - RNA, 19 nt, synthetic construct
  misc_feature 1..19: note = siRNA antisense sequence
  source 1..19: mol_type = other RNA
cagtgtagattcattcaga

SEQ ID NO: 37354 - RNA, 19 nt, synthetic construct
  misc_feature 1..19: note = siRNA sense sequence
  source 1..19: mol_type = other RNA
tacatacatttgtgaggta

SEQ ID NO: 37355 - RNA, 19 nt, synthetic construct
  misc_feature 1..19: note = siRNA antisense sequence
  source 1..19: mol_type = other RNA
tacctcacaaatgtatgta

SEQ ID NO: 37356 - RNA, 19 nt, synthetic construct
  misc_feature 1..19: note = siRNA sense sequence
  source 1..19: mol_type = other RNA
acatacatttgtgaggtaa

SEQ ID NO: 37357 - RNA, 19 nt, synthetic construct
  misc_feature 1..19: note = siRNA antisense sequence
  source 1..19: mol_type = other RNA
ttacctcacaaatgtatgt

SEQ ID NO: 37358 - RNA, 19 nt, synthetic construct
  misc_feature 1..19: note = siRNA sense sequence
  source 1..19: mol_type = other RNA
catacatttgtgaggtaat

SEQ ID NO: 37359 - RNA, 19 nt, synthetic construct
  misc_feature 1..19: note = siRNA antisense sequence
  source 1..19: mol_type = other RNA
attacctcacaaatgtatg

SEQ ID NO: 37360 - RNA, 19 nt, synthetic construct
  misc_feature 1..19: note = siRNA sense sequence
  source 1..19: mol_type = other RNA
gaggtaatgttaataagag

SEQ ID NO: 37361 - RNA, 19 nt, synthetic construct
  misc_feature 1..19: note = siRNA antisense sequence
  source 1..19: mol_type = other RNA
ctcttattaacattacctc

SEQ ID NO: 37362 - RNA, 19 nt, synthetic construct
  misc_feature 1..19: note = siRNA sense sequence
  source 1..19: mol_type = other RNA
gactatgccttatatcttg

SEQ ID NO: 37363 - RNA, 19 nt, synthetic construct
  misc_feature 1..19: note = siRNA antisense sequence
  source 1..19: mol_type = other RNA
caagatataaggcatagtc

SEQ ID NO: 37364 - RNA, 19 nt, synthetic construct
  misc_feature 1..19: note = siRNA sense sequence
  source 1..19: mol_type = other RNA
actatgccttatatcttgg

SEQ ID NO: 37365 - RNA, 19 nt, synthetic construct
  misc_feature 1..19: note = siRNA antisense sequence
  source 1..19: mol_type = other RNA
ccaagatataaggcatagt

SEQ ID NO: 37366 - RNA, 19 nt, synthetic construct
  misc_feature 1..19: note = siRNA sense sequence
  source 1..19: mol_type = other RNA
ctatgccttatatcttggt

SEQ ID NO: 37367 - RNA, 19 nt, synthetic construct
  misc_feature 1..19: note = siRNA antisense sequence
  source 1..19: mol_type = other RNA
accaagatataaggcatag

SEQ ID NO: 37368 - RNA, 19 nt, synthetic construct
  misc_feature 1..19: note = siRNA sense sequence
  source 1..19: mol_type = other RNA
tatgccttatatcttggtt

SEQ ID NO: 37369 - RNA, 19 nt, synthetic construct
  misc_feature 1..19: note = siRNA antisense sequence
  source 1..19: mol_type = other RNA
aaccaagatataaggcata

SEQ ID NO: 37370 - RNA, 19 nt, synthetic construct
  misc_feature 1..19: note = siRNA sense sequence
  source 1..19: mol_type = other RNA
atgccttatatcttggttt

SEQ ID NO: 37371 - RNA, 19 nt, synthetic construct
  misc_feature 1..19: note = siRNA antisense sequence
  source 1..19: mol_type = other RNA
aaaccaagatataaggcat

SEQ ID NO: 37372 - RNA, 19 nt, synthetic construct
  misc_feature 1..19: note = siRNA sense sequence
  source 1..19: mol_type = other RNA
tgccttatatcttggttta

SEQ ID NO: 37373 - RNA, 19 nt, synthetic construct
  misc_feature 1..19: note = siRNA antisense sequence
  source 1..19: mol_type = other RNA
taaaccaagatataaggca

SEQ ID NO: 37374 - RNA, 19 nt, synthetic construct
  misc_feature 1..19: note = siRNA sense sequence
  source 1..19: mol_type = other RNA
atatcttggtttacccatg

SEQ ID NO: 37375 - RNA, 19 nt, synthetic construct
  misc_feature 1..19: note = siRNA antisense sequence
  source 1..19: mol_type = other RNA
catgggtaaaccaagatat

SEQ ID NO: 37376 - RNA, 19 nt, synthetic construct
  misc_feature 1..19: note = siRNA sense sequence
  source 1..19: mol_type = other RNA
tatcttggtttacccatga

SEQ ID NO: 37377 - RNA, 19 nt, synthetic construct
  misc_feature 1..19: note = siRNA antisense sequence
  source 1..19: mol_type = other RNA
tcatgggtaaaccaagata

SEQ ID NO: 37378 - RNA, 19 nt, synthetic construct
  misc_feature 1..19: note = siRNA sense sequence
  source 1..19: mol_type = other RNA
atcttggtttacccatgaa

SEQ ID NO: 37379 - RNA, 19 nt, synthetic construct
  misc_feature 1..19: note = siRNA antisense sequence
  source 1..19: mol_type = other RNA
ttcatgggtaaaccaagat

SEQ ID NO: 37380 - RNA, 19 nt, synthetic construct
  misc_feature 1..19: note = siRNA sense sequence
  source 1..19: mol_type = other RNA
tcttggtttacccatgaag

SEQ ID NO: 37381 - RNA, 19 nt, synthetic construct
  misc_feature 1..19: note = siRNA antisense sequence
  source 1..19: mol_type = other RNA
cttcatgggtaaaccaaga

SEQ ID NO: 37382 - RNA, 19 nt, synthetic construct
  misc_feature 1..19: note = siRNA sense sequence
  source 1..19: mol_type = other RNA
cttggtttacccatgaagc

SEQ ID NO: 37383 - RNA, 19 nt, synthetic construct
  misc_feature 1..19: note = siRNA antisense sequence
  source 1..19: mol_type = other RNA
gcttcatgggtaaaccaag

SEQ ID NO: 37384 - RNA, 19 nt, synthetic construct
  misc_feature 1..19: note = siRNA sense sequence
  source 1..19: mol_type = other RNA
ttggtttacccatgaagct

SEQ ID NO: 37385 - RNA, 19 nt, synthetic construct
  misc_feature 1..19: note = siRNA antisense sequence
  source 1..19: mol_type = other RNA
agcttcatgggtaaaccaa

SEQ ID NO: 37386 - RNA, 19 nt, synthetic construct
  misc_feature 1..19: note = siRNA sense sequence
  source 1..19: mol_type = other RNA
tggtttacccatgaagctg

SEQ ID NO: 37387 - RNA, 19 nt, synthetic construct
  misc_feature 1..19: note = siRNA antisense sequence
  source 1..19: mol_type = other RNA
cagcttcatgggtaaacca

SEQ ID NO: 37388 - RNA, 19 nt, synthetic construct
  misc_feature 1..19: note = siRNA sense sequence
  source 1..19: mol_type = other RNA
ggtttacccatgaagctga

SEQ ID NO: 37389 - RNA, 19 nt, synthetic construct
  misc_feature 1..19: note = siRNA antisense sequence
  source 1..19: mol_type = other RNA
tcagcttcatgggtaaacc

SEQ ID NO: 37390 - RNA, 19 nt, synthetic construct
  misc_feature 1..19: note = siRNA sense sequence
  source 1..19: mol_type = other RNA
gtttacccatgaagctgag

SEQ ID NO: 37391 - RNA, 19 nt, synthetic construct
  misc_feature 1..19: note = siRNA antisense sequence
  source 1..19: mol_type = other RNA
ctcagcttcatgggtaaac

SEQ ID NO: 37392 - RNA, 19 nt, synthetic construct
  misc_feature 1..19: note = siRNA sense sequence
  source 1..19: mol_type = other RNA
acccatgaagctgagttga

SEQ ID NO: 37393 - RNA, 19 nt, synthetic construct
  misc_feature 1..19: note = siRNA antisense sequence
  source 1..19: mol_type = other RNA
tcaactcagcttcatgggt

SEQ ID NO: 37394 - RNA, 19 nt, synthetic construct
  misc_feature 1..19: note = siRNA sense sequence
  source 1..19: mol_type = other RNA
cccatgaagctgagttgaa

SEQ ID NO: 37395 - RNA, 19 nt, synthetic construct
  misc_feature 1..19: note = siRNA antisense sequence
  source 1..19: mol_type = other RNA
ttcaactcagcttcatggg

SEQ ID NO: 37396 - RNA, 19 nt, synthetic construct
  misc_feature 1..19: note = siRNA sense sequence
  source 1..19: mol_type = other RNA
ccatgaagctgagttgaat

SEQ ID NO: 37397 - RNA, 19 nt, synthetic construct
  misc_feature 1..19: note = siRNA antisense sequence
  source 1..19: mol_type = other RNA
attcaactcagcttcatgg

SEQ ID NO: 37398 - RNA, 19 nt, synthetic construct
  misc_feature 1..19: note = siRNA sense sequence
  source 1..19: mol_type = other RNA
catgaagctgagttgaatt

SEQ ID NO: 37399 - RNA, 19 nt, synthetic construct
  misc_feature 1..19: note = siRNA antisense sequence
  source 1..19: mol_type = other RNA
aattcaactcagcttcatg

SEQ ID NO: 37400 - RNA, 19 nt, synthetic construct
  misc_feature 1..19: note = siRNA sense sequence
  source 1..19: mol_type = other RNA
atgaagctgagttgaattg

SEQ ID NO: 37401 - RNA, 19 nt, synthetic construct
  misc_feature 1..19: note = siRNA antisense sequence
  source 1..19: mol_type = other RNA
caattcaactcagcttcat

SEQ ID NO: 37402 - RNA, 19 nt, synthetic construct
  misc_feature 1..19: note = siRNA sense sequence
  source 1..19: mol_type = other RNA
tgaagctgagttgaattgt

SEQ ID NO: 37403 - RNA, 19 nt, synthetic construct
  misc_feature 1..19: note = siRNA antisense sequence
  source 1..19: mol_type = other RNA
acaattcaactcagcttca

SEQ ID NO: 37404 - RNA, 19 nt, synthetic construct
  misc_feature 1..19: note = siRNA sense sequence
  source 1..19: mol_type = other RNA
gaagctgagttgaattgtc

SEQ ID NO: 37405 - RNA, 19 nt, synthetic construct
  misc_feature 1..19: note = siRNA antisense sequence
  source 1..19: mol_type = other RNA
gacaattcaactcagcttc

SEQ ID NO: 37406 - RNA, 19 nt, synthetic construct
  misc_feature 1..19: note = siRNA sense sequence
  source 1..19: mol_type = other RNA
aagctgagttgaattgtct

SEQ ID NO: 37407 - RNA, 19 nt, synthetic construct
  misc_feature 1..19: note = siRNA antisense sequence
  source 1..19: mol_type = other RNA
agacaattcaactcagctt

SEQ ID NO: 37408 - RNA, 19 nt, synthetic construct
  misc_feature 1..19: note = siRNA sense sequence
  source 1..19: mol_type = other RNA
agctgagttgaattgtctc

SEQ ID NO: 37409 - RNA, 19 nt, synthetic construct
  misc_feature 1..19: note = siRNA antisense sequence
  source 1..19: mol_type = other RNA
gagacaattcaactcagct

SEQ ID NO: 37410 - RNA, 19 nt, synthetic construct
  misc_feature 1..19: note = siRNA sense sequence
  source 1..19: mol_type = other RNA
aaaatatttgttggtgggt

SEQ ID NO: 37411 - RNA, 19 nt, synthetic construct
  misc_feature 1..19: note = siRNA antisense sequence
  source 1..19: mol_type = other RNA
acccaccaacaaatatttt

SEQ ID NO: 37412 - RNA, 19 nt, synthetic construct
  misc_feature 1..19: note = siRNA sense sequence
  source 1..19: mol_type = other RNA
aaatatttgttggtgggtt

SEQ ID NO: 37413 - RNA, 19 nt, synthetic construct
  misc_feature 1..19: note = siRNA antisense sequence
  source 1..19: mol_type = other RNA
aacccaccaacaaatattt

SEQ ID NO: 37414 - RNA, 19 nt, synthetic construct
  misc_feature 1..19: note = siRNA sense sequence
  source 1..19: mol_type = other RNA
aatatttgttggtgggtta

SEQ ID NO: 37415 - RNA, 19 nt, synthetic construct
  misc_feature 1..19: note = siRNA antisense sequence
  source 1..19: mol_type = other RNA
taacccaccaacaaatatt

SEQ ID NO: 37416 - RNA, 19 nt, synthetic construct
  misc_feature 1..19: note = siRNA sense sequence
  source 1..19: mol_type = other RNA
atatttgttggtgggttag

SEQ ID NO: 37417 - RNA, 19 nt, synthetic construct
  misc_feature 1..19: note = siRNA antisense sequence
  source 1..19: mol_type = other RNA
ctaacccaccaacaaatat

SEQ ID NO: 37418 - RNA, 19 nt, synthetic construct
  misc_feature 1..19: note = siRNA sense sequence
  source 1..19: mol_type = other RNA
tatttgttggtgggttagg

SEQ ID NO: 37419 - RNA, 19 nt, synthetic construct
  misc_feature 1..19: note = siRNA antisense sequence
  source 1..19: mol_type = other RNA
cctaacccaccaacaaata

SEQ ID NO: 37420 - RNA, 19 nt, synthetic construct
  misc_feature 1..19: note = siRNA sense sequence
  source 1..19: mol_type = other RNA
atttgttggtgggttaggt

SEQ ID NO: 37421 - RNA, 19 nt, synthetic construct
  misc_feature 1..19: note = siRNA antisense sequence
  source 1..19: mol_type = other RNA
acctaacccaccaacaaat

SEQ ID NO: 37422 - RNA, 19 nt, synthetic construct
  misc_feature 1..19: note = siRNA sense sequence
  source 1..19: mol_type = other RNA
tttgttggtgggttaggtt

SEQ ID NO: 37423 - RNA, 19 nt, synthetic construct
  misc_feature 1..19: note = siRNA antisense sequence
  source 1..19: mol_type = other RNA
aacctaacccaccaacaaa

SEQ ID NO: 37424 - RNA, 19 nt, synthetic construct
  misc_feature 1..19: note = siRNA sense sequence
  source 1..19: mol_type = other RNA
ttgttggtgggttaggttt

SEQ ID NO: 37425 - RNA, 19 nt, synthetic construct
  misc_feature 1..19: note = siRNA antisense sequence
  source 1..19: mol_type = other RNA
aaacctaacccaccaacaa

SEQ ID NO: 37426 - RNA, 19 nt, synthetic construct
  misc_feature 1..19: note = siRNA sense sequence
  source 1..19: mol_type = other RNA
tgttggtgggttaggtttt

SEQ ID NO: 37427 - RNA, 19 nt, synthetic construct
  misc_feature 1..19: note = siRNA antisense sequence
  source 1..19: mol_type = other RNA
aaaacctaacccaccaaca

SEQ ID NO: 37428 - RNA, 19 nt, synthetic construct
  misc_feature 1..19: note = siRNA sense sequence
  source 1..19: mol_type = other RNA
ttagccatagcataaatgt

SEQ ID NO: 37429 - RNA, 19 nt, synthetic construct
  misc_feature 1..19: note = siRNA antisense sequence
  source 1..19: mol_type = other RNA
acatttatgctatggctaa

SEQ ID NO: 37430 - RNA, 19 nt, synthetic construct
  misc_feature 1..19: note = siRNA sense sequence
  source 1..19: mol_type = other RNA
tagccatagcataaatgtg

SEQ ID NO: 37431 - RNA, 19 nt, synthetic construct
  misc_feature 1..19: note = siRNA antisense sequence
  source 1..19: mol_type = other RNA
cacatttatgctatggcta

SEQ ID NO: 37432 - RNA, 19 nt, synthetic construct
  misc_feature 1..19: note = siRNA sense sequence
  source 1..19: mol_type = other RNA
agccatagcataaatgtgg

SEQ ID NO: 37433 - RNA, 19 nt, synthetic construct
  misc_feature 1..19: note = siRNA antisense sequence
  source 1..19: mol_type = other RNA
ccacatttatgctatggct

SEQ ID NO: 37434 - RNA, 19 nt, synthetic construct
  misc_feature 1..19: note = siRNA sense sequence
  source 1..19: mol_type = other RNA
gccatagcataaatgtggg

SEQ ID NO: 37435 - RNA, 19 nt, synthetic construct
  misc_feature 1..19: note = siRNA antisense sequence
  source 1..19: mol_type = other RNA
cccacatttatgctatggc

SEQ ID NO: 37436 - RNA, 19 nt, synthetic construct
  misc_feature 1..19: note = siRNA sense sequence
  source 1..19: mol_type = other RNA
ccatagcataaatgtgggt

SEQ ID NO: 37437 - RNA, 19 nt, synthetic construct
  misc_feature 1..19: note = siRNA antisense sequence
  source 1..19: mol_type = other RNA
acccacatttatgctatgg

SEQ ID NO: 37438 - RNA, 19 nt, synthetic construct
  misc_feature 1..19: note = siRNA sense sequence
  source 1..19: mol_type = other RNA
catagcataaatgtgggtc

SEQ ID NO: 37439 - RNA, 19 nt, synthetic construct
  misc_feature 1..19: note = siRNA antisense sequence
  source 1..19: mol_type = other RNA
gacccacatttatgctatg

SEQ ID NO: 37440 - RNA, 19 nt, synthetic construct
  misc_feature 1..19: note = siRNA sense sequence
  source 1..19: mol_type = other RNA
atagcataaatgtgggtca

SEQ ID NO: 37441 - RNA, 19 nt, synthetic construct
  misc_feature 1..19: note = siRNA antisense sequence
  source 1..19: mol_type = other RNA
tgacccacatttatgctat

SEQ ID NO: 37442 - RNA, 19 nt, synthetic construct
  misc_feature 1..19: note = siRNA sense sequence
  source 1..19: mol_type = other RNA
tagcataaatgtgggtcag

SEQ ID NO: 37443 - RNA, 19 nt, synthetic construct
  misc_feature 1..19: note = siRNA antisense sequence
  source 1..19: mol_type = other RNA
ctgacccacatttatgcta

SEQ ID NO: 37444 - RNA, 19 nt, synthetic construct
  misc_feature 1..19: note = siRNA sense sequence
  source 1..19: mol_type = other RNA
agcataaatgtgggtcagt

SEQ ID NO: 37445 - RNA, 19 nt, synthetic construct
  misc_feature 1..19: note = siRNA antisense sequence
  source 1..19: mol_type = other RNA
actgacccacatttatgct

SEQ ID NO: 37446 - RNA, 19 nt, synthetic construct
  misc_feature 1..19: note = siRNA sense sequence
  source 1..19: mol_type = other RNA
gcataaatgtgggtcagtc

SEQ ID NO: 37447 - RNA, 19 nt, synthetic construct
  misc_feature 1..19: note = siRNA antisense sequence
  source 1..19: mol_type = other RNA
gactgacccacatttatgc

SEQ ID NO: 37448 - RNA, 19 nt, synthetic construct
  misc_feature 1..19: note = siRNA sense sequence
  source 1..19: mol_type = other RNA
taaatgtgggtcagtcaat

SEQ ID NO: 37449 - RNA, 19 nt, synthetic construct
  misc_feature 1..19: note = siRNA antisense sequence
  source 1..19: mol_type = other RNA
attgactgacccacattta

SEQ ID NO: 37450 - RNA, 19 nt, synthetic construct
  misc_feature 1..19: note = siRNA sense sequence
  source 1..19: mol_type = other RNA
aaatgtgggtcagtcaatc

SEQ ID NO: 37451 - RNA, 19 nt, synthetic construct
  misc_feature 1..19: note = siRNA antisense sequence
  source 1..19: mol_type = other RNA
gattgactgacccacattt

SEQ ID NO: 37452 - RNA, 19 nt, synthetic construct
  misc_feature 1..19: note = siRNA sense sequence
  source 1..19: mol_type = other RNA
aatgtgggtcagtcaatca

SEQ ID NO: 37453 - RNA, 19 nt, synthetic construct
  misc_feature 1..19: note = siRNA antisense sequence
  source 1..19: mol_type = other RNA
tgattgactgacccacatt

SEQ ID NO: 37454 - RNA, 19 nt, synthetic construct
  misc_feature 1..19: note = siRNA sense sequence
  source 1..19: mol_type = other RNA
atgtgggtcagtcaatcaa

SEQ ID NO: 37455 - RNA, 19 nt, synthetic construct
  misc_feature 1..19: note = siRNA antisense sequence
  source 1..19: mol_type = other RNA
ttgattgactgacccacat

SEQ ID NO: 37456 - RNA, 19 nt, synthetic construct
  misc_feature 1..19: note = siRNA sense sequence
  source 1..19: mol_type = other RNA
tgtgggtcagtcaatcaac

SEQ ID NO: 37457 - RNA, 19 nt, synthetic construct
  misc_feature 1..19: note = siRNA antisense sequence
  source 1..19: mol_type = other RNA
gttgattgactgacccaca

SEQ ID NO: 37458 - RNA, 19 nt, synthetic construct
  misc_feature 1..19: note = siRNA sense sequence
  source 1..19: mol_type = other RNA
cattttatgtgtctggcat

SEQ ID NO: 37459 - RNA, 19 nt, synthetic construct
  misc_feature 1..19: note = siRNA antisense sequence
  source 1..19: mol_type = other RNA
atgccagacacataaaatg

SEQ ID NO: 37460 - RNA, 19 nt, synthetic construct
  misc_feature 1..19: note = siRNA sense sequence
  source 1..19: mol_type = other RNA
tatgtgtctggcattatgc

SEQ ID NO: 37461 - RNA, 19 nt, synthetic construct
  misc_feature 1..19: note = siRNA antisense sequence
  source 1..19: mol_type = other RNA
gcataatgccagacacata

SEQ ID NO: 37462 - RNA, 19 nt, synthetic construct
  misc_feature 1..19: note = siRNA sense sequence
  source 1..19: mol_type = other RNA
tgtctggcattatgctaaa

SEQ ID NO: 37463 - RNA, 19 nt, synthetic construct
  misc_feature 1..19: note = siRNA antisense sequence
  source 1..19: mol_type = other RNA
tttagcataatgccagaca

SEQ ID NO: 37464 - RNA, 19 nt, synthetic construct
  misc_feature 1..19: note = siRNA sense sequence
  source 1..19: mol_type = other RNA
gtctggcattatgctaaat

SEQ ID NO: 37465 - RNA, 19 nt, synthetic construct
  misc_feature 1..19: note = siRNA antisense sequence
  source 1..19: mol_type = other RNA
atttagcataatgccagac

SEQ ID NO: 37466 - RNA, 19 nt, synthetic construct
  misc_feature 1..19: note = siRNA sense sequence
  source 1..19: mol_type = other RNA
tctggcattatgctaaatt

SEQ ID NO: 37467 - RNA, 19 nt, synthetic construct
  misc_feature 1..19: note = siRNA antisense sequence
  source 1..19: mol_type = other RNA
aatttagcataatgccaga

SEQ ID NO: 37468 - RNA, 19 nt, synthetic construct
  misc_feature 1..19: note = siRNA sense sequence
  source 1..19: mol_type = other RNA
ctggcattatgctaaattc

SEQ ID NO: 37469 - RNA, 19 nt, synthetic construct
  misc_feature 1..19: note = siRNA antisense sequence
  source 1..19: mol_type = other RNA
gaatttagcataatgccag

SEQ ID NO: 37470 - RNA, 19 nt, synthetic construct
  misc_feature 1..19: note = siRNA sense sequence
  source 1..19: mol_type = other RNA
tggcattatgctaaattcc

SEQ ID NO: 37471 - RNA, 19 nt, synthetic construct
  misc_feature 1..19: note = siRNA antisense sequence
  source 1..19: mol_type = other RNA
ggaatttagcataatgcca

SEQ ID NO: 37472 - RNA, 19 nt, synthetic construct
  misc_feature 1..19: note = siRNA sense sequence
  source 1..19: mol_type = other RNA
ggcattatgctaaattcca

SEQ ID NO: 37473 - RNA, 19 nt, synthetic construct
  misc_feature 1..19: note = siRNA antisense sequence
  source 1..19: mol_type = other RNA
tggaatttagcataatgcc

SEQ ID NO: 37474 - RNA, 19 nt, synthetic construct
  misc_feature 1..19: note = siRNA sense sequence
  source 1..19: mol_type = other RNA
gcattatgctaaattccat

SEQ ID NO: 37475 - RNA, 19 nt, synthetic construct
  misc_feature 1..19: note = siRNA antisense sequence
  source 1..19: mol_type = other RNA
atggaatttagcataatgc

SEQ ID NO: 37476 - RNA, 19 nt, synthetic construct
  misc_feature 1..19: note = siRNA sense sequence
  source 1..19: mol_type = other RNA
tttaacctagtcaaggaca

SEQ ID NO: 37477 - RNA, 19 nt, synthetic construct
  misc_feature 1..19: note = siRNA antisense sequence
  source 1..19: mol_type = other RNA
tgtccttgactaggttaaa

SEQ ID NO: 37478 - RNA, 19 nt, synthetic construct
  misc_feature 1..19: note = siRNA sense sequence
  source 1..19: mol_type = other RNA
ttaacctagtcaaggacat

SEQ ID NO: 37479 - RNA, 19 nt, synthetic construct
  misc_feature 1..19: note = siRNA antisense sequence
  source 1..19: mol_type = other RNA
atgtccttgactaggttaa

SEQ ID NO: 37480 - RNA, 19 nt, synthetic construct
  misc_feature 1..19: note = siRNA sense sequence
  source 1..19: mol_type = other RNA
taacctagtcaaggacata

SEQ ID NO: 37481 - RNA, 19 nt, synthetic construct
  misc_feature 1..19: note = siRNA antisense sequence
  source 1..19: mol_type = other RNA
tatgtccttgactaggtta

SEQ ID NO: 37482 - RNA, 19 nt, synthetic construct
  misc_feature 1..19: note = siRNA sense sequence
  source 1..19: mol_type = other RNA
aacctagtcaaggacatac

SEQ ID NO: 37483 - RNA, 19 nt, synthetic construct
  misc_feature 1..19: note = siRNA antisense sequence
  source 1..19: mol_type = other RNA
gtatgtccttgactaggtt

SEQ ID NO: 37484 - RNA, 19 nt, synthetic construct
  misc_feature 1..19: note = siRNA sense sequence
  source 1..19: mol_type = other RNA
tagtcaaggacatacatga

SEQ ID NO: 37485 - RNA, 19 nt, synthetic construct
  misc_feature 1..19: note = siRNA antisense sequence
  source 1..19: mol_type = other RNA
tcatgtatgtccttgacta

SEQ ID NO: 37486 - RNA, 19 nt, synthetic construct
  misc_feature 1..19: note = siRNA sense sequence
  source 1..19: mol_type = other RNA
agtcaaggacatacatgaa

SEQ ID NO: 37487 - RNA, 19 nt, synthetic construct
  misc_feature 1..19: note = siRNA antisense sequence
  source 1..19: mol_type = other RNA
ttcatgtatgtccttgact

SEQ ID NO: 37488 - RNA, 19 nt, synthetic construct
  misc_feature 1..19: note = siRNA sense sequence
  source 1..19: mol_type = other RNA
aaccagtgcagaatagact

SEQ ID NO: 37489 - RNA, 19 nt, synthetic construct
  misc_feature 1..19: note = siRNA antisense sequence
  source 1..19: mol_type = other RNA
agtctattctgcactggtt

SEQ ID NO: 37490 - RNA, 19 nt, synthetic construct
  misc_feature 1..19: note = siRNA sense sequence
  source 1..19: mol_type = other RNA
accagtgcagaatagacta

SEQ ID NO: 37491 - RNA, 19 nt, synthetic construct
  misc_feature 1..19: note = siRNA antisense sequence
  source 1..19: mol_type = other RNA
tagtctattctgcactggt

SEQ ID NO: 37492 - RNA, 19 nt, synthetic construct
  misc_feature 1..19: note = siRNA sense sequence
  source 1..19: mol_type = other RNA
ccagtgcagaatagactat

SEQ ID NO: 37493 - RNA, 19 nt, synthetic construct
  misc_feature 1..19: note = siRNA antisense sequence
  source 1..19: mol_type = other RNA
atagtctattctgcactgg

SEQ ID NO: 37494 - RNA, 19 nt, synthetic construct
  misc_feature 1..19: note = siRNA sense sequence
  source 1..19: mol_type = other RNA
cagtgcagaatagactata

SEQ ID NO: 37495 - RNA, 19 nt, synthetic construct
  misc_feature 1..19: note = siRNA antisense sequence
  source 1..19: mol_type = other RNA
tatagtctattctgcactg

SEQ ID NO: 37496 - RNA, 19 nt, synthetic construct
  misc_feature 1..19: note = siRNA sense sequence
  source 1..19: mol_type = other RNA
agtgcagaatagactataa

SEQ ID NO: 37497 - RNA, 19 nt, synthetic construct
  misc_feature 1..19: note = siRNA antisense sequence
  source 1..19: mol_type = other RNA
ttatagtctattctgcact

SEQ ID NO: 37498 - RNA, 19 nt, synthetic construct
  misc_feature 1..19: note = siRNA sense sequence
  source 1..19: mol_type = other RNA
gtgcagaatagactataaa

SEQ ID NO: 37499 - RNA, 19 nt, synthetic construct
  misc_feature 1..19: note = siRNA antisense sequence
  source 1..19: mol_type = other RNA
tttatagtctattctgcac

SEQ ID NO: 37500 - RNA, 19 nt, synthetic construct
  misc_feature 1..19: note = siRNA sense sequence
  source 1..19: mol_type = other RNA
agactataaattcaatggg

SEQ ID NO: 37501 - RNA, 19 nt, synthetic construct
  misc_feature 1..19: note = siRNA antisense sequence
  source 1..19: mol_type = other RNA
cccattgaatttatagtct

SEQ ID NO: 37502 - RNA, 19 nt, synthetic construct
  misc_feature 1..19: note = siRNA sense sequence
  source 1..19: mol_type = other RNA
gactataaattcaatggga

SEQ ID NO: 37503 - RNA, 19 nt, synthetic construct
  misc_feature 1..19: note = siRNA antisense sequence
  source 1..19: mol_type = other RNA
tcccattgaatttatagtc

SEQ ID NO: 37504 - RNA, 19 nt, synthetic construct
  misc_feature 1..19: note = siRNA sense sequence
  source 1..19: mol_type = other RNA
agatgattcttggttcttg

SEQ ID NO: 37505 - RNA, 19 nt, synthetic construct
  misc_feature 1..19: note = siRNA antisense sequence
  source 1..19: mol_type = other RNA
caagaaccaagaatcatct

SEQ ID NO: 37506 - RNA, 19 nt, synthetic construct
  misc_feature 1..19: note = siRNA sense sequence
  source 1..19: mol_type = other RNA
gatgattcttggttcttga

SEQ ID NO: 37507 - RNA, 19 nt, synthetic construct
  misc_feature 1..19: note = siRNA antisense sequence
  source 1..19: mol_type = other RNA
tcaagaaccaagaatcatc

SEQ ID NO: 37508 - RNA, 19 nt, synthetic construct
  misc_feature 1..19: note = siRNA sense sequence
  source 1..19: mol_type = other RNA
atgattcttggttcttgac

SEQ ID NO: 37509 - RNA, 19 nt, synthetic construct
  misc_feature 1..19: note = siRNA antisense sequence
  source 1..19: mol_type = other RNA
gtcaagaaccaagaatcat

SEQ ID NO: 37510 - RNA, 19 nt, synthetic construct
  misc_feature 1..19: note = siRNA sense sequence
  source 1..19: mol_type = other RNA
tgattcttggttcttgacc

SEQ ID NO: 37511 - RNA, 19 nt, synthetic construct
  misc_feature 1..19: note = siRNA antisense sequence
  source 1..19: mol_type = other RNA
ggtcaagaaccaagaatca

SEQ ID NO: 37512 - RNA, 19 nt, synthetic construct
  misc_feature 1..19: note = siRNA sense sequence
  source 1..19: mol_type = other RNA
tcttggttcttgacctaag

SEQ ID NO: 37513 - RNA, 19 nt, synthetic construct
  misc_feature 1..19: note = siRNA antisense sequence
  source 1..19: mol_type = other RNA
cttaggtcaagaaccaaga

SEQ ID NO: 37514 - RNA, 19 nt, synthetic construct
  misc_feature 1..19: note = siRNA sense sequence
  source 1..19: mol_type = other RNA
cttggttcttgacctaagt

SEQ ID NO: 37515 - RNA, 19 nt, synthetic construct
  misc_feature 1..19: note = siRNA antisense sequence
  source 1..19: mol_type = other RNA
acttaggtcaagaaccaag

SEQ ID NO: 37516 - RNA, 19 nt, synthetic construct
  misc_feature 1..19: note = siRNA sense sequence
  source 1..19: mol_type = other RNA
ttggttcttgacctaagtc

SEQ ID NO: 37517 - RNA, 19 nt, synthetic construct
  misc_feature 1..19: note = siRNA antisense sequence
  source 1..19: mol_type = other RNA
gacttaggtcaagaaccaa

SEQ ID NO: 37518 - RNA, 19 nt, synthetic construct
  misc_feature 1..19: note = siRNA sense sequence
  source 1..19: mol_type = other RNA
ggttcttgacctaagtctt

SEQ ID NO: 37519 - RNA, 19 nt, synthetic construct
  misc_feature 1..19: note = siRNA antisense sequence
  source 1..19: mol_type = other RNA
aagacttaggtcaagaacc

SEQ ID NO: 37520 - RNA, 19 nt, synthetic construct
  misc_feature 1..19: note = siRNA sense sequence
  source 1..19: mol_type = other RNA
gttcttgacctaagtcttg

SEQ ID NO: 37521 - RNA, 19 nt, synthetic construct
  misc_feature 1..19: note = siRNA antisense sequence
  source 1..19: mol_type = other RNA
caagacttaggtcaagaac

SEQ ID NO: 37522 - RNA, 19 nt, synthetic construct
  misc_feature 1..19: note = siRNA sense sequence
  source 1..19: mol_type = other RNA
ttcttgacctaagtcttga

SEQ ID NO: 37523 - RNA, 19 nt, synthetic construct
  misc_feature 1..19: note = siRNA antisense sequence
  source 1..19: mol_type = other RNA
tcaagacttaggtcaagaa

SEQ ID NO: 37524 - RNA, 19 nt, synthetic construct
  misc_feature 1..19: note = siRNA sense sequence
  source 1..19: mol_type = other RNA
aaaatgtcactccaagctt

SEQ ID NO: 37525 - RNA, 19 nt, synthetic construct
  misc_feature 1..19: note = siRNA antisense sequence
  source 1..19: mol_type = other RNA
aagcttggagtgacatttt

SEQ ID NO: 37526 - RNA, 19 nt, synthetic construct
  misc_feature 1..19: note = siRNA sense sequence
  source 1..19: mol_type = other RNA
aaatgtcactccaagcttg

SEQ ID NO: 37527 - RNA, 19 nt, synthetic construct
  misc_feature 1..19: note = siRNA antisense sequence
  source 1..19: mol_type = other RNA
caagcttggagtgacattt

SEQ ID NO: 37528 - RNA, 19 nt, synthetic construct
  misc_feature 1..19: note = siRNA sense sequence
  source 1..19: mol_type = other RNA
aatgtcactccaagcttgg

SEQ ID NO: 37529 - RNA, 19 nt, synthetic construct
  misc_feature 1..19: note = siRNA antisense sequence
  source 1..19: mol_type = other RNA
ccaagcttggagtgacatt

SEQ ID NO: 37530 - RNA, 19 nt, synthetic construct
  misc_feature 1..19: note = siRNA sense sequence
  source 1..19: mol_type = other RNA
tgtcactccaagcttggga

SEQ ID NO: 37531 - RNA, 19 nt, synthetic construct
  misc_feature 1..19: note = siRNA antisense sequence
  source 1..19: mol_type = other RNA
tcccaagcttggagtgaca

SEQ ID NO: 37532 - RNA, 19 nt, synthetic construct
  misc_feature 1..19: note = siRNA sense sequence
  source 1..19: mol_type = other RNA
gtcactccaagcttgggaa

SEQ ID NO: 37533 - RNA, 19 nt, synthetic construct
  misc_feature 1..19: note = siRNA antisense sequence
  source 1..19: mol_type = other RNA
ttcccaagcttggagtgac

SEQ ID NO: 37534 - RNA, 19 nt, synthetic construct
  misc_feature 1..19: note = siRNA sense sequence
  source 1..19: mol_type = other RNA
tcactccaagcttgggaag

SEQ ID NO: 37535 - RNA, 19 nt, synthetic construct
  misc_feature 1..19: note = siRNA antisense sequence
  source 1..19: mol_type = other RNA
cttcccaagcttggagtga

SEQ ID NO: 37536 - RNA, 19 nt, synthetic construct
  misc_feature 1..19: note = siRNA sense sequence
  source 1..19: mol_type = other RNA
aataagtgaggtgagtgtg

SEQ ID NO: 37537 - RNA, 19 nt, synthetic construct
  misc_feature 1..19: note = siRNA antisense sequence
  source 1..19: mol_type = other RNA
cacactcacctcacttatt

SEQ ID NO: 37538 - RNA, 19 nt, synthetic construct
  misc_feature 1..19: note = siRNA sense sequence
  source 1..19: mol_type = other RNA
agtgaggtgagtgtgttgg

SEQ ID NO: 37539 - RNA, 19 nt, synthetic construct
  misc_feature 1..19: note = siRNA antisense sequence
  source 1..19: mol_type = other RNA
ccaacacactcacctcact

SEQ ID NO: 37540 - RNA, 19 nt, synthetic construct
  misc_feature 1..19: note = siRNA sense sequence
  source 1..19: mol_type = other RNA
gtgaggtgagtgtgttggt

SEQ ID NO: 37541 - RNA, 19 nt, synthetic construct
  misc_feature 1..19: note = siRNA antisense sequence
  source 1..19: mol_type = other RNA
accaacacactcacctcac

SEQ ID NO: 37542 - RNA, 19 nt, synthetic construct
  misc_feature 1..19: note = siRNA sense sequence
  source 1..19: mol_type = other RNA
tgaggtgagtgtgttggta

SEQ ID NO: 37543 - RNA, 19 nt, synthetic construct
  misc_feature 1..19: note = siRNA antisense sequence
  source 1..19: mol_type = other RNA
taccaacacactcacctca

SEQ ID NO: 37544 - RNA, 19 nt, synthetic construct
  misc_feature 1..19: note = siRNA sense sequence
  source 1..19: mol_type = other RNA
gaggtgagtgtgttggtaa

SEQ ID NO: 37545 - RNA, 19 nt, synthetic construct
  misc_feature 1..19: note = siRNA antisense sequence
  source 1..19: mol_type = other RNA
ttaccaacacactcacctc

SEQ ID NO: 37546 - RNA, 19 nt, synthetic construct
  misc_feature 1..19: note = siRNA sense sequence
  source 1..19: mol_type = other RNA
aggtgagtgtgttggtaag

SEQ ID NO: 37547 - RNA, 19 nt, synthetic construct
  misc_feature 1..19: note = siRNA antisense sequence
  source 1..19: mol_type = other RNA
cttaccaacacactcacct

SEQ ID NO: 37548 - RNA, 19 nt, synthetic construct
  misc_feature 1..19: note = siRNA sense sequence
  source 1..19: mol_type = other RNA
gtgagtgtgttggtaagta

SEQ ID NO: 37549 - RNA, 19 nt, synthetic construct
  misc_feature 1..19: note = siRNA antisense sequence
  source 1..19: mol_type = other RNA
tacttaccaacacactcac

SEQ ID NO: 37550 - RNA, 19 nt, synthetic construct
  misc_feature 1..19: note = siRNA sense sequence
  source 1..19: mol_type = other RNA
gagtgtgttggtaagtaaa

SEQ ID NO: 37551 - RNA, 19 nt, synthetic construct
  misc_feature 1..19: note = siRNA antisense sequence
  source 1..19: mol_type = other RNA
tttacttaccaacacactc

SEQ ID NO: 37552 - RNA, 19 nt, synthetic construct
  misc_feature 1..19: note = siRNA sense sequence
  source 1..19: mol_type = other RNA
acaggtctcatattgggat

SEQ ID NO: 37553 - RNA, 19 nt, synthetic construct
  misc_feature 1..19: note = siRNA antisense sequence
  source 1..19: mol_type = other RNA
atcccaatatgagacctgt

SEQ ID NO: 37554 - RNA, 19 nt, synthetic construct
  misc_feature 1..19: note = siRNA sense sequence
  source 1..19: mol_type = other RNA
caggtctcatattgggatg

SEQ ID NO: 37555 - RNA, 19 nt, synthetic construct
  misc_feature 1..19: note = siRNA antisense sequence
  source 1..19: mol_type = other RNA
catcccaatatgagacctg

SEQ ID NO: 37556 - RNA, 19 nt, synthetic construct
  misc_feature 1..19: note = siRNA sense sequence
  source 1..19: mol_type = other RNA
aaaggatgatggcagatct

SEQ ID NO: 37557 - RNA, 19 nt, synthetic construct
  misc_feature 1..19: note = siRNA antisense sequence
  source 1..19: mol_type = other RNA
agatctgccatcatccttt

SEQ ID NO: 37558 - RNA, 19 nt, synthetic construct
  misc_feature 1..19: note = siRNA sense sequence
  source 1..19: mol_type = other RNA
aaggatgatggcagatctt

SEQ ID NO: 37559 - RNA, 19 nt, synthetic construct
  misc_feature 1..19: note = siRNA antisense sequence
  source 1..19: mol_type = other RNA
aagatctgccatcatcctt

SEQ ID NO: 37560 - RNA, 19 nt, synthetic construct
  misc_feature 1..19: note = siRNA sense sequence
  source 1..19: mol_type = other RNA
aggatgatggcagatcttg

SEQ ID NO: 37561 - RNA, 19 nt, synthetic construct
  misc_feature 1..19: note = siRNA antisense sequence
  source 1..19: mol_type = other RNA
caagatctgccatcatcct

SEQ ID NO: 37562 - RNA, 19 nt, synthetic construct
  misc_feature 1..19: note = siRNA sense sequence
  source 1..19: mol_type = other RNA
ggatgatggcagatcttga

SEQ ID NO: 37563 - RNA, 19 nt, synthetic construct
  misc_feature 1..19: note = siRNA antisense sequence
  source 1..19: mol_type = other RNA
tcaagatctgccatcatcc

SEQ ID NO: 37564 - RNA, 19 nt, synthetic construct
  misc_feature 1..19: note = siRNA sense sequence
  source 1..19: mol_type = other RNA
gatgatggcagatcttgaa

SEQ ID NO: 37565 - RNA, 19 nt, synthetic construct
  misc_feature 1..19: note = siRNA antisense sequence
  source 1..19: mol_type = other RNA
ttcaagatctgccatcatc

SEQ ID NO: 37566 - RNA, 19 nt, synthetic construct
  misc_feature 1..19: note = siRNA sense sequence
  source 1..19: mol_type = other RNA
cacaggagcttggacctaa

SEQ ID NO: 37567 - RNA, 19 nt, synthetic construct
  misc_feature 1..19: note = siRNA antisense sequence
  source 1..19: mol_type = other RNA
ttaggtccaagctcctgtg

SEQ ID NO: 37568 - RNA, 19 nt, synthetic construct
  misc_feature 1..19: note = siRNA sense sequence
  source 1..19: mol_type = other RNA
acaggagcttggacctaag

SEQ ID NO: 37569 - RNA, 19 nt, synthetic construct
  misc_feature 1..19: note = siRNA antisense sequence
  source 1..19: mol_type = other RNA
cttaggtccaagctcctgt

SEQ ID NO: 37570 - RNA, 19 nt, synthetic construct
  misc_feature 1..19: note = siRNA sense sequence
  source 1..19: mol_type = other RNA
caggagcttggacctaaga

SEQ ID NO: 37571 - RNA, 19 nt, synthetic construct
  misc_feature 1..19: note = siRNA antisense sequence
  source 1..19: mol_type = other RNA
tcttaggtccaagctcctg

SEQ ID NO: 37572 - RNA, 19 nt, synthetic construct
  misc_feature 1..19: note = siRNA sense sequence
  source 1..19: mol_type = other RNA
agcttggacctaagatgag

SEQ ID NO: 37573 - RNA, 19 nt, synthetic construct
  misc_feature 1..19: note = siRNA antisense sequence
  source 1..19: mol_type = other RNA
ctcatcttaggtccaagct

SEQ ID NO: 37574 - RNA, 19 nt, synthetic construct
  misc_feature 1..19: note = siRNA sense sequence
  source 1..19: mol_type = other RNA
gcttggacctaagatgagg

SEQ ID NO: 37575 - RNA, 19 nt, synthetic construct
  misc_feature 1..19: note = siRNA antisense sequence
  source 1..19: mol_type = other RNA
cctcatcttaggtccaagc

SEQ ID NO: 37576 - RNA, 19 nt, synthetic construct
  misc_feature 1..19: note = siRNA sense sequence
  source 1..19: mol_type = other RNA
cttggacctaagatgagga

SEQ ID NO: 37577 - RNA, 19 nt, synthetic construct
  misc_feature 1..19: note = siRNA antisense sequence
  source 1..19: mol_type = other RNA
tcctcatcttaggtccaag

SEQ ID NO: 37578 - RNA, 19 nt, synthetic construct
  misc_feature 1..19: note = siRNA sense sequence
  source 1..19: mol_type = other RNA
ttggacctaagatgaggac

SEQ ID NO: 37579 - RNA, 19 nt, synthetic construct
  misc_feature 1..19: note = siRNA antisense sequence
  source 1..19: mol_type = other RNA
gtcctcatcttaggtccaa

SEQ ID NO: 37580 - RNA, 19 nt, synthetic construct
  misc_feature 1..19: note = siRNA sense sequence
  source 1..19: mol_type = other RNA
tggacctaagatgaggacg

SEQ ID NO: 37581 - RNA, 19 nt, synthetic construct
  misc_feature 1..19: note = siRNA antisense sequence
  source 1..19: mol_type = other RNA
cgtcctcatcttaggtcca

SEQ ID NO: 37582 - RNA, 19 nt, synthetic construct
  misc_feature 1..19: note = siRNA sense sequence
  source 1..19: mol_type = other RNA
ggacctaagatgaggacgt

SEQ ID NO: 37583 - RNA, 19 nt, synthetic construct
  misc_feature 1..19: note = siRNA antisense sequence
  source 1..19: mol_type = other RNA
acgtcctcatcttaggtcc

SEQ ID NO: 37584 - RNA, 19 nt, synthetic construct
  misc_feature 1..19: note = siRNA sense sequence
  source 1..19: mol_type = other RNA
gacctaagatgaggacgtt

SEQ ID NO: 37585 - RNA, 19 nt, synthetic construct
  misc_feature 1..19: note = siRNA antisense sequence
  source 1..19: mol_type = other RNA
aacgtcctcatcttaggtc

SEQ ID NO: 37586 - RNA, 19 nt, synthetic construct
  misc_feature 1..19: note = siRNA sense sequence
  source 1..19: mol_type = other RNA
acctaagatgaggacgttg

SEQ ID NO: 37587 - RNA, 19 nt, synthetic construct
  misc_feature 1..19: note = siRNA antisense sequence
  source 1..19: mol_type = other RNA
caacgtcctcatcttaggt

SEQ ID NO: 37588 - RNA, 19 nt, synthetic construct
  misc_feature 1..19: note = siRNA sense sequence
  source 1..19: mol_type = other RNA
cctaagatgaggacgttga

SEQ ID NO: 37589 - RNA, 19 nt, synthetic construct
  misc_feature 1..19: note = siRNA antisense sequence
  source 1..19: mol_type = other RNA
tcaacgtcctcatcttagg

SEQ ID NO: 37590 - RNA, 19 nt, synthetic construct
  misc_feature 1..19: note = siRNA sense sequence
  source 1..19: mol_type = other RNA
ctaagatgaggacgttgag

SEQ ID NO: 37591 - RNA, 19 nt, synthetic construct
  misc_feature 1..19: note = siRNA antisense sequence
  source 1..19: mol_type = other RNA
ctcaacgtcctcatcttag

SEQ ID NO: 37592 - RNA, 19 nt, synthetic construct
  misc_feature 1..19: note = siRNA sense sequence
  source 1..19: mol_type = other RNA
agaagccatcataagttgt

SEQ ID NO: 37593 - RNA, 19 nt, synthetic construct
  misc_feature 1..19: note = siRNA antisense sequence
  source 1..19: mol_type = other RNA
acaacttatgatggcttct

SEQ ID NO: 37594 - RNA, 19 nt, synthetic construct
  misc_feature 1..19: note = siRNA sense sequence
  source 1..19: mol_type = other RNA
gaagccatcataagttgtc

SEQ ID NO: 37595 - RNA, 19 nt, synthetic construct
  misc_feature 1..19: note = siRNA antisense sequence
  source 1..19: mol_type = other RNA
gacaacttatgatggcttc

SEQ ID NO: 37596 - RNA, 19 nt, synthetic construct
  misc_feature 1..19: note = siRNA sense sequence
  source 1..19: mol_type = other RNA
aagccatcataagttgtca

SEQ ID NO: 37597 - RNA, 19 nt, synthetic construct
  misc_feature 1..19: note = siRNA antisense sequence
  source 1..19: mol_type = other RNA
tgacaacttatgatggctt

SEQ ID NO: 37598 - RNA, 19 nt, synthetic construct
  misc_feature 1..19: note = siRNA sense sequence
  source 1..19: mol_type = other RNA
catataaattggattggag

SEQ ID NO: 37599 - RNA, 19 nt, synthetic construct
  misc_feature 1..19: note = siRNA antisense sequence
  source 1..19: mol_type = other RNA
ctccaatccaatttatatg

SEQ ID NO: 37600 - RNA, 19 nt, synthetic construct
  misc_feature 1..19: note = siRNA sense sequence
  source 1..19: mol_type = other RNA
ctataatctggtacttaag

SEQ ID NO: 37601 - RNA, 19 nt, synthetic construct
  misc_feature 1..19: note = siRNA antisense sequence
  source 1..19: mol_type = other RNA
cttaagtaccagattatag

SEQ ID NO: 37602 - RNA, 19 nt, synthetic construct
  misc_feature 1..19: note = siRNA sense sequence
  source 1..19: mol_type = other RNA
tataatctggtacttaagg

SEQ ID NO: 37603 - RNA, 19 nt, synthetic construct
  misc_feature 1..19: note = siRNA antisense sequence
  source 1..19: mol_type = other RNA
ccttaagtaccagattata

SEQ ID NO: 37604 - RNA, 19 nt, synthetic construct
  misc_feature 1..19: note = siRNA sense sequence
  source 1..19: mol_type = other RNA
ataatctggtacttaaggg

SEQ ID NO: 37605 - RNA, 19 nt, synthetic construct
  misc_feature 1..19: note = siRNA antisense sequence
  source 1..19: mol_type = other RNA
cccttaagtaccagattat

SEQ ID NO: 37606 - RNA, 19 nt, synthetic construct
  misc_feature 1..19: note = siRNA sense sequence
  source 1..19: mol_type = other RNA
ctggtacttaagggatgag

SEQ ID NO: 37607 - RNA, 19 nt, synthetic construct
  misc_feature 1..19: note = siRNA antisense sequence
  source 1..19: mol_type = other RNA
ctcatcccttaagtaccag

SEQ ID NO: 37608 - RNA, 19 nt, synthetic construct
  misc_feature 1..19: note = siRNA sense sequence
  source 1..19: mol_type = other RNA
gccttcaggctgtattagg

SEQ ID NO: 37609 - RNA, 19 nt, synthetic construct
  misc_feature 1..19: note = siRNA antisense sequence
  source 1..19: mol_type = other RNA
cctaatacagcctgaaggc

SEQ ID NO: 37610 - RNA, 19 nt, synthetic construct
  misc_feature 1..19: note = siRNA sense sequence
  source 1..19: mol_type = other RNA
ccttcaggctgtattaggg

SEQ ID NO: 37611 - RNA, 19 nt, synthetic construct
  misc_feature 1..19: note = siRNA antisense sequence
  source 1..19: mol_type = other RNA
ccctaatacagcctgaagg

SEQ ID NO: 37612 - RNA, 19 nt, synthetic construct
  misc_feature 1..19: note = siRNA sense sequence
  source 1..19: mol_type = other RNA
caagatgaatcagtaaatc

SEQ ID NO: 37613 - RNA, 19 nt, synthetic construct
  misc_feature 1..19: note = siRNA antisense sequence
  source 1..19: mol_type = other RNA
gatttactgattcatcttg

SEQ ID NO: 37614 - RNA, 19 nt, synthetic construct
  misc_feature 1..19: note = siRNA sense sequence
  source 1..19: mol_type = other RNA
gatgaatcagtaaatcttg

SEQ ID NO: 37615 - RNA, 19 nt, synthetic construct
  misc_feature 1..19: note = siRNA antisense sequence
  source 1..19: mol_type = other RNA
caagatttactgattcatc

SEQ ID NO: 37616 - RNA, 19 nt, synthetic construct
  misc_feature 1..19: note = siRNA sense sequence
  source 1..19: mol_type = other RNA
atgaatcagtaaatcttgg

SEQ ID NO: 37617 - RNA, 19 nt, synthetic construct
  misc_feature 1..19: note = siRNA antisense sequence
  source 1..19: mol_type = other RNA
ccaagatttactgattcat

SEQ ID NO: 37618 - RNA, 19 nt, synthetic construct
  misc_feature 1..19: note = siRNA sense sequence
  source 1..19: mol_type = other RNA
gaatcagtaaatcttggtg

SEQ ID NO: 37619 - RNA, 19 nt, synthetic construct
  misc_feature 1..19: note = siRNA antisense sequence
  source 1..19: mol_type = other RNA
caccaagatttactgattc

SEQ ID NO: 37620 - RNA, 19 nt, synthetic construct
  misc_feature 1..19: note = siRNA sense sequence
  source 1..19: mol_type = other RNA
aatcagtaaatcttggtgg

SEQ ID NO: 37621 - RNA, 19 nt, synthetic construct
  misc_feature 1..19: note = siRNA antisense sequence
  source 1..19: mol_type = other RNA
ccaccaagatttactgatt

SEQ ID NO: 37622 - RNA, 19 nt, synthetic construct
  misc_feature 1..19: note = siRNA sense sequence
  source 1..19: mol_type = other RNA
cagtaaatcttggtggaag

SEQ ID NO: 37623 - RNA, 19 nt, synthetic construct
  misc_feature 1..19: note = siRNA antisense sequence
  source 1..19: mol_type = other RNA
cttccaccaagatttactg

SEQ ID NO: 37624 - RNA, 19 nt, synthetic construct
  misc_feature 1..19: note = siRNA sense sequence
  source 1..19: mol_type = other RNA
agtaaatcttggtggaagt

SEQ ID NO: 37625 - RNA, 19 nt, synthetic construct
  misc_feature 1..19: note = siRNA antisense sequence
  source 1..19: mol_type = other RNA
acttccaccaagatttact

SEQ ID NO: 37626 - RNA, 19 nt, synthetic construct
  misc_feature 1..19: note = siRNA sense sequence
  source 1..19: mol_type = other RNA
gtaaatcttggtggaagtt

SEQ ID NO: 37627 - RNA, 19 nt, synthetic construct
  misc_feature 1..19: note = siRNA antisense sequence
  source 1..19: mol_type = other RNA
aacttccaccaagatttac

SEQ ID NO: 37628 - RNA, 19 nt, synthetic construct
  misc_feature 1..19: note = siRNA sense sequence
  source 1..19: mol_type = other RNA
aaatcttggtggaagtttg

SEQ ID NO: 37629 - RNA, 19 nt, synthetic construct
  misc_feature 1..19: note = siRNA antisense sequence
  source 1..19: mol_type = other RNA
caaacttccaccaagattt

SEQ ID NO: 37630 - RNA, 19 nt, synthetic construct
  misc_feature 1..19: note = siRNA sense sequence
  source 1..19: mol_type = other RNA
aatcttggtggaagtttgg

SEQ ID NO: 37631 - RNA, 19 nt, synthetic construct
  misc_feature 1..19: note = siRNA antisense sequence
  source 1..19: mol_type = other RNA
ccaaacttccaccaagatt

SEQ ID NO: 37632 - RNA, 19 nt, synthetic construct
  misc_feature 1..19: note = siRNA sense sequence
  source 1..19: mol_type = other RNA
atcttggtggaagtttgga

SEQ ID NO: 37633 - RNA, 19 nt, synthetic construct
  misc_feature 1..19: note = siRNA antisense sequence
  source 1..19: mol_type = other RNA
tccaaacttccaccaagat

SEQ ID NO: 37634 - RNA, 19 nt, synthetic construct
  misc_feature 1..19: note = siRNA sense sequence
  source 1..19: mol_type = other RNA
tcttggtggaagtttggaa

SEQ ID NO: 37635 - RNA, 19 nt, synthetic construct
  misc_feature 1..19: note = siRNA antisense sequence
  source 1..19: mol_type = other RNA
ttccaaacttccaccaaga

SEQ ID NO: 37636 - RNA, 19 nt, synthetic construct
  misc_feature 1..19: note = siRNA sense sequence
  source 1..19: mol_type = other RNA
aaatggtcaatgaaggtgt

SEQ ID NO: 37637 - RNA, 19 nt, synthetic construct
  misc_feature 1..19: note = siRNA antisense sequence
  source 1..19: mol_type = other RNA
acaccttcattgaccattt

SEQ ID NO: 37638 - RNA, 19 nt, synthetic construct
  misc_feature 1..19: note = siRNA sense sequence
  source 1..19: mol_type = other RNA
aatggtcaatgaaggtgta

SEQ ID NO: 37639 - RNA, 19 nt, synthetic construct
  misc_feature 1..19: note = siRNA antisense sequence
  source 1..19: mol_type = other RNA
tacaccttcattgaccatt

SEQ ID NO: 37640 - RNA, 19 nt, synthetic construct
  misc_feature 1..19: note = siRNA sense sequence
  source 1..19: mol_type = other RNA
atggtcaatgaaggtgtag

SEQ ID NO: 37641 - RNA, 19 nt, synthetic construct
  misc_feature 1..19: note = siRNA antisense sequence
  source 1..19: mol_type = other RNA
ctacaccttcattgaccat

SEQ ID NO: 37642 - RNA, 19 nt, synthetic construct
  misc_feature 1..19: note = siRNA sense sequence
  source 1..19: mol_type = other RNA
tggtcaatgaaggtgtagg

SEQ ID NO: 37643 - RNA, 19 nt, synthetic construct
  misc_feature 1..19: note = siRNA antisense sequence
  source 1..19: mol_type = other RNA
cctacaccttcattgacca

SEQ ID NO: 37644 - RNA, 19 nt, synthetic construct
  misc_feature 1..19: note = siRNA sense sequence
  source 1..19: mol_type = other RNA
agaggtcagatagattcca

SEQ ID NO: 37645 - RNA, 19 nt, synthetic construct
  misc_feature 1..19: note = siRNA antisense sequence
  source 1..19: mol_type = other RNA
tggaatctatctgacctct

SEQ ID NO: 37646 - RNA, 19 nt, synthetic construct
  misc_feature 1..19: note = siRNA sense sequence
  source 1..19: mol_type = other RNA
gtcagatagattccaaaat

SEQ ID NO: 37647 - RNA, 19 nt, synthetic construct
  misc_feature 1..19: note = siRNA antisense sequence
  source 1..19: mol_type = other RNA
attttggaatctatctgac

SEQ ID NO: 37648 - RNA, 19 nt, synthetic construct
  misc_feature 1..19: note = siRNA sense sequence
  source 1..19: mol_type = other RNA
gattccaaaatttctgtac

SEQ ID NO: 37649 - RNA, 19 nt, synthetic construct
  misc_feature 1..19: note = siRNA antisense sequence
  source 1..19: mol_type = other RNA
gtacagaaattttggaatc

SEQ ID NO: 37650 - RNA, 19 nt, synthetic construct
  misc_feature 1..19: note = siRNA sense sequence
  source 1..19: mol_type = other RNA
ttccaaaatttctgtactg

SEQ ID NO: 37651 - RNA, 19 nt, synthetic construct
  misc_feature 1..19: note = siRNA antisense sequence
  source 1..19: mol_type = other RNA
cagtacagaaattttggaa

SEQ ID NO: 37652 - RNA, 19 nt, synthetic construct
  misc_feature 1..19: note = siRNA sense sequence
  source 1..19: mol_type = other RNA
tccaaaatttctgtactgg

SEQ ID NO: 37653 - RNA, 19 nt, synthetic construct
  misc_feature 1..19: note = siRNA antisense sequence
  source 1..19: mol_type = other RNA
ccagtacagaaattttgga

SEQ ID NO: 37654 - RNA, 19 nt, synthetic construct
  misc_feature 1..19: note = siRNA sense sequence
  source 1..19: mol_type = other RNA
ccaaaatttctgtactggc

SEQ ID NO: 37655 - RNA, 19 nt, synthetic construct
  misc_feature 1..19: note = siRNA antisense sequence
  source 1..19: mol_type = other RNA
gccagtacagaaattttgg

SEQ ID NO: 37656 - RNA, 19 nt, synthetic construct
  misc_feature 1..19: note = siRNA sense sequence
  source 1..19: mol_type = other RNA
caaaatttctgtactggct

SEQ ID NO: 37657 - RNA, 19 nt, synthetic construct
  misc_feature 1..19: note = siRNA antisense sequence
  source 1..19: mol_type = other RNA
agccagtacagaaattttg

SEQ ID NO: 37658 - RNA, 19 nt, synthetic construct
  misc_feature 1..19: note = siRNA sense sequence
  source 1..19: mol_type = other RNA
aaaatttctgtactggctc

SEQ ID NO: 37659 - RNA, 19 nt, synthetic construct
  misc_feature 1..19: note = siRNA antisense sequence
  source 1..19: mol_type = other RNA
gagccagtacagaaatttt

SEQ ID NO: 37660 - RNA, 19 nt, synthetic construct
  misc_feature 1..19: note = siRNA sense sequence
  source 1..19: mol_type = other RNA
aaatttctgtactggctca

SEQ ID NO: 37661 - RNA, 19 nt, synthetic construct
  misc_feature 1..19: note = siRNA antisense sequence
  source 1..19: mol_type = other RNA
tgagccagtacagaaattt

SEQ ID NO: 37662 - RNA, 19 nt, synthetic construct
  misc_feature 1..19: note = siRNA sense sequence
  source 1..19: mol_type = other RNA
aatttctgtactggctcat

SEQ ID NO: 37663 - RNA, 19 nt, synthetic construct
  misc_feature 1..19: note = siRNA antisense sequence
  source 1..19: mol_type = other RNA
atgagccagtacagaaatt

SEQ ID NO: 37664 - RNA, 19 nt, synthetic construct
  misc_feature 1..19: note = siRNA sense sequence
  source 1..19: mol_type = other RNA
ctgtactggctcattggga

SEQ ID NO: 37665 - RNA, 19 nt, synthetic construct
  misc_feature 1..19: note = siRNA antisense sequence
  source 1..19: mol_type = other RNA
tcccaatgagccagtacag

SEQ ID NO: 37666 - RNA, 19 nt, synthetic construct
  misc_feature 1..19: note = siRNA sense sequence
  source 1..19: mol_type = other RNA
tgtactggctcattgggaa

SEQ ID NO: 37667 - RNA, 19 nt, synthetic construct
  misc_feature 1..19: note = siRNA antisense sequence
  source 1..19: mol_type = other RNA
ttcccaatgagccagtaca

SEQ ID NO: 37668 - RNA, 19 nt, synthetic construct
  misc_feature 1..19: note = siRNA sense sequence
  source 1..19: mol_type = other RNA
gaagtgggtaagtctattt

SEQ ID NO: 37669 - RNA, 19 nt, synthetic construct
  misc_feature 1..19: note = siRNA antisense sequence
  source 1..19: mol_type = other RNA
aaatagacttacccacttc

SEQ ID NO: 37670 - RNA, 19 nt, synthetic construct
  misc_feature 1..19: note = siRNA sense sequence
  source 1..19: mol_type = other RNA
aagtgggtaagtctatttt

SEQ ID NO: 37671 - RNA, 19 nt, synthetic construct
  misc_feature 1..19: note = siRNA antisense sequence
  source 1..19: mol_type = other RNA
aaaatagacttacccactt

SEQ ID NO: 37672 - RNA, 19 nt, synthetic construct
  misc_feature 1..19: note = siRNA sense sequence
  source 1..19: mol_type = other RNA
aaatagctccagttcaagg

SEQ ID NO: 37673 - RNA, 19 nt, synthetic construct
  misc_feature 1..19: note = siRNA antisense sequence
  source 1..19: mol_type = other RNA
ccttgaactggagctattt

SEQ ID NO: 37674 - RNA, 19 nt, synthetic construct
  misc_feature 1..19: note = siRNA sense sequence
  source 1..19: mol_type = other RNA
aatagctccagttcaaggt

SEQ ID NO: 37675 - RNA, 19 nt, synthetic construct
  misc_feature 1..19: note = siRNA antisense sequence
  source 1..19: mol_type = other RNA
accttgaactggagctatt

SEQ ID NO: 37676 - RNA, 19 nt, synthetic construct
  misc_feature 1..19: note = siRNA sense sequence
  source 1..19: mol_type = other RNA
atagctccagttcaaggtg

SEQ ID NO: 37677 - RNA, 19 nt, synthetic construct
  misc_feature 1..19: note = siRNA antisense sequence
  source 1..19: mol_type = other RNA
caccttgaactggagctat

SEQ ID NO: 37678 - RNA, 19 nt, synthetic construct
  misc_feature 1..19: note = siRNA sense sequence
  source 1..19: mol_type = other RNA
tagctccagttcaaggtga

SEQ ID NO: 37679 - RNA, 19 nt, synthetic construct
  misc_feature 1..19: note = siRNA antisense sequence
  source 1..19: mol_type = other RNA
tcaccttgaactggagcta

SEQ ID NO: 37680 - RNA, 19 nt, synthetic construct
  misc_feature 1..19: note = siRNA sense sequence
  source 1..19: mol_type = other RNA
agctccagttcaaggtgat

SEQ ID NO: 37681 - RNA, 19 nt, synthetic construct
  misc_feature 1..19: note = siRNA antisense sequence
  source 1..19: mol_type = other RNA
atcaccttgaactggagct

SEQ ID NO: 37682 - RNA, 19 nt, synthetic construct
  misc_feature 1..19: note = siRNA sense sequence
  source 1..19: mol_type = other RNA
gctccagttcaaggtgatt

SEQ ID NO: 37683 - RNA, 19 nt, synthetic construct
  misc_feature 1..19: note = siRNA antisense sequence
  source 1..19: mol_type = other RNA
aatcaccttgaactggagc

SEQ ID NO: 37684 - RNA, 19 nt, synthetic construct
  misc_feature 1..19: note = siRNA sense sequence
  source 1..19: mol_type = other RNA
tcaaggtgatttctaggta

SEQ ID NO: 37685 - RNA, 19 nt, synthetic construct
  misc_feature 1..19: note = siRNA antisense sequence
  source 1..19: mol_type = other RNA
tacctagaaatcaccttga

SEQ ID NO: 37686 - RNA, 19 nt, synthetic construct
  misc_feature 1..19: note = siRNA sense sequence
  source 1..19: mol_type = other RNA
caaggtgatttctaggtag

SEQ ID NO: 37687 - RNA, 19 nt, synthetic construct
  misc_feature 1..19: note = siRNA antisense sequence
  source 1..19: mol_type = other RNA
ctacctagaaatcaccttg

SEQ ID NO: 37688 - RNA, 19 nt, synthetic construct
  misc_feature 1..19: note = siRNA sense sequence
  source 1..19: mol_type = other RNA
aaggtgatttctaggtagt

SEQ ID NO: 37689 - RNA, 19 nt, synthetic construct
  misc_feature 1..19: note = siRNA antisense sequence
  source 1..19: mol_type = other RNA
actacctagaaatcacctt

SEQ ID NO: 37690 - RNA, 19 nt, synthetic construct
  misc_feature 1..19: note = siRNA sense sequence
  source 1..19: mol_type = other RNA
aggtgatttctaggtagtt

SEQ ID NO: 37691 - RNA, 19 nt, synthetic construct
  misc_feature 1..19: note = siRNA antisense sequence
  source 1..19: mol_type = other RNA
aactacctagaaatcacct

SEQ ID NO: 37692 - RNA, 19 nt, synthetic construct
  misc_feature 1..19: note = siRNA sense sequence
  source 1..19: mol_type = other RNA
ggtgatttctaggtagttg

SEQ ID NO: 37693 - RNA, 19 nt, synthetic construct
  misc_feature 1..19: note = siRNA antisense sequence
  source 1..19: mol_type = other RNA
caactacctagaaatcacc

SEQ ID NO: 37694 - RNA, 19 nt, synthetic construct
  misc_feature 1..19: note = siRNA sense sequence
  source 1..19: mol_type = other RNA
gtgatttctaggtagttgg

SEQ ID NO: 37695 - RNA, 19 nt, synthetic construct
  misc_feature 1..19: note = siRNA antisense sequence
  source 1..19: mol_type = other RNA
ccaactacctagaaatcac

SEQ ID NO: 37696 - RNA, 19 nt, synthetic construct
  misc_feature 1..19: note = siRNA sense sequence
  source 1..19: mol_type = other RNA
tgatttctaggtagttgga

SEQ ID NO: 37697 - RNA, 19 nt, synthetic construct
  misc_feature 1..19: note = siRNA antisense sequence
  source 1..19: mol_type = other RNA
tccaactacctagaaatca

SEQ ID NO: 37698 - RNA, 19 nt, synthetic construct
  misc_feature 1..19: note = siRNA sense sequence
  source 1..19: mol_type = other RNA
gatttctaggtagttggaa

SEQ ID NO: 37699 - RNA, 19 nt, synthetic construct
  misc_feature 1..19: note = siRNA antisense sequence
  source 1..19: mol_type = other RNA
ttccaactacctagaaatc

SEQ ID NO: 37700 - RNA, 19 nt, synthetic construct
  misc_feature 1..19: note = siRNA sense sequence
  source 1..19: mol_type = other RNA
tcagactggaatgcaggta

SEQ ID NO: 37701 - RNA, 19 nt, synthetic construct
  misc_feature 1..19: note = siRNA antisense sequence
  source 1..19: mol_type = other RNA
tacctgcattccagtctga

SEQ ID NO: 37702 - RNA, 19 nt, synthetic construct
  misc_feature 1..19: note = siRNA sense sequence
  source 1..19: mol_type = other RNA
cagactggaatgcaggtaa

SEQ ID NO: 37703 - RNA, 19 nt, synthetic construct
  misc_feature 1..19: note = siRNA antisense sequence
  source 1..19: mol_type = other RNA
ttacctgcattccagtctg

SEQ ID NO: 37704 - RNA, 19 nt, synthetic construct
  misc_feature 1..19: note = siRNA sense sequence
  source 1..19: mol_type = other RNA
agactggaatgcaggtaag

SEQ ID NO: 37705 - RNA, 19 nt, synthetic construct
  misc_feature 1..19: note = siRNA antisense sequence
  source 1..19: mol_type = other RNA
cttacctgcattccagtct

SEQ ID NO: 37706 - RNA, 19 nt, synthetic construct
  misc_feature 1..19: note = siRNA sense sequence
  source 1..19: mol_type = other RNA
gactggaatgcaggtaaga

SEQ ID NO: 37707 - RNA, 19 nt, synthetic construct
  misc_feature 1..19: note = siRNA antisense sequence
  source 1..19: mol_type = other RNA
tcttacctgcattccagtc

SEQ ID NO: 37708 - RNA, 19 nt, synthetic construct
  misc_feature 1..19: note = siRNA sense sequence
  source 1..19: mol_type = other RNA
actggaatgcaggtaagag

SEQ ID NO: 37709 - RNA, 19 nt, synthetic construct
  misc_feature 1..19: note = siRNA antisense sequence
  source 1..19: mol_type = other RNA
ctcttacctgcattccagt

SEQ ID NO: 37710 - RNA, 19 nt, synthetic construct
  misc_feature 1..19: note = siRNA sense sequence
  source 1..19: mol_type = other RNA
ctggaatgcaggtaagagg

SEQ ID NO: 37711 - RNA, 19 nt, synthetic construct
  misc_feature 1..19: note = siRNA antisense sequence
  source 1..19: mol_type = other RNA
cctcttacctgcattccag

SEQ ID NO: 37712 - RNA, 19 nt, synthetic construct
  misc_feature 1..19: note = siRNA sense sequence
  source 1..19: mol_type = other RNA
tggaatgcaggtaagaggg

SEQ ID NO: 37713 - RNA, 19 nt, synthetic construct
  misc_feature 1..19: note = siRNA antisense sequence
  source 1..19: mol_type = other RNA
ccctcttacctgcattcca

SEQ ID NO: 37714 - RNA, 19 nt, synthetic construct
  misc_feature 1..19: note = siRNA sense sequence
  source 1..19: mol_type = other RNA
agaagttaatgtgttagtg

SEQ ID NO: 37715 - RNA, 19 nt, synthetic construct
  misc_feature 1..19: note = siRNA antisense sequence
  source 1..19: mol_type = other RNA
cactaacacattaacttct

SEQ ID NO: 37716 - RNA, 19 nt, synthetic construct
  misc_feature 1..19: note = siRNA sense sequence
  source 1..19: mol_type = other RNA
gaagttaatgtgttagtgg

SEQ ID NO: 37717 - RNA, 19 nt, synthetic construct
  misc_feature 1..19: note = siRNA antisense sequence
  source 1..19: mol_type = other RNA
ccactaacacattaacttc

SEQ ID NO: 37718 - RNA, 19 nt, synthetic construct
  misc_feature 1..19: note = siRNA sense sequence
  source 1..19: mol_type = other RNA
aagttaatgtgttagtgga

SEQ ID NO: 37719 - RNA, 19 nt, synthetic construct
  misc_feature 1..19: note = siRNA antisense sequence
  source 1..19: mol_type = other RNA
tccactaacacattaactt

SEQ ID NO: 37720 - RNA, 19 nt, synthetic construct
  misc_feature 1..19: note = siRNA sense sequence
  source 1..19: mol_type = other RNA
agttaatgtgttagtggaa

SEQ ID NO: 37721 - RNA, 19 nt, synthetic construct
  misc_feature 1..19: note = siRNA antisense sequence
  source 1..19: mol_type = other RNA
ttccactaacacattaact

SEQ ID NO: 37722 - RNA, 19 nt, synthetic construct
  misc_feature 1..19: note = siRNA sense sequence
  source 1..19: mol_type = other RNA
gactgattttgcagcccac

SEQ ID NO: 37723 - RNA, 19 nt, synthetic construct
  misc_feature 1..19: note = siRNA antisense sequence
  source 1..19: mol_type = other RNA
gtgggctgcaaaatcagtc

SEQ ID NO: 37724 - RNA, 19 nt, synthetic construct
  misc_feature 1..19: note = siRNA sense sequence
  source 1..19: mol_type = other RNA
actgattttgcagcccact

SEQ ID NO: 37725 - RNA, 19 nt, synthetic construct
  misc_feature 1..19: note = siRNA antisense sequence
  source 1..19: mol_type = other RNA
agtgggctgcaaaatcagt

SEQ ID NO: 37726 - RNA, 19 nt, synthetic construct
  misc_feature 1..19: note = siRNA sense sequence
  source 1..19: mol_type = other RNA
ctgattttgcagcccactt

SEQ ID NO: 37727 - RNA, 19 nt, synthetic construct
  misc_feature 1..19: note = siRNA antisense sequence
  source 1..19: mol_type = other RNA
aagtgggctgcaaaatcag

SEQ ID NO: 37728 - RNA, 19 nt, synthetic construct
  misc_feature 1..19: note = siRNA sense sequence
  source 1..19: mol_type = other RNA
tgattttgcagcccacttg

SEQ ID NO: 37729 - RNA, 19 nt, synthetic construct
  misc_feature 1..19: note = siRNA antisense sequence
  source 1..19: mol_type = other RNA
caagtgggctgcaaaatca

SEQ ID NO: 37730 - RNA, 19 nt, synthetic construct
  misc_feature 1..19: note = siRNA sense sequence
  source 1..19: mol_type = other RNA
gattttgcagcccacttgc

SEQ ID NO: 37731 - RNA, 19 nt, synthetic construct
  misc_feature 1..19: note = siRNA antisense sequence
  source 1..19: mol_type = other RNA
gcaagtgggctgcaaaatc

SEQ ID NO: 37732 - RNA, 19 nt, synthetic construct
  misc_feature 1..19: note = siRNA sense sequence
  source 1..19: mol_type = other RNA
ccacttgcaaccctgggca

SEQ ID NO: 37733 - RNA, 19 nt, synthetic construct
  misc_feature 1..19: note = siRNA antisense sequence
  source 1..19: mol_type = other RNA
tgcccagggttgcaagtgg

SEQ ID NO: 37734 - RNA, 19 nt, synthetic construct
  misc_feature 1..19: note = siRNA sense sequence
  source 1..19: mol_type = other RNA
cacttgcaaccctgggcac

SEQ ID NO: 37735 - RNA, 19 nt, synthetic construct
  misc_feature 1..19: note = siRNA antisense sequence
  source 1..19: mol_type = other RNA
gtgcccagggttgcaagtg

SEQ ID NO: 37736 - RNA, 19 nt, synthetic construct
  misc_feature 1..19: note = siRNA sense sequence
  source 1..19: mol_type = other RNA
cccacatctagcatgaggc

SEQ ID NO: 37737 - RNA, 19 nt, synthetic construct
  misc_feature 1..19: note = siRNA antisense sequence
  source 1..19: mol_type = other RNA
gcctcatgctagatgtggg

SEQ ID NO: 37738 - RNA, 19 nt, synthetic construct
  misc_feature 1..19: note = siRNA sense sequence
  source 1..19: mol_type = other RNA
ccacatctagcatgaggcc

SEQ ID NO: 37739 - RNA, 19 nt, synthetic construct
  misc_feature 1..19: note = siRNA antisense sequence
  source 1..19: mol_type = other RNA
ggcctcatgctagatgtgg

SEQ ID NO: 37740 - RNA, 19 nt, synthetic construct
  misc_feature 1..19: note = siRNA sense sequence
  source 1..19: mol_type = other RNA
cacatctagcatgaggcct

SEQ ID NO: 37741 - RNA, 19 nt, synthetic construct
  misc_feature 1..19: note = siRNA antisense sequence
  source 1..19: mol_type = other RNA
aggcctcatgctagatgtg

SEQ ID NO: 37742 - RNA, 19 nt, synthetic construct
  misc_feature 1..19: note = siRNA sense sequence
  source 1..19: mol_type = other RNA
acatctagcatgaggcctt

SEQ ID NO: 37743 - RNA, 19 nt, synthetic construct
  misc_feature 1..19: note = siRNA antisense sequence
  source 1..19: mol_type = other RNA
aaggcctcatgctagatgt

SEQ ID NO: 37744 - RNA, 19 nt, synthetic construct
  misc_feature 1..19: note = siRNA sense sequence
  source 1..19: mol_type = other RNA
atctagcatgaggccttat

SEQ ID NO: 37745 - RNA, 19 nt, synthetic construct
  misc_feature 1..19: note = siRNA antisense sequence
  source 1..19: mol_type = other RNA
ataaggcctcatgctagat

SEQ ID NO: 37746 - RNA, 19 nt, synthetic construct
  misc_feature 1..19: note = siRNA sense sequence
  source 1..19: mol_type = other RNA
tctagcatgaggccttata

SEQ ID NO: 37747 - RNA, 19 nt, synthetic construct
  misc_feature 1..19: note = siRNA antisense sequence
  source 1..19: mol_type = other RNA
tataaggcctcatgctaga

SEQ ID NO: 37748 - RNA, 19 nt, synthetic construct
  misc_feature 1..19: note = siRNA sense sequence
  source 1..19: mol_type = other RNA
ctagcatgaggccttatac

SEQ ID NO: 37749 - RNA, 19 nt, synthetic construct
  misc_feature 1..19: note = siRNA antisense sequence
  source 1..19: mol_type = other RNA
gtataaggcctcatgctag

SEQ ID NO: 37750 - RNA, 19 nt, synthetic construct
  misc_feature 1..19: note = siRNA sense sequence
  source 1..19: mol_type = other RNA
catgaggccttatacataa

SEQ ID NO: 37751 - RNA, 19 nt, synthetic construct
  misc_feature 1..19: note = siRNA antisense sequence
  source 1..19: mol_type = other RNA
ttatgtataaggcctcatg

SEQ ID NO: 37752 - RNA, 19 nt, synthetic construct
  misc_feature 1..19: note = siRNA sense sequence
  source 1..19: mol_type = other RNA
atgaggccttatacataat

SEQ ID NO: 37753 - RNA, 19 nt, synthetic construct
  misc_feature 1..19: note = siRNA antisense sequence
  source 1..19: mol_type = other RNA
attatgtataaggcctcat

SEQ ID NO: 37754 - RNA, 19 nt, synthetic construct
  misc_feature 1..19: note = siRNA sense sequence
  source 1..19: mol_type = other RNA
aggccttatacataatatg

SEQ ID NO: 37755 - RNA, 19 nt, synthetic construct
  misc_feature 1..19: note = siRNA antisense sequence
  source 1..19: mol_type = other RNA
catattatgtataaggcct

SEQ ID NO: 37756 - RNA, 19 nt, synthetic construct
  misc_feature 1..19: note = siRNA sense sequence
  source 1..19: mol_type = other RNA
ggccttatacataatatgc

SEQ ID NO: 37757 - RNA, 19 nt, synthetic construct
  misc_feature 1..19: note = siRNA antisense sequence
  source 1..19: mol_type = other RNA
gcatattatgtataaggcc

SEQ ID NO: 37758 - RNA, 19 nt, synthetic construct
  misc_feature 1..19: note = siRNA sense sequence
  source 1..19: mol_type = other RNA
tgcactcaatcattatttg

SEQ ID NO: 37759 - RNA, 19 nt, synthetic construct
  misc_feature 1..19: note = siRNA antisense sequence
  source 1..19: mol_type = other RNA
caaataatgattgagtgca

SEQ ID NO: 37760 - RNA, 19 nt, synthetic construct
  misc_feature 1..19: note = siRNA sense sequence
  source 1..19: mol_type = other RNA
gcactcaatcattatttgt

SEQ ID NO: 37761 - RNA, 19 nt, synthetic construct
  misc_feature 1..19: note = siRNA antisense sequence
  source 1..19: mol_type = other RNA
acaaataatgattgagtgc

SEQ ID NO: 37762 - RNA, 19 nt, synthetic construct
  misc_feature 1..19: note = siRNA sense sequence
  source 1..19: mol_type = other RNA
caatcattatttgttggct

SEQ ID NO: 37763 - RNA, 19 nt, synthetic construct
  misc_feature 1..19: note = siRNA antisense sequence
  source 1..19: mol_type = other RNA
agccaacaaataatgattg

SEQ ID NO: 37764 - RNA, 19 nt, synthetic construct
  misc_feature 1..19: note = siRNA sense sequence
  source 1..19: mol_type = other RNA
atcattatttgttggctga

SEQ ID NO: 37765 - RNA, 19 nt, synthetic construct
  misc_feature 1..19: note = siRNA antisense sequence
  source 1..19: mol_type = other RNA
tcagccaacaaataatgat

SEQ ID NO: 37766 - RNA, 19 nt, synthetic construct
  misc_feature 1..19: note = siRNA sense sequence
  source 1..19: mol_type = other RNA
acactctgttatcatcaat

SEQ ID NO: 37767 - RNA, 19 nt, synthetic construct
  misc_feature 1..19: note = siRNA antisense sequence
  source 1..19: mol_type = other RNA
attgatgataacagagtgt

SEQ ID NO: 37768 - RNA, 19 nt, synthetic construct
  misc_feature 1..19: note = siRNA sense sequence
  source 1..19: mol_type = other RNA
cactctgttatcatcaatt

SEQ ID NO: 37769 - RNA, 19 nt, synthetic construct
  misc_feature 1..19: note = siRNA antisense sequence
  source 1..19: mol_type = other RNA
aattgatgataacagagtg

SEQ ID NO: 37770 - RNA, 19 nt, synthetic construct
  misc_feature 1..19: note = siRNA sense sequence
  source 1..19: mol_type = other RNA
aaagttaaatgtgactctc

SEQ ID NO: 37771 - RNA, 19 nt, synthetic construct
  misc_feature 1..19: note = siRNA antisense sequence
  source 1..19: mol_type = other RNA
gagagtcacatttaacttt

SEQ ID NO: 37772 - RNA, 19 nt, synthetic construct
  misc_feature 1..19: note = siRNA sense sequence
  source 1..19: mol_type = other RNA
ttaaatgtgactctcctag

SEQ ID NO: 37773 - RNA, 19 nt, synthetic construct
  misc_feature 1..19: note = siRNA antisense sequence
  source 1..19: mol_type = other RNA
ctaggagagtcacatttaa

SEQ ID NO: 37774 - RNA, 19 nt, synthetic construct
  misc_feature 1..19: note = siRNA sense sequence
  source 1..19: mol_type = other RNA
taaatgtgactctcctagg

SEQ ID NO: 37775 - RNA, 19 nt, synthetic construct
  misc_feature 1..19: note = siRNA antisense sequence
  source 1..19: mol_type = other RNA
cctaggagagtcacattta

SEQ ID NO: 37776 - RNA, 19 nt, synthetic construct
  misc_feature 1..19: note = siRNA sense sequence
  source 1..19: mol_type = other RNA
aaatgtgactctcctaggg

SEQ ID NO: 37777 - RNA, 19 nt, synthetic construct
  misc_feature 1..19: note = siRNA antisense sequence
  source 1..19: mol_type = other RNA
ccctaggagagtcacattt

SEQ ID NO: 37778 - RNA, 19 nt, synthetic construct
  misc_feature 1..19: note = siRNA sense sequence
  source 1..19: mol_type = other RNA
aatgtgactctcctaggga

SEQ ID NO: 37779 - RNA, 19 nt, synthetic construct
  misc_feature 1..19: note = siRNA antisense sequence
  source 1..19: mol_type = other RNA
tccctaggagagtcacatt

SEQ ID NO: 37780 - RNA, 19 nt, synthetic construct
  misc_feature 1..19: note = siRNA sense sequence
  source 1..19: mol_type = other RNA
aaatgcaactacttaggac

SEQ ID NO: 37781 - RNA, 19 nt, synthetic construct
  misc_feature 1..19: note = siRNA antisense sequence
  source 1..19: mol_type = other RNA
gtcctaagtagttgcattt

SEQ ID NO: 37782 - RNA, 19 nt, synthetic construct
  misc_feature 1..19: note = siRNA sense sequence
  source 1..19: mol_type = other RNA
aatgcaactacttaggacc

SEQ ID NO: 37783 - RNA, 19 nt, synthetic construct
  misc_feature 1..19: note = siRNA antisense sequence
  source 1..19: mol_type = other RNA
ggtcctaagtagttgcatt

SEQ ID NO: 37784 - RNA, 19 nt, synthetic construct
  misc_feature 1..19: note = siRNA sense sequence
  source 1..19: mol_type = other RNA
atgcaactacttaggacca

SEQ ID NO: 37785 - RNA, 19 nt, synthetic construct
  misc_feature 1..19: note = siRNA antisense sequence
  source 1..19: mol_type = other RNA
tggtcctaagtagttgcat

SEQ ID NO: 37786 - RNA, 19 nt, synthetic construct
  misc_feature 1..19: note = siRNA sense sequence
  source 1..19: mol_type = other RNA
ctacttaggaccagagctg

SEQ ID NO: 37787 - RNA, 19 nt, synthetic construct
  misc_feature 1..19: note = siRNA antisense sequence
  source 1..19: mol_type = other RNA
cagctctggtcctaagtag

SEQ ID NO: 37788 - RNA, 19 nt, synthetic construct
  misc_feature 1..19: note = siRNA sense sequence
  source 1..19: mol_type = other RNA
tacttaggaccagagctgt

SEQ ID NO: 37789 - RNA, 19 nt, synthetic construct
  misc_feature 1..19: note = siRNA antisense sequence
  source 1..19: mol_type = other RNA
acagctctggtcctaagta

SEQ ID NO: 37790 - RNA, 19 nt, synthetic construct
  misc_feature 1..19: note = siRNA sense sequence
  source 1..19: mol_type = other RNA
acttaggaccagagctgta

SEQ ID NO: 37791 - RNA, 19 nt, synthetic construct
  misc_feature 1..19: note = siRNA antisense sequence
  source 1..19: mol_type = other RNA
tacagctctggtcctaagt

SEQ ID NO: 37792 - RNA, 19 nt, synthetic construct
  misc_feature 1..19: note = siRNA sense sequence
  source 1..19: mol_type = other RNA
cttaggaccagagctgtaa

SEQ ID NO: 37793 - RNA, 19 nt, synthetic construct
  misc_feature 1..19: note = siRNA antisense sequence
  source 1..19: mol_type = other RNA
ttacagctctggtcctaag

SEQ ID NO: 37794 - RNA, 19 nt, synthetic construct
  misc_feature 1..19: note = siRNA sense sequence
  source 1..19: mol_type = other RNA
ttaggaccagagctgtaat

SEQ ID NO: 37795 - RNA, 19 nt, synthetic construct
  misc_feature 1..19: note = siRNA antisense sequence
  source 1..19: mol_type = other RNA
attacagctctggtcctaa

SEQ ID NO: 37796 - RNA, 19 nt, synthetic construct
  misc_feature 1..19: note = siRNA sense sequence
  source 1..19: mol_type = other RNA
taggaccagagctgtaata

SEQ ID NO: 37797 - RNA, 19 nt, synthetic construct
  misc_feature 1..19: note = siRNA antisense sequence
  source 1..19: mol_type = other RNA
tattacagctctggtccta

SEQ ID NO: 37798 - RNA, 19 nt, synthetic construct
  misc_feature 1..19: note = siRNA sense sequence
  source 1..19: mol_type = other RNA
aggaccagagctgtaatag

SEQ ID NO: 37799 - RNA, 19 nt, synthetic construct
  misc_feature 1..19: note = siRNA antisense sequence
  source 1..19: mol_type = other RNA
ctattacagctctggtcct

SEQ ID NO: 37800 - RNA, 19 nt, synthetic construct
  misc_feature 1..19: note = siRNA sense sequence
  source 1..19: mol_type = other RNA
ggaccagagctgtaataga

SEQ ID NO: 37801 - RNA, 19 nt, synthetic construct
  misc_feature 1..19: note = siRNA antisense sequence
  source 1..19: mol_type = other RNA
tctattacagctctggtcc

SEQ ID NO: 37802 - RNA, 19 nt, synthetic construct
  misc_feature 1..19: note = siRNA sense sequence
  source 1..19: mol_type = other RNA
gaccagagctgtaatagat

SEQ ID NO: 37803 - RNA, 19 nt, synthetic construct
  misc_feature 1..19: note = siRNA antisense sequence
  source 1..19: mol_type = other RNA
atctattacagctctggtc

SEQ ID NO: 37804 - RNA, 19 nt, synthetic construct
  misc_feature 1..19: note = siRNA sense sequence
  source 1..19: mol_type = other RNA
accagagctgtaatagatt

SEQ ID NO: 37805 - RNA, 19 nt, synthetic construct
  misc_feature 1..19: note = siRNA antisense sequence
  source 1..19: mol_type = other RNA
aatctattacagctctggt

SEQ ID NO: 37806 - RNA, 19 nt, synthetic construct
  misc_feature 1..19: note = siRNA sense sequence
  source 1..19: mol_type = other RNA
ccagagctgtaatagattt

SEQ ID NO: 37807 - RNA, 19 nt, synthetic construct
  misc_feature 1..19: note = siRNA antisense sequence
  source 1..19: mol_type = other RNA
aaatctattacagctctgg

SEQ ID NO: 37808 - RNA, 19 nt, synthetic construct
  misc_feature 1..19: note = siRNA sense sequence
  source 1..19: mol_type = other RNA
cagagctgtaatagatttc

SEQ ID NO: 37809 - RNA, 19 nt, synthetic construct
  misc_feature 1..19: note = siRNA antisense sequence
  source 1..19: mol_type = other RNA
gaaatctattacagctctg

SEQ ID NO: 37810 - RNA, 19 nt, synthetic construct
  misc_feature 1..19: note = siRNA sense sequence
  source 1..19: mol_type = other RNA
ctctacactcagtcttgtg

SEQ ID NO: 37811 - RNA, 19 nt, synthetic construct
  misc_feature 1..19: note = siRNA antisense sequence
  source 1..19: mol_type = other RNA
cacaagactgagtgtagag

SEQ ID NO: 37812 - RNA, 19 nt, synthetic construct
  misc_feature 1..19: note = siRNA sense sequence
  source 1..19: mol_type = other RNA
tctacactcagtcttgtgc

SEQ ID NO: 37813 - RNA, 19 nt, synthetic construct
  misc_feature 1..19: note = siRNA antisense sequence
  source 1..19: mol_type = other RNA
gcacaagactgagtgtaga

SEQ ID NO: 37814 - RNA, 19 nt, synthetic construct
  misc_feature 1..19: note = siRNA sense sequence
  source 1..19: mol_type = other RNA
ctacactcagtcttgtgcc

SEQ ID NO: 37815 - RNA, 19 nt, synthetic construct
  misc_feature 1..19: note = siRNA antisense sequence
  source 1..19: mol_type = other RNA
ggcacaagactgagtgtag

SEQ ID NO: 37816 - RNA, 19 nt, synthetic construct
  misc_feature 1..19: note = siRNA sense sequence
  source 1..19: mol_type = other RNA
tacactcagtcttgtgcct

SEQ ID NO: 37817 - RNA, 19 nt, synthetic construct
  misc_feature 1..19: note = siRNA antisense sequence
  source 1..19: mol_type = other RNA
aggcacaagactgagtgta

SEQ ID NO: 37818 - RNA, 19 nt, synthetic construct
  misc_feature 1..19: note = siRNA sense sequence
  source 1..19: mol_type = other RNA
aactatctttgtggtaggt

SEQ ID NO: 37819 - RNA, 19 nt, synthetic construct
  misc_feature 1..19: note = siRNA antisense sequence
  source 1..19: mol_type = other RNA
acctaccacaaagatagtt

SEQ ID NO: 37820 - RNA, 19 nt, synthetic construct
  misc_feature 1..19: note = siRNA sense sequence
  source 1..19: mol_type = other RNA
actatctttgtggtaggta

SEQ ID NO: 37821 - RNA, 19 nt, synthetic construct
  misc_feature 1..19: note = siRNA antisense sequence
  source 1..19: mol_type = other RNA
tacctaccacaaagatagt

SEQ ID NO: 37822 - RNA, 19 nt, synthetic construct
  misc_feature 1..19: note = siRNA sense sequence
  source 1..19: mol_type = other RNA
ctatctttgtggtaggtac

SEQ ID NO: 37823 - RNA, 19 nt, synthetic construct
  misc_feature 1..19: note = siRNA antisense sequence
  source 1..19: mol_type = other RNA
gtacctaccacaaagatag

SEQ ID NO: 37824 - RNA, 19 nt, synthetic construct
  misc_feature 1..19: note = siRNA sense sequence
  source 1..19: mol_type = other RNA
tatctttgtggtaggtacc

SEQ ID NO: 37825 - RNA, 19 nt, synthetic construct
  misc_feature 1..19: note = siRNA antisense sequence
  source 1..19: mol_type = other RNA
ggtacctaccacaaagata

SEQ ID NO: 37826 - RNA, 19 nt, synthetic construct
  misc_feature 1..19: note = siRNA sense sequence
  source 1..19: mol_type = other RNA
gtaagtttgtaagcatttg

SEQ ID NO: 37827 - RNA, 19 nt, synthetic construct
  misc_feature 1..19: note = siRNA antisense sequence
  source 1..19: mol_type = other RNA
caaatgcttacaaacttac

SEQ ID NO: 37828 - RNA, 19 nt, synthetic construct
  misc_feature 1..19: note = siRNA sense sequence
  source 1..19: mol_type = other RNA
gtttgtaagcatttgaatg

SEQ ID NO: 37829 - RNA, 19 nt, synthetic construct
  misc_feature 1..19: note = siRNA antisense sequence
  source 1..19: mol_type = other RNA
cattcaaatgcttacaaac

SEQ ID NO: 37830 - RNA, 19 nt, synthetic construct
  misc_feature 1..19: note = siRNA sense sequence
  source 1..19: mol_type = other RNA
gtaagcatttgaatgtaga

SEQ ID NO: 37831 - RNA, 19 nt, synthetic construct
  misc_feature 1..19: note = siRNA antisense sequence
  source 1..19: mol_type = other RNA
tctacattcaaatgcttac

SEQ ID NO: 37832 - RNA, 19 nt, synthetic construct
  misc_feature 1..19: note = siRNA sense sequence
  source 1..19: mol_type = other RNA
agcatttgaatgtagatga

SEQ ID NO: 37833 - RNA, 19 nt, synthetic construct
  misc_feature 1..19: note = siRNA antisense sequence
  source 1..19: mol_type = other RNA
tcatctacattcaaatgct

SEQ ID NO: 37834 - RNA, 19 nt, synthetic construct
  misc_feature 1..19: note = siRNA sense sequence
  source 1..19: mol_type = other RNA
gcatttgaatgtagatgat

SEQ ID NO: 37835 - RNA, 19 nt, synthetic construct
  misc_feature 1..19: note = siRNA antisense sequence
  source 1..19: mol_type = other RNA
atcatctacattcaaatgc

SEQ ID NO: 37836 - RNA, 19 nt, synthetic construct
  misc_feature 1..19: note = siRNA sense sequence
  source 1..19: mol_type = other RNA
gaatgtagatgatatcaga

SEQ ID NO: 37837 - RNA, 19 nt, synthetic construct
  misc_feature 1..19: note = siRNA antisense sequence
  source 1..19: mol_type = other RNA
tctgatatcatctacattc

SEQ ID NO: 37838 - RNA, 19 nt, synthetic construct
  misc_feature 1..19: note = siRNA sense sequence
  source 1..19: mol_type = other RNA
atctcacgttgacatttat

SEQ ID NO: 37839 - RNA, 19 nt, synthetic construct
  misc_feature 1..19: note = siRNA antisense sequence
  source 1..19: mol_type = other RNA
ataaatgtcaacgtgagat

SEQ ID NO: 37840 - RNA, 19 nt, synthetic construct
  misc_feature 1..19: note = siRNA sense sequence
  source 1..19: mol_type = other RNA
ctcacgttgacatttatta

SEQ ID NO: 37841 - RNA, 19 nt, synthetic construct
  misc_feature 1..19: note = siRNA antisense sequence
  source 1..19: mol_type = other RNA
taataaatgtcaacgtgag

SEQ ID NO: 37842 - RNA, 19 nt, synthetic construct
  misc_feature 1..19: note = siRNA sense sequence
  source 1..19: mol_type = other RNA
aaaatcagagcaaccaaaa

SEQ ID NO: 37843 - RNA, 19 nt, synthetic construct
  misc_feature 1..19: note = siRNA antisense sequence
  source 1..19: mol_type = other RNA
ttttggttgctctgatttt

SEQ ID NO: 37844 - RNA, 19 nt, synthetic construct
  misc_feature 1..19: note = siRNA sense sequence
  source 1..19: mol_type = other RNA
aagatgtgggcaattgaat

SEQ ID NO: 37845 - RNA, 19 nt, synthetic construct
  misc_feature 1..19: note = siRNA antisense sequence
  source 1..19: mol_type = other RNA
attcaattgcccacatctt

SEQ ID NO: 37846 - RNA, 19 nt, synthetic construct
  misc_feature 1..19: note = siRNA sense sequence
  source 1..19: mol_type = other RNA
agatgtgggcaattgaatt

SEQ ID NO: 37847 - RNA, 19 nt, synthetic construct
  misc_feature 1..19: note = siRNA antisense sequence
  source 1..19: mol_type = other RNA
aattcaattgcccacatct

SEQ ID NO: 37848 - RNA, 19 nt, synthetic construct
  misc_feature 1..19: note = siRNA sense sequence
  source 1..19: mol_type = other RNA
gtgggcaattgaatttaaa

SEQ ID NO: 37849 - RNA, 19 nt, synthetic construct
  misc_feature 1..19: note = siRNA antisense sequence
  source 1..19: mol_type = other RNA
tttaaattcaattgcccac

SEQ ID NO: 37850 - RNA, 19 nt, synthetic construct
  misc_feature 1..19: note = siRNA sense sequence
  source 1..19: mol_type = other RNA
gggcaattgaatttaaaag

SEQ ID NO: 37851 - RNA, 19 nt, synthetic construct
  misc_feature 1..19: note = siRNA antisense sequence
  source 1..19: mol_type = other RNA
cttttaaattcaattgccc

SEQ ID NO: 37852 - RNA, 19 nt, synthetic construct
  misc_feature 1..19: note = siRNA sense sequence
  source 1..19: mol_type = other RNA
aacttttaaggatagcatg

SEQ ID NO: 37853 - RNA, 19 nt, synthetic construct
  misc_feature 1..19: note = siRNA antisense sequence
  source 1..19: mol_type = other RNA
catgctatccttaaaagtt

SEQ ID NO: 37854 - RNA, 19 nt, synthetic construct
  misc_feature 1..19: note = siRNA sense sequence
  source 1..19: mol_type = other RNA
acttttaaggatagcatgg

SEQ ID NO: 37855 - RNA, 19 nt, synthetic construct
  misc_feature 1..19: note = siRNA antisense sequence
  source 1..19: mol_type = other RNA
ccatgctatccttaaaagt

SEQ ID NO: 37856 - RNA, 19 nt, synthetic construct
  misc_feature 1..19: note = siRNA sense sequence
  source 1..19: mol_type = other RNA
ttttaaggatagcatggta

SEQ ID NO: 37857 - RNA, 19 nt, synthetic construct
  misc_feature 1..19: note = siRNA antisense sequence
  source 1..19: mol_type = other RNA
taccatgctatccttaaaa

SEQ ID NO: 37858 - RNA, 19 nt, synthetic construct
  misc_feature 1..19: note = siRNA sense sequence
  source 1..19: mol_type = other RNA
tttaaggatagcatggtag

SEQ ID NO: 37859 - RNA, 19 nt, synthetic construct
  misc_feature 1..19: note = siRNA antisense sequence
  source 1..19: mol_type = other RNA
ctaccatgctatccttaaa

SEQ ID NO: 37860 - RNA, 19 nt, synthetic construct
  misc_feature 1..19: note = siRNA sense sequence
  source 1..19: mol_type = other RNA
ttaaggatagcatggtagc

SEQ ID NO: 37861 - RNA, 19 nt, synthetic construct
  misc_feature 1..19: note = siRNA antisense sequence
  source 1..19: mol_type = other RNA
gctaccatgctatccttaa

SEQ ID NO: 37862 - RNA, 19 nt, synthetic construct
  misc_feature 1..19: note = siRNA sense sequence
  source 1..19: mol_type = other RNA
taaggatagcatggtagca

SEQ ID NO: 37863 - RNA, 19 nt, synthetic construct
  misc_feature 1..19: note = siRNA antisense sequence
  source 1..19: mol_type = other RNA
tgctaccatgctatcctta

SEQ ID NO: 37864 - RNA, 19 nt, synthetic construct
  misc_feature 1..19: note = siRNA sense sequence
  source 1..19: mol_type = other RNA
aaggatagcatggtagcag

SEQ ID NO: 37865 - RNA, 19 nt, synthetic construct
  misc_feature 1..19: note = siRNA antisense sequence
  source 1..19: mol_type = other RNA
ctgctaccatgctatcctt

SEQ ID NO: 37866 - RNA, 19 nt, synthetic construct
  misc_feature 1..19: note = siRNA sense sequence
  source 1..19: mol_type = other RNA
aggatagcatggtagcagc

SEQ ID NO: 37867 - RNA, 19 nt, synthetic construct
  misc_feature 1..19: note = siRNA antisense sequence
  source 1..19: mol_type = other RNA
gctgctaccatgctatcct

SEQ ID NO: 37868 - RNA, 19 nt, synthetic construct
  misc_feature 1..19: note = siRNA sense sequence
  source 1..19: mol_type = other RNA
ggatagcatggtagcagca

SEQ ID NO: 37869 - RNA, 19 nt, synthetic construct
  misc_feature 1..19: note = siRNA antisense sequence
  source 1..19: mol_type = other RNA
tgctgctaccatgctatcc

SEQ ID NO: 37870 - RNA, 19 nt, synthetic construct
  misc_feature 1..19: note = siRNA sense sequence
  source 1..19: mol_type = other RNA
gatagcatggtagcagcat

SEQ ID NO: 37871 - RNA, 19 nt, synthetic construct
  misc_feature 1..19: note = siRNA antisense sequence
  source 1..19: mol_type = other RNA
atgctgctaccatgctatc

SEQ ID NO: 37872 - RNA, 19 nt, synthetic construct
  misc_feature 1..19: note = siRNA sense sequence
  source 1..19: mol_type = other RNA
agcatggtagcagcatatt

SEQ ID NO: 37873 - RNA, 19 nt, synthetic construct
  misc_feature 1..19: note = siRNA antisense sequence
  source 1..19: mol_type = other RNA
aatatgctgctaccatgct

SEQ ID NO: 37874 - RNA, 19 nt, synthetic construct
  misc_feature 1..19: note = siRNA sense sequence
  source 1..19: mol_type = other RNA
ggtagcagcatattgttct

SEQ ID NO: 37875 - RNA, 19 nt, synthetic construct
  misc_feature 1..19: note = siRNA antisense sequence
  source 1..19: mol_type = other RNA
agaacaatatgctgctacc

SEQ ID NO: 37876 - RNA, 19 nt, synthetic construct
  misc_feature 1..19: note = siRNA sense sequence
  source 1..19: mol_type = other RNA
gtagcagcatattgttcta

SEQ ID NO: 37877 - RNA, 19 nt, synthetic construct
  misc_feature 1..19: note = siRNA antisense sequence
  source 1..19: mol_type = other RNA
tagaacaatatgctgctac

SEQ ID NO: 37878 - RNA, 19 nt, synthetic construct
  misc_feature 1..19: note = siRNA sense sequence
  source 1..19: mol_type = other RNA
tagcagcatattgttctaa

SEQ ID NO: 37879 - RNA, 19 nt, synthetic construct
  misc_feature 1..19: note = siRNA antisense sequence
  source 1..19: mol_type = other RNA
ttagaacaatatgctgcta

SEQ ID NO: 37880 - RNA, 19 nt, synthetic construct
  misc_feature 1..19: note = siRNA sense sequence
  source 1..19: mol_type = other RNA
agcagcatattgttctaaa

SEQ ID NO: 37881 - RNA, 19 nt, synthetic construct
  misc_feature 1..19: note = siRNA antisense sequence
  source 1..19: mol_type = other RNA
tttagaacaatatgctgct

SEQ ID NO: 37882 - RNA, 19 nt, synthetic construct
  misc_feature 1..19: note = siRNA sense sequence
  source 1..19: mol_type = other RNA
gcagcatattgttctaaag

SEQ ID NO: 37883 - RNA, 19 nt, synthetic construct
  misc_feature 1..19: note = siRNA antisense sequence
  source 1..19: mol_type = other RNA
ctttagaacaatatgctgc

SEQ ID NO: 37884 - RNA, 19 nt, synthetic construct
  misc_feature 1..19: note = siRNA sense sequence
  source 1..19: mol_type = other RNA
cagcatattgttctaaaga

SEQ ID NO: 37885 - RNA, 19 nt, synthetic construct
  misc_feature 1..19: note = siRNA antisense sequence
  source 1..19: mol_type = other RNA
tctttagaacaatatgctg

SEQ ID NO: 37886 - RNA, 19 nt, synthetic construct
  misc_feature 1..19: note = siRNA sense sequence
  source 1..19: mol_type = other RNA
aaatctgggatctggtagt

SEQ ID NO: 37887 - RNA, 19 nt, synthetic construct
  misc_feature 1..19: note = siRNA antisense sequence
  source 1..19: mol_type = other RNA
actaccagatcccagattt

SEQ ID NO: 37888 - RNA, 19 nt, synthetic construct
  misc_feature 1..19: note = siRNA sense sequence
  source 1..19: mol_type = other RNA
aatctgggatctggtagtg

SEQ ID NO: 37889 - RNA, 19 nt, synthetic construct
  misc_feature 1..19: note = siRNA antisense sequence
  source 1..19: mol_type = other RNA
cactaccagatcccagatt

SEQ ID NO: 37890 - RNA, 19 nt, synthetic construct
  misc_feature 1..19: note = siRNA sense sequence
  source 1..19: mol_type = other RNA
atctgggatctggtagtgc

SEQ ID NO: 37891 - RNA, 19 nt, synthetic construct
  misc_feature 1..19: note = siRNA antisense sequence
  source 1..19: mol_type = other RNA
gcactaccagatcccagat

SEQ ID NO: 37892 - RNA, 19 nt, synthetic construct
  misc_feature 1..19: note = siRNA sense sequence
  source 1..19: mol_type = other RNA
tctgggatctggtagtgca

SEQ ID NO: 37893 - RNA, 19 nt, synthetic construct
  misc_feature 1..19: note = siRNA antisense sequence
  source 1..19: mol_type = other RNA
tgcactaccagatcccaga

SEQ ID NO: 37894 - RNA, 19 nt, synthetic construct
  misc_feature 1..19: note = siRNA sense sequence
  source 1..19: mol_type = other RNA
ctgggatctggtagtgcaa

SEQ ID NO: 37895 - RNA, 19 nt, synthetic construct
  misc_feature 1..19: note = siRNA antisense sequence
  source 1..19: mol_type = other RNA
ttgcactaccagatcccag

SEQ ID NO: 37896 - RNA, 19 nt, synthetic construct
  misc_feature 1..19: note = siRNA sense sequence
  source 1..19: mol_type = other RNA
tgggatctggtagtgcaaa

SEQ ID NO: 37897 - RNA, 19 nt, synthetic construct
  misc_feature 1..19: note = siRNA antisense sequence
  source 1..19: mol_type = other RNA
tttgcactaccagatccca

SEQ ID NO: 37898 - RNA, 19 nt, synthetic construct
  misc_feature 1..19: note = siRNA sense sequence
  source 1..19: mol_type = other RNA
gggatctggtagtgcaaaa

SEQ ID NO: 37899 - RNA, 19 nt, synthetic construct
  misc_feature 1..19: note = siRNA antisense sequence
  source 1..19: mol_type = other RNA
ttttgcactaccagatccc

SEQ ID NO: 37900 - RNA, 19 nt, synthetic construct
  misc_feature 1..19: note = siRNA sense sequence
  source 1..19: mol_type = other RNA
ggatctggtagtgcaaaat

SEQ ID NO: 37901 - RNA, 19 nt, synthetic construct
  misc_feature 1..19: note = siRNA antisense sequence
  source 1..19: mol_type = other RNA
attttgcactaccagatcc

SEQ ID NO: 37902 - RNA, 19 nt, synthetic construct
  misc_feature 1..19: note = siRNA sense sequence
  source 1..19: mol_type = other RNA
gatctggtagtgcaaaata

SEQ ID NO: 37903 - RNA, 19 nt, synthetic construct
  misc_feature 1..19: note = siRNA antisense sequence
  source 1..19: mol_type = other RNA
tattttgcactaccagatc

SEQ ID NO: 37904 - RNA, 19 nt, synthetic construct
  misc_feature 1..19: note = siRNA sense sequence
  source 1..19: mol_type = other RNA
atctggtagtgcaaaataa

SEQ ID NO: 37905 - RNA, 19 nt, synthetic construct
  misc_feature 1..19: note = siRNA antisense sequence
  source 1..19: mol_type = other RNA
ttattttgcactaccagat

SEQ ID NO: 37906 - RNA, 19 nt, synthetic construct
  misc_feature 1..19: note = siRNA sense sequence
  source 1..19: mol_type = other RNA
tctggtagtgcaaaataac

SEQ ID NO: 37907 - RNA, 19 nt, synthetic construct
  misc_feature 1..19: note = siRNA antisense sequence
  source 1..19: mol_type = other RNA
gttattttgcactaccaga

SEQ ID NO: 37908 - RNA, 19 nt, synthetic construct
  misc_feature 1..19: note = siRNA sense sequence
  source 1..19: mol_type = other RNA
ctggtagtgcaaaataacc

SEQ ID NO: 37909 - RNA, 19 nt, synthetic construct
  misc_feature 1..19: note = siRNA antisense sequence
  source 1..19: mol_type = other RNA
ggttattttgcactaccag

SEQ ID NO: 37910 - RNA, 19 nt, synthetic construct
  misc_feature 1..19: note = siRNA sense sequence
  source 1..19: mol_type = other RNA
tagtgcaaaataacctgta

SEQ ID NO: 37911 - RNA, 19 nt, synthetic construct
  misc_feature 1..19: note = siRNA antisense sequence
  source 1..19: mol_type = other RNA
tacaggttattttgcacta

SEQ ID NO: 37912 - RNA, 19 nt, synthetic construct
  misc_feature 1..19: note = siRNA sense sequence
  source 1..19: mol_type = other RNA
catgtttggatgttctgta

SEQ ID NO: 37913 - RNA, 19 nt, synthetic construct
  misc_feature 1..19: note = siRNA antisense sequence
  source 1..19: mol_type = other RNA
tacagaacatccaaacatg

SEQ ID NO: 37914 - RNA, 19 nt, synthetic construct
  misc_feature 1..19: note = siRNA sense sequence
  source 1..19: mol_type = other RNA
atgtttggatgttctgtaa

SEQ ID NO: 37915 - RNA, 19 nt, synthetic construct
  misc_feature 1..19: note = siRNA antisense sequence
  source 1..19: mol_type = other RNA
ttacagaacatccaaacat

SEQ ID NO: 37916 - RNA, 19 nt, synthetic construct
  misc_feature 1..19: note = siRNA sense sequence
  source 1..19: mol_type = other RNA
tgtttggatgttctgtaag

SEQ ID NO: 37917 - RNA, 19 nt, synthetic construct
  misc_feature 1..19: note = siRNA antisense sequence
  source 1..19: mol_type = other RNA
cttacagaacatccaaaca

SEQ ID NO: 37918 - RNA, 19 nt, synthetic construct
  misc_feature 1..19: note = siRNA sense sequence
  source 1..19: mol_type = other RNA
gtttggatgttctgtaagt

SEQ ID NO: 37919 - RNA, 19 nt, synthetic construct
  misc_feature 1..19: note = siRNA antisense sequence
  source 1..19: mol_type = other RNA
acttacagaacatccaaac

SEQ ID NO: 37920 - RNA, 19 nt, synthetic construct
  misc_feature 1..19: note = siRNA sense sequence
  source 1..19: mol_type = other RNA
tttggatgttctgtaagtg

SEQ ID NO: 37921 - RNA, 19 nt, synthetic construct
  misc_feature 1..19: note = siRNA antisense sequence
  source 1..19: mol_type = other RNA
cacttacagaacatccaaa

SEQ ID NO: 37922 - RNA, 19 nt, synthetic construct
  misc_feature 1..19: note = siRNA sense sequence
  source 1..19: mol_type = other RNA
tggatgttctgtaagtgtc

SEQ ID NO: 37923 - RNA, 19 nt, synthetic construct
  misc_feature 1..19: note = siRNA antisense sequence
  source 1..19: mol_type = other RNA
gacacttacagaacatcca

SEQ ID NO: 37924 - RNA, 19 nt, synthetic construct
  misc_feature 1..19: note = siRNA sense sequence
  source 1..19: mol_type = other RNA
cagatagattgcagactta

SEQ ID NO: 37925 - RNA, 19 nt, synthetic construct
  misc_feature 1..19: note = siRNA antisense sequence
  source 1..19: mol_type = other RNA
taagtctgcaatctatctg

SEQ ID NO: 37926 - RNA, 19 nt, synthetic construct
  misc_feature 1..19: note = siRNA sense sequence
  source 1..19: mol_type = other RNA
gatagattgcagacttact

SEQ ID NO: 37927 - RNA, 19 nt, synthetic construct
  misc_feature 1..19: note = siRNA antisense sequence
  source 1..19: mol_type = other RNA
agtaagtctgcaatctatc

SEQ ID NO: 37928 - RNA, 19 nt, synthetic construct
  misc_feature 1..19: note = siRNA sense sequence
  source 1..19: mol_type = other RNA
atagattgcagacttactt

SEQ ID NO: 37929 - RNA, 19 nt, synthetic construct
  misc_feature 1..19: note = siRNA antisense sequence
  source 1..19: mol_type = other RNA
aagtaagtctgcaatctat

SEQ ID NO: 37930 - RNA, 19 nt, synthetic construct
  misc_feature 1..19: note = siRNA sense sequence
  source 1..19: mol_type = other RNA
tagattgcagacttacttc

SEQ ID NO: 37931 - RNA, 19 nt, synthetic construct
  misc_feature 1..19: note = siRNA antisense sequence
  source 1..19: mol_type = other RNA
gaagtaagtctgcaatcta

SEQ ID NO: 37932 - RNA, 19 nt, synthetic construct
  misc_feature 1..19: note = siRNA sense sequence
  source 1..19: mol_type = other RNA
agattgcagacttacttcg

SEQ ID NO: 37933 - RNA, 19 nt, synthetic construct
  misc_feature 1..19: note = siRNA antisense sequence
  source 1..19: mol_type = other RNA
cgaagtaagtctgcaatct

SEQ ID NO: 37934 - RNA, 19 nt, synthetic construct
  misc_feature 1..19: note = siRNA sense sequence
  source 1..19: mol_type = other RNA
gattgcagacttacttcga

SEQ ID NO: 37935 - RNA, 19 nt, synthetic construct
  misc_feature 1..19: note = siRNA antisense sequence
  source 1..19: mol_type = other RNA
tcgaagtaagtctgcaatc

SEQ ID NO: 37936 - RNA, 19 nt, synthetic construct
  misc_feature 1..19: note = siRNA sense sequence
  source 1..19: mol_type = other RNA
attgcagacttacttcgag

SEQ ID NO: 37937 - RNA, 19 nt, synthetic construct
  misc_feature 1..19: note = siRNA antisense sequence
  source 1..19: mol_type = other RNA
ctcgaagtaagtctgcaat

SEQ ID NO: 37938 - RNA, 19 nt, synthetic construct
  misc_feature 1..19: note = siRNA sense sequence
  source 1..19: mol_type = other RNA
tgctacagaataattgaca

SEQ ID NO: 37939 - RNA, 19 nt, synthetic construct
  misc_feature 1..19: note = siRNA antisense sequence
  source 1..19: mol_type = other RNA
tgtcaattattctgtagca

SEQ ID NO: 37940 - RNA, 19 nt, synthetic construct
  misc_feature 1..19: note = siRNA sense sequence
  source 1..19: mol_type = other RNA
gctacagaataattgacat

SEQ ID NO: 37941 - RNA, 19 nt, synthetic construct
  misc_feature 1..19: note = siRNA antisense sequence
  source 1..19: mol_type = other RNA
atgtcaattattctgtagc

SEQ ID NO: 37942 - RNA, 19 nt, synthetic construct
  misc_feature 1..19: note = siRNA sense sequence
  source 1..19: mol_type = other RNA
taattgacatatttggagg

SEQ ID NO: 37943 - RNA, 19 nt, synthetic construct
  misc_feature 1..19: note = siRNA antisense sequence
  source 1..19: mol_type = other RNA
cctccaaatatgtcaatta

SEQ ID NO: 37944 - RNA, 19 nt, synthetic construct
  misc_feature 1..19: note = siRNA sense sequence
  source 1..19: mol_type = other RNA
aattgacatatttggagga

SEQ ID NO: 37945 - RNA, 19 nt, synthetic construct
  misc_feature 1..19: note = siRNA antisense sequence
  source 1..19: mol_type = other RNA
tcctccaaatatgtcaatt

SEQ ID NO: 37946 - RNA, 19 nt, synthetic construct
  misc_feature 1..19: note = siRNA sense sequence
  source 1..19: mol_type = other RNA
taattatctctagaggtag

SEQ ID NO: 37947 - RNA, 19 nt, synthetic construct
  misc_feature 1..19: note = siRNA antisense sequence
  source 1..19: mol_type = other RNA
ctacctctagagataatta

SEQ ID NO: 37948 - RNA, 19 nt, synthetic construct
  misc_feature 1..19: note = siRNA sense sequence
  source 1..19: mol_type = other RNA
aattatctctagaggtagg

SEQ ID NO: 37949 - RNA, 19 nt, synthetic construct
  misc_feature 1..19: note = siRNA antisense sequence
  source 1..19: mol_type = other RNA
cctacctctagagataatt

SEQ ID NO: 37950 - RNA, 19 nt, synthetic construct
  misc_feature 1..19: note = siRNA sense sequence
  source 1..19: mol_type = other RNA
attatctctagaggtaggc

SEQ ID NO: 37951 - RNA, 19 nt, synthetic construct
  misc_feature 1..19: note = siRNA antisense sequence
  source 1..19: mol_type = other RNA
gcctacctctagagataat

SEQ ID NO: 37952 - RNA, 19 nt, synthetic construct
  misc_feature 1..19: note = siRNA sense sequence
  source 1..19: mol_type = other RNA
ttatctctagaggtaggca

SEQ ID NO: 37953 - RNA, 19 nt, synthetic construct
  misc_feature 1..19: note = siRNA antisense sequence
  source 1..19: mol_type = other RNA
tgcctacctctagagataa

SEQ ID NO: 37954 - RNA, 19 nt, synthetic construct
  misc_feature 1..19: note = siRNA sense sequence
  source 1..19: mol_type = other RNA
tatctctagaggtaggcac

SEQ ID NO: 37955 - RNA, 19 nt, synthetic construct
  misc_feature 1..19: note = siRNA antisense sequence
  source 1..19: mol_type = other RNA
gtgcctacctctagagata

SEQ ID NO: 37956 - RNA, 19 nt, synthetic construct
  misc_feature 1..19: note = siRNA sense sequence
  source 1..19: mol_type = other RNA
atctctagaggtaggcacc

SEQ ID NO: 37957 - RNA, 19 nt, synthetic construct
  misc_feature 1..19: note = siRNA antisense sequence
  source 1..19: mol_type = other RNA
ggtgcctacctctagagat

SEQ ID NO: 37958 - RNA, 19 nt, synthetic construct
  misc_feature 1..19: note = siRNA sense sequence
  source 1..19: mol_type = other RNA
gtaggcaccttcataagtc

SEQ ID NO: 37959 - RNA, 19 nt, synthetic construct
  misc_feature 1..19: note = siRNA antisense sequence
  source 1..19: mol_type = other RNA
gacttatgaaggtgcctac

SEQ ID NO: 37960 - RNA, 19 nt, synthetic construct
  misc_feature 1..19: note = siRNA sense sequence
  source 1..19: mol_type = other RNA
taggcaccttcataagtca

SEQ ID NO: 37961 - RNA, 19 nt, synthetic construct
  misc_feature 1..19: note = siRNA antisense sequence
  source 1..19: mol_type = other RNA
tgacttatgaaggtgccta

SEQ ID NO: 37962 - RNA, 19 nt, synthetic construct
  misc_feature 1..19: note = siRNA sense sequence
  source 1..19: mol_type = other RNA
aggcaccttcataagtcat

SEQ ID NO: 37963 - RNA, 19 nt, synthetic construct
  misc_feature 1..19: note = siRNA antisense sequence
  source 1..19: mol_type = other RNA
atgacttatgaaggtgcct

SEQ ID NO: 37964 - RNA, 19 nt, synthetic construct
  misc_feature 1..19: note = siRNA sense sequence
  source 1..19: mol_type = other RNA
ggcaccttcataagtcata

SEQ ID NO: 37965 - RNA, 19 nt, synthetic construct
  misc_feature 1..19: note = siRNA antisense sequence
  source 1..19: mol_type = other RNA
tatgacttatgaaggtgcc

SEQ ID NO: 37966 - RNA, 19 nt, synthetic construct
  misc_feature 1..19: note = siRNA sense sequence
  source 1..19: mol_type = other RNA
gcaccttcataagtcatat

SEQ ID NO: 37967 - RNA, 19 nt, synthetic construct
  misc_feature 1..19: note = siRNA antisense sequence
  source 1..19: mol_type = other RNA
atatgacttatgaaggtgc

SEQ ID NO: 37968 - RNA, 19 nt, synthetic construct
  misc_feature 1..19: note = siRNA sense sequence
  source 1..19: mol_type = other RNA
caccttcataagtcatatt

SEQ ID NO: 37969 - RNA, 19 nt, synthetic construct
  misc_feature 1..19: note = siRNA antisense sequence
  source 1..19: mol_type = other RNA
aatatgacttatgaaggtg

SEQ ID NO: 37970 - RNA, 19 nt, synthetic construct
  misc_feature 1..19: note = siRNA sense sequence
  source 1..19: mol_type = other RNA
taagtcatatttactgctc

SEQ ID NO: 37971 - RNA, 19 nt, synthetic construct
  misc_feature 1..19: note = siRNA antisense sequence
  source 1..19: mol_type = other RNA
gagcagtaaatatgactta

SEQ ID NO: 37972 - RNA, 19 nt, synthetic construct
  misc_feature 1..19: note = siRNA sense sequence
  source 1..19: mol_type = other RNA
aagtcatatttactgctca

SEQ ID NO: 37973 - RNA, 19 nt, synthetic construct
  misc_feature 1..19: note = siRNA antisense sequence
  source 1..19: mol_type = other RNA
tgagcagtaaatatgactt

SEQ ID NO: 37974 - RNA, 19 nt, synthetic construct
  misc_feature 1..19: note = siRNA sense sequence
  source 1..19: mol_type = other RNA
agtcatatttactgctcat

SEQ ID NO: 37975 - RNA, 19 nt, synthetic construct
  misc_feature 1..19: note = siRNA antisense sequence
  source 1..19: mol_type = other RNA
atgagcagtaaatatgact

SEQ ID NO: 37976 - RNA, 19 nt, synthetic construct
  misc_feature 1..19: note = siRNA sense sequence
  source 1..19: mol_type = other RNA
gtcatatttactgctcatg

SEQ ID NO: 37977 - RNA, 19 nt, synthetic construct
  misc_feature 1..19: note = siRNA antisense sequence
  source 1..19: mol_type = other RNA
catgagcagtaaatatgac

SEQ ID NO: 37978 - RNA, 19 nt, synthetic construct
  misc_feature 1..19: note = siRNA sense sequence
  source 1..19: mol_type = other RNA
tcatatttactgctcatgc

SEQ ID NO: 37979 - RNA, 19 nt, synthetic construct
  misc_feature 1..19: note = siRNA antisense sequence
  source 1..19: mol_type = other RNA
gcatgagcagtaaatatga

SEQ ID NO: 37980 - RNA, 19 nt, synthetic construct
  misc_feature 1..19: note = siRNA sense sequence
  source 1..19: mol_type = other RNA
catatttactgctcatgct

SEQ ID NO: 37981 - RNA, 19 nt, synthetic construct
  misc_feature 1..19: note = siRNA antisense sequence
  source 1..19: mol_type = other RNA
agcatgagcagtaaatatg

SEQ ID NO: 37982 - RNA, 19 nt, synthetic construct
  misc_feature 1..19: note = siRNA sense sequence
  source 1..19: mol_type = other RNA
atatttactgctcatgctt

SEQ ID NO: 37983 - RNA, 19 nt, synthetic construct
  misc_feature 1..19: note = siRNA antisense sequence
  source 1..19: mol_type = other RNA
aagcatgagcagtaaatat

SEQ ID NO: 37984 - RNA, 19 nt, synthetic construct
  misc_feature 1..19: note = siRNA sense sequence
  source 1..19: mol_type = other RNA
tatttactgctcatgcttt

SEQ ID NO: 37985 - RNA, 19 nt, synthetic construct
  misc_feature 1..19: note = siRNA antisense sequence
  source 1..19: mol_type = other RNA
aaagcatgagcagtaaata

SEQ ID NO: 37986 - RNA, 19 nt, synthetic construct
  misc_feature 1..19: note = siRNA sense sequence
  source 1..19: mol_type = other RNA
atttactgctcatgctttc

SEQ ID NO: 37987 - RNA, 19 nt, synthetic construct
  misc_feature 1..19: note = siRNA antisense sequence
  source 1..19: mol_type = other RNA
gaaagcatgagcagtaaat

SEQ ID NO: 37988 - RNA, 19 nt, synthetic construct
  misc_feature 1..19: note = siRNA sense sequence
  source 1..19: mol_type = other RNA
tttactgctcatgctttcg

SEQ ID NO: 37989 - RNA, 19 nt, synthetic construct
  misc_feature 1..19: note = siRNA antisense sequence
  source 1..19: mol_type = other RNA
cgaaagcatgagcagtaaa

SEQ ID NO: 37990 - RNA, 19 nt, synthetic construct
  misc_feature 1..19: note = siRNA sense sequence
  source 1..19: mol_type = other RNA
ttactgctcatgctttcga

SEQ ID NO: 37991 - RNA, 19 nt, synthetic construct
  misc_feature 1..19: note = siRNA antisense sequence
  source 1..19: mol_type = other RNA
tcgaaagcatgagcagtaa

SEQ ID NO: 37992 - RNA, 19 nt, synthetic construct
  misc_feature 1..19: note = siRNA sense sequence
  source 1..19: mol_type = other RNA
tactgctcatgctttcgaa

SEQ ID NO: 37993 - RNA, 19 nt, synthetic construct
  misc_feature 1..19: note = siRNA antisense sequence
  source 1..19: mol_type = other RNA
ttcgaaagcatgagcagta

SEQ ID NO: 37994 - RNA, 19 nt, synthetic construct
  misc_feature 1..19: note = siRNA sense sequence
  source 1..19: mol_type = other RNA
actgctcatgctttcgaat

SEQ ID NO: 37995 - RNA, 19 nt, synthetic construct
  misc_feature 1..19: note = siRNA antisense sequence
  source 1..19: mol_type = other RNA
attcgaaagcatgagcagt

SEQ ID NO: 37996 - RNA, 19 nt, synthetic construct
  misc_feature 1..19: note = siRNA sense sequence
  source 1..19: mol_type = other RNA
ctgctcatgctttcgaatt

SEQ ID NO: 37997 - RNA, 19 nt, synthetic construct
  misc_feature 1..19: note = siRNA antisense sequence
  source 1..19: mol_type = other RNA
aattcgaaagcatgagcag

SEQ ID NO: 37998 - RNA, 19 nt, synthetic construct
  misc_feature 1..19: note = siRNA sense sequence
  source 1..19: mol_type = other RNA
aaaatcatcctgacccatc

SEQ ID NO: 37999 - RNA, 19 nt, synthetic construct
  misc_feature 1..19: note = siRNA antisense sequence
  source 1..19: mol_type = other RNA
gatgggtcaggatgatttt

SEQ ID NO: 38000 - RNA, 19 nt, synthetic construct
  misc_feature 1..19: note = siRNA sense sequence
  source 1..19: mol_type = other RNA
aaatcatcctgacccatct

SEQ ID NO: 38001 - RNA, 19 nt, synthetic construct
  misc_feature 1..19: note = siRNA antisense sequence
  source 1..19: mol_type = other RNA
agatgggtcaggatgattt

SEQ ID NO: 38002 - RNA, 19 nt, synthetic construct
  misc_feature 1..19: note = siRNA sense sequence
  source 1..19: mol_type = other RNA
aatcatcctgacccatctt

SEQ ID NO: 38003 - RNA, 19 nt, synthetic construct
  misc_feature 1..19: note = siRNA antisense sequence
  source 1..19: mol_type = other RNA
aagatgggtcaggatgatt

SEQ ID NO: 38004 - RNA, 19 nt, synthetic construct
  misc_feature 1..19: note = siRNA sense sequence
  source 1..19: mol_type = other RNA
atcatcctgacccatctta

SEQ ID NO: 38005 - RNA, 19 nt, synthetic construct
  misc_feature 1..19: note = siRNA antisense sequence
  source 1..19: mol_type = other RNA
taagatgggtcaggatgat

SEQ ID NO: 38006 - RNA, 19 nt, synthetic construct
  misc_feature 1..19: note = siRNA sense sequence
  source 1..19: mol_type = other RNA
tatagaaggagcacttgtt

SEQ ID NO: 38007 - RNA, 19 nt, synthetic construct
  misc_feature 1..19: note = siRNA antisense sequence
  source 1..19: mol_type = other RNA
aacaagtgctccttctata

SEQ ID NO: 38008 - RNA, 19 nt, synthetic construct
  misc_feature 1..19: note = siRNA sense sequence
  source 1..19: mol_type = other RNA
atagaaggagcacttgtta

SEQ ID NO: 38009 - RNA, 19 nt, synthetic construct
  misc_feature 1..19: note = siRNA antisense sequence
  source 1..19: mol_type = other RNA
taacaagtgctccttctat

SEQ ID NO: 38010 - RNA, 19 nt, synthetic construct
  misc_feature 1..19: note = siRNA sense sequence
  source 1..19: mol_type = other RNA
tagaaggagcacttgttag

SEQ ID NO: 38011 - RNA, 19 nt, synthetic construct
  misc_feature 1..19: note = siRNA antisense sequence
  source 1..19: mol_type = other RNA
ctaacaagtgctccttcta

SEQ ID NO: 38012 - RNA, 19 nt, synthetic construct
  misc_feature 1..19: note = siRNA sense sequence
  source 1..19: mol_type = other RNA
agaaggagcacttgttagc

SEQ ID NO: 38013 - RNA, 19 nt, synthetic construct
  misc_feature 1..19: note = siRNA antisense sequence
  source 1..19: mol_type = other RNA
gctaacaagtgctccttct

SEQ ID NO: 38014 - RNA, 19 nt, synthetic construct
  misc_feature 1..19: note = siRNA sense sequence
  source 1..19: mol_type = other RNA
gaaggagcacttgttagcc

SEQ ID NO: 38015 - RNA, 19 nt, synthetic construct
  misc_feature 1..19: note = siRNA antisense sequence
  source 1..19: mol_type = other RNA
ggctaacaagtgctccttc

SEQ ID NO: 38016 - RNA, 19 nt, synthetic construct
  misc_feature 1..19: note = siRNA sense sequence
  source 1..19: mol_type = other RNA
aaggagcacttgttagccc

SEQ ID NO: 38017 - RNA, 19 nt, synthetic construct
  misc_feature 1..19: note = siRNA antisense sequence
  source 1..19: mol_type = other RNA
gggctaacaagtgctcctt

SEQ ID NO: 38018 - RNA, 19 nt, synthetic construct
  misc_feature 1..19: note = siRNA sense sequence
  source 1..19: mol_type = other RNA
aggagcacttgttagccca

SEQ ID NO: 38019 - RNA, 19 nt, synthetic construct
  misc_feature 1..19: note = siRNA antisense sequence
  source 1..19: mol_type = other RNA
tgggctaacaagtgctcct

SEQ ID NO: 38020 - RNA, 19 nt, synthetic construct
  misc_feature 1..19: note = siRNA sense sequence
  source 1..19: mol_type = other RNA
ggagcacttgttagcccat

SEQ ID NO: 38021 - RNA, 19 nt, synthetic construct
  misc_feature 1..19: note = siRNA antisense sequence
  source 1..19: mol_type = other RNA
atgggctaacaagtgctcc

SEQ ID NO: 38022 - RNA, 19 nt, synthetic construct
  misc_feature 1..19: note = siRNA sense sequence
  source 1..19: mol_type = other RNA
gagcacttgttagcccatg

SEQ ID NO: 38023 - RNA, 19 nt, synthetic construct
  misc_feature 1..19: note = siRNA antisense sequence
  source 1..19: mol_type = other RNA
catgggctaacaagtgctc

SEQ ID NO: 38024 - RNA, 19 nt, synthetic construct
  misc_feature 1..19: note = siRNA sense sequence
  source 1..19: mol_type = other RNA
agcacttgttagcccatga

SEQ ID NO: 38025 - RNA, 19 nt, synthetic construct
  misc_feature 1..19: note = siRNA antisense sequence
  source 1..19: mol_type = other RNA
tcatgggctaacaagtgct

SEQ ID NO: 38026 - RNA, 19 nt, synthetic construct
  misc_feature 1..19: note = siRNA sense sequence
  source 1..19: mol_type = other RNA
gcacttgttagcccatgac

SEQ ID NO: 38027 - RNA, 19 nt, synthetic construct
  misc_feature 1..19: note = siRNA antisense sequence
  source 1..19: mol_type = other RNA
gtcatgggctaacaagtgc

SEQ ID NO: 38028 - RNA, 19 nt, synthetic construct
  misc_feature 1..19: note = siRNA sense sequence
  source 1..19: mol_type = other RNA
aggtagccttatgtcctct

SEQ ID NO: 38029 - RNA, 19 nt, synthetic construct
  misc_feature 1..19: note = siRNA antisense sequence
  source 1..19: mol_type = other RNA
agaggacataaggctacct

SEQ ID NO: 38030 - RNA, 19 nt, synthetic construct
  misc_feature 1..19: note = siRNA sense sequence
  source 1..19: mol_type = other RNA
ggtagccttatgtcctctt

SEQ ID NO: 38031 - RNA, 19 nt, synthetic construct
  misc_feature 1..19: note = siRNA antisense sequence
  source 1..19: mol_type = other RNA
aagaggacataaggctacc

SEQ ID NO: 38032 - RNA, 19 nt, synthetic construct
  misc_feature 1..19: note = siRNA sense sequence
  source 1..19: mol_type = other RNA
gtagccttatgtcctcttt

SEQ ID NO: 38033 - RNA, 19 nt, synthetic construct
  misc_feature 1..19: note = siRNA antisense sequence
  source 1..19: mol_type = other RNA
aaagaggacataaggctac

SEQ ID NO: 38034 - RNA, 19 nt, synthetic construct
  misc_feature 1..19: note = siRNA sense sequence
  source 1..19: mol_type = other RNA
tagccttatgtcctcttta

SEQ ID NO: 38035 - RNA, 19 nt, synthetic construct
  misc_feature 1..19: note = siRNA antisense sequence
  source 1..19: mol_type = other RNA
taaagaggacataaggcta

SEQ ID NO: 38036 - RNA, 19 nt, synthetic construct
  misc_feature 1..19: note = siRNA sense sequence
  source 1..19: mol_type = other RNA
agccttatgtcctctttac

SEQ ID NO: 38037 - RNA, 19 nt, synthetic construct
  misc_feature 1..19: note = siRNA antisense sequence
  source 1..19: mol_type = other RNA
gtaaagaggacataaggct

SEQ ID NO: 38038 - RNA, 19 nt, synthetic construct
  misc_feature 1..19: note = siRNA sense sequence
  source 1..19: mol_type = other RNA
gccttatgtcctctttact

SEQ ID NO: 38039 - RNA, 19 nt, synthetic construct
  misc_feature 1..19: note = siRNA antisense sequence
  source 1..19: mol_type = other RNA
agtaaagaggacataaggc

SEQ ID NO: 38040 - RNA, 19 nt, synthetic construct
  misc_feature 1..19: note = siRNA sense sequence
  source 1..19: mol_type = other RNA
tgtcctctttactgttcag

SEQ ID NO: 38041 - RNA, 19 nt, synthetic construct
  misc_feature 1..19: note = siRNA antisense sequence
  source 1..19: mol_type = other RNA
ctgaacagtaaagaggaca

SEQ ID NO: 38042 - RNA, 19 nt, synthetic construct
  misc_feature 1..19: note = siRNA sense sequence
  source 1..19: mol_type = other RNA
gtcctctttactgttcaga

SEQ ID NO: 38043 - RNA, 19 nt, synthetic construct
  misc_feature 1..19: note = siRNA antisense sequence
  source 1..19: mol_type = other RNA
tctgaacagtaaagaggac

SEQ ID NO: 38044 - RNA, 19 nt, synthetic construct
  misc_feature 1..19: note = siRNA sense sequence
  source 1..19: mol_type = other RNA
tcctctttactgttcagaa

SEQ ID NO: 38045 - RNA, 19 nt, synthetic construct
  misc_feature 1..19: note = siRNA antisense sequence
  source 1..19: mol_type = other RNA
ttctgaacagtaaagagga

SEQ ID NO: 38046 - RNA, 19 nt, synthetic construct
  misc_feature 1..19: note = siRNA sense sequence
  source 1..19: mol_type = other RNA
cctctttactgttcagaag

SEQ ID NO: 38047 - RNA, 19 nt, synthetic construct
  misc_feature 1..19: note = siRNA antisense sequence
  source 1..19: mol_type = other RNA
cttctgaacagtaaagagg

SEQ ID NO: 38048 - RNA, 19 nt, synthetic construct
  misc_feature 1..19: note = siRNA sense sequence
  source 1..19: mol_type = other RNA
ctctttactgttcagaagt

SEQ ID NO: 38049 - RNA, 19 nt, synthetic construct
  misc_feature 1..19: note = siRNA antisense sequence
  source 1..19: mol_type = other RNA
acttctgaacagtaaagag

SEQ ID NO: 38050 - RNA, 19 nt, synthetic construct
  misc_feature 1..19: note = siRNA sense sequence
  source 1..19: mol_type = other RNA
tttactgttcagaagtttg

SEQ ID NO: 38051 - RNA, 19 nt, synthetic construct
  misc_feature 1..19: note = siRNA antisense sequence
  source 1..19: mol_type = other RNA
caaacttctgaacagtaaa

SEQ ID NO: 38052 - RNA, 19 nt, synthetic construct
  misc_feature 1..19: note = siRNA sense sequence
  source 1..19: mol_type = other RNA
ctgttcagaagtttgctct

SEQ ID NO: 38053 - RNA, 19 nt, synthetic construct
  misc_feature 1..19: note = siRNA antisense sequence
  source 1..19: mol_type = other RNA
agagcaaacttctgaacag

SEQ ID NO: 38054 - RNA, 19 nt, synthetic construct
  misc_feature 1..19: note = siRNA sense sequence
  source 1..19: mol_type = other RNA
agaagtttgctctgaagtg

SEQ ID NO: 38055 - RNA, 19 nt, synthetic construct
  misc_feature 1..19: note = siRNA antisense sequence
  source 1..19: mol_type = other RNA
cacttcagagcaaacttct

SEQ ID NO: 38056 - RNA, 19 nt, synthetic construct
  misc_feature 1..19: note = siRNA sense sequence
  source 1..19: mol_type = other RNA
gaagtttgctctgaagtgt

SEQ ID NO: 38057 - RNA, 19 nt, synthetic construct
  misc_feature 1..19: note = siRNA antisense sequence
  source 1..19: mol_type = other RNA
acacttcagagcaaacttc

SEQ ID NO: 38058 - RNA, 19 nt, synthetic construct
  misc_feature 1..19: note = siRNA sense sequence
  source 1..19: mol_type = other RNA
aagtttgctctgaagtgta

SEQ ID NO: 38059 - RNA, 19 nt, synthetic construct
  misc_feature 1..19: note = siRNA antisense sequence
  source 1..19: mol_type = other RNA
tacacttcagagcaaactt

SEQ ID NO: 38060 - RNA, 19 nt, synthetic construct
  misc_feature 1..19: note = siRNA sense sequence
  source 1..19: mol_type = other RNA
agtttgctctgaagtgtaa

SEQ ID NO: 38061 - RNA, 19 nt, synthetic construct
  misc_feature 1..19: note = siRNA antisense sequence
  source 1..19: mol_type = other RNA
ttacacttcagagcaaact

SEQ ID NO: 38062 - RNA, 19 nt, synthetic construct
  misc_feature 1..19: note = siRNA sense sequence
  source 1..19: mol_type = other RNA
gtttgctctgaagtgtaat

SEQ ID NO: 38063 - RNA, 19 nt, synthetic construct
  misc_feature 1..19: note = siRNA antisense sequence
  source 1..19: mol_type = other RNA
attacacttcagagcaaac

SEQ ID NO: 38064 - RNA, 19 nt, synthetic construct
  misc_feature 1..19: note = siRNA sense sequence
  source 1..19: mol_type = other RNA
tgctctgaagtgtaattta

SEQ ID NO: 38065 - RNA, 19 nt, synthetic construct
  misc_feature 1..19: note = siRNA antisense sequence
  source 1..19: mol_type = other RNA
taaattacacttcagagca

SEQ ID NO: 38066 - RNA, 19 nt, synthetic construct
  misc_feature 1..19: note = siRNA sense sequence
  source 1..19: mol_type = other RNA
gccacatgctttctcagta

SEQ ID NO: 38067 - RNA, 19 nt, synthetic construct
  misc_feature 1..19: note = siRNA antisense sequence
  source 1..19: mol_type = other RNA
tactgagaaagcatgtggc

SEQ ID NO: 38068 - RNA, 19 nt, synthetic construct
  misc_feature 1..19: note = siRNA sense sequence
  source 1..19: mol_type = other RNA
gttgttcattatgtttagc

SEQ ID NO: 38069 - RNA, 19 nt, synthetic construct
  misc_feature 1..19: note = siRNA antisense sequence
  source 1..19: mol_type = other RNA
gctaaacataatgaacaac

SEQ ID NO: 38070 - RNA, 19 nt, synthetic construct
  misc_feature 1..19: note = siRNA sense sequence
  source 1..19: mol_type = other RNA
gttcattatgtttagcatg

SEQ ID NO: 38071 - RNA, 19 nt, synthetic construct
  misc_feature 1..19: note = siRNA antisense sequence
  source 1..19: mol_type = other RNA
catgctaaacataatgaac

SEQ ID NO: 38072 - RNA, 19 nt, synthetic construct
  misc_feature 1..19: note = siRNA sense sequence
  source 1..19: mol_type = other RNA
tatgtttagcatgagctgg

SEQ ID NO: 38073 - RNA, 19 nt, synthetic construct
  misc_feature 1..19: note = siRNA antisense sequence
  source 1..19: mol_type = other RNA
ccagctcatgctaaacata

SEQ ID NO: 38074 - RNA, 19 nt, synthetic construct
  misc_feature 1..19: note = siRNA sense sequence
  source 1..19: mol_type = other RNA
atgtttagcatgagctgga

SEQ ID NO: 38075 - RNA, 19 nt, synthetic construct
  misc_feature 1..19: note = siRNA antisense sequence
  source 1..19: mol_type = other RNA
tccagctcatgctaaacat

SEQ ID NO: 38076 - RNA, 19 nt, synthetic construct
  misc_feature 1..19: note = siRNA sense sequence
  source 1..19: mol_type = other RNA
tgtttagcatgagctggag

SEQ ID NO: 38077 - RNA, 19 nt, synthetic construct
  misc_feature 1..19: note = siRNA antisense sequence
  source 1..19: mol_type = other RNA
ctccagctcatgctaaaca

SEQ ID NO: 38078 - RNA, 19 nt, synthetic construct
  misc_feature 1..19: note = siRNA sense sequence
  source 1..19: mol_type = other RNA
gtttagcatgagctggagc

SEQ ID NO: 38079 - RNA, 19 nt, synthetic construct
  misc_feature 1..19: note = siRNA antisense sequence
  source 1..19: mol_type = other RNA
gctccagctcatgctaaac

SEQ ID NO: 38080 - RNA, 19 nt, synthetic construct
  misc_feature 1..19: note = siRNA sense sequence
  source 1..19: mol_type = other RNA
tttagcatgagctggagca

SEQ ID NO: 38081 - RNA, 19 nt, synthetic construct
  misc_feature 1..19: note = siRNA antisense sequence
  source 1..19: mol_type = other RNA
tgctccagctcatgctaaa

SEQ ID NO: 38082 - RNA, 19 nt, synthetic construct
  misc_feature 1..19: note = siRNA sense sequence
  source 1..19: mol_type = other RNA
ttagcatgagctggagcat

SEQ ID NO: 38083 - RNA, 19 nt, synthetic construct
  misc_feature 1..19: note = siRNA antisense sequence
  source 1..19: mol_type = other RNA
atgctccagctcatgctaa

SEQ ID NO: 38084 - RNA, 19 nt, synthetic construct
  misc_feature 1..19: note = siRNA sense sequence
  source 1..19: mol_type = other RNA
tagcatgagctggagcatc

SEQ ID NO: 38085 - RNA, 19 nt, synthetic construct
  misc_feature 1..19: note = siRNA antisense sequence
  source 1..19: mol_type = other RNA
gatgctccagctcatgcta

SEQ ID NO: 38086 - RNA, 19 nt, synthetic construct
  misc_feature 1..19: note = siRNA sense sequence
  source 1..19: mol_type = other RNA
agcatgagctggagcatcc

SEQ ID NO: 38087 - RNA, 19 nt, synthetic construct
  misc_feature 1..19: note = siRNA antisense sequence
  source 1..19: mol_type = other RNA
ggatgctccagctcatgct

SEQ ID NO: 38088 - RNA, 19 nt, synthetic construct
  misc_feature 1..19: note = siRNA sense sequence
  source 1..19: mol_type = other RNA
gagcatccaagtaattgca

SEQ ID NO: 38089 - RNA, 19 nt, synthetic construct
  misc_feature 1..19: note = siRNA antisense sequence
  source 1..19: mol_type = other RNA
tgcaattacttggatgctc

SEQ ID NO: 38090 - RNA, 19 nt, synthetic construct
  misc_feature 1..19: note = siRNA sense sequence
  source 1..19: mol_type = other RNA
agcatccaagtaattgcaa

SEQ ID NO: 38091 - RNA, 19 nt, synthetic construct
  misc_feature 1..19: note = siRNA antisense sequence
  source 1..19: mol_type = other RNA
ttgcaattacttggatgct

SEQ ID NO: 38092 - RNA, 19 nt, synthetic construct
  misc_feature 1..19: note = siRNA sense sequence
  source 1..19: mol_type = other RNA
tccaagtaattgcaatgtg

SEQ ID NO: 38093 - RNA, 19 nt, synthetic construct
  misc_feature 1..19: note = siRNA antisense sequence
  source 1..19: mol_type = other RNA
cacattgcaattacttgga

SEQ ID NO: 38094 - RNA, 19 nt, synthetic construct
  misc_feature 1..19: note = siRNA sense sequence
  source 1..19: mol_type = other RNA
ccaagtaattgcaatgtgg

SEQ ID NO: 38095 - RNA, 19 nt, synthetic construct
  misc_feature 1..19: note = siRNA antisense sequence
  source 1..19: mol_type = other RNA
ccacattgcaattacttgg

SEQ ID NO: 38096 - RNA, 19 nt, synthetic construct
  misc_feature 1..19: note = siRNA sense sequence
  source 1..19: mol_type = other RNA
gtaattgcaatgtggttca

SEQ ID NO: 38097 - RNA, 19 nt, synthetic construct
  misc_feature 1..19: note = siRNA antisense sequence
  source 1..19: mol_type = other RNA
tgaaccacattgcaattac

SEQ ID NO: 38098 - RNA, 19 nt, synthetic construct
  misc_feature 1..19: note = siRNA sense sequence
  source 1..19: mol_type = other RNA
taattgcaatgtggttcag

SEQ ID NO: 38099 - RNA, 19 nt, synthetic construct
  misc_feature 1..19: note = siRNA antisense sequence
  source 1..19: mol_type = other RNA
ctgaaccacattgcaatta

SEQ ID NO: 38100 - RNA, 19 nt, synthetic construct
  misc_feature 1..19: note = siRNA sense sequence
  source 1..19: mol_type = other RNA
aattgcaatgtggttcaga

SEQ ID NO: 38101 - RNA, 19 nt, synthetic construct
  misc_feature 1..19: note = siRNA antisense sequence
  source 1..19: mol_type = other RNA
tctgaaccacattgcaatt

SEQ ID NO: 38102 - RNA, 19 nt, synthetic construct
  misc_feature 1..19: note = siRNA sense sequence
  source 1..19: mol_type = other RNA
attgcaatgtggttcagaa

SEQ ID NO: 38103 - RNA, 19 nt, synthetic construct
  misc_feature 1..19: note = siRNA antisense sequence
  source 1..19: mol_type = other RNA
ttctgaaccacattgcaat

SEQ ID NO: 38104 - RNA, 19 nt, synthetic construct
  misc_feature 1..19: note = siRNA sense sequence
  source 1..19: mol_type = other RNA
tgcaatgtggttcagaaga

SEQ ID NO: 38105 - RNA, 19 nt, synthetic construct
  misc_feature 1..19: note = siRNA antisense sequence
  source 1..19: mol_type = other RNA
tcttctgaaccacattgca

SEQ ID NO: 38106 - RNA, 19 nt, synthetic construct
  misc_feature 1..19: note = siRNA sense sequence
  source 1..19: mol_type = other RNA
gcaatgtggttcagaagaa

SEQ ID NO: 38107 - RNA, 19 nt, synthetic construct
  misc_feature 1..19: note = siRNA antisense sequence
  source 1..19: mol_type = other RNA
ttcttctgaaccacattgc

SEQ ID NO: 38108 - RNA, 19 nt, synthetic construct
  misc_feature 1..19: note = siRNA sense sequence
  source 1..19: mol_type = other RNA
caatgtggttcagaagaat

SEQ ID NO: 38109 - RNA, 19 nt, synthetic construct
  misc_feature 1..19: note = siRNA antisense sequence
  source 1..19: mol_type = other RNA
attcttctgaaccacattg

SEQ ID NO: 38110 - RNA, 19 nt, synthetic construct
  misc_feature 1..19: note = siRNA sense sequence
  source 1..19: mol_type = other RNA
aatgtggttcagaagaatt

SEQ ID NO: 38111 - RNA, 19 nt, synthetic construct
  misc_feature 1..19: note = siRNA antisense sequence
  source 1..19: mol_type = other RNA
aattcttctgaaccacatt

SEQ ID NO: 38112 - RNA, 19 nt, synthetic construct
  misc_feature 1..19: note = siRNA sense sequence
  source 1..19: mol_type = other RNA
atgtggttcagaagaattc

SEQ ID NO: 38113 - RNA, 19 nt, synthetic construct
  misc_feature 1..19: note = siRNA antisense sequence
  source 1..19: mol_type = other RNA
gaattcttctgaaccacat

SEQ ID NO: 38114 - RNA, 19 nt, synthetic construct
  misc_feature 1..19: note = siRNA sense sequence
  source 1..19: mol_type = other RNA
tgtggttcagaagaattca

SEQ ID NO: 38115 - RNA, 19 nt, synthetic construct
  misc_feature 1..19: note = siRNA antisense sequence
  source 1..19: mol_type = other RNA
tgaattcttctgaaccaca

SEQ ID NO: 38116 - RNA, 19 nt, synthetic construct
  misc_feature 1..19: note = siRNA sense sequence
  source 1..19: mol_type = other RNA
gtggttcagaagaattcag

SEQ ID NO: 38117 - RNA, 19 nt, synthetic construct
  misc_feature 1..19: note = siRNA antisense sequence
  source 1..19: mol_type = other RNA
ctgaattcttctgaaccac

SEQ ID NO: 38118 - RNA, 19 nt, synthetic construct
  misc_feature 1..19: note = siRNA sense sequence
  source 1..19: mol_type = other RNA
tggttcagaagaattcaga

SEQ ID NO: 38119 - RNA, 19 nt, synthetic construct
  misc_feature 1..19: note = siRNA antisense sequence
  source 1..19: mol_type = other RNA
tctgaattcttctgaacca

SEQ ID NO: 38120 - RNA, 19 nt, synthetic construct
  misc_feature 1..19: note = siRNA sense sequence
  source 1..19: mol_type = other RNA
ggttcagaagaattcagaa

SEQ ID NO: 38121 - RNA, 19 nt, synthetic construct
  misc_feature 1..19: note = siRNA antisense sequence
  source 1..19: mol_type = other RNA
ttctgaattcttctgaacc

SEQ ID NO: 38122 - RNA, 19 nt, synthetic construct
  misc_feature 1..19: note = siRNA sense sequence
  source 1..19: mol_type = other RNA
caagccttccagatttcca

SEQ ID NO: 38123 - RNA, 19 nt, synthetic construct
  misc_feature 1..19: note = siRNA antisense sequence
  source 1..19: mol_type = other RNA
tggaaatctggaaggcttg

SEQ ID NO: 38124 - RNA, 19 nt, synthetic construct
  misc_feature 1..19: note = siRNA sense sequence
  source 1..19: mol_type = other RNA
gccttccagatttccagat

SEQ ID NO: 38125 - RNA, 19 nt, synthetic construct
  misc_feature 1..19: note = siRNA antisense sequence
  source 1..19: mol_type = other RNA
atctggaaatctggaaggc

SEQ ID NO: 38126 - RNA, 19 nt, synthetic construct
  misc_feature 1..19: note = siRNA sense sequence
  source 1..19: mol_type = other RNA
cagatttccagatttagtg

SEQ ID NO: 38127 - RNA, 19 nt, synthetic construct
  misc_feature 1..19: note = siRNA antisense sequence
  source 1..19: mol_type = other RNA
cactaaatctggaaatctg

SEQ ID NO: 38128 - RNA, 19 nt, synthetic construct
  misc_feature 1..19: note = siRNA sense sequence
  source 1..19: mol_type = other RNA
agatttccagatttagtgg

SEQ ID NO: 38129 - RNA, 19 nt, synthetic construct
  misc_feature 1..19: note = siRNA antisense sequence
  source 1..19: mol_type = other RNA
ccactaaatctggaaatct

SEQ ID NO: 38130 - RNA, 19 nt, synthetic construct
  misc_feature 1..19: note = siRNA sense sequence
  source 1..19: mol_type = other RNA
gatttccagatttagtggt

SEQ ID NO: 38131 - RNA, 19 nt, synthetic construct
  misc_feature 1..19: note = siRNA antisense sequence
  source 1..19: mol_type = other RNA
accactaaatctggaaatc

SEQ ID NO: 38132 - RNA, 19 nt, synthetic construct
  misc_feature 1..19: note = siRNA sense sequence
  source 1..19: mol_type = other RNA
atttccagatttagtggta

SEQ ID NO: 38133 - RNA, 19 nt, synthetic construct
  misc_feature 1..19: note = siRNA antisense sequence
  source 1..19: mol_type = other RNA
taccactaaatctggaaat

SEQ ID NO: 38134 - RNA, 19 nt, synthetic construct
  misc_feature 1..19: note = siRNA sense sequence
  source 1..19: mol_type = other RNA
tttccagatttagtggtaa

SEQ ID NO: 38135 - RNA, 19 nt, synthetic construct
  misc_feature 1..19: note = siRNA antisense sequence
  source 1..19: mol_type = other RNA
ttaccactaaatctggaaa

SEQ ID NO: 38136 - RNA, 19 nt, synthetic construct
  misc_feature 1..19: note = siRNA sense sequence
  source 1..19: mol_type = other RNA
catcagcatggccaggtct

SEQ ID NO: 38137 - RNA, 19 nt, synthetic construct
  misc_feature 1..19: note = siRNA antisense sequence
  source 1..19: mol_type = other RNA
agacctggccatgctgatg

SEQ ID NO: 38138 - RNA, 19 nt, synthetic construct
  misc_feature 1..19: note = siRNA sense sequence
  source 1..19: mol_type = other RNA
atcagcatggccaggtctc

SEQ ID NO: 38139 - RNA, 19 nt, synthetic construct
  misc_feature 1..19: note = siRNA antisense sequence
  source 1..19: mol_type = other RNA
gagacctggccatgctgat

SEQ ID NO: 38140 - RNA, 19 nt, synthetic construct
  misc_feature 1..19: note = siRNA sense sequence
  source 1..19: mol_type = other RNA
tcagcatggccaggtctca

SEQ ID NO: 38141 - RNA, 19 nt, synthetic construct
  misc_feature 1..19: note = siRNA antisense sequence
  source 1..19: mol_type = other RNA
tgagacctggccatgctga

SEQ ID NO: 38142 - RNA, 19 nt, synthetic construct
  misc_feature 1..19: note = siRNA sense sequence
  source 1..19: mol_type = other RNA
cagcatggccaggtctcag

SEQ ID NO: 38143 - RNA, 19 nt, synthetic construct
  misc_feature 1..19: note = siRNA antisense sequence
  source 1..19: mol_type = other RNA
ctgagacctggccatgctg

SEQ ID NO: 38144 - RNA, 19 nt, synthetic construct
  misc_feature 1..19: note = siRNA sense sequence
  source 1..19: mol_type = other RNA
atggccaggtctcagccga

SEQ ID NO: 38145 - RNA, 19 nt, synthetic construct
  misc_feature 1..19: note = siRNA antisense sequence
  source 1..19: mol_type = other RNA
tcggctgagacctggccat

SEQ ID NO: 38146 - RNA, 19 nt, synthetic construct
  misc_feature 1..19: note = siRNA sense sequence
  source 1..19: mol_type = other RNA
tggccaggtctcagccgaa

SEQ ID NO: 38147 - RNA, 19 nt, synthetic construct
  misc_feature 1..19: note = siRNA antisense sequence
  source 1..19: mol_type = other RNA
ttcggctgagacctggcca

SEQ ID NO: 38148 - RNA, 19 nt, synthetic construct
  misc_feature 1..19: note = siRNA sense sequence
  source 1..19: mol_type = other RNA
gggctttccactctaatct

SEQ ID NO: 38149 - RNA, 19 nt, synthetic construct
  misc_feature 1..19: note = siRNA antisense sequence
  source 1..19: mol_type = other RNA
agattagagtggaaagccc

SEQ ID NO: 38150 - RNA, 19 nt, synthetic construct
  misc_feature 1..19: note = siRNA sense sequence
  source 1..19: mol_type = other RNA
ggctttccactctaatctg

SEQ ID NO: 38151 - RNA, 19 nt, synthetic construct
  misc_feature 1..19: note = siRNA antisense sequence
  source 1..19: mol_type = other RNA
cagattagagtggaaagcc

SEQ ID NO: 38152 - RNA, 19 nt, synthetic construct
  misc_feature 1..19: note = siRNA sense sequence
  source 1..19: mol_type = other RNA
gctttccactctaatctgt

SEQ ID NO: 38153 - RNA, 19 nt, synthetic construct
  misc_feature 1..19: note = siRNA antisense sequence
  source 1..19: mol_type = other RNA
acagattagagtggaaagc

SEQ ID NO: 38154 - RNA, 19 nt, synthetic construct
  misc_feature 1..19: note = siRNA sense sequence
  source 1..19: mol_type = other RNA
ctttccactctaatctgtt

SEQ ID NO: 38155 - RNA, 19 nt, synthetic construct
  misc_feature 1..19: note = siRNA antisense sequence
  source 1..19: mol_type = other RNA
aacagattagagtggaaag

SEQ ID NO: 38156 - RNA, 19 nt, synthetic construct
  misc_feature 1..19: note = siRNA sense sequence
  source 1..19: mol_type = other RNA
tttccactctaatctgttg

SEQ ID NO: 38157 - RNA, 19 nt, synthetic construct
  misc_feature 1..19: note = siRNA antisense sequence
  source 1..19: mol_type = other RNA
caacagattagagtggaaa

SEQ ID NO: 38158 - RNA, 19 nt, synthetic construct
  misc_feature 1..19: note = siRNA sense sequence
  source 1..19: mol_type = other RNA
tccactctaatctgttgct

SEQ ID NO: 38159 - RNA, 19 nt, synthetic construct
  misc_feature 1..19: note = siRNA antisense sequence
  source 1..19: mol_type = other RNA
agcaacagattagagtgga

SEQ ID NO: 38160 - RNA, 19 nt, synthetic construct
  misc_feature 1..19: note = siRNA sense sequence
  source 1..19: mol_type = other RNA
ccactctaatctgttgctg

SEQ ID NO: 38161 - RNA, 19 nt, synthetic construct
  misc_feature 1..19: note = siRNA antisense sequence
  source 1..19: mol_type = other RNA
cagcaacagattagagtgg

SEQ ID NO: 38162 - RNA, 19 nt, synthetic construct
  misc_feature 1..19: note = siRNA sense sequence
  source 1..19: mol_type = other RNA
tttgcttcattccttccag

SEQ ID NO: 38163 - RNA, 19 nt, synthetic construct
  misc_feature 1..19: note = siRNA antisense sequence
  source 1..19: mol_type = other RNA
ctggaaggaatgaagcaaa

SEQ ID NO: 38164 - RNA, 19 nt, synthetic construct
  misc_feature 1..19: note = siRNA sense sequence
  source 1..19: mol_type = other RNA
ttgcttcattccttccagc

SEQ ID NO: 38165 - RNA, 19 nt, synthetic construct
  misc_feature 1..19: note = siRNA antisense sequence
  source 1..19: mol_type = other RNA
gctggaaggaatgaagcaa

SEQ ID NO: 38166 - RNA, 19 nt, synthetic construct
  misc_feature 1..19: note = siRNA sense sequence
  source 1..19: mol_type = other RNA
gcttcattccttccagcat

SEQ ID NO: 38167 - RNA, 19 nt, synthetic construct
  misc_feature 1..19: note = siRNA antisense sequence
  source 1..19: mol_type = other RNA
atgctggaaggaatgaagc

SEQ ID NO: 38168 - RNA, 19 nt, synthetic construct
  misc_feature 1..19: note = siRNA sense sequence
  source 1..19: mol_type = other RNA
cttcattccttccagcatg

SEQ ID NO: 38169 - RNA, 19 nt, synthetic construct
  misc_feature 1..19: note = siRNA antisense sequence
  source 1..19: mol_type = other RNA
catgctggaaggaatgaag

SEQ ID NO: 38170 - RNA, 19 nt, synthetic construct
  misc_feature 1..19: note = siRNA sense sequence
  source 1..19: mol_type = other RNA
ttcattccttccagcatgt

SEQ ID NO: 38171 - RNA, 19 nt, synthetic construct
  misc_feature 1..19: note = siRNA antisense sequence
  source 1..19: mol_type = other RNA
acatgctggaaggaatgaa

SEQ ID NO: 38172 - RNA, 19 nt, synthetic construct
  misc_feature 1..19: note = siRNA sense sequence
  source 1..19: mol_type = other RNA
ttccttccagcatgtgtgc

SEQ ID NO: 38173 - RNA, 19 nt, synthetic construct
  misc_feature 1..19: note = siRNA antisense sequence
  source 1..19: mol_type = other RNA
gcacacatgctggaaggaa

SEQ ID NO: 38174 - RNA, 19 nt, synthetic construct
  misc_feature 1..19: note = siRNA sense sequence
  source 1..19: mol_type = other RNA
tccttccagcatgtgtgcc

SEQ ID NO: 38175 - RNA, 19 nt, synthetic construct
  misc_feature 1..19: note = siRNA antisense sequence
  source 1..19: mol_type = other RNA
ggcacacatgctggaagga

SEQ ID NO: 38176 - RNA, 19 nt, synthetic construct
  misc_feature 1..19: note = siRNA sense sequence
  source 1..19: mol_type = other RNA
ttccagcatgtgtgcctac

SEQ ID NO: 38177 - RNA, 19 nt, synthetic construct
  misc_feature 1..19: note = siRNA antisense sequence
  source 1..19: mol_type = other RNA
gtaggcacacatgctggaa

SEQ ID NO: 38178 - RNA, 19 nt, synthetic construct
  misc_feature 1..19: note = siRNA sense sequence
  source 1..19: mol_type = other RNA
tccagcatgtgtgcctacc

SEQ ID NO: 38179 - RNA, 19 nt, synthetic construct
  misc_feature 1..19: note = siRNA antisense sequence
  source 1..19: mol_type = other RNA
ggtaggcacacatgctgga

SEQ ID NO: 38180 - RNA, 19 nt, synthetic construct
  misc_feature 1..19: note = siRNA sense sequence
  source 1..19: mol_type = other RNA
ccagcatgtgtgcctaccc

SEQ ID NO: 38181 - RNA, 19 nt, synthetic construct
  misc_feature 1..19: note = siRNA antisense sequence
  source 1..19: mol_type = other RNA
gggtaggcacacatgctgg

SEQ ID NO: 38182 - RNA, 19 nt, synthetic construct
  misc_feature 1..19: note = siRNA sense sequence
  source 1..19: mol_type = other RNA
cagcatgtgtgcctaccct

SEQ ID NO: 38183 - RNA, 19 nt, synthetic construct
  misc_feature 1..19: note = siRNA antisense sequence
  source 1..19: mol_type = other RNA
agggtaggcacacatgctg

SEQ ID NO: 38184 - RNA, 19 nt, synthetic construct
  misc_feature 1..19: note = siRNA sense sequence
  source 1..19: mol_type = other RNA
agcatgtgtgcctaccctt

SEQ ID NO: 38185 - RNA, 19 nt, synthetic construct
  misc_feature 1..19: note = siRNA antisense sequence
  source 1..19: mol_type = other RNA
aagggtaggcacacatgct

SEQ ID NO: 38186 - RNA, 19 nt, synthetic construct
  misc_feature 1..19: note = siRNA sense sequence
  source 1..19: mol_type = other RNA
gcatgtgtgcctacccttt

SEQ ID NO: 38187 - RNA, 19 nt, synthetic construct
  misc_feature 1..19: note = siRNA antisense sequence
  source 1..19: mol_type = other RNA
aaagggtaggcacacatgc

SEQ ID NO: 38188 - RNA, 19 nt, synthetic construct
  misc_feature 1..19: note = siRNA sense sequence
  source 1..19: mol_type = other RNA
catgtgtgcctaccctttt

SEQ ID NO: 38189 - RNA, 19 nt, synthetic construct
  misc_feature 1..19: note = siRNA antisense sequence
  source 1..19: mol_type = other RNA
aaaagggtaggcacacatg

SEQ ID NO: 38190 - RNA, 19 nt, synthetic construct
  misc_feature 1..19: note = siRNA sense sequence
  source 1..19: mol_type = other RNA
atgtgtgcctaccctttta

SEQ ID NO: 38191 - RNA, 19 nt, synthetic construct
  misc_feature 1..19: note = siRNA antisense sequence
  source 1..19: mol_type = other RNA
taaaagggtaggcacacat

SEQ ID NO: 38192 - RNA, 19 nt, synthetic construct
  misc_feature 1..19: note = siRNA sense sequence
  source 1..19: mol_type = other RNA
tgtgtgcctacccttttaa

SEQ ID NO: 38193 - RNA, 19 nt, synthetic construct
  misc_feature 1..19: note = siRNA antisense sequence
  source 1..19: mol_type = other RNA
ttaaaagggtaggcacaca

SEQ ID NO: 38194 - RNA, 19 nt, synthetic construct
  misc_feature 1..19: note = siRNA sense sequence
  source 1..19: mol_type = other RNA
gtgtgcctacccttttaac

SEQ ID NO: 38195 - RNA, 19 nt, synthetic construct
  misc_feature 1..19: note = siRNA antisense sequence
  source 1..19: mol_type = other RNA
gttaaaagggtaggcacac

SEQ ID NO: 38196 - RNA, 19 nt, synthetic construct
  misc_feature 1..19: note = siRNA sense sequence
  source 1..19: mol_type = other RNA
tgtgcctacccttttaact

SEQ ID NO: 38197 - RNA, 19 nt, synthetic construct
  misc_feature 1..19: note = siRNA antisense sequence
  source 1..19: mol_type = other RNA
agttaaaagggtaggcaca

SEQ ID NO: 38198 - RNA, 19 nt, synthetic construct
  misc_feature 1..19: note = siRNA sense sequence
  source 1..19: mol_type = other RNA
acccttttaactgcccttc

SEQ ID NO: 38199 - RNA, 19 nt, synthetic construct
  misc_feature 1..19: note = siRNA antisense sequence
  source 1..19: mol_type = other RNA
gaagggcagttaaaagggt

SEQ ID NO: 38200 - RNA, 19 nt, synthetic construct
  misc_feature 1..19: note = siRNA sense sequence
  source 1..19: mol_type = other RNA
cttttaactgcccttcaag

SEQ ID NO: 38201 - RNA, 19 nt, synthetic construct
  misc_feature 1..19: note = siRNA antisense sequence
  source 1..19: mol_type = other RNA
cttgaagggcagttaaaag

SEQ ID NO: 38202 - RNA, 19 nt, synthetic construct
  misc_feature 1..19: note = siRNA sense sequence
  source 1..19: mol_type = other RNA
ttttaactgcccttcaagc

SEQ ID NO: 38203 - RNA, 19 nt, synthetic construct
  misc_feature 1..19: note = siRNA antisense sequence
  source 1..19: mol_type = other RNA
gcttgaagggcagttaaaa

SEQ ID NO: 38204 - RNA, 19 nt, synthetic construct
  misc_feature 1..19: note = siRNA sense sequence
  source 1..19: mol_type = other RNA
tttaactgcccttcaagca

SEQ ID NO: 38205 - RNA, 19 nt, synthetic construct
  misc_feature 1..19: note = siRNA antisense sequence
  source 1..19: mol_type = other RNA
tgcttgaagggcagttaaa

SEQ ID NO: 38206 - RNA, 19 nt, synthetic construct
  misc_feature 1..19: note = siRNA sense sequence
  source 1..19: mol_type = other RNA
ttaactgcccttcaagcaa

SEQ ID NO: 38207 - RNA, 19 nt, synthetic construct
  misc_feature 1..19: note = siRNA antisense sequence
  source 1..19: mol_type = other RNA
ttgcttgaagggcagttaa

SEQ ID NO: 38208 - RNA, 19 nt, synthetic construct
  misc_feature 1..19: note = siRNA sense sequence
  source 1..19: mol_type = other RNA
ttcactggacctgtctgat

SEQ ID NO: 38209 - RNA, 19 nt, synthetic construct
  misc_feature 1..19: note = siRNA antisense sequence
  source 1..19: mol_type = other RNA
atcagacaggtccagtgaa

SEQ ID NO: 38210 - RNA, 19 nt, synthetic construct
  misc_feature 1..19: note = siRNA sense sequence
  source 1..19: mol_type = other RNA
ctggacctgtctgatctca

SEQ ID NO: 38211 - RNA, 19 nt, synthetic construct
  misc_feature 1..19: note = siRNA antisense sequence
  source 1..19: mol_type = other RNA
tgagatcagacaggtccag

SEQ ID NO: 38212 - RNA, 19 nt, synthetic construct
  misc_feature 1..19: note = siRNA sense sequence
  source 1..19: mol_type = other RNA
tggacctgtctgatctcaa

SEQ ID NO: 38213 - RNA, 19 nt, synthetic construct
  misc_feature 1..19: note = siRNA antisense sequence
  source 1..19: mol_type = other RNA
ttgagatcagacaggtcca

SEQ ID NO: 38214 - RNA, 19 nt, synthetic construct
  misc_feature 1..19: note = siRNA sense sequence
  source 1..19: mol_type = other RNA
ggacctgtctgatctcaaa

SEQ ID NO: 38215 - RNA, 19 nt, synthetic construct
  misc_feature 1..19: note = siRNA antisense sequence
  source 1..19: mol_type = other RNA
tttgagatcagacaggtcc

SEQ ID NO: 38216 - RNA, 19 nt, synthetic construct
  misc_feature 1..19: note = siRNA sense sequence
  source 1..19: mol_type = other RNA
gacctgtctgatctcaaag

SEQ ID NO: 38217 - RNA, 19 nt, synthetic construct
  misc_feature 1..19: note = siRNA antisense sequence
  source 1..19: mol_type = other RNA
ctttgagatcagacaggtc

SEQ ID NO: 38218 - RNA, 19 nt, synthetic construct
  misc_feature 1..19: note = siRNA sense sequence
  source 1..19: mol_type = other RNA
cctgtctgatctcaaagta

SEQ ID NO: 38219 - RNA, 19 nt, synthetic construct
  misc_feature 1..19: note = siRNA antisense sequence
  source 1..19: mol_type = other RNA
tactttgagatcagacagg

SEQ ID NO: 38220 - RNA, 19 nt, synthetic construct
  misc_feature 1..19: note = siRNA sense sequence
  source 1..19: mol_type = other RNA
ctgtctgatctcaaagtag

SEQ ID NO: 38221 - RNA, 19 nt, synthetic construct
  misc_feature 1..19: note = siRNA antisense sequence
  source 1..19: mol_type = other RNA
ctactttgagatcagacag

SEQ ID NO: 38222 - RNA, 19 nt, synthetic construct
  misc_feature 1..19: note = siRNA sense sequence
  source 1..19: mol_type = other RNA
tgtctgatctcaaagtaga

SEQ ID NO: 38223 - RNA, 19 nt, synthetic construct
  misc_feature 1..19: note = siRNA antisense sequence
  source 1..19: mol_type = other RNA
tctactttgagatcagaca

SEQ ID NO: 38224 - RNA, 19 nt, synthetic construct
  misc_feature 1..19: note = siRNA sense sequence
  source 1..19: mol_type = other RNA
tctcaaagtagattttcag

SEQ ID NO: 38225 - RNA, 19 nt, synthetic construct
  misc_feature 1..19: note = siRNA antisense sequence
  source 1..19: mol_type = other RNA
ctgaaaatctactttgaga

SEQ ID NO: 38226 - RNA, 19 nt, synthetic construct
  misc_feature 1..19: note = siRNA sense sequence
  source 1..19: mol_type = other RNA
tagattttcaggatccacc

SEQ ID NO: 38227 - RNA, 19 nt, synthetic construct
  misc_feature 1..19: note = siRNA antisense sequence
  source 1..19: mol_type = other RNA
ggtggatcctgaaaatcta

SEQ ID NO: 38228 - RNA, 19 nt, synthetic construct
  misc_feature 1..19: note = siRNA sense sequence
  source 1..19: mol_type = other RNA
tgccaaccttcaagccaat

SEQ ID NO: 38229 - RNA, 19 nt, synthetic construct
  misc_feature 1..19: note = siRNA antisense sequence
  source 1..19: mol_type = other RNA
attggcttgaaggttggca

SEQ ID NO: 38230 - RNA, 19 nt, synthetic construct
  misc_feature 1..19: note = siRNA sense sequence
  source 1..19: mol_type = other RNA
ccaaccttcaagccaatgt

SEQ ID NO: 38231 - RNA, 19 nt, synthetic construct
  misc_feature 1..19: note = siRNA antisense sequence
  source 1..19: mol_type = other RNA
acattggcttgaaggttgg

SEQ ID NO: 38232 - RNA, 19 nt, synthetic construct
  misc_feature 1..19: note = siRNA sense sequence
  source 1..19: mol_type = other RNA
ccttcaagccaatgtttat

SEQ ID NO: 38233 - RNA, 19 nt, synthetic construct
  misc_feature 1..19: note = siRNA antisense sequence
  source 1..19: mol_type = other RNA
ataaacattggcttgaagg

SEQ ID NO: 38234 - RNA, 19 nt, synthetic construct
  misc_feature 1..19: note = siRNA sense sequence
  source 1..19: mol_type = other RNA
caagccaatgtttatcaat

SEQ ID NO: 38235 - RNA, 19 nt, synthetic construct
  misc_feature 1..19: note = siRNA antisense sequence
  source 1..19: mol_type = other RNA
attgataaacattggcttg

SEQ ID NO: 38236 - RNA, 19 nt, synthetic construct
  misc_feature 1..19: note = siRNA sense sequence
  source 1..19: mol_type = other RNA
caattatcttgacttcatg

SEQ ID NO: 38237 - RNA, 19 nt, synthetic construct
  misc_feature 1..19: note = siRNA antisense sequence
  source 1..19: mol_type = other RNA
catgaagtcaagataattg

SEQ ID NO: 38238 - RNA, 19 nt, synthetic construct
  misc_feature 1..19: note = siRNA sense sequence
  source 1..19: mol_type = other RNA
aattatcttgacttcatgc

SEQ ID NO: 38239 - RNA, 19 nt, synthetic construct
  misc_feature 1..19: note = siRNA antisense sequence
  source 1..19: mol_type = other RNA
gcatgaagtcaagataatt

SEQ ID NO: 38240 - RNA, 19 nt, synthetic construct
  misc_feature 1..19: note = siRNA sense sequence
  source 1..19: mol_type = other RNA
attatcttgacttcatgcc

SEQ ID NO: 38241 - RNA, 19 nt, synthetic construct
  misc_feature 1..19: note = siRNA antisense sequence
  source 1..19: mol_type = other RNA
ggcatgaagtcaagataat

SEQ ID NO: 38242 - RNA, 19 nt, synthetic construct
  misc_feature 1..19: note = siRNA sense sequence
  source 1..19: mol_type = other RNA
ttatcttgacttcatgcct

SEQ ID NO: 38243 - RNA, 19 nt, synthetic construct
  misc_feature 1..19: note = siRNA antisense sequence
  source 1..19: mol_type = other RNA
aggcatgaagtcaagataa

SEQ ID NO: 38244 - RNA, 19 nt, synthetic construct
  misc_feature 1..19: note = siRNA sense sequence
  source 1..19: mol_type = other RNA
ttgacttcatgccttttct

SEQ ID NO: 38245 - RNA, 19 nt, synthetic construct
  misc_feature 1..19: note = siRNA antisense sequence
  source 1..19: mol_type = other RNA
agaaaaggcatgaagtcaa

SEQ ID NO: 38246 - RNA, 19 nt, synthetic construct
  misc_feature 1..19: note = siRNA sense sequence
  source 1..19: mol_type = other RNA
cttcatgccttttctctag

SEQ ID NO: 38247 - RNA, 19 nt, synthetic construct
  misc_feature 1..19: note = siRNA antisense sequence
  source 1..19: mol_type = other RNA
ctagagaaaaggcatgaag

SEQ ID NO: 38248 - RNA, 19 nt, synthetic construct
  misc_feature 1..19: note = siRNA sense sequence
  source 1..19: mol_type = other RNA
ttcatgccttttctctaga

SEQ ID NO: 38249 - RNA, 19 nt, synthetic construct
  misc_feature 1..19: note = siRNA antisense sequence
  source 1..19: mol_type = other RNA
tctagagaaaaggcatgaa

SEQ ID NO: 38250 - RNA, 19 nt, synthetic construct
  misc_feature 1..19: note = siRNA sense sequence
  source 1..19: mol_type = other RNA
catgccttttctctagagg

SEQ ID NO: 38251 - RNA, 19 nt, synthetic construct
  misc_feature 1..19: note = siRNA antisense sequence
  source 1..19: mol_type = other RNA
cctctagagaaaaggcatg

SEQ ID NO: 38252 - RNA, 19 nt, synthetic construct
  misc_feature 1..19: note = siRNA sense sequence
  source 1..19: mol_type = other RNA
atgccttttctctagagga

SEQ ID NO: 38253 - RNA, 19 nt, synthetic construct
  misc_feature 1..19: note = siRNA antisense sequence
  source 1..19: mol_type = other RNA
tcctctagagaaaaggcat

SEQ ID NO: 38254 - RNA, 19 nt, synthetic construct
  misc_feature 1..19: note = siRNA sense sequence
  source 1..19: mol_type = other RNA
tgccttttctctagaggat

SEQ ID NO: 38255 - RNA, 19 nt, synthetic construct
  misc_feature 1..19: note = siRNA antisense sequence
  source 1..19: mol_type = other RNA
atcctctagagaaaaggca

SEQ ID NO: 38256 - RNA, 19 nt, synthetic construct
  misc_feature 1..19: note = siRNA sense sequence
  source 1..19: mol_type = other RNA
gccttttctctagaggatc

SEQ ID NO: 38257 - RNA, 19 nt, synthetic construct
  misc_feature 1..19: note = siRNA antisense sequence
  source 1..19: mol_type = other RNA
gatcctctagagaaaaggc

SEQ ID NO: 38258 - RNA, 19 nt, synthetic construct
  misc_feature 1..19: note = siRNA sense sequence
  source 1..19: mol_type = other RNA
ccttttctctagaggatcc

SEQ ID NO: 38259 - RNA, 19 nt, synthetic construct
  misc_feature 1..19: note = siRNA antisense sequence
  source 1..19: mol_type = other RNA
ggatcctctagagaaaagg

SEQ ID NO: 38260 - RNA, 19 nt, synthetic construct
  misc_feature 1..19: note = siRNA sense sequence
  source 1..19: mol_type = other RNA
cttttctctagaggatcct

SEQ ID NO: 38261 - RNA, 19 nt, synthetic construct
  misc_feature 1..19: note = siRNA antisense sequence
  source 1..19: mol_type = other RNA
aggatcctctagagaaaag

SEQ ID NO: 38262 - RNA, 19 nt, synthetic construct
  misc_feature 1..19: note = siRNA sense sequence
  source 1..19: mol_type = other RNA
ttttctctagaggatcctg

SEQ ID NO: 38263 - RNA, 19 nt, synthetic construct
  misc_feature 1..19: note = siRNA antisense sequence
  source 1..19: mol_type = other RNA
caggatcctctagagaaaa

SEQ ID NO: 38264 - RNA, 19 nt, synthetic construct
  misc_feature 1..19: note = siRNA sense sequence
  source 1..19: mol_type = other RNA
tttctctagaggatcctgc

SEQ ID NO: 38265 - RNA, 19 nt, synthetic construct
  misc_feature 1..19: note = siRNA antisense sequence
  source 1..19: mol_type = other RNA
gcaggatcctctagagaaa

SEQ ID NO: 38266 - RNA, 19 nt, synthetic construct
  misc_feature 1..19: note = siRNA sense sequence
  source 1..19: mol_type = other RNA
ttctctagaggatcctgct

SEQ ID NO: 38267 - RNA, 19 nt, synthetic construct
  misc_feature 1..19: note = siRNA antisense sequence
  source 1..19: mol_type = other RNA
agcaggatcctctagagaa

SEQ ID NO: 38268 - RNA, 19 nt, synthetic construct
  misc_feature 1..19: note = siRNA sense sequence
  source 1..19: mol_type = other RNA
tctctagaggatcctgctt

SEQ ID NO: 38269 - RNA, 19 nt, synthetic construct
  misc_feature 1..19: note = siRNA antisense sequence
  source 1..19: mol_type = other RNA
aagcaggatcctctagaga

SEQ ID NO: 38270 - RNA, 19 nt, synthetic construct
  misc_feature 1..19: note = siRNA sense sequence
  source 1..19: mol_type = other RNA
ctctagaggatcctgcttt

SEQ ID NO: 38271 - RNA, 19 nt, synthetic construct
  misc_feature 1..19: note = siRNA antisense sequence
  source 1..19: mol_type = other RNA
aaagcaggatcctctagag

SEQ ID NO: 38272 - RNA, 19 nt, synthetic construct
  misc_feature 1..19: note = siRNA sense sequence
  source 1..19: mol_type = other RNA
gaggatcctgctttatgcc

SEQ ID NO: 38273 - RNA, 19 nt, synthetic construct
  misc_feature 1..19: note = siRNA antisense sequence
  source 1..19: mol_type = other RNA
ggcataaagcaggatcctc

SEQ ID NO: 38274 - RNA, 19 nt, synthetic construct
  misc_feature 1..19: note = siRNA sense sequence
  source 1..19: mol_type = other RNA
aggatcctgctttatgcca

SEQ ID NO: 38275 - RNA, 19 nt, synthetic construct
  misc_feature 1..19: note = siRNA antisense sequence
  source 1..19: mol_type = other RNA
tggcataaagcaggatcct

SEQ ID NO: 38276 - RNA, 19 nt, synthetic construct
  misc_feature 1..19: note = siRNA sense sequence
  source 1..19: mol_type = other RNA
ggatcctgctttatgccag

SEQ ID NO: 38277 - RNA, 19 nt, synthetic construct
  misc_feature 1..19: note = siRNA antisense sequence
  source 1..19: mol_type = other RNA
ctggcataaagcaggatcc

SEQ ID NO: 38278 - RNA, 19 nt, synthetic construct
  misc_feature 1..19: note = siRNA sense sequence
  source 1..19: mol_type = other RNA
tatgccaggtcagggtacc

SEQ ID NO: 38279 - RNA, 19 nt, synthetic construct
  misc_feature 1..19: note = siRNA antisense sequence
  source 1..19: mol_type = other RNA
ggtaccctgacctggcata

SEQ ID NO: 38280 - RNA, 19 nt, synthetic construct
  misc_feature 1..19: note = siRNA sense sequence
  source 1..19: mol_type = other RNA
ccaggtcagggtaccaatg

SEQ ID NO: 38281 - RNA, 19 nt, synthetic construct
  misc_feature 1..19: note = siRNA antisense sequence
  source 1..19: mol_type = other RNA
cattggtaccctgacctgg

SEQ ID NO: 38282 - RNA, 19 nt, synthetic construct
  misc_feature 1..19: note = siRNA sense sequence
  source 1..19: mol_type = other RNA
caggtcagggtaccaatgg

SEQ ID NO: 38283 - RNA, 19 nt, synthetic construct
  misc_feature 1..19: note = siRNA antisense sequence
  source 1..19: mol_type = other RNA
ccattggtaccctgacctg

SEQ ID NO: 38284 - RNA, 19 nt, synthetic construct
  misc_feature 1..19: note = siRNA sense sequence
  source 1..19: mol_type = other RNA
aggtcagggtaccaatggg

SEQ ID NO: 38285 - RNA, 19 nt, synthetic construct
  misc_feature 1..19: note = siRNA antisense sequence
  source 1..19: mol_type = other RNA
cccattggtaccctgacct

SEQ ID NO: 38286 - RNA, 19 nt, synthetic construct
  misc_feature 1..19: note = siRNA sense sequence
  source 1..19: mol_type = other RNA
ggtcagggtaccaatgggc

SEQ ID NO: 38287 - RNA, 19 nt, synthetic construct
  misc_feature 1..19: note = siRNA antisense sequence
  source 1..19: mol_type = other RNA
gcccattggtaccctgacc

SEQ ID NO: 38288 - RNA, 19 nt, synthetic construct
  misc_feature 1..19: note = siRNA sense sequence
  source 1..19: mol_type = other RNA
tcagggtaccaatgggctc

SEQ ID NO: 38289 - RNA, 19 nt, synthetic construct
  misc_feature 1..19: note = siRNA antisense sequence
  source 1..19: mol_type = other RNA
gagcccattggtaccctga

SEQ ID NO: 38290 - RNA, 19 nt, synthetic construct
  misc_feature 1..19: note = siRNA sense sequence
  source 1..19: mol_type = other RNA
cagggtaccaatgggctca

SEQ ID NO: 38291 - RNA, 19 nt, synthetic construct
  misc_feature 1..19: note = siRNA antisense sequence
  source 1..19: mol_type = other RNA
tgagcccattggtaccctg

SEQ ID NO: 38292 - RNA, 19 nt, synthetic construct
  misc_feature 1..19: note = siRNA sense sequence
  source 1..19: mol_type = other RNA
agggtaccaatgggctcat

SEQ ID NO: 38293 - RNA, 19 nt, synthetic construct
  misc_feature 1..19: note = siRNA antisense sequence
  source 1..19: mol_type = other RNA
atgagcccattggtaccct

SEQ ID NO: 38294 - RNA, 19 nt, synthetic construct
  misc_feature 1..19: note = siRNA sense sequence
  source 1..19: mol_type = other RNA
gggtaccaatgggctcatg

SEQ ID NO: 38295 - RNA, 19 nt, synthetic construct
  misc_feature 1..19: note = siRNA antisense sequence
  source 1..19: mol_type = other RNA
catgagcccattggtaccc

SEQ ID NO: 38296 - RNA, 19 nt, synthetic construct
  misc_feature 1..19: note = siRNA sense sequence
  source 1..19: mol_type = other RNA
ggtaccaatgggctcatgt

SEQ ID NO: 38297 - RNA, 19 nt, synthetic construct
  misc_feature 1..19: note = siRNA antisense sequence
  source 1..19: mol_type = other RNA
acatgagcccattggtacc

SEQ ID NO: 38298 - RNA, 19 nt, synthetic construct
  misc_feature 1..19: note = siRNA sense sequence
  source 1..19: mol_type = other RNA
gtaccaatgggctcatgtg

SEQ ID NO: 38299 - RNA, 19 nt, synthetic construct
  misc_feature 1..19: note = siRNA antisense sequence
  source 1..19: mol_type = other RNA
cacatgagcccattggtac

SEQ ID NO: 38300 - RNA, 19 nt, synthetic construct
  misc_feature 1..19: note = siRNA sense sequence
  source 1..19: mol_type = other RNA
aatgggctcatgtgattga

SEQ ID NO: 38301 - RNA, 19 nt, synthetic construct
  misc_feature 1..19: note = siRNA antisense sequence
  source 1..19: mol_type = other RNA
tcaatcacatgagcccatt

SEQ ID NO: 38302 - RNA, 19 nt, synthetic construct
  misc_feature 1..19: note = siRNA sense sequence
  source 1..19: mol_type = other RNA
atgggctcatgtgattgat

SEQ ID NO: 38303 - RNA, 19 nt, synthetic construct
  misc_feature 1..19: note = siRNA antisense sequence
  source 1..19: mol_type = other RNA
atcaatcacatgagcccat

SEQ ID NO: 38304 - RNA, 19 nt, synthetic construct
  misc_feature 1..19: note = siRNA sense sequence
  source 1..19: mol_type = other RNA
gggctcatgtgattgatgc

SEQ ID NO: 38305 - RNA, 19 nt, synthetic construct
  misc_feature 1..19: note = siRNA antisense sequence
  source 1..19: mol_type = other RNA
gcatcaatcacatgagccc

SEQ ID NO: 38306 - RNA, 19 nt, synthetic construct
  misc_feature 1..19: note = siRNA sense sequence
  source 1..19: mol_type = other RNA
ggctcatgtgattgatgcc

SEQ ID NO: 38307 - RNA, 19 nt, synthetic construct
  misc_feature 1..19: note = siRNA antisense sequence
  source 1..19: mol_type = other RNA
ggcatcaatcacatgagcc

SEQ ID NO: 38308 - RNA, 19 nt, synthetic construct
  misc_feature 1..19: note = siRNA sense sequence
  source 1..19: mol_type = other RNA
gctcatgtgattgatgccc

SEQ ID NO: 38309 - RNA, 19 nt, synthetic construct
  misc_feature 1..19: note = siRNA antisense sequence
  source 1..19: mol_type = other RNA
gggcatcaatcacatgagc

SEQ ID NO: 38310 - RNA, 19 nt, synthetic construct
  misc_feature 1..19: note = siRNA sense sequence
  source 1..19: mol_type = other RNA
ctcatgtgattgatgccct

SEQ ID NO: 38311 - RNA, 19 nt, synthetic construct
  misc_feature 1..19: note = siRNA antisense sequence
  source 1..19: mol_type = other RNA
agggcatcaatcacatgag

SEQ ID NO: 38312 - RNA, 19 nt, synthetic construct
  misc_feature 1..19: note = siRNA sense sequence
  source 1..19: mol_type = other RNA
tcatgtgattgatgcccta

SEQ ID NO: 38313 - RNA, 19 nt, synthetic construct
  misc_feature 1..19: note = siRNA antisense sequence
  source 1..19: mol_type = other RNA
tagggcatcaatcacatga

SEQ ID NO: 38314 - RNA, 19 nt, synthetic construct
  misc_feature 1..19: note = siRNA sense sequence
  source 1..19: mol_type = other RNA
catgtgattgatgccctat

SEQ ID NO: 38315 - RNA, 19 nt, synthetic construct
  misc_feature 1..19: note = siRNA antisense sequence
  source 1..19: mol_type = other RNA
atagggcatcaatcacatg

SEQ ID NO: 38316 - RNA, 19 nt, synthetic construct
  misc_feature 1..19: note = siRNA sense sequence
  source 1..19: mol_type = other RNA
atgtgattgatgccctatt

SEQ ID NO: 38317 - RNA, 19 nt, synthetic construct
  misc_feature 1..19: note = siRNA antisense sequence
  source 1..19: mol_type = other RNA
aatagggcatcaatcacat

SEQ ID NO: 38318 - RNA, 19 nt, synthetic construct
  misc_feature 1..19: note = siRNA sense sequence
  source 1..19: mol_type = other RNA
tgtgattgatgccctattt

SEQ ID NO: 38319 - RNA, 19 nt, synthetic construct
  misc_feature 1..19: note = siRNA antisense sequence
  source 1..19: mol_type = other RNA
aaatagggcatcaatcaca

SEQ ID NO: 38320 - RNA, 19 nt, synthetic construct
  misc_feature 1..19: note = siRNA sense sequence
  source 1..19: mol_type = other RNA
gtgattgatgccctatttc

SEQ ID NO: 38321 - RNA, 19 nt, synthetic construct
  misc_feature 1..19: note = siRNA antisense sequence
  source 1..19: mol_type = other RNA
gaaatagggcatcaatcac

SEQ ID NO: 38322 - RNA, 19 nt, synthetic construct
  misc_feature 1..19: note = siRNA sense sequence
  source 1..19: mol_type = other RNA
tgattgatgccctatttcc

SEQ ID NO: 38323 - RNA, 19 nt, synthetic construct
  misc_feature 1..19: note = siRNA antisense sequence
  source 1..19: mol_type = other RNA
ggaaatagggcatcaatca

SEQ ID NO: 38324 - RNA, 19 nt, synthetic construct
  misc_feature 1..19: note = siRNA sense sequence
  source 1..19: mol_type = other RNA
gattgatgccctatttcca

SEQ ID NO: 38325 - RNA, 19 nt, synthetic construct
  misc_feature 1..19: note = siRNA antisense sequence
  source 1..19: mol_type = other RNA
tggaaatagggcatcaatc

SEQ ID NO: 38326 - RNA, 19 nt, synthetic construct
  misc_feature 1..19: note = siRNA sense sequence
  source 1..19: mol_type = other RNA
attgatgccctatttccaa

SEQ ID NO: 38327 - RNA, 19 nt, synthetic construct
  misc_feature 1..19: note = siRNA antisense sequence
  source 1..19: mol_type = other RNA
ttggaaatagggcatcaat

SEQ ID NO: 38328 - RNA, 19 nt, synthetic construct
  misc_feature 1..19: note = siRNA sense sequence
  source 1..19: mol_type = other RNA
ttgatgccctatttccaat

SEQ ID NO: 38329 - RNA, 19 nt, synthetic construct
  misc_feature 1..19: note = siRNA antisense sequence
  source 1..19: mol_type = other RNA
attggaaatagggcatcaa

SEQ ID NO: 38330 - RNA, 19 nt, synthetic construct
  misc_feature 1..19: note = siRNA sense sequence
  source 1..19: mol_type = other RNA
atttccaataagtctgtgt

SEQ ID NO: 38331 - RNA, 19 nt, synthetic construct
  misc_feature 1..19: note = siRNA antisense sequence
  source 1..19: mol_type = other RNA
acacagacttattggaaat

SEQ ID NO: 38332 - RNA, 19 nt, synthetic construct
  misc_feature 1..19: note = siRNA sense sequence
  source 1..19: mol_type = other RNA
tttccaataagtctgtgtt

SEQ ID NO: 38333 - RNA, 19 nt, synthetic construct
  misc_feature 1..19: note = siRNA antisense sequence
  source 1..19: mol_type = other RNA
aacacagacttattggaaa

SEQ ID NO: 38334 - RNA, 19 nt, synthetic construct
  misc_feature 1..19: note = siRNA sense sequence
  source 1..19: mol_type = other RNA
ttccaataagtctgtgttg

SEQ ID NO: 38335 - RNA, 19 nt, synthetic construct
  misc_feature 1..19: note = siRNA antisense sequence
  source 1..19: mol_type = other RNA
caacacagacttattggaa

SEQ ID NO: 38336 - RNA, 19 nt, synthetic construct
  misc_feature 1..19: note = siRNA sense sequence
  source 1..19: mol_type = other RNA
tccaataagtctgtgttgt

SEQ ID NO: 38337 - RNA, 19 nt, synthetic construct
  misc_feature 1..19: note = siRNA antisense sequence
  source 1..19: mol_type = other RNA
acaacacagacttattgga

SEQ ID NO: 38338 - RNA, 19 nt, synthetic construct
  misc_feature 1..19: note = siRNA sense sequence
  source 1..19: mol_type = other RNA
ccaataagtctgtgttgta

SEQ ID NO: 38339 - RNA, 19 nt, synthetic construct
  misc_feature 1..19: note = siRNA antisense sequence
  source 1..19: mol_type = other RNA
tacaacacagacttattgg

SEQ ID NO: 38340 - RNA, 19 nt, synthetic construct
  misc_feature 1..19: note = siRNA sense sequence
  source 1..19: mol_type = other RNA
caataagtctgtgttgtaa

SEQ ID NO: 38341 - RNA, 19 nt, synthetic construct
  misc_feature 1..19: note = siRNA antisense sequence
  source 1..19: mol_type = other RNA
ttacaacacagacttattg

SEQ ID NO: 38342 - RNA, 19 nt, synthetic construct
  misc_feature 1..19: note = siRNA sense sequence
  source 1..19: mol_type = other RNA
taagtctgtgttgtaaaag

SEQ ID NO: 38343 - RNA, 19 nt, synthetic construct
  misc_feature 1..19: note = siRNA antisense sequence
  source 1..19: mol_type = other RNA
cttttacaacacagactta

SEQ ID NO: 38344 - RNA, 19 nt, synthetic construct
  misc_feature 1..19: note = siRNA sense sequence
  source 1..19: mol_type = other RNA
agtctgtgttgtaaaagaa

SEQ ID NO: 38345 - RNA, 19 nt, synthetic construct
  misc_feature 1..19: note = siRNA antisense sequence
  source 1..19: mol_type = other RNA
ttcttttacaacacagact

SEQ ID NO: 38346 - RNA, 19 nt, synthetic construct
  misc_feature 1..19: note = siRNA sense sequence
  source 1..19: mol_type = other RNA
aaaagaatccctgctaatg

SEQ ID NO: 38347 - RNA, 19 nt, synthetic construct
  misc_feature 1..19: note = siRNA antisense sequence
  source 1..19: mol_type = other RNA
cattagcagggattctttt

SEQ ID NO: 38348 - RNA, 19 nt, synthetic construct
  misc_feature 1..19: note = siRNA sense sequence
  source 1..19: mol_type = other RNA
gaatccctgctaatgtaga

SEQ ID NO: 38349 - RNA, 19 nt, synthetic construct
  misc_feature 1..19: note = siRNA antisense sequence
  source 1..19: mol_type = other RNA
tctacattagcagggattc

SEQ ID NO: 38350 - RNA, 19 nt, synthetic construct
  misc_feature 1..19: note = siRNA sense sequence
  source 1..19: mol_type = other RNA
aatccctgctaatgtagag

SEQ ID NO: 38351 - RNA, 19 nt, synthetic construct
  misc_feature 1..19: note = siRNA antisense sequence
  source 1..19: mol_type = other RNA
ctctacattagcagggatt

SEQ ID NO: 38352 - RNA, 19 nt, synthetic construct
  misc_feature 1..19: note = siRNA sense sequence
  source 1..19: mol_type = other RNA
atccctgctaatgtagagc

SEQ ID NO: 38353 - RNA, 19 nt, synthetic construct
  misc_feature 1..19: note = siRNA antisense sequence
  source 1..19: mol_type = other RNA
gctctacattagcagggat

SEQ ID NO: 38354 - RNA, 19 nt, synthetic construct
  misc_feature 1..19: note = siRNA sense sequence
  source 1..19: mol_type = other RNA
ccctgctaatgtagagcta

SEQ ID NO: 38355 - RNA, 19 nt, synthetic construct
  misc_feature 1..19: note = siRNA antisense sequence
  source 1..19: mol_type = other RNA
tagctctacattagcaggg

SEQ ID NO: 38356 - RNA, 19 nt, synthetic construct
  misc_feature 1..19: note = siRNA sense sequence
  source 1..19: mol_type = other RNA
cctgctaatgtagagctat

SEQ ID NO: 38357 - RNA, 19 nt, synthetic construct
  misc_feature 1..19: note = siRNA antisense sequence
  source 1..19: mol_type = other RNA
atagctctacattagcagg

SEQ ID NO: 38358 - RNA, 19 nt, synthetic construct
  misc_feature 1..19: note = siRNA sense sequence
  source 1..19: mol_type = other RNA
ctgctaatgtagagctatt

SEQ ID NO: 38359 - RNA, 19 nt, synthetic construct
  misc_feature 1..19: note = siRNA antisense sequence
  source 1..19: mol_type = other RNA
aatagctctacattagcag

SEQ ID NO: 38360 - RNA, 19 nt, synthetic construct
  misc_feature 1..19: note = siRNA sense sequence
  source 1..19: mol_type = other RNA
tgctaatgtagagctattc

SEQ ID NO: 38361 - RNA, 19 nt, synthetic construct
  misc_feature 1..19: note = siRNA antisense sequence
  source 1..19: mol_type = other RNA
gaatagctctacattagca

SEQ ID NO: 38362 - RNA, 19 nt, synthetic construct
  misc_feature 1..19: note = siRNA sense sequence
  source 1..19: mol_type = other RNA
gctaatgtagagctattcc

SEQ ID NO: 38363 - RNA, 19 nt, synthetic construct
  misc_feature 1..19: note = siRNA antisense sequence
  source 1..19: mol_type = other RNA
ggaatagctctacattagc

SEQ ID NO: 38364 - RNA, 19 nt, synthetic construct
  misc_feature 1..19: note = siRNA sense sequence
  source 1..19: mol_type = other RNA
ctaatgtagagctattcca

SEQ ID NO: 38365 - RNA, 19 nt, synthetic construct
  misc_feature 1..19: note = siRNA antisense sequence
  source 1..19: mol_type = other RNA
tggaatagctctacattag

SEQ ID NO: 38366 - RNA, 19 nt, synthetic construct
  misc_feature 1..19: note = siRNA sense sequence
  source 1..19: mol_type = other RNA
taatgtagagctattccag

SEQ ID NO: 38367 - RNA, 19 nt, synthetic construct
  misc_feature 1..19: note = siRNA antisense sequence
  source 1..19: mol_type = other RNA
ctggaatagctctacatta

SEQ ID NO: 38368 - RNA, 19 nt, synthetic construct
  misc_feature 1..19: note = siRNA sense sequence
  source 1..19: mol_type = other RNA
aatgtagagctattccaga

SEQ ID NO: 38369 - RNA, 19 nt, synthetic construct
  misc_feature 1..19: note = siRNA antisense sequence
  source 1..19: mol_type = other RNA
tctggaatagctctacatt

SEQ ID NO: 38370 - RNA, 19 nt, synthetic construct
  misc_feature 1..19: note = siRNA sense sequence
  source 1..19: mol_type = other RNA
atgtagagctattccagac

SEQ ID NO: 38371 - RNA, 19 nt, synthetic construct
  misc_feature 1..19: note = siRNA antisense sequence
  source 1..19: mol_type = other RNA
gtctggaatagctctacat

SEQ ID NO: 38372 - RNA, 19 nt, synthetic construct
  misc_feature 1..19: note = siRNA sense sequence
  source 1..19: mol_type = other RNA
gcttattttacattgcttc

SEQ ID NO: 38373 - RNA, 19 nt, synthetic construct
  misc_feature 1..19: note = siRNA antisense sequence
  source 1..19: mol_type = other RNA
gaagcaatgtaaaataagc

SEQ ID NO: 38374 - RNA, 19 nt, synthetic construct
  misc_feature 1..19: note = siRNA sense sequence
  source 1..19: mol_type = other RNA
ttttacattgcttctaacg

SEQ ID NO: 38375 - RNA, 19 nt, synthetic construct
  misc_feature 1..19: note = siRNA antisense sequence
  source 1..19: mol_type = other RNA
cgttagaagcaatgtaaaa

SEQ ID NO: 38376 - RNA, 19 nt, synthetic construct
  misc_feature 1..19: note = siRNA sense sequence
  source 1..19: mol_type = other RNA
tttacattgcttctaacgc

SEQ ID NO: 38377 - RNA, 19 nt, synthetic construct
  misc_feature 1..19: note = siRNA antisense sequence
  source 1..19: mol_type = other RNA
gcgttagaagcaatgtaaa

SEQ ID NO: 38378 - RNA, 19 nt, synthetic construct
  misc_feature 1..19: note = siRNA sense sequence
  source 1..19: mol_type = other RNA
ttacattgcttctaacgcc

SEQ ID NO: 38379 - RNA, 19 nt, synthetic construct
  misc_feature 1..19: note = siRNA antisense sequence
  source 1..19: mol_type = other RNA
ggcgttagaagcaatgtaa

SEQ ID NO: 38380 - RNA, 19 nt, synthetic construct
  misc_feature 1..19: note = siRNA sense sequence
  source 1..19: mol_type = other RNA
tacattgcttctaacgcct

SEQ ID NO: 38381 - RNA, 19 nt, synthetic construct
  misc_feature 1..19: note = siRNA antisense sequence
  source 1..19: mol_type = other RNA
aggcgttagaagcaatgta

SEQ ID NO: 38382 - RNA, 19 nt, synthetic construct
  misc_feature 1..19: note = siRNA sense sequence
  source 1..19: mol_type = other RNA
acattgcttctaacgcctt

SEQ ID NO: 38383 - RNA, 19 nt, synthetic construct
  misc_feature 1..19: note = siRNA antisense sequence
  source 1..19: mol_type = other RNA
aaggcgttagaagcaatgt

SEQ ID NO: 38384 - RNA, 19 nt, synthetic construct
  misc_feature 1..19: note = siRNA sense sequence
  source 1..19: mol_type = other RNA
cattgcttctaacgccttt

SEQ ID NO: 38385 - RNA, 19 nt, synthetic construct
  misc_feature 1..19: note = siRNA antisense sequence
  source 1..19: mol_type = other RNA
aaaggcgttagaagcaatg

SEQ ID NO: 38386 - RNA, 19 nt, synthetic construct
  misc_feature 1..19: note = siRNA sense sequence
  source 1..19: mol_type = other RNA
attgcttctaacgcctttt

SEQ ID NO: 38387 - RNA, 19 nt, synthetic construct
  misc_feature 1..19: note = siRNA antisense sequence
  source 1..19: mol_type = other RNA
aaaaggcgttagaagcaat

SEQ ID NO: 38388 - RNA, 19 nt, synthetic construct
  misc_feature 1..19: note = siRNA sense sequence
  source 1..19: mol_type = other RNA
ttgcttctaacgccttttg

SEQ ID NO: 38389 - RNA, 19 nt, synthetic construct
  misc_feature 1..19: note = siRNA antisense sequence
  source 1..19: mol_type = other RNA
caaaaggcgttagaagcaa

SEQ ID NO: 38390 - RNA, 19 nt, synthetic construct
  misc_feature 1..19: note = siRNA sense sequence
  source 1..19: mol_type = other RNA
tgcttctaacgccttttga

SEQ ID NO: 38391 - RNA, 19 nt, synthetic construct
  misc_feature 1..19: note = siRNA antisense sequence
  source 1..19: mol_type = other RNA
tcaaaaggcgttagaagca

SEQ ID NO: 38392 - RNA, 19 nt, synthetic construct
  misc_feature 1..19: note = siRNA sense sequence
  source 1..19: mol_type = other RNA
gcttctaacgccttttgaa

SEQ ID NO: 38393 - RNA, 19 nt, synthetic construct
  misc_feature 1..19: note = siRNA antisense sequence
  source 1..19: mol_type = other RNA
ttcaaaaggcgttagaagc

SEQ ID NO: 38394 - RNA, 19 nt, synthetic construct
  misc_feature 1..19: note = siRNA sense sequence
  source 1..19: mol_type = other RNA
ttctaacgccttttgaagt

SEQ ID NO: 38395 - RNA, 19 nt, synthetic construct
  misc_feature 1..19: note = siRNA antisense sequence
  source 1..19: mol_type = other RNA
acttcaaaaggcgttagaa

SEQ ID NO: 38396 - RNA, 19 nt, synthetic construct
  misc_feature 1..19: note = siRNA sense sequence
  source 1..19: mol_type = other RNA
tctaacgccttttgaagtt

SEQ ID NO: 38397 - RNA, 19 nt, synthetic construct
  misc_feature 1..19: note = siRNA antisense sequence
  source 1..19: mol_type = other RNA
aacttcaaaaggcgttaga

SEQ ID NO: 38398 - RNA, 19 nt, synthetic construct
  misc_feature 1..19: note = siRNA sense sequence
  source 1..19: mol_type = other RNA
ctaacgccttttgaagttg

SEQ ID NO: 38399 - RNA, 19 nt, synthetic construct
  misc_feature 1..19: note = siRNA antisense sequence
  source 1..19: mol_type = other RNA
caacttcaaaaggcgttag

SEQ ID NO: 38400 - RNA, 19 nt, synthetic construct
  misc_feature 1..19: note = siRNA sense sequence
  source 1..19: mol_type = other RNA
taacgccttttgaagttga

SEQ ID NO: 38401 - RNA, 19 nt, synthetic construct
  misc_feature 1..19: note = siRNA antisense sequence
  source 1..19: mol_type = other RNA
tcaacttcaaaaggcgtta

SEQ ID NO: 38402 - RNA, 19 nt, synthetic construct
  misc_feature 1..19: note = siRNA sense sequence
  source 1..19: mol_type = other RNA
aacgccttttgaagttgaa

SEQ ID NO: 38403 - RNA, 19 nt, synthetic construct
  misc_feature 1..19: note = siRNA antisense sequence
  source 1..19: mol_type = other RNA
ttcaacttcaaaaggcgtt

SEQ ID NO: 38404 - RNA, 19 nt, synthetic construct
  misc_feature 1..19: note = siRNA sense sequence
  source 1..19: mol_type = other RNA
tccaccttttatgagcaaa

SEQ ID NO: 38405 - RNA, 19 nt, synthetic construct
  misc_feature 1..19: note = siRNA antisense sequence
  source 1..19: mol_type = other RNA
tttgctcataaaaggtgga

SEQ ID NO: 38406 - RNA, 19 nt, synthetic construct
  misc_feature 1..19: note = siRNA sense sequence
  source 1..19: mol_type = other RNA
ccaccttttatgagcaaat

SEQ ID NO: 38407 - RNA, 19 nt, synthetic construct
  misc_feature 1..19: note = siRNA antisense sequence
  source 1..19: mol_type = other RNA
atttgctcataaaaggtgg

SEQ ID NO: 38408 - RNA, 19 nt, synthetic construct
  misc_feature 1..19: note = siRNA sense sequence
  source 1..19: mol_type = other RNA
caccttttatgagcaaatc

SEQ ID NO: 38409 - RNA, 19 nt, synthetic construct
  misc_feature 1..19: note = siRNA antisense sequence
  source 1..19: mol_type = other RNA
gatttgctcataaaaggtg

SEQ ID NO: 38410 - RNA, 19 nt, synthetic construct
  misc_feature 1..19: note = siRNA sense sequence
  source 1..19: mol_type = other RNA
accttttatgagcaaatca

SEQ ID NO: 38411 - RNA, 19 nt, synthetic construct
  misc_feature 1..19: note = siRNA antisense sequence
  source 1..19: mol_type = other RNA
tgatttgctcataaaaggt

SEQ ID NO: 38412 - RNA, 19 nt, synthetic construct
  misc_feature 1..19: note = siRNA sense sequence
  source 1..19: mol_type = other RNA
ccttttatgagcaaatcac

SEQ ID NO: 38413 - RNA, 19 nt, synthetic construct
  misc_feature 1..19: note = siRNA antisense sequence
  source 1..19: mol_type = other RNA
gtgatttgctcataaaagg

SEQ ID NO: 38414 - RNA, 19 nt, synthetic construct
  misc_feature 1..19: note = siRNA sense sequence
  source 1..19: mol_type = other RNA
cttttatgagcaaatcact

SEQ ID NO: 38415 - RNA, 19 nt, synthetic construct
  misc_feature 1..19: note = siRNA antisense sequence
  source 1..19: mol_type = other RNA
agtgatttgctcataaaag

SEQ ID NO: 38416 - RNA, 19 nt, synthetic construct
  misc_feature 1..19: note = siRNA sense sequence
  source 1..19: mol_type = other RNA
tttatgagcaaatcactgc

SEQ ID NO: 38417 - RNA, 19 nt, synthetic construct
  misc_feature 1..19: note = siRNA antisense sequence
  source 1..19: mol_type = other RNA
gcagtgatttgctcataaa

SEQ ID NO: 38418 - RNA, 19 nt, synthetic construct
  misc_feature 1..19: note = siRNA sense sequence
  source 1..19: mol_type = other RNA
agcaaatcactgcagttaa

SEQ ID NO: 38419 - RNA, 19 nt, synthetic construct
  misc_feature 1..19: note = siRNA antisense sequence
  source 1..19: mol_type = other RNA
ttaactgcagtgatttgct

SEQ ID NO: 38420 - RNA, 19 nt, synthetic construct
  misc_feature 1..19: note = siRNA sense sequence
  source 1..19: mol_type = other RNA
gcaaatcactgcagttaat

SEQ ID NO: 38421 - RNA, 19 nt, synthetic construct
  misc_feature 1..19: note = siRNA antisense sequence
  source 1..19: mol_type = other RNA
attaactgcagtgatttgc

SEQ ID NO: 38422 - RNA, 19 nt, synthetic construct
  misc_feature 1..19: note = siRNA sense sequence
  source 1..19: mol_type = other RNA
aaatcactgcagttaatgg

SEQ ID NO: 38423 - RNA, 19 nt, synthetic construct
  misc_feature 1..19: note = siRNA antisense sequence
  source 1..19: mol_type = other RNA
ccattaactgcagtgattt

SEQ ID NO: 38424 - RNA, 19 nt, synthetic construct
  misc_feature 1..19: note = siRNA sense sequence
  source 1..19: mol_type = other RNA
aatcactgcagttaatggg

SEQ ID NO: 38425 - RNA, 19 nt, synthetic construct
  misc_feature 1..19: note = siRNA antisense sequence
  source 1..19: mol_type = other RNA
cccattaactgcagtgatt

SEQ ID NO: 38426 - RNA, 19 nt, synthetic construct
  misc_feature 1..19: note = siRNA sense sequence
  source 1..19: mol_type = other RNA
atcactgcagttaatgggt

SEQ ID NO: 38427 - RNA, 19 nt, synthetic construct
  misc_feature 1..19: note = siRNA antisense sequence
  source 1..19: mol_type = other RNA
acccattaactgcagtgat

SEQ ID NO: 38428 - RNA, 19 nt, synthetic construct
  misc_feature 1..19: note = siRNA sense sequence
  source 1..19: mol_type = other RNA
tcactgcagttaatgggtc

SEQ ID NO: 38429 - RNA, 19 nt, synthetic construct
  misc_feature 1..19: note = siRNA antisense sequence
  source 1..19: mol_type = other RNA
gacccattaactgcagtga

SEQ ID NO: 38430 - RNA, 19 nt, synthetic construct
  misc_feature 1..19: note = siRNA sense sequence
  source 1..19: mol_type = other RNA
cactgcagttaatgggtca

SEQ ID NO: 38431 - RNA, 19 nt, synthetic construct
  misc_feature 1..19: note = siRNA antisense sequence
  source 1..19: mol_type = other RNA
tgacccattaactgcagtg

SEQ ID NO: 38432 - RNA, 19 nt, synthetic construct
  misc_feature 1..19: note = siRNA sense sequence
  source 1..19: mol_type = other RNA
actgcagttaatgggtcac

SEQ ID NO: 38433 - RNA, 19 nt, synthetic construct
  misc_feature 1..19: note = siRNA antisense sequence
  source 1..19: mol_type = other RNA
gtgacccattaactgcagt

SEQ ID NO: 38434 - RNA, 19 nt, synthetic construct
  misc_feature 1..19: note = siRNA sense sequence
  source 1..19: mol_type = other RNA
ctgcagttaatgggtcact

SEQ ID NO: 38435 - RNA, 19 nt, synthetic construct
  misc_feature 1..19: note = siRNA antisense sequence
  source 1..19: mol_type = other RNA
agtgacccattaactgcag

SEQ ID NO: 38436 - RNA, 19 nt, synthetic construct
  misc_feature 1..19: note = siRNA sense sequence
  source 1..19: mol_type = other RNA
ttaatgggtcactgtgtaa

SEQ ID NO: 38437 - RNA, 19 nt, synthetic construct
  misc_feature 1..19: note = siRNA antisense sequence
  source 1..19: mol_type = other RNA
ttacacagtgacccattaa

SEQ ID NO: 38438 - RNA, 19 nt, synthetic construct
  misc_feature 1..19: note = siRNA sense sequence
  source 1..19: mol_type = other RNA
aatgggtcactgtgtaagt

SEQ ID NO: 38439 - RNA, 19 nt, synthetic construct
  misc_feature 1..19: note = siRNA antisense sequence
  source 1..19: mol_type = other RNA
acttacacagtgacccatt

SEQ ID NO: 38440 - RNA, 19 nt, synthetic construct
  misc_feature 1..19: note = siRNA sense sequence
  source 1..19: mol_type = other RNA
atgggtcactgtgtaagtt

SEQ ID NO: 38441 - RNA, 19 nt, synthetic construct
  misc_feature 1..19: note = siRNA antisense sequence
  source 1..19: mol_type = other RNA
aacttacacagtgacccat

SEQ ID NO: 38442 - RNA, 19 nt, synthetic construct
  misc_feature 1..19: note = siRNA sense sequence
  source 1..19: mol_type = other RNA
tgggtcactgtgtaagttt

SEQ ID NO: 38443 - RNA, 19 nt, synthetic construct
  misc_feature 1..19: note = siRNA antisense sequence
  source 1..19: mol_type = other RNA
aaacttacacagtgaccca

SEQ ID NO: 38444 - RNA, 19 nt, synthetic construct
  misc_feature 1..19: note = siRNA sense sequence
  source 1..19: mol_type = other RNA
gggtcactgtgtaagtttc

SEQ ID NO: 38445 - RNA, 19 nt, synthetic construct
  misc_feature 1..19: note = siRNA antisense sequence
  source 1..19: mol_type = other RNA
gaaacttacacagtgaccc

SEQ ID NO: 38446 - RNA, 19 nt, synthetic construct
  misc_feature 1..19: note = siRNA sense sequence
  source 1..19: mol_type = other RNA
ggtcactgtgtaagtttca

SEQ ID NO: 38447 - RNA, 19 nt, synthetic construct
  misc_feature 1..19: note = siRNA antisense sequence
  source 1..19: mol_type = other RNA
tgaaacttacacagtgacc

SEQ ID NO: 38448 - RNA, 19 nt, synthetic construct
  misc_feature 1..19: note = siRNA sense sequence
  source 1..19: mol_type = other RNA
tcactgtgtaagtttcatt

SEQ ID NO: 38449 - RNA, 19 nt, synthetic construct
  misc_feature 1..19: note = siRNA antisense sequence
  source 1..19: mol_type = other RNA
aatgaaacttacacagtga

SEQ ID NO: 38450 - RNA, 19 nt, synthetic construct
  misc_feature 1..19: note = siRNA sense sequence
  source 1..19: mol_type = other RNA
cactgtgtaagtttcattc

SEQ ID NO: 38451 - RNA, 19 nt, synthetic construct
  misc_feature 1..19: note = siRNA antisense sequence
  source 1..19: mol_type = other RNA
gaatgaaacttacacagtg

SEQ ID NO: 38452 - RNA, 19 nt, synthetic construct
  misc_feature 1..19: note = siRNA sense sequence
  source 1..19: mol_type = other RNA
actgtgtaagtttcattct

SEQ ID NO: 38453 - RNA, 19 nt, synthetic construct
  misc_feature 1..19: note = siRNA antisense sequence
  source 1..19: mol_type = other RNA
agaatgaaacttacacagt

SEQ ID NO: 38454 - RNA, 19 nt, synthetic construct
  misc_feature 1..19: note = siRNA sense sequence
  source 1..19: mol_type = other RNA
gtgtaagtttcattctcta

SEQ ID NO: 38455 - RNA, 19 nt, synthetic construct
  misc_feature 1..19: note = siRNA antisense sequence
  source 1..19: mol_type = other RNA
tagagaatgaaacttacac

SEQ ID NO: 38456 - RNA, 19 nt, synthetic construct
  misc_feature 1..19: note = siRNA sense sequence
  source 1..19: mol_type = other RNA
tgtattagacatcaaggca

SEQ ID NO: 38457 - RNA, 19 nt, synthetic construct
  misc_feature 1..19: note = siRNA antisense sequence
  source 1..19: mol_type = other RNA
tgccttgatgtctaataca

SEQ ID NO: 38458 - RNA, 19 nt, synthetic construct
  misc_feature 1..19: note = siRNA sense sequence
  source 1..19: mol_type = other RNA
gtattagacatcaaggcag

SEQ ID NO: 38459 - RNA, 19 nt, synthetic construct
  misc_feature 1..19: note = siRNA antisense sequence
  source 1..19: mol_type = other RNA
ctgccttgatgtctaatac

SEQ ID NO: 38460 - RNA, 19 nt, synthetic construct
  misc_feature 1..19: note = siRNA sense sequence
  source 1..19: mol_type = other RNA
tagacatcaaggcagagtt

SEQ ID NO: 38461 - RNA, 19 nt, synthetic construct
  misc_feature 1..19: note = siRNA antisense sequence
  source 1..19: mol_type = other RNA
aactctgccttgatgtcta

SEQ ID NO: 38462 - RNA, 19 nt, synthetic construct
  misc_feature 1..19: note = siRNA sense sequence
  source 1..19: mol_type = other RNA
agacatcaaggcagagtta

SEQ ID NO: 38463 - RNA, 19 nt, synthetic construct
  misc_feature 1..19: note = siRNA antisense sequence
  source 1..19: mol_type = other RNA
taactctgccttgatgtct

SEQ ID NO: 38464 - RNA, 19 nt, synthetic construct
  misc_feature 1..19: note = siRNA sense sequence
  source 1..19: mol_type = other RNA
acatcaaggcagagttagt

SEQ ID NO: 38465 - RNA, 19 nt, synthetic construct
  misc_feature 1..19: note = siRNA antisense sequence
  source 1..19: mol_type = other RNA
actaactctgccttgatgt

SEQ ID NO: 38466 - RNA, 19 nt, synthetic construct
  misc_feature 1..19: note = siRNA sense sequence
  source 1..19: mol_type = other RNA
catcaaggcagagttagtt

SEQ ID NO: 38467 - RNA, 19 nt, synthetic construct
  misc_feature 1..19: note = siRNA antisense sequence
  source 1..19: mol_type = other RNA
aactaactctgccttgatg

SEQ ID NO: 38468 - RNA, 19 nt, synthetic construct
  misc_feature 1..19: note = siRNA sense sequence
  source 1..19: mol_type = other RNA
atcaaggcagagttagttg

SEQ ID NO: 38469 - RNA, 19 nt, synthetic construct
  misc_feature 1..19: note = siRNA antisense sequence
  source 1..19: mol_type = other RNA
caactaactctgccttgat

SEQ ID NO: 38470 - RNA, 19 nt, synthetic construct
  misc_feature 1..19: note = siRNA sense sequence
  source 1..19: mol_type = other RNA
caaggcagagttagttgaa

SEQ ID NO: 38471 - RNA, 19 nt, synthetic construct
  misc_feature 1..19: note = siRNA antisense sequence
  source 1..19: mol_type = other RNA
ttcaactaactctgccttg

SEQ ID NO: 38472 - RNA, 19 nt, synthetic construct
  misc_feature 1..19: note = siRNA sense sequence
  source 1..19: mol_type = other RNA
gacatcagacaccacctac

SEQ ID NO: 38473 - RNA, 19 nt, synthetic construct
  misc_feature 1..19: note = siRNA antisense sequence
  source 1..19: mol_type = other RNA
gtaggtggtgtctgatgtc

SEQ ID NO: 38474 - RNA, 19 nt, synthetic construct
  misc_feature 1..19: note = siRNA sense sequence
  source 1..19: mol_type = other RNA
acatcagacaccacctact

SEQ ID NO: 38475 - RNA, 19 nt, synthetic construct
  misc_feature 1..19: note = siRNA antisense sequence
  source 1..19: mol_type = other RNA
agtaggtggtgtctgatgt

SEQ ID NO: 38476 - RNA, 19 nt, synthetic construct
  misc_feature 1..19: note = siRNA sense sequence
  source 1..19: mol_type = other RNA
atcagacaccacctactct

SEQ ID NO: 38477 - RNA, 19 nt, synthetic construct
  misc_feature 1..19: note = siRNA antisense sequence
  source 1..19: mol_type = other RNA
agagtaggtggtgtctgat

SEQ ID NO: 38478 - RNA, 19 nt, synthetic construct
  misc_feature 1..19: note = siRNA sense sequence
  source 1..19: mol_type = other RNA
tcagacaccacctactctt

SEQ ID NO: 38479 - RNA, 19 nt, synthetic construct
  misc_feature 1..19: note = siRNA antisense sequence
  source 1..19: mol_type = other RNA
aagagtaggtggtgtctga

SEQ ID NO: 38480 - RNA, 19 nt, synthetic construct
  misc_feature 1..19: note = siRNA sense sequence
  source 1..19: mol_type = other RNA
cagacaccacctactcttc

SEQ ID NO: 38481 - RNA, 19 nt, synthetic construct
  misc_feature 1..19: note = siRNA antisense sequence
  source 1..19: mol_type = other RNA
gaagagtaggtggtgtctg

SEQ ID NO: 38482 - RNA, 19 nt, synthetic construct
  misc_feature 1..19: note = siRNA sense sequence
  source 1..19: mol_type = other RNA
caccacctactcttcaaat

SEQ ID NO: 38483 - RNA, 19 nt, synthetic construct
  misc_feature 1..19: note = siRNA antisense sequence
  source 1..19: mol_type = other RNA
atttgaagagtaggtggtg

SEQ ID NO: 38484 - RNA, 19 nt, synthetic construct
  misc_feature 1..19: note = siRNA sense sequence
  source 1..19: mol_type = other RNA
accacctactcttcaaata

SEQ ID NO: 38485 - RNA, 19 nt, synthetic construct
  misc_feature 1..19: note = siRNA antisense sequence
  source 1..19: mol_type = other RNA
tatttgaagagtaggtggt

SEQ ID NO: 38486 - RNA, 19 nt, synthetic construct
  misc_feature 1..19: note = siRNA sense sequence
  source 1..19: mol_type = other RNA
ccacctactcttcaaataa

SEQ ID NO: 38487 - RNA, 19 nt, synthetic construct
  misc_feature 1..19: note = siRNA antisense sequence
  source 1..19: mol_type = other RNA
ttatttgaagagtaggtgg

SEQ ID NO: 38488 - RNA, 19 nt, synthetic construct
  misc_feature 1..19: note = siRNA sense sequence
  source 1..19: mol_type = other RNA
cacctactcttcaaataaa

SEQ ID NO: 38489 - RNA, 19 nt, synthetic construct
  misc_feature 1..19: note = siRNA antisense sequence
  source 1..19: mol_type = other RNA
tttatttgaagagtaggtg

SEQ ID NO: 38490 - RNA, 19 nt, synthetic construct
  misc_feature 1..19: note = siRNA sense sequence
  source 1..19: mol_type = other RNA
gcaaatatttctgcttact

SEQ ID NO: 38491 - RNA, 19 nt, synthetic construct
  misc_feature 1..19: note = siRNA antisense sequence
  source 1..19: mol_type = other RNA
agtaagcagaaatatttgc

SEQ ID NO: 38492 - RNA, 19 nt, synthetic construct
  misc_feature 1..19: note = siRNA sense sequence
  source 1..19: mol_type = other RNA
aattgtagcttattcatgg

SEQ ID NO: 38493 - RNA, 19 nt, synthetic construct
  misc_feature 1..19: note = siRNA antisense sequence
  source 1..19: mol_type = other RNA
ccatgaataagctacaatt

SEQ ID NO: 38494 - RNA, 19 nt, synthetic construct
  misc_feature 1..19: note = siRNA sense sequence
  source 1..19: mol_type = other RNA
attgtagcttattcatgga

SEQ ID NO: 38495 - RNA, 19 nt, synthetic construct
  misc_feature 1..19: note = siRNA antisense sequence
  source 1..19: mol_type = other RNA
tccatgaataagctacaat

SEQ ID NO: 38496 - RNA, 19 nt, synthetic construct
  misc_feature 1..19: note = siRNA sense sequence
  source 1..19: mol_type = other RNA
gtgtttctctcactttgat

SEQ ID NO: 38497 - RNA, 19 nt, synthetic construct
  misc_feature 1..19: note = siRNA antisense sequence
  source 1..19: mol_type = other RNA
atcaaagtgagagaaacac

SEQ ID NO: 38498 - RNA, 19 nt, synthetic construct
  misc_feature 1..19: note = siRNA sense sequence
  source 1..19: mol_type = other RNA
tgtttctctcactttgatg

SEQ ID NO: 38499 - RNA, 19 nt, synthetic construct
  misc_feature 1..19: note = siRNA antisense sequence
  source 1..19: mol_type = other RNA
catcaaagtgagagaaaca

SEQ ID NO: 38500 - RNA, 19 nt, synthetic construct
  misc_feature 1..19: note = siRNA sense sequence
  source 1..19: mol_type = other RNA
gtttctctcactttgatga

SEQ ID NO: 38501 - RNA, 19 nt, synthetic construct
  misc_feature 1..19: note = siRNA antisense sequence
  source 1..19: mol_type = other RNA
tcatcaaagtgagagaaac

SEQ ID NO: 38502 - RNA, 19 nt, synthetic construct
  misc_feature 1..19: note = siRNA sense sequence
  source 1..19: mol_type = other RNA
tctctcactttgatgatcc

SEQ ID NO: 38503 - RNA, 19 nt, synthetic construct
  misc_feature 1..19: note = siRNA antisense sequence
  source 1..19: mol_type = other RNA
ggatcatcaaagtgagaga

SEQ ID NO: 38504 - RNA, 19 nt, synthetic construct
  misc_feature 1..19: note = siRNA sense sequence
  source 1..19: mol_type = other RNA
ctctcactttgatgatcct

SEQ ID NO: 38505 - RNA, 19 nt, synthetic construct
  misc_feature 1..19: note = siRNA antisense sequence
  source 1..19: mol_type = other RNA
aggatcatcaaagtgagag

SEQ ID NO: 38506 - RNA, 19 nt, synthetic construct
  misc_feature 1..19: note = siRNA sense sequence
  source 1..19: mol_type = other RNA
tctcactttgatgatcctt

SEQ ID NO: 38507 - RNA, 19 nt, synthetic construct
  misc_feature 1..19: note = siRNA antisense sequence
  source 1..19: mol_type = other RNA
aaggatcatcaaagtgaga

SEQ ID NO: 38508 - RNA, 19 nt, synthetic construct
  misc_feature 1..19: note = siRNA sense sequence
  source 1..19: mol_type = other RNA
ctcactttgatgatccttg

SEQ ID NO: 38509 - RNA, 19 nt, synthetic construct
  misc_feature 1..19: note = siRNA antisense sequence
  source 1..19: mol_type = other RNA
caaggatcatcaaagtgag

SEQ ID NO: 38510 - RNA, 19 nt, synthetic construct
  misc_feature 1..19: note = siRNA sense sequence
  source 1..19: mol_type = other RNA
tcactttgatgatccttga

SEQ ID NO: 38511 - RNA, 19 nt, synthetic construct
  misc_feature 1..19: note = siRNA antisense sequence
  source 1..19: mol_type = other RNA
tcaaggatcatcaaagtga

SEQ ID NO: 38512 - RNA, 19 nt, synthetic construct
  misc_feature 1..19: note = siRNA sense sequence
  source 1..19: mol_type = other RNA
cactttgatgatccttgag

SEQ ID NO: 38513 - RNA, 19 nt, synthetic construct
  misc_feature 1..19: note = siRNA antisense sequence
  source 1..19: mol_type = other RNA
ctcaaggatcatcaaagtg

SEQ ID NO: 38514 - RNA, 19 nt, synthetic construct
  misc_feature 1..19: note = siRNA sense sequence
  source 1..19: mol_type = other RNA
actttgatgatccttgagt

SEQ ID NO: 38515 - RNA, 19 nt, synthetic construct
  misc_feature 1..19: note = siRNA antisense sequence
  source 1..19: mol_type = other RNA
actcaaggatcatcaaagt

SEQ ID NO: 38516 - RNA, 19 nt, synthetic construct
  misc_feature 1..19: note = siRNA sense sequence
  source 1..19: mol_type = other RNA
ctttgatgatccttgagtt

SEQ ID NO: 38517 - RNA, 19 nt, synthetic construct
  misc_feature 1..19: note = siRNA antisense sequence
  source 1..19: mol_type = other RNA
aactcaaggatcatcaaag

SEQ ID NO: 38518 - RNA, 19 nt, synthetic construct
  misc_feature 1..19: note = siRNA sense sequence
  source 1..19: mol_type = other RNA
tttgatgatccttgagttg

SEQ ID NO: 38519 - RNA, 19 nt, synthetic construct
  misc_feature 1..19: note = siRNA antisense sequence
  source 1..19: mol_type = other RNA
caactcaaggatcatcaaa

SEQ ID NO: 38520 - RNA, 19 nt, synthetic construct
  misc_feature 1..19: note = siRNA sense sequence
  source 1..19: mol_type = other RNA
ttgatgatccttgagttga

SEQ ID NO: 38521 - RNA, 19 nt, synthetic construct
  misc_feature 1..19: note = siRNA antisense sequence
  source 1..19: mol_type = other RNA
tcaactcaaggatcatcaa

SEQ ID NO: 38522 - RNA, 19 nt, synthetic construct
  misc_feature 1..19: note = siRNA sense sequence
  source 1..19: mol_type = other RNA
tgatgatccttgagttgat

SEQ ID NO: 38523 - RNA, 19 nt, synthetic construct
  misc_feature 1..19: note = siRNA antisense sequence
  source 1..19: mol_type = other RNA
atcaactcaaggatcatca

SEQ ID NO: 38524 - RNA, 19 nt, synthetic construct
  misc_feature 1..19: note = siRNA sense sequence
  source 1..19: mol_type = other RNA
tccttgagttgatcagatg

SEQ ID NO: 38525 - RNA, 19 nt, synthetic construct
  misc_feature 1..19: note = siRNA antisense sequence
  source 1..19: mol_type = other RNA
catctgatcaactcaagga

SEQ ID NO: 38526 - RNA, 19 nt, synthetic construct
  misc_feature 1..19: note = siRNA sense sequence
  source 1..19: mol_type = other RNA
ccttgagttgatcagatgt

SEQ ID NO: 38527 - RNA, 19 nt, synthetic construct
  misc_feature 1..19: note = siRNA antisense sequence
  source 1..19: mol_type = other RNA
acatctgatcaactcaagg

SEQ ID NO: 38528 - RNA, 19 nt, synthetic construct
  misc_feature 1..19: note = siRNA sense sequence
  source 1..19: mol_type = other RNA
cttgagttgatcagatgtt

SEQ ID NO: 38529 - RNA, 19 nt, synthetic construct
  misc_feature 1..19: note = siRNA antisense sequence
  source 1..19: mol_type = other RNA
aacatctgatcaactcaag

SEQ ID NO: 38530 - RNA, 19 nt, synthetic construct
  misc_feature 1..19: note = siRNA sense sequence
  source 1..19: mol_type = other RNA
ttgagttgatcagatgttt

SEQ ID NO: 38531 - RNA, 19 nt, synthetic construct
  misc_feature 1..19: note = siRNA antisense sequence
  source 1..19: mol_type = other RNA
aaacatctgatcaactcaa

SEQ ID NO: 38532 - RNA, 19 nt, synthetic construct
  misc_feature 1..19: note = siRNA sense sequence
  source 1..19: mol_type = other RNA
tgatcagatgtttctccag

SEQ ID NO: 38533 - RNA, 19 nt, synthetic construct
  misc_feature 1..19: note = siRNA antisense sequence
  source 1..19: mol_type = other RNA
ctggagaaacatctgatca

SEQ ID NO: 38534 - RNA, 19 nt, synthetic construct
  misc_feature 1..19: note = siRNA sense sequence
  source 1..19: mol_type = other RNA
gatcagatgtttctccaga

SEQ ID NO: 38535 - RNA, 19 nt, synthetic construct
  misc_feature 1..19: note = siRNA antisense sequence
  source 1..19: mol_type = other RNA
tctggagaaacatctgatc

SEQ ID NO: 38536 - RNA, 19 nt, synthetic construct
  misc_feature 1..19: note = siRNA sense sequence
  source 1..19: mol_type = other RNA
atcagatgtttctccagaa

SEQ ID NO: 38537 - RNA, 19 nt, synthetic construct
  misc_feature 1..19: note = siRNA antisense sequence
  source 1..19: mol_type = other RNA
ttctggagaaacatctgat

SEQ ID NO: 38538 - RNA, 19 nt, synthetic construct
  misc_feature 1..19: note = siRNA sense sequence
  source 1..19: mol_type = other RNA
tgagtaacgatatccagaa

SEQ ID NO: 38539 - RNA, 19 nt, synthetic construct
  misc_feature 1..19: note = siRNA antisense sequence
  source 1..19: mol_type = other RNA
ttctggatatcgttactca

SEQ ID NO: 38540 - RNA, 19 nt, synthetic construct
  misc_feature 1..19: note = siRNA sense sequence
  source 1..19: mol_type = other RNA
acatgttttgatcttctca

SEQ ID NO: 38541 - RNA, 19 nt, synthetic construct
  misc_feature 1..19: note = siRNA antisense sequence
  source 1..19: mol_type = other RNA
tgagaagatcaaaacatgt

SEQ ID NO: 38542 - RNA, 19 nt, synthetic construct
  misc_feature 1..19: note = siRNA sense sequence
  source 1..19: mol_type = other RNA
catgttttgatcttctcag

SEQ ID NO: 38543 - RNA, 19 nt, synthetic construct
  misc_feature 1..19: note = siRNA antisense sequence
  source 1..19: mol_type = other RNA
ctgagaagatcaaaacatg

SEQ ID NO: 38544 - RNA, 19 nt, synthetic construct
  misc_feature 1..19: note = siRNA sense sequence
  source 1..19: mol_type = other RNA
atgttttgatcttctcagt

SEQ ID NO: 38545 - RNA, 19 nt, synthetic construct
  misc_feature 1..19: note = siRNA antisense sequence
  source 1..19: mol_type = other RNA
actgagaagatcaaaacat

SEQ ID NO: 38546 - RNA, 19 nt, synthetic construct
  misc_feature 1..19: note = siRNA sense sequence
  source 1..19: mol_type = other RNA
tgttttgatcttctcagtc

SEQ ID NO: 38547 - RNA, 19 nt, synthetic construct
  misc_feature 1..19: note = siRNA antisense sequence
  source 1..19: mol_type = other RNA
gactgagaagatcaaaaca

SEQ ID NO: 38548 - RNA, 19 nt, synthetic construct
  misc_feature 1..19: note = siRNA sense sequence
  source 1..19: mol_type = other RNA
ttgatcttctcagtctgca

SEQ ID NO: 38549 - RNA, 19 nt, synthetic construct
  misc_feature 1..19: note = siRNA antisense sequence
  source 1..19: mol_type = other RNA
tgcagactgagaagatcaa

SEQ ID NO: 38550 - RNA, 19 nt, synthetic construct
  misc_feature 1..19: note = siRNA sense sequence
  source 1..19: mol_type = other RNA
tgatcttctcagtctgcat

SEQ ID NO: 38551 - RNA, 19 nt, synthetic construct
  misc_feature 1..19: note = siRNA antisense sequence
  source 1..19: mol_type = other RNA
atgcagactgagaagatca

SEQ ID NO: 38552 - RNA, 19 nt, synthetic construct
  misc_feature 1..19: note = siRNA sense sequence
  source 1..19: mol_type = other RNA
gatcttctcagtctgcata

SEQ ID NO: 38553 - RNA, 19 nt, synthetic construct
  misc_feature 1..19: note = siRNA antisense sequence
  source 1..19: mol_type = other RNA
tatgcagactgagaagatc

SEQ ID NO: 38554 - RNA, 19 nt, synthetic construct
  misc_feature 1..19: note = siRNA sense sequence
  source 1..19: mol_type = other RNA
atcttctcagtctgcatac

SEQ ID NO: 38555 - RNA, 19 nt, synthetic construct
  misc_feature 1..19: note = siRNA antisense sequence
  source 1..19: mol_type = other RNA
gtatgcagactgagaagat

SEQ ID NO: 38556 - RNA, 19 nt, synthetic construct
  misc_feature 1..19: note = siRNA sense sequence
  source 1..19: mol_type = other RNA
gtctgcatacaggtcatta

SEQ ID NO: 38557 - RNA, 19 nt, synthetic construct
  misc_feature 1..19: note = siRNA antisense sequence
  source 1..19: mol_type = other RNA
taatgacctgtatgcagac

SEQ ID NO: 38558 - RNA, 19 nt, synthetic construct
  misc_feature 1..19: note = siRNA sense sequence
  source 1..19: mol_type = other RNA
tctgcatacaggtcattac

SEQ ID NO: 38559 - RNA, 19 nt, synthetic construct
  misc_feature 1..19: note = siRNA antisense sequence
  source 1..19: mol_type = other RNA
gtaatgacctgtatgcaga

SEQ ID NO: 38560 - RNA, 19 nt, synthetic construct
  misc_feature 1..19: note = siRNA sense sequence
  source 1..19: mol_type = other RNA
ctgcatacaggtcattaca

SEQ ID NO: 38561 - RNA, 19 nt, synthetic construct
  misc_feature 1..19: note = siRNA antisense sequence
  source 1..19: mol_type = other RNA
tgtaatgacctgtatgcag

SEQ ID NO: 38562 - RNA, 19 nt, synthetic construct
  misc_feature 1..19: note = siRNA sense sequence
  source 1..19: mol_type = other RNA
atgtgcctgggccttcacc

SEQ ID NO: 38563 - RNA, 19 nt, synthetic construct
  misc_feature 1..19: note = siRNA antisense sequence
  source 1..19: mol_type = other RNA
ggtgaaggcccaggcacat

SEQ ID NO: 38564 - RNA, 19 nt, synthetic construct
  misc_feature 1..19: note = siRNA sense sequence
  source 1..19: mol_type = other RNA
ggccttcaccttgaccctg

SEQ ID NO: 38565 - RNA, 19 nt, synthetic construct
  misc_feature 1..19: note = siRNA antisense sequence
  source 1..19: mol_type = other RNA
cagggtcaaggtgaaggcc

SEQ ID NO: 38566 - RNA, 19 nt, synthetic construct
  misc_feature 1..19: note = siRNA sense sequence
  source 1..19: mol_type = other RNA
gccttcaccttgaccctgt

SEQ ID NO: 38567 - RNA, 19 nt, synthetic construct
  misc_feature 1..19: note = siRNA antisense sequence
  source 1..19: mol_type = other RNA
acagggtcaaggtgaaggc

SEQ ID NO: 38568 - RNA, 19 nt, synthetic construct
  misc_feature 1..19: note = siRNA sense sequence
  source 1..19: mol_type = other RNA
ccttcaccttgaccctgtg

SEQ ID NO: 38569 - RNA, 19 nt, synthetic construct
  misc_feature 1..19: note = siRNA antisense sequence
  source 1..19: mol_type = other RNA
cacagggtcaaggtgaagg

SEQ ID NO: 38570 - RNA, 19 nt, synthetic construct
  misc_feature 1..19: note = siRNA sense sequence
  source 1..19: mol_type = other RNA
cttcaccttgaccctgtgg

SEQ ID NO: 38571 - RNA, 19 nt, synthetic construct
  misc_feature 1..19: note = siRNA antisense sequence
  source 1..19: mol_type = other RNA
ccacagggtcaaggtgaag

SEQ ID NO: 38572 - RNA, 19 nt, synthetic construct
  misc_feature 1..19: note = siRNA sense sequence
  source 1..19: mol_type = other RNA
ttcaccttgaccctgtggg

SEQ ID NO: 38573 - RNA, 19 nt, synthetic construct
  misc_feature 1..19: note = siRNA antisense sequence
  source 1..19: mol_type = other RNA
cccacagggtcaaggtgaa

SEQ ID NO: 38574 - RNA, 19 nt, synthetic construct
  misc_feature 1..19: note = siRNA sense sequence
  source 1..19: mol_type = other RNA
tgtattttctagacaggaa

SEQ ID NO: 38575 - RNA, 19 nt, synthetic construct
  misc_feature 1..19: note = siRNA antisense sequence
  source 1..19: mol_type = other RNA
ttcctgtctagaaaataca

SEQ ID NO: 38576 - RNA, 19 nt, synthetic construct
  misc_feature 1..19: note = siRNA sense sequence
  source 1..19: mol_type = other RNA
gaatgaatgtccaaaggtt

SEQ ID NO: 38577 - RNA, 19 nt, synthetic construct
  misc_feature 1..19: note = siRNA antisense sequence
  source 1..19: mol_type = other RNA
aacctttggacattcattc

SEQ ID NO: 38578 - RNA, 19 nt, synthetic construct
  misc_feature 1..19: note = siRNA sense sequence
  source 1..19: mol_type = other RNA
aatgaatgtccaaaggttt

SEQ ID NO: 38579 - RNA, 19 nt, synthetic construct
  misc_feature 1..19: note = siRNA antisense sequence
  source 1..19: mol_type = other RNA
aaacctttggacattcatt

SEQ ID NO: 38580 - RNA, 19 nt, synthetic construct
  misc_feature 1..19: note = siRNA sense sequence
  source 1..19: mol_type = other RNA
atgaatgtccaaaggttta

SEQ ID NO: 38581 - RNA, 19 nt, synthetic construct
  misc_feature 1..19: note = siRNA antisense sequence
  source 1..19: mol_type = other RNA
taaacctttggacattcat

SEQ ID NO: 38582 - RNA, 19 nt, synthetic construct
  misc_feature 1..19: note = siRNA sense sequence
  source 1..19: mol_type = other RNA
tgaatgtccaaaggtttaa

SEQ ID NO: 38583 - RNA, 19 nt, synthetic construct
  misc_feature 1..19: note = siRNA antisense sequence
  source 1..19: mol_type = other RNA
ttaaacctttggacattca

SEQ ID NO: 38584 - RNA, 19 nt, synthetic construct
  misc_feature 1..19: note = siRNA sense sequence
  source 1..19: mol_type = other RNA
gtccaaaggtttaatatag

SEQ ID NO: 38585 - RNA, 19 nt, synthetic construct
  misc_feature 1..19: note = siRNA antisense sequence
  source 1..19: mol_type = other RNA
ctatattaaacctttggac

SEQ ID NO: 38586 - RNA, 19 nt, synthetic construct
  misc_feature 1..19: note = siRNA sense sequence
  source 1..19: mol_type = other RNA
tccaaaggtttaatatagc

SEQ ID NO: 38587 - RNA, 19 nt, synthetic construct
  misc_feature 1..19: note = siRNA antisense sequence
  source 1..19: mol_type = other RNA
gctatattaaacctttgga

SEQ ID NO: 38588 - RNA, 19 nt, synthetic construct
  misc_feature 1..19: note = siRNA sense sequence
  source 1..19: mol_type = other RNA
ccaaaggtttaatatagca

SEQ ID NO: 38589 - RNA, 19 nt, synthetic construct
  misc_feature 1..19: note = siRNA antisense sequence
  source 1..19: mol_type = other RNA
tgctatattaaacctttgg

SEQ ID NO: 38590 - RNA, 19 nt, synthetic construct
  misc_feature 1..19: note = siRNA sense sequence
  source 1..19: mol_type = other RNA
atagcaagtatgtcacagg

SEQ ID NO: 38591 - RNA, 19 nt, synthetic construct
  misc_feature 1..19: note = siRNA antisense sequence
  source 1..19: mol_type = other RNA
cctgtgacatacttgctat

SEQ ID NO: 38592 - RNA, 19 nt, synthetic construct
  misc_feature 1..19: note = siRNA sense sequence
  source 1..19: mol_type = other RNA
agtatgtcacagggtcagg

SEQ ID NO: 38593 - RNA, 19 nt, synthetic construct
  misc_feature 1..19: note = siRNA antisense sequence
  source 1..19: mol_type = other RNA
cctgaccctgtgacatact

SEQ ID NO: 38594 - RNA, 19 nt, synthetic construct
  misc_feature 1..19: note = siRNA sense sequence
  source 1..19: mol_type = other RNA
tgtcacagggtcaggatat

SEQ ID NO: 38595 - RNA, 19 nt, synthetic construct
  misc_feature 1..19: note = siRNA antisense sequence
  source 1..19: mol_type = other RNA
atatcctgaccctgtgaca

SEQ ID NO: 38596 - RNA, 19 nt, synthetic construct
  misc_feature 1..19: note = siRNA sense sequence
  source 1..19: mol_type = other RNA
gtcacagggtcaggatatg

SEQ ID NO: 38597 - RNA, 19 nt, synthetic construct
  misc_feature 1..19: note = siRNA antisense sequence
  source 1..19: mol_type = other RNA
catatcctgaccctgtgac

SEQ ID NO: 38598 - RNA, 19 nt, synthetic construct
  misc_feature 1..19: note = siRNA sense sequence
  source 1..19: mol_type = other RNA
tcacagggtcaggatatgg

SEQ ID NO: 38599 - RNA, 19 nt, synthetic construct
  misc_feature 1..19: note = siRNA antisense sequence
  source 1..19: mol_type = other RNA
ccatatcctgaccctgtga

SEQ ID NO: 38600 - RNA, 19 nt, synthetic construct
  misc_feature 1..19: note = siRNA sense sequence
  source 1..19: mol_type = other RNA
cacagggtcaggatatgga

SEQ ID NO: 38601 - RNA, 19 nt, synthetic construct
  misc_feature 1..19: note = siRNA antisense sequence
  source 1..19: mol_type = other RNA
tccatatcctgaccctgtg

SEQ ID NO: 38602 - RNA, 19 nt, synthetic construct
  misc_feature 1..19: note = siRNA sense sequence
  source 1..19: mol_type = other RNA
acagggtcaggatatggaa

SEQ ID NO: 38603 - RNA, 19 nt, synthetic construct
  misc_feature 1..19: note = siRNA antisense sequence
  source 1..19: mol_type = other RNA
ttccatatcctgaccctgt

SEQ ID NO: 38604 - RNA, 19 nt, synthetic construct
  misc_feature 1..19: note = siRNA sense sequence
  source 1..19: mol_type = other RNA
acaccagccttctgacttt

SEQ ID NO: 38605 - RNA, 19 nt, synthetic construct
  misc_feature 1..19: note = siRNA antisense sequence
  source 1..19: mol_type = other RNA
aaagtcagaaggctggtgt

SEQ ID NO: 38606 - RNA, 19 nt, synthetic construct
  misc_feature 1..19: note = siRNA sense sequence
  source 1..19: mol_type = other RNA
caccagccttctgactttt

SEQ ID NO: 38607 - RNA, 19 nt, synthetic construct
  misc_feature 1..19: note = siRNA antisense sequence
  source 1..19: mol_type = other RNA
aaaagtcagaaggctggtg

SEQ ID NO: 38608 - RNA, 19 nt, synthetic construct
  misc_feature 1..19: note = siRNA sense sequence
  source 1..19: mol_type = other RNA
caaggattctctagctgtt

SEQ ID NO: 38609 - RNA, 19 nt, synthetic construct
  misc_feature 1..19: note = siRNA antisense sequence
  source 1..19: mol_type = other RNA
aacagctagagaatccttg

SEQ ID NO: 38610 - RNA, 19 nt, synthetic construct
  misc_feature 1..19: note = siRNA sense sequence
  source 1..19: mol_type = other RNA
aggattctctagctgtttg

SEQ ID NO: 38611 - RNA, 19 nt, synthetic construct
  misc_feature 1..19: note = siRNA antisense sequence
  source 1..19: mol_type = other RNA
caaacagctagagaatcct

SEQ ID NO: 38612 - RNA, 19 nt, synthetic construct
  misc_feature 1..19: note = siRNA sense sequence
  source 1..19: mol_type = other RNA
gattctctagctgtttgac

SEQ ID NO: 38613 - RNA, 19 nt, synthetic construct
  misc_feature 1..19: note = siRNA antisense sequence
  source 1..19: mol_type = other RNA
gtcaaacagctagagaatc

SEQ ID NO: 38614 - RNA, 19 nt, synthetic construct
  misc_feature 1..19: note = siRNA sense sequence
  source 1..19: mol_type = other RNA
attctctagctgtttgacc

SEQ ID NO: 38615 - RNA, 19 nt, synthetic construct
  misc_feature 1..19: note = siRNA antisense sequence
  source 1..19: mol_type = other RNA
ggtcaaacagctagagaat

SEQ ID NO: 38616 - RNA, 19 nt, synthetic construct
  misc_feature 1..19: note = siRNA sense sequence
  source 1..19: mol_type = other RNA
ctagctgtttgacctggag

SEQ ID NO: 38617 - RNA, 19 nt, synthetic construct
  misc_feature 1..19: note = siRNA antisense sequence
  source 1..19: mol_type = other RNA
ctccaggtcaaacagctag

SEQ ID NO: 38618 - RNA, 19 nt, synthetic construct
  misc_feature 1..19: note = siRNA sense sequence
  source 1..19: mol_type = other RNA
ctctggtgtcactcaaagg

SEQ ID NO: 38619 - RNA, 19 nt, synthetic construct
  misc_feature 1..19: note = siRNA antisense sequence
  source 1..19: mol_type = other RNA
cctttgagtgacaccagag

SEQ ID NO: 38620 - RNA, 19 nt, synthetic construct
  misc_feature 1..19: note = siRNA sense sequence
  source 1..19: mol_type = other RNA
tctggtgtcactcaaaggc

SEQ ID NO: 38621 - RNA, 19 nt, synthetic construct
  misc_feature 1..19: note = siRNA antisense sequence
  source 1..19: mol_type = other RNA
gcctttgagtgacaccaga

SEQ ID NO: 38622 - RNA, 19 nt, synthetic construct
  misc_feature 1..19: note = siRNA sense sequence
  source 1..19: mol_type = other RNA
ctggtgtcactcaaaggca

SEQ ID NO: 38623 - RNA, 19 nt, synthetic construct
  misc_feature 1..19: note = siRNA antisense sequence
  source 1..19: mol_type = other RNA
tgcctttgagtgacaccag

SEQ ID NO: 38624 - RNA, 19 nt, synthetic construct
  misc_feature 1..19: note = siRNA sense sequence
  source 1..19: mol_type = other RNA
tgtcactcaaaggcatgta

SEQ ID NO: 38625 - RNA, 19 nt, synthetic construct
  misc_feature 1..19: note = siRNA antisense sequence
  source 1..19: mol_type = other RNA
tacatgcctttgagtgaca

SEQ ID NO: 38626 - RNA, 19 nt, synthetic construct
  misc_feature 1..19: note = siRNA sense sequence
  source 1..19: mol_type = other RNA
gtcactcaaaggcatgtat

SEQ ID NO: 38627 - RNA, 19 nt, synthetic construct
  misc_feature 1..19: note = siRNA antisense sequence
  source 1..19: mol_type = other RNA
atacatgcctttgagtgac

SEQ ID NO: 38628 - RNA, 19 nt, synthetic construct
  misc_feature 1..19: note = siRNA sense sequence
  source 1..19: mol_type = other RNA
ctcaaaggcatgtatagca

SEQ ID NO: 38629 - RNA, 19 nt, synthetic construct
  misc_feature 1..19: note = siRNA antisense sequence
  source 1..19: mol_type = other RNA
tgctatacatgcctttgag

SEQ ID NO: 38630 - RNA, 19 nt, synthetic construct
  misc_feature 1..19: note = siRNA sense sequence
  source 1..19: mol_type = other RNA
tcaaaggcatgtatagcat

SEQ ID NO: 38631 - RNA, 19 nt, synthetic construct
  misc_feature 1..19: note = siRNA antisense sequence
  source 1..19: mol_type = other RNA
atgctatacatgcctttga

SEQ ID NO: 38632 - RNA, 19 nt, synthetic construct
  misc_feature 1..19: note = siRNA sense sequence
  source 1..19: mol_type = other RNA
caaaggcatgtatagcatc

SEQ ID NO: 38633 - RNA, 19 nt, synthetic construct
  misc_feature 1..19: note = siRNA antisense sequence
  source 1..19: mol_type = other RNA
gatgctatacatgcctttg

SEQ ID NO: 38634 - RNA, 19 nt, synthetic construct
  misc_feature 1..19: note = siRNA sense sequence
  source 1..19: mol_type = other RNA
aaaggcatgtatagcatcc

SEQ ID NO: 38635 - RNA, 19 nt, synthetic construct
  misc_feature 1..19: note = siRNA antisense sequence
  source 1..19: mol_type = other RNA
ggatgctatacatgccttt

SEQ ID NO: 38636 - RNA, 19 nt, synthetic construct
  misc_feature 1..19: note = siRNA sense sequence
  source 1..19: mol_type = other RNA
aaggcatgtatagcatccc

SEQ ID NO: 38637 - RNA, 19 nt, synthetic construct
  misc_feature 1..19: note = siRNA antisense sequence
  source 1..19: mol_type = other RNA
gggatgctatacatgcctt

SEQ ID NO: 38638 - RNA, 19 nt, synthetic construct
  misc_feature 1..19: note = siRNA sense sequence
  source 1..19: mol_type = other RNA
catgtatagcatcccactt

SEQ ID NO: 38639 - RNA, 19 nt, synthetic construct
  misc_feature 1..19: note = siRNA antisense sequence
  source 1..19: mol_type = other RNA
aagtgggatgctatacatg

SEQ ID NO: 38640 - RNA, 19 nt, synthetic construct
  misc_feature 1..19: note = siRNA sense sequence
  source 1..19: mol_type = other RNA
atgtatagcatcccactta

SEQ ID NO: 38641 - RNA, 19 nt, synthetic construct
  misc_feature 1..19: note = siRNA antisense sequence
  source 1..19: mol_type = other RNA
taagtgggatgctatacat

SEQ ID NO: 38642 - RNA, 19 nt, synthetic construct
  misc_feature 1..19: note = siRNA sense sequence
  source 1..19: mol_type = other RNA
tgtatagcatcccacttaa

SEQ ID NO: 38643 - RNA, 19 nt, synthetic construct
  misc_feature 1..19: note = siRNA antisense sequence
  source 1..19: mol_type = other RNA
ttaagtgggatgctataca

SEQ ID NO: 38644 - RNA, 19 nt, synthetic construct
  misc_feature 1..19: note = siRNA sense sequence
  source 1..19: mol_type = other RNA
gtatagcatcccacttaag

SEQ ID NO: 38645 - RNA, 19 nt, synthetic construct
  misc_feature 1..19: note = siRNA antisense sequence
  source 1..19: mol_type = other RNA
cttaagtgggatgctatac

SEQ ID NO: 38646 - RNA, 19 nt, synthetic construct
  misc_feature 1..19: note = siRNA sense sequence
  source 1..19: mol_type = other RNA
tatagcatcccacttaagc

SEQ ID NO: 38647 - RNA, 19 nt, synthetic construct
  misc_feature 1..19: note = siRNA antisense sequence
  source 1..19: mol_type = other RNA
gcttaagtgggatgctata

SEQ ID NO: 38648 - RNA, 19 nt, synthetic construct
  misc_feature 1..19: note = siRNA sense sequence
  source 1..19: mol_type = other RNA
gcatcccacttaagctgaa

SEQ ID NO: 38649 - RNA, 19 nt, synthetic construct
  misc_feature 1..19: note = siRNA antisense sequence
  source 1..19: mol_type = other RNA
ttcagcttaagtgggatgc

SEQ ID NO: 38650 - RNA, 19 nt, synthetic construct
  misc_feature 1..19: note = siRNA sense sequence
  source 1..19: mol_type = other RNA
cccacttaagctgaatata

SEQ ID NO: 38651 - RNA, 19 nt, synthetic construct
  misc_feature 1..19: note = siRNA antisense sequence
  source 1..19: mol_type = other RNA
tatattcagcttaagtggg

SEQ ID NO: 38652 - RNA, 19 nt, synthetic construct
  misc_feature 1..19: note = siRNA sense sequence
  source 1..19: mol_type = other RNA
caatccagacctcttggct

SEQ ID NO: 38653 - RNA, 19 nt, synthetic construct
  misc_feature 1..19: note = siRNA antisense sequence
  source 1..19: mol_type = other RNA
agccaagaggtctggattg

SEQ ID NO: 38654 - RNA, 19 nt, synthetic construct
  misc_feature 1..19: note = siRNA sense sequence
  source 1..19: mol_type = other RNA
aatccagacctcttggctg

SEQ ID NO: 38655 - RNA, 19 nt, synthetic construct
  misc_feature 1..19: note = siRNA antisense sequence
  source 1..19: mol_type = other RNA
cagccaagaggtctggatt

SEQ ID NO: 38656 - RNA, 19 nt, synthetic construct
  misc_feature 1..19: note = siRNA sense sequence
  source 1..19: mol_type = other RNA
acctcttggctggtcacat

SEQ ID NO: 38657 - RNA, 19 nt, synthetic construct
  misc_feature 1..19: note = siRNA antisense sequence
  source 1..19: mol_type = other RNA
atgtgaccagccaagaggt

SEQ ID NO: 38658 - RNA, 19 nt, synthetic construct
  misc_feature 1..19: note = siRNA sense sequence
  source 1..19: mol_type = other RNA
cctcttggctggtcacata

SEQ ID NO: 38659 - RNA, 19 nt, synthetic construct
  misc_feature 1..19: note = siRNA antisense sequence
  source 1..19: mol_type = other RNA
tatgtgaccagccaagagg

SEQ ID NO: 38660 - RNA, 19 nt, synthetic construct
  misc_feature 1..19: note = siRNA sense sequence
  source 1..19: mol_type = other RNA
ctcttggctggtcacataa

SEQ ID NO: 38661 - RNA, 19 nt, synthetic construct
  misc_feature 1..19: note = siRNA antisense sequence
  source 1..19: mol_type = other RNA
ttatgtgaccagccaagag

SEQ ID NO: 38662 - RNA, 19 nt, synthetic construct
  misc_feature 1..19: note = siRNA sense sequence
  source 1..19: mol_type = other RNA
tcttggctggtcacataag

SEQ ID NO: 38663 - RNA, 19 nt, synthetic construct
  misc_feature 1..19: note = siRNA antisense sequence
  source 1..19: mol_type = other RNA
cttatgtgaccagccaaga

SEQ ID NO: 38664 - RNA, 19 nt, synthetic construct
  misc_feature 1..19: note = siRNA sense sequence
  source 1..19: mol_type = other RNA
ttggctggtcacataagta

SEQ ID NO: 38665 - RNA, 19 nt, synthetic construct
  misc_feature 1..19: note = siRNA antisense sequence
  source 1..19: mol_type = other RNA
tacttatgtgaccagccaa

SEQ ID NO: 38666 - RNA, 19 nt, synthetic construct
  misc_feature 1..19: note = siRNA sense sequence
  source 1..19: mol_type = other RNA
tggctggtcacataagtat

SEQ ID NO: 38667 - RNA, 19 nt, synthetic construct
  misc_feature 1..19: note = siRNA antisense sequence
  source 1..19: mol_type = other RNA
atacttatgtgaccagcca

SEQ ID NO: 38668 - RNA, 19 nt, synthetic construct
  misc_feature 1..19: note = siRNA sense sequence
  source 1..19: mol_type = other RNA
ggctggtcacataagtata

SEQ ID NO: 38669 - RNA, 19 nt, synthetic construct
  misc_feature 1..19: note = siRNA antisense sequence
  source 1..19: mol_type = other RNA
tatacttatgtgaccagcc

SEQ ID NO: 38670 - RNA, 19 nt, synthetic construct
  misc_feature 1..19: note = siRNA sense sequence
  source 1..19: mol_type = other RNA
gctggtcacataagtataa

SEQ ID NO: 38671 - RNA, 19 nt, synthetic construct
  misc_feature 1..19: note = siRNA antisense sequence
  source 1..19: mol_type = other RNA
ttatacttatgtgaccagc

SEQ ID NO: 38672 - RNA, 19 nt, synthetic construct
  misc_feature 1..19: note = siRNA sense sequence
  source 1..19: mol_type = other RNA
ctggtcacataagtataaa

SEQ ID NO: 38673 - RNA, 19 nt, synthetic construct
  misc_feature 1..19: note = siRNA antisense sequence
  source 1..19: mol_type = other RNA
tttatacttatgtgaccag

SEQ ID NO: 38674 - RNA, 19 nt, synthetic construct
  misc_feature 1..19: note = siRNA sense sequence
  source 1..19: mol_type = other RNA
aagtataaattctcaggtc

SEQ ID NO: 38675 - RNA, 19 nt, synthetic construct
  misc_feature 1..19: note = siRNA antisense sequence
  source 1..19: mol_type = other RNA
gacctgagaatttatactt

SEQ ID NO: 38676 - RNA, 19 nt, synthetic construct
  misc_feature 1..19: note = siRNA sense sequence
  source 1..19: mol_type = other RNA
agtataaattctcaggtct

SEQ ID NO: 38677 - RNA, 19 nt, synthetic construct
  misc_feature 1..19: note = siRNA antisense sequence
  source 1..19: mol_type = other RNA
agacctgagaatttatact

SEQ ID NO: 38678 - RNA, 19 nt, synthetic construct
  misc_feature 1..19: note = siRNA sense sequence
  source 1..19: mol_type = other RNA
gtataaattctcaggtctg

SEQ ID NO: 38679 - RNA, 19 nt, synthetic construct
  misc_feature 1..19: note = siRNA antisense sequence
  source 1..19: mol_type = other RNA
cagacctgagaatttatac

SEQ ID NO: 38680 - RNA, 19 nt, synthetic construct
  misc_feature 1..19: note = siRNA sense sequence
  source 1..19: mol_type = other RNA
tataaattctcaggtctgc

SEQ ID NO: 38681 - RNA, 19 nt, synthetic construct
  misc_feature 1..19: note = siRNA antisense sequence
  source 1..19: mol_type = other RNA
gcagacctgagaatttata

SEQ ID NO: 38682 - RNA, 19 nt, synthetic construct
  misc_feature 1..19: note = siRNA sense sequence
  source 1..19: mol_type = other RNA
ataaattctcaggtctgcc

SEQ ID NO: 38683 - RNA, 19 nt, synthetic construct
  misc_feature 1..19: note = siRNA antisense sequence
  source 1..19: mol_type = other RNA
ggcagacctgagaatttat

SEQ ID NO: 38684 - RNA, 19 nt, synthetic construct
  misc_feature 1..19: note = siRNA sense sequence
  source 1..19: mol_type = other RNA
taaattctcaggtctgcct

SEQ ID NO: 38685 - RNA, 19 nt, synthetic construct
  misc_feature 1..19: note = siRNA antisense sequence
  source 1..19: mol_type = other RNA
aggcagacctgagaattta

SEQ ID NO: 38686 - RNA, 19 nt, synthetic construct
  misc_feature 1..19: note = siRNA sense sequence
  source 1..19: mol_type = other RNA
ttctcaggtctgccttatt

SEQ ID NO: 38687 - RNA, 19 nt, synthetic construct
  misc_feature 1..19: note = siRNA antisense sequence
  source 1..19: mol_type = other RNA
aataaggcagacctgagaa

SEQ ID NO: 38688 - RNA, 19 nt, synthetic construct
  misc_feature 1..19: note = siRNA sense sequence
  source 1..19: mol_type = other RNA
tctcaggtctgccttattc

SEQ ID NO: 38689 - RNA, 19 nt, synthetic construct
  misc_feature 1..19: note = siRNA antisense sequence
  source 1..19: mol_type = other RNA
gaataaggcagacctgaga

SEQ ID NO: 38690 - RNA, 19 nt, synthetic construct
  misc_feature 1..19: note = siRNA sense sequence
  source 1..19: mol_type = other RNA
ctcaggtctgccttattca

SEQ ID NO: 38691 - RNA, 19 nt, synthetic construct
  misc_feature 1..19: note = siRNA antisense sequence
  source 1..19: mol_type = other RNA
tgaataaggcagacctgag

SEQ ID NO: 38692 - RNA, 19 nt, synthetic construct
  misc_feature 1..19: note = siRNA sense sequence
  source 1..19: mol_type = other RNA
tcaggtctgccttattcag

SEQ ID NO: 38693 - RNA, 19 nt, synthetic construct
  misc_feature 1..19: note = siRNA antisense sequence
  source 1..19: mol_type = other RNA
ctgaataaggcagacctga

SEQ ID NO: 38694 - RNA, 19 nt, synthetic construct
  misc_feature 1..19: note = siRNA sense sequence
  source 1..19: mol_type = other RNA
gaatgcctattttgtgctt

SEQ ID NO: 38695 - RNA, 19 nt, synthetic construct
  misc_feature 1..19: note = siRNA antisense sequence
  source 1..19: mol_type = other RNA
aagcacaaaataggcattc

SEQ ID NO: 38696 - RNA, 19 nt, synthetic construct
  misc_feature 1..19: note = siRNA sense sequence
  source 1..19: mol_type = other RNA
aatgcctattttgtgcttg

SEQ ID NO: 38697 - RNA, 19 nt, synthetic construct
  misc_feature 1..19: note = siRNA antisense sequence
  source 1..19: mol_type = other RNA
caagcacaaaataggcatt

SEQ ID NO: 38698 - RNA, 19 nt, synthetic construct
  misc_feature 1..19: note = siRNA sense sequence
  source 1..19: mol_type = other RNA
atgcctattttgtgcttgg

SEQ ID NO: 38699 - RNA, 19 nt, synthetic construct
  misc_feature 1..19: note = siRNA antisense sequence
  source 1..19: mol_type = other RNA
ccaagcacaaaataggcat

SEQ ID NO: 38700 - RNA, 19 nt, synthetic construct
  misc_feature 1..19: note = siRNA sense sequence
  source 1..19: mol_type = other RNA
tgcctattttgtgcttggt

SEQ ID NO: 38701 - RNA, 19 nt, synthetic construct
  misc_feature 1..19: note = siRNA antisense sequence
  source 1..19: mol_type = other RNA
accaagcacaaaataggca

SEQ ID NO: 38702 - RNA, 19 nt, synthetic construct
  misc_feature 1..19: note = siRNA sense sequence
  source 1..19: mol_type = other RNA
gcctattttgtgcttggta

SEQ ID NO: 38703 - RNA, 19 nt, synthetic construct
  misc_feature 1..19: note = siRNA antisense sequence
  source 1..19: mol_type = other RNA
taccaagcacaaaataggc

SEQ ID NO: 38704 - RNA, 19 nt, synthetic construct
  misc_feature 1..19: note = siRNA sense sequence
  source 1..19: mol_type = other RNA
cctattttgtgcttggtac

SEQ ID NO: 38705 - RNA, 19 nt, synthetic construct
  misc_feature 1..19: note = siRNA antisense sequence
  source 1..19: mol_type = other RNA
gtaccaagcacaaaatagg

SEQ ID NO: 38706 - RNA, 19 nt, synthetic construct
  misc_feature 1..19: note = siRNA sense sequence
  source 1..19: mol_type = other RNA
ttgtgcttggtactagtat

SEQ ID NO: 38707 - RNA, 19 nt, synthetic construct
  misc_feature 1..19: note = siRNA antisense sequence
  source 1..19: mol_type = other RNA
atactagtaccaagcacaa

SEQ ID NO: 38708 - RNA, 19 nt, synthetic construct
  misc_feature 1..19: note = siRNA sense sequence
  source 1..19: mol_type = other RNA
tgtgcttggtactagtatg

SEQ ID NO: 38709 - RNA, 19 nt, synthetic construct
  misc_feature 1..19: note = siRNA antisense sequence
  source 1..19: mol_type = other RNA
catactagtaccaagcaca

SEQ ID NO: 38710 - RNA, 19 nt, synthetic construct
  misc_feature 1..19: note = siRNA sense sequence
  source 1..19: mol_type = other RNA
gtgcttggtactagtatga

SEQ ID NO: 38711 - RNA, 19 nt, synthetic construct
  misc_feature 1..19: note = siRNA antisense sequence
  source 1..19: mol_type = other RNA
tcatactagtaccaagcac

SEQ ID NO: 38712 - RNA, 19 nt, synthetic construct
  misc_feature 1..19: note = siRNA sense sequence
  source 1..19: mol_type = other RNA
tgcttggtactagtatgag

SEQ ID NO: 38713 - RNA, 19 nt, synthetic construct
  misc_feature 1..19: note = siRNA antisense sequence
  source 1..19: mol_type = other RNA
ctcatactagtaccaagca

SEQ ID NO: 38714 - RNA, 19 nt, synthetic construct
  misc_feature 1..19: note = siRNA sense sequence
  source 1..19: mol_type = other RNA
tatgagcactaaggatgtg

SEQ ID NO: 38715 - RNA, 19 nt, synthetic construct
  misc_feature 1..19: note = siRNA antisense sequence
  source 1..19: mol_type = other RNA
cacatccttagtgctcata

SEQ ID NO: 38716 - RNA, 19 nt, synthetic construct
  misc_feature 1..19: note = siRNA sense sequence
  source 1..19: mol_type = other RNA
atgagcactaaggatgtgt

SEQ ID NO: 38717 - RNA, 19 nt, synthetic construct
  misc_feature 1..19: note = siRNA antisense sequence
  source 1..19: mol_type = other RNA
acacatccttagtgctcat

SEQ ID NO: 38718 - RNA, 19 nt, synthetic construct
  misc_feature 1..19: note = siRNA sense sequence
  source 1..19: mol_type = other RNA
tgagcactaaggatgtgtt

SEQ ID NO: 38719 - RNA, 19 nt, synthetic construct
  misc_feature 1..19: note = siRNA antisense sequence
  source 1..19: mol_type = other RNA
aacacatccttagtgctca

SEQ ID NO: 38720 - RNA, 19 nt, synthetic construct
  misc_feature 1..19: note = siRNA sense sequence
  source 1..19: mol_type = other RNA
gagcactaaggatgtgttt

SEQ ID NO: 38721 - RNA, 19 nt, synthetic construct
  misc_feature 1..19: note = siRNA antisense sequence
  source 1..19: mol_type = other RNA
aaacacatccttagtgctc

SEQ ID NO: 38722 - RNA, 19 nt, synthetic construct
  misc_feature 1..19: note = siRNA sense sequence
  source 1..19: mol_type = other RNA
agcactaaggatgtgtttg

SEQ ID NO: 38723 - RNA, 19 nt, synthetic construct
  misc_feature 1..19: note = siRNA antisense sequence
  source 1..19: mol_type = other RNA
caaacacatccttagtgct

SEQ ID NO: 38724 - RNA, 19 nt, synthetic construct
  misc_feature 1..19: note = siRNA sense sequence
  source 1..19: mol_type = other RNA
gcactaaggatgtgtttgt

SEQ ID NO: 38725 - RNA, 19 nt, synthetic construct
  misc_feature 1..19: note = siRNA antisense sequence
  source 1..19: mol_type = other RNA
acaaacacatccttagtgc

SEQ ID NO: 38726 - RNA, 19 nt, synthetic construct
  misc_feature 1..19: note = siRNA sense sequence
  source 1..19: mol_type = other RNA
cactaaggatgtgtttgtg

SEQ ID NO: 38727 - RNA, 19 nt, synthetic construct
  misc_feature 1..19: note = siRNA antisense sequence
  source 1..19: mol_type = other RNA
cacaaacacatccttagtg

SEQ ID NO: 38728 - RNA, 19 nt, synthetic construct
  misc_feature 1..19: note = siRNA sense sequence
  source 1..19: mol_type = other RNA
aatccctactattgtggag

SEQ ID NO: 38729 - RNA, 19 nt, synthetic construct
  misc_feature 1..19: note = siRNA antisense sequence
  source 1..19: mol_type = other RNA
ctccacaatagtagggatt

SEQ ID NO: 38730 - RNA, 19 nt, synthetic construct
  misc_feature 1..19: note = siRNA sense sequence
  source 1..19: mol_type = other RNA
atccctactattgtggagc

SEQ ID NO: 38731 - RNA, 19 nt, synthetic construct
  misc_feature 1..19: note = siRNA antisense sequence
  source 1..19: mol_type = other RNA
gctccacaatagtagggat

SEQ ID NO: 38732 - RNA, 19 nt, synthetic construct
  misc_feature 1..19: note = siRNA sense sequence
  source 1..19: mol_type = other RNA
tccctactattgtggagct

SEQ ID NO: 38733 - RNA, 19 nt, synthetic construct
  misc_feature 1..19: note = siRNA antisense sequence
  source 1..19: mol_type = other RNA
agctccacaatagtaggga

SEQ ID NO: 38734 - RNA, 19 nt, synthetic construct
  misc_feature 1..19: note = siRNA sense sequence
  source 1..19: mol_type = other RNA
tactattgtggagcttata

SEQ ID NO: 38735 - RNA, 19 nt, synthetic construct
  misc_feature 1..19: note = siRNA antisense sequence
  source 1..19: mol_type = other RNA
tataagctccacaatagta

SEQ ID NO: 38736 - RNA, 19 nt, synthetic construct
  misc_feature 1..19: note = siRNA sense sequence
  source 1..19: mol_type = other RNA
acaggtaggttacatcaaa

SEQ ID NO: 38737 - RNA, 19 nt, synthetic construct
  misc_feature 1..19: note = siRNA antisense sequence
  source 1..19: mol_type = other RNA
tttgatgtaacctacctgt

SEQ ID NO: 38738 - RNA, 19 nt, synthetic construct
  misc_feature 1..19: note = siRNA sense sequence
  source 1..19: mol_type = other RNA
caggtaggttacatcaaat

SEQ ID NO: 38739 - RNA, 19 nt, synthetic construct
  misc_feature 1..19: note = siRNA antisense sequence
  source 1..19: mol_type = other RNA
atttgatgtaacctacctg

SEQ ID NO: 38740 - RNA, 19 nt, synthetic construct
  misc_feature 1..19: note = siRNA sense sequence
  source 1..19: mol_type = other RNA
aggtaggttacatcaaatg

SEQ ID NO: 38741 - RNA, 19 nt, synthetic construct
  misc_feature 1..19: note = siRNA antisense sequence
  source 1..19: mol_type = other RNA
catttgatgtaacctacct

SEQ ID NO: 38742 - RNA, 19 nt, synthetic construct
  misc_feature 1..19: note = siRNA sense sequence
  source 1..19: mol_type = other RNA
ggtaggttacatcaaatgc

SEQ ID NO: 38743 - RNA, 19 nt, synthetic construct
  misc_feature 1..19: note = siRNA antisense sequence
  source 1..19: mol_type = other RNA
gcatttgatgtaacctacc

SEQ ID NO: 38744 - RNA, 19 nt, synthetic construct
  misc_feature 1..19: note = siRNA sense sequence
  source 1..19: mol_type = other RNA
gtaggttacatcaaatgcc

SEQ ID NO: 38745 - RNA, 19 nt, synthetic construct
  misc_feature 1..19: note = siRNA antisense sequence
  source 1..19: mol_type = other RNA
ggcatttgatgtaacctac

SEQ ID NO: 38746 - RNA, 19 nt, synthetic construct
  misc_feature 1..19: note = siRNA sense sequence
  source 1..19: mol_type = other RNA
taggttacatcaaatgcca

SEQ ID NO: 38747 - RNA, 19 nt, synthetic construct
  misc_feature 1..19: note = siRNA antisense sequence
  source 1..19: mol_type = other RNA
tggcatttgatgtaaccta

SEQ ID NO: 38748 - RNA, 19 nt, synthetic construct
  misc_feature 1..19: note = siRNA sense sequence
  source 1..19: mol_type = other RNA
aggttacatcaaatgccag

SEQ ID NO: 38749 - RNA, 19 nt, synthetic construct
  misc_feature 1..19: note = siRNA antisense sequence
  source 1..19: mol_type = other RNA
ctggcatttgatgtaacct

SEQ ID NO: 38750 - RNA, 19 nt, synthetic construct
  misc_feature 1..19: note = siRNA sense sequence
  source 1..19: mol_type = other RNA
ggttacatcaaatgccaga

SEQ ID NO: 38751 - RNA, 19 nt, synthetic construct
  misc_feature 1..19: note = siRNA antisense sequence
  source 1..19: mol_type = other RNA
tctggcatttgatgtaacc

SEQ ID NO: 38752 - RNA, 19 nt, synthetic construct
  misc_feature 1..19: note = siRNA sense sequence
  source 1..19: mol_type = other RNA
gttacatcaaatgccagaa

SEQ ID NO: 38753 - RNA, 19 nt, synthetic construct
  misc_feature 1..19: note = siRNA antisense sequence
  source 1..19: mol_type = other RNA
ttctggcatttgatgtaac

SEQ ID NO: 38754 - RNA, 19 nt, synthetic construct
  misc_feature 1..19: note = siRNA sense sequence
  source 1..19: mol_type = other RNA
ttacatcaaatgccagaat

SEQ ID NO: 38755 - RNA, 19 nt, synthetic construct
  misc_feature 1..19: note = siRNA antisense sequence
  source 1..19: mol_type = other RNA
attctggcatttgatgtaa

SEQ ID NO: 38756 - RNA, 19 nt, synthetic construct
  misc_feature 1..19: note = siRNA sense sequence
  source 1..19: mol_type = other RNA
tacatcaaatgccagaata

SEQ ID NO: 38757 - RNA, 19 nt, synthetic construct
  misc_feature 1..19: note = siRNA antisense sequence
  source 1..19: mol_type = other RNA
tattctggcatttgatgta

SEQ ID NO: 38758 - RNA, 19 nt, synthetic construct
  misc_feature 1..19: note = siRNA sense sequence
  source 1..19: mol_type = other RNA
aaatgccagaataggatca

SEQ ID NO: 38759 - RNA, 19 nt, synthetic construct
  misc_feature 1..19: note = siRNA antisense sequence
  source 1..19: mol_type = other RNA
tgatcctattctggcattt

SEQ ID NO: 38760 - RNA, 19 nt, synthetic construct
  misc_feature 1..19: note = siRNA sense sequence
  source 1..19: mol_type = other RNA
gccagaataggatcagtgt

SEQ ID NO: 38761 - RNA, 19 nt, synthetic construct
  misc_feature 1..19: note = siRNA antisense sequence
  source 1..19: mol_type = other RNA
acactgatcctattctggc

SEQ ID NO: 38762 - RNA, 19 nt, synthetic construct
  misc_feature 1..19: note = siRNA sense sequence
  source 1..19: mol_type = other RNA
gaataggatcagtgttgtg

SEQ ID NO: 38763 - RNA, 19 nt, synthetic construct
  misc_feature 1..19: note = siRNA antisense sequence
  source 1..19: mol_type = other RNA
cacaacactgatcctattc

SEQ ID NO: 38764 - RNA, 19 nt, synthetic construct
  misc_feature 1..19: note = siRNA sense sequence
  source 1..19: mol_type = other RNA
aaccctatgctaatacttt

SEQ ID NO: 38765 - RNA, 19 nt, synthetic construct
  misc_feature 1..19: note = siRNA antisense sequence
  source 1..19: mol_type = other RNA
aaagtattagcatagggtt

SEQ ID NO: 38766 - RNA, 19 nt, synthetic construct
  misc_feature 1..19: note = siRNA sense sequence
  source 1..19: mol_type = other RNA
cctatgctaatacttttct

SEQ ID NO: 38767 - RNA, 19 nt, synthetic construct
  misc_feature 1..19: note = siRNA antisense sequence
  source 1..19: mol_type = other RNA
agaaaagtattagcatagg

SEQ ID NO: 38768 - RNA, 19 nt, synthetic construct
  misc_feature 1..19: note = siRNA sense sequence
  source 1..19: mol_type = other RNA
atgctaatacttttctagg

SEQ ID NO: 38769 - RNA, 19 nt, synthetic construct
  misc_feature 1..19: note = siRNA antisense sequence
  source 1..19: mol_type = other RNA
cctagaaaagtattagcat

SEQ ID NO: 38770 - RNA, 19 nt, synthetic construct
  misc_feature 1..19: note = siRNA sense sequence
  source 1..19: mol_type = other RNA
tgctaatacttttctagga

SEQ ID NO: 38771 - RNA, 19 nt, synthetic construct
  misc_feature 1..19: note = siRNA antisense sequence
  source 1..19: mol_type = other RNA
tcctagaaaagtattagca

SEQ ID NO: 38772 - RNA, 19 nt, synthetic construct
  misc_feature 1..19: note = siRNA sense sequence
  source 1..19: mol_type = other RNA
gctaatacttttctaggat

SEQ ID NO: 38773 - RNA, 19 nt, synthetic construct
  misc_feature 1..19: note = siRNA antisense sequence
  source 1..19: mol_type = other RNA
atcctagaaaagtattagc

SEQ ID NO: 38774 - RNA, 19 nt, synthetic construct
  misc_feature 1..19: note = siRNA sense sequence
  source 1..19: mol_type = other RNA
ctaatacttttctaggatc

SEQ ID NO: 38775 - RNA, 19 nt, synthetic construct
  misc_feature 1..19: note = siRNA antisense sequence
  source 1..19: mol_type = other RNA
gatcctagaaaagtattag

SEQ ID NO: 38776 - RNA, 19 nt, synthetic construct
  misc_feature 1..19: note = siRNA sense sequence
  source 1..19: mol_type = other RNA
atacttttctaggatcttg

SEQ ID NO: 38777 - RNA, 19 nt, synthetic construct
  misc_feature 1..19: note = siRNA antisense sequence
  source 1..19: mol_type = other RNA
caagatcctagaaaagtat

SEQ ID NO: 38778 - RNA, 19 nt, synthetic construct
  misc_feature 1..19: note = siRNA sense sequence
  source 1..19: mol_type = other RNA
tacttttctaggatcttgt

SEQ ID NO: 38779 - RNA, 19 nt, synthetic construct
  misc_feature 1..19: note = siRNA antisense sequence
  source 1..19: mol_type = other RNA
acaagatcctagaaaagta

SEQ ID NO: 38780 - RNA, 19 nt, synthetic construct
  misc_feature 1..19: note = siRNA sense sequence
  source 1..19: mol_type = other RNA
acttttctaggatcttgtt

SEQ ID NO: 38781 - RNA, 19 nt, synthetic construct
  misc_feature 1..19: note = siRNA antisense sequence
  source 1..19: mol_type = other RNA
aacaagatcctagaaaagt

SEQ ID NO: 38782 - RNA, 19 nt, synthetic construct
  misc_feature 1..19: note = siRNA sense sequence
  source 1..19: mol_type = other RNA
cttttctaggatcttgtta

SEQ ID NO: 38783 - RNA, 19 nt, synthetic construct
  misc_feature 1..19: note = siRNA antisense sequence
  source 1..19: mol_type = other RNA
taacaagatcctagaaaag

SEQ ID NO: 38784 - RNA, 19 nt, synthetic construct
  misc_feature 1..19: note = siRNA sense sequence
  source 1..19: mol_type = other RNA
ctaggatcttgttattttg

SEQ ID NO: 38785 - RNA, 19 nt, synthetic construct
  misc_feature 1..19: note = siRNA antisense sequence
  source 1..19: mol_type = other RNA
caaaataacaagatcctag

SEQ ID NO: 38786 - RNA, 19 nt, synthetic construct
  misc_feature 1..19: note = siRNA sense sequence
  source 1..19: mol_type = other RNA
gttattttgatgcagttgg

SEQ ID NO: 38787 - RNA, 19 nt, synthetic construct
  misc_feature 1..19: note = siRNA antisense sequence
  source 1..19: mol_type = other RNA
ccaactgcatcaaaataac

SEQ ID NO: 38788 - RNA, 19 nt, synthetic construct
  misc_feature 1..19: note = siRNA sense sequence
  source 1..19: mol_type = other RNA
ttattttgatgcagttgga

SEQ ID NO: 38789 - RNA, 19 nt, synthetic construct
  misc_feature 1..19: note = siRNA antisense sequence
  source 1..19: mol_type = other RNA
tccaactgcatcaaaataa

SEQ ID NO: 38790 - RNA, 19 nt, synthetic construct
  misc_feature 1..19: note = siRNA sense sequence
  source 1..19: mol_type = other RNA
tattttgatgcagttggag

SEQ ID NO: 38791 - RNA, 19 nt, synthetic construct
  misc_feature 1..19: note = siRNA antisense sequence
  source 1..19: mol_type = other RNA
ctccaactgcatcaaaata

SEQ ID NO: 38792 - RNA, 19 nt, synthetic construct
  misc_feature 1..19: note = siRNA sense sequence
  source 1..19: mol_type = other RNA
gtgaggcttccttaggatt

SEQ ID NO: 38793 - RNA, 19 nt, synthetic construct
  misc_feature 1..19: note = siRNA antisense sequence
  source 1..19: mol_type = other RNA
aatcctaaggaagcctcac

SEQ ID NO: 38794 - RNA, 19 nt, synthetic construct
  misc_feature 1..19: note = siRNA sense sequence
  source 1..19: mol_type = other RNA
tgaggcttccttaggattc

SEQ ID NO: 38795 - RNA, 19 nt, synthetic construct
  misc_feature 1..19: note = siRNA antisense sequence
  source 1..19: mol_type = other RNA
gaatcctaaggaagcctca

SEQ ID NO: 38796 - RNA, 19 nt, synthetic construct
  misc_feature 1..19: note = siRNA sense sequence
  source 1..19: mol_type = other RNA
gaggcttccttaggattca

SEQ ID NO: 38797 - RNA, 19 nt, synthetic construct
  misc_feature 1..19: note = siRNA antisense sequence
  source 1..19: mol_type = other RNA
tgaatcctaaggaagcctc

SEQ ID NO: 38798 - RNA, 19 nt, synthetic construct
  misc_feature 1..19: note = siRNA sense sequence
  source 1..19: mol_type = other RNA
aggcttccttaggattcaa

SEQ ID NO: 38799 - RNA, 19 nt, synthetic construct
  misc_feature 1..19: note = siRNA antisense sequence
  source 1..19: mol_type = other RNA
ttgaatcctaaggaagcct

SEQ ID NO: 38800 - RNA, 19 nt, synthetic construct
  misc_feature 1..19: note = siRNA sense sequence
  source 1..19: mol_type = other RNA
ggcttccttaggattcaag

SEQ ID NO: 38801 - RNA, 19 nt, synthetic construct
  misc_feature 1..19: note = siRNA antisense sequence
  source 1..19: mol_type = other RNA
cttgaatcctaaggaagcc

SEQ ID NO: 38802 - RNA, 19 nt, synthetic construct
  misc_feature 1..19: note = siRNA sense sequence
  source 1..19: mol_type = other RNA
gcttccttaggattcaagt

SEQ ID NO: 38803 - RNA, 19 nt, synthetic construct
  misc_feature 1..19: note = siRNA antisense sequence
  source 1..19: mol_type = other RNA
acttgaatcctaaggaagc

SEQ ID NO: 38804 - RNA, 19 nt, synthetic construct
  misc_feature 1..19: note = siRNA sense sequence
  source 1..19: mol_type = other RNA
cttccttaggattcaagtg

SEQ ID NO: 38805 - RNA, 19 nt, synthetic construct
  misc_feature 1..19: note = siRNA antisense sequence
  source 1..19: mol_type = other RNA
cacttgaatcctaaggaag

SEQ ID NO: 38806 - RNA, 19 nt, synthetic construct
  misc_feature 1..19: note = siRNA sense sequence
  source 1..19: mol_type = other RNA
ttccttaggattcaagtgg

SEQ ID NO: 38807 - RNA, 19 nt, synthetic construct
  misc_feature 1..19: note = siRNA antisense sequence
  source 1..19: mol_type = other RNA
ccacttgaatcctaaggaa

SEQ ID NO: 38808 - RNA, 19 nt, synthetic construct
  misc_feature 1..19: note = siRNA sense sequence
  source 1..19: mol_type = other RNA
tccttaggattcaagtggt

SEQ ID NO: 38809 - RNA, 19 nt, synthetic construct
  misc_feature 1..19: note = siRNA antisense sequence
  source 1..19: mol_type = other RNA
accacttgaatcctaagga

SEQ ID NO: 38810 - RNA, 19 nt, synthetic construct
  misc_feature 1..19: note = siRNA sense sequence
  source 1..19: mol_type = other RNA
ccttaggattcaagtggta

SEQ ID NO: 38811 - RNA, 19 nt, synthetic construct
  misc_feature 1..19: note = siRNA antisense sequence
  source 1..19: mol_type = other RNA
taccacttgaatcctaagg

SEQ ID NO: 38812 - RNA, 19 nt, synthetic construct
  misc_feature 1..19: note = siRNA sense sequence
  source 1..19: mol_type = other RNA
cttaggattcaagtggtaa

SEQ ID NO: 38813 - RNA, 19 nt, synthetic construct
  misc_feature 1..19: note = siRNA antisense sequence
  source 1..19: mol_type = other RNA
ttaccacttgaatcctaag

SEQ ID NO: 38814 - RNA, 19 nt, synthetic construct
  misc_feature 1..19: note = siRNA sense sequence
  source 1..19: mol_type = other RNA
ttaggattcaagtggtaag

SEQ ID NO: 38815 - RNA, 19 nt, synthetic construct
  misc_feature 1..19: note = siRNA antisense sequence
  source 1..19: mol_type = other RNA
cttaccacttgaatcctaa

SEQ ID NO: 38816 - RNA, 19 nt, synthetic construct
  misc_feature 1..19: note = siRNA sense sequence
  source 1..19: mol_type = other RNA
taggattcaagtggtaaga

SEQ ID NO: 38817 - RNA, 19 nt, synthetic construct
  misc_feature 1..19: note = siRNA antisense sequence
  source 1..19: mol_type = other RNA
tcttaccacttgaatccta

SEQ ID NO: 38818 - RNA, 19 nt, synthetic construct
  misc_feature 1..19: note = siRNA sense sequence
  source 1..19: mol_type = other RNA
attcaagtggtaagataca

SEQ ID NO: 38819 - RNA, 19 nt, synthetic construct
  misc_feature 1..19: note = siRNA antisense sequence
  source 1..19: mol_type = other RNA
tgtatcttaccacttgaat

SEQ ID NO: 38820 - RNA, 19 nt, synthetic construct
  misc_feature 1..19: note = siRNA sense sequence
  source 1..19: mol_type = other RNA
cagtcctatgatctgctaa

SEQ ID NO: 38821 - RNA, 19 nt, synthetic construct
  misc_feature 1..19: note = siRNA antisense sequence
  source 1..19: mol_type = other RNA
ttagcagatcataggactg

SEQ ID NO: 38822 - RNA, 19 nt, synthetic construct
  misc_feature 1..19: note = siRNA sense sequence
  source 1..19: mol_type = other RNA
agtcctatgatctgctaac

SEQ ID NO: 38823 - RNA, 19 nt, synthetic construct
  misc_feature 1..19: note = siRNA antisense sequence
  source 1..19: mol_type = other RNA
gttagcagatcataggact

SEQ ID NO: 38824 - RNA, 19 nt, synthetic construct
  misc_feature 1..19: note = siRNA sense sequence
  source 1..19: mol_type = other RNA
gtcctatgatctgctaacc

SEQ ID NO: 38825 - RNA, 19 nt, synthetic construct
  misc_feature 1..19: note = siRNA antisense sequence
  source 1..19: mol_type = other RNA
ggttagcagatcataggac

SEQ ID NO: 38826 - RNA, 19 nt, synthetic construct
  misc_feature 1..19: note = siRNA sense sequence
  source 1..19: mol_type = other RNA
tatgatctgctaacctggt

SEQ ID NO: 38827 - RNA, 19 nt, synthetic construct
  misc_feature 1..19: note = siRNA antisense sequence
  source 1..19: mol_type = other RNA
accaggttagcagatcata

SEQ ID NO: 38828 - RNA, 19 nt, synthetic construct
  misc_feature 1..19: note = siRNA sense sequence
  source 1..19: mol_type = other RNA
atgatctgctaacctggtc

SEQ ID NO: 38829 - RNA, 19 nt, synthetic construct
  misc_feature 1..19: note = siRNA antisense sequence
  source 1..19: mol_type = other RNA
gaccaggttagcagatcat

SEQ ID NO: 38830 - RNA, 19 nt, synthetic construct
  misc_feature 1..19: note = siRNA sense sequence
  source 1..19: mol_type = other RNA
tgatctgctaacctggtct

SEQ ID NO: 38831 - RNA, 19 nt, synthetic construct
  misc_feature 1..19: note = siRNA antisense sequence
  source 1..19: mol_type = other RNA
agaccaggttagcagatca

SEQ ID NO: 38832 - RNA, 19 nt, synthetic construct
  misc_feature 1..19: note = siRNA sense sequence
  source 1..19: mol_type = other RNA
gatctgctaacctggtctt

SEQ ID NO: 38833 - RNA, 19 nt, synthetic construct
  misc_feature 1..19: note = siRNA antisense sequence
  source 1..19: mol_type = other RNA
aagaccaggttagcagatc

SEQ ID NO: 38834 - RNA, 19 nt, synthetic construct
  misc_feature 1..19: note = siRNA sense sequence
  source 1..19: mol_type = other RNA
tgctaacctggtctttact

SEQ ID NO: 38835 - RNA, 19 nt, synthetic construct
  misc_feature 1..19: note = siRNA antisense sequence
  source 1..19: mol_type = other RNA
agtaaagaccaggttagca

SEQ ID NO: 38836 - RNA, 19 nt, synthetic construct
  misc_feature 1..19: note = siRNA sense sequence
  source 1..19: mol_type = other RNA
gctaacctggtctttacta

SEQ ID NO: 38837 - RNA, 19 nt, synthetic construct
  misc_feature 1..19: note = siRNA antisense sequence
  source 1..19: mol_type = other RNA
tagtaaagaccaggttagc

SEQ ID NO: 38838 - RNA, 19 nt, synthetic construct
  misc_feature 1..19: note = siRNA sense sequence
  source 1..19: mol_type = other RNA
ctaacctggtctttactat

SEQ ID NO: 38839 - RNA, 19 nt, synthetic construct
  misc_feature 1..19: note = siRNA antisense sequence
  source 1..19: mol_type = other RNA
atagtaaagaccaggttag

SEQ ID NO: 38840 - RNA, 19 nt, synthetic construct
  misc_feature 1..19: note = siRNA sense sequence
  source 1..19: mol_type = other RNA
taacctggtctttactatt

SEQ ID NO: 38841 - RNA, 19 nt, synthetic construct
  misc_feature 1..19: note = siRNA antisense sequence
  source 1..19: mol_type = other RNA
aatagtaaagaccaggtta

SEQ ID NO: 38842 - RNA, 19 nt, synthetic construct
  misc_feature 1..19: note = siRNA sense sequence
  source 1..19: mol_type = other RNA
aacctggtctttactattg

SEQ ID NO: 38843 - RNA, 19 nt, synthetic construct
  misc_feature 1..19: note = siRNA antisense sequence
  source 1..19: mol_type = other RNA
caatagtaaagaccaggtt

SEQ ID NO: 38844 - RNA, 19 nt, synthetic construct
  misc_feature 1..19: note = siRNA sense sequence
  source 1..19: mol_type = other RNA
tggtctttactattggtcc

SEQ ID NO: 38845 - RNA, 19 nt, synthetic construct
  misc_feature 1..19: note = siRNA antisense sequence
  source 1..19: mol_type = other RNA
ggaccaatagtaaagacca

SEQ ID NO: 38846 - RNA, 19 nt, synthetic construct
  misc_feature 1..19: note = siRNA sense sequence
  source 1..19: mol_type = other RNA
ggtctttactattggtccc

SEQ ID NO: 38847 - RNA, 19 nt, synthetic construct
  misc_feature 1..19: note = siRNA antisense sequence
  source 1..19: mol_type = other RNA
gggaccaatagtaaagacc

SEQ ID NO: 38848 - RNA, 19 nt, synthetic construct
  misc_feature 1..19: note = siRNA sense sequence
  source 1..19: mol_type = other RNA
gtctttactattggtccca

SEQ ID NO: 38849 - RNA, 19 nt, synthetic construct
  misc_feature 1..19: note = siRNA antisense sequence
  source 1..19: mol_type = other RNA
tgggaccaatagtaaagac

SEQ ID NO: 38850 - RNA, 19 nt, synthetic construct
  misc_feature 1..19: note = siRNA sense sequence
  source 1..19: mol_type = other RNA
tctttactattggtcccaa

SEQ ID NO: 38851 - RNA, 19 nt, synthetic construct
  misc_feature 1..19: note = siRNA antisense sequence
  source 1..19: mol_type = other RNA
ttgggaccaatagtaaaga

SEQ ID NO: 38852 - RNA, 19 nt, synthetic construct
  misc_feature 1..19: note = siRNA sense sequence
  source 1..19: mol_type = other RNA
ctttactattggtcccaac

SEQ ID NO: 38853 - RNA, 19 nt, synthetic construct
  misc_feature 1..19: note = siRNA antisense sequence
  source 1..19: mol_type = other RNA
gttgggaccaatagtaaag

SEQ ID NO: 38854 - RNA, 19 nt, synthetic construct
  misc_feature 1..19: note = siRNA sense sequence
  source 1..19: mol_type = other RNA
tttactattggtcccaact

SEQ ID NO: 38855 - RNA, 19 nt, synthetic construct
  misc_feature 1..19: note = siRNA antisense sequence
  source 1..19: mol_type = other RNA
agttgggaccaatagtaaa

SEQ ID NO: 38856 - RNA, 19 nt, synthetic construct
  misc_feature 1..19: note = siRNA sense sequence
  source 1..19: mol_type = other RNA
actccctgtctcaatcctg

SEQ ID NO: 38857 - RNA, 19 nt, synthetic construct
  misc_feature 1..19: note = siRNA antisense sequence
  source 1..19: mol_type = other RNA
caggattgagacagggagt

SEQ ID NO: 38858 - RNA, 19 nt, synthetic construct
  misc_feature 1..19: note = siRNA sense sequence
  source 1..19: mol_type = other RNA
cctgtctcaatcctgggct

SEQ ID NO: 38859 - RNA, 19 nt, synthetic construct
  misc_feature 1..19: note = siRNA antisense sequence
  source 1..19: mol_type = other RNA
agcccaggattgagacagg

SEQ ID NO: 38860 - RNA, 19 nt, synthetic construct
  misc_feature 1..19: note = siRNA sense sequence
  source 1..19: mol_type = other RNA
atcctgggctcctacactc

SEQ ID NO: 38861 - RNA, 19 nt, synthetic construct
  misc_feature 1..19: note = siRNA antisense sequence
  source 1..19: mol_type = other RNA
gagtgtaggagcccaggat

SEQ ID NO: 38862 - RNA, 19 nt, synthetic construct
  misc_feature 1..19: note = siRNA sense sequence
  source 1..19: mol_type = other RNA
cctgggctcctacactcta

SEQ ID NO: 38863 - RNA, 19 nt, synthetic construct
  misc_feature 1..19: note = siRNA antisense sequence
  source 1..19: mol_type = other RNA
tagagtgtaggagcccagg

SEQ ID NO: 38864 - RNA, 19 nt, synthetic construct
  misc_feature 1..19: note = siRNA sense sequence
  source 1..19: mol_type = other RNA
ctgggctcctacactctac

SEQ ID NO: 38865 - RNA, 19 nt, synthetic construct
  misc_feature 1..19: note = siRNA antisense sequence
  source 1..19: mol_type = other RNA
gtagagtgtaggagcccag

SEQ ID NO: 38866 - RNA, 19 nt, synthetic construct
  misc_feature 1..19: note = siRNA sense sequence
  source 1..19: mol_type = other RNA
acactctaccactttctaa

SEQ ID NO: 38867 - RNA, 19 nt, synthetic construct
  misc_feature 1..19: note = siRNA antisense sequence
  source 1..19: mol_type = other RNA
ttagaaagtggtagagtgt

SEQ ID NO: 38868 - RNA, 19 nt, synthetic construct
  misc_feature 1..19: note = siRNA sense sequence
  source 1..19: mol_type = other RNA
cactctaccactttctaag

SEQ ID NO: 38869 - RNA, 19 nt, synthetic construct
  misc_feature 1..19: note = siRNA antisense sequence
  source 1..19: mol_type = other RNA
cttagaaagtggtagagtg

SEQ ID NO: 38870 - RNA, 19 nt, synthetic construct
  misc_feature 1..19: note = siRNA sense sequence
  source 1..19: mol_type = other RNA
ctaagttctcactccgcaa

SEQ ID NO: 38871 - RNA, 19 nt, synthetic construct
  misc_feature 1..19: note = siRNA antisense sequence
  source 1..19: mol_type = other RNA
ttgcggagtgagaacttag

SEQ ID NO: 38872 - RNA, 19 nt, synthetic construct
  misc_feature 1..19: note = siRNA sense sequence
  source 1..19: mol_type = other RNA
taagttctcactccgcaat

SEQ ID NO: 38873 - RNA, 19 nt, synthetic construct
  misc_feature 1..19: note = siRNA antisense sequence
  source 1..19: mol_type = other RNA
attgcggagtgagaactta

SEQ ID NO: 38874 - RNA, 19 nt, synthetic construct
  misc_feature 1..19: note = siRNA sense sequence
  source 1..19: mol_type = other RNA
aagttctcactccgcaatc

SEQ ID NO: 38875 - RNA, 19 nt, synthetic construct
  misc_feature 1..19: note = siRNA antisense sequence
  source 1..19: mol_type = other RNA
gattgcggagtgagaactt

SEQ ID NO: 38876 - RNA, 19 nt, synthetic construct
  misc_feature 1..19: note = siRNA sense sequence
  source 1..19: mol_type = other RNA
agttctcactccgcaatct

SEQ ID NO: 38877 - RNA, 19 nt, synthetic construct
  misc_feature 1..19: note = siRNA antisense sequence
  source 1..19: mol_type = other RNA
agattgcggagtgagaact

SEQ ID NO: 38878 - RNA, 19 nt, synthetic construct
  misc_feature 1..19: note = siRNA sense sequence
  source 1..19: mol_type = other RNA
gttctcactccgcaatctt

SEQ ID NO: 38879 - RNA, 19 nt, synthetic construct
  misc_feature 1..19: note = siRNA antisense sequence
  source 1..19: mol_type = other RNA
aagattgcggagtgagaac

SEQ ID NO: 38880 - RNA, 19 nt, synthetic construct
  misc_feature 1..19: note = siRNA sense sequence
  source 1..19: mol_type = other RNA
ttctcactccgcaatcttc

SEQ ID NO: 38881 - RNA, 19 nt, synthetic construct
  misc_feature 1..19: note = siRNA antisense sequence
  source 1..19: mol_type = other RNA
gaagattgcggagtgagaa

SEQ ID NO: 38882 - RNA, 19 nt, synthetic construct
  misc_feature 1..19: note = siRNA sense sequence
  source 1..19: mol_type = other RNA
cactccgcaatcttcactt

SEQ ID NO: 38883 - RNA, 19 nt, synthetic construct
  misc_feature 1..19: note = siRNA antisense sequence
  source 1..19: mol_type = other RNA
aagtgaagattgcggagtg

SEQ ID NO: 38884 - RNA, 19 nt, synthetic construct
  misc_feature 1..19: note = siRNA sense sequence
  source 1..19: mol_type = other RNA
actccgcaatcttcactta

SEQ ID NO: 38885 - RNA, 19 nt, synthetic construct
  misc_feature 1..19: note = siRNA antisense sequence
  source 1..19: mol_type = other RNA
taagtgaagattgcggagt

SEQ ID NO: 38886 - RNA, 19 nt, synthetic construct
  misc_feature 1..19: note = siRNA sense sequence
  source 1..19: mol_type = other RNA
ctccgcaatcttcacttat

SEQ ID NO: 38887 - RNA, 19 nt, synthetic construct
  misc_feature 1..19: note = siRNA antisense sequence
  source 1..19: mol_type = other RNA
ataagtgaagattgcggag

SEQ ID NO: 38888 - RNA, 19 nt, synthetic construct
  misc_feature 1..19: note = siRNA sense sequence
  source 1..19: mol_type = other RNA
tccgcaatcttcacttatc

SEQ ID NO: 38889 - RNA, 19 nt, synthetic construct
  misc_feature 1..19: note = siRNA antisense sequence
  source 1..19: mol_type = other RNA
gataagtgaagattgcgga

SEQ ID NO: 38890 - RNA, 19 nt, synthetic construct
  misc_feature 1..19: note = siRNA sense sequence
  source 1..19: mol_type = other RNA
ccgcaatcttcacttatct

SEQ ID NO: 38891 - RNA, 19 nt, synthetic construct
  misc_feature 1..19: note = siRNA antisense sequence
  source 1..19: mol_type = other RNA
agataagtgaagattgcgg

SEQ ID NO: 38892 - RNA, 19 nt, synthetic construct
  misc_feature 1..19: note = siRNA sense sequence
  source 1..19: mol_type = other RNA
cgcaatcttcacttatctc

SEQ ID NO: 38893 - RNA, 19 nt, synthetic construct
  misc_feature 1..19: note = siRNA antisense sequence
  source 1..19: mol_type = other RNA
gagataagtgaagattgcg

SEQ ID NO: 38894 - RNA, 19 nt, synthetic construct
  misc_feature 1..19: note = siRNA sense sequence
  source 1..19: mol_type = other RNA
gcaatcttcacttatctca

SEQ ID NO: 38895 - RNA, 19 nt, synthetic construct
  misc_feature 1..19: note = siRNA antisense sequence
  source 1..19: mol_type = other RNA
tgagataagtgaagattgc

SEQ ID NO: 38896 - RNA, 19 nt, synthetic construct
  misc_feature 1..19: note = siRNA sense sequence
  source 1..19: mol_type = other RNA
caatcttcacttatctcag

SEQ ID NO: 38897 - RNA, 19 nt, synthetic construct
  misc_feature 1..19: note = siRNA antisense sequence
  source 1..19: mol_type = other RNA
ctgagataagtgaagattg

SEQ ID NO: 38898 - RNA, 19 nt, synthetic construct
  misc_feature 1..19: note = siRNA sense sequence
  source 1..19: mol_type = other RNA
aatcttcacttatctcaga

SEQ ID NO: 38899 - RNA, 19 nt, synthetic construct
  misc_feature 1..19: note = siRNA antisense sequence
  source 1..19: mol_type = other RNA
tctgagataagtgaagatt

SEQ ID NO: 38900 - RNA, 19 nt, synthetic construct
  misc_feature 1..19: note = siRNA sense sequence
  source 1..19: mol_type = other RNA
tcttcacttatctcagaat

SEQ ID NO: 38901 - RNA, 19 nt, synthetic construct
  misc_feature 1..19: note = siRNA antisense sequence
  source 1..19: mol_type = other RNA
attctgagataagtgaaga

SEQ ID NO: 38902 - RNA, 19 nt, synthetic construct
  misc_feature 1..19: note = siRNA sense sequence
  source 1..19: mol_type = other RNA
cttcacttatctcagaata

SEQ ID NO: 38903 - RNA, 19 nt, synthetic construct
  misc_feature 1..19: note = siRNA antisense sequence
  source 1..19: mol_type = other RNA
tattctgagataagtgaag

SEQ ID NO: 38904 - RNA, 19 nt, synthetic construct
  misc_feature 1..19: note = siRNA sense sequence
  source 1..19: mol_type = other RNA
tcacttatctcagaatatg

SEQ ID NO: 38905 - RNA, 19 nt, synthetic construct
  misc_feature 1..19: note = siRNA antisense sequence
  source 1..19: mol_type = other RNA
catattctgagataagtga

SEQ ID NO: 38906 - RNA, 19 nt, synthetic construct
  misc_feature 1..19: note = siRNA sense sequence
  source 1..19: mol_type = other RNA
cacttatctcagaatatgc

SEQ ID NO: 38907 - RNA, 19 nt, synthetic construct
  misc_feature 1..19: note = siRNA antisense sequence
  source 1..19: mol_type = other RNA
gcatattctgagataagtg

SEQ ID NO: 38908 - RNA, 19 nt, synthetic construct
  misc_feature 1..19: note = siRNA sense sequence
  source 1..19: mol_type = other RNA
ctcagaatatgcaataggc

SEQ ID NO: 38909 - RNA, 19 nt, synthetic construct
  misc_feature 1..19: note = siRNA antisense sequence
  source 1..19: mol_type = other RNA
gcctattgcatattctgag

SEQ ID NO: 38910 - RNA, 19 nt, synthetic construct
  misc_feature 1..19: note = siRNA sense sequence
  source 1..19: mol_type = other RNA
tcagaatatgcaataggcc

SEQ ID NO: 38911 - RNA, 19 nt, synthetic construct
  misc_feature 1..19: note = siRNA antisense sequence
  source 1..19: mol_type = other RNA
ggcctattgcatattctga

SEQ ID NO: 38912 - RNA, 19 nt, synthetic construct
  misc_feature 1..19: note = siRNA sense sequence
  source 1..19: mol_type = other RNA
cagaatatgcaataggccg

SEQ ID NO: 38913 - RNA, 19 nt, synthetic construct
  misc_feature 1..19: note = siRNA antisense sequence
  source 1..19: mol_type = other RNA
cggcctattgcatattctg

SEQ ID NO: 38914 - RNA, 19 nt, synthetic construct
  misc_feature 1..19: note = siRNA sense sequence
  source 1..19: mol_type = other RNA
agaatatgcaataggccgt

SEQ ID NO: 38915 - RNA, 19 nt, synthetic construct
  misc_feature 1..19: note = siRNA antisense sequence
  source 1..19: mol_type = other RNA
acggcctattgcatattct

SEQ ID NO: 38916 - RNA, 19 nt, synthetic construct
  misc_feature 1..19: note = siRNA sense sequence
  source 1..19: mol_type = other RNA
gaatatgcaataggccgtg

SEQ ID NO: 38917 - RNA, 19 nt, synthetic construct
  misc_feature 1..19: note = siRNA antisense sequence
  source 1..19: mol_type = other RNA
cacggcctattgcatattc

SEQ ID NO: 38918 - RNA, 19 nt, synthetic construct
  misc_feature 1..19: note = siRNA sense sequence
  source 1..19: mol_type = other RNA
aatatgcaataggccgtgg

SEQ ID NO: 38919 - RNA, 19 nt, synthetic construct
  misc_feature 1..19: note = siRNA antisense sequence
  source 1..19: mol_type = other RNA
ccacggcctattgcatatt

SEQ ID NO: 38920 - RNA, 19 nt, synthetic construct
  misc_feature 1..19: note = siRNA sense sequence
  source 1..19: mol_type = other RNA
atatgcaataggccgtggt

SEQ ID NO: 38921 - RNA, 19 nt, synthetic construct
  misc_feature 1..19: note = siRNA antisense sequence
  source 1..19: mol_type = other RNA
accacggcctattgcatat

SEQ ID NO: 38922 - RNA, 19 nt, synthetic construct
  misc_feature 1..19: note = siRNA sense sequence
  source 1..19: mol_type = other RNA
tatgcaataggccgtggtt

SEQ ID NO: 38923 - RNA, 19 nt, synthetic construct
  misc_feature 1..19: note = siRNA antisense sequence
  source 1..19: mol_type = other RNA
aaccacggcctattgcata

SEQ ID NO: 38924 - RNA, 19 nt, synthetic construct
  misc_feature 1..19: note = siRNA sense sequence
  source 1..19: mol_type = other RNA
atgcaataggccgtggttg

SEQ ID NO: 38925 - RNA, 19 nt, synthetic construct
  misc_feature 1..19: note = siRNA antisense sequence
  source 1..19: mol_type = other RNA
caaccacggcctattgcat

SEQ ID NO: 38926 - RNA, 19 nt, synthetic construct
  misc_feature 1..19: note = siRNA sense sequence
  source 1..19: mol_type = other RNA
tgcaataggccgtggttga

SEQ ID NO: 38927 - RNA, 19 nt, synthetic construct
  misc_feature 1..19: note = siRNA antisense sequence
  source 1..19: mol_type = other RNA
tcaaccacggcctattgca

SEQ ID NO: 38928 - RNA, 19 nt, synthetic construct
  misc_feature 1..19: note = siRNA sense sequence
  source 1..19: mol_type = other RNA
gcaataggccgtggttgag

SEQ ID NO: 38929 - RNA, 19 nt, synthetic construct
  misc_feature 1..19: note = siRNA antisense sequence
  source 1..19: mol_type = other RNA
ctcaaccacggcctattgc

SEQ ID NO: 38930 - RNA, 19 nt, synthetic construct
  misc_feature 1..19: note = siRNA sense sequence
  source 1..19: mol_type = other RNA
ttgctgtatcaggtcagtt

SEQ ID NO: 38931 - RNA, 19 nt, synthetic construct
  misc_feature 1..19: note = siRNA antisense sequence
  source 1..19: mol_type = other RNA
aactgacctgatacagcaa

SEQ ID NO: 38932 - RNA, 19 nt, synthetic construct
  misc_feature 1..19: note = siRNA sense sequence
  source 1..19: mol_type = other RNA
tgctgtatcaggtcagttt

SEQ ID NO: 38933 - RNA, 19 nt, synthetic construct
  misc_feature 1..19: note = siRNA antisense sequence
  source 1..19: mol_type = other RNA
aaactgacctgatacagca

SEQ ID NO: 38934 - RNA, 19 nt, synthetic construct
  misc_feature 1..19: note = siRNA sense sequence
  source 1..19: mol_type = other RNA
gctgtatcaggtcagtttc

SEQ ID NO: 38935 - RNA, 19 nt, synthetic construct
  misc_feature 1..19: note = siRNA antisense sequence
  source 1..19: mol_type = other RNA
gaaactgacctgatacagc

SEQ ID NO: 38936 - RNA, 19 nt, synthetic construct
  misc_feature 1..19: note = siRNA sense sequence
  source 1..19: mol_type = other RNA
ctgtatcaggtcagtttcc

SEQ ID NO: 38937 - RNA, 19 nt, synthetic construct
  misc_feature 1..19: note = siRNA antisense sequence
  source 1..19: mol_type = other RNA
ggaaactgacctgatacag

SEQ ID NO: 38938 - RNA, 19 nt, synthetic construct
  misc_feature 1..19: note = siRNA sense sequence
  source 1..19: mol_type = other RNA
tgtatcaggtcagtttcca

SEQ ID NO: 38939 - RNA, 19 nt, synthetic construct
  misc_feature 1..19: note = siRNA antisense sequence
  source 1..19: mol_type = other RNA
tggaaactgacctgataca

SEQ ID NO: 38940 - RNA, 19 nt, synthetic construct
  misc_feature 1..19: note = siRNA sense sequence
  source 1..19: mol_type = other RNA
gtatcaggtcagtttccaa

SEQ ID NO: 38941 - RNA, 19 nt, synthetic construct
  misc_feature 1..19: note = siRNA antisense sequence
  source 1..19: mol_type = other RNA
ttggaaactgacctgatac

SEQ ID NO: 38942 - RNA, 19 nt, synthetic construct
  misc_feature 1..19: note = siRNA sense sequence
  source 1..19: mol_type = other RNA
tatcaggtcagtttccaat

SEQ ID NO: 38943 - RNA, 19 nt, synthetic construct
  misc_feature 1..19: note = siRNA antisense sequence
  source 1..19: mol_type = other RNA
attggaaactgacctgata

SEQ ID NO: 38944 - RNA, 19 nt, synthetic construct
  misc_feature 1..19: note = siRNA sense sequence
  source 1..19: mol_type = other RNA
atcaggtcagtttccaatt

SEQ ID NO: 38945 - RNA, 19 nt, synthetic construct
  misc_feature 1..19: note = siRNA antisense sequence
  source 1..19: mol_type = other RNA
aattggaaactgacctgat

SEQ ID NO: 38946 - RNA, 19 nt, synthetic construct
  misc_feature 1..19: note = siRNA sense sequence
  source 1..19: mol_type = other RNA
tcaggtcagtttccaatta

SEQ ID NO: 38947 - RNA, 19 nt, synthetic construct
  misc_feature 1..19: note = siRNA antisense sequence
  source 1..19: mol_type = other RNA
taattggaaactgacctga

SEQ ID NO: 38948 - RNA, 19 nt, synthetic construct
  misc_feature 1..19: note = siRNA sense sequence
  source 1..19: mol_type = other RNA
caggtcagtttccaattat

SEQ ID NO: 38949 - RNA, 19 nt, synthetic construct
  misc_feature 1..19: note = siRNA antisense sequence
  source 1..19: mol_type = other RNA
ataattggaaactgacctg

SEQ ID NO: 38950 - RNA, 19 nt, synthetic construct
  misc_feature 1..19: note = siRNA sense sequence
  source 1..19: mol_type = other RNA
aggtcagtttccaattatc

SEQ ID NO: 38951 - RNA, 19 nt, synthetic construct
  misc_feature 1..19: note = siRNA antisense sequence
  source 1..19: mol_type = other RNA
gataattggaaactgacct

SEQ ID NO: 38952 - RNA, 19 nt, synthetic construct
  misc_feature 1..19: note = siRNA sense sequence
  source 1..19: mol_type = other RNA
ggtcagtttccaattatca

SEQ ID NO: 38953 - RNA, 19 nt, synthetic construct
  misc_feature 1..19: note = siRNA antisense sequence
  source 1..19: mol_type = other RNA
tgataattggaaactgacc

SEQ ID NO: 38954 - RNA, 19 nt, synthetic construct
  misc_feature 1..19: note = siRNA sense sequence
  source 1..19: mol_type = other RNA
tcagtttccaattatcacc

SEQ ID NO: 38955 - RNA, 19 nt, synthetic construct
  misc_feature 1..19: note = siRNA antisense sequence
  source 1..19: mol_type = other RNA
ggtgataattggaaactga

SEQ ID NO: 38956 - RNA, 19 nt, synthetic construct
  misc_feature 1..19: note = siRNA sense sequence
  source 1..19: mol_type = other RNA
caattatcaccatatccta

SEQ ID NO: 38957 - RNA, 19 nt, synthetic construct
  misc_feature 1..19: note = siRNA antisense sequence
  source 1..19: mol_type = other RNA
taggatatggtgataattg

SEQ ID NO: 38958 - RNA, 19 nt, synthetic construct
  misc_feature 1..19: note = siRNA sense sequence
  source 1..19: mol_type = other RNA
attatcaccatatcctaag

SEQ ID NO: 38959 - RNA, 19 nt, synthetic construct
  misc_feature 1..19: note = siRNA antisense sequence
  source 1..19: mol_type = other RNA
cttaggatatggtgataat

SEQ ID NO: 38960 - RNA, 19 nt, synthetic construct
  misc_feature 1..19: note = siRNA sense sequence
  source 1..19: mol_type = other RNA
ttatcaccatatcctaagt

SEQ ID NO: 38961 - RNA, 19 nt, synthetic construct
  misc_feature 1..19: note = siRNA antisense sequence
  source 1..19: mol_type = other RNA
acttaggatatggtgataa

SEQ ID NO: 38962 - RNA, 19 nt, synthetic construct
  misc_feature 1..19: note = siRNA sense sequence
  source 1..19: mol_type = other RNA
tatcaccatatcctaagtg

SEQ ID NO: 38963 - RNA, 19 nt, synthetic construct
  misc_feature 1..19: note = siRNA antisense sequence
  source 1..19: mol_type = other RNA
cacttaggatatggtgata

SEQ ID NO: 38964 - RNA, 19 nt, synthetic construct
  misc_feature 1..19: note = siRNA sense sequence
  source 1..19: mol_type = other RNA
atcaccatatcctaagtgc

SEQ ID NO: 38965 - RNA, 19 nt, synthetic construct
  misc_feature 1..19: note = siRNA antisense sequence
  source 1..19: mol_type = other RNA
gcacttaggatatggtgat

SEQ ID NO: 38966 - RNA, 19 nt, synthetic construct
  misc_feature 1..19: note = siRNA sense sequence
  source 1..19: mol_type = other RNA
tcaccatatcctaagtgct

SEQ ID NO: 38967 - RNA, 19 nt, synthetic construct
  misc_feature 1..19: note = siRNA antisense sequence
  source 1..19: mol_type = other RNA
agcacttaggatatggtga

SEQ ID NO: 38968 - RNA, 19 nt, synthetic construct
  misc_feature 1..19: note = siRNA sense sequence
  source 1..19: mol_type = other RNA
caccatatcctaagtgctt

SEQ ID NO: 38969 - RNA, 19 nt, synthetic construct
  misc_feature 1..19: note = siRNA antisense sequence
  source 1..19: mol_type = other RNA
aagcacttaggatatggtg

SEQ ID NO: 38970 - RNA, 19 nt, synthetic construct
  misc_feature 1..19: note = siRNA sense sequence
  source 1..19: mol_type = other RNA
accatatcctaagtgcttt

SEQ ID NO: 38971 - RNA, 19 nt, synthetic construct
  misc_feature 1..19: note = siRNA antisense sequence
  source 1..19: mol_type = other RNA
aaagcacttaggatatggt

SEQ ID NO: 38972 - RNA, 19 nt, synthetic construct
  misc_feature 1..19: note = siRNA sense sequence
  source 1..19: mol_type = other RNA
ccatatcctaagtgctttc

SEQ ID NO: 38973 - RNA, 19 nt, synthetic construct
  misc_feature 1..19: note = siRNA antisense sequence
  source 1..19: mol_type = other RNA
gaaagcacttaggatatgg

SEQ ID NO: 38974 - RNA, 19 nt, synthetic construct
  misc_feature 1..19: note = siRNA sense sequence
  source 1..19: mol_type = other RNA
catatcctaagtgctttct

SEQ ID NO: 38975 - RNA, 19 nt, synthetic construct
  misc_feature 1..19: note = siRNA antisense sequence
  source 1..19: mol_type = other RNA
agaaagcacttaggatatg

SEQ ID NO: 38976 - RNA, 19 nt, synthetic construct
  misc_feature 1..19: note = siRNA sense sequence
  source 1..19: mol_type = other RNA
agtgctttctcttgcccta

SEQ ID NO: 38977 - RNA, 19 nt, synthetic construct
  misc_feature 1..19: note = siRNA antisense sequence
  source 1..19: mol_type = other RNA
tagggcaagagaaagcact

SEQ ID NO: 38978 - RNA, 19 nt, synthetic construct
  misc_feature 1..19: note = siRNA sense sequence
  source 1..19: mol_type = other RNA
gtgctttctcttgccctag

SEQ ID NO: 38979 - RNA, 19 nt, synthetic construct
  misc_feature 1..19: note = siRNA antisense sequence
  source 1..19: mol_type = other RNA
ctagggcaagagaaagcac

SEQ ID NO: 38980 - RNA, 19 nt, synthetic construct
  misc_feature 1..19: note = siRNA sense sequence
  source 1..19: mol_type = other RNA
tgctttctcttgccctaga

SEQ ID NO: 38981 - RNA, 19 nt, synthetic construct
  misc_feature 1..19: note = siRNA antisense sequence
  source 1..19: mol_type = other RNA
tctagggcaagagaaagca

SEQ ID NO: 38982 - RNA, 19 nt, synthetic construct
  misc_feature 1..19: note = siRNA sense sequence
  source 1..19: mol_type = other RNA
cttttcctccagagccaaa

SEQ ID NO: 38983 - RNA, 19 nt, synthetic construct
  misc_feature 1..19: note = siRNA antisense sequence
  source 1..19: mol_type = other RNA
tttggctctggaggaaaag

SEQ ID NO: 38984 - RNA, 19 nt, synthetic construct
  misc_feature 1..19: note = siRNA sense sequence
  source 1..19: mol_type = other RNA
gccaaatctcaagctctct

SEQ ID NO: 38985 - RNA, 19 nt, synthetic construct
  misc_feature 1..19: note = siRNA antisense sequence
  source 1..19: mol_type = other RNA
agagagcttgagatttggc

SEQ ID NO: 38986 - RNA, 19 nt, synthetic construct
  misc_feature 1..19: note = siRNA sense sequence
  source 1..19: mol_type = other RNA
ccaaatctcaagctctctg

SEQ ID NO: 38987 - RNA, 19 nt, synthetic construct
  misc_feature 1..19: note = siRNA antisense sequence
  source 1..19: mol_type = other RNA
cagagagcttgagatttgg

SEQ ID NO: 38988 - RNA, 19 nt, synthetic construct
  misc_feature 1..19: note = siRNA sense sequence
  source 1..19: mol_type = other RNA
caaatctcaagctctctgt

SEQ ID NO: 38989 - RNA, 19 nt, synthetic construct
  misc_feature 1..19: note = siRNA antisense sequence
  source 1..19: mol_type = other RNA
acagagagcttgagatttg

SEQ ID NO: 38990 - RNA, 19 nt, synthetic construct
  misc_feature 1..19: note = siRNA sense sequence
  source 1..19: mol_type = other RNA
aaatctcaagctctctgtt

SEQ ID NO: 38991 - RNA, 19 nt, synthetic construct
  misc_feature 1..19: note = siRNA antisense sequence
  source 1..19: mol_type = other RNA
aacagagagcttgagattt

SEQ ID NO: 38992 - RNA, 19 nt, synthetic construct
  misc_feature 1..19: note = siRNA sense sequence
  source 1..19: mol_type = other RNA
aatctcaagctctctgttc

SEQ ID NO: 38993 - RNA, 19 nt, synthetic construct
  misc_feature 1..19: note = siRNA antisense sequence
  source 1..19: mol_type = other RNA
gaacagagagcttgagatt

SEQ ID NO: 38994 - RNA, 19 nt, synthetic construct
  misc_feature 1..19: note = siRNA sense sequence
  source 1..19: mol_type = other RNA
atctcaagctctctgttcc

SEQ ID NO: 38995 - RNA, 19 nt, synthetic construct
  misc_feature 1..19: note = siRNA antisense sequence
  source 1..19: mol_type = other RNA
ggaacagagagcttgagat

SEQ ID NO: 38996 - RNA, 19 nt, synthetic construct
  misc_feature 1..19: note = siRNA sense sequence
  source 1..19: mol_type = other RNA
tctcaagctctctgttcct

SEQ ID NO: 38997 - RNA, 19 nt, synthetic construct
  misc_feature 1..19: note = siRNA antisense sequence
  source 1..19: mol_type = other RNA
aggaacagagagcttgaga

SEQ ID NO: 38998 - RNA, 19 nt, synthetic construct
  misc_feature 1..19: note = siRNA sense sequence
  source 1..19: mol_type = other RNA
aagctctctgttcctgtct

SEQ ID NO: 38999 - RNA, 19 nt, synthetic construct
  misc_feature 1..19: note = siRNA antisense sequence
  source 1..19: mol_type = other RNA
agacaggaacagagagctt

SEQ ID NO: 39000 - RNA, 19 nt, synthetic construct
  misc_feature 1..19: note = siRNA sense sequence
  source 1..19: mol_type = other RNA
agctctctgttcctgtcta

SEQ ID NO: 39001 - RNA, 19 nt, synthetic construct
  misc_feature 1..19: note = siRNA antisense sequence
  source 1..19: mol_type = other RNA
tagacaggaacagagagct

SEQ ID NO: 39002 - RNA, 19 nt, synthetic construct
  misc_feature 1..19: note = siRNA sense sequence
  source 1..19: mol_type = other RNA
ctctctgttcctgtctata

SEQ ID NO: 39003 - RNA, 19 nt, synthetic construct
  misc_feature 1..19: note = siRNA antisense sequence
  source 1..19: mol_type = other RNA
tatagacaggaacagagag

SEQ ID NO: 39004 - RNA, 19 nt, synthetic construct
  misc_feature 1..19: note = siRNA sense sequence
  source 1..19: mol_type = other RNA
tctctgttcctgtctataa

SEQ ID NO: 39005 - RNA, 19 nt, synthetic construct
  misc_feature 1..19: note = siRNA antisense sequence
  source 1..19: mol_type = other RNA
ttatagacaggaacagaga

SEQ ID NO: 39006 - RNA, 19 nt, synthetic construct
  misc_feature 1..19: note = siRNA sense sequence
  source 1..19: mol_type = other RNA
ctctgttcctgtctataag

SEQ ID NO: 39007 - RNA, 19 nt, synthetic construct
  misc_feature 1..19: note = siRNA antisense sequence
  source 1..19: mol_type = other RNA
cttatagacaggaacagag

SEQ ID NO: 39008 - RNA, 19 nt, synthetic construct
  misc_feature 1..19: note = siRNA sense sequence
  source 1..19: mol_type = other RNA
tctgttcctgtctataagc

SEQ ID NO: 39009 - RNA, 19 nt, synthetic construct
  misc_feature 1..19: note = siRNA antisense sequence
  source 1..19: mol_type = other RNA
gcttatagacaggaacaga

SEQ ID NO: 39010 - RNA, 19 nt, synthetic construct
  misc_feature 1..19: note = siRNA sense sequence
  source 1..19: mol_type = other RNA
tgttcctgtctataagcaa

SEQ ID NO: 39011 - RNA, 19 nt, synthetic construct
  misc_feature 1..19: note = siRNA antisense sequence
  source 1..19: mol_type = other RNA
ttgcttatagacaggaaca

SEQ ID NO: 39012 - RNA, 19 nt, synthetic construct
  misc_feature 1..19: note = siRNA sense sequence
  source 1..19: mol_type = other RNA
gttcctgtctataagcaag

SEQ ID NO: 39013 - RNA, 19 nt, synthetic construct
  misc_feature 1..19: note = siRNA antisense sequence
  source 1..19: mol_type = other RNA
cttgcttatagacaggaac

SEQ ID NO: 39014 - RNA, 19 nt, synthetic construct
  misc_feature 1..19: note = siRNA sense sequence
  source 1..19: mol_type = other RNA
ttcctgtctataagcaagc

SEQ ID NO: 39015 - RNA, 19 nt, synthetic construct
  misc_feature 1..19: note = siRNA antisense sequence
  source 1..19: mol_type = other RNA
gcttgcttatagacaggaa

SEQ ID NO: 39016 - RNA, 19 nt, synthetic construct
  misc_feature 1..19: note = siRNA sense sequence
  source 1..19: mol_type = other RNA
tcctgtctataagcaagct

SEQ ID NO: 39017 - RNA, 19 nt, synthetic construct
  misc_feature 1..19: note = siRNA antisense sequence
  source 1..19: mol_type = other RNA
agcttgcttatagacagga

SEQ ID NO: 39018 - RNA, 19 nt, synthetic construct
  misc_feature 1..19: note = siRNA sense sequence
  source 1..19: mol_type = other RNA
cctgtctataagcaagctt

SEQ ID NO: 39019 - RNA, 19 nt, synthetic construct
  misc_feature 1..19: note = siRNA antisense sequence
  source 1..19: mol_type = other RNA
aagcttgcttatagacagg

SEQ ID NO: 39020 - RNA, 19 nt, synthetic construct
  misc_feature 1..19: note = siRNA sense sequence
  source 1..19: mol_type = other RNA
taagcaagctttattctga

SEQ ID NO: 39021 - RNA, 19 nt, synthetic construct
  misc_feature 1..19: note = siRNA antisense sequence
  source 1..19: mol_type = other RNA
tcagaataaagcttgctta

SEQ ID NO: 39022 - RNA, 19 nt, synthetic construct
  misc_feature 1..19: note = siRNA sense sequence
  source 1..19: mol_type = other RNA
aagcaagctttattctgag

SEQ ID NO: 39023 - RNA, 19 nt, synthetic construct
  misc_feature 1..19: note = siRNA antisense sequence
  source 1..19: mol_type = other RNA
ctcagaataaagcttgctt

SEQ ID NO: 39024 - RNA, 19 nt, synthetic construct
  misc_feature 1..19: note = siRNA sense sequence
  source 1..19: mol_type = other RNA
aagctttattctgagttct

SEQ ID NO: 39025 - RNA, 19 nt, synthetic construct
  misc_feature 1..19: note = siRNA antisense sequence
  source 1..19: mol_type = other RNA
agaactcagaataaagctt

SEQ ID NO: 39026 - RNA, 19 nt, synthetic construct
  misc_feature 1..19: note = siRNA sense sequence
  source 1..19: mol_type = other RNA
agctttattctgagttcta

SEQ ID NO: 39027 - RNA, 19 nt, synthetic construct
  misc_feature 1..19: note = siRNA antisense sequence
  source 1..19: mol_type = other RNA
tagaactcagaataaagct

SEQ ID NO: 39028 - RNA, 19 nt, synthetic construct
  misc_feature 1..19: note = siRNA sense sequence
  source 1..19: mol_type = other RNA
gctttattctgagttctag

SEQ ID NO: 39029 - RNA, 19 nt, synthetic construct
  misc_feature 1..19: note = siRNA antisense sequence
  source 1..19: mol_type = other RNA
ctagaactcagaataaagc

SEQ ID NO: 39030 - RNA, 19 nt, synthetic construct
  misc_feature 1..19: note = siRNA sense sequence
  source 1..19: mol_type = other RNA
ctttattctgagttctagc

SEQ ID NO: 39031 - RNA, 19 nt, synthetic construct
  misc_feature 1..19: note = siRNA antisense sequence
  source 1..19: mol_type = other RNA
gctagaactcagaataaag

SEQ ID NO: 39032 - RNA, 19 nt, synthetic construct
  misc_feature 1..19: note = siRNA sense sequence
  source 1..19: mol_type = other RNA
tttattctgagttctagcc

SEQ ID NO: 39033 - RNA, 19 nt, synthetic construct
  misc_feature 1..19: note = siRNA antisense sequence
  source 1..19: mol_type = other RNA
ggctagaactcagaataaa

SEQ ID NO: 39034 - RNA, 19 nt, synthetic construct
  misc_feature 1..19: note = siRNA sense sequence
  source 1..19: mol_type = other RNA
ttattctgagttctagcca

SEQ ID NO: 39035 - RNA, 19 nt, synthetic construct
  misc_feature 1..19: note = siRNA antisense sequence
  source 1..19: mol_type = other RNA
tggctagaactcagaataa

SEQ ID NO: 39036 - RNA, 19 nt, synthetic construct
  misc_feature 1..19: note = siRNA sense sequence
  source 1..19: mol_type = other RNA
tattctgagttctagccac

SEQ ID NO: 39037 - RNA, 19 nt, synthetic construct
  misc_feature 1..19: note = siRNA antisense sequence
  source 1..19: mol_type = other RNA
gtggctagaactcagaata

SEQ ID NO: 39038 - RNA, 19 nt, synthetic construct
  misc_feature 1..19: note = siRNA sense sequence
  source 1..19: mol_type = other RNA
attctgagttctagccacc

SEQ ID NO: 39039 - RNA, 19 nt, synthetic construct
  misc_feature 1..19: note = siRNA antisense sequence
  source 1..19: mol_type = other RNA
ggtggctagaactcagaat

SEQ ID NO: 39040 - RNA, 19 nt, synthetic construct
  misc_feature 1..19: note = siRNA sense sequence
  source 1..19: mol_type = other RNA
tgagttctagccacccata

SEQ ID NO: 39041 - RNA, 19 nt, synthetic construct
  misc_feature 1..19: note = siRNA antisense sequence
  source 1..19: mol_type = other RNA
tatgggtggctagaactca

SEQ ID NO: 39042 - RNA, 19 nt, synthetic construct
  misc_feature 1..19: note = siRNA sense sequence
  source 1..19: mol_type = other RNA
gagttctagccacccatac

SEQ ID NO: 39043 - RNA, 19 nt, synthetic construct
  misc_feature 1..19: note = siRNA antisense sequence
  source 1..19: mol_type = other RNA
gtatgggtggctagaactc

SEQ ID NO: 39044 - RNA, 19 nt, synthetic construct
  misc_feature 1..19: note = siRNA sense sequence
  source 1..19: mol_type = other RNA
agttctagccacccatact

SEQ ID NO: 39045 - RNA, 19 nt, synthetic construct
  misc_feature 1..19: note = siRNA antisense sequence
  source 1..19: mol_type = other RNA
agtatgggtggctagaact

SEQ ID NO: 39046 - RNA, 19 nt, synthetic construct
  misc_feature 1..19: note = siRNA sense sequence
  source 1..19: mol_type = other RNA
gttctagccacccatactt

SEQ ID NO: 39047 - RNA, 19 nt, synthetic construct
  misc_feature 1..19: note = siRNA antisense sequence
  source 1..19: mol_type = other RNA
aagtatgggtggctagaac

SEQ ID NO: 39048 - RNA, 19 nt, synthetic construct
  misc_feature 1..19: note = siRNA sense sequence
  source 1..19: mol_type = other RNA
ttctagccacccatacttt

SEQ ID NO: 39049 - RNA, 19 nt, synthetic construct
  misc_feature 1..19: note = siRNA antisense sequence
  source 1..19: mol_type = other RNA
aaagtatgggtggctagaa

SEQ ID NO: 39050 - RNA, 19 nt, synthetic construct
  misc_feature 1..19: note = siRNA sense sequence
  source 1..19: mol_type = other RNA
tctagccacccatactttc

SEQ ID NO: 39051 - RNA, 19 nt, synthetic construct
  misc_feature 1..19: note = siRNA antisense sequence
  source 1..19: mol_type = other RNA
gaaagtatgggtggctaga

SEQ ID NO: 39052 - RNA, 19 nt, synthetic construct
  misc_feature 1..19: note = siRNA sense sequence
  source 1..19: mol_type = other RNA
ctagccacccatactttct

SEQ ID NO: 39053 - RNA, 19 nt, synthetic construct
  misc_feature 1..19: note = siRNA antisense sequence
  source 1..19: mol_type = other RNA
agaaagtatgggtggctag

SEQ ID NO: 39054 - RNA, 19 nt, synthetic construct
  misc_feature 1..19: note = siRNA sense sequence
  source 1..19: mol_type = other RNA
ccacccatactttctcatt

SEQ ID NO: 39055 - RNA, 19 nt, synthetic construct
  misc_feature 1..19: note = siRNA antisense sequence
  source 1..19: mol_type = other RNA
aatgagaaagtatgggtgg

SEQ ID NO: 39056 - RNA, 19 nt, synthetic construct
  misc_feature 1..19: note = siRNA sense sequence
  source 1..19: mol_type = other RNA
cacccatactttctcatta

SEQ ID NO: 39057 - RNA, 19 nt, synthetic construct
  misc_feature 1..19: note = siRNA antisense sequence
  source 1..19: mol_type = other RNA
taatgagaaagtatgggtg

SEQ ID NO: 39058 - RNA, 19 nt, synthetic construct
  misc_feature 1..19: note = siRNA sense sequence
  source 1..19: mol_type = other RNA
acccatactttctcattat

SEQ ID NO: 39059 - RNA, 19 nt, synthetic construct
  misc_feature 1..19: note = siRNA antisense sequence
  source 1..19: mol_type = other RNA
ataatgagaaagtatgggt

SEQ ID NO: 39060 - RNA, 19 nt, synthetic construct
  misc_feature 1..19: note = siRNA sense sequence
  source 1..19: mol_type = other RNA
cccatactttctcattatc

SEQ ID NO: 39061 - RNA, 19 nt, synthetic construct
  misc_feature 1..19: note = siRNA antisense sequence
  source 1..19: mol_type = other RNA
gataatgagaaagtatggg

SEQ ID NO: 39062 - RNA, 19 nt, synthetic construct
  misc_feature 1..19: note = siRNA sense sequence
  source 1..19: mol_type = other RNA
tatcttcccttttccatct

SEQ ID NO: 39063 - RNA, 19 nt, synthetic construct
  misc_feature 1..19: note = siRNA antisense sequence
  source 1..19: mol_type = other RNA
agatggaaaagggaagata

SEQ ID NO: 39064 - RNA, 19 nt, synthetic construct
  misc_feature 1..19: note = siRNA sense sequence
  source 1..19: mol_type = other RNA
atcttcccttttccatctt

SEQ ID NO: 39065 - RNA, 19 nt, synthetic construct
  misc_feature 1..19: note = siRNA antisense sequence
  source 1..19: mol_type = other RNA
aagatggaaaagggaagat

SEQ ID NO: 39066 - RNA, 19 nt, synthetic construct
  misc_feature 1..19: note = siRNA sense sequence
  source 1..19: mol_type = other RNA
cccttttccatcttcattc

SEQ ID NO: 39067 - RNA, 19 nt, synthetic construct
  misc_feature 1..19: note = siRNA antisense sequence
  source 1..19: mol_type = other RNA
gaatgaagatggaaaaggg

SEQ ID NO: 39068 - RNA, 19 nt, synthetic construct
  misc_feature 1..19: note = siRNA sense sequence
  source 1..19: mol_type = other RNA
ccatcttcattctcctgtc

SEQ ID NO: 39069 - RNA, 19 nt, synthetic construct
  misc_feature 1..19: note = siRNA antisense sequence
  source 1..19: mol_type = other RNA
gacaggagaatgaagatgg

SEQ ID NO: 39070 - RNA, 19 nt, synthetic construct
  misc_feature 1..19: note = siRNA sense sequence
  source 1..19: mol_type = other RNA
catcttcattctcctgtct

SEQ ID NO: 39071 - RNA, 19 nt, synthetic construct
  misc_feature 1..19: note = siRNA antisense sequence
  source 1..19: mol_type = other RNA
agacaggagaatgaagatg

SEQ ID NO: 39072 - RNA, 19 nt, synthetic construct
  misc_feature 1..19: note = siRNA sense sequence
  source 1..19: mol_type = other RNA
atcttcattctcctgtctc

SEQ ID NO: 39073 - RNA, 19 nt, synthetic construct
  misc_feature 1..19: note = siRNA antisense sequence
  source 1..19: mol_type = other RNA
gagacaggagaatgaagat

SEQ ID NO: 39074 - RNA, 19 nt, synthetic construct
  misc_feature 1..19: note = siRNA sense sequence
  source 1..19: mol_type = other RNA
tcattctcctgtctccaca

SEQ ID NO: 39075 - RNA, 19 nt, synthetic construct
  misc_feature 1..19: note = siRNA antisense sequence
  source 1..19: mol_type = other RNA
tgtggagacaggagaatga

SEQ ID NO: 39076 - RNA, 19 nt, synthetic construct
  misc_feature 1..19: note = siRNA sense sequence
  source 1..19: mol_type = other RNA
cattctcctgtctccacac

SEQ ID NO: 39077 - RNA, 19 nt, synthetic construct
  misc_feature 1..19: note = siRNA antisense sequence
  source 1..19: mol_type = other RNA
gtgtggagacaggagaatg

SEQ ID NO: 39078 - RNA, 19 nt, synthetic construct
  misc_feature 1..19: note = siRNA sense sequence
  source 1..19: mol_type = other RNA
attctcctgtctccacact

SEQ ID NO: 39079 - RNA, 19 nt, synthetic construct
  misc_feature 1..19: note = siRNA antisense sequence
  source 1..19: mol_type = other RNA
agtgtggagacaggagaat

SEQ ID NO: 39080 - RNA, 19 nt, synthetic construct
  misc_feature 1..19: note = siRNA sense sequence
  source 1..19: mol_type = other RNA
ttctcctgtctccacactt

SEQ ID NO: 39081 - RNA, 19 nt, synthetic construct
  misc_feature 1..19: note = siRNA antisense sequence
  source 1..19: mol_type = other RNA
aagtgtggagacaggagaa

SEQ ID NO: 39082 - RNA, 19 nt, synthetic construct
  misc_feature 1..19: note = siRNA sense sequence
  source 1..19: mol_type = other RNA
cctgtctccacacttttcc

SEQ ID NO: 39083 - RNA, 19 nt, synthetic construct
  misc_feature 1..19: note = siRNA antisense sequence
  source 1..19: mol_type = other RNA
ggaaaagtgtggagacagg

SEQ ID NO: 39084 - RNA, 19 nt, synthetic construct
  misc_feature 1..19: note = siRNA sense sequence
  source 1..19: mol_type = other RNA
ccacacttttccctgggct

SEQ ID NO: 39085 - RNA, 19 nt, synthetic construct
  misc_feature 1..19: note = siRNA antisense sequence
  source 1..19: mol_type = other RNA
agcccagggaaaagtgtgg

SEQ ID NO: 39086 - RNA, 19 nt, synthetic construct
  misc_feature 1..19: note = siRNA sense sequence
  source 1..19: mol_type = other RNA
cacacttttccctgggcta

SEQ ID NO: 39087 - RNA, 19 nt, synthetic construct
  misc_feature 1..19: note = siRNA antisense sequence
  source 1..19: mol_type = other RNA
tagcccagggaaaagtgtg

SEQ ID NO: 39088 - RNA, 19 nt, synthetic construct
  misc_feature 1..19: note = siRNA sense sequence
  source 1..19: mol_type = other RNA
acacttttccctgggctat

SEQ ID NO: 39089 - RNA, 19 nt, synthetic construct
  misc_feature 1..19: note = siRNA antisense sequence
  source 1..19: mol_type = other RNA
atagcccagggaaaagtgt

SEQ ID NO: 39090 - RNA, 19 nt, synthetic construct
  misc_feature 1..19: note = siRNA sense sequence
  source 1..19: mol_type = other RNA
cacttttccctgggctatc

SEQ ID NO: 39091 - RNA, 19 nt, synthetic construct
  misc_feature 1..19: note = siRNA antisense sequence
  source 1..19: mol_type = other RNA
gatagcccagggaaaagtg

SEQ ID NO: 39092 - RNA, 19 nt, synthetic construct
  misc_feature 1..19: note = siRNA sense sequence
  source 1..19: mol_type = other RNA
acttttccctgggctatcc

SEQ ID NO: 39093 - RNA, 19 nt, synthetic construct
  misc_feature 1..19: note = siRNA antisense sequence
  source 1..19: mol_type = other RNA
ggatagcccagggaaaagt

SEQ ID NO: 39094 - RNA, 19 nt, synthetic construct
  misc_feature 1..19: note = siRNA sense sequence
  source 1..19: mol_type = other RNA
ttccctgggctatccatat

SEQ ID NO: 39095 - RNA, 19 nt, synthetic construct
  misc_feature 1..19: note = siRNA antisense sequence
  source 1..19: mol_type = other RNA
atatggatagcccagggaa

SEQ ID NO: 39096 - RNA, 19 nt, synthetic construct
  misc_feature 1..19: note = siRNA sense sequence
  source 1..19: mol_type = other RNA
ctgggctatccatatctcc

SEQ ID NO: 39097 - RNA, 19 nt, synthetic construct
  misc_feature 1..19: note = siRNA antisense sequence
  source 1..19: mol_type = other RNA
ggagatatggatagcccag

SEQ ID NO: 39098 - RNA, 19 nt, synthetic construct
  misc_feature 1..19: note = siRNA sense sequence
  source 1..19: mol_type = other RNA
tgggctatccatatctccc

SEQ ID NO: 39099 - RNA, 19 nt, synthetic construct
  misc_feature 1..19: note = siRNA antisense sequence
  source 1..19: mol_type = other RNA
gggagatatggatagccca

SEQ ID NO: 39100 - RNA, 19 nt, synthetic construct
  misc_feature 1..19: note = siRNA sense sequence
  source 1..19: mol_type = other RNA
gggctatccatatctccct

SEQ ID NO: 39101 - RNA, 19 nt, synthetic construct
  misc_feature 1..19: note = siRNA antisense sequence
  source 1..19: mol_type = other RNA
agggagatatggatagccc

SEQ ID NO: 39102 - RNA, 19 nt, synthetic construct
  misc_feature 1..19: note = siRNA sense sequence
  source 1..19: mol_type = other RNA
ggctatccatatctccctt

SEQ ID NO: 39103 - RNA, 19 nt, synthetic construct
  misc_feature 1..19: note = siRNA antisense sequence
  source 1..19: mol_type = other RNA
aagggagatatggatagcc

SEQ ID NO: 39104 - RNA, 19 nt, synthetic construct
  misc_feature 1..19: note = siRNA sense sequence
  source 1..19: mol_type = other RNA
gctatccatatctcccttt

SEQ ID NO: 39105 - RNA, 19 nt, synthetic construct
  misc_feature 1..19: note = siRNA antisense sequence
  source 1..19: mol_type = other RNA
aaagggagatatggatagc

SEQ ID NO: 39106 - RNA, 19 nt, synthetic construct
  misc_feature 1..19: note = siRNA sense sequence
  source 1..19: mol_type = other RNA
tagctctcctattagcatg

SEQ ID NO: 39107 - RNA, 19 nt, synthetic construct
  misc_feature 1..19: note = siRNA antisense sequence
  source 1..19: mol_type = other RNA
catgctaataggagagcta

SEQ ID NO: 39108 - RNA, 19 nt, synthetic construct
  misc_feature 1..19: note = siRNA sense sequence
  source 1..19: mol_type = other RNA
agctctcctattagcatgc

SEQ ID NO: 39109 - RNA, 19 nt, synthetic construct
  misc_feature 1..19: note = siRNA antisense sequence
  source 1..19: mol_type = other RNA
gcatgctaataggagagct

SEQ ID NO: 39110 - RNA, 19 nt, synthetic construct
  misc_feature 1..19: note = siRNA sense sequence
  source 1..19: mol_type = other RNA
gctctcctattagcatgct

SEQ ID NO: 39111 - RNA, 19 nt, synthetic construct
  misc_feature 1..19: note = siRNA antisense sequence
  source 1..19: mol_type = other RNA
agcatgctaataggagagc

SEQ ID NO: 39112 - RNA, 19 nt, synthetic construct
  misc_feature 1..19: note = siRNA sense sequence
  source 1..19: mol_type = other RNA
ctctcctattagcatgctg

SEQ ID NO: 39113 - RNA, 19 nt, synthetic construct
  misc_feature 1..19: note = siRNA antisense sequence
  source 1..19: mol_type = other RNA
cagcatgctaataggagag

SEQ ID NO: 39114 - RNA, 19 nt, synthetic construct
  misc_feature 1..19: note = siRNA sense sequence
  source 1..19: mol_type = other RNA
tctcctattagcatgctgt

SEQ ID NO: 39115 - RNA, 19 nt, synthetic construct
  misc_feature 1..19: note = siRNA antisense sequence
  source 1..19: mol_type = other RNA
acagcatgctaataggaga

SEQ ID NO: 39116 - RNA, 19 nt, synthetic construct
  misc_feature 1..19: note = siRNA sense sequence
  source 1..19: mol_type = other RNA
ctcctattagcatgctgta

SEQ ID NO: 39117 - RNA, 19 nt, synthetic construct
  misc_feature 1..19: note = siRNA antisense sequence
  source 1..19: mol_type = other RNA
tacagcatgctaataggag

SEQ ID NO: 39118 - RNA, 19 nt, synthetic construct
  misc_feature 1..19: note = siRNA sense sequence
  source 1..19: mol_type = other RNA
tcctattagcatgctgtac

SEQ ID NO: 39119 - RNA, 19 nt, synthetic construct
  misc_feature 1..19: note = siRNA antisense sequence
  source 1..19: mol_type = other RNA
gtacagcatgctaatagga

SEQ ID NO: 39120 - RNA, 19 nt, synthetic construct
  misc_feature 1..19: note = siRNA sense sequence
  source 1..19: mol_type = other RNA
actcacttttcatcagtta

SEQ ID NO: 39121 - RNA, 19 nt, synthetic construct
  misc_feature 1..19: note = siRNA antisense sequence
  source 1..19: mol_type = other RNA
taactgatgaaaagtgagt

SEQ ID NO: 39122 - RNA, 19 nt, synthetic construct
  misc_feature 1..19: note = siRNA sense sequence
  source 1..19: mol_type = other RNA
ctcacttttcatcagttat

SEQ ID NO: 39123 - RNA, 19 nt, synthetic construct
  misc_feature 1..19: note = siRNA antisense sequence
  source 1..19: mol_type = other RNA
ataactgatgaaaagtgag

SEQ ID NO: 39124 - RNA, 19 nt, synthetic construct
  misc_feature 1..19: note = siRNA sense sequence
  source 1..19: mol_type = other RNA
tcacttttcatcagttatc

SEQ ID NO: 39125 - RNA, 19 nt, synthetic construct
  misc_feature 1..19: note = siRNA antisense sequence
  source 1..19: mol_type = other RNA
gataactgatgaaaagtga

SEQ ID NO: 39126 - RNA, 19 nt, synthetic construct
  misc_feature 1..19: note = siRNA sense sequence
  source 1..19: mol_type = other RNA
cacttttcatcagttatcc

SEQ ID NO: 39127 - RNA, 19 nt, synthetic construct
  misc_feature 1..19: note = siRNA antisense sequence
  source 1..19: mol_type = other RNA
ggataactgatgaaaagtg

SEQ ID NO: 39128 - RNA, 19 nt, synthetic construct
  misc_feature 1..19: note = siRNA sense sequence
  source 1..19: mol_type = other RNA
acttttcatcagttatcct

SEQ ID NO: 39129 - RNA, 19 nt, synthetic construct
  misc_feature 1..19: note = siRNA antisense sequence
  source 1..19: mol_type = other RNA
aggataactgatgaaaagt

SEQ ID NO: 39130 - RNA, 19 nt, synthetic construct
  misc_feature 1..19: note = siRNA sense sequence
  source 1..19: mol_type = other RNA
cttttcatcagttatccta

SEQ ID NO: 39131 - RNA, 19 nt, synthetic construct
  misc_feature 1..19: note = siRNA antisense sequence
  source 1..19: mol_type = other RNA
taggataactgatgaaaag

SEQ ID NO: 39132 - RNA, 19 nt, synthetic construct
  misc_feature 1..19: note = siRNA sense sequence
  source 1..19: mol_type = other RNA
ttttcatcagttatcctag

SEQ ID NO: 39133 - RNA, 19 nt, synthetic construct
  misc_feature 1..19: note = siRNA antisense sequence
  source 1..19: mol_type = other RNA
ctaggataactgatgaaaa

SEQ ID NO: 39134 - RNA, 19 nt, synthetic construct
  misc_feature 1..19: note = siRNA sense sequence
  source 1..19: mol_type = other RNA
ttcatcagttatcctagat

SEQ ID NO: 39135 - RNA, 19 nt, synthetic construct
  misc_feature 1..19: note = siRNA antisense sequence
  source 1..19: mol_type = other RNA
atctaggataactgatgaa

SEQ ID NO: 39136 - RNA, 19 nt, synthetic construct
  misc_feature 1..19: note = siRNA sense sequence
  source 1..19: mol_type = other RNA
tcatcagttatcctagatt

SEQ ID NO: 39137 - RNA, 19 nt, synthetic construct
  misc_feature 1..19: note = siRNA antisense sequence
  source 1..19: mol_type = other RNA
aatctaggataactgatga

SEQ ID NO: 39138 - RNA, 19 nt, synthetic construct
  misc_feature 1..19: note = siRNA sense sequence
  source 1..19: mol_type = other RNA
catcagttatcctagattt

SEQ ID NO: 39139 - RNA, 19 nt, synthetic construct
  misc_feature 1..19: note = siRNA antisense sequence
  source 1..19: mol_type = other RNA
aaatctaggataactgatg

SEQ ID NO: 39140 - RNA, 19 nt, synthetic construct
  misc_feature 1..19: note = siRNA sense sequence
  source 1..19: mol_type = other RNA
tcagttatcctagattttc

SEQ ID NO: 39141 - RNA, 19 nt, synthetic construct
  misc_feature 1..19: note = siRNA antisense sequence
  source 1..19: mol_type = other RNA
gaaaatctaggataactga

SEQ ID NO: 39142 - RNA, 19 nt, synthetic construct
  misc_feature 1..19: note = siRNA sense sequence
  source 1..19: mol_type = other RNA
cagttatcctagattttcc

SEQ ID NO: 39143 - RNA, 19 nt, synthetic construct
  misc_feature 1..19: note = siRNA antisense sequence
  source 1..19: mol_type = other RNA
ggaaaatctaggataactg

SEQ ID NO: 39144 - RNA, 19 nt, synthetic construct
  misc_feature 1..19: note = siRNA sense sequence
  source 1..19: mol_type = other RNA
ccacttgatattacatgtt

SEQ ID NO: 39145 - RNA, 19 nt, synthetic construct
  misc_feature 1..19: note = siRNA antisense sequence
  source 1..19: mol_type = other RNA
aacatgtaatatcaagtgg

SEQ ID NO: 39146 - RNA, 19 nt, synthetic construct
  misc_feature 1..19: note = siRNA sense sequence
  source 1..19: mol_type = other RNA
ttacatgttttccaactag

SEQ ID NO: 39147 - RNA, 19 nt, synthetic construct
  misc_feature 1..19: note = siRNA antisense sequence
  source 1..19: mol_type = other RNA
ctagttggaaaacatgtaa

SEQ ID NO: 39148 - RNA, 19 nt, synthetic construct
  misc_feature 1..19: note = siRNA sense sequence
  source 1..19: mol_type = other RNA
tacatgttttccaactagt

SEQ ID NO: 39149 - RNA, 19 nt, synthetic construct
  misc_feature 1..19: note = siRNA antisense sequence
  source 1..19: mol_type = other RNA
actagttggaaaacatgta

SEQ ID NO: 39150 - RNA, 19 nt, synthetic construct
  misc_feature 1..19: note = siRNA sense sequence
  source 1..19: mol_type = other RNA
acatgttttccaactagtg

SEQ ID NO: 39151 - RNA, 19 nt, synthetic construct
  misc_feature 1..19: note = siRNA antisense sequence
  source 1..19: mol_type = other RNA
cactagttggaaaacatgt

SEQ ID NO: 39152 - RNA, 19 nt, synthetic construct
  misc_feature 1..19: note = siRNA sense sequence
  source 1..19: mol_type = other RNA
catgttttccaactagtga

SEQ ID NO: 39153 - RNA, 19 nt, synthetic construct
  misc_feature 1..19: note = siRNA antisense sequence
  source 1..19: mol_type = other RNA
tcactagttggaaaacatg

SEQ ID NO: 39154 - RNA, 19 nt, synthetic construct
  misc_feature 1..19: note = siRNA sense sequence
  source 1..19: mol_type = other RNA
atgttttccaactagtgag

SEQ ID NO: 39155 - RNA, 19 nt, synthetic construct
  misc_feature 1..19: note = siRNA antisense sequence
  source 1..19: mol_type = other RNA
ctcactagttggaaaacat

SEQ ID NO: 39156 - RNA, 19 nt, synthetic construct
  misc_feature 1..19: note = siRNA sense sequence
  source 1..19: mol_type = other RNA
actagtgagtcagttcttc

SEQ ID NO: 39157 - RNA, 19 nt, synthetic construct
  misc_feature 1..19: note = siRNA antisense sequence
  source 1..19: mol_type = other RNA
gaagaactgactcactagt

SEQ ID NO: 39158 - RNA, 19 nt, synthetic construct
  misc_feature 1..19: note = siRNA sense sequence
  source 1..19: mol_type = other RNA
ctagtgagtcagttcttct

SEQ ID NO: 39159 - RNA, 19 nt, synthetic construct
  misc_feature 1..19: note = siRNA antisense sequence
  source 1..19: mol_type = other RNA
agaagaactgactcactag

SEQ ID NO: 39160 - RNA, 19 nt, synthetic construct
  misc_feature 1..19: note = siRNA sense sequence
  source 1..19: mol_type = other RNA
tagtgagtcagttcttctc

SEQ ID NO: 39161 - RNA, 19 nt, synthetic construct
  misc_feature 1..19: note = siRNA antisense sequence
  source 1..19: mol_type = other RNA
gagaagaactgactcacta

SEQ ID NO: 39162 - RNA, 19 nt, synthetic construct
  misc_feature 1..19: note = siRNA sense sequence
  source 1..19: mol_type = other RNA
agtgagtcagttcttctct

SEQ ID NO: 39163 - RNA, 19 nt, synthetic construct
  misc_feature 1..19: note = siRNA antisense sequence
  source 1..19: mol_type = other RNA
agagaagaactgactcact

SEQ ID NO: 39164 - RNA, 19 nt, synthetic construct
  misc_feature 1..19: note = siRNA sense sequence
  source 1..19: mol_type = other RNA
gtgagtcagttcttctcta

SEQ ID NO: 39165 - RNA, 19 nt, synthetic construct
  misc_feature 1..19: note = siRNA antisense sequence
  source 1..19: mol_type = other RNA
tagagaagaactgactcac

SEQ ID NO: 39166 - RNA, 19 nt, synthetic construct
  misc_feature 1..19: note = siRNA sense sequence
  source 1..19: mol_type = other RNA
tgagtcagttcttctctac

SEQ ID NO: 39167 - RNA, 19 nt, synthetic construct
  misc_feature 1..19: note = siRNA antisense sequence
  source 1..19: mol_type = other RNA
gtagagaagaactgactca

SEQ ID NO: 39168 - RNA, 19 nt, synthetic construct
  misc_feature 1..19: note = siRNA sense sequence
  source 1..19: mol_type = other RNA
gagtcagttcttctctaca

SEQ ID NO: 39169 - RNA, 19 nt, synthetic construct
  misc_feature 1..19: note = siRNA antisense sequence
  source 1..19: mol_type = other RNA
tgtagagaagaactgactc

SEQ ID NO: 39170 - RNA, 19 nt, synthetic construct
  misc_feature 1..19: note = siRNA sense sequence
  source 1..19: mol_type = other RNA
ttgttctattcagatgatg

SEQ ID NO: 39171 - RNA, 19 nt, synthetic construct
  misc_feature 1..19: note = siRNA antisense sequence
  source 1..19: mol_type = other RNA
catcatctgaatagaacaa

SEQ ID NO: 39172 - RNA, 19 nt, synthetic construct
  misc_feature 1..19: note = siRNA sense sequence
  source 1..19: mol_type = other RNA
tgttctattcagatgatgg

SEQ ID NO: 39173 - RNA, 19 nt, synthetic construct
  misc_feature 1..19: note = siRNA antisense sequence
  source 1..19: mol_type = other RNA
ccatcatctgaatagaaca

SEQ ID NO: 39174 - RNA, 19 nt, synthetic construct
  misc_feature 1..19: note = siRNA sense sequence
  source 1..19: mol_type = other RNA
gttctattcagatgatgga

SEQ ID NO: 39175 - RNA, 19 nt, synthetic construct
  misc_feature 1..19: note = siRNA antisense sequence
  source 1..19: mol_type = other RNA
tccatcatctgaatagaac

SEQ ID NO: 39176 - RNA, 19 nt, synthetic construct
  misc_feature 1..19: note = siRNA sense sequence
  source 1..19: mol_type = other RNA
ttctattcagatgatggaa

SEQ ID NO: 39177 - RNA, 19 nt, synthetic construct
  misc_feature 1..19: note = siRNA antisense sequence
  source 1..19: mol_type = other RNA
ttccatcatctgaatagaa

SEQ ID NO: 39178 - RNA, 19 nt, synthetic construct
  misc_feature 1..19: note = siRNA sense sequence
  source 1..19: mol_type = other RNA
aaaggactttgagggccta

SEQ ID NO: 39179 - RNA, 19 nt, synthetic construct
  misc_feature 1..19: note = siRNA antisense sequence
  source 1..19: mol_type = other RNA
taggccctcaaagtccttt

SEQ ID NO: 39180 - RNA, 19 nt, synthetic construct
  misc_feature 1..19: note = siRNA sense sequence
  source 1..19: mol_type = other RNA
aaggactttgagggcctaa

SEQ ID NO: 39181 - RNA, 19 nt, synthetic construct
  misc_feature 1..19: note = siRNA antisense sequence
  source 1..19: mol_type = other RNA
ttaggccctcaaagtcctt

SEQ ID NO: 39182 - RNA, 19 nt, synthetic construct
  misc_feature 1..19: note = siRNA sense sequence
  source 1..19: mol_type = other RNA
aggactttgagggcctaac

SEQ ID NO: 39183 - RNA, 19 nt, synthetic construct
  misc_feature 1..19: note = siRNA antisense sequence
  source 1..19: mol_type = other RNA
gttaggccctcaaagtcct

SEQ ID NO: 39184 - RNA, 19 nt, synthetic construct
  misc_feature 1..19: note = siRNA sense sequence
  source 1..19: mol_type = other RNA
ggactttgagggcctaact

SEQ ID NO: 39185 - RNA, 19 nt, synthetic construct
  misc_feature 1..19: note = siRNA antisense sequence
  source 1..19: mol_type = other RNA
agttaggccctcaaagtcc

SEQ ID NO: 39186 - RNA, 19 nt, synthetic construct
  misc_feature 1..19: note = siRNA sense sequence
  source 1..19: mol_type = other RNA
gactttgagggcctaactc

SEQ ID NO: 39187 - RNA, 19 nt, synthetic construct
  misc_feature 1..19: note = siRNA antisense sequence
  source 1..19: mol_type = other RNA
gagttaggccctcaaagtc

SEQ ID NO: 39188 - RNA, 19 nt, synthetic construct
  misc_feature 1..19: note = siRNA sense sequence
  source 1..19: mol_type = other RNA
actttgagggcctaactcc

SEQ ID NO: 39189 - RNA, 19 nt, synthetic construct
  misc_feature 1..19: note = siRNA antisense sequence
  source 1..19: mol_type = other RNA
ggagttaggccctcaaagt

SEQ ID NO: 39190 - RNA, 19 nt, synthetic construct
  misc_feature 1..19: note = siRNA sense sequence
  source 1..19: mol_type = other RNA
ctttgagggcctaactccc

SEQ ID NO: 39191 - RNA, 19 nt, synthetic construct
  misc_feature 1..19: note = siRNA antisense sequence
  source 1..19: mol_type = other RNA
gggagttaggccctcaaag

SEQ ID NO: 39192 - RNA, 19 nt, synthetic construct
  misc_feature 1..19: note = siRNA sense sequence
  source 1..19: mol_type = other RNA
agggcctaactcccatcca

SEQ ID NO: 39193 - RNA, 19 nt, synthetic construct
  misc_feature 1..19: note = siRNA antisense sequence
  source 1..19: mol_type = other RNA
tggatgggagttaggccct

SEQ ID NO: 39194 - RNA, 19 nt, synthetic construct
  misc_feature 1..19: note = siRNA sense sequence
  source 1..19: mol_type = other RNA
gggcctaactcccatccac

SEQ ID NO: 39195 - RNA, 19 nt, synthetic construct
  misc_feature 1..19: note = siRNA antisense sequence
  source 1..19: mol_type = other RNA
gtggatgggagttaggccc

SEQ ID NO: 39196 - RNA, 19 nt, synthetic construct
  misc_feature 1..19: note = siRNA sense sequence
  source 1..19: mol_type = other RNA
ggcctaactcccatccact

SEQ ID NO: 39197 - RNA, 19 nt, synthetic construct
  misc_feature 1..19: note = siRNA antisense sequence
  source 1..19: mol_type = other RNA
agtggatgggagttaggcc

SEQ ID NO: 39198 - RNA, 19 nt, synthetic construct
  misc_feature 1..19: note = siRNA sense sequence
  source 1..19: mol_type = other RNA
gcctaactcccatccacta

SEQ ID NO: 39199 - RNA, 19 nt, synthetic construct
  misc_feature 1..19: note = siRNA antisense sequence
  source 1..19: mol_type = other RNA
tagtggatgggagttaggc

SEQ ID NO: 39200 - RNA, 19 nt, synthetic construct
  misc_feature 1..19: note = siRNA sense sequence
  source 1..19: mol_type = other RNA
cctaactcccatccactat

SEQ ID NO: 39201 - RNA, 19 nt, synthetic construct
  misc_feature 1..19: note = siRNA antisense sequence
  source 1..19: mol_type = other RNA
atagtggatgggagttagg

SEQ ID NO: 39202 - RNA, 19 nt, synthetic construct
  misc_feature 1..19: note = siRNA sense sequence
  source 1..19: mol_type = other RNA
ctaactcccatccactata

SEQ ID NO: 39203 - RNA, 19 nt, synthetic construct
  misc_feature 1..19: note = siRNA antisense sequence
  source 1..19: mol_type = other RNA
tatagtggatgggagttag

SEQ ID NO: 39204 - RNA, 19 nt, synthetic construct
  misc_feature 1..19: note = siRNA sense sequence
  source 1..19: mol_type = other RNA
taactcccatccactataa

SEQ ID NO: 39205 - RNA, 19 nt, synthetic construct
  misc_feature 1..19: note = siRNA antisense sequence
  source 1..19: mol_type = other RNA
ttatagtggatgggagtta

SEQ ID NO: 39206 - RNA, 19 nt, synthetic construct
  misc_feature 1..19: note = siRNA sense sequence
  source 1..19: mol_type = other RNA
aactcccatccactataaa

SEQ ID NO: 39207 - RNA, 19 nt, synthetic construct
  misc_feature 1..19: note = siRNA antisense sequence
  source 1..19: mol_type = other RNA
tttatagtggatgggagtt

SEQ ID NO: 39208 - RNA, 19 nt, synthetic construct
  misc_feature 1..19: note = siRNA sense sequence
  source 1..19: mol_type = other RNA
actcccatccactataaaa

SEQ ID NO: 39209 - RNA, 19 nt, synthetic construct
  misc_feature 1..19: note = siRNA antisense sequence
  source 1..19: mol_type = other RNA
ttttatagtggatgggagt

SEQ ID NO: 39210 - RNA, 19 nt, synthetic construct
  misc_feature 1..19: note = siRNA sense sequence
  source 1..19: mol_type = other RNA
acatccctggccagctgca

SEQ ID NO: 39211 - RNA, 19 nt, synthetic construct
  misc_feature 1..19: note = siRNA antisense sequence
  source 1..19: mol_type = other RNA
tgcagctggccagggatgt

SEQ ID NO: 39212 - RNA, 19 nt, synthetic construct
  misc_feature 1..19: note = siRNA sense sequence
  source 1..19: mol_type = other RNA
catccctggccagctgcaa

SEQ ID NO: 39213 - RNA, 19 nt, synthetic construct
  misc_feature 1..19: note = siRNA antisense sequence
  source 1..19: mol_type = other RNA
ttgcagctggccagggatg

SEQ ID NO: 39214 - RNA, 19 nt, synthetic construct
  misc_feature 1..19: note = siRNA sense sequence
  source 1..19: mol_type = other RNA
atccctggccagctgcaac

SEQ ID NO: 39215 - RNA, 19 nt, synthetic construct
  misc_feature 1..19: note = siRNA antisense sequence
  source 1..19: mol_type = other RNA
gttgcagctggccagggat

SEQ ID NO: 39216 - RNA, 19 nt, synthetic construct
  misc_feature 1..19: note = siRNA sense sequence
  source 1..19: mol_type = other RNA
ccagctgcaacccacctca

SEQ ID NO: 39217 - RNA, 19 nt, synthetic construct
  misc_feature 1..19: note = siRNA antisense sequence
  source 1..19: mol_type = other RNA
tgaggtgggttgcagctgg

SEQ ID NO: 39218 - RNA, 19 nt, synthetic construct
  misc_feature 1..19: note = siRNA sense sequence
  source 1..19: mol_type = other RNA
cagctgcaacccacctcat

SEQ ID NO: 39219 - RNA, 19 nt, synthetic construct
  misc_feature 1..19: note = siRNA antisense sequence
  source 1..19: mol_type = other RNA
atgaggtgggttgcagctg

SEQ ID NO: 39220 - RNA, 19 nt, synthetic construct
  misc_feature 1..19: note = siRNA sense sequence
  source 1..19: mol_type = other RNA
gctgcaacccacctcatct

SEQ ID NO: 39221 - RNA, 19 nt, synthetic construct
  misc_feature 1..19: note = siRNA antisense sequence
  source 1..19: mol_type = other RNA
agatgaggtgggttgcagc

SEQ ID NO: 39222 - RNA, 19 nt, synthetic construct
  misc_feature 1..19: note = siRNA sense sequence
  source 1..19: mol_type = other RNA
ctgcaacccacctcatctt

SEQ ID NO: 39223 - RNA, 19 nt, synthetic construct
  misc_feature 1..19: note = siRNA antisense sequence
  source 1..19: mol_type = other RNA
aagatgaggtgggttgcag

SEQ ID NO: 39224 - RNA, 19 nt, synthetic construct
  misc_feature 1..19: note = siRNA sense sequence
  source 1..19: mol_type = other RNA
tgcaacccacctcatcttg

SEQ ID NO: 39225 - RNA, 19 nt, synthetic construct
  misc_feature 1..19: note = siRNA antisense sequence
  source 1..19: mol_type = other RNA
caagatgaggtgggttgca

SEQ ID NO: 39226 - RNA, 19 nt, synthetic construct
  misc_feature 1..19: note = siRNA sense sequence
  source 1..19: mol_type = other RNA
gcaacccacctcatcttga

SEQ ID NO: 39227 - RNA, 19 nt, synthetic construct
  misc_feature 1..19: note = siRNA antisense sequence
  source 1..19: mol_type = other RNA
tcaagatgaggtgggttgc

SEQ ID NO: 39228 - RNA, 19 nt, synthetic construct
  misc_feature 1..19: note = siRNA sense sequence
  source 1..19: mol_type = other RNA
caacccacctcatcttgac

SEQ ID NO: 39229 - RNA, 19 nt, synthetic construct
  misc_feature 1..19: note = siRNA antisense sequence
  source 1..19: mol_type = other RNA
gtcaagatgaggtgggttg

SEQ ID NO: 39230 - RNA, 19 nt, synthetic construct
  misc_feature 1..19: note = siRNA sense sequence
  source 1..19: mol_type = other RNA
aacccacctcatcttgacc

SEQ ID NO: 39231 - RNA, 19 nt, synthetic construct
  misc_feature 1..19: note = siRNA antisense sequence
  source 1..19: mol_type = other RNA
ggtcaagatgaggtgggtt

SEQ ID NO: 39232 - RNA, 19 nt, synthetic construct
  misc_feature 1..19: note = siRNA sense sequence
  source 1..19: mol_type = other RNA
acccacctcatcttgacca

SEQ ID NO: 39233 - RNA, 19 nt, synthetic construct
  misc_feature 1..19: note = siRNA antisense sequence
  source 1..19: mol_type = other RNA
tggtcaagatgaggtgggt

SEQ ID NO: 39234 - RNA, 19 nt, synthetic construct
  misc_feature 1..19: note = siRNA sense sequence
  source 1..19: mol_type = other RNA
ctcatcttgaccagaggag

SEQ ID NO: 39235 - RNA, 19 nt, synthetic construct
  misc_feature 1..19: note = siRNA antisense sequence
  source 1..19: mol_type = other RNA
ctcctctggtcaagatgag

SEQ ID NO: 39236 - RNA, 19 nt, synthetic construct
  misc_feature 1..19: note = siRNA sense sequence
  source 1..19: mol_type = other RNA
tcatcttgaccagaggagc

SEQ ID NO: 39237 - RNA, 19 nt, synthetic construct
  misc_feature 1..19: note = siRNA antisense sequence
  source 1..19: mol_type = other RNA
gctcctctggtcaagatga

SEQ ID NO: 39238 - RNA, 19 nt, synthetic construct
  misc_feature 1..19: note = siRNA sense sequence
  source 1..19: mol_type = other RNA
catcttgaccagaggagct

SEQ ID NO: 39239 - RNA, 19 nt, synthetic construct
  misc_feature 1..19: note = siRNA antisense sequence
  source 1..19: mol_type = other RNA
agctcctctggtcaagatg

SEQ ID NO: 39240 - RNA, 19 nt, synthetic construct
  misc_feature 1..19: note = siRNA sense sequence
  source 1..19: mol_type = other RNA
atcttgaccagaggagctg

SEQ ID NO: 39241 - RNA, 19 nt, synthetic construct
  misc_feature 1..19: note = siRNA antisense sequence
  source 1..19: mol_type = other RNA
cagctcctctggtcaagat

SEQ ID NO: 39242 - RNA, 19 nt, synthetic construct
  misc_feature 1..19: note = siRNA sense sequence
  source 1..19: mol_type = other RNA
gaccagaggagctgcctga

SEQ ID NO: 39243 - RNA, 19 nt, synthetic construct
  misc_feature 1..19: note = siRNA antisense sequence
  source 1..19: mol_type = other RNA
tcaggcagctcctctggtc

SEQ ID NO: 39244 - RNA, 19 nt, synthetic construct
  misc_feature 1..19: note = siRNA sense sequence
  source 1..19: mol_type = other RNA
accagaggagctgcctgac

SEQ ID NO: 39245 - RNA, 19 nt, synthetic construct
  misc_feature 1..19: note = siRNA antisense sequence
  source 1..19: mol_type = other RNA
gtcaggcagctcctctggt

SEQ ID NO: 39246 - RNA, 19 nt, synthetic construct
  misc_feature 1..19: note = siRNA sense sequence
  source 1..19: mol_type = other RNA
cagaggagctgcctgacag

SEQ ID NO: 39247 - RNA, 19 nt, synthetic construct
  misc_feature 1..19: note = siRNA antisense sequence
  source 1..19: mol_type = other RNA
ctgtcaggcagctcctctg

SEQ ID NO: 39248 - RNA, 19 nt, synthetic construct
  misc_feature 1..19: note = siRNA sense sequence
  source 1..19: mol_type = other RNA
agaggagctgcctgacaga

SEQ ID NO: 39249 - RNA, 19 nt, synthetic construct
  misc_feature 1..19: note = siRNA antisense sequence
  source 1..19: mol_type = other RNA
tctgtcaggcagctcctct

SEQ ID NO: 39250 - RNA, 19 nt, synthetic construct
  misc_feature 1..19: note = siRNA sense sequence
  source 1..19: mol_type = other RNA
ctacgtatgccttatcagt

SEQ ID NO: 39251 - RNA, 19 nt, synthetic construct
  misc_feature 1..19: note = siRNA antisense sequence
  source 1..19: mol_type = other RNA
actgataaggcatacgtag

SEQ ID NO: 39252 - RNA, 19 nt, synthetic construct
  misc_feature 1..19: note = siRNA sense sequence
  source 1..19: mol_type = other RNA
tacgtatgccttatcagtt

SEQ ID NO: 39253 - RNA, 19 nt, synthetic construct
  misc_feature 1..19: note = siRNA antisense sequence
  source 1..19: mol_type = other RNA
aactgataaggcatacgta

SEQ ID NO: 39254 - RNA, 19 nt, synthetic construct
  misc_feature 1..19: note = siRNA sense sequence
  source 1..19: mol_type = other RNA
acgtatgccttatcagttt

SEQ ID NO: 39255 - RNA, 19 nt, synthetic construct
  misc_feature 1..19: note = siRNA antisense sequence
  source 1..19: mol_type = other RNA
aaactgataaggcatacgt

SEQ ID NO: 39256 - RNA, 19 nt, synthetic construct
  misc_feature 1..19: note = siRNA sense sequence
  source 1..19: mol_type = other RNA
cgtatgccttatcagttta

SEQ ID NO: 39257 - RNA, 19 nt, synthetic construct
  misc_feature 1..19: note = siRNA antisense sequence
  source 1..19: mol_type = other RNA
taaactgataaggcatacg

SEQ ID NO: 39258 - RNA, 19 nt, synthetic construct
  misc_feature 1..19: note = siRNA sense sequence
  source 1..19: mol_type = other RNA
tgccttatcagtttaaatc

SEQ ID NO: 39259 - RNA, 19 nt, synthetic construct
  misc_feature 1..19: note = siRNA antisense sequence
  source 1..19: mol_type = other RNA
gatttaaactgataaggca

SEQ ID NO: 39260 - RNA, 19 nt, synthetic construct
  misc_feature 1..19: note = siRNA sense sequence
  source 1..19: mol_type = other RNA
gccttatcagtttaaatct

SEQ ID NO: 39261 - RNA, 19 nt, synthetic construct
  misc_feature 1..19: note = siRNA antisense sequence
  source 1..19: mol_type = other RNA
agatttaaactgataaggc

SEQ ID NO: 39262 - RNA, 19 nt, synthetic construct
  misc_feature 1..19: note = siRNA sense sequence
  source 1..19: mol_type = other RNA
tcagtttaaatcttcatcg

SEQ ID NO: 39263 - RNA, 19 nt, synthetic construct
  misc_feature 1..19: note = siRNA antisense sequence
  source 1..19: mol_type = other RNA
cgatgaagatttaaactga

SEQ ID NO: 39264 - RNA, 19 nt, synthetic construct
  misc_feature 1..19: note = siRNA sense sequence
  source 1..19: mol_type = other RNA
agtttaaatcttcatcgct

SEQ ID NO: 39265 - RNA, 19 nt, synthetic construct
  misc_feature 1..19: note = siRNA antisense sequence
  source 1..19: mol_type = other RNA
agcgatgaagatttaaact

SEQ ID NO: 39266 - RNA, 19 nt, synthetic construct
  misc_feature 1..19: note = siRNA sense sequence
  source 1..19: mol_type = other RNA
gtttaaatcttcatcgctc

SEQ ID NO: 39267 - RNA, 19 nt, synthetic construct
  misc_feature 1..19: note = siRNA antisense sequence
  source 1..19: mol_type = other RNA
gagcgatgaagatttaaac

SEQ ID NO: 39268 - RNA, 19 nt, synthetic construct
  misc_feature 1..19: note = siRNA sense sequence
  source 1..19: mol_type = other RNA
tttaaatcttcatcgctct

SEQ ID NO: 39269 - RNA, 19 nt, synthetic construct
  misc_feature 1..19: note = siRNA antisense sequence
  source 1..19: mol_type = other RNA
agagcgatgaagatttaaa

SEQ ID NO: 39270 - RNA, 19 nt, synthetic construct
  misc_feature 1..19: note = siRNA sense sequence
  source 1..19: mol_type = other RNA
ttaaatcttcatcgctctc

SEQ ID NO: 39271 - RNA, 19 nt, synthetic construct
  misc_feature 1..19: note = siRNA antisense sequence
  source 1..19: mol_type = other RNA
gagagcgatgaagatttaa

SEQ ID NO: 39272 - RNA, 19 nt, synthetic construct
  misc_feature 1..19: note = siRNA sense sequence
  source 1..19: mol_type = other RNA
taaatcttcatcgctctct

SEQ ID NO: 39273 - RNA, 19 nt, synthetic construct
  misc_feature 1..19: note = siRNA antisense sequence
  source 1..19: mol_type = other RNA
agagagcgatgaagattta

SEQ ID NO: 39274 - RNA, 19 nt, synthetic construct
  misc_feature 1..19: note = siRNA sense sequence
  source 1..19: mol_type = other RNA
aaatcttcatcgctctcta

SEQ ID NO: 39275 - RNA, 19 nt, synthetic construct
  misc_feature 1..19: note = siRNA antisense sequence
  source 1..19: mol_type = other RNA
tagagagcgatgaagattt

SEQ ID NO: 39276 - RNA, 19 nt, synthetic construct
  misc_feature 1..19: note = siRNA sense sequence
  source 1..19: mol_type = other RNA
aatcttcatcgctctctac

SEQ ID NO: 39277 - RNA, 19 nt, synthetic construct
  misc_feature 1..19: note = siRNA antisense sequence
  source 1..19: mol_type = other RNA
gtagagagcgatgaagatt

SEQ ID NO: 39278 - RNA, 19 nt, synthetic construct
  misc_feature 1..19: note = siRNA sense sequence
  source 1..19: mol_type = other RNA
atcttcatcgctctctaca

SEQ ID NO: 39279 - RNA, 19 nt, synthetic construct
  misc_feature 1..19: note = siRNA antisense sequence
  source 1..19: mol_type = other RNA
tgtagagagcgatgaagat

SEQ ID NO: 39280 - RNA, 19 nt, synthetic construct
  misc_feature 1..19: note = siRNA sense sequence
  source 1..19: mol_type = other RNA
caagcccaccacccttcta

SEQ ID NO: 39281 - RNA, 19 nt, synthetic construct
  misc_feature 1..19: note = siRNA antisense sequence
  source 1..19: mol_type = other RNA
tagaagggtggtgggcttg

SEQ ID NO: 39282 - RNA, 19 nt, synthetic construct
  misc_feature 1..19: note = siRNA sense sequence
  source 1..19: mol_type = other RNA
aagcccaccacccttctac

SEQ ID NO: 39283 - RNA, 19 nt, synthetic construct
  misc_feature 1..19: note = siRNA antisense sequence
  source 1..19: mol_type = other RNA
gtagaagggtggtgggctt

SEQ ID NO: 39284 - RNA, 19 nt, synthetic construct
  misc_feature 1..19: note = siRNA sense sequence
  source 1..19: mol_type = other RNA
cacccttctacctcctctg

SEQ ID NO: 39285 - RNA, 19 nt, synthetic construct
  misc_feature 1..19: note = siRNA antisense sequence
  source 1..19: mol_type = other RNA
cagaggaggtagaagggtg

SEQ ID NO: 39286 - RNA, 19 nt, synthetic construct
  misc_feature 1..19: note = siRNA sense sequence
  source 1..19: mol_type = other RNA
acccttctacctcctctgt

SEQ ID NO: 39287 - RNA, 19 nt, synthetic construct
  misc_feature 1..19: note = siRNA antisense sequence
  source 1..19: mol_type = other RNA
acagaggaggtagaagggt

SEQ ID NO: 39288 - RNA, 19 nt, synthetic construct
  misc_feature 1..19: note = siRNA sense sequence
  source 1..19: mol_type = other RNA
cccttctacctcctctgta

SEQ ID NO: 39289 - RNA, 19 nt, synthetic construct
  misc_feature 1..19: note = siRNA antisense sequence
  source 1..19: mol_type = other RNA
tacagaggaggtagaaggg

SEQ ID NO: 39290 - RNA, 19 nt, synthetic construct
  misc_feature 1..19: note = siRNA sense sequence
  source 1..19: mol_type = other RNA
aactgcagctattattttc

SEQ ID NO: 39291 - RNA, 19 nt, synthetic construct
  misc_feature 1..19: note = siRNA antisense sequence
  source 1..19: mol_type = other RNA
gaaaataatagctgcagtt

SEQ ID NO: 39292 - RNA, 19 nt, synthetic construct
  misc_feature 1..19: note = siRNA sense sequence
  source 1..19: mol_type = other RNA
actgcagctattattttcc

SEQ ID NO: 39293 - RNA, 19 nt, synthetic construct
  misc_feature 1..19: note = siRNA antisense sequence
  source 1..19: mol_type = other RNA
ggaaaataatagctgcagt

SEQ ID NO: 39294 - RNA, 19 nt, synthetic construct
  misc_feature 1..19: note = siRNA sense sequence
  source 1..19: mol_type = other RNA
ctgcagctattattttcca

SEQ ID NO: 39295 - RNA, 19 nt, synthetic construct
  misc_feature 1..19: note = siRNA antisense sequence
  source 1..19: mol_type = other RNA
tggaaaataatagctgcag

SEQ ID NO: 39296 - RNA, 19 nt, synthetic construct
  misc_feature 1..19: note = siRNA sense sequence
  source 1..19: mol_type = other RNA
tgcagctattattttccaa

SEQ ID NO: 39297 - RNA, 19 nt, synthetic construct
  misc_feature 1..19: note = siRNA antisense sequence
  source 1..19: mol_type = other RNA
ttggaaaataatagctgca

SEQ ID NO: 39298 - RNA, 19 nt, synthetic construct
  misc_feature 1..19: note = siRNA sense sequence
  source 1..19: mol_type = other RNA
aggtcaaaatttaatcctc

SEQ ID NO: 39299 - RNA, 19 nt, synthetic construct
  misc_feature 1..19: note = siRNA antisense sequence
  source 1..19: mol_type = other RNA
gaggattaaattttgacct

SEQ ID NO: 39300 - RNA, 19 nt, synthetic construct
  misc_feature 1..19: note = siRNA sense sequence
  source 1..19: mol_type = other RNA
aaatttaatcctcacttcc

SEQ ID NO: 39301 - RNA, 19 nt, synthetic construct
  misc_feature 1..19: note = siRNA antisense sequence
  source 1..19: mol_type = other RNA
ggaagtgaggattaaattt

SEQ ID NO: 39302 - RNA, 19 nt, synthetic construct
  misc_feature 1..19: note = siRNA sense sequence
  source 1..19: mol_type = other RNA
taatcctcacttcctgttt

SEQ ID NO: 39303 - RNA, 19 nt, synthetic construct
  misc_feature 1..19: note = siRNA antisense sequence
  source 1..19: mol_type = other RNA
aaacaggaagtgaggatta

SEQ ID NO: 39304 - RNA, 19 nt, synthetic construct
  misc_feature 1..19: note = siRNA sense sequence
  source 1..19: mol_type = other RNA
ctcacttcctgtttcagtt

SEQ ID NO: 39305 - RNA, 19 nt, synthetic construct
  misc_feature 1..19: note = siRNA antisense sequence
  source 1..19: mol_type = other RNA
aactgaaacaggaagtgag

SEQ ID NO: 39306 - RNA, 19 nt, synthetic construct
  misc_feature 1..19: note = siRNA sense sequence
  source 1..19: mol_type = other RNA
tcacttcctgtttcagtta

SEQ ID NO: 39307 - RNA, 19 nt, synthetic construct
  misc_feature 1..19: note = siRNA antisense sequence
  source 1..19: mol_type = other RNA
taactgaaacaggaagtga

SEQ ID NO: 39308 - RNA, 19 nt, synthetic construct
  misc_feature 1..19: note = siRNA sense sequence
  source 1..19: mol_type = other RNA
cacttcctgtttcagttaa

SEQ ID NO: 39309 - RNA, 19 nt, synthetic construct
  misc_feature 1..19: note = siRNA antisense sequence
  source 1..19: mol_type = other RNA
ttaactgaaacaggaagtg

SEQ ID NO: 39310 - RNA, 19 nt, synthetic construct
  misc_feature 1..19: note = siRNA sense sequence
  source 1..19: mol_type = other RNA
acttcctgtttcagttaac

SEQ ID NO: 39311 - RNA, 19 nt, synthetic construct
  misc_feature 1..19: note = siRNA antisense sequence
  source 1..19: mol_type = other RNA
gttaactgaaacaggaagt

SEQ ID NO: 39312 - RNA, 19 nt, synthetic construct
  misc_feature 1..19: note = siRNA sense sequence
  source 1..19: mol_type = other RNA
cttcctgtttcagttaact

SEQ ID NO: 39313 - RNA, 19 nt, synthetic construct
  misc_feature 1..19: note = siRNA antisense sequence
  source 1..19: mol_type = other RNA
agttaactgaaacaggaag

SEQ ID NO: 39314 - RNA, 19 nt, synthetic construct
  misc_feature 1..19: note = siRNA sense sequence
  source 1..19: mol_type = other RNA
ttcctgtttcagttaacta

SEQ ID NO: 39315 - RNA, 19 nt, synthetic construct
  misc_feature 1..19: note = siRNA antisense sequence
  source 1..19: mol_type = other RNA
tagttaactgaaacaggaa

SEQ ID NO: 39316 - RNA, 19 nt, synthetic construct
  misc_feature 1..19: note = siRNA sense sequence
  source 1..19: mol_type = other RNA
tcctgtttcagttaactat

SEQ ID NO: 39317 - RNA, 19 nt, synthetic construct
  misc_feature 1..19: note = siRNA antisense sequence
  source 1..19: mol_type = other RNA
atagttaactgaaacagga

SEQ ID NO: 39318 - RNA, 19 nt, synthetic construct
  misc_feature 1..19: note = siRNA sense sequence
  source 1..19: mol_type = other RNA
ttgctgcataataagtcat

SEQ ID NO: 39319 - RNA, 19 nt, synthetic construct
  misc_feature 1..19: note = siRNA antisense sequence
  source 1..19: mol_type = other RNA
atgacttattatgcagcaa

SEQ ID NO: 39320 - RNA, 19 nt, synthetic construct
  misc_feature 1..19: note = siRNA sense sequence
  source 1..19: mol_type = other RNA
atacttagtcacttaaagc

SEQ ID NO: 39321 - RNA, 19 nt, synthetic construct
  misc_feature 1..19: note = siRNA antisense sequence
  source 1..19: mol_type = other RNA
gctttaagtgactaagtat

SEQ ID NO: 39322 - RNA, 19 nt, synthetic construct
  misc_feature 1..19: note = siRNA sense sequence
  source 1..19: mol_type = other RNA
tacttagtcacttaaagca

SEQ ID NO: 39323 - RNA, 19 nt, synthetic construct
  misc_feature 1..19: note = siRNA antisense sequence
  source 1..19: mol_type = other RNA
tgctttaagtgactaagta

SEQ ID NO: 39324 - RNA, 19 nt, synthetic construct
  misc_feature 1..19: note = siRNA sense sequence
  source 1..19: mol_type = other RNA
caatggtctataaattctc

SEQ ID NO: 39325 - RNA, 19 nt, synthetic construct
  misc_feature 1..19: note = siRNA antisense sequence
  source 1..19: mol_type = other RNA
gagaatttatagaccattg

SEQ ID NO: 39326 - RNA, 19 nt, synthetic construct
  misc_feature 1..19: note = siRNA sense sequence
  source 1..19: mol_type = other RNA
tggtctataaattctcaag

SEQ ID NO: 39327 - RNA, 19 nt, synthetic construct
  misc_feature 1..19: note = siRNA antisense sequence
  source 1..19: mol_type = other RNA
cttgagaatttatagacca

SEQ ID NO: 39328 - RNA, 19 nt, synthetic construct
  misc_feature 1..19: note = siRNA sense sequence
  source 1..19: mol_type = other RNA
ggtctataaattctcaaga

SEQ ID NO: 39329 - RNA, 19 nt, synthetic construct
  misc_feature 1..19: note = siRNA antisense sequence
  source 1..19: mol_type = other RNA
tcttgagaatttatagacc

SEQ ID NO: 39330 - RNA, 19 nt, synthetic construct
  misc_feature 1..19: note = siRNA sense sequence
  source 1..19: mol_type = other RNA
tttgaggattgaataggta

SEQ ID NO: 39331 - RNA, 19 nt, synthetic construct
  misc_feature 1..19: note = siRNA antisense sequence
  source 1..19: mol_type = other RNA
tacctattcaatcctcaaa

SEQ ID NO: 39332 - RNA, 19 nt, synthetic construct
  misc_feature 1..19: note = siRNA sense sequence
  source 1..19: mol_type = other RNA
ccctattgcctgggctcat

SEQ ID NO: 39333 - RNA, 19 nt, synthetic construct
  misc_feature 1..19: note = siRNA antisense sequence
  source 1..19: mol_type = other RNA
atgagcccaggcaataggg

SEQ ID NO: 39334 - RNA, 19 nt, synthetic construct
  misc_feature 1..19: note = siRNA sense sequence
  source 1..19: mol_type = other RNA
cctattgcctgggctcatc

SEQ ID NO: 39335 - RNA, 19 nt, synthetic construct
  misc_feature 1..19: note = siRNA antisense sequence
  source 1..19: mol_type = other RNA
gatgagcccaggcaatagg

SEQ ID NO: 39336 - RNA, 19 nt, synthetic construct
  misc_feature 1..19: note = siRNA sense sequence
  source 1..19: mol_type = other RNA
ctattgcctgggctcatca

SEQ ID NO: 39337 - RNA, 19 nt, synthetic construct
  misc_feature 1..19: note = siRNA antisense sequence
  source 1..19: mol_type = other RNA
tgatgagcccaggcaatag

SEQ ID NO: 39338 - RNA, 19 nt, synthetic construct
  misc_feature 1..19: note = siRNA sense sequence
  source 1..19: mol_type = other RNA
tattgcctgggctcatcat

SEQ ID NO: 39339 - RNA, 19 nt, synthetic construct
  misc_feature 1..19: note = siRNA antisense sequence
  source 1..19: mol_type = other RNA
atgatgagcccaggcaata

SEQ ID NO: 39340 - RNA, 19 nt, synthetic construct
  misc_feature 1..19: note = siRNA sense sequence
  source 1..19: mol_type = other RNA
attgcctgggctcatcatc

SEQ ID NO: 39341 - RNA, 19 nt, synthetic construct
  misc_feature 1..19: note = siRNA antisense sequence
  source 1..19: mol_type = other RNA
gatgatgagcccaggcaat

SEQ ID NO: 39342 - RNA, 19 nt, synthetic construct
  misc_feature 1..19: note = siRNA sense sequence
  source 1..19: mol_type = other RNA
ttgcctgggctcatcatct

SEQ ID NO: 39343 - RNA, 19 nt, synthetic construct
  misc_feature 1..19: note = siRNA antisense sequence
  source 1..19: mol_type = other RNA
agatgatgagcccaggcaa

SEQ ID NO: 39344 - RNA, 19 nt, synthetic construct
  misc_feature 1..19: note = siRNA sense sequence
  source 1..19: mol_type = other RNA
tgcctgggctcatcatctg

SEQ ID NO: 39345 - RNA, 19 nt, synthetic construct
  misc_feature 1..19: note = siRNA antisense sequence
  source 1..19: mol_type = other RNA
cagatgatgagcccaggca

SEQ ID NO: 39346 - RNA, 19 nt, synthetic construct
  misc_feature 1..19: note = siRNA sense sequence
  source 1..19: mol_type = other RNA
tgggctcatcatctggtcc

SEQ ID NO: 39347 - RNA, 19 nt, synthetic construct
  misc_feature 1..19: note = siRNA antisense sequence
  source 1..19: mol_type = other RNA
ggaccagatgatgagccca

SEQ ID NO: 39348 - RNA, 19 nt, synthetic construct
  misc_feature 1..19: note = siRNA sense sequence
  source 1..19: mol_type = other RNA
gggctcatcatctggtccc

SEQ ID NO: 39349 - RNA, 19 nt, synthetic construct
  misc_feature 1..19: note = siRNA antisense sequence
  source 1..19: mol_type = other RNA
gggaccagatgatgagccc

SEQ ID NO: 39350 - RNA, 19 nt, synthetic construct
  misc_feature 1..19: note = siRNA sense sequence
  source 1..19: mol_type = other RNA
gctcatcatctggtccctc

SEQ ID NO: 39351 - RNA, 19 nt, synthetic construct
  misc_feature 1..19: note = siRNA antisense sequence
  source 1..19: mol_type = other RNA
gagggaccagatgatgagc

SEQ ID NO: 39352 - RNA, 19 nt, synthetic construct
  misc_feature 1..19: note = siRNA sense sequence
  source 1..19: mol_type = other RNA
ctcatcatctggtccctca

SEQ ID NO: 39353 - RNA, 19 nt, synthetic construct
  misc_feature 1..19: note = siRNA antisense sequence
  source 1..19: mol_type = other RNA
tgagggaccagatgatgag

SEQ ID NO: 39354 - RNA, 19 nt, synthetic construct
  misc_feature 1..19: note = siRNA sense sequence
  source 1..19: mol_type = other RNA
tcatcatctggtccctcaa

SEQ ID NO: 39355 - RNA, 19 nt, synthetic construct
  misc_feature 1..19: note = siRNA antisense sequence
  source 1..19: mol_type = other RNA
ttgagggaccagatgatga

SEQ ID NO: 39356 - RNA, 19 nt, synthetic construct
  misc_feature 1..19: note = siRNA sense sequence
  source 1..19: mol_type = other RNA
atcatctggtccctcaact

SEQ ID NO: 39357 - RNA, 19 nt, synthetic construct
  misc_feature 1..19: note = siRNA antisense sequence
  source 1..19: mol_type = other RNA
agttgagggaccagatgat

SEQ ID NO: 39358 - RNA, 19 nt, synthetic construct
  misc_feature 1..19: note = siRNA sense sequence
  source 1..19: mol_type = other RNA
tcatctggtccctcaactg

SEQ ID NO: 39359 - RNA, 19 nt, synthetic construct
  misc_feature 1..19: note = siRNA antisense sequence
  source 1..19: mol_type = other RNA
cagttgagggaccagatga

SEQ ID NO: 39360 - RNA, 19 nt, synthetic construct
  misc_feature 1..19: note = siRNA sense sequence
  source 1..19: mol_type = other RNA
catctggtccctcaactgg

SEQ ID NO: 39361 - RNA, 19 nt, synthetic construct
  misc_feature 1..19: note = siRNA antisense sequence
  source 1..19: mol_type = other RNA
ccagttgagggaccagatg

SEQ ID NO: 39362 - RNA, 19 nt, synthetic construct
  misc_feature 1..19: note = siRNA sense sequence
  source 1..19: mol_type = other RNA
atctggtccctcaactggg

SEQ ID NO: 39363 - RNA, 19 nt, synthetic construct
  misc_feature 1..19: note = siRNA antisense sequence
  source 1..19: mol_type = other RNA
cccagttgagggaccagat

SEQ ID NO: 39364 - RNA, 19 nt, synthetic construct
  misc_feature 1..19: note = siRNA sense sequence
  source 1..19: mol_type = other RNA
ggagtgtccaagctggctt

SEQ ID NO: 39365 - RNA, 19 nt, synthetic construct
  misc_feature 1..19: note = siRNA antisense sequence
  source 1..19: mol_type = other RNA
aagccagcttggacactcc

SEQ ID NO: 39366 - RNA, 19 nt, synthetic construct
  misc_feature 1..19: note = siRNA sense sequence
  source 1..19: mol_type = other RNA
gagtgtccaagctggcttt

SEQ ID NO: 39367 - RNA, 19 nt, synthetic construct
  misc_feature 1..19: note = siRNA antisense sequence
  source 1..19: mol_type = other RNA
aaagccagcttggacactc

SEQ ID NO: 39368 - RNA, 19 nt, synthetic construct
  misc_feature 1..19: note = siRNA sense sequence
  source 1..19: mol_type = other RNA
agtgtccaagctggctttc

SEQ ID NO: 39369 - RNA, 19 nt, synthetic construct
  misc_feature 1..19: note = siRNA antisense sequence
  source 1..19: mol_type = other RNA
gaaagccagcttggacact

SEQ ID NO: 39370 - RNA, 19 nt, synthetic construct
  misc_feature 1..19: note = siRNA sense sequence
  source 1..19: mol_type = other RNA
gtgtccaagctggctttcc

SEQ ID NO: 39371 - RNA, 19 nt, synthetic construct
  misc_feature 1..19: note = siRNA antisense sequence
  source 1..19: mol_type = other RNA
ggaaagccagcttggacac

SEQ ID NO: 39372 - RNA, 19 nt, synthetic construct
  misc_feature 1..19: note = siRNA sense sequence
  source 1..19: mol_type = other RNA
aagctggctttcctcacac

SEQ ID NO: 39373 - RNA, 19 nt, synthetic construct
  misc_feature 1..19: note = siRNA antisense sequence
  source 1..19: mol_type = other RNA
gtgtgaggaaagccagctt

SEQ ID NO: 39374 - RNA, 19 nt, synthetic construct
  misc_feature 1..19: note = siRNA sense sequence
  source 1..19: mol_type = other RNA
agctggctttcctcacacg

SEQ ID NO: 39375 - RNA, 19 nt, synthetic construct
  misc_feature 1..19: note = siRNA antisense sequence
  source 1..19: mol_type = other RNA
cgtgtgaggaaagccagct

SEQ ID NO: 39376 - RNA, 19 nt, synthetic construct
  misc_feature 1..19: note = siRNA sense sequence
  source 1..19: mol_type = other RNA
gctggctttcctcacacga

SEQ ID NO: 39377 - RNA, 19 nt, synthetic construct
  misc_feature 1..19: note = siRNA antisense sequence
  source 1..19: mol_type = other RNA
tcgtgtgaggaaagccagc

SEQ ID NO: 39378 - RNA, 19 nt, synthetic construct
  misc_feature 1..19: note = siRNA sense sequence
  source 1..19: mol_type = other RNA
ctggctttcctcacacgag

SEQ ID NO: 39379 - RNA, 19 nt, synthetic construct
  misc_feature 1..19: note = siRNA antisense sequence
  source 1..19: mol_type = other RNA
ctcgtgtgaggaaagccag

SEQ ID NO: 39380 - RNA, 19 nt, synthetic construct
  misc_feature 1..19: note = siRNA sense sequence
  source 1..19: mol_type = other RNA
tggctttcctcacacgagt

SEQ ID NO: 39381 - RNA, 19 nt, synthetic construct
  misc_feature 1..19: note = siRNA antisense sequence
  source 1..19: mol_type = other RNA
actcgtgtgaggaaagcca

SEQ ID NO: 39382 - RNA, 19 nt, synthetic construct
  misc_feature 1..19: note = siRNA sense sequence
  source 1..19: mol_type = other RNA
ggctttcctcacacgagtg

SEQ ID NO: 39383 - RNA, 19 nt, synthetic construct
  misc_feature 1..19: note = siRNA antisense sequence
  source 1..19: mol_type = other RNA
cactcgtgtgaggaaagcc

SEQ ID NO: 39384 - RNA, 19 nt, synthetic construct
  misc_feature 1..19: note = siRNA sense sequence
  source 1..19: mol_type = other RNA
gctttcctcacacgagtgg

SEQ ID NO: 39385 - RNA, 19 nt, synthetic construct
  misc_feature 1..19: note = siRNA antisense sequence
  source 1..19: mol_type = other RNA
ccactcgtgtgaggaaagc

SEQ ID NO: 39386 - RNA, 19 nt, synthetic construct
  misc_feature 1..19: note = siRNA sense sequence
  source 1..19: mol_type = other RNA
ctttcctcacacgagtgga

SEQ ID NO: 39387 - RNA, 19 nt, synthetic construct
  misc_feature 1..19: note = siRNA antisense sequence
  source 1..19: mol_type = other RNA
tccactcgtgtgaggaaag

SEQ ID NO: 39388 - RNA, 19 nt, synthetic construct
  misc_feature 1..19: note = siRNA sense sequence
  source 1..19: mol_type = other RNA
tcctcacacgagtggaagt

SEQ ID NO: 39389 - RNA, 19 nt, synthetic construct
  misc_feature 1..19: note = siRNA antisense sequence
  source 1..19: mol_type = other RNA
acttccactcgtgtgagga

SEQ ID NO: 39390 - RNA, 19 nt, synthetic construct
  misc_feature 1..19: note = siRNA sense sequence
  source 1..19: mol_type = other RNA
cctcacacgagtggaagtt

SEQ ID NO: 39391 - RNA, 19 nt, synthetic construct
  misc_feature 1..19: note = siRNA antisense sequence
  source 1..19: mol_type = other RNA
aacttccactcgtgtgagg

SEQ ID NO: 39392 - RNA, 19 nt, synthetic construct
  misc_feature 1..19: note = siRNA sense sequence
  source 1..19: mol_type = other RNA
ctcacacgagtggaagttc

SEQ ID NO: 39393 - RNA, 19 nt, synthetic construct
  misc_feature 1..19: note = siRNA antisense sequence
  source 1..19: mol_type = other RNA
gaacttccactcgtgtgag

SEQ ID NO: 39394 - RNA, 19 nt, synthetic construct
  misc_feature 1..19: note = siRNA sense sequence
  source 1..19: mol_type = other RNA
cacgagtggaagttcatgc

SEQ ID NO: 39395 - RNA, 19 nt, synthetic construct
  misc_feature 1..19: note = siRNA antisense sequence
  source 1..19: mol_type = other RNA
gcatgaacttccactcgtg

SEQ ID NO: 39396 - RNA, 19 nt, synthetic construct
  misc_feature 1..19: note = siRNA sense sequence
  source 1..19: mol_type = other RNA
acgagtggaagttcatgct

SEQ ID NO: 39397 - RNA, 19 nt, synthetic construct
  misc_feature 1..19: note = siRNA antisense sequence
  source 1..19: mol_type = other RNA
agcatgaacttccactcgt

SEQ ID NO: 39398 - RNA, 19 nt, synthetic construct
  misc_feature 1..19: note = siRNA sense sequence
  source 1..19: mol_type = other RNA
cgagtggaagttcatgctg

SEQ ID NO: 39399 - RNA, 19 nt, synthetic construct
  misc_feature 1..19: note = siRNA antisense sequence
  source 1..19: mol_type = other RNA
cagcatgaacttccactcg

SEQ ID NO: 39400 - RNA, 19 nt, synthetic construct
  misc_feature 1..19: note = siRNA sense sequence
  source 1..19: mol_type = other RNA
gagtggaagttcatgctgt

SEQ ID NO: 39401 - RNA, 19 nt, synthetic construct
  misc_feature 1..19: note = siRNA antisense sequence
  source 1..19: mol_type = other RNA
acagcatgaacttccactc

SEQ ID NO: 39402 - RNA, 19 nt, synthetic construct
  misc_feature 1..19: note = siRNA sense sequence
  source 1..19: mol_type = other RNA
agtggaagttcatgctgtc

SEQ ID NO: 39403 - RNA, 19 nt, synthetic construct
  misc_feature 1..19: note = siRNA antisense sequence
  source 1..19: mol_type = other RNA
gacagcatgaacttccact

SEQ ID NO: 39404 - RNA, 19 nt, synthetic construct
  misc_feature 1..19: note = siRNA sense sequence
  source 1..19: mol_type = other RNA
gtggaagttcatgctgtca

SEQ ID NO: 39405 - RNA, 19 nt, synthetic construct
  misc_feature 1..19: note = siRNA antisense sequence
  source 1..19: mol_type = other RNA
tgacagcatgaacttccac

SEQ ID NO: 39406 - RNA, 19 nt, synthetic construct
  misc_feature 1..19: note = siRNA sense sequence
  source 1..19: mol_type = other RNA
tggaagttcatgctgtcag

SEQ ID NO: 39407 - RNA, 19 nt, synthetic construct
  misc_feature 1..19: note = siRNA antisense sequence
  source 1..19: mol_type = other RNA
ctgacagcatgaacttcca

SEQ ID NO: 39408 - RNA, 19 nt, synthetic construct
  misc_feature 1..19: note = siRNA sense sequence
  source 1..19: mol_type = other RNA
ggaagttcatgctgtcagc

SEQ ID NO: 39409 - RNA, 19 nt, synthetic construct
  misc_feature 1..19: note = siRNA antisense sequence
  source 1..19: mol_type = other RNA
gctgacagcatgaacttcc

SEQ ID NO: 39410 - RNA, 19 nt, synthetic construct
  misc_feature 1..19: note = siRNA sense sequence
  source 1..19: mol_type = other RNA
gaagttcatgctgtcagct

SEQ ID NO: 39411 - RNA, 19 nt, synthetic construct
  misc_feature 1..19: note = siRNA antisense sequence
  source 1..19: mol_type = other RNA
agctgacagcatgaacttc

SEQ ID NO: 39412 - RNA, 19 nt, synthetic construct
  misc_feature 1..19: note = siRNA sense sequence
  source 1..19: mol_type = other RNA
aagttcatgctgtcagcta

SEQ ID NO: 39413 - RNA, 19 nt, synthetic construct
  misc_feature 1..19: note = siRNA antisense sequence
  source 1..19: mol_type = other RNA
tagctgacagcatgaactt

SEQ ID NO: 39414 - RNA, 19 nt, synthetic construct
  misc_feature 1..19: note = siRNA sense sequence
  source 1..19: mol_type = other RNA
agttcatgctgtcagctaa

SEQ ID NO: 39415 - RNA, 19 nt, synthetic construct
  misc_feature 1..19: note = siRNA antisense sequence
  source 1..19: mol_type = other RNA
ttagctgacagcatgaact

SEQ ID NO: 39416 - RNA, 19 nt, synthetic construct
  misc_feature 1..19: note = siRNA sense sequence
  source 1..19: mol_type = other RNA
gttcatgctgtcagctaaa

SEQ ID NO: 39417 - RNA, 19 nt, synthetic construct
  misc_feature 1..19: note = siRNA antisense sequence
  source 1..19: mol_type = other RNA
tttagctgacagcatgaac

SEQ ID NO: 39418 - RNA, 19 nt, synthetic construct
  misc_feature 1..19: note = siRNA sense sequence
  source 1..19: mol_type = other RNA
ttcatgctgtcagctaaag

SEQ ID NO: 39419 - RNA, 19 nt, synthetic construct
  misc_feature 1..19: note = siRNA antisense sequence
  source 1..19: mol_type = other RNA
ctttagctgacagcatgaa

SEQ ID NO: 39420 - RNA, 19 nt, synthetic construct
  misc_feature 1..19: note = siRNA sense sequence
  source 1..19: mol_type = other RNA
tcatgctgtcagctaaagc

SEQ ID NO: 39421 - RNA, 19 nt, synthetic construct
  misc_feature 1..19: note = siRNA antisense sequence
  source 1..19: mol_type = other RNA
gctttagctgacagcatga

SEQ ID NO: 39422 - RNA, 19 nt, synthetic construct
  misc_feature 1..19: note = siRNA sense sequence
  source 1..19: mol_type = other RNA
tgtcagctaaagcaccaat

SEQ ID NO: 39423 - RNA, 19 nt, synthetic construct
  misc_feature 1..19: note = siRNA antisense sequence
  source 1..19: mol_type = other RNA
attggtgctttagctgaca

SEQ ID NO: 39424 - RNA, 19 nt, synthetic construct
  misc_feature 1..19: note = siRNA sense sequence
  source 1..19: mol_type = other RNA
gtcagctaaagcaccaatt

SEQ ID NO: 39425 - RNA, 19 nt, synthetic construct
  misc_feature 1..19: note = siRNA antisense sequence
  source 1..19: mol_type = other RNA
aattggtgctttagctgac

SEQ ID NO: 39426 - RNA, 19 nt, synthetic construct
  misc_feature 1..19: note = siRNA sense sequence
  source 1..19: mol_type = other RNA
gctaaagcaccaattctgt

SEQ ID NO: 39427 - RNA, 19 nt, synthetic construct
  misc_feature 1..19: note = siRNA antisense sequence
  source 1..19: mol_type = other RNA
acagaattggtgctttagc

SEQ ID NO: 39428 - RNA, 19 nt, synthetic construct
  misc_feature 1..19: note = siRNA sense sequence
  source 1..19: mol_type = other RNA
ctaaagcaccaattctgtt

SEQ ID NO: 39429 - RNA, 19 nt, synthetic construct
  misc_feature 1..19: note = siRNA antisense sequence
  source 1..19: mol_type = other RNA
aacagaattggtgctttag

SEQ ID NO: 39430 - RNA, 19 nt, synthetic construct
  misc_feature 1..19: note = siRNA sense sequence
  source 1..19: mol_type = other RNA
taaagcaccaattctgttc

SEQ ID NO: 39431 - RNA, 19 nt, synthetic construct
  misc_feature 1..19: note = siRNA antisense sequence
  source 1..19: mol_type = other RNA
gaacagaattggtgcttta

SEQ ID NO: 39432 - RNA, 19 nt, synthetic construct
  misc_feature 1..19: note = siRNA sense sequence
  source 1..19: mol_type = other RNA
aagcaccaattctgttcca

SEQ ID NO: 39433 - RNA, 19 nt, synthetic construct
  misc_feature 1..19: note = siRNA antisense sequence
  source 1..19: mol_type = other RNA
tggaacagaattggtgctt

SEQ ID NO: 39434 - RNA, 19 nt, synthetic construct
  misc_feature 1..19: note = siRNA sense sequence
  source 1..19: mol_type = other RNA
agcaccaattctgttccac

SEQ ID NO: 39435 - RNA, 19 nt, synthetic construct
  misc_feature 1..19: note = siRNA antisense sequence
  source 1..19: mol_type = other RNA
gtggaacagaattggtgct

SEQ ID NO: 39436 - RNA, 19 nt, synthetic construct
  misc_feature 1..19: note = siRNA sense sequence
  source 1..19: mol_type = other RNA
tggcctcttatcctctgtt

SEQ ID NO: 39437 - RNA, 19 nt, synthetic construct
  misc_feature 1..19: note = siRNA antisense sequence
  source 1..19: mol_type = other RNA
aacagaggataagaggcca

SEQ ID NO: 39438 - RNA, 19 nt, synthetic construct
  misc_feature 1..19: note = siRNA sense sequence
  source 1..19: mol_type = other RNA
ggcctcttatcctctgtta

SEQ ID NO: 39439 - RNA, 19 nt, synthetic construct
  misc_feature 1..19: note = siRNA antisense sequence
  source 1..19: mol_type = other RNA
taacagaggataagaggcc

SEQ ID NO: 39440 - RNA, 19 nt, synthetic construct
  misc_feature 1..19: note = siRNA sense sequence
  source 1..19: mol_type = other RNA
ttatcctctgttaagcaac

SEQ ID NO: 39441 - RNA, 19 nt, synthetic construct
  misc_feature 1..19: note = siRNA antisense sequence
  source 1..19: mol_type = other RNA
gttgcttaacagaggataa

SEQ ID NO: 39442 - RNA, 19 nt, synthetic construct
  misc_feature 1..19: note = siRNA sense sequence
  source 1..19: mol_type = other RNA
acactgggcttcttcacat

SEQ ID NO: 39443 - RNA, 19 nt, synthetic construct
  misc_feature 1..19: note = siRNA antisense sequence
  source 1..19: mol_type = other RNA
atgtgaagaagcccagtgt

SEQ ID NO: 39444 - RNA, 19 nt, synthetic construct
  misc_feature 1..19: note = siRNA sense sequence
  source 1..19: mol_type = other RNA
cactgggcttcttcacatc

SEQ ID NO: 39445 - RNA, 19 nt, synthetic construct
  misc_feature 1..19: note = siRNA antisense sequence
  source 1..19: mol_type = other RNA
gatgtgaagaagcccagtg

SEQ ID NO: 39446 - RNA, 19 nt, synthetic construct
  misc_feature 1..19: note = siRNA sense sequence
  source 1..19: mol_type = other RNA
actgggcttcttcacatcc

SEQ ID NO: 39447 - RNA, 19 nt, synthetic construct
  misc_feature 1..19: note = siRNA antisense sequence
  source 1..19: mol_type = other RNA
ggatgtgaagaagcccagt

SEQ ID NO: 39448 - RNA, 19 nt, synthetic construct
  misc_feature 1..19: note = siRNA sense sequence
  source 1..19: mol_type = other RNA
ctgggcttcttcacatcct

SEQ ID NO: 39449 - RNA, 19 nt, synthetic construct
  misc_feature 1..19: note = siRNA antisense sequence
  source 1..19: mol_type = other RNA
aggatgtgaagaagcccag

SEQ ID NO: 39450 - RNA, 19 nt, synthetic construct
  misc_feature 1..19: note = siRNA sense sequence
  source 1..19: mol_type = other RNA
atgttctcagctttcaaaa

SEQ ID NO: 39451 - RNA, 19 nt, synthetic construct
  misc_feature 1..19: note = siRNA antisense sequence
  source 1..19: mol_type = other RNA
ttttgaaagctgagaacat

SEQ ID NO: 39452 - RNA, 19 nt, synthetic construct
  misc_feature 1..19: note = siRNA sense sequence
  source 1..19: mol_type = other RNA
acaggtaaaatggaatctg

SEQ ID NO: 39453 - RNA, 19 nt, synthetic construct
  misc_feature 1..19: note = siRNA antisense sequence
  source 1..19: mol_type = other RNA
cagattccattttacctgt

SEQ ID NO: 39454 - RNA, 19 nt, synthetic construct
  misc_feature 1..19: note = siRNA sense sequence
  source 1..19: mol_type = other RNA
caggtaaaatggaatctgc

SEQ ID NO: 39455 - RNA, 19 nt, synthetic construct
  misc_feature 1..19: note = siRNA antisense sequence
  source 1..19: mol_type = other RNA
gcagattccattttacctg

SEQ ID NO: 39456 - RNA, 19 nt, synthetic construct
  misc_feature 1..19: note = siRNA sense sequence
  source 1..19: mol_type = other RNA
aggtaaaatggaatctgca

SEQ ID NO: 39457 - RNA, 19 nt, synthetic construct
  misc_feature 1..19: note = siRNA antisense sequence
  source 1..19: mol_type = other RNA
tgcagattccattttacct

SEQ ID NO: 39458 - RNA, 19 nt, synthetic construct
  misc_feature 1..19: note = siRNA sense sequence
  source 1..19: mol_type = other RNA
ggtaaaatggaatctgcaa

SEQ ID NO: 39459 - RNA, 19 nt, synthetic construct
  misc_feature 1..19: note = siRNA antisense sequence
  source 1..19: mol_type = other RNA
ttgcagattccattttacc

SEQ ID NO: 39460 - RNA, 19 nt, synthetic construct
  misc_feature 1..19: note = siRNA sense sequence
  source 1..19: mol_type = other RNA
gtaaaatggaatctgcaaa

SEQ ID NO: 39461 - RNA, 19 nt, synthetic construct
  misc_feature 1..19: note = siRNA antisense sequence
  source 1..19: mol_type = other RNA
tttgcagattccattttac

SEQ ID NO: 39462 - RNA, 19 nt, synthetic construct
  misc_feature 1..19: note = siRNA sense sequence
  source 1..19: mol_type = other RNA
taaaatggaatctgcaaag

SEQ ID NO: 39463 - RNA, 19 nt, synthetic construct
  misc_feature 1..19: note = siRNA antisense sequence
  source 1..19: mol_type = other RNA
ctttgcagattccatttta

SEQ ID NO: 39464 - RNA, 19 nt, synthetic construct
  misc_feature 1..19: note = siRNA sense sequence
  source 1..19: mol_type = other RNA
aaaatggaatctgcaaagg

SEQ ID NO: 39465 - RNA, 19 nt, synthetic construct
  misc_feature 1..19: note = siRNA antisense sequence
  source 1..19: mol_type = other RNA
cctttgcagattccatttt

SEQ ID NO: 39466 - RNA, 19 nt, synthetic construct
  misc_feature 1..19: note = siRNA sense sequence
  source 1..19: mol_type = other RNA
aaatggaatctgcaaaggc

SEQ ID NO: 39467 - RNA, 19 nt, synthetic construct
  misc_feature 1..19: note = siRNA antisense sequence
  source 1..19: mol_type = other RNA
gcctttgcagattccattt

SEQ ID NO: 39468 - RNA, 19 nt, synthetic construct
  misc_feature 1..19: note = siRNA sense sequence
  source 1..19: mol_type = other RNA
aatggaatctgcaaaggcc

SEQ ID NO: 39469 - RNA, 19 nt, synthetic construct
  misc_feature 1..19: note = siRNA antisense sequence
  source 1..19: mol_type = other RNA
ggcctttgcagattccatt

SEQ ID NO: 39470 - RNA, 19 nt, synthetic construct
  misc_feature 1..19: note = siRNA sense sequence
  source 1..19: mol_type = other RNA
atggaatctgcaaaggcct

SEQ ID NO: 39471 - RNA, 19 nt, synthetic construct
  misc_feature 1..19: note = siRNA antisense sequence
  source 1..19: mol_type = other RNA
aggcctttgcagattccat

SEQ ID NO: 39472 - RNA, 19 nt, synthetic construct
  misc_feature 1..19: note = siRNA sense sequence
  source 1..19: mol_type = other RNA
tggaatctgcaaaggcctt

SEQ ID NO: 39473 - RNA, 19 nt, synthetic construct
  misc_feature 1..19: note = siRNA antisense sequence
  source 1..19: mol_type = other RNA
aaggcctttgcagattcca

SEQ ID NO: 39474 - RNA, 19 nt, synthetic construct
  misc_feature 1..19: note = siRNA sense sequence
  source 1..19: mol_type = other RNA
aatctgcaaaggcctttta

SEQ ID NO: 39475 - RNA, 19 nt, synthetic construct
  misc_feature 1..19: note = siRNA antisense sequence
  source 1..19: mol_type = other RNA
taaaaggcctttgcagatt

SEQ ID NO: 39476 - RNA, 19 nt, synthetic construct
  misc_feature 1..19: note = siRNA sense sequence
  source 1..19: mol_type = other RNA
atctgcaaaggccttttaa

SEQ ID NO: 39477 - RNA, 19 nt, synthetic construct
  misc_feature 1..19: note = siRNA antisense sequence
  source 1..19: mol_type = other RNA
ttaaaaggcctttgcagat

SEQ ID NO: 39478 - RNA, 19 nt, synthetic construct
  misc_feature 1..19: note = siRNA sense sequence
  source 1..19: mol_type = other RNA
tctgcaaaggccttttaag

SEQ ID NO: 39479 - RNA, 19 nt, synthetic construct
  misc_feature 1..19: note = siRNA antisense sequence
  source 1..19: mol_type = other RNA
cttaaaaggcctttgcaga

SEQ ID NO: 39480 - RNA, 19 nt, synthetic construct
  misc_feature 1..19: note = siRNA sense sequence
  source 1..19: mol_type = other RNA
ctgcaaaggccttttaagg

SEQ ID NO: 39481 - RNA, 19 nt, synthetic construct
  misc_feature 1..19: note = siRNA antisense sequence
  source 1..19: mol_type = other RNA
ccttaaaaggcctttgcag

SEQ ID NO: 39482 - RNA, 19 nt, synthetic construct
  misc_feature 1..19: note = siRNA sense sequence
  source 1..19: mol_type = other RNA
ctagccttagaagtcatag

SEQ ID NO: 39483 - RNA, 19 nt, synthetic construct
  misc_feature 1..19: note = siRNA antisense sequence
  source 1..19: mol_type = other RNA
ctatgacttctaaggctag

SEQ ID NO: 39484 - RNA, 19 nt, synthetic construct
  misc_feature 1..19: note = siRNA sense sequence
  source 1..19: mol_type = other RNA
tagccttagaagtcatagt

SEQ ID NO: 39485 - RNA, 19 nt, synthetic construct
  misc_feature 1..19: note = siRNA antisense sequence
  source 1..19: mol_type = other RNA
actatgacttctaaggcta

SEQ ID NO: 39486 - RNA, 19 nt, synthetic construct
  misc_feature 1..19: note = siRNA sense sequence
  source 1..19: mol_type = other RNA
agccttagaagtcatagta

SEQ ID NO: 39487 - RNA, 19 nt, synthetic construct
  misc_feature 1..19: note = siRNA antisense sequence
  source 1..19: mol_type = other RNA
tactatgacttctaaggct

SEQ ID NO: 39488 - RNA, 19 nt, synthetic construct
  misc_feature 1..19: note = siRNA sense sequence
  source 1..19: mol_type = other RNA
ccttagaagtcatagtatc

SEQ ID NO: 39489 - RNA, 19 nt, synthetic construct
  misc_feature 1..19: note = siRNA antisense sequence
  source 1..19: mol_type = other RNA
gatactatgacttctaagg

SEQ ID NO: 39490 - RNA, 19 nt, synthetic construct
  misc_feature 1..19: note = siRNA sense sequence
  source 1..19: mol_type = other RNA
cttagaagtcatagtatca

SEQ ID NO: 39491 - RNA, 19 nt, synthetic construct
  misc_feature 1..19: note = siRNA antisense sequence
  source 1..19: mol_type = other RNA
tgatactatgacttctaag

SEQ ID NO: 39492 - RNA, 19 nt, synthetic construct
  misc_feature 1..19: note = siRNA sense sequence
  source 1..19: mol_type = other RNA
agtcatagtatcatttgtg

SEQ ID NO: 39493 - RNA, 19 nt, synthetic construct
  misc_feature 1..19: note = siRNA antisense sequence
  source 1..19: mol_type = other RNA
cacaaatgatactatgact

SEQ ID NO: 39494 - RNA, 19 nt, synthetic construct
  misc_feature 1..19: note = siRNA sense sequence
  source 1..19: mol_type = other RNA
gtcatagtatcatttgtgc

SEQ ID NO: 39495 - RNA, 19 nt, synthetic construct
  misc_feature 1..19: note = siRNA antisense sequence
  source 1..19: mol_type = other RNA
gcacaaatgatactatgac

SEQ ID NO: 39496 - RNA, 19 nt, synthetic construct
  misc_feature 1..19: note = siRNA sense sequence
  source 1..19: mol_type = other RNA
tcatagtatcatttgtgct

SEQ ID NO: 39497 - RNA, 19 nt, synthetic construct
  misc_feature 1..19: note = siRNA antisense sequence
  source 1..19: mol_type = other RNA
agcacaaatgatactatga

SEQ ID NO: 39498 - RNA, 19 nt, synthetic construct
  misc_feature 1..19: note = siRNA sense sequence
  source 1..19: mol_type = other RNA
catttgtgctgcattctat

SEQ ID NO: 39499 - RNA, 19 nt, synthetic construct
  misc_feature 1..19: note = siRNA antisense sequence
  source 1..19: mol_type = other RNA
atagaatgcagcacaaatg

SEQ ID NO: 39500 - RNA, 19 nt, synthetic construct
  misc_feature 1..19: note = siRNA sense sequence
  source 1..19: mol_type = other RNA
atcctagattcaatgggtg

SEQ ID NO: 39501 - RNA, 19 nt, synthetic construct
  misc_feature 1..19: note = siRNA antisense sequence
  source 1..19: mol_type = other RNA
cacccattgaatctaggat

SEQ ID NO: 39502 - RNA, 19 nt, synthetic construct
  misc_feature 1..19: note = siRNA sense sequence
  source 1..19: mol_type = other RNA
tcctagattcaatgggtgg

SEQ ID NO: 39503 - RNA, 19 nt, synthetic construct
  misc_feature 1..19: note = siRNA antisense sequence
  source 1..19: mol_type = other RNA
ccacccattgaatctagga

SEQ ID NO: 39504 - RNA, 19 nt, synthetic construct
  misc_feature 1..19: note = siRNA sense sequence
  source 1..19: mol_type = other RNA
cctagattcaatgggtgga

SEQ ID NO: 39505 - RNA, 19 nt, synthetic construct
  misc_feature 1..19: note = siRNA antisense sequence
  source 1..19: mol_type = other RNA
tccacccattgaatctagg

SEQ ID NO: 39506 - RNA, 19 nt, synthetic construct
  misc_feature 1..19: note = siRNA sense sequence
  source 1..19: mol_type = other RNA
ctagattcaatgggtggaa

SEQ ID NO: 39507 - RNA, 19 nt, synthetic construct
  misc_feature 1..19: note = siRNA antisense sequence
  source 1..19: mol_type = other RNA
ttccacccattgaatctag

SEQ ID NO: 39508 - RNA, 19 nt, synthetic construct
  misc_feature 1..19: note = siRNA sense sequence
  source 1..19: mol_type = other RNA
aataaaagtcaaagtcgtg

SEQ ID NO: 39509 - RNA, 19 nt, synthetic construct
  misc_feature 1..19: note = siRNA antisense sequence
  source 1..19: mol_type = other RNA
cacgactttgacttttatt

SEQ ID NO: 39510 - RNA, 19 nt, synthetic construct
  misc_feature 1..19: note = siRNA sense sequence
  source 1..19: mol_type = other RNA
ataaaagtcaaagtcgtgt

SEQ ID NO: 39511 - RNA, 19 nt, synthetic construct
  misc_feature 1..19: note = siRNA antisense sequence
  source 1..19: mol_type = other RNA
acacgactttgacttttat

SEQ ID NO: 39512 - RNA, 19 nt, synthetic construct
  misc_feature 1..19: note = siRNA sense sequence
  source 1..19: mol_type = other RNA
taaaagtcaaagtcgtgtt

SEQ ID NO: 39513 - RNA, 19 nt, synthetic construct
  misc_feature 1..19: note = siRNA antisense sequence
  source 1..19: mol_type = other RNA
aacacgactttgactttta

SEQ ID NO: 39514 - RNA, 19 nt, synthetic construct
  misc_feature 1..19: note = siRNA sense sequence
  source 1..19: mol_type = other RNA
aaaagtcaaagtcgtgttg

SEQ ID NO: 39515 - RNA, 19 nt, synthetic construct
  misc_feature 1..19: note = siRNA antisense sequence
  source 1..19: mol_type = other RNA
caacacgactttgactttt

SEQ ID NO: 39516 - RNA, 19 nt, synthetic construct
  misc_feature 1..19: note = siRNA sense sequence
  source 1..19: mol_type = other RNA
aaagtcaaagtcgtgttgc

SEQ ID NO: 39517 - RNA, 19 nt, synthetic construct
  misc_feature 1..19: note = siRNA antisense sequence
  source 1..19: mol_type = other RNA
gcaacacgactttgacttt

SEQ ID NO: 39518 - RNA, 19 nt, synthetic construct
  misc_feature 1..19: note = siRNA sense sequence
  source 1..19: mol_type = other RNA
aagtcaaagtcgtgttgca

SEQ ID NO: 39519 - RNA, 19 nt, synthetic construct
  misc_feature 1..19: note = siRNA antisense sequence
  source 1..19: mol_type = other RNA
tgcaacacgactttgactt

SEQ ID NO: 39520 - RNA, 19 nt, synthetic construct
  misc_feature 1..19: note = siRNA sense sequence
  source 1..19: mol_type = other RNA
agtcaaagtcgtgttgcaa

SEQ ID NO: 39521 - RNA, 19 nt, synthetic construct
  misc_feature 1..19: note = siRNA antisense sequence
  source 1..19: mol_type = other RNA
ttgcaacacgactttgact

SEQ ID NO: 39522 - RNA, 19 nt, synthetic construct
  misc_feature 1..19: note = siRNA sense sequence
  source 1..19: mol_type = other RNA
gtcaaagtcgtgttgcaaa

SEQ ID NO: 39523 - RNA, 19 nt, synthetic construct
  misc_feature 1..19: note = siRNA antisense sequence
  source 1..19: mol_type = other RNA
tttgcaacacgactttgac

SEQ ID NO: 39524 - RNA, 19 nt, synthetic construct
  misc_feature 1..19: note = siRNA sense sequence
  source 1..19: mol_type = other RNA
tcaaagtcgtgttgcaaaa

SEQ ID NO: 39525 - RNA, 19 nt, synthetic construct
  misc_feature 1..19: note = siRNA antisense sequence
  source 1..19: mol_type = other RNA
ttttgcaacacgactttga

SEQ ID NO: 39526 - RNA, 19 nt, synthetic construct
  misc_feature 1..19: note = siRNA sense sequence
  source 1..19: mol_type = other RNA
caaagtcgtgttgcaaaag

SEQ ID NO: 39527 - RNA, 19 nt, synthetic construct
  misc_feature 1..19: note = siRNA antisense sequence
  source 1..19: mol_type = other RNA
cttttgcaacacgactttg

SEQ ID NO: 39528 - RNA, 19 nt, synthetic construct
  misc_feature 1..19: note = siRNA sense sequence
  source 1..19: mol_type = other RNA
aaagtcgtgttgcaaaagt

SEQ ID NO: 39529 - RNA, 19 nt, synthetic construct
  misc_feature 1..19: note = siRNA antisense sequence
  source 1..19: mol_type = other RNA
acttttgcaacacgacttt

SEQ ID NO: 39530 - RNA, 19 nt, synthetic construct
  misc_feature 1..19: note = siRNA sense sequence
  source 1..19: mol_type = other RNA
aagtcgtgttgcaaaagtg

SEQ ID NO: 39531 - RNA, 19 nt, synthetic construct
  misc_feature 1..19: note = siRNA antisense sequence
  source 1..19: mol_type = other RNA
cacttttgcaacacgactt

SEQ ID NO: 39532 - RNA, 19 nt, synthetic construct
  misc_feature 1..19: note = siRNA sense sequence
  source 1..19: mol_type = other RNA
agtcgtgttgcaaaagtgt

SEQ ID NO: 39533 - RNA, 19 nt, synthetic construct
  misc_feature 1..19: note = siRNA antisense sequence
  source 1..19: mol_type = other RNA
acacttttgcaacacgact

SEQ ID NO: 39534 - RNA, 19 nt, synthetic construct
  misc_feature 1..19: note = siRNA sense sequence
  source 1..19: mol_type = other RNA
gtcgtgttgcaaaagtgta

SEQ ID NO: 39535 - RNA, 19 nt, synthetic construct
  misc_feature 1..19: note = siRNA antisense sequence
  source 1..19: mol_type = other RNA
tacacttttgcaacacgac

SEQ ID NO: 39536 - RNA, 19 nt, synthetic construct
  misc_feature 1..19: note = siRNA sense sequence
  source 1..19: mol_type = other RNA
tcgtgttgcaaaagtgtac

SEQ ID NO: 39537 - RNA, 19 nt, synthetic construct
  misc_feature 1..19: note = siRNA antisense sequence
  source 1..19: mol_type = other RNA
gtacacttttgcaacacga

SEQ ID NO: 39538 - RNA, 19 nt, synthetic construct
  misc_feature 1..19: note = siRNA sense sequence
  source 1..19: mol_type = other RNA
catcgaccacccttgcaaa

SEQ ID NO: 39539 - RNA, 19 nt, synthetic construct
  misc_feature 1..19: note = siRNA antisense sequence
  source 1..19: mol_type = other RNA
tttgcaagggtggtcgatg

SEQ ID NO: 39540 - RNA, 19 nt, synthetic construct
  misc_feature 1..19: note = siRNA sense sequence
  source 1..19: mol_type = other RNA
tcaatactgggctgctcag

SEQ ID NO: 39541 - RNA, 19 nt, synthetic construct
  misc_feature 1..19: note = siRNA antisense sequence
  source 1..19: mol_type = other RNA
ctgagcagcccagtattga

SEQ ID NO: 39542 - RNA, 19 nt, synthetic construct
  misc_feature 1..19: note = siRNA sense sequence
  source 1..19: mol_type = other RNA
tgctgcctagggaatggtc

SEQ ID NO: 39543 - RNA, 19 nt, synthetic construct
  misc_feature 1..19: note = siRNA antisense sequence
  source 1..19: mol_type = other RNA
gaccattccctaggcagca

SEQ ID NO: 39544 - RNA, 19 nt, synthetic construct
  misc_feature 1..19: note = siRNA sense sequence
  source 1..19: mol_type = other RNA
gctgcctagggaatggtcg

SEQ ID NO: 39545 - RNA, 19 nt, synthetic construct
  misc_feature 1..19: note = siRNA antisense sequence
  source 1..19: mol_type = other RNA
cgaccattccctaggcagc

SEQ ID NO: 39546 - RNA, 19 nt, synthetic construct
  misc_feature 1..19: note = siRNA sense sequence
  source 1..19: mol_type = other RNA
ctgcctagggaatggtcgc

SEQ ID NO: 39547 - RNA, 19 nt, synthetic construct
  misc_feature 1..19: note = siRNA antisense sequence
  source 1..19: mol_type = other RNA
gcgaccattccctaggcag

SEQ ID NO: 39548 - RNA, 19 nt, synthetic construct
  misc_feature 1..19: note = siRNA sense sequence
  source 1..19: mol_type = other RNA
gcctagggaatggtcgctc

SEQ ID NO: 39549 - RNA, 19 nt, synthetic construct
  misc_feature 1..19: note = siRNA antisense sequence
  source 1..19: mol_type = other RNA
gagcgaccattccctaggc

SEQ ID NO: 39550 - RNA, 19 nt, synthetic construct
  misc_feature 1..19: note = siRNA sense sequence
  source 1..19: mol_type = other RNA
cctagggaatggtcgctct

SEQ ID NO: 39551 - RNA, 19 nt, synthetic construct
  misc_feature 1..19: note = siRNA antisense sequence
  source 1..19: mol_type = other RNA
agagcgaccattccctagg

SEQ ID NO: 39552 - RNA, 19 nt, synthetic construct
  misc_feature 1..19: note = siRNA sense sequence
  source 1..19: mol_type = other RNA
ctagggaatggtcgctctt

SEQ ID NO: 39553 - RNA, 19 nt, synthetic construct
  misc_feature 1..19: note = siRNA antisense sequence
  source 1..19: mol_type = other RNA
aagagcgaccattccctag

SEQ ID NO: 39554 - RNA, 19 nt, synthetic construct
  misc_feature 1..19: note = siRNA sense sequence
  source 1..19: mol_type = other RNA
tagggaatggtcgctcttc

SEQ ID NO: 39555 - RNA, 19 nt, synthetic construct
  misc_feature 1..19: note = siRNA antisense sequence
  source 1..19: mol_type = other RNA
gaagagcgaccattcccta

SEQ ID NO: 39556 - RNA, 19 nt, synthetic construct
  misc_feature 1..19: note = siRNA sense sequence
  source 1..19: mol_type = other RNA
tggtcgctcttcctcattt

SEQ ID NO: 39557 - RNA, 19 nt, synthetic construct
  misc_feature 1..19: note = siRNA antisense sequence
  source 1..19: mol_type = other RNA
aaatgaggaagagcgacca

SEQ ID NO: 39558 - RNA, 19 nt, synthetic construct
  misc_feature 1..19: note = siRNA sense sequence
  source 1..19: mol_type = other RNA
ggtcgctcttcctcatttt

SEQ ID NO: 39559 - RNA, 19 nt, synthetic construct
  misc_feature 1..19: note = siRNA antisense sequence
  source 1..19: mol_type = other RNA
aaaatgaggaagagcgacc

SEQ ID NO: 39560 - RNA, 19 nt, synthetic construct
  misc_feature 1..19: note = siRNA sense sequence
  source 1..19: mol_type = other RNA
acctctccttctggatcca

SEQ ID NO: 39561 - RNA, 19 nt, synthetic construct
  misc_feature 1..19: note = siRNA antisense sequence
  source 1..19: mol_type = other RNA
tggatccagaaggagaggt

SEQ ID NO: 39562 - RNA, 19 nt, synthetic construct
  misc_feature 1..19: note = siRNA sense sequence
  source 1..19: mol_type = other RNA
cctctccttctggatccac

SEQ ID NO: 39563 - RNA, 19 nt, synthetic construct
  misc_feature 1..19: note = siRNA antisense sequence
  source 1..19: mol_type = other RNA
gtggatccagaaggagagg

SEQ ID NO: 39564 - RNA, 19 nt, synthetic construct
  misc_feature 1..19: note = siRNA sense sequence
  source 1..19: mol_type = other RNA
ctctccttctggatccacc

SEQ ID NO: 39565 - RNA, 19 nt, synthetic construct
  misc_feature 1..19: note = siRNA antisense sequence
  source 1..19: mol_type = other RNA
ggtggatccagaaggagag

SEQ ID NO: 39566 - RNA, 19 nt, synthetic construct
  misc_feature 1..19: note = siRNA sense sequence
  source 1..19: mol_type = other RNA
ccttctggatccaccctgt

SEQ ID NO: 39567 - RNA, 19 nt, synthetic construct
  misc_feature 1..19: note = siRNA antisense sequence
  source 1..19: mol_type = other RNA
acagggtggatccagaagg

SEQ ID NO: 39568 - RNA, 19 nt, synthetic construct
  misc_feature 1..19: note = siRNA sense sequence
  source 1..19: mol_type = other RNA
cttctggatccaccctgtc

SEQ ID NO: 39569 - RNA, 19 nt, synthetic construct
  misc_feature 1..19: note = siRNA antisense sequence
  source 1..19: mol_type = other RNA
gacagggtggatccagaag

SEQ ID NO: 39570 - RNA, 19 nt, synthetic construct
  misc_feature 1..19: note = siRNA sense sequence
  source 1..19: mol_type = other RNA
ttctggatccaccctgtct

SEQ ID NO: 39571 - RNA, 19 nt, synthetic construct
  misc_feature 1..19: note = siRNA antisense sequence
  source 1..19: mol_type = other RNA
agacagggtggatccagaa

SEQ ID NO: 39572 - RNA, 19 nt, synthetic construct
  misc_feature 1..19: note = siRNA sense sequence
  source 1..19: mol_type = other RNA
tctggatccaccctgtcta

SEQ ID NO: 39573 - RNA, 19 nt, synthetic construct
  misc_feature 1..19: note = siRNA antisense sequence
  source 1..19: mol_type = other RNA
tagacagggtggatccaga

SEQ ID NO: 39574 - RNA, 19 nt, synthetic construct
  misc_feature 1..19: note = siRNA sense sequence
  source 1..19: mol_type = other RNA
ctggatccaccctgtctac

SEQ ID NO: 39575 - RNA, 19 nt, synthetic construct
  misc_feature 1..19: note = siRNA antisense sequence
  source 1..19: mol_type = other RNA
gtagacagggtggatccag

SEQ ID NO: 39576 - RNA, 19 nt, synthetic construct
  misc_feature 1..19: note = siRNA sense sequence
  source 1..19: mol_type = other RNA
tccaccctgtctacctgct

SEQ ID NO: 39577 - RNA, 19 nt, synthetic construct
  misc_feature 1..19: note = siRNA antisense sequence
  source 1..19: mol_type = other RNA
agcaggtagacagggtgga

SEQ ID NO: 39578 - RNA, 19 nt, synthetic construct
  misc_feature 1..19: note = siRNA sense sequence
  source 1..19: mol_type = other RNA
ccaccctgtctacctgctc

SEQ ID NO: 39579 - RNA, 19 nt, synthetic construct
  misc_feature 1..19: note = siRNA antisense sequence
  source 1..19: mol_type = other RNA
gagcaggtagacagggtgg

SEQ ID NO: 39580 - RNA, 19 nt, synthetic construct
  misc_feature 1..19: note = siRNA sense sequence
  source 1..19: mol_type = other RNA
caccctgtctacctgctca

SEQ ID NO: 39581 - RNA, 19 nt, synthetic construct
  misc_feature 1..19: note = siRNA antisense sequence
  source 1..19: mol_type = other RNA
tgagcaggtagacagggtg

SEQ ID NO: 39582 - RNA, 19 nt, synthetic construct
  misc_feature 1..19: note = siRNA sense sequence
  source 1..19: mol_type = other RNA
accctgtctacctgctcag

SEQ ID NO: 39583 - RNA, 19 nt, synthetic construct
  misc_feature 1..19: note = siRNA antisense sequence
  source 1..19: mol_type = other RNA
ctgagcaggtagacagggt

SEQ ID NO: 39584 - RNA, 19 nt, synthetic construct
  misc_feature 1..19: note = siRNA sense sequence
  source 1..19: mol_type = other RNA
ccctgtctacctgctcaga

SEQ ID NO: 39585 - RNA, 19 nt, synthetic construct
  misc_feature 1..19: note = siRNA antisense sequence
  source 1..19: mol_type = other RNA
tctgagcaggtagacaggg

SEQ ID NO: 39586 - RNA, 19 nt, synthetic construct
  misc_feature 1..19: note = siRNA sense sequence
  source 1..19: mol_type = other RNA
attctactccctctcctgt

SEQ ID NO: 39587 - RNA, 19 nt, synthetic construct
  misc_feature 1..19: note = siRNA antisense sequence
  source 1..19: mol_type = other RNA
acaggagagggagtagaat

SEQ ID NO: 39588 - RNA, 19 nt, synthetic construct
  misc_feature 1..19: note = siRNA sense sequence
  source 1..19: mol_type = other RNA
ttctactccctctcctgtg

SEQ ID NO: 39589 - RNA, 19 nt, synthetic construct
  misc_feature 1..19: note = siRNA antisense sequence
  source 1..19: mol_type = other RNA
cacaggagagggagtagaa

SEQ ID NO: 39590 - RNA, 19 nt, synthetic construct
  misc_feature 1..19: note = siRNA sense sequence
  source 1..19: mol_type = other RNA
atcaggatttctcttgtta

SEQ ID NO: 39591 - RNA, 19 nt, synthetic construct
  misc_feature 1..19: note = siRNA antisense sequence
  source 1..19: mol_type = other RNA
taacaagagaaatcctgat

SEQ ID NO: 39592 - RNA, 19 nt, synthetic construct
  misc_feature 1..19: note = siRNA sense sequence
  source 1..19: mol_type = other RNA
gttactgtttctttcttgc

SEQ ID NO: 39593 - RNA, 19 nt, synthetic construct
  misc_feature 1..19: note = siRNA antisense sequence
  source 1..19: mol_type = other RNA
gcaagaaagaaacagtaac

SEQ ID NO: 39594 - RNA, 19 nt, synthetic construct
  misc_feature 1..19: note = siRNA sense sequence
  source 1..19: mol_type = other RNA
tttctttcttgccatcatt

SEQ ID NO: 39595 - RNA, 19 nt, synthetic construct
  misc_feature 1..19: note = siRNA antisense sequence
  source 1..19: mol_type = other RNA
aatgatggcaagaaagaaa

SEQ ID NO: 39596 - RNA, 19 nt, synthetic construct
  misc_feature 1..19: note = siRNA sense sequence
  source 1..19: mol_type = other RNA
tctttcttgccatcattta

SEQ ID NO: 39597 - RNA, 19 nt, synthetic construct
  misc_feature 1..19: note = siRNA antisense sequence
  source 1..19: mol_type = other RNA
taaatgatggcaagaaaga

SEQ ID NO: 39598 - RNA, 19 nt, synthetic construct
  misc_feature 1..19: note = siRNA sense sequence
  source 1..19: mol_type = other RNA
tttcttgccatcatttagc

SEQ ID NO: 39599 - RNA, 19 nt, synthetic construct
  misc_feature 1..19: note = siRNA antisense sequence
  source 1..19: mol_type = other RNA
gctaaatgatggcaagaaa

SEQ ID NO: 39600 - RNA, 19 nt, synthetic construct
  misc_feature 1..19: note = siRNA sense sequence
  source 1..19: mol_type = other RNA
ttcttgccatcatttagcc

SEQ ID NO: 39601 - RNA, 19 nt, synthetic construct
  misc_feature 1..19: note = siRNA antisense sequence
  source 1..19: mol_type = other RNA
ggctaaatgatggcaagaa

SEQ ID NO: 39602 - RNA, 19 nt, synthetic construct
  misc_feature 1..19: note = siRNA sense sequence
  source 1..19: mol_type = other RNA
gccatcatttagccatatg

SEQ ID NO: 39603 - RNA, 19 nt, synthetic construct
  misc_feature 1..19: note = siRNA antisense sequence
  source 1..19: mol_type = other RNA
catatggctaaatgatggc

SEQ ID NO: 39604 - RNA, 19 nt, synthetic construct
  misc_feature 1..19: note = siRNA sense sequence
  source 1..19: mol_type = other RNA
ccatcatttagccatatgc

SEQ ID NO: 39605 - RNA, 19 nt, synthetic construct
  misc_feature 1..19: note = siRNA antisense sequence
  source 1..19: mol_type = other RNA
gcatatggctaaatgatgg

SEQ ID NO: 39606 - RNA, 19 nt, synthetic construct
  misc_feature 1..19: note = siRNA sense sequence
  source 1..19: mol_type = other RNA
gattgcctccatgataaat

SEQ ID NO: 39607 - RNA, 19 nt, synthetic construct
  misc_feature 1..19: note = siRNA antisense sequence
  source 1..19: mol_type = other RNA
atttatcatggaggcaatc

SEQ ID NO: 39608 - RNA, 19 nt, synthetic construct
  misc_feature 1..19: note = siRNA sense sequence
  source 1..19: mol_type = other RNA
attgcctccatgataaatt

SEQ ID NO: 39609 - RNA, 19 nt, synthetic construct
  misc_feature 1..19: note = siRNA antisense sequence
  source 1..19: mol_type = other RNA
aatttatcatggaggcaat

SEQ ID NO: 39610 - RNA, 19 nt, synthetic construct
  misc_feature 1..19: note = siRNA sense sequence
  source 1..19: mol_type = other RNA
tgcctccatgataaatttg

SEQ ID NO: 39611 - RNA, 19 nt, synthetic construct
  misc_feature 1..19: note = siRNA antisense sequence
  source 1..19: mol_type = other RNA
caaatttatcatggaggca

SEQ ID NO: 39612 - RNA, 19 nt, synthetic construct
  misc_feature 1..19: note = siRNA sense sequence
  source 1..19: mol_type = other RNA
gcctccatgataaatttgg

SEQ ID NO: 39613 - RNA, 19 nt, synthetic construct
  misc_feature 1..19: note = siRNA antisense sequence
  source 1..19: mol_type = other RNA
ccaaatttatcatggaggc

SEQ ID NO: 39614 - RNA, 19 nt, synthetic construct
  misc_feature 1..19: note = siRNA sense sequence
  source 1..19: mol_type = other RNA
ccatgataaatttggacac

SEQ ID NO: 39615 - RNA, 19 nt, synthetic construct
  misc_feature 1..19: note = siRNA antisense sequence
  source 1..19: mol_type = other RNA
gtgtccaaatttatcatgg

SEQ ID NO: 39616 - RNA, 19 nt, synthetic construct
  misc_feature 1..19: note = siRNA sense sequence
  source 1..19: mol_type = other RNA
tctcaagcccttaatggtt

SEQ ID NO: 39617 - RNA, 19 nt, synthetic construct
  misc_feature 1..19: note = siRNA antisense sequence
  source 1..19: mol_type = other RNA
aaccattaagggcttgaga

SEQ ID NO: 39618 - RNA, 19 nt, synthetic construct
  misc_feature 1..19: note = siRNA sense sequence
  source 1..19: mol_type = other RNA
ctcaagcccttaatggttt

SEQ ID NO: 39619 - RNA, 19 nt, synthetic construct
  misc_feature 1..19: note = siRNA antisense sequence
  source 1..19: mol_type = other RNA
aaaccattaagggcttgag

SEQ ID NO: 39620 - RNA, 19 nt, synthetic construct
  misc_feature 1..19: note = siRNA sense sequence
  source 1..19: mol_type = other RNA
agcccttaatggtttgtca

SEQ ID NO: 39621 - RNA, 19 nt, synthetic construct
  misc_feature 1..19: note = siRNA antisense sequence
  source 1..19: mol_type = other RNA
tgacaaaccattaagggct

SEQ ID NO: 39622 - RNA, 19 nt, synthetic construct
  misc_feature 1..19: note = siRNA sense sequence
  source 1..19: mol_type = other RNA
atggtttgtcattgccctg

SEQ ID NO: 39623 - RNA, 19 nt, synthetic construct
  misc_feature 1..19: note = siRNA antisense sequence
  source 1..19: mol_type = other RNA
cagggcaatgacaaaccat

SEQ ID NO: 39624 - RNA, 19 nt, synthetic construct
  misc_feature 1..19: note = siRNA sense sequence
  source 1..19: mol_type = other RNA
tggtttgtcattgccctga

SEQ ID NO: 39625 - RNA, 19 nt, synthetic construct
  misc_feature 1..19: note = siRNA antisense sequence
  source 1..19: mol_type = other RNA
tcagggcaatgacaaacca

SEQ ID NO: 39626 - RNA, 19 nt, synthetic construct
  misc_feature 1..19: note = siRNA sense sequence
  source 1..19: mol_type = other RNA
ggtttgtcattgccctgaa

SEQ ID NO: 39627 - RNA, 19 nt, synthetic construct
  misc_feature 1..19: note = siRNA antisense sequence
  source 1..19: mol_type = other RNA
ttcagggcaatgacaaacc

SEQ ID NO: 39628 - RNA, 19 nt, synthetic construct
  misc_feature 1..19: note = siRNA sense sequence
  source 1..19: mol_type = other RNA
acactgcccatctccctca

SEQ ID NO: 39629 - RNA, 19 nt, synthetic construct
  misc_feature 1..19: note = siRNA antisense sequence
  source 1..19: mol_type = other RNA
tgagggagatgggcagtgt

SEQ ID NO: 39630 - RNA, 19 nt, synthetic construct
  misc_feature 1..19: note = siRNA sense sequence
  source 1..19: mol_type = other RNA
cactgcccatctccctcat

SEQ ID NO: 39631 - RNA, 19 nt, synthetic construct
  misc_feature 1..19: note = siRNA antisense sequence
  source 1..19: mol_type = other RNA
atgagggagatgggcagtg

SEQ ID NO: 39632 - RNA, 19 nt, synthetic construct
  misc_feature 1..19: note = siRNA sense sequence
  source 1..19: mol_type = other RNA
actgcccatctccctcatt

SEQ ID NO: 39633 - RNA, 19 nt, synthetic construct
  misc_feature 1..19: note = siRNA antisense sequence
  source 1..19: mol_type = other RNA
aatgagggagatgggcagt

SEQ ID NO: 39634 - RNA, 19 nt, synthetic construct
  misc_feature 1..19: note = siRNA sense sequence
  source 1..19: mol_type = other RNA
ctgcccatctccctcattt

SEQ ID NO: 39635 - RNA, 19 nt, synthetic construct
  misc_feature 1..19: note = siRNA antisense sequence
  source 1..19: mol_type = other RNA
aaatgagggagatgggcag

SEQ ID NO: 39636 - RNA, 19 nt, synthetic construct
  misc_feature 1..19: note = siRNA sense sequence
  source 1..19: mol_type = other RNA
tgcccatctccctcatttt

SEQ ID NO: 39637 - RNA, 19 nt, synthetic construct
  misc_feature 1..19: note = siRNA antisense sequence
  source 1..19: mol_type = other RNA
aaaatgagggagatgggca

SEQ ID NO: 39638 - RNA, 19 nt, synthetic construct
  misc_feature 1..19: note = siRNA sense sequence
  source 1..19: mol_type = other RNA
ctcattcttgcctcctatt

SEQ ID NO: 39639 - RNA, 19 nt, synthetic construct
  misc_feature 1..19: note = siRNA antisense sequence
  source 1..19: mol_type = other RNA
aataggaggcaagaatgag

SEQ ID NO: 39640 - RNA, 19 nt, synthetic construct
  misc_feature 1..19: note = siRNA sense sequence
  source 1..19: mol_type = other RNA
tcattcttgcctcctattc

SEQ ID NO: 39641 - RNA, 19 nt, synthetic construct
  misc_feature 1..19: note = siRNA antisense sequence
  source 1..19: mol_type = other RNA
gaataggaggcaagaatga

SEQ ID NO: 39642 - RNA, 19 nt, synthetic construct
  misc_feature 1..19: note = siRNA sense sequence
  source 1..19: mol_type = other RNA
cattcttgcctcctattct

SEQ ID NO: 39643 - RNA, 19 nt, synthetic construct
  misc_feature 1..19: note = siRNA antisense sequence
  source 1..19: mol_type = other RNA
agaataggaggcaagaatg

SEQ ID NO: 39644 - RNA, 19 nt, synthetic construct
  misc_feature 1..19: note = siRNA sense sequence
  source 1..19: mol_type = other RNA
attcttgcctcctattctt

SEQ ID NO: 39645 - RNA, 19 nt, synthetic construct
  misc_feature 1..19: note = siRNA antisense sequence
  source 1..19: mol_type = other RNA
aagaataggaggcaagaat

SEQ ID NO: 39646 - RNA, 19 nt, synthetic construct
  misc_feature 1..19: note = siRNA sense sequence
  source 1..19: mol_type = other RNA
tctttggtttctgtgacac

SEQ ID NO: 39647 - RNA, 19 nt, synthetic construct
  misc_feature 1..19: note = siRNA antisense sequence
  source 1..19: mol_type = other RNA
gtgtcacagaaaccaaaga

SEQ ID NO: 39648 - RNA, 19 nt, synthetic construct
  misc_feature 1..19: note = siRNA sense sequence
  source 1..19: mol_type = other RNA
gctgttttctgattcttgc

SEQ ID NO: 39649 - RNA, 19 nt, synthetic construct
  misc_feature 1..19: note = siRNA antisense sequence
  source 1..19: mol_type = other RNA
gcaagaatcagaaaacagc

SEQ ID NO: 39650 - RNA, 19 nt, synthetic construct
  misc_feature 1..19: note = siRNA sense sequence
  source 1..19: mol_type = other RNA
tgttttctgattcttgctc

SEQ ID NO: 39651 - RNA, 19 nt, synthetic construct
  misc_feature 1..19: note = siRNA antisense sequence
  source 1..19: mol_type = other RNA
gagcaagaatcagaaaaca

SEQ ID NO: 39652 - RNA, 19 nt, synthetic construct
  misc_feature 1..19: note = siRNA sense sequence
  source 1..19: mol_type = other RNA
tttctgattcttgctccct

SEQ ID NO: 39653 - RNA, 19 nt, synthetic construct
  misc_feature 1..19: note = siRNA antisense sequence
  source 1..19: mol_type = other RNA
agggagcaagaatcagaaa

SEQ ID NO: 39654 - RNA, 19 nt, synthetic construct
  misc_feature 1..19: note = siRNA sense sequence
  source 1..19: mol_type = other RNA
tctgattcttgctcccttt

SEQ ID NO: 39655 - RNA, 19 nt, synthetic construct
  misc_feature 1..19: note = siRNA antisense sequence
  source 1..19: mol_type = other RNA
aaagggagcaagaatcaga

SEQ ID NO: 39656 - RNA, 19 nt, synthetic construct
  misc_feature 1..19: note = siRNA sense sequence
  source 1..19: mol_type = other RNA
attcttgctccctttctga

SEQ ID NO: 39657 - RNA, 19 nt, synthetic construct
  misc_feature 1..19: note = siRNA antisense sequence
  source 1..19: mol_type = other RNA
tcagaaagggagcaagaat

SEQ ID NO: 39658 - RNA, 19 nt, synthetic construct
  misc_feature 1..19: note = siRNA sense sequence
  source 1..19: mol_type = other RNA
ttcttgctccctttctgat

SEQ ID NO: 39659 - RNA, 19 nt, synthetic construct
  misc_feature 1..19: note = siRNA antisense sequence
  source 1..19: mol_type = other RNA
atcagaaagggagcaagaa

SEQ ID NO: 39660 - RNA, 19 nt, synthetic construct
  misc_feature 1..19: note = siRNA sense sequence
  source 1..19: mol_type = other RNA
tcttgctccctttctgatt

SEQ ID NO: 39661 - RNA, 19 nt, synthetic construct
  misc_feature 1..19: note = siRNA antisense sequence
  source 1..19: mol_type = other RNA
aatcagaaagggagcaaga

SEQ ID NO: 39662 - RNA, 19 nt, synthetic construct
  misc_feature 1..19: note = siRNA sense sequence
  source 1..19: mol_type = other RNA
cttgctccctttctgatta

SEQ ID NO: 39663 - RNA, 19 nt, synthetic construct
  misc_feature 1..19: note = siRNA antisense sequence
  source 1..19: mol_type = other RNA
taatcagaaagggagcaag

SEQ ID NO: 39664 - RNA, 19 nt, synthetic construct
  misc_feature 1..19: note = siRNA sense sequence
  source 1..19: mol_type = other RNA
ttgctccctttctgattac

SEQ ID NO: 39665 - RNA, 19 nt, synthetic construct
  misc_feature 1..19: note = siRNA antisense sequence
  source 1..19: mol_type = other RNA
gtaatcagaaagggagcaa

SEQ ID NO: 39666 - RNA, 19 nt, synthetic construct
  misc_feature 1..19: note = siRNA sense sequence
  source 1..19: mol_type = other RNA
tgctccctttctgattacc

SEQ ID NO: 39667 - RNA, 19 nt, synthetic construct
  misc_feature 1..19: note = siRNA antisense sequence
  source 1..19: mol_type = other RNA
ggtaatcagaaagggagca

SEQ ID NO: 39668 - RNA, 19 nt, synthetic construct
  misc_feature 1..19: note = siRNA sense sequence
  source 1..19: mol_type = other RNA
gctccctttctgattaccc

SEQ ID NO: 39669 - RNA, 19 nt, synthetic construct
  misc_feature 1..19: note = siRNA antisense sequence
  source 1..19: mol_type = other RNA
gggtaatcagaaagggagc

SEQ ID NO: 39670 - RNA, 19 nt, synthetic construct
  misc_feature 1..19: note = siRNA sense sequence
  source 1..19: mol_type = other RNA
ctccctttctgattaccct

SEQ ID NO: 39671 - RNA, 19 nt, synthetic construct
  misc_feature 1..19: note = siRNA antisense sequence
  source 1..19: mol_type = other RNA
agggtaatcagaaagggag

SEQ ID NO: 39672 - RNA, 19 nt, synthetic construct
  misc_feature 1..19: note = siRNA sense sequence
  source 1..19: mol_type = other RNA
tccctttctgattaccctt

SEQ ID NO: 39673 - RNA, 19 nt, synthetic construct
  misc_feature 1..19: note = siRNA antisense sequence
  source 1..19: mol_type = other RNA
aagggtaatcagaaaggga

SEQ ID NO: 39674 - RNA, 19 nt, synthetic construct
  misc_feature 1..19: note = siRNA sense sequence
  source 1..19: mol_type = other RNA
ccctttctgattacccttg

SEQ ID NO: 39675 - RNA, 19 nt, synthetic construct
  misc_feature 1..19: note = siRNA antisense sequence
  source 1..19: mol_type = other RNA
caagggtaatcagaaaggg

SEQ ID NO: 39676 - RNA, 19 nt, synthetic construct
  misc_feature 1..19: note = siRNA sense sequence
  source 1..19: mol_type = other RNA
tctgattacccttgcctag

SEQ ID NO: 39677 - RNA, 19 nt, synthetic construct
  misc_feature 1..19: note = siRNA antisense sequence
  source 1..19: mol_type = other RNA
ctaggcaagggtaatcaga

SEQ ID NO: 39678 - RNA, 19 nt, synthetic construct
  misc_feature 1..19: note = siRNA sense sequence
  source 1..19: mol_type = other RNA
ctgattacccttgcctagt

SEQ ID NO: 39679 - RNA, 19 nt, synthetic construct
  misc_feature 1..19: note = siRNA antisense sequence
  source 1..19: mol_type = other RNA
actaggcaagggtaatcag

SEQ ID NO: 39680 - RNA, 19 nt, synthetic construct
  misc_feature 1..19: note = siRNA sense sequence
  source 1..19: mol_type = other RNA
ttacccttgcctagttttc

SEQ ID NO: 39681 - RNA, 19 nt, synthetic construct
  misc_feature 1..19: note = siRNA antisense sequence
  source 1..19: mol_type = other RNA
gaaaactaggcaagggtaa

SEQ ID NO: 39682 - RNA, 19 nt, synthetic construct
  misc_feature 1..19: note = siRNA sense sequence
  source 1..19: mol_type = other RNA
tacccttgcctagttttct

SEQ ID NO: 39683 - RNA, 19 nt, synthetic construct
  misc_feature 1..19: note = siRNA antisense sequence
  source 1..19: mol_type = other RNA
agaaaactaggcaagggta

SEQ ID NO: 39684 - RNA, 19 nt, synthetic construct
  misc_feature 1..19: note = siRNA sense sequence
  source 1..19: mol_type = other RNA
acccttgcctagttttctt

SEQ ID NO: 39685 - RNA, 19 nt, synthetic construct
  misc_feature 1..19: note = siRNA antisense sequence
  source 1..19: mol_type = other RNA
aagaaaactaggcaagggt

SEQ ID NO: 39686 - RNA, 19 nt, synthetic construct
  misc_feature 1..19: note = siRNA sense sequence
  source 1..19: mol_type = other RNA
cccttgcctagttttcttc

SEQ ID NO: 39687 - RNA, 19 nt, synthetic construct
  misc_feature 1..19: note = siRNA antisense sequence
  source 1..19: mol_type = other RNA
gaagaaaactaggcaaggg

SEQ ID NO: 39688 - RNA, 19 nt, synthetic construct
  misc_feature 1..19: note = siRNA sense sequence
  source 1..19: mol_type = other RNA
tgcctagttttcttccttt

SEQ ID NO: 39689 - RNA, 19 nt, synthetic construct
  misc_feature 1..19: note = siRNA antisense sequence
  source 1..19: mol_type = other RNA
aaaggaagaaaactaggca

SEQ ID NO: 39690 - RNA, 19 nt, synthetic construct
  misc_feature 1..19: note = siRNA sense sequence
  source 1..19: mol_type = other RNA
gcctagttttcttcctttg

SEQ ID NO: 39691 - RNA, 19 nt, synthetic construct
  misc_feature 1..19: note = siRNA antisense sequence
  source 1..19: mol_type = other RNA
caaaggaagaaaactaggc

SEQ ID NO: 39692 - RNA, 19 nt, synthetic construct
  misc_feature 1..19: note = siRNA sense sequence
  source 1..19: mol_type = other RNA
cctagttttcttcctttgc

SEQ ID NO: 39693 - RNA, 19 nt, synthetic construct
  misc_feature 1..19: note = siRNA antisense sequence
  source 1..19: mol_type = other RNA
gcaaaggaagaaaactagg

SEQ ID NO: 39694 - RNA, 19 nt, synthetic construct
  misc_feature 1..19: note = siRNA sense sequence
  source 1..19: mol_type = other RNA
ctagttttcttcctttgct

SEQ ID NO: 39695 - RNA, 19 nt, synthetic construct
  misc_feature 1..19: note = siRNA antisense sequence
  source 1..19: mol_type = other RNA
agcaaaggaagaaaactag

SEQ ID NO: 39696 - RNA, 19 nt, synthetic construct
  misc_feature 1..19: note = siRNA sense sequence
  source 1..19: mol_type = other RNA
tagttttcttcctttgctc

SEQ ID NO: 39697 - RNA, 19 nt, synthetic construct
  misc_feature 1..19: note = siRNA antisense sequence
  source 1..19: mol_type = other RNA
gagcaaaggaagaaaacta

SEQ ID NO: 39698 - RNA, 19 nt, synthetic construct
  misc_feature 1..19: note = siRNA sense sequence
  source 1..19: mol_type = other RNA
tcttcctttgctcattgaa

SEQ ID NO: 39699 - RNA, 19 nt, synthetic construct
  misc_feature 1..19: note = siRNA antisense sequence
  source 1..19: mol_type = other RNA
ttcaatgagcaaaggaaga

SEQ ID NO: 39700 - RNA, 19 nt, synthetic construct
  misc_feature 1..19: note = siRNA sense sequence
  source 1..19: mol_type = other RNA
cttaagtgttatttcacct

SEQ ID NO: 39701 - RNA, 19 nt, synthetic construct
  misc_feature 1..19: note = siRNA antisense sequence
  source 1..19: mol_type = other RNA
aggtgaaataacacttaag

SEQ ID NO: 39702 - RNA, 19 nt, synthetic construct
  misc_feature 1..19: note = siRNA sense sequence
  source 1..19: mol_type = other RNA
gtgttatttcaccttcaga

SEQ ID NO: 39703 - RNA, 19 nt, synthetic construct
  misc_feature 1..19: note = siRNA antisense sequence
  source 1..19: mol_type = other RNA
tctgaaggtgaaataacac

SEQ ID NO: 39704 - RNA, 19 nt, synthetic construct
  misc_feature 1..19: note = siRNA sense sequence
  source 1..19: mol_type = other RNA
tgttatttcaccttcagat

SEQ ID NO: 39705 - RNA, 19 nt, synthetic construct
  misc_feature 1..19: note = siRNA antisense sequence
  source 1..19: mol_type = other RNA
atctgaaggtgaaataaca

SEQ ID NO: 39706 - RNA, 19 nt, synthetic construct
  misc_feature 1..19: note = siRNA sense sequence
  source 1..19: mol_type = other RNA
gttatttcaccttcagatg

SEQ ID NO: 39707 - RNA, 19 nt, synthetic construct
  misc_feature 1..19: note = siRNA antisense sequence
  source 1..19: mol_type = other RNA
catctgaaggtgaaataac

SEQ ID NO: 39708 - RNA, 19 nt, synthetic construct
  misc_feature 1..19: note = siRNA sense sequence
  source 1..19: mol_type = other RNA
ttcaccttcagatgtcaac

SEQ ID NO: 39709 - RNA, 19 nt, synthetic construct
  misc_feature 1..19: note = siRNA antisense sequence
  source 1..19: mol_type = other RNA
gttgacatctgaaggtgaa

SEQ ID NO: 39710 - RNA, 19 nt, synthetic construct
  misc_feature 1..19: note = siRNA sense sequence
  source 1..19: mol_type = other RNA
catttagtgctcttctcac

SEQ ID NO: 39711 - RNA, 19 nt, synthetic construct
  misc_feature 1..19: note = siRNA antisense sequence
  source 1..19: mol_type = other RNA
gtgagaagagcactaaatg

SEQ ID NO: 39712 - RNA, 19 nt, synthetic construct
  misc_feature 1..19: note = siRNA sense sequence
  source 1..19: mol_type = other RNA
gtgctcttctcactatatt

SEQ ID NO: 39713 - RNA, 19 nt, synthetic construct
  misc_feature 1..19: note = siRNA antisense sequence
  source 1..19: mol_type = other RNA
aatatagtgagaagagcac

SEQ ID NO: 39714 - RNA, 19 nt, synthetic construct
  misc_feature 1..19: note = siRNA sense sequence
  source 1..19: mol_type = other RNA
tgctcttctcactatattt

SEQ ID NO: 39715 - RNA, 19 nt, synthetic construct
  misc_feature 1..19: note = siRNA antisense sequence
  source 1..19: mol_type = other RNA
aaatatagtgagaagagca

SEQ ID NO: 39716 - RNA, 19 nt, synthetic construct
  misc_feature 1..19: note = siRNA sense sequence
  source 1..19: mol_type = other RNA
ctcttctcactatatttcg

SEQ ID NO: 39717 - RNA, 19 nt, synthetic construct
  misc_feature 1..19: note = siRNA antisense sequence
  source 1..19: mol_type = other RNA
cgaaatatagtgagaagag

SEQ ID NO: 39718 - RNA, 19 nt, synthetic construct
  misc_feature 1..19: note = siRNA sense sequence
  source 1..19: mol_type = other RNA
tcttctcactatatttcga

SEQ ID NO: 39719 - RNA, 19 nt, synthetic construct
  misc_feature 1..19: note = siRNA antisense sequence
  source 1..19: mol_type = other RNA
tcgaaatatagtgagaaga

SEQ ID NO: 39720 - RNA, 19 nt, synthetic construct
  misc_feature 1..19: note = siRNA sense sequence
  source 1..19: mol_type = other RNA
cttctcactatatttcgag

SEQ ID NO: 39721 - RNA, 19 nt, synthetic construct
  misc_feature 1..19: note = siRNA antisense sequence
  source 1..19: mol_type = other RNA
ctcgaaatatagtgagaag

SEQ ID NO: 39722 - RNA, 19 nt, synthetic construct
  misc_feature 1..19: note = siRNA sense sequence
  source 1..19: mol_type = other RNA
ttctcactatatttcgagg

SEQ ID NO: 39723 - RNA, 19 nt, synthetic construct
  misc_feature 1..19: note = siRNA antisense sequence
  source 1..19: mol_type = other RNA
cctcgaaatatagtgagaa

SEQ ID NO: 39724 - RNA, 19 nt, synthetic construct
  misc_feature 1..19: note = siRNA sense sequence
  source 1..19: mol_type = other RNA
tctcactatatttcgaggt

SEQ ID NO: 39725 - RNA, 19 nt, synthetic construct
  misc_feature 1..19: note = siRNA antisense sequence
  source 1..19: mol_type = other RNA
acctcgaaatatagtgaga

SEQ ID NO: 39726 - RNA, 19 nt, synthetic construct
  misc_feature 1..19: note = siRNA sense sequence
  source 1..19: mol_type = other RNA
ctcactatatttcgaggtg

SEQ ID NO: 39727 - RNA, 19 nt, synthetic construct
  misc_feature 1..19: note = siRNA antisense sequence
  source 1..19: mol_type = other RNA
cacctcgaaatatagtgag

SEQ ID NO: 39728 - RNA, 19 nt, synthetic construct
  misc_feature 1..19: note = siRNA sense sequence
  source 1..19: mol_type = other RNA
tcactatatttcgaggtgg

SEQ ID NO: 39729 - RNA, 19 nt, synthetic construct
  misc_feature 1..19: note = siRNA antisense sequence
  source 1..19: mol_type = other RNA
ccacctcgaaatatagtga

SEQ ID NO: 39730 - RNA, 19 nt, synthetic construct
  misc_feature 1..19: note = siRNA sense sequence
  source 1..19: mol_type = other RNA
cactatatttcgaggtggt

SEQ ID NO: 39731 - RNA, 19 nt, synthetic construct
  misc_feature 1..19: note = siRNA antisense sequence
  source 1..19: mol_type = other RNA
accacctcgaaatatagtg

SEQ ID NO: 39732 - RNA, 19 nt, synthetic construct
  misc_feature 1..19: note = siRNA sense sequence
  source 1..19: mol_type = other RNA
actatatttcgaggtggta

SEQ ID NO: 39733 - RNA, 19 nt, synthetic construct
  misc_feature 1..19: note = siRNA antisense sequence
  source 1..19: mol_type = other RNA
taccacctcgaaatatagt

SEQ ID NO: 39734 - RNA, 19 nt, synthetic construct
  misc_feature 1..19: note = siRNA sense sequence
  source 1..19: mol_type = other RNA
ctatatttcgaggtggtaa

SEQ ID NO: 39735 - RNA, 19 nt, synthetic construct
  misc_feature 1..19: note = siRNA antisense sequence
  source 1..19: mol_type = other RNA
ttaccacctcgaaatatag

SEQ ID NO: 39736 - RNA, 19 nt, synthetic construct
  misc_feature 1..19: note = siRNA sense sequence
  source 1..19: mol_type = other RNA
tatatttcgaggtggtaat

SEQ ID NO: 39737 - RNA, 19 nt, synthetic construct
  misc_feature 1..19: note = siRNA antisense sequence
  source 1..19: mol_type = other RNA
attaccacctcgaaatata

SEQ ID NO: 39738 - RNA, 19 nt, synthetic construct
  misc_feature 1..19: note = siRNA sense sequence
  source 1..19: mol_type = other RNA
atttcgaggtggtaatatt

SEQ ID NO: 39739 - RNA, 19 nt, synthetic construct
  misc_feature 1..19: note = siRNA antisense sequence
  source 1..19: mol_type = other RNA
aatattaccacctcgaaat

SEQ ID NO: 39740 - RNA, 19 nt, synthetic construct
  misc_feature 1..19: note = siRNA sense sequence
  source 1..19: mol_type = other RNA
tttcgaggtggtaatattt

SEQ ID NO: 39741 - RNA, 19 nt, synthetic construct
  misc_feature 1..19: note = siRNA antisense sequence
  source 1..19: mol_type = other RNA
aaatattaccacctcgaaa

SEQ ID NO: 39742 - RNA, 19 nt, synthetic construct
  misc_feature 1..19: note = siRNA sense sequence
  source 1..19: mol_type = other RNA
tttacttttagggcctcaa

SEQ ID NO: 39743 - RNA, 19 nt, synthetic construct
  misc_feature 1..19: note = siRNA antisense sequence
  source 1..19: mol_type = other RNA
ttgaggccctaaaagtaaa

SEQ ID NO: 39744 - RNA, 19 nt, synthetic construct
  misc_feature 1..19: note = siRNA sense sequence
  source 1..19: mol_type = other RNA
ttacttttagggcctcaac

SEQ ID NO: 39745 - RNA, 19 nt, synthetic construct
  misc_feature 1..19: note = siRNA antisense sequence
  source 1..19: mol_type = other RNA
gttgaggccctaaaagtaa

SEQ ID NO: 39746 - RNA, 19 nt, synthetic construct
  misc_feature 1..19: note = siRNA sense sequence
  source 1..19: mol_type = other RNA
atgctcatatcatgctcat

SEQ ID NO: 39747 - RNA, 19 nt, synthetic construct
  misc_feature 1..19: note = siRNA antisense sequence
  source 1..19: mol_type = other RNA
atgagcatgatatgagcat

SEQ ID NO: 39748 - RNA, 19 nt, synthetic construct
  misc_feature 1..19: note = siRNA sense sequence
  source 1..19: mol_type = other RNA
tgctcatatcatgctcata

SEQ ID NO: 39749 - RNA, 19 nt, synthetic construct
  misc_feature 1..19: note = siRNA antisense sequence
  source 1..19: mol_type = other RNA
tatgagcatgatatgagca

SEQ ID NO: 39750 - RNA, 19 nt, synthetic construct
  misc_feature 1..19: note = siRNA sense sequence
  source 1..19: mol_type = other RNA
gctcatatcatgctcatac

SEQ ID NO: 39751 - RNA, 19 nt, synthetic construct
  misc_feature 1..19: note = siRNA antisense sequence
  source 1..19: mol_type = other RNA
gtatgagcatgatatgagc

SEQ ID NO: 39752 - RNA, 19 nt, synthetic construct
  misc_feature 1..19: note = siRNA sense sequence
  source 1..19: mol_type = other RNA
agcaagactgagcccactt

SEQ ID NO: 39753 - RNA, 19 nt, synthetic construct
  misc_feature 1..19: note = siRNA antisense sequence
  source 1..19: mol_type = other RNA
aagtgggctcagtcttgct

SEQ ID NO: 39754 - RNA, 19 nt, synthetic construct
  misc_feature 1..19: note = siRNA sense sequence
  source 1..19: mol_type = other RNA
actgagcccacttgcctac

SEQ ID NO: 39755 - RNA, 19 nt, synthetic construct
  misc_feature 1..19: note = siRNA antisense sequence
  source 1..19: mol_type = other RNA
gtaggcaagtgggctcagt

SEQ ID NO: 39756 - RNA, 19 nt, synthetic construct
  misc_feature 1..19: note = siRNA sense sequence
  source 1..19: mol_type = other RNA
agcccacttgcctacagaa

SEQ ID NO: 39757 - RNA, 19 nt, synthetic construct
  misc_feature 1..19: note = siRNA antisense sequence
  source 1..19: mol_type = other RNA
ttctgtaggcaagtgggct

SEQ ID NO: 39758 - RNA, 19 nt, synthetic construct
  misc_feature 1..19: note = siRNA sense sequence
  source 1..19: mol_type = other RNA
gcccacttgcctacagaag

SEQ ID NO: 39759 - RNA, 19 nt, synthetic construct
  misc_feature 1..19: note = siRNA antisense sequence
  source 1..19: mol_type = other RNA
cttctgtaggcaagtgggc

SEQ ID NO: 39760 - RNA, 19 nt, synthetic construct
  misc_feature 1..19: note = siRNA sense sequence
  source 1..19: mol_type = other RNA
cttgcctacagaagtaact

SEQ ID NO: 39761 - RNA, 19 nt, synthetic construct
  misc_feature 1..19: note = siRNA antisense sequence
  source 1..19: mol_type = other RNA
agttacttctgtaggcaag

SEQ ID NO: 39762 - RNA, 19 nt, synthetic construct
  misc_feature 1..19: note = siRNA sense sequence
  source 1..19: mol_type = other RNA
ttgcctacagaagtaactc

SEQ ID NO: 39763 - RNA, 19 nt, synthetic construct
  misc_feature 1..19: note = siRNA antisense sequence
  source 1..19: mol_type = other RNA
gagttacttctgtaggcaa

SEQ ID NO: 39764 - RNA, 19 nt, synthetic construct
  misc_feature 1..19: note = siRNA sense sequence
  source 1..19: mol_type = other RNA
tgcctacagaagtaactca

SEQ ID NO: 39765 - RNA, 19 nt, synthetic construct
  misc_feature 1..19: note = siRNA antisense sequence
  source 1..19: mol_type = other RNA
tgagttacttctgtaggca

SEQ ID NO: 39766 - RNA, 19 nt, synthetic construct
  misc_feature 1..19: note = siRNA sense sequence
  source 1..19: mol_type = other RNA
gcctacagaagtaactcat

SEQ ID NO: 39767 - RNA, 19 nt, synthetic construct
  misc_feature 1..19: note = siRNA antisense sequence
  source 1..19: mol_type = other RNA
atgagttacttctgtaggc

SEQ ID NO: 39768 - RNA, 19 nt, synthetic construct
  misc_feature 1..19: note = siRNA sense sequence
  source 1..19: mol_type = other RNA
cctacagaagtaactcatt

SEQ ID NO: 39769 - RNA, 19 nt, synthetic construct
  misc_feature 1..19: note = siRNA antisense sequence
  source 1..19: mol_type = other RNA
aatgagttacttctgtagg

SEQ ID NO: 39770 - RNA, 19 nt, synthetic construct
  misc_feature 1..19: note = siRNA sense sequence
  source 1..19: mol_type = other RNA
ctacagaagtaactcatta

SEQ ID NO: 39771 - RNA, 19 nt, synthetic construct
  misc_feature 1..19: note = siRNA antisense sequence
  source 1..19: mol_type = other RNA
taatgagttacttctgtag

SEQ ID NO: 39772 - RNA, 19 nt, synthetic construct
  misc_feature 1..19: note = siRNA sense sequence
  source 1..19: mol_type = other RNA
acagaagtaactcattatc

SEQ ID NO: 39773 - RNA, 19 nt, synthetic construct
  misc_feature 1..19: note = siRNA antisense sequence
  source 1..19: mol_type = other RNA
gataatgagttacttctgt

SEQ ID NO: 39774 - RNA, 19 nt, synthetic construct
  misc_feature 1..19: note = siRNA sense sequence
  source 1..19: mol_type = other RNA
cagaagtaactcattatca

SEQ ID NO: 39775 - RNA, 19 nt, synthetic construct
  misc_feature 1..19: note = siRNA antisense sequence
  source 1..19: mol_type = other RNA
tgataatgagttacttctg

SEQ ID NO: 39776 - RNA, 19 nt, synthetic construct
  misc_feature 1..19: note = siRNA sense sequence
  source 1..19: mol_type = other RNA
agaagtaactcattatcag

SEQ ID NO: 39777 - RNA, 19 nt, synthetic construct
  misc_feature 1..19: note = siRNA antisense sequence
  source 1..19: mol_type = other RNA
ctgataatgagttacttct

SEQ ID NO: 39778 - RNA, 19 nt, synthetic construct
  misc_feature 1..19: note = siRNA sense sequence
  source 1..19: mol_type = other RNA
gaagtaactcattatcagt

SEQ ID NO: 39779 - RNA, 19 nt, synthetic construct
  misc_feature 1..19: note = siRNA antisense sequence
  source 1..19: mol_type = other RNA
actgataatgagttacttc

SEQ ID NO: 39780 - RNA, 19 nt, synthetic construct
  misc_feature 1..19: note = siRNA sense sequence
  source 1..19: mol_type = other RNA
aagtaactcattatcagtg

SEQ ID NO: 39781 - RNA, 19 nt, synthetic construct
  misc_feature 1..19: note = siRNA antisense sequence
  source 1..19: mol_type = other RNA
cactgataatgagttactt

SEQ ID NO: 39782 - RNA, 19 nt, synthetic construct
  misc_feature 1..19: note = siRNA sense sequence
  source 1..19: mol_type = other RNA
agtaactcattatcagtgc

SEQ ID NO: 39783 - RNA, 19 nt, synthetic construct
  misc_feature 1..19: note = siRNA antisense sequence
  source 1..19: mol_type = other RNA
gcactgataatgagttact

SEQ ID NO: 39784 - RNA, 19 nt, synthetic construct
  misc_feature 1..19: note = siRNA sense sequence
  source 1..19: mol_type = other RNA
gtaactcattatcagtgca

SEQ ID NO: 39785 - RNA, 19 nt, synthetic construct
  misc_feature 1..19: note = siRNA antisense sequence
  source 1..19: mol_type = other RNA
tgcactgataatgagttac

SEQ ID NO: 39786 - RNA, 19 nt, synthetic construct
  misc_feature 1..19: note = siRNA sense sequence
  source 1..19: mol_type = other RNA
ctcattatcagtgcatcct

SEQ ID NO: 39787 - RNA, 19 nt, synthetic construct
  misc_feature 1..19: note = siRNA antisense sequence
  source 1..19: mol_type = other RNA
aggatgcactgataatgag

SEQ ID NO: 39788 - RNA, 19 nt, synthetic construct
  misc_feature 1..19: note = siRNA sense sequence
  source 1..19: mol_type = other RNA
tcattatcagtgcatcctt

SEQ ID NO: 39789 - RNA, 19 nt, synthetic construct
  misc_feature 1..19: note = siRNA antisense sequence
  source 1..19: mol_type = other RNA
aaggatgcactgataatga

SEQ ID NO: 39790 - RNA, 19 nt, synthetic construct
  misc_feature 1..19: note = siRNA sense sequence
  source 1..19: mol_type = other RNA
cattatcagtgcatccttt

SEQ ID NO: 39791 - RNA, 19 nt, synthetic construct
  misc_feature 1..19: note = siRNA antisense sequence
  source 1..19: mol_type = other RNA
aaaggatgcactgataatg

SEQ ID NO: 39792 - RNA, 19 nt, synthetic construct
  misc_feature 1..19: note = siRNA sense sequence
  source 1..19: mol_type = other RNA
tcagtgcatcctttcttgg

SEQ ID NO: 39793 - RNA, 19 nt, synthetic construct
  misc_feature 1..19: note = siRNA antisense sequence
  source 1..19: mol_type = other RNA
ccaagaaaggatgcactga

SEQ ID NO: 39794 - RNA, 19 nt, synthetic construct
  misc_feature 1..19: note = siRNA sense sequence
  source 1..19: mol_type = other RNA
cagtgcatcctttcttggc

SEQ ID NO: 39795 - RNA, 19 nt, synthetic construct
  misc_feature 1..19: note = siRNA antisense sequence
  source 1..19: mol_type = other RNA
gccaagaaaggatgcactg

SEQ ID NO: 39796 - RNA, 19 nt, synthetic construct
  misc_feature 1..19: note = siRNA sense sequence
  source 1..19: mol_type = other RNA
agtgcatcctttcttggcc

SEQ ID NO: 39797 - RNA, 19 nt, synthetic construct
  misc_feature 1..19: note = siRNA antisense sequence
  source 1..19: mol_type = other RNA
ggccaagaaaggatgcact

SEQ ID NO: 39798 - RNA, 19 nt, synthetic construct
  misc_feature 1..19: note = siRNA sense sequence
  source 1..19: mol_type = other RNA
gtgcatcctttcttggcct

SEQ ID NO: 39799 - RNA, 19 nt, synthetic construct
  misc_feature 1..19: note = siRNA antisense sequence
  source 1..19: mol_type = other RNA
aggccaagaaaggatgcac

SEQ ID NO: 39800 - RNA, 19 nt, synthetic construct
  misc_feature 1..19: note = siRNA sense sequence
  source 1..19: mol_type = other RNA
tgcatcctttcttggcctt

SEQ ID NO: 39801 - RNA, 19 nt, synthetic construct
  misc_feature 1..19: note = siRNA antisense sequence
  source 1..19: mol_type = other RNA
aaggccaagaaaggatgca

SEQ ID NO: 39802 - RNA, 19 nt, synthetic construct
  misc_feature 1..19: note = siRNA sense sequence
  source 1..19: mol_type = other RNA
gcatcctttcttggccttt

SEQ ID NO: 39803 - RNA, 19 nt, synthetic construct
  misc_feature 1..19: note = siRNA antisense sequence
  source 1..19: mol_type = other RNA
aaaggccaagaaaggatgc

SEQ ID NO: 39804 - RNA, 19 nt, synthetic construct
  misc_feature 1..19: note = siRNA sense sequence
  source 1..19: mol_type = other RNA
cctttcttggcctttcttc

SEQ ID NO: 39805 - RNA, 19 nt, synthetic construct
  misc_feature 1..19: note = siRNA antisense sequence
  source 1..19: mol_type = other RNA
gaagaaaggccaagaaagg

SEQ ID NO: 39806 - RNA, 19 nt, synthetic construct
  misc_feature 1..19: note = siRNA sense sequence
  source 1..19: mol_type = other RNA
cttggcctttcttccttcc

SEQ ID NO: 39807 - RNA, 19 nt, synthetic construct
  misc_feature 1..19: note = siRNA antisense sequence
  source 1..19: mol_type = other RNA
ggaaggaagaaaggccaag

SEQ ID NO: 39808 - RNA, 19 nt, synthetic construct
  misc_feature 1..19: note = siRNA sense sequence
  source 1..19: mol_type = other RNA
ttggcctttcttccttccc

SEQ ID NO: 39809 - RNA, 19 nt, synthetic construct
  misc_feature 1..19: note = siRNA antisense sequence
  source 1..19: mol_type = other RNA
gggaaggaagaaaggccaa

SEQ ID NO: 39810 - RNA, 19 nt, synthetic construct
  misc_feature 1..19: note = siRNA sense sequence
  source 1..19: mol_type = other RNA
tggcctttcttccttccca

SEQ ID NO: 39811 - RNA, 19 nt, synthetic construct
  misc_feature 1..19: note = siRNA antisense sequence
  source 1..19: mol_type = other RNA
tgggaaggaagaaaggcca

SEQ ID NO: 39812 - RNA, 19 nt, synthetic construct
  misc_feature 1..19: note = siRNA sense sequence
  source 1..19: mol_type = other RNA
ggcctttcttccttcccac

SEQ ID NO: 39813 - RNA, 19 nt, synthetic construct
  misc_feature 1..19: note = siRNA antisense sequence
  source 1..19: mol_type = other RNA
gtgggaaggaagaaaggcc

SEQ ID NO: 39814 - RNA, 19 nt, synthetic construct
  misc_feature 1..19: note = siRNA sense sequence
  source 1..19: mol_type = other RNA
gcctttcttccttcccact

SEQ ID NO: 39815 - RNA, 19 nt, synthetic construct
  misc_feature 1..19: note = siRNA antisense sequence
  source 1..19: mol_type = other RNA
agtgggaaggaagaaaggc

SEQ ID NO: 39816 - RNA, 19 nt, synthetic construct
  misc_feature 1..19: note = siRNA sense sequence
  source 1..19: mol_type = other RNA
cctttcttccttcccactc

SEQ ID NO: 39817 - RNA, 19 nt, synthetic construct
  misc_feature 1..19: note = siRNA antisense sequence
  source 1..19: mol_type = other RNA
gagtgggaaggaagaaagg

SEQ ID NO: 39818 - RNA, 19 nt, synthetic construct
  misc_feature 1..19: note = siRNA sense sequence
  source 1..19: mol_type = other RNA
tgtcttggatctacttttg

SEQ ID NO: 39819 - RNA, 19 nt, synthetic construct
  misc_feature 1..19: note = siRNA antisense sequence
  source 1..19: mol_type = other RNA
caaaagtagatccaagaca

SEQ ID NO: 39820 - RNA, 19 nt, synthetic construct
  misc_feature 1..19: note = siRNA sense sequence
  source 1..19: mol_type = other RNA
tcttggatctacttttgga

SEQ ID NO: 39821 - RNA, 19 nt, synthetic construct
  misc_feature 1..19: note = siRNA antisense sequence
  source 1..19: mol_type = other RNA
tccaaaagtagatccaaga

SEQ ID NO: 39822 - RNA, 19 nt, synthetic construct
  misc_feature 1..19: note = siRNA sense sequence
  source 1..19: mol_type = other RNA
aagacagcttatatcctaa

SEQ ID NO: 39823 - RNA, 19 nt, synthetic construct
  misc_feature 1..19: note = siRNA antisense sequence
  source 1..19: mol_type = other RNA
ttaggatataagctgtctt

SEQ ID NO: 39824 - RNA, 19 nt, synthetic construct
  misc_feature 1..19: note = siRNA sense sequence
  source 1..19: mol_type = other RNA
agacagcttatatcctaaa

SEQ ID NO: 39825 - RNA, 19 nt, synthetic construct
  misc_feature 1..19: note = siRNA antisense sequence
  source 1..19: mol_type = other RNA
tttaggatataagctgtct

SEQ ID NO: 39826 - RNA, 19 nt, synthetic construct
  misc_feature 1..19: note = siRNA sense sequence
  source 1..19: mol_type = other RNA
gacagcttatatcctaaat

SEQ ID NO: 39827 - RNA, 19 nt, synthetic construct
  misc_feature 1..19: note = siRNA antisense sequence
  source 1..19: mol_type = other RNA
atttaggatataagctgtc

SEQ ID NO: 39828 - RNA, 19 nt, synthetic construct
  misc_feature 1..19: note = siRNA sense sequence
  source 1..19: mol_type = other RNA
tttatagagttagtccttc

SEQ ID NO: 39829 - RNA, 19 nt, synthetic construct
  misc_feature 1..19: note = siRNA antisense sequence
  source 1..19: mol_type = other RNA
gaaggactaactctataaa

SEQ ID NO: 39830 - RNA, 19 nt, synthetic construct
  misc_feature 1..19: note = siRNA sense sequence
  source 1..19: mol_type = other RNA
ttatagagttagtccttcc

SEQ ID NO: 39831 - RNA, 19 nt, synthetic construct
  misc_feature 1..19: note = siRNA antisense sequence
  source 1..19: mol_type = other RNA
ggaaggactaactctataa

SEQ ID NO: 39832 - RNA, 19 nt, synthetic construct
  misc_feature 1..19: note = siRNA sense sequence
  source 1..19: mol_type = other RNA
tatagagttagtccttcca

SEQ ID NO: 39833 - RNA, 19 nt, synthetic construct
  misc_feature 1..19: note = siRNA antisense sequence
  source 1..19: mol_type = other RNA
tggaaggactaactctata

SEQ ID NO: 39834 - RNA, 19 nt, synthetic construct
  misc_feature 1..19: note = siRNA sense sequence
  source 1..19: mol_type = other RNA
atagagttagtccttccat

SEQ ID NO: 39835 - RNA, 19 nt, synthetic construct
  misc_feature 1..19: note = siRNA antisense sequence
  source 1..19: mol_type = other RNA
atggaaggactaactctat

SEQ ID NO: 39836 - RNA, 19 nt, synthetic construct
  misc_feature 1..19: note = siRNA sense sequence
  source 1..19: mol_type = other RNA
tagagttagtccttccatc

SEQ ID NO: 39837 - RNA, 19 nt, synthetic construct
  misc_feature 1..19: note = siRNA antisense sequence
  source 1..19: mol_type = other RNA
gatggaaggactaactcta

SEQ ID NO: 39838 - RNA, 19 nt, synthetic construct
  misc_feature 1..19: note = siRNA sense sequence
  source 1..19: mol_type = other RNA
agagttagtccttccatcc

SEQ ID NO: 39839 - RNA, 19 nt, synthetic construct
  misc_feature 1..19: note = siRNA antisense sequence
  source 1..19: mol_type = other RNA
ggatggaaggactaactct

SEQ ID NO: 39840 - RNA, 19 nt, synthetic construct
  misc_feature 1..19: note = siRNA sense sequence
  source 1..19: mol_type = other RNA
gagttagtccttccatcct

SEQ ID NO: 39841 - RNA, 19 nt, synthetic construct
  misc_feature 1..19: note = siRNA antisense sequence
  source 1..19: mol_type = other RNA
aggatggaaggactaactc

SEQ ID NO: 39842 - RNA, 19 nt, synthetic construct
  misc_feature 1..19: note = siRNA sense sequence
  source 1..19: mol_type = other RNA
agttagtccttccatcctc

SEQ ID NO: 39843 - RNA, 19 nt, synthetic construct
  misc_feature 1..19: note = siRNA antisense sequence
  source 1..19: mol_type = other RNA
gaggatggaaggactaact

SEQ ID NO: 39844 - RNA, 19 nt, synthetic construct
  misc_feature 1..19: note = siRNA sense sequence
  source 1..19: mol_type = other RNA
gttagtccttccatcctct

SEQ ID NO: 39845 - RNA, 19 nt, synthetic construct
  misc_feature 1..19: note = siRNA antisense sequence
  source 1..19: mol_type = other RNA
agaggatggaaggactaac

SEQ ID NO: 39846 - RNA, 19 nt, synthetic construct
  misc_feature 1..19: note = siRNA sense sequence
  source 1..19: mol_type = other RNA
ttagtccttccatcctctg

SEQ ID NO: 39847 - RNA, 19 nt, synthetic construct
  misc_feature 1..19: note = siRNA antisense sequence
  source 1..19: mol_type = other RNA
cagaggatggaaggactaa

SEQ ID NO: 39848 - RNA, 19 nt, synthetic construct
  misc_feature 1..19: note = siRNA sense sequence
  source 1..19: mol_type = other RNA
agtccttccatcctctgta

SEQ ID NO: 39849 - RNA, 19 nt, synthetic construct
  misc_feature 1..19: note = siRNA antisense sequence
  source 1..19: mol_type = other RNA
tacagaggatggaaggact

SEQ ID NO: 39850 - RNA, 19 nt, synthetic construct
  misc_feature 1..19: note = siRNA sense sequence
  source 1..19: mol_type = other RNA
gtccttccatcctctgtac

SEQ ID NO: 39851 - RNA, 19 nt, synthetic construct
  misc_feature 1..19: note = siRNA antisense sequence
  source 1..19: mol_type = other RNA
gtacagaggatggaaggac

SEQ ID NO: 39852 - RNA, 19 nt, synthetic construct
  misc_feature 1..19: note = siRNA sense sequence
  source 1..19: mol_type = other RNA
tccttccatcctctgtact

SEQ ID NO: 39853 - RNA, 19 nt, synthetic construct
  misc_feature 1..19: note = siRNA antisense sequence
  source 1..19: mol_type = other RNA
agtacagaggatggaagga

SEQ ID NO: 39854 - RNA, 19 nt, synthetic construct
  misc_feature 1..19: note = siRNA sense sequence
  source 1..19: mol_type = other RNA
ccttccatcctctgtactt

SEQ ID NO: 39855 - RNA, 19 nt, synthetic construct
  misc_feature 1..19: note = siRNA antisense sequence
  source 1..19: mol_type = other RNA
aagtacagaggatggaagg

SEQ ID NO: 39856 - RNA, 19 nt, synthetic construct
  misc_feature 1..19: note = siRNA sense sequence
  source 1..19: mol_type = other RNA
tccatcctctgtacttcct

SEQ ID NO: 39857 - RNA, 19 nt, synthetic construct
  misc_feature 1..19: note = siRNA antisense sequence
  source 1..19: mol_type = other RNA
aggaagtacagaggatgga

SEQ ID NO: 39858 - RNA, 19 nt, synthetic construct
  misc_feature 1..19: note = siRNA sense sequence
  source 1..19: mol_type = other RNA
tctgtacttcctgaatcca

SEQ ID NO: 39859 - RNA, 19 nt, synthetic construct
  misc_feature 1..19: note = siRNA antisense sequence
  source 1..19: mol_type = other RNA
tggattcaggaagtacaga

SEQ ID NO: 39860 - RNA, 19 nt, synthetic construct
  misc_feature 1..19: note = siRNA sense sequence
  source 1..19: mol_type = other RNA
ctgtacttcctgaatccaa

SEQ ID NO: 39861 - RNA, 19 nt, synthetic construct
  misc_feature 1..19: note = siRNA antisense sequence
  source 1..19: mol_type = other RNA
ttggattcaggaagtacag

SEQ ID NO: 39862 - RNA, 19 nt, synthetic construct
  misc_feature 1..19: note = siRNA sense sequence
  source 1..19: mol_type = other RNA
tgtacttcctgaatccaaa

SEQ ID NO: 39863 - RNA, 19 nt, synthetic construct
  misc_feature 1..19: note = siRNA antisense sequence
  source 1..19: mol_type = other RNA
tttggattcaggaagtaca

SEQ ID NO: 39864 - RNA, 19 nt, synthetic construct
  misc_feature 1..19: note = siRNA sense sequence
  source 1..19: mol_type = other RNA
gtacttcctgaatccaaat

SEQ ID NO: 39865 - RNA, 19 nt, synthetic construct
  misc_feature 1..19: note = siRNA antisense sequence
  source 1..19: mol_type = other RNA
atttggattcaggaagtac

SEQ ID NO: 39866 - RNA, 19 nt, synthetic construct
  misc_feature 1..19: note = siRNA sense sequence
  source 1..19: mol_type = other RNA
tacttcctgaatccaaatc

SEQ ID NO: 39867 - RNA, 19 nt, synthetic construct
  misc_feature 1..19: note = siRNA antisense sequence
  source 1..19: mol_type = other RNA
gatttggattcaggaagta

SEQ ID NO: 39868 - RNA, 19 nt, synthetic construct
  misc_feature 1..19: note = siRNA sense sequence
  source 1..19: mol_type = other RNA
tgaatccaaatcctcatct

SEQ ID NO: 39869 - RNA, 19 nt, synthetic construct
  misc_feature 1..19: note = siRNA antisense sequence
  source 1..19: mol_type = other RNA
agatgaggatttggattca

SEQ ID NO: 39870 - RNA, 19 nt, synthetic construct
  misc_feature 1..19: note = siRNA sense sequence
  source 1..19: mol_type = other RNA
gaatccaaatcctcatctg

SEQ ID NO: 39871 - RNA, 19 nt, synthetic construct
  misc_feature 1..19: note = siRNA antisense sequence
  source 1..19: mol_type = other RNA
cagatgaggatttggattc

SEQ ID NO: 39872 - RNA, 19 nt, synthetic construct
  misc_feature 1..19: note = siRNA sense sequence
  source 1..19: mol_type = other RNA
tcctcatctggattacttt

SEQ ID NO: 39873 - RNA, 19 nt, synthetic construct
  misc_feature 1..19: note = siRNA antisense sequence
  source 1..19: mol_type = other RNA
aaagtaatccagatgagga

SEQ ID NO: 39874 - RNA, 19 nt, synthetic construct
  misc_feature 1..19: note = siRNA sense sequence
  source 1..19: mol_type = other RNA
cctcatctggattacttta

SEQ ID NO: 39875 - RNA, 19 nt, synthetic construct
  misc_feature 1..19: note = siRNA antisense sequence
  source 1..19: mol_type = other RNA
taaagtaatccagatgagg

SEQ ID NO: 39876 - RNA, 19 nt, synthetic construct
  misc_feature 1..19: note = siRNA sense sequence
  source 1..19: mol_type = other RNA
ctcatctggattactttag

SEQ ID NO: 39877 - RNA, 19 nt, synthetic construct
  misc_feature 1..19: note = siRNA antisense sequence
  source 1..19: mol_type = other RNA
ctaaagtaatccagatgag

SEQ ID NO: 39878 - RNA, 19 nt, synthetic construct
  misc_feature 1..19: note = siRNA sense sequence
  source 1..19: mol_type = other RNA
tcatctggattactttagg

SEQ ID NO: 39879 - RNA, 19 nt, synthetic construct
  misc_feature 1..19: note = siRNA antisense sequence
  source 1..19: mol_type = other RNA
cctaaagtaatccagatga

SEQ ID NO: 39880 - RNA, 19 nt, synthetic construct
  misc_feature 1..19: note = siRNA sense sequence
  source 1..19: mol_type = other RNA
catctggattactttagga

SEQ ID NO: 39881 - RNA, 19 nt, synthetic construct
  misc_feature 1..19: note = siRNA antisense sequence
  source 1..19: mol_type = other RNA
tcctaaagtaatccagatg

SEQ ID NO: 39882 - RNA, 19 nt, synthetic construct
  misc_feature 1..19: note = siRNA sense sequence
  source 1..19: mol_type = other RNA
tttaggaatccatatcttg

SEQ ID NO: 39883 - RNA, 19 nt, synthetic construct
  misc_feature 1..19: note = siRNA antisense sequence
  source 1..19: mol_type = other RNA
caagatatggattcctaaa

SEQ ID NO: 39884 - RNA, 19 nt, synthetic construct
  misc_feature 1..19: note = siRNA sense sequence
  source 1..19: mol_type = other RNA
ttaggaatccatatcttgt

SEQ ID NO: 39885 - RNA, 19 nt, synthetic construct
  misc_feature 1..19: note = siRNA antisense sequence
  source 1..19: mol_type = other RNA
acaagatatggattcctaa

SEQ ID NO: 39886 - RNA, 19 nt, synthetic construct
  misc_feature 1..19: note = siRNA sense sequence
  source 1..19: mol_type = other RNA
aggaatccatatcttgtca

SEQ ID NO: 39887 - RNA, 19 nt, synthetic construct
  misc_feature 1..19: note = siRNA antisense sequence
  source 1..19: mol_type = other RNA
tgacaagatatggattcct

SEQ ID NO: 39888 - RNA, 19 nt, synthetic construct
  misc_feature 1..19: note = siRNA sense sequence
  source 1..19: mol_type = other RNA
atccatatcttgtcatttg

SEQ ID NO: 39889 - RNA, 19 nt, synthetic construct
  misc_feature 1..19: note = siRNA antisense sequence
  source 1..19: mol_type = other RNA
caaatgacaagatatggat

SEQ ID NO: 39890 - RNA, 19 nt, synthetic construct
  misc_feature 1..19: note = siRNA sense sequence
  source 1..19: mol_type = other RNA
tccatatcttgtcatttga

SEQ ID NO: 39891 - RNA, 19 nt, synthetic construct
  misc_feature 1..19: note = siRNA antisense sequence
  source 1..19: mol_type = other RNA
tcaaatgacaagatatgga

SEQ ID NO: 39892 - RNA, 19 nt, synthetic construct
  misc_feature 1..19: note = siRNA sense sequence
  source 1..19: mol_type = other RNA
ccatatcttgtcatttgac

SEQ ID NO: 39893 - RNA, 19 nt, synthetic construct
  misc_feature 1..19: note = siRNA antisense sequence
  source 1..19: mol_type = other RNA
gtcaaatgacaagatatgg

SEQ ID NO: 39894 - RNA, 19 nt, synthetic construct
  misc_feature 1..19: note = siRNA sense sequence
  source 1..19: mol_type = other RNA
catatcttgtcatttgact

SEQ ID NO: 39895 - RNA, 19 nt, synthetic construct
  misc_feature 1..19: note = siRNA antisense sequence
  source 1..19: mol_type = other RNA
agtcaaatgacaagatatg

SEQ ID NO: 39896 - RNA, 19 nt, synthetic construct
  misc_feature 1..19: note = siRNA sense sequence
  source 1..19: mol_type = other RNA
atatcttgtcatttgactc

SEQ ID NO: 39897 - RNA, 19 nt, synthetic construct
  misc_feature 1..19: note = siRNA antisense sequence
  source 1..19: mol_type = other RNA
gagtcaaatgacaagatat

SEQ ID NO: 39898 - RNA, 19 nt, synthetic construct
  misc_feature 1..19: note = siRNA sense sequence
  source 1..19: mol_type = other RNA
tatcttgtcatttgactct

SEQ ID NO: 39899 - RNA, 19 nt, synthetic construct
  misc_feature 1..19: note = siRNA antisense sequence
  source 1..19: mol_type = other RNA
agagtcaaatgacaagata

SEQ ID NO: 39900 - RNA, 19 nt, synthetic construct
  misc_feature 1..19: note = siRNA sense sequence
  source 1..19: mol_type = other RNA
atcttgtcatttgactcta

SEQ ID NO: 39901 - RNA, 19 nt, synthetic construct
  misc_feature 1..19: note = siRNA antisense sequence
  source 1..19: mol_type = other RNA
tagagtcaaatgacaagat

SEQ ID NO: 39902 - RNA, 19 nt, synthetic construct
  misc_feature 1..19: note = siRNA sense sequence
  source 1..19: mol_type = other RNA
tcttgtcatttgactctaa

SEQ ID NO: 39903 - RNA, 19 nt, synthetic construct
  misc_feature 1..19: note = siRNA antisense sequence
  source 1..19: mol_type = other RNA
ttagagtcaaatgacaaga

SEQ ID NO: 39904 - RNA, 19 nt, synthetic construct
  misc_feature 1..19: note = siRNA sense sequence
  source 1..19: mol_type = other RNA
cctcttcaatttacttatg

SEQ ID NO: 39905 - RNA, 19 nt, synthetic construct
  misc_feature 1..19: note = siRNA antisense sequence
  source 1..19: mol_type = other RNA
cataagtaaattgaagagg

SEQ ID NO: 39906 - RNA, 19 nt, synthetic construct
  misc_feature 1..19: note = siRNA sense sequence
  source 1..19: mol_type = other RNA
ttacttatgacacttcaag

SEQ ID NO: 39907 - RNA, 19 nt, synthetic construct
  misc_feature 1..19: note = siRNA antisense sequence
  source 1..19: mol_type = other RNA
cttgaagtgtcataagtaa

SEQ ID NO: 39908 - RNA, 19 nt, synthetic construct
  misc_feature 1..19: note = siRNA sense sequence
  source 1..19: mol_type = other RNA
tacttatgacacttcaagc

SEQ ID NO: 39909 - RNA, 19 nt, synthetic construct
  misc_feature 1..19: note = siRNA antisense sequence
  source 1..19: mol_type = other RNA
gcttgaagtgtcataagta

SEQ ID NO: 39910 - RNA, 19 nt, synthetic construct
  misc_feature 1..19: note = siRNA sense sequence
  source 1..19: mol_type = other RNA
acttatgacacttcaagca

SEQ ID NO: 39911 - RNA, 19 nt, synthetic construct
  misc_feature 1..19: note = siRNA antisense sequence
  source 1..19: mol_type = other RNA
tgcttgaagtgtcataagt

SEQ ID NO: 39912 - RNA, 19 nt, synthetic construct
  misc_feature 1..19: note = siRNA sense sequence
  source 1..19: mol_type = other RNA
cttatgacacttcaagcaa

SEQ ID NO: 39913 - RNA, 19 nt, synthetic construct
  misc_feature 1..19: note = siRNA antisense sequence
  source 1..19: mol_type = other RNA
ttgcttgaagtgtcataag

SEQ ID NO: 39914 - RNA, 19 nt, synthetic construct
  misc_feature 1..19: note = siRNA sense sequence
  source 1..19: mol_type = other RNA
ttatgacacttcaagcaaa

SEQ ID NO: 39915 - RNA, 19 nt, synthetic construct
  misc_feature 1..19: note = siRNA antisense sequence
  source 1..19: mol_type = other RNA
tttgcttgaagtgtcataa

SEQ ID NO: 39916 - RNA, 19 nt, synthetic construct
  misc_feature 1..19: note = siRNA sense sequence
  source 1..19: mol_type = other RNA
tatgacacttcaagcaaat

SEQ ID NO: 39917 - RNA, 19 nt, synthetic construct
  misc_feature 1..19: note = siRNA antisense sequence
  source 1..19: mol_type = other RNA
atttgcttgaagtgtcata

SEQ ID NO: 39918 - RNA, 19 nt, synthetic construct
  misc_feature 1..19: note = siRNA sense sequence
  source 1..19: mol_type = other RNA
atgacacttcaagcaaata

SEQ ID NO: 39919 - RNA, 19 nt, synthetic construct
  misc_feature 1..19: note = siRNA antisense sequence
  source 1..19: mol_type = other RNA
tatttgcttgaagtgtcat

SEQ ID NO: 39920 - RNA, 19 nt, synthetic construct
  misc_feature 1..19: note = siRNA sense sequence
  source 1..19: mol_type = other RNA
tgacacttcaagcaaataa

SEQ ID NO: 39921 - RNA, 19 nt, synthetic construct
  misc_feature 1..19: note = siRNA antisense sequence
  source 1..19: mol_type = other RNA
ttatttgcttgaagtgtca

SEQ ID NO: 39922 - RNA, 19 nt, synthetic construct
  misc_feature 1..19: note = siRNA sense sequence
  source 1..19: mol_type = other RNA
gacacttcaagcaaataag

SEQ ID NO: 39923 - RNA, 19 nt, synthetic construct
  misc_feature 1..19: note = siRNA antisense sequence
  source 1..19: mol_type = other RNA
cttatttgcttgaagtgtc

SEQ ID NO: 39924 - RNA, 19 nt, synthetic construct
  misc_feature 1..19: note = siRNA sense sequence
  source 1..19: mol_type = other RNA
caaagttcttaaagctgac

SEQ ID NO: 39925 - RNA, 19 nt, synthetic construct
  misc_feature 1..19: note = siRNA antisense sequence
  source 1..19: mol_type = other RNA
gtcagctttaagaactttg

SEQ ID NO: 39926 - RNA, 19 nt, synthetic construct
  misc_feature 1..19: note = siRNA sense sequence
  source 1..19: mol_type = other RNA
aaagttcttaaagctgact

SEQ ID NO: 39927 - RNA, 19 nt, synthetic construct
  misc_feature 1..19: note = siRNA antisense sequence
  source 1..19: mol_type = other RNA
agtcagctttaagaacttt

SEQ ID NO: 39928 - RNA, 19 nt, synthetic construct
  misc_feature 1..19: note = siRNA sense sequence
  source 1..19: mol_type = other RNA
agttcttaaagctgactat

SEQ ID NO: 39929 - RNA, 19 nt, synthetic construct
  misc_feature 1..19: note = siRNA antisense sequence
  source 1..19: mol_type = other RNA
atagtcagctttaagaact

SEQ ID NO: 39930 - RNA, 19 nt, synthetic construct
  misc_feature 1..19: note = siRNA sense sequence
  source 1..19: mol_type = other RNA
cattcatgatctggactct

SEQ ID NO: 39931 - RNA, 19 nt, synthetic construct
  misc_feature 1..19: note = siRNA antisense sequence
  source 1..19: mol_type = other RNA
agagtccagatcatgaatg

SEQ ID NO: 39932 - RNA, 19 nt, synthetic construct
  misc_feature 1..19: note = siRNA sense sequence
  source 1..19: mol_type = other RNA
attcatgatctggactctt

SEQ ID NO: 39933 - RNA, 19 nt, synthetic construct
  misc_feature 1..19: note = siRNA antisense sequence
  source 1..19: mol_type = other RNA
aagagtccagatcatgaat

SEQ ID NO: 39934 - RNA, 19 nt, synthetic construct
  misc_feature 1..19: note = siRNA sense sequence
  source 1..19: mol_type = other RNA
tcatgatctggactctttt

SEQ ID NO: 39935 - RNA, 19 nt, synthetic construct
  misc_feature 1..19: note = siRNA antisense sequence
  source 1..19: mol_type = other RNA
aaaagagtccagatcatga

SEQ ID NO: 39936 - RNA, 19 nt, synthetic construct
  misc_feature 1..19: note = siRNA sense sequence
  source 1..19: mol_type = other RNA
tctctagcctcaacttcta

SEQ ID NO: 39937 - RNA, 19 nt, synthetic construct
  misc_feature 1..19: note = siRNA antisense sequence
  source 1..19: mol_type = other RNA
tagaagttgaggctagaga

SEQ ID NO: 39938 - RNA, 19 nt, synthetic construct
  misc_feature 1..19: note = siRNA sense sequence
  source 1..19: mol_type = other RNA
ctctagcctcaacttctac

SEQ ID NO: 39939 - RNA, 19 nt, synthetic construct
  misc_feature 1..19: note = siRNA antisense sequence
  source 1..19: mol_type = other RNA
gtagaagttgaggctagag

SEQ ID NO: 39940 - RNA, 19 nt, synthetic construct
  misc_feature 1..19: note = siRNA sense sequence
  source 1..19: mol_type = other RNA
acttctactgcagttatac

SEQ ID NO: 39941 - RNA, 19 nt, synthetic construct
  misc_feature 1..19: note = siRNA antisense sequence
  source 1..19: mol_type = other RNA
gtataactgcagtagaagt

SEQ ID NO: 39942 - RNA, 19 nt, synthetic construct
  misc_feature 1..19: note = siRNA sense sequence
  source 1..19: mol_type = other RNA
cttctactgcagttatact

SEQ ID NO: 39943 - RNA, 19 nt, synthetic construct
  misc_feature 1..19: note = siRNA antisense sequence
  source 1..19: mol_type = other RNA
agtataactgcagtagaag

SEQ ID NO: 39944 - RNA, 19 nt, synthetic construct
  misc_feature 1..19: note = siRNA sense sequence
  source 1..19: mol_type = other RNA
tatactgagctacttggca

SEQ ID NO: 39945 - RNA, 19 nt, synthetic construct
  misc_feature 1..19: note = siRNA antisense sequence
  source 1..19: mol_type = other RNA
tgccaagtagctcagtata

SEQ ID NO: 39946 - RNA, 19 nt, synthetic construct
  misc_feature 1..19: note = siRNA sense sequence
  source 1..19: mol_type = other RNA
tgagctacttggcatttat

SEQ ID NO: 39947 - RNA, 19 nt, synthetic construct
  misc_feature 1..19: note = siRNA antisense sequence
  source 1..19: mol_type = other RNA
ataaatgccaagtagctca

SEQ ID NO: 39948 - RNA, 19 nt, synthetic construct
  misc_feature 1..19: note = siRNA sense sequence
  source 1..19: mol_type = other RNA
gagctacttggcatttatc

SEQ ID NO: 39949 - RNA, 19 nt, synthetic construct
  misc_feature 1..19: note = siRNA antisense sequence
  source 1..19: mol_type = other RNA
gataaatgccaagtagctc

SEQ ID NO: 39950 - RNA, 19 nt, synthetic construct
  misc_feature 1..19: note = siRNA sense sequence
  source 1..19: mol_type = other RNA
agctacttggcatttatca

SEQ ID NO: 39951 - RNA, 19 nt, synthetic construct
  misc_feature 1..19: note = siRNA antisense sequence
  source 1..19: mol_type = other RNA
tgataaatgccaagtagct

SEQ ID NO: 39952 - RNA, 19 nt, synthetic construct
  misc_feature 1..19: note = siRNA sense sequence
  source 1..19: mol_type = other RNA
gctacttggcatttatcaa

SEQ ID NO: 39953 - RNA, 19 nt, synthetic construct
  misc_feature 1..19: note = siRNA antisense sequence
  source 1..19: mol_type = other RNA
ttgataaatgccaagtagc

SEQ ID NO: 39954 - RNA, 19 nt, synthetic construct
  misc_feature 1..19: note = siRNA sense sequence
  source 1..19: mol_type = other RNA
acttggcatttatcaaagg

SEQ ID NO: 39955 - RNA, 19 nt, synthetic construct
  misc_feature 1..19: note = siRNA antisense sequence
  source 1..19: mol_type = other RNA
cctttgataaatgccaagt

SEQ ID NO: 39956 - RNA, 19 nt, synthetic construct
  misc_feature 1..19: note = siRNA sense sequence
  source 1..19: mol_type = other RNA
cttggcatttatcaaagga

SEQ ID NO: 39957 - RNA, 19 nt, synthetic construct
  misc_feature 1..19: note = siRNA antisense sequence
  source 1..19: mol_type = other RNA
tcctttgataaatgccaag

SEQ ID NO: 39958 - RNA, 19 nt, synthetic construct
  misc_feature 1..19: note = siRNA sense sequence
  source 1..19: mol_type = other RNA
ttggcatttatcaaaggag

SEQ ID NO: 39959 - RNA, 19 nt, synthetic construct
  misc_feature 1..19: note = siRNA antisense sequence
  source 1..19: mol_type = other RNA
ctcctttgataaatgccaa

SEQ ID NO: 39960 - RNA, 19 nt, synthetic construct
  misc_feature 1..19: note = siRNA sense sequence
  source 1..19: mol_type = other RNA
tggcatttatcaaaggagt

SEQ ID NO: 39961 - RNA, 19 nt, synthetic construct
  misc_feature 1..19: note = siRNA antisense sequence
  source 1..19: mol_type = other RNA
actcctttgataaatgcca

SEQ ID NO: 39962 - RNA, 19 nt, synthetic construct
  misc_feature 1..19: note = siRNA sense sequence
  source 1..19: mol_type = other RNA
gcatttatcaaaggagtgg

SEQ ID NO: 39963 - RNA, 19 nt, synthetic construct
  misc_feature 1..19: note = siRNA antisense sequence
  source 1..19: mol_type = other RNA
ccactcctttgataaatgc

SEQ ID NO: 39964 - RNA, 19 nt, synthetic construct
  misc_feature 1..19: note = siRNA sense sequence
  source 1..19: mol_type = other RNA
catttatcaaaggagtggt

SEQ ID NO: 39965 - RNA, 19 nt, synthetic construct
  misc_feature 1..19: note = siRNA antisense sequence
  source 1..19: mol_type = other RNA
accactcctttgataaatg

SEQ ID NO: 39966 - RNA, 19 nt, synthetic construct
  misc_feature 1..19: note = siRNA sense sequence
  source 1..19: mol_type = other RNA
atttatcaaaggagtggta

SEQ ID NO: 39967 - RNA, 19 nt, synthetic construct
  misc_feature 1..19: note = siRNA antisense sequence
  source 1..19: mol_type = other RNA
taccactcctttgataaat

SEQ ID NO: 39968 - RNA, 19 nt, synthetic construct
  misc_feature 1..19: note = siRNA sense sequence
  source 1..19: mol_type = other RNA
tacttctaagactttgctg

SEQ ID NO: 39969 - RNA, 19 nt, synthetic construct
  misc_feature 1..19: note = siRNA antisense sequence
  source 1..19: mol_type = other RNA
cagcaaagtcttagaagta

SEQ ID NO: 39970 - RNA, 19 nt, synthetic construct
  misc_feature 1..19: note = siRNA sense sequence
  source 1..19: mol_type = other RNA
cttctaagactttgctgaa

SEQ ID NO: 39971 - RNA, 19 nt, synthetic construct
  misc_feature 1..19: note = siRNA antisense sequence
  source 1..19: mol_type = other RNA
ttcagcaaagtcttagaag

SEQ ID NO: 39972 - RNA, 19 nt, synthetic construct
  misc_feature 1..19: note = siRNA sense sequence
  source 1..19: mol_type = other RNA
tttgctgaagttgcatcaa

SEQ ID NO: 39973 - RNA, 19 nt, synthetic construct
  misc_feature 1..19: note = siRNA antisense sequence
  source 1..19: mol_type = other RNA
ttgatgcaacttcagcaaa

SEQ ID NO: 39974 - RNA, 19 nt, synthetic construct
  misc_feature 1..19: note = siRNA sense sequence
  source 1..19: mol_type = other RNA
ttgctgaagttgcatcaag

SEQ ID NO: 39975 - RNA, 19 nt, synthetic construct
  misc_feature 1..19: note = siRNA antisense sequence
  source 1..19: mol_type = other RNA
cttgatgcaacttcagcaa

SEQ ID NO: 39976 - RNA, 19 nt, synthetic construct
  misc_feature 1..19: note = siRNA sense sequence
  source 1..19: mol_type = other RNA
gctgaagttgcatcaagtt

SEQ ID NO: 39977 - RNA, 19 nt, synthetic construct
  misc_feature 1..19: note = siRNA antisense sequence
  source 1..19: mol_type = other RNA
aacttgatgcaacttcagc

SEQ ID NO: 39978 - RNA, 19 nt, synthetic construct
  misc_feature 1..19: note = siRNA sense sequence
  source 1..19: mol_type = other RNA
ctgaagttgcatcaagttc

SEQ ID NO: 39979 - RNA, 19 nt, synthetic construct
  misc_feature 1..19: note = siRNA antisense sequence
  source 1..19: mol_type = other RNA
gaacttgatgcaacttcag

SEQ ID NO: 39980 - RNA, 19 nt, synthetic construct
  misc_feature 1..19: note = siRNA sense sequence
  source 1..19: mol_type = other RNA
agttgcatcaagttcagac

SEQ ID NO: 39981 - RNA, 19 nt, synthetic construct
  misc_feature 1..19: note = siRNA antisense sequence
  source 1..19: mol_type = other RNA
gtctgaacttgatgcaact

SEQ ID NO: 39982 - RNA, 19 nt, synthetic construct
  misc_feature 1..19: note = siRNA sense sequence
  source 1..19: mol_type = other RNA
gttgcatcaagttcagacc

SEQ ID NO: 39983 - RNA, 19 nt, synthetic construct
  misc_feature 1..19: note = siRNA antisense sequence
  source 1..19: mol_type = other RNA
ggtctgaacttgatgcaac

SEQ ID NO: 39984 - RNA, 19 nt, synthetic construct
  misc_feature 1..19: note = siRNA sense sequence
  source 1..19: mol_type = other RNA
ttgcatcaagttcagacct

SEQ ID NO: 39985 - RNA, 19 nt, synthetic construct
  misc_feature 1..19: note = siRNA antisense sequence
  source 1..19: mol_type = other RNA
aggtctgaacttgatgcaa

SEQ ID NO: 39986 - RNA, 19 nt, synthetic construct
  misc_feature 1..19: note = siRNA sense sequence
  source 1..19: mol_type = other RNA
tgcatcaagttcagaccta

SEQ ID NO: 39987 - RNA, 19 nt, synthetic construct
  misc_feature 1..19: note = siRNA antisense sequence
  source 1..19: mol_type = other RNA
taggtctgaacttgatgca

SEQ ID NO: 39988 - RNA, 19 nt, synthetic construct
  misc_feature 1..19: note = siRNA sense sequence
  source 1..19: mol_type = other RNA
gcatcaagttcagacctat

SEQ ID NO: 39989 - RNA, 19 nt, synthetic construct
  misc_feature 1..19: note = siRNA antisense sequence
  source 1..19: mol_type = other RNA
ataggtctgaacttgatgc

SEQ ID NO: 39990 - RNA, 19 nt, synthetic construct
  misc_feature 1..19: note = siRNA sense sequence
  source 1..19: mol_type = other RNA
catcaagttcagacctatt

SEQ ID NO: 39991 - RNA, 19 nt, synthetic construct
  misc_feature 1..19: note = siRNA antisense sequence
  source 1..19: mol_type = other RNA
aataggtctgaacttgatg

SEQ ID NO: 39992 - RNA, 19 nt, synthetic construct
  misc_feature 1..19: note = siRNA sense sequence
  source 1..19: mol_type = other RNA
atcaagttcagacctattc

SEQ ID NO: 39993 - RNA, 19 nt, synthetic construct
  misc_feature 1..19: note = siRNA antisense sequence
  source 1..19: mol_type = other RNA
gaataggtctgaacttgat

SEQ ID NO: 39994 - RNA, 19 nt, synthetic construct
  misc_feature 1..19: note = siRNA sense sequence
  source 1..19: mol_type = other RNA
tcaagttcagacctattca

SEQ ID NO: 39995 - RNA, 19 nt, synthetic construct
  misc_feature 1..19: note = siRNA antisense sequence
  source 1..19: mol_type = other RNA
tgaataggtctgaacttga

SEQ ID NO: 39996 - RNA, 19 nt, synthetic construct
  misc_feature 1..19: note = siRNA sense sequence
  source 1..19: mol_type = other RNA
caagttcagacctattcaa

SEQ ID NO: 39997 - RNA, 19 nt, synthetic construct
  misc_feature 1..19: note = siRNA antisense sequence
  source 1..19: mol_type = other RNA
ttgaataggtctgaacttg

SEQ ID NO: 39998 - RNA, 19 nt, synthetic construct
  misc_feature 1..19: note = siRNA sense sequence
  source 1..19: mol_type = other RNA
aagttcagacctattcaat

SEQ ID NO: 39999 - RNA, 19 nt, synthetic construct
  misc_feature 1..19: note = siRNA antisense sequence
  source 1..19: mol_type = other RNA
attgaataggtctgaactt

SEQ ID NO: 40000 - RNA, 19 nt, synthetic construct
  misc_feature 1..19: note = siRNA sense sequence
  source 1..19: mol_type = other RNA
agttcagacctattcaata

SEQ ID NO: 40001 - RNA, 19 nt, synthetic construct
  misc_feature 1..19: note = siRNA antisense sequence
  source 1..19: mol_type = other RNA
tattgaataggtctgaact

SEQ ID NO: 40002 - RNA, 19 nt, synthetic construct
  misc_feature 1..19: note = siRNA sense sequence
  source 1..19: mol_type = other RNA
tagttgtgcttctctctct

SEQ ID NO: 40003 - RNA, 19 nt, synthetic construct
  misc_feature 1..19: note = siRNA antisense sequence
  source 1..19: mol_type = other RNA
agagagagaagcacaacta

SEQ ID NO: 40004 - RNA, 19 nt, synthetic construct
  misc_feature 1..19: note = siRNA sense sequence
  source 1..19: mol_type = other RNA
agttgtgcttctctctcta

SEQ ID NO: 40005 - RNA, 19 nt, synthetic construct
  misc_feature 1..19: note = siRNA antisense sequence
  source 1..19: mol_type = other RNA
tagagagagaagcacaact

SEQ ID NO: 40006 - RNA, 19 nt, synthetic construct
  misc_feature 1..19: note = siRNA sense sequence
  source 1..19: mol_type = other RNA
gttgtgcttctctctctaa

SEQ ID NO: 40007 - RNA, 19 nt, synthetic construct
  misc_feature 1..19: note = siRNA antisense sequence
  source 1..19: mol_type = other RNA
ttagagagagaagcacaac

SEQ ID NO: 40008 - RNA, 19 nt, synthetic construct
  misc_feature 1..19: note = siRNA sense sequence
  source 1..19: mol_type = other RNA
ttgtgcttctctctctaag

SEQ ID NO: 40009 - RNA, 19 nt, synthetic construct
  misc_feature 1..19: note = siRNA antisense sequence
  source 1..19: mol_type = other RNA
cttagagagagaagcacaa

SEQ ID NO: 40010 - RNA, 19 nt, synthetic construct
  misc_feature 1..19: note = siRNA sense sequence
  source 1..19: mol_type = other RNA
tgtgcttctctctctaagt

SEQ ID NO: 40011 - RNA, 19 nt, synthetic construct
  misc_feature 1..19: note = siRNA antisense sequence
  source 1..19: mol_type = other RNA
acttagagagagaagcaca

SEQ ID NO: 40012 - RNA, 19 nt, synthetic construct
  misc_feature 1..19: note = siRNA sense sequence
  source 1..19: mol_type = other RNA
gtgcttctctctctaagtt

SEQ ID NO: 40013 - RNA, 19 nt, synthetic construct
  misc_feature 1..19: note = siRNA antisense sequence
  source 1..19: mol_type = other RNA
aacttagagagagaagcac

SEQ ID NO: 40014 - RNA, 19 nt, synthetic construct
  misc_feature 1..19: note = siRNA sense sequence
  source 1..19: mol_type = other RNA
tgcttctctctctaagtta

SEQ ID NO: 40015 - RNA, 19 nt, synthetic construct
  misc_feature 1..19: note = siRNA antisense sequence
  source 1..19: mol_type = other RNA
taacttagagagagaagca

SEQ ID NO: 40016 - RNA, 19 nt, synthetic construct
  misc_feature 1..19: note = siRNA sense sequence
  source 1..19: mol_type = other RNA
gcttctctctctaagttat

SEQ ID NO: 40017 - RNA, 19 nt, synthetic construct
  misc_feature 1..19: note = siRNA antisense sequence
  source 1..19: mol_type = other RNA
ataacttagagagagaagc

SEQ ID NO: 40018 - RNA, 19 nt, synthetic construct
  misc_feature 1..19: note = siRNA sense sequence
  source 1..19: mol_type = other RNA
cttctctctctaagttata

SEQ ID NO: 40019 - RNA, 19 nt, synthetic construct
  misc_feature 1..19: note = siRNA antisense sequence
  source 1..19: mol_type = other RNA
tataacttagagagagaag

SEQ ID NO: 40020 - RNA, 19 nt, synthetic construct
  misc_feature 1..19: note = siRNA sense sequence
  source 1..19: mol_type = other RNA
ctctctctaagttataagc

SEQ ID NO: 40021 - RNA, 19 nt, synthetic construct
  misc_feature 1..19: note = siRNA antisense sequence
  source 1..19: mol_type = other RNA
gcttataacttagagagag

SEQ ID NO: 40022 - RNA, 19 nt, synthetic construct
  misc_feature 1..19: note = siRNA sense sequence
  source 1..19: mol_type = other RNA
tctctctaagttataagca

SEQ ID NO: 40023 - RNA, 19 nt, synthetic construct
  misc_feature 1..19: note = siRNA antisense sequence
  source 1..19: mol_type = other RNA
tgcttataacttagagaga

SEQ ID NO: 40024 - RNA, 19 nt, synthetic construct
  misc_feature 1..19: note = siRNA sense sequence
  source 1..19: mol_type = other RNA
ctctctaagttataagcaa

SEQ ID NO: 40025 - RNA, 19 nt, synthetic construct
  misc_feature 1..19: note = siRNA antisense sequence
  source 1..19: mol_type = other RNA
ttgcttataacttagagag

SEQ ID NO: 40026 - RNA, 19 nt, synthetic construct
  misc_feature 1..19: note = siRNA sense sequence
  source 1..19: mol_type = other RNA
tttatatcctcaggacctg

SEQ ID NO: 40027 - RNA, 19 nt, synthetic construct
  misc_feature 1..19: note = siRNA antisense sequence
  source 1..19: mol_type = other RNA
caggtcctgaggatataaa

SEQ ID NO: 40028 - RNA, 19 nt, synthetic construct
  misc_feature 1..19: note = siRNA sense sequence
  source 1..19: mol_type = other RNA
tatatcctcaggacctggc

SEQ ID NO: 40029 - RNA, 19 nt, synthetic construct
  misc_feature 1..19: note = siRNA antisense sequence
  source 1..19: mol_type = other RNA
gccaggtcctgaggatata

SEQ ID NO: 40030 - RNA, 19 nt, synthetic construct
  misc_feature 1..19: note = siRNA sense sequence
  source 1..19: mol_type = other RNA
atatcctcaggacctggca

SEQ ID NO: 40031 - RNA, 19 nt, synthetic construct
  misc_feature 1..19: note = siRNA antisense sequence
  source 1..19: mol_type = other RNA
tgccaggtcctgaggatat

SEQ ID NO: 40032 - RNA, 19 nt, synthetic construct
  misc_feature 1..19: note = siRNA sense sequence
  source 1..19: mol_type = other RNA
tatcctcaggacctggcat

SEQ ID NO: 40033 - RNA, 19 nt, synthetic construct
  misc_feature 1..19: note = siRNA antisense sequence
  source 1..19: mol_type = other RNA
atgccaggtcctgaggata

SEQ ID NO: 40034 - RNA, 19 nt, synthetic construct
  misc_feature 1..19: note = siRNA sense sequence
  source 1..19: mol_type = other RNA
atcctcaggacctggcata

SEQ ID NO: 40035 - RNA, 19 nt, synthetic construct
  misc_feature 1..19: note = siRNA antisense sequence
  source 1..19: mol_type = other RNA
tatgccaggtcctgaggat

SEQ ID NO: 40036 - RNA, 19 nt, synthetic construct
  misc_feature 1..19: note = siRNA sense sequence
  source 1..19: mol_type = other RNA
tcctcaggacctggcataa

SEQ ID NO: 40037 - RNA, 19 nt, synthetic construct
  misc_feature 1..19: note = siRNA antisense sequence
  source 1..19: mol_type = other RNA
ttatgccaggtcctgagga

SEQ ID NO: 40038 - RNA, 19 nt, synthetic construct
  misc_feature 1..19: note = siRNA sense sequence
  source 1..19: mol_type = other RNA
cctcaggacctggcataaa

SEQ ID NO: 40039 - RNA, 19 nt, synthetic construct
  misc_feature 1..19: note = siRNA antisense sequence
  source 1..19: mol_type = other RNA
tttatgccaggtcctgagg

SEQ ID NO: 40040 - RNA, 19 nt, synthetic construct
  misc_feature 1..19: note = siRNA sense sequence
  source 1..19: mol_type = other RNA
ctcaggacctggcataaat

SEQ ID NO: 40041 - RNA, 19 nt, synthetic construct
  misc_feature 1..19: note = siRNA antisense sequence
  source 1..19: mol_type = other RNA
atttatgccaggtcctgag

SEQ ID NO: 40042 - RNA, 19 nt, synthetic construct
  misc_feature 1..19: note = siRNA sense sequence
  source 1..19: mol_type = other RNA
tcaggacctggcataaatg

SEQ ID NO: 40043 - RNA, 19 nt, synthetic construct
  misc_feature 1..19: note = siRNA antisense sequence
  source 1..19: mol_type = other RNA
catttatgccaggtcctga

SEQ ID NO: 40044 - RNA, 19 nt, synthetic construct
  misc_feature 1..19: note = siRNA sense sequence
  source 1..19: mol_type = other RNA
caggacctggcataaatgc

SEQ ID NO: 40045 - RNA, 19 nt, synthetic construct
  misc_feature 1..19: note = siRNA antisense sequence
  source 1..19: mol_type = other RNA
gcatttatgccaggtcctg

SEQ ID NO: 40046 - RNA, 19 nt, synthetic construct
  misc_feature 1..19: note = siRNA sense sequence
  source 1..19: mol_type = other RNA
gcccagcatgtaaaatatt

SEQ ID NO: 40047 - RNA, 19 nt, synthetic construct
  misc_feature 1..19: note = siRNA antisense sequence
  source 1..19: mol_type = other RNA
aatattttacatgctgggc

SEQ ID NO: 40048 - RNA, 19 nt, synthetic construct
  misc_feature 1..19: note = siRNA sense sequence
  source 1..19: mol_type = other RNA
taattactccagcctcaaa

SEQ ID NO: 40049 - RNA, 19 nt, synthetic construct
  misc_feature 1..19: note = siRNA antisense sequence
  source 1..19: mol_type = other RNA
tttgaggctggagtaatta

SEQ ID NO: 40050 - RNA, 19 nt, synthetic construct
  misc_feature 1..19: note = siRNA sense sequence
  source 1..19: mol_type = other RNA
aattactccagcctcaaat

SEQ ID NO: 40051 - RNA, 19 nt, synthetic construct
  misc_feature 1..19: note = siRNA antisense sequence
  source 1..19: mol_type = other RNA
atttgaggctggagtaatt

SEQ ID NO: 40052 - RNA, 19 nt, synthetic construct
  misc_feature 1..19: note = siRNA sense sequence
  source 1..19: mol_type = other RNA
attactccagcctcaaatt

SEQ ID NO: 40053 - RNA, 19 nt, synthetic construct
  misc_feature 1..19: note = siRNA antisense sequence
  source 1..19: mol_type = other RNA
aatttgaggctggagtaat

SEQ ID NO: 40054 - RNA, 19 nt, synthetic construct
  misc_feature 1..19: note = siRNA sense sequence
  source 1..19: mol_type = other RNA
ttactccagcctcaaatta

SEQ ID NO: 40055 - RNA, 19 nt, synthetic construct
  misc_feature 1..19: note = siRNA antisense sequence
  source 1..19: mol_type = other RNA
taatttgaggctggagtaa

SEQ ID NO: 40056 - RNA, 19 nt, synthetic construct
  misc_feature 1..19: note = siRNA sense sequence
  source 1..19: mol_type = other RNA
tactccagcctcaaattaa

SEQ ID NO: 40057 - RNA, 19 nt, synthetic construct
  misc_feature 1..19: note = siRNA antisense sequence
  source 1..19: mol_type = other RNA
ttaatttgaggctggagta

SEQ ID NO: 40058 - RNA, 19 nt, synthetic construct
  misc_feature 1..19: note = siRNA sense sequence
  source 1..19: mol_type = other RNA
actccagcctcaaattaaa

SEQ ID NO: 40059 - RNA, 19 nt, synthetic construct
  misc_feature 1..19: note = siRNA antisense sequence
  source 1..19: mol_type = other RNA
tttaatttgaggctggagt

SEQ ID NO: 40060 - RNA, 19 nt, synthetic construct
  misc_feature 1..19: note = siRNA sense sequence
  source 1..19: mol_type = other RNA
ctccagcctcaaattaaat

SEQ ID NO: 40061 - RNA, 19 nt, synthetic construct
  misc_feature 1..19: note = siRNA antisense sequence
  source 1..19: mol_type = other RNA
atttaatttgaggctggag

SEQ ID NO: 40062 - RNA, 19 nt, synthetic construct
  misc_feature 1..19: note = siRNA sense sequence
  source 1..19: mol_type = other RNA
tccagcctcaaattaaata

SEQ ID NO: 40063 - RNA, 19 nt, synthetic construct
  misc_feature 1..19: note = siRNA antisense sequence
  source 1..19: mol_type = other RNA
tatttaatttgaggctgga

SEQ ID NO: 40064 - RNA, 19 nt, synthetic construct
  misc_feature 1..19: note = siRNA sense sequence
  source 1..19: mol_type = other RNA
ccagcctcaaattaaatac

SEQ ID NO: 40065 - RNA, 19 nt, synthetic construct
  misc_feature 1..19: note = siRNA antisense sequence
  source 1..19: mol_type = other RNA
gtatttaatttgaggctgg

SEQ ID NO: 40066 - RNA, 19 nt, synthetic construct
  misc_feature 1..19: note = siRNA sense sequence
  source 1..19: mol_type = other RNA
cagcctcaaattaaatact

SEQ ID NO: 40067 - RNA, 19 nt, synthetic construct
  misc_feature 1..19: note = siRNA antisense sequence
  source 1..19: mol_type = other RNA
agtatttaatttgaggctg

SEQ ID NO: 40068 - RNA, 19 nt, synthetic construct
  misc_feature 1..19: note = siRNA sense sequence
  source 1..19: mol_type = other RNA
accaatttattccattacg

SEQ ID NO: 40069 - RNA, 19 nt, synthetic construct
  misc_feature 1..19: note = siRNA antisense sequence
  source 1..19: mol_type = other RNA
cgtaatggaataaattggt

SEQ ID NO: 40070 - RNA, 19 nt, synthetic construct
  misc_feature 1..19: note = siRNA sense sequence
  source 1..19: mol_type = other RNA
tcttgatgtattcctgatt

SEQ ID NO: 40071 - RNA, 19 nt, synthetic construct
  misc_feature 1..19: note = siRNA antisense sequence
  source 1..19: mol_type = other RNA
aatcaggaatacatcaaga

SEQ ID NO: 40072 - RNA, 19 nt, synthetic construct
  misc_feature 1..19: note = siRNA sense sequence
  source 1..19: mol_type = other RNA
cttgatgtattcctgatta

SEQ ID NO: 40073 - RNA, 19 nt, synthetic construct
  misc_feature 1..19: note = siRNA antisense sequence
  source 1..19: mol_type = other RNA
taatcaggaatacatcaag

SEQ ID NO: 40074 - RNA, 19 nt, synthetic construct
  misc_feature 1..19: note = siRNA sense sequence
  source 1..19: mol_type = other RNA
gatgtattcctgattaatc

SEQ ID NO: 40075 - RNA, 19 nt, synthetic construct
  misc_feature 1..19: note = siRNA antisense sequence
  source 1..19: mol_type = other RNA
gattaatcaggaatacatc

SEQ ID NO: 40076 - RNA, 19 nt, synthetic construct
  misc_feature 1..19: note = siRNA sense sequence
  source 1..19: mol_type = other RNA
acatcgatgttagttgttt

SEQ ID NO: 40077 - RNA, 19 nt, synthetic construct
  misc_feature 1..19: note = siRNA antisense sequence
  source 1..19: mol_type = other RNA
aaacaactaacatcgatgt

SEQ ID NO: 40078 - RNA, 19 nt, synthetic construct
  misc_feature 1..19: note = siRNA sense sequence
  source 1..19: mol_type = other RNA
catcgatgttagttgttta

SEQ ID NO: 40079 - RNA, 19 nt, synthetic construct
  misc_feature 1..19: note = siRNA antisense sequence
  source 1..19: mol_type = other RNA
taaacaactaacatcgatg

SEQ ID NO: 40080 - RNA, 19 nt, synthetic construct
  misc_feature 1..19: note = siRNA sense sequence
  source 1..19: mol_type = other RNA
cgatgttagttgtttattc

SEQ ID NO: 40081 - RNA, 19 nt, synthetic construct
  misc_feature 1..19: note = siRNA antisense sequence
  source 1..19: mol_type = other RNA
gaataaacaactaacatcg

SEQ ID NO: 40082 - RNA, 19 nt, synthetic construct
  misc_feature 1..19: note = siRNA sense sequence
  source 1..19: mol_type = other RNA
catttagatagcacatact

SEQ ID NO: 40083 - RNA, 19 nt, synthetic construct
  misc_feature 1..19: note = siRNA antisense sequence
  source 1..19: mol_type = other RNA
agtatgtgctatctaaatg

SEQ ID NO: 40084 - RNA, 19 nt, synthetic construct
  misc_feature 1..19: note = siRNA sense sequence
  source 1..19: mol_type = other RNA
tagcacatactataagcca

SEQ ID NO: 40085 - RNA, 19 nt, synthetic construct
  misc_feature 1..19: note = siRNA antisense sequence
  source 1..19: mol_type = other RNA
tggcttatagtatgtgcta

SEQ ID NO: 40086 - RNA, 19 nt, synthetic construct
  misc_feature 1..19: note = siRNA sense sequence
  source 1..19: mol_type = other RNA
catactataagccaaatac

SEQ ID NO: 40087 - RNA, 19 nt, synthetic construct
  misc_feature 1..19: note = siRNA antisense sequence
  source 1..19: mol_type = other RNA
gtatttggcttatagtatg

SEQ ID NO: 40088 - RNA, 19 nt, synthetic construct
  misc_feature 1..19: note = siRNA sense sequence
  source 1..19: mol_type = other RNA
tactataagccaaatactg

SEQ ID NO: 40089 - RNA, 19 nt, synthetic construct
  misc_feature 1..19: note = siRNA antisense sequence
  source 1..19: mol_type = other RNA
cagtatttggcttatagta

SEQ ID NO: 40090 - RNA, 19 nt, synthetic construct
  misc_feature 1..19: note = siRNA sense sequence
  source 1..19: mol_type = other RNA
taagccaaatactgttcta

SEQ ID NO: 40091 - RNA, 19 nt, synthetic construct
  misc_feature 1..19: note = siRNA antisense sequence
  source 1..19: mol_type = other RNA
tagaacagtatttggctta

SEQ ID NO: 40092 - RNA, 19 nt, synthetic construct
  misc_feature 1..19: note = siRNA sense sequence
  source 1..19: mol_type = other RNA
aagccaaatactgttctaa

SEQ ID NO: 40093 - RNA, 19 nt, synthetic construct
  misc_feature 1..19: note = siRNA antisense sequence
  source 1..19: mol_type = other RNA
ttagaacagtatttggctt

SEQ ID NO: 40094 - RNA, 19 nt, synthetic construct
  misc_feature 1..19: note = siRNA sense sequence
  source 1..19: mol_type = other RNA
aatcacagatggagtaatt

SEQ ID NO: 40095 - RNA, 19 nt, synthetic construct
  misc_feature 1..19: note = siRNA antisense sequence
  source 1..19: mol_type = other RNA
aattactccatctgtgatt

SEQ ID NO: 40096 - RNA, 19 nt, synthetic construct
  misc_feature 1..19: note = siRNA sense sequence
  source 1..19: mol_type = other RNA
atcacagatggagtaattg

SEQ ID NO: 40097 - RNA, 19 nt, synthetic construct
  misc_feature 1..19: note = siRNA antisense sequence
  source 1..19: mol_type = other RNA
caattactccatctgtgat

SEQ ID NO: 40098 - RNA, 19 nt, synthetic construct
  misc_feature 1..19: note = siRNA sense sequence
  source 1..19: mol_type = other RNA
tcacagatggagtaattga

SEQ ID NO: 40099 - RNA, 19 nt, synthetic construct
  misc_feature 1..19: note = siRNA antisense sequence
  source 1..19: mol_type = other RNA
tcaattactccatctgtga

SEQ ID NO: 40100 - RNA, 19 nt, synthetic construct
  misc_feature 1..19: note = siRNA sense sequence
  source 1..19: mol_type = other RNA
tggagtaattgacttgtcc

SEQ ID NO: 40101 - RNA, 19 nt, synthetic construct
  misc_feature 1..19: note = siRNA antisense sequence
  source 1..19: mol_type = other RNA
ggacaagtcaattactcca

SEQ ID NO: 40102 - RNA, 19 nt, synthetic construct
  misc_feature 1..19: note = siRNA sense sequence
  source 1..19: mol_type = other RNA
ggagtaattgacttgtcct

SEQ ID NO: 40103 - RNA, 19 nt, synthetic construct
  misc_feature 1..19: note = siRNA antisense sequence
  source 1..19: mol_type = other RNA
aggacaagtcaattactcc

SEQ ID NO: 40104 - RNA, 19 nt, synthetic construct
  misc_feature 1..19: note = siRNA sense sequence
  source 1..19: mol_type = other RNA
gagtaattgacttgtccta

SEQ ID NO: 40105 - RNA, 19 nt, synthetic construct
  misc_feature 1..19: note = siRNA antisense sequence
  source 1..19: mol_type = other RNA
taggacaagtcaattactc

SEQ ID NO: 40106 - RNA, 19 nt, synthetic construct
  misc_feature 1..19: note = siRNA sense sequence
  source 1..19: mol_type = other RNA
agtaattgacttgtcctaa

SEQ ID NO: 40107 - RNA, 19 nt, synthetic construct
  misc_feature 1..19: note = siRNA antisense sequence
  source 1..19: mol_type = other RNA
ttaggacaagtcaattact

SEQ ID NO: 40108 - RNA, 19 nt, synthetic construct
  misc_feature 1..19: note = siRNA sense sequence
  source 1..19: mol_type = other RNA
gtaattgacttgtcctaac

SEQ ID NO: 40109 - RNA, 19 nt, synthetic construct
  misc_feature 1..19: note = siRNA antisense sequence
  source 1..19: mol_type = other RNA
gttaggacaagtcaattac

SEQ ID NO: 40110 - RNA, 19 nt, synthetic construct
  misc_feature 1..19: note = siRNA sense sequence
  source 1..19: mol_type = other RNA
taattgacttgtcctaacc

SEQ ID NO: 40111 - RNA, 19 nt, synthetic construct
  misc_feature 1..19: note = siRNA antisense sequence
  source 1..19: mol_type = other RNA
ggttaggacaagtcaatta

SEQ ID NO: 40112 - RNA, 19 nt, synthetic construct
  misc_feature 1..19: note = siRNA sense sequence
  source 1..19: mol_type = other RNA
tatagctaagtgaatggta

SEQ ID NO: 40113 - RNA, 19 nt, synthetic construct
  misc_feature 1..19: note = siRNA antisense sequence
  source 1..19: mol_type = other RNA
taccattcacttagctata

SEQ ID NO: 40114 - RNA, 19 nt, synthetic construct
  misc_feature 1..19: note = siRNA sense sequence
  source 1..19: mol_type = other RNA
atagctaagtgaatggtaa

SEQ ID NO: 40115 - RNA, 19 nt, synthetic construct
  misc_feature 1..19: note = siRNA antisense sequence
  source 1..19: mol_type = other RNA
ttaccattcacttagctat

SEQ ID NO: 40116 - RNA, 19 nt, synthetic construct
  misc_feature 1..19: note = siRNA sense sequence
  source 1..19: mol_type = other RNA
tagctaagtgaatggtaaa

SEQ ID NO: 40117 - RNA, 19 nt, synthetic construct
  misc_feature 1..19: note = siRNA antisense sequence
  source 1..19: mol_type = other RNA
tttaccattcacttagcta

SEQ ID NO: 40118 - RNA, 19 nt, synthetic construct
  misc_feature 1..19: note = siRNA sense sequence
  source 1..19: mol_type = other RNA
ctaagtgaatggtaaagcc

SEQ ID NO: 40119 - RNA, 19 nt, synthetic construct
  misc_feature 1..19: note = siRNA antisense sequence
  source 1..19: mol_type = other RNA
ggctttaccattcacttag

SEQ ID NO: 40120 - RNA, 19 nt, synthetic construct
  misc_feature 1..19: note = siRNA sense sequence
  source 1..19: mol_type = other RNA
taagtgaatggtaaagcca

SEQ ID NO: 40121 - RNA, 19 nt, synthetic construct
  misc_feature 1..19: note = siRNA antisense sequence
  source 1..19: mol_type = other RNA
tggctttaccattcactta

SEQ ID NO: 40122 - RNA, 19 nt, synthetic construct
  misc_feature 1..19: note = siRNA sense sequence
  source 1..19: mol_type = other RNA
tggtaaagccataatttga

SEQ ID NO: 40123 - RNA, 19 nt, synthetic construct
  misc_feature 1..19: note = siRNA antisense sequence
  source 1..19: mol_type = other RNA
tcaaattatggctttacca

SEQ ID NO: 40124 - RNA, 19 nt, synthetic construct
  misc_feature 1..19: note = siRNA sense sequence
  source 1..19: mol_type = other RNA
ggcctagcacatggtataa

SEQ ID NO: 40125 - RNA, 19 nt, synthetic construct
  misc_feature 1..19: note = siRNA antisense sequence
  source 1..19: mol_type = other RNA
ttataccatgtgctaggcc

SEQ ID NO: 40126 - RNA, 19 nt, synthetic construct
  misc_feature 1..19: note = siRNA sense sequence
  source 1..19: mol_type = other RNA
gcctagcacatggtataaa

SEQ ID NO: 40127 - RNA, 19 nt, synthetic construct
  misc_feature 1..19: note = siRNA antisense sequence
  source 1..19: mol_type = other RNA
tttataccatgtgctaggc

SEQ ID NO: 40128 - RNA, 19 nt, synthetic construct
  misc_feature 1..19: note = siRNA sense sequence
  source 1..19: mol_type = other RNA
cctagcacatggtataaat

SEQ ID NO: 40129 - RNA, 19 nt, synthetic construct
  misc_feature 1..19: note = siRNA antisense sequence
  source 1..19: mol_type = other RNA
atttataccatgtgctagg

SEQ ID NO: 40130 - RNA, 19 nt, synthetic construct
  misc_feature 1..19: note = siRNA sense sequence
  source 1..19: mol_type = other RNA
tagcacatggtataaattc

SEQ ID NO: 40131 - RNA, 19 nt, synthetic construct
  misc_feature 1..19: note = siRNA antisense sequence
  source 1..19: mol_type = other RNA
gaatttataccatgtgcta

SEQ ID NO: 40132 - RNA, 19 nt, synthetic construct
  misc_feature 1..19: note = siRNA sense sequence
  source 1..19: mol_type = other RNA
agcacatggtataaattca

SEQ ID NO: 40133 - RNA, 19 nt, synthetic construct
  misc_feature 1..19: note = siRNA antisense sequence
  source 1..19: mol_type = other RNA
tgaatttataccatgtgct

SEQ ID NO: 40134 - RNA, 19 nt, synthetic construct
  misc_feature 1..19: note = siRNA sense sequence
  source 1..19: mol_type = other RNA
gcacatggtataaattcaa

SEQ ID NO: 40135 - RNA, 19 nt, synthetic construct
  misc_feature 1..19: note = siRNA antisense sequence
  source 1..19: mol_type = other RNA
ttgaatttataccatgtgc

SEQ ID NO: 40136 - RNA, 19 nt, synthetic construct
  misc_feature 1..19: note = siRNA sense sequence
  source 1..19: mol_type = other RNA
attcaataaagcctagctg

SEQ ID NO: 40137 - RNA, 19 nt, synthetic construct
  misc_feature 1..19: note = siRNA antisense sequence
  source 1..19: mol_type = other RNA
cagctaggctttattgaat

SEQ ID NO: 40138 - RNA, 19 nt, synthetic construct
  misc_feature 1..19: note = siRNA sense sequence
  source 1..19: mol_type = other RNA
ttcaataaagcctagctgc

SEQ ID NO: 40139 - RNA, 19 nt, synthetic construct
  misc_feature 1..19: note = siRNA antisense sequence
  source 1..19: mol_type = other RNA
gcagctaggctttattgaa

SEQ ID NO: 40140 - RNA, 19 nt, synthetic construct
  misc_feature 1..19: note = siRNA sense sequence
  source 1..19: mol_type = other RNA
tcaataaagcctagctgcc

SEQ ID NO: 40141 - RNA, 19 nt, synthetic construct
  misc_feature 1..19: note = siRNA antisense sequence
  source 1..19: mol_type = other RNA
ggcagctaggctttattga

SEQ ID NO: 40142 - RNA, 19 nt, synthetic construct
  misc_feature 1..19: note = siRNA sense sequence
  source 1..19: mol_type = other RNA
aaagcctagctgccattat

SEQ ID NO: 40143 - RNA, 19 nt, synthetic construct
  misc_feature 1..19: note = siRNA antisense sequence
  source 1..19: mol_type = other RNA
ataatggcagctaggcttt

SEQ ID NO: 40144 - RNA, 19 nt, synthetic construct
  misc_feature 1..19: note = siRNA sense sequence
  source 1..19: mol_type = other RNA
aagcctagctgccattatc

SEQ ID NO: 40145 - RNA, 19 nt, synthetic construct
  misc_feature 1..19: note = siRNA antisense sequence
  source 1..19: mol_type = other RNA
gataatggcagctaggctt

SEQ ID NO: 40146 - RNA, 19 nt, synthetic construct
  misc_feature 1..19: note = siRNA sense sequence
  source 1..19: mol_type = other RNA
agcctagctgccattatca

SEQ ID NO: 40147 - RNA, 19 nt, synthetic construct
  misc_feature 1..19: note = siRNA antisense sequence
  source 1..19: mol_type = other RNA
tgataatggcagctaggct

SEQ ID NO: 40148 - RNA, 19 nt, synthetic construct
  misc_feature 1..19: note = siRNA sense sequence
  source 1..19: mol_type = other RNA
gcctagctgccattatcag

SEQ ID NO: 40149 - RNA, 19 nt, synthetic construct
  misc_feature 1..19: note = siRNA antisense sequence
  source 1..19: mol_type = other RNA
ctgataatggcagctaggc

SEQ ID NO: 40150 - RNA, 19 nt, synthetic construct
  misc_feature 1..19: note = siRNA sense sequence
  source 1..19: mol_type = other RNA
cctagctgccattatcagt

SEQ ID NO: 40151 - RNA, 19 nt, synthetic construct
  misc_feature 1..19: note = siRNA antisense sequence
  source 1..19: mol_type = other RNA
actgataatggcagctagg

SEQ ID NO: 40152 - RNA, 19 nt, synthetic construct
  misc_feature 1..19: note = siRNA sense sequence
  source 1..19: mol_type = other RNA
ctagctgccattatcagtg

SEQ ID NO: 40153 - RNA, 19 nt, synthetic construct
  misc_feature 1..19: note = siRNA antisense sequence
  source 1..19: mol_type = other RNA
cactgataatggcagctag

SEQ ID NO: 40154 - RNA, 19 nt, synthetic construct
  misc_feature 1..19: note = siRNA sense sequence
  source 1..19: mol_type = other RNA
tagctgccattatcagtgg

SEQ ID NO: 40155 - RNA, 19 nt, synthetic construct
  misc_feature 1..19: note = siRNA antisense sequence
  source 1..19: mol_type = other RNA
ccactgataatggcagcta

SEQ ID NO: 40156 - RNA, 19 nt, synthetic construct
  misc_feature 1..19: note = siRNA sense sequence
  source 1..19: mol_type = other RNA
agctgccattatcagtggt

SEQ ID NO: 40157 - RNA, 19 nt, synthetic construct
  misc_feature 1..19: note = siRNA antisense sequence
  source 1..19: mol_type = other RNA
accactgataatggcagct

SEQ ID NO: 40158 - RNA, 19 nt, synthetic construct
  misc_feature 1..19: note = siRNA sense sequence
  source 1..19: mol_type = other RNA
gctgccattatcagtggta

SEQ ID NO: 40159 - RNA, 19 nt, synthetic construct
  misc_feature 1..19: note = siRNA antisense sequence
  source 1..19: mol_type = other RNA
taccactgataatggcagc

SEQ ID NO: 40160 - RNA, 19 nt, synthetic construct
  misc_feature 1..19: note = siRNA sense sequence
  source 1..19: mol_type = other RNA
ctgccattatcagtggtag

SEQ ID NO: 40161 - RNA, 19 nt, synthetic construct
  misc_feature 1..19: note = siRNA antisense sequence
  source 1..19: mol_type = other RNA
ctaccactgataatggcag

SEQ ID NO: 40162 - RNA, 19 nt, synthetic construct
  misc_feature 1..19: note = siRNA sense sequence
  source 1..19: mol_type = other RNA
tgccattatcagtggtagt

SEQ ID NO: 40163 - RNA, 19 nt, synthetic construct
  misc_feature 1..19: note = siRNA antisense sequence
  source 1..19: mol_type = other RNA
actaccactgataatggca

SEQ ID NO: 40164 - RNA, 19 nt, synthetic construct
  misc_feature 1..19: note = siRNA sense sequence
  source 1..19: mol_type = other RNA
gccattatcagtggtagta

SEQ ID NO: 40165 - RNA, 19 nt, synthetic construct
  misc_feature 1..19: note = siRNA antisense sequence
  source 1..19: mol_type = other RNA
tactaccactgataatggc

SEQ ID NO: 40166 - RNA, 19 nt, synthetic construct
  misc_feature 1..19: note = siRNA sense sequence
  source 1..19: mol_type = other RNA
ccattatcagtggtagtat

SEQ ID NO: 40167 - RNA, 19 nt, synthetic construct
  misc_feature 1..19: note = siRNA antisense sequence
  source 1..19: mol_type = other RNA
atactaccactgataatgg

SEQ ID NO: 40168 - RNA, 19 nt, synthetic construct
  misc_feature 1..19: note = siRNA sense sequence
  source 1..19: mol_type = other RNA
cattatcagtggtagtata

SEQ ID NO: 40169 - RNA, 19 nt, synthetic construct
  misc_feature 1..19: note = siRNA antisense sequence
  source 1..19: mol_type = other RNA
tatactaccactgataatg

SEQ ID NO: 40170 - RNA, 19 nt, synthetic construct
  misc_feature 1..19: note = siRNA sense sequence
  source 1..19: mol_type = other RNA
atcagtggtagtataatga

SEQ ID NO: 40171 - RNA, 19 nt, synthetic construct
  misc_feature 1..19: note = siRNA antisense sequence
  source 1..19: mol_type = other RNA
tcattatactaccactgat

SEQ ID NO: 40172 - RNA, 19 nt, synthetic construct
  misc_feature 1..19: note = siRNA sense sequence
  source 1..19: mol_type = other RNA
tcagtggtagtataatgaa

SEQ ID NO: 40173 - RNA, 19 nt, synthetic construct
  misc_feature 1..19: note = siRNA antisense sequence
  source 1..19: mol_type = other RNA
ttcattatactaccactga

SEQ ID NO: 40174 - RNA, 19 nt, synthetic construct
  misc_feature 1..19: note = siRNA sense sequence
  source 1..19: mol_type = other RNA
acatagtaatttggtgtct

SEQ ID NO: 40175 - RNA, 19 nt, synthetic construct
  misc_feature 1..19: note = siRNA antisense sequence
  source 1..19: mol_type = other RNA
agacaccaaattactatgt

SEQ ID NO: 40176 - RNA, 19 nt, synthetic construct
  misc_feature 1..19: note = siRNA sense sequence
  source 1..19: mol_type = other RNA
catagtaatttggtgtctt

SEQ ID NO: 40177 - RNA, 19 nt, synthetic construct
  misc_feature 1..19: note = siRNA antisense sequence
  source 1..19: mol_type = other RNA
aagacaccaaattactatg

SEQ ID NO: 40178 - RNA, 19 nt, synthetic construct
  misc_feature 1..19: note = siRNA sense sequence
  source 1..19: mol_type = other RNA
tgttaaattagggcacaga

SEQ ID NO: 40179 - RNA, 19 nt, synthetic construct
  misc_feature 1..19: note = siRNA antisense sequence
  source 1..19: mol_type = other RNA
tctgtgccctaatttaaca

SEQ ID NO: 40180 - RNA, 19 nt, synthetic construct
  misc_feature 1..19: note = siRNA sense sequence
  source 1..19: mol_type = other RNA
gttaaattagggcacagat

SEQ ID NO: 40181 - RNA, 19 nt, synthetic construct
  misc_feature 1..19: note = siRNA antisense sequence
  source 1..19: mol_type = other RNA
atctgtgccctaatttaac

SEQ ID NO: 40182 - RNA, 19 nt, synthetic construct
  misc_feature 1..19: note = siRNA sense sequence
  source 1..19: mol_type = other RNA
aattagggcacagattttc

SEQ ID NO: 40183 - RNA, 19 nt, synthetic construct
  misc_feature 1..19: note = siRNA antisense sequence
  source 1..19: mol_type = other RNA
gaaaatctgtgccctaatt

SEQ ID NO: 40184 - RNA, 19 nt, synthetic construct
  misc_feature 1..19: note = siRNA sense sequence
  source 1..19: mol_type = other RNA
attagggcacagattttca

SEQ ID NO: 40185 - RNA, 19 nt, synthetic construct
  misc_feature 1..19: note = siRNA antisense sequence
  source 1..19: mol_type = other RNA
tgaaaatctgtgccctaat

SEQ ID NO: 40186 - RNA, 19 nt, synthetic construct
  misc_feature 1..19: note = siRNA sense sequence
  source 1..19: mol_type = other RNA
ttagggcacagattttcac

SEQ ID NO: 40187 - RNA, 19 nt, synthetic construct
  misc_feature 1..19: note = siRNA antisense sequence
  source 1..19: mol_type = other RNA
gtgaaaatctgtgccctaa

SEQ ID NO: 40188 - RNA, 19 nt, synthetic construct
  misc_feature 1..19: note = siRNA sense sequence
  source 1..19: mol_type = other RNA
tagggcacagattttcact

SEQ ID NO: 40189 - RNA, 19 nt, synthetic construct
  misc_feature 1..19: note = siRNA antisense sequence
  source 1..19: mol_type = other RNA
agtgaaaatctgtgcccta

SEQ ID NO: 40190 - RNA, 19 nt, synthetic construct
  misc_feature 1..19: note = siRNA sense sequence
  source 1..19: mol_type = other RNA
agggcacagattttcacta

SEQ ID NO: 40191 - RNA, 19 nt, synthetic construct
  misc_feature 1..19: note = siRNA antisense sequence
  source 1..19: mol_type = other RNA
tagtgaaaatctgtgccct

SEQ ID NO: 40192 - RNA, 19 nt, synthetic construct
  misc_feature 1..19: note = siRNA sense sequence
  source 1..19: mol_type = other RNA
gggcacagattttcactaa

SEQ ID NO: 40193 - RNA, 19 nt, synthetic construct
  misc_feature 1..19: note = siRNA antisense sequence
  source 1..19: mol_type = other RNA
ttagtgaaaatctgtgccc

SEQ ID NO: 40194 - RNA, 19 nt, synthetic construct
  misc_feature 1..19: note = siRNA sense sequence
  source 1..19: mol_type = other RNA
ggcacagattttcactaaa

SEQ ID NO: 40195 - RNA, 19 nt, synthetic construct
  misc_feature 1..19: note = siRNA antisense sequence
  source 1..19: mol_type = other RNA
tttagtgaaaatctgtgcc

SEQ ID NO: 40196 - RNA, 19 nt, synthetic construct
  misc_feature 1..19: note = siRNA sense sequence
  source 1..19: mol_type = other RNA
aattttcactttgagttcg

SEQ ID NO: 40197 - RNA, 19 nt, synthetic construct
  misc_feature 1..19: note = siRNA antisense sequence
  source 1..19: mol_type = other RNA
cgaactcaaagtgaaaatt

SEQ ID NO: 40198 - RNA, 19 nt, synthetic construct
  misc_feature 1..19: note = siRNA sense sequence
  source 1..19: mol_type = other RNA
attttcactttgagttcga

SEQ ID NO: 40199 - RNA, 19 nt, synthetic construct
  misc_feature 1..19: note = siRNA antisense sequence
  source 1..19: mol_type = other RNA
tcgaactcaaagtgaaaat

SEQ ID NO: 40200 - RNA, 19 nt, synthetic construct
  misc_feature 1..19: note = siRNA sense sequence
  source 1..19: mol_type = other RNA
ttttcactttgagttcgat

SEQ ID NO: 40201 - RNA, 19 nt, synthetic construct
  misc_feature 1..19: note = siRNA antisense sequence
  source 1..19: mol_type = other RNA
atcgaactcaaagtgaaaa

SEQ ID NO: 40202 - RNA, 19 nt, synthetic construct
  misc_feature 1..19: note = siRNA sense sequence
  source 1..19: mol_type = other RNA
cactttgagttcgatcata

SEQ ID NO: 40203 - RNA, 19 nt, synthetic construct
  misc_feature 1..19: note = siRNA antisense sequence
  source 1..19: mol_type = other RNA
tatgatcgaactcaaagtg

SEQ ID NO: 40204 - RNA, 19 nt, synthetic construct
  misc_feature 1..19: note = siRNA sense sequence
  source 1..19: mol_type = other RNA
actttgagttcgatcataa

SEQ ID NO: 40205 - RNA, 19 nt, synthetic construct
  misc_feature 1..19: note = siRNA antisense sequence
  source 1..19: mol_type = other RNA
ttatgatcgaactcaaagt

SEQ ID NO: 40206 - RNA, 19 nt, synthetic construct
  misc_feature 1..19: note = siRNA sense sequence
  source 1..19: mol_type = other RNA
ctttgagttcgatcataaa

SEQ ID NO: 40207 - RNA, 19 nt, synthetic construct
  misc_feature 1..19: note = siRNA antisense sequence
  source 1..19: mol_type = other RNA
tttatgatcgaactcaaag

SEQ ID NO: 40208 - RNA, 19 nt, synthetic construct
  misc_feature 1..19: note = siRNA sense sequence
  source 1..19: mol_type = other RNA
atatgctatagaatgatcc

SEQ ID NO: 40209 - RNA, 19 nt, synthetic construct
  misc_feature 1..19: note = siRNA antisense sequence
  source 1..19: mol_type = other RNA
ggatcattctatagcatat

SEQ ID NO: 40210 - RNA, 19 nt, synthetic construct
  misc_feature 1..19: note = siRNA sense sequence
  source 1..19: mol_type = other RNA
tatgctatagaatgatcct

SEQ ID NO: 40211 - RNA, 19 nt, synthetic construct
  misc_feature 1..19: note = siRNA antisense sequence
  source 1..19: mol_type = other RNA
aggatcattctatagcata

SEQ ID NO: 40212 - RNA, 19 nt, synthetic construct
  misc_feature 1..19: note = siRNA sense sequence
  source 1..19: mol_type = other RNA
atgctatagaatgatcctg

SEQ ID NO: 40213 - RNA, 19 nt, synthetic construct
  misc_feature 1..19: note = siRNA antisense sequence
  source 1..19: mol_type = other RNA
caggatcattctatagcat

SEQ ID NO: 40214 - RNA, 19 nt, synthetic construct
  misc_feature 1..19: note = siRNA sense sequence
  source 1..19: mol_type = other RNA
tgctatagaatgatcctga

SEQ ID NO: 40215 - RNA, 19 nt, synthetic construct
  misc_feature 1..19: note = siRNA antisense sequence
  source 1..19: mol_type = other RNA
tcaggatcattctatagca

SEQ ID NO: 40216 - RNA, 19 nt, synthetic construct
  misc_feature 1..19: note = siRNA sense sequence
  source 1..19: mol_type = other RNA
gctatagaatgatcctgaa

SEQ ID NO: 40217 - RNA, 19 nt, synthetic construct
  misc_feature 1..19: note = siRNA antisense sequence
  source 1..19: mol_type = other RNA
ttcaggatcattctatagc

SEQ ID NO: 40218 - RNA, 19 nt, synthetic construct
  misc_feature 1..19: note = siRNA sense sequence
  source 1..19: mol_type = other RNA
acactatgagcattatctt

SEQ ID NO: 40219 - RNA, 19 nt, synthetic construct
  misc_feature 1..19: note = siRNA antisense sequence
  source 1..19: mol_type = other RNA
aagataatgctcatagtgt

SEQ ID NO: 40220 - RNA, 19 nt, synthetic construct
  misc_feature 1..19: note = siRNA sense sequence
  source 1..19: mol_type = other RNA
cactatgagcattatcttt

SEQ ID NO: 40221 - RNA, 19 nt, synthetic construct
  misc_feature 1..19: note = siRNA antisense sequence
  source 1..19: mol_type = other RNA
aaagataatgctcatagtg

SEQ ID NO: 40222 - RNA, 19 nt, synthetic construct
  misc_feature 1..19: note = siRNA sense sequence
  source 1..19: mol_type = other RNA
actatgagcattatctttg

SEQ ID NO: 40223 - RNA, 19 nt, synthetic construct
  misc_feature 1..19: note = siRNA antisense sequence
  source 1..19: mol_type = other RNA
caaagataatgctcatagt

SEQ ID NO: 40224 - RNA, 19 nt, synthetic construct
  misc_feature 1..19: note = siRNA sense sequence
  source 1..19: mol_type = other RNA
ctatgagcattatctttgt

SEQ ID NO: 40225 - RNA, 19 nt, synthetic construct
  misc_feature 1..19: note = siRNA antisense sequence
  source 1..19: mol_type = other RNA
acaaagataatgctcatag

SEQ ID NO: 40226 - RNA, 19 nt, synthetic construct
  misc_feature 1..19: note = siRNA sense sequence
  source 1..19: mol_type = other RNA
atgagcattatctttgtgc

SEQ ID NO: 40227 - RNA, 19 nt, synthetic construct
  misc_feature 1..19: note = siRNA antisense sequence
  source 1..19: mol_type = other RNA
gcacaaagataatgctcat

SEQ ID NO: 40228 - RNA, 19 nt, synthetic construct
  misc_feature 1..19: note = siRNA sense sequence
  source 1..19: mol_type = other RNA
tgagcattatctttgtgca

SEQ ID NO: 40229 - RNA, 19 nt, synthetic construct
  misc_feature 1..19: note = siRNA antisense sequence
  source 1..19: mol_type = other RNA
tgcacaaagataatgctca

SEQ ID NO: 40230 - RNA, 19 nt, synthetic construct
  misc_feature 1..19: note = siRNA sense sequence
  source 1..19: mol_type = other RNA
ttatctttgtgcattaagc

SEQ ID NO: 40231 - RNA, 19 nt, synthetic construct
  misc_feature 1..19: note = siRNA antisense sequence
  source 1..19: mol_type = other RNA
gcttaatgcacaaagataa

SEQ ID NO: 40232 - RNA, 19 nt, synthetic construct
  misc_feature 1..19: note = siRNA sense sequence
  source 1..19: mol_type = other RNA
ttgtgcattaagcttttcc

SEQ ID NO: 40233 - RNA, 19 nt, synthetic construct
  misc_feature 1..19: note = siRNA antisense sequence
  source 1..19: mol_type = other RNA
ggaaaagcttaatgcacaa

SEQ ID NO: 40234 - RNA, 19 nt, synthetic construct
  misc_feature 1..19: note = siRNA sense sequence
  source 1..19: mol_type = other RNA
gcattaagcttttccctct

SEQ ID NO: 40235 - RNA, 19 nt, synthetic construct
  misc_feature 1..19: note = siRNA antisense sequence
  source 1..19: mol_type = other RNA
agagggaaaagcttaatgc

SEQ ID NO: 40236 - RNA, 19 nt, synthetic construct
  misc_feature 1..19: note = siRNA sense sequence
  source 1..19: mol_type = other RNA
cattaagcttttccctctt

SEQ ID NO: 40237 - RNA, 19 nt, synthetic construct
  misc_feature 1..19: note = siRNA antisense sequence
  source 1..19: mol_type = other RNA
aagagggaaaagcttaatg

SEQ ID NO: 40238 - RNA, 19 nt, synthetic construct
  misc_feature 1..19: note = siRNA sense sequence
  source 1..19: mol_type = other RNA
aagcttttccctcttactt

SEQ ID NO: 40239 - RNA, 19 nt, synthetic construct
  misc_feature 1..19: note = siRNA antisense sequence
  source 1..19: mol_type = other RNA
aagtaagagggaaaagctt

SEQ ID NO: 40240 - RNA, 19 nt, synthetic construct
  misc_feature 1..19: note = siRNA sense sequence
  source 1..19: mol_type = other RNA
agcttttccctcttacttt

SEQ ID NO: 40241 - RNA, 19 nt, synthetic construct
  misc_feature 1..19: note = siRNA antisense sequence
  source 1..19: mol_type = other RNA
aaagtaagagggaaaagct

SEQ ID NO: 40242 - RNA, 19 nt, synthetic construct
  misc_feature 1..19: note = siRNA sense sequence
  source 1..19: mol_type = other RNA
cttttccctcttactttag

SEQ ID NO: 40243 - RNA, 19 nt, synthetic construct
  misc_feature 1..19: note = siRNA antisense sequence
  source 1..19: mol_type = other RNA
ctaaagtaagagggaaaag

SEQ ID NO: 40244 - RNA, 19 nt, synthetic construct
  misc_feature 1..19: note = siRNA sense sequence
  source 1..19: mol_type = other RNA
ttccctcttactttaggtc

SEQ ID NO: 40245 - RNA, 19 nt, synthetic construct
  misc_feature 1..19: note = siRNA antisense sequence
  source 1..19: mol_type = other RNA
gacctaaagtaagagggaa

SEQ ID NO: 40246 - RNA, 19 nt, synthetic construct
  misc_feature 1..19: note = siRNA sense sequence
  source 1..19: mol_type = other RNA
gatagattcccagaagtaa

SEQ ID NO: 40247 - RNA, 19 nt, synthetic construct
  misc_feature 1..19: note = siRNA antisense sequence
  source 1..19: mol_type = other RNA
ttacttctgggaatctatc

SEQ ID NO: 40248 - RNA, 19 nt, synthetic construct
  misc_feature 1..19: note = siRNA sense sequence
  source 1..19: mol_type = other RNA
tattaaagggtttgagcat

SEQ ID NO: 40249 - RNA, 19 nt, synthetic construct
  misc_feature 1..19: note = siRNA antisense sequence
  source 1..19: mol_type = other RNA
atgctcaaaccctttaata

SEQ ID NO: 40250 - RNA, 19 nt, synthetic construct
  misc_feature 1..19: note = siRNA sense sequence
  source 1..19: mol_type = other RNA
attaaagggtttgagcatt

SEQ ID NO: 40251 - RNA, 19 nt, synthetic construct
  misc_feature 1..19: note = siRNA antisense sequence
  source 1..19: mol_type = other RNA
aatgctcaaaccctttaat

SEQ ID NO: 40252 - RNA, 19 nt, synthetic construct
  misc_feature 1..19: note = siRNA sense sequence
  source 1..19: mol_type = other RNA
ttaaagggtttgagcattt

SEQ ID NO: 40253 - RNA, 19 nt, synthetic construct
  misc_feature 1..19: note = siRNA antisense sequence
  source 1..19: mol_type = other RNA
aaatgctcaaaccctttaa

SEQ ID NO: 40254 - RNA, 19 nt, synthetic construct
  misc_feature 1..19: note = siRNA sense sequence
  source 1..19: mol_type = other RNA
taaagggtttgagcatttt

SEQ ID NO: 40255 - RNA, 19 nt, synthetic construct
  misc_feature 1..19: note = siRNA antisense sequence
  source 1..19: mol_type = other RNA
aaaatgctcaaacccttta

SEQ ID NO: 40256 - RNA, 19 nt, synthetic construct
  misc_feature 1..19: note = siRNA sense sequence
  source 1..19: mol_type = other RNA
aaccatgttttagagtctc

SEQ ID NO: 40257 - RNA, 19 nt, synthetic construct
  misc_feature 1..19: note = siRNA antisense sequence
  source 1..19: mol_type = other RNA
gagactctaaaacatggtt

SEQ ID NO: 40258 - RNA, 19 nt, synthetic construct
  misc_feature 1..19: note = siRNA sense sequence
  source 1..19: mol_type = other RNA
accatgttttagagtctca

SEQ ID NO: 40259 - RNA, 19 nt, synthetic construct
  misc_feature 1..19: note = siRNA antisense sequence
  source 1..19: mol_type = other RNA
tgagactctaaaacatggt

SEQ ID NO: 40260 - RNA, 19 nt, synthetic construct
  misc_feature 1..19: note = siRNA sense sequence
  source 1..19: mol_type = other RNA
ccatgttttagagtctcaa

SEQ ID NO: 40261 - RNA, 19 nt, synthetic construct
  misc_feature 1..19: note = siRNA antisense sequence
  source 1..19: mol_type = other RNA
ttgagactctaaaacatgg

SEQ ID NO: 40262 - RNA, 19 nt, synthetic construct
  misc_feature 1..19: note = siRNA sense sequence
  source 1..19: mol_type = other RNA
catgttttagagtctcaat

SEQ ID NO: 40263 - RNA, 19 nt, synthetic construct
  misc_feature 1..19: note = siRNA antisense sequence
  source 1..19: mol_type = other RNA
attgagactctaaaacatg

SEQ ID NO: 40264 - RNA, 19 nt, synthetic construct
  misc_feature 1..19: note = siRNA sense sequence
  source 1..19: mol_type = other RNA
tgttttagagtctcaatag

SEQ ID NO: 40265 - RNA, 19 nt, synthetic construct
  misc_feature 1..19: note = siRNA antisense sequence
  source 1..19: mol_type = other RNA
ctattgagactctaaaaca

SEQ ID NO: 40266 - RNA, 19 nt, synthetic construct
  misc_feature 1..19: note = siRNA sense sequence
  source 1..19: mol_type = other RNA
gttttagagtctcaatagc

SEQ ID NO: 40267 - RNA, 19 nt, synthetic construct
  misc_feature 1..19: note = siRNA antisense sequence
  source 1..19: mol_type = other RNA
gctattgagactctaaaac

SEQ ID NO: 40268 - RNA, 19 nt, synthetic construct
  misc_feature 1..19: note = siRNA sense sequence
  source 1..19: mol_type = other RNA
ttttagagtctcaatagct

SEQ ID NO: 40269 - RNA, 19 nt, synthetic construct
  misc_feature 1..19: note = siRNA antisense sequence
  source 1..19: mol_type = other RNA
agctattgagactctaaaa

SEQ ID NO: 40270 - RNA, 19 nt, synthetic construct
  misc_feature 1..19: note = siRNA sense sequence
  source 1..19: mol_type = other RNA
tagagtctcaatagcttaa

SEQ ID NO: 40271 - RNA, 19 nt, synthetic construct
  misc_feature 1..19: note = siRNA antisense sequence
  source 1..19: mol_type = other RNA
ttaagctattgagactcta

SEQ ID NO: 40272 - RNA, 19 nt, synthetic construct
  misc_feature 1..19: note = siRNA sense sequence
  source 1..19: mol_type = other RNA
agagtctcaatagcttaat

SEQ ID NO: 40273 - RNA, 19 nt, synthetic construct
  misc_feature 1..19: note = siRNA antisense sequence
  source 1..19: mol_type = other RNA
attaagctattgagactct

SEQ ID NO: 40274 - RNA, 19 nt, synthetic construct
  misc_feature 1..19: note = siRNA sense sequence
  source 1..19: mol_type = other RNA
gagtctcaatagcttaata

SEQ ID NO: 40275 - RNA, 19 nt, synthetic construct
  misc_feature 1..19: note = siRNA antisense sequence
  source 1..19: mol_type = other RNA
tattaagctattgagactc

SEQ ID NO: 40276 - RNA, 19 nt, synthetic construct
  misc_feature 1..19: note = siRNA sense sequence
  source 1..19: mol_type = other RNA
ttcattaatactagcatgc

SEQ ID NO: 40277 - RNA, 19 nt, synthetic construct
  misc_feature 1..19: note = siRNA antisense sequence
  source 1..19: mol_type = other RNA
gcatgctagtattaatgaa

SEQ ID NO: 40278 - RNA, 19 nt, synthetic construct
  misc_feature 1..19: note = siRNA sense sequence
  source 1..19: mol_type = other RNA
tcattaatactagcatgcc

SEQ ID NO: 40279 - RNA, 19 nt, synthetic construct
  misc_feature 1..19: note = siRNA antisense sequence
  source 1..19: mol_type = other RNA
ggcatgctagtattaatga

SEQ ID NO: 40280 - RNA, 19 nt, synthetic construct
  misc_feature 1..19: note = siRNA sense sequence
  source 1..19: mol_type = other RNA
cattaatactagcatgcct

SEQ ID NO: 40281 - RNA, 19 nt, synthetic construct
  misc_feature 1..19: note = siRNA antisense sequence
  source 1..19: mol_type = other RNA
aggcatgctagtattaatg

SEQ ID NO: 40282 - RNA, 19 nt, synthetic construct
  misc_feature 1..19: note = siRNA sense sequence
  source 1..19: mol_type = other RNA
attaatactagcatgccta

SEQ ID NO: 40283 - RNA, 19 nt, synthetic construct
  misc_feature 1..19: note = siRNA antisense sequence
  source 1..19: mol_type = other RNA
taggcatgctagtattaat

SEQ ID NO: 40284 - RNA, 19 nt, synthetic construct
  misc_feature 1..19: note = siRNA sense sequence
  source 1..19: mol_type = other RNA
ttaatactagcatgcctat

SEQ ID NO: 40285 - RNA, 19 nt, synthetic construct
  misc_feature 1..19: note = siRNA antisense sequence
  source 1..19: mol_type = other RNA
ataggcatgctagtattaa

SEQ ID NO: 40286 - RNA, 19 nt, synthetic construct
  misc_feature 1..19: note = siRNA sense sequence
  source 1..19: mol_type = other RNA
taatactagcatgcctata

SEQ ID NO: 40287 - RNA, 19 nt, synthetic construct
  misc_feature 1..19: note = siRNA antisense sequence
  source 1..19: mol_type = other RNA
tataggcatgctagtatta

SEQ ID NO: 40288 - RNA, 19 nt, synthetic construct
  misc_feature 1..19: note = siRNA sense sequence
  source 1..19: mol_type = other RNA
aatactagcatgcctatag

SEQ ID NO: 40289 - RNA, 19 nt, synthetic construct
  misc_feature 1..19: note = siRNA antisense sequence
  source 1..19: mol_type = other RNA
ctataggcatgctagtatt

SEQ ID NO: 40290 - RNA, 19 nt, synthetic construct
  misc_feature 1..19: note = siRNA sense sequence
  source 1..19: mol_type = other RNA
atactagcatgcctatagg

SEQ ID NO: 40291 - RNA, 19 nt, synthetic construct
  misc_feature 1..19: note = siRNA antisense sequence
  source 1..19: mol_type = other RNA
cctataggcatgctagtat

SEQ ID NO: 40292 - RNA, 19 nt, synthetic construct
  misc_feature 1..19: note = siRNA sense sequence
  source 1..19: mol_type = other RNA
tactagcatgcctataggg

SEQ ID NO: 40293 - RNA, 19 nt, synthetic construct
  misc_feature 1..19: note = siRNA antisense sequence
  source 1..19: mol_type = other RNA
ccctataggcatgctagta

SEQ ID NO: 40294 - RNA, 19 nt, synthetic construct
  misc_feature 1..19: note = siRNA sense sequence
  source 1..19: mol_type = other RNA
actagcatgcctatagggc

SEQ ID NO: 40295 - RNA, 19 nt, synthetic construct
  misc_feature 1..19: note = siRNA antisense sequence
  source 1..19: mol_type = other RNA
gccctataggcatgctagt

SEQ ID NO: 40296 - RNA, 19 nt, synthetic construct
  misc_feature 1..19: note = siRNA sense sequence
  source 1..19: mol_type = other RNA
ctagcatgcctatagggcc

SEQ ID NO: 40297 - RNA, 19 nt, synthetic construct
  misc_feature 1..19: note = siRNA antisense sequence
  source 1..19: mol_type = other RNA
ggccctataggcatgctag

SEQ ID NO: 40298 - RNA, 19 nt, synthetic construct
  misc_feature 1..19: note = siRNA sense sequence
  source 1..19: mol_type = other RNA
tagcatgcctatagggcct

SEQ ID NO: 40299 - RNA, 19 nt, synthetic construct
  misc_feature 1..19: note = siRNA antisense sequence
  source 1..19: mol_type = other RNA
aggccctataggcatgcta

SEQ ID NO: 40300 - RNA, 19 nt, synthetic construct
  misc_feature 1..19: note = siRNA sense sequence
  source 1..19: mol_type = other RNA
agcatgcctatagggccta

SEQ ID NO: 40301 - RNA, 19 nt, synthetic construct
  misc_feature 1..19: note = siRNA antisense sequence
  source 1..19: mol_type = other RNA
taggccctataggcatgct

SEQ ID NO: 40302 - RNA, 19 nt, synthetic construct
  misc_feature 1..19: note = siRNA sense sequence
  source 1..19: mol_type = other RNA
gcatgcctatagggcctac

SEQ ID NO: 40303 - RNA, 19 nt, synthetic construct
  misc_feature 1..19: note = siRNA antisense sequence
  source 1..19: mol_type = other RNA
gtaggccctataggcatgc

SEQ ID NO: 40304 - RNA, 19 nt, synthetic construct
  misc_feature 1..19: note = siRNA sense sequence
  source 1..19: mol_type = other RNA
cccatttcttttcaatatg

SEQ ID NO: 40305 - RNA, 19 nt, synthetic construct
  misc_feature 1..19: note = siRNA antisense sequence
  source 1..19: mol_type = other RNA
catattgaaaagaaatggg

SEQ ID NO: 40306 - RNA, 19 nt, synthetic construct
  misc_feature 1..19: note = siRNA sense sequence
  source 1..19: mol_type = other RNA
tcttttcaatatgacagac

SEQ ID NO: 40307 - RNA, 19 nt, synthetic construct
  misc_feature 1..19: note = siRNA antisense sequence
  source 1..19: mol_type = other RNA
gtctgtcatattgaaaaga

SEQ ID NO: 40308 - RNA, 19 nt, synthetic construct
  misc_feature 1..19: note = siRNA sense sequence
  source 1..19: mol_type = other RNA
cttttcaatatgacagact

SEQ ID NO: 40309 - RNA, 19 nt, synthetic construct
  misc_feature 1..19: note = siRNA antisense sequence
  source 1..19: mol_type = other RNA
agtctgtcatattgaaaag

SEQ ID NO: 40310 - RNA, 19 nt, synthetic construct
  misc_feature 1..19: note = siRNA sense sequence
  source 1..19: mol_type = other RNA
ttcaatatgacagactttc

SEQ ID NO: 40311 - RNA, 19 nt, synthetic construct
  misc_feature 1..19: note = siRNA antisense sequence
  source 1..19: mol_type = other RNA
gaaagtctgtcatattgaa

SEQ ID NO: 40312 - RNA, 19 nt, synthetic construct
  misc_feature 1..19: note = siRNA sense sequence
  source 1..19: mol_type = other RNA
ttttcaaaatgtgtgccta

SEQ ID NO: 40313 - RNA, 19 nt, synthetic construct
  misc_feature 1..19: note = siRNA antisense sequence
  source 1..19: mol_type = other RNA
taggcacacattttgaaaa

SEQ ID NO: 40314 - RNA, 19 nt, synthetic construct
  misc_feature 1..19: note = siRNA sense sequence
  source 1..19: mol_type = other RNA
tttcaaaatgtgtgcctaa

SEQ ID NO: 40315 - RNA, 19 nt, synthetic construct
  misc_feature 1..19: note = siRNA antisense sequence
  source 1..19: mol_type = other RNA
ttaggcacacattttgaaa

SEQ ID NO: 40316 - RNA, 19 nt, synthetic construct
  misc_feature 1..19: note = siRNA sense sequence
  source 1..19: mol_type = other RNA
ttcaaaatgtgtgcctaat

SEQ ID NO: 40317 - RNA, 19 nt, synthetic construct
  misc_feature 1..19: note = siRNA antisense sequence
  source 1..19: mol_type = other RNA
attaggcacacattttgaa

SEQ ID NO: 40318 - RNA, 19 nt, synthetic construct
  misc_feature 1..19: note = siRNA sense sequence
  source 1..19: mol_type = other RNA
tcaaaatgtgtgcctaatc

SEQ ID NO: 40319 - RNA, 19 nt, synthetic construct
  misc_feature 1..19: note = siRNA antisense sequence
  source 1..19: mol_type = other RNA
gattaggcacacattttga

SEQ ID NO: 40320 - RNA, 19 nt, synthetic construct
  misc_feature 1..19: note = siRNA sense sequence
  source 1..19: mol_type = other RNA
caaaatgtgtgcctaatca

SEQ ID NO: 40321 - RNA, 19 nt, synthetic construct
  misc_feature 1..19: note = siRNA antisense sequence
  source 1..19: mol_type = other RNA
tgattaggcacacattttg

SEQ ID NO: 40322 - RNA, 19 nt, synthetic construct
  misc_feature 1..19: note = siRNA sense sequence
  source 1..19: mol_type = other RNA
aaaatgtgtgcctaatcaa

SEQ ID NO: 40323 - RNA, 19 nt, synthetic construct
  misc_feature 1..19: note = siRNA antisense sequence
  source 1..19: mol_type = other RNA
ttgattaggcacacatttt

SEQ ID NO: 40324 - RNA, 19 nt, synthetic construct
  misc_feature 1..19: note = siRNA sense sequence
  source 1..19: mol_type = other RNA
aaatgtgtgcctaatcaat

SEQ ID NO: 40325 - RNA, 19 nt, synthetic construct
  misc_feature 1..19: note = siRNA antisense sequence
  source 1..19: mol_type = other RNA
attgattaggcacacattt

SEQ ID NO: 40326 - RNA, 19 nt, synthetic construct
  misc_feature 1..19: note = siRNA sense sequence
  source 1..19: mol_type = other RNA
aatgtgtgcctaatcaatt

SEQ ID NO: 40327 - RNA, 19 nt, synthetic construct
  misc_feature 1..19: note = siRNA antisense sequence
  source 1..19: mol_type = other RNA
aattgattaggcacacatt

SEQ ID NO: 40328 - RNA, 19 nt, synthetic construct
  misc_feature 1..19: note = siRNA sense sequence
  source 1..19: mol_type = other RNA
atgtgtgcctaatcaattt

SEQ ID NO: 40329 - RNA, 19 nt, synthetic construct
  misc_feature 1..19: note = siRNA antisense sequence
  source 1..19: mol_type = other RNA
aaattgattaggcacacat

SEQ ID NO: 40330 - RNA, 19 nt, synthetic construct
  misc_feature 1..19: note = siRNA sense sequence
  source 1..19: mol_type = other RNA
tgtgtgcctaatcaatttg

SEQ ID NO: 40331 - RNA, 19 nt, synthetic construct
  misc_feature 1..19: note = siRNA antisense sequence
  source 1..19: mol_type = other RNA
caaattgattaggcacaca

SEQ ID NO: 40332 - RNA, 19 nt, synthetic construct
  misc_feature 1..19: note = siRNA sense sequence
  source 1..19: mol_type = other RNA
gtgtgcctaatcaatttgt

SEQ ID NO: 40333 - RNA, 19 nt, synthetic construct
  misc_feature 1..19: note = siRNA antisense sequence
  source 1..19: mol_type = other RNA
acaaattgattaggcacac

SEQ ID NO: 40334 - RNA, 19 nt, synthetic construct
  misc_feature 1..19: note = siRNA sense sequence
  source 1..19: mol_type = other RNA
tgtgcctaatcaatttgta

SEQ ID NO: 40335 - RNA, 19 nt, synthetic construct
  misc_feature 1..19: note = siRNA antisense sequence
  source 1..19: mol_type = other RNA
tacaaattgattaggcaca

SEQ ID NO: 40336 - RNA, 19 nt, synthetic construct
  misc_feature 1..19: note = siRNA sense sequence
  source 1..19: mol_type = other RNA
gtgcctaatcaatttgtac

SEQ ID NO: 40337 - RNA, 19 nt, synthetic construct
  misc_feature 1..19: note = siRNA antisense sequence
  source 1..19: mol_type = other RNA
gtacaaattgattaggcac

SEQ ID NO: 40338 - RNA, 19 nt, synthetic construct
  misc_feature 1..19: note = siRNA sense sequence
  source 1..19: mol_type = other RNA
tgcctaatcaatttgtact

SEQ ID NO: 40339 - RNA, 19 nt, synthetic construct
  misc_feature 1..19: note = siRNA antisense sequence
  source 1..19: mol_type = other RNA
agtacaaattgattaggca

SEQ ID NO: 40340 - RNA, 19 nt, synthetic construct
  misc_feature 1..19: note = siRNA sense sequence
  source 1..19: mol_type = other RNA
gcctaatcaatttgtactt

SEQ ID NO: 40341 - RNA, 19 nt, synthetic construct
  misc_feature 1..19: note = siRNA antisense sequence
  source 1..19: mol_type = other RNA
aagtacaaattgattaggc

SEQ ID NO: 40342 - RNA, 19 nt, synthetic construct
  misc_feature 1..19: note = siRNA sense sequence
  source 1..19: mol_type = other RNA
cctaatcaatttgtacttc

SEQ ID NO: 40343 - RNA, 19 nt, synthetic construct
  misc_feature 1..19: note = siRNA antisense sequence
  source 1..19: mol_type = other RNA
gaagtacaaattgattagg

SEQ ID NO: 40344 - RNA, 19 nt, synthetic construct
  misc_feature 1..19: note = siRNA sense sequence
  source 1..19: mol_type = other RNA
tacttcaatgcaacttctc

SEQ ID NO: 40345 - RNA, 19 nt, synthetic construct
  misc_feature 1..19: note = siRNA antisense sequence
  source 1..19: mol_type = other RNA
gagaagttgcattgaagta

SEQ ID NO: 40346 - RNA, 19 nt, synthetic construct
  misc_feature 1..19: note = siRNA sense sequence
  source 1..19: mol_type = other RNA
acttcaatgcaacttctca

SEQ ID NO: 40347 - RNA, 19 nt, synthetic construct
  misc_feature 1..19: note = siRNA antisense sequence
  source 1..19: mol_type = other RNA
tgagaagttgcattgaagt

SEQ ID NO: 40348 - RNA, 19 nt, synthetic construct
  misc_feature 1..19: note = siRNA sense sequence
  source 1..19: mol_type = other RNA
ttcaatgcaacttctcagt

SEQ ID NO: 40349 - RNA, 19 nt, synthetic construct
  misc_feature 1..19: note = siRNA antisense sequence
  source 1..19: mol_type = other RNA
actgagaagttgcattgaa

SEQ ID NO: 40350 - RNA, 19 nt, synthetic construct
  misc_feature 1..19: note = siRNA sense sequence
  source 1..19: mol_type = other RNA
acttctcagttctcctgca

SEQ ID NO: 40351 - RNA, 19 nt, synthetic construct
  misc_feature 1..19: note = siRNA antisense sequence
  source 1..19: mol_type = other RNA
tgcaggagaactgagaagt

SEQ ID NO: 40352 - RNA, 19 nt, synthetic construct
  misc_feature 1..19: note = siRNA sense sequence
  source 1..19: mol_type = other RNA
gttctcctgcagacattct

SEQ ID NO: 40353 - RNA, 19 nt, synthetic construct
  misc_feature 1..19: note = siRNA antisense sequence
  source 1..19: mol_type = other RNA
agaatgtctgcaggagaac

SEQ ID NO: 40354 - RNA, 19 nt, synthetic construct
  misc_feature 1..19: note = siRNA sense sequence
  source 1..19: mol_type = other RNA
ttctcctgcagacattctt

SEQ ID NO: 40355 - RNA, 19 nt, synthetic construct
  misc_feature 1..19: note = siRNA antisense sequence
  source 1..19: mol_type = other RNA
aagaatgtctgcaggagaa

SEQ ID NO: 40356 - RNA, 19 nt, synthetic construct
  misc_feature 1..19: note = siRNA sense sequence
  source 1..19: mol_type = other RNA
cattctttctccatgccga

SEQ ID NO: 40357 - RNA, 19 nt, synthetic construct
  misc_feature 1..19: note = siRNA antisense sequence
  source 1..19: mol_type = other RNA
tcggcatggagaaagaatg

SEQ ID NO: 40358 - RNA, 19 nt, synthetic construct
  misc_feature 1..19: note = siRNA sense sequence
  source 1..19: mol_type = other RNA
attctttctccatgccgaa

SEQ ID NO: 40359 - RNA, 19 nt, synthetic construct
  misc_feature 1..19: note = siRNA antisense sequence
  source 1..19: mol_type = other RNA
ttcggcatggagaaagaat

SEQ ID NO: 40360 - RNA, 19 nt, synthetic construct
  misc_feature 1..19: note = siRNA sense sequence
  source 1..19: mol_type = other RNA
cccaactttcccagcatct

SEQ ID NO: 40361 - RNA, 19 nt, synthetic construct
  misc_feature 1..19: note = siRNA antisense sequence
  source 1..19: mol_type = other RNA
agatgctgggaaagttggg

SEQ ID NO: 40362 - RNA, 19 nt, synthetic construct
  misc_feature 1..19: note = siRNA sense sequence
  source 1..19: mol_type = other RNA
ccaactttcccagcatctt

SEQ ID NO: 40363 - RNA, 19 nt, synthetic construct
  misc_feature 1..19: note = siRNA antisense sequence
  source 1..19: mol_type = other RNA
aagatgctgggaaagttgg

SEQ ID NO: 40364 - RNA, 19 nt, synthetic construct
  misc_feature 1..19: note = siRNA sense sequence
  source 1..19: mol_type = other RNA
actttcccagcatcttttg

SEQ ID NO: 40365 - RNA, 19 nt, synthetic construct
  misc_feature 1..19: note = siRNA antisense sequence
  source 1..19: mol_type = other RNA
caaaagatgctgggaaagt

SEQ ID NO: 40366 - RNA, 19 nt, synthetic construct
  misc_feature 1..19: note = siRNA sense sequence
  source 1..19: mol_type = other RNA
ctttcccagcatcttttgt

SEQ ID NO: 40367 - RNA, 19 nt, synthetic construct
  misc_feature 1..19: note = siRNA antisense sequence
  source 1..19: mol_type = other RNA
acaaaagatgctgggaaag

SEQ ID NO: 40368 - RNA, 19 nt, synthetic construct
  misc_feature 1..19: note = siRNA sense sequence
  source 1..19: mol_type = other RNA
tttcccagcatcttttgtc

SEQ ID NO: 40369 - RNA, 19 nt, synthetic construct
  misc_feature 1..19: note = siRNA antisense sequence
  source 1..19: mol_type = other RNA
gacaaaagatgctgggaaa

SEQ ID NO: 40370 - RNA, 19 nt, synthetic construct
  misc_feature 1..19: note = siRNA sense sequence
  source 1..19: mol_type = other RNA
ttcccagcatcttttgtct

SEQ ID NO: 40371 - RNA, 19 nt, synthetic construct
  misc_feature 1..19: note = siRNA antisense sequence
  source 1..19: mol_type = other RNA
agacaaaagatgctgggaa

SEQ ID NO: 40372 - RNA, 19 nt, synthetic construct
  misc_feature 1..19: note = siRNA sense sequence
  source 1..19: mol_type = other RNA
tcccagcatcttttgtctg

SEQ ID NO: 40373 - RNA, 19 nt, synthetic construct
  misc_feature 1..19: note = siRNA antisense sequence
  source 1..19: mol_type = other RNA
cagacaaaagatgctggga

SEQ ID NO: 40374 - RNA, 19 nt, synthetic construct
  misc_feature 1..19: note = siRNA sense sequence
  source 1..19: mol_type = other RNA
cccagcatcttttgtctga

SEQ ID NO: 40375 - RNA, 19 nt, synthetic construct
  misc_feature 1..19: note = siRNA antisense sequence
  source 1..19: mol_type = other RNA
tcagacaaaagatgctggg

SEQ ID NO: 40376 - RNA, 19 nt, synthetic construct
  misc_feature 1..19: note = siRNA sense sequence
  source 1..19: mol_type = other RNA
ccagcatcttttgtctgac

SEQ ID NO: 40377 - RNA, 19 nt, synthetic construct
  misc_feature 1..19: note = siRNA antisense sequence
  source 1..19: mol_type = other RNA
gtcagacaaaagatgctgg

SEQ ID NO: 40378 - RNA, 19 nt, synthetic construct
  misc_feature 1..19: note = siRNA sense sequence
  source 1..19: mol_type = other RNA
cagcatcttttgtctgaca

SEQ ID NO: 40379 - RNA, 19 nt, synthetic construct
  misc_feature 1..19: note = siRNA antisense sequence
  source 1..19: mol_type = other RNA
tgtcagacaaaagatgctg

SEQ ID NO: 40380 - RNA, 19 nt, synthetic construct
  misc_feature 1..19: note = siRNA sense sequence
  source 1..19: mol_type = other RNA
caaatttaccagactccta

SEQ ID NO: 40381 - RNA, 19 nt, synthetic construct
  misc_feature 1..19: note = siRNA antisense sequence
  source 1..19: mol_type = other RNA
taggagtctggtaaatttg

SEQ ID NO: 40382 - RNA, 19 nt, synthetic construct
  misc_feature 1..19: note = siRNA sense sequence
  source 1..19: mol_type = other RNA
aaatttaccagactcctaa

SEQ ID NO: 40383 - RNA, 19 nt, synthetic construct
  misc_feature 1..19: note = siRNA antisense sequence
  source 1..19: mol_type = other RNA
ttaggagtctggtaaattt

SEQ ID NO: 40384 - RNA, 19 nt, synthetic construct
  misc_feature 1..19: note = siRNA sense sequence
  source 1..19: mol_type = other RNA
aatttaccagactcctaac

SEQ ID NO: 40385 - RNA, 19 nt, synthetic construct
  misc_feature 1..19: note = siRNA antisense sequence
  source 1..19: mol_type = other RNA
gttaggagtctggtaaatt

SEQ ID NO: 40386 - RNA, 19 nt, synthetic construct
  misc_feature 1..19: note = siRNA sense sequence
  source 1..19: mol_type = other RNA
atttaccagactcctaact

SEQ ID NO: 40387 - RNA, 19 nt, synthetic construct
  misc_feature 1..19: note = siRNA antisense sequence
  source 1..19: mol_type = other RNA
agttaggagtctggtaaat

SEQ ID NO: 40388 - RNA, 19 nt, synthetic construct
  misc_feature 1..19: note = siRNA sense sequence
  source 1..19: mol_type = other RNA
tttaccagactcctaacta

SEQ ID NO: 40389 - RNA, 19 nt, synthetic construct
  misc_feature 1..19: note = siRNA antisense sequence
  source 1..19: mol_type = other RNA
tagttaggagtctggtaaa

SEQ ID NO: 40390 - RNA, 19 nt, synthetic construct
  misc_feature 1..19: note = siRNA sense sequence
  source 1..19: mol_type = other RNA
ttaccagactcctaactat

SEQ ID NO: 40391 - RNA, 19 nt, synthetic construct
  misc_feature 1..19: note = siRNA antisense sequence
  source 1..19: mol_type = other RNA
atagttaggagtctggtaa

SEQ ID NO: 40392 - RNA, 19 nt, synthetic construct
  misc_feature 1..19: note = siRNA sense sequence
  source 1..19: mol_type = other RNA
taccagactcctaactatc

SEQ ID NO: 40393 - RNA, 19 nt, synthetic construct
  misc_feature 1..19: note = siRNA antisense sequence
  source 1..19: mol_type = other RNA
gatagttaggagtctggta

SEQ ID NO: 40394 - RNA, 19 nt, synthetic construct
  misc_feature 1..19: note = siRNA sense sequence
  source 1..19: mol_type = other RNA
accagactcctaactatct

SEQ ID NO: 40395 - RNA, 19 nt, synthetic construct
  misc_feature 1..19: note = siRNA antisense sequence
  source 1..19: mol_type = other RNA
agatagttaggagtctggt

SEQ ID NO: 40396 - RNA, 19 nt, synthetic construct
  misc_feature 1..19: note = siRNA sense sequence
  source 1..19: mol_type = other RNA
agactcctaactatctgag

SEQ ID NO: 40397 - RNA, 19 nt, synthetic construct
  misc_feature 1..19: note = siRNA antisense sequence
  source 1..19: mol_type = other RNA
ctcagatagttaggagtct

SEQ ID NO: 40398 - RNA, 19 nt, synthetic construct
  misc_feature 1..19: note = siRNA sense sequence
  source 1..19: mol_type = other RNA
tcctaactatctgagtcat

SEQ ID NO: 40399 - RNA, 19 nt, synthetic construct
  misc_feature 1..19: note = siRNA antisense sequence
  source 1..19: mol_type = other RNA
atgactcagatagttagga

SEQ ID NO: 40400 - RNA, 19 nt, synthetic construct
  misc_feature 1..19: note = siRNA sense sequence
  source 1..19: mol_type = other RNA
cctaactatctgagtcata

SEQ ID NO: 40401 - RNA, 19 nt, synthetic construct
  misc_feature 1..19: note = siRNA antisense sequence
  source 1..19: mol_type = other RNA
tatgactcagatagttagg

SEQ ID NO: 40402 - RNA, 19 nt, synthetic construct
  misc_feature 1..19: note = siRNA sense sequence
  source 1..19: mol_type = other RNA
tgagtcatagtctcctaaa

SEQ ID NO: 40403 - RNA, 19 nt, synthetic construct
  misc_feature 1..19: note = siRNA antisense sequence
  source 1..19: mol_type = other RNA
tttaggagactatgactca

SEQ ID NO: 40404 - RNA, 19 nt, synthetic construct
  misc_feature 1..19: note = siRNA sense sequence
  source 1..19: mol_type = other RNA
gagtcatagtctcctaaat

SEQ ID NO: 40405 - RNA, 19 nt, synthetic construct
  misc_feature 1..19: note = siRNA antisense sequence
  source 1..19: mol_type = other RNA
atttaggagactatgactc

SEQ ID NO: 40406 - RNA, 19 nt, synthetic construct
  misc_feature 1..19: note = siRNA sense sequence
  source 1..19: mol_type = other RNA
agtcatagtctcctaaata

SEQ ID NO: 40407 - RNA, 19 nt, synthetic construct
  misc_feature 1..19: note = siRNA antisense sequence
  source 1..19: mol_type = other RNA
tatttaggagactatgact

SEQ ID NO: 40408 - RNA, 19 nt, synthetic construct
  misc_feature 1..19: note = siRNA sense sequence
  source 1..19: mol_type = other RNA
gtcatagtctcctaaatac

SEQ ID NO: 40409 - RNA, 19 nt, synthetic construct
  misc_feature 1..19: note = siRNA antisense sequence
  source 1..19: mol_type = other RNA
gtatttaggagactatgac

SEQ ID NO: 40410 - RNA, 19 nt, synthetic construct
  misc_feature 1..19: note = siRNA sense sequence
  source 1..19: mol_type = other RNA
tcatagtctcctaaataca

SEQ ID NO: 40411 - RNA, 19 nt, synthetic construct
  misc_feature 1..19: note = siRNA antisense sequence
  source 1..19: mol_type = other RNA
tgtatttaggagactatga

SEQ ID NO: 40412 - RNA, 19 nt, synthetic construct
  misc_feature 1..19: note = siRNA sense sequence
  source 1..19: mol_type = other RNA
catagtctcctaaatacat

SEQ ID NO: 40413 - RNA, 19 nt, synthetic construct
  misc_feature 1..19: note = siRNA antisense sequence
  source 1..19: mol_type = other RNA
atgtatttaggagactatg

SEQ ID NO: 40414 - RNA, 19 nt, synthetic construct
  misc_feature 1..19: note = siRNA sense sequence
  source 1..19: mol_type = other RNA
tagtctcctaaatacattc

SEQ ID NO: 40415 - RNA, 19 nt, synthetic construct
  misc_feature 1..19: note = siRNA antisense sequence
  source 1..19: mol_type = other RNA
gaatgtatttaggagacta

SEQ ID NO: 40416 - RNA, 19 nt, synthetic construct
  misc_feature 1..19: note = siRNA sense sequence
  source 1..19: mol_type = other RNA
ctcctaaatacattccatt

SEQ ID NO: 40417 - RNA, 19 nt, synthetic construct
  misc_feature 1..19: note = siRNA antisense sequence
  source 1..19: mol_type = other RNA
aatggaatgtatttaggag

SEQ ID NO: 40418 - RNA, 19 nt, synthetic construct
  misc_feature 1..19: note = siRNA sense sequence
  source 1..19: mol_type = other RNA
tcctaaatacattccattg

SEQ ID NO: 40419 - RNA, 19 nt, synthetic construct
  misc_feature 1..19: note = siRNA antisense sequence
  source 1..19: mol_type = other RNA
caatggaatgtatttagga

SEQ ID NO: 40420 - RNA, 19 nt, synthetic construct
  misc_feature 1..19: note = siRNA sense sequence
  source 1..19: mol_type = other RNA
cctaaatacattccattgt

SEQ ID NO: 40421 - RNA, 19 nt, synthetic construct
  misc_feature 1..19: note = siRNA antisense sequence
  source 1..19: mol_type = other RNA
acaatggaatgtatttagg

SEQ ID NO: 40422 - RNA, 19 nt, synthetic construct
  misc_feature 1..19: note = siRNA sense sequence
  source 1..19: mol_type = other RNA
ctaaatacattccattgtg

SEQ ID NO: 40423 - RNA, 19 nt, synthetic construct
  misc_feature 1..19: note = siRNA antisense sequence
  source 1..19: mol_type = other RNA
cacaatggaatgtatttag

SEQ ID NO: 40424 - RNA, 19 nt, synthetic construct
  misc_feature 1..19: note = siRNA sense sequence
  source 1..19: mol_type = other RNA
taaatacattccattgtgc

SEQ ID NO: 40425 - RNA, 19 nt, synthetic construct
  misc_feature 1..19: note = siRNA antisense sequence
  source 1..19: mol_type = other RNA
gcacaatggaatgtattta

SEQ ID NO: 40426 - RNA, 19 nt, synthetic construct
  misc_feature 1..19: note = siRNA sense sequence
  source 1..19: mol_type = other RNA
tatgtccctcttaatttag

SEQ ID NO: 40427 - RNA, 19 nt, synthetic construct
  misc_feature 1..19: note = siRNA antisense sequence
  source 1..19: mol_type = other RNA
ctaaattaagagggacata

SEQ ID NO: 40428 - RNA, 19 nt, synthetic construct
  misc_feature 1..19: note = siRNA sense sequence
  source 1..19: mol_type = other RNA
atgtccctcttaatttaga

SEQ ID NO: 40429 - RNA, 19 nt, synthetic construct
  misc_feature 1..19: note = siRNA antisense sequence
  source 1..19: mol_type = other RNA
tctaaattaagagggacat

SEQ ID NO: 40430 - RNA, 19 nt, synthetic construct
  misc_feature 1..19: note = siRNA sense sequence
  source 1..19: mol_type = other RNA
tgtccctcttaatttagat

SEQ ID NO: 40431 - RNA, 19 nt, synthetic construct
  misc_feature 1..19: note = siRNA antisense sequence
  source 1..19: mol_type = other RNA
atctaaattaagagggaca

SEQ ID NO: 40432 - RNA, 19 nt, synthetic construct
  misc_feature 1..19: note = siRNA sense sequence
  source 1..19: mol_type = other RNA
gtccctcttaatttagata

SEQ ID NO: 40433 - RNA, 19 nt, synthetic construct
  misc_feature 1..19: note = siRNA antisense sequence
  source 1..19: mol_type = other RNA
tatctaaattaagagggac

SEQ ID NO: 40434 - RNA, 19 nt, synthetic construct
  misc_feature 1..19: note = siRNA sense sequence
  source 1..19: mol_type = other RNA
tagatatttcagacatggc

SEQ ID NO: 40435 - RNA, 19 nt, synthetic construct
  misc_feature 1..19: note = siRNA antisense sequence
  source 1..19: mol_type = other RNA
gccatgtctgaaatatcta

SEQ ID NO: 40436 - RNA, 19 nt, synthetic construct
  misc_feature 1..19: note = siRNA sense sequence
  source 1..19: mol_type = other RNA
agatatttcagacatggcc

SEQ ID NO: 40437 - RNA, 19 nt, synthetic construct
  misc_feature 1..19: note = siRNA antisense sequence
  source 1..19: mol_type = other RNA
ggccatgtctgaaatatct

SEQ ID NO: 40438 - RNA, 19 nt, synthetic construct
  misc_feature 1..19: note = siRNA sense sequence
  source 1..19: mol_type = other RNA
gatatttcagacatggcct

SEQ ID NO: 40439 - RNA, 19 nt, synthetic construct
  misc_feature 1..19: note = siRNA antisense sequence
  source 1..19: mol_type = other RNA
aggccatgtctgaaatatc

SEQ ID NO: 40440 - RNA, 19 nt, synthetic construct
  misc_feature 1..19: note = siRNA sense sequence
  source 1..19: mol_type = other RNA
atatttcagacatggcctg

SEQ ID NO: 40441 - RNA, 19 nt, synthetic construct
  misc_feature 1..19: note = siRNA antisense sequence
  source 1..19: mol_type = other RNA
caggccatgtctgaaatat

SEQ ID NO: 40442 - RNA, 19 nt, synthetic construct
  misc_feature 1..19: note = siRNA sense sequence
  source 1..19: mol_type = other RNA
tggcctgaccagcacagaa

SEQ ID NO: 40443 - RNA, 19 nt, synthetic construct
  misc_feature 1..19: note = siRNA antisense sequence
  source 1..19: mol_type = other RNA
ttctgtgctggtcaggcca

SEQ ID NO: 40444 - RNA, 19 nt, synthetic construct
  misc_feature 1..19: note = siRNA sense sequence
  source 1..19: mol_type = other RNA
ggactatcactgcttgacc

SEQ ID NO: 40445 - RNA, 19 nt, synthetic construct
  misc_feature 1..19: note = siRNA antisense sequence
  source 1..19: mol_type = other RNA
ggtcaagcagtgatagtcc

SEQ ID NO: 40446 - RNA, 19 nt, synthetic construct
  misc_feature 1..19: note = siRNA sense sequence
  source 1..19: mol_type = other RNA
gactatcactgcttgacca

SEQ ID NO: 40447 - RNA, 19 nt, synthetic construct
  misc_feature 1..19: note = siRNA antisense sequence
  source 1..19: mol_type = other RNA
tggtcaagcagtgatagtc

SEQ ID NO: 40448 - RNA, 19 nt, synthetic construct
  misc_feature 1..19: note = siRNA sense sequence
  source 1..19: mol_type = other RNA
ttccagcactgcagactaa

SEQ ID NO: 40449 - RNA, 19 nt, synthetic construct
  misc_feature 1..19: note = siRNA antisense sequence
  source 1..19: mol_type = other RNA
ttagtctgcagtgctggaa

SEQ ID NO: 40450 - RNA, 19 nt, synthetic construct
  misc_feature 1..19: note = siRNA sense sequence
  source 1..19: mol_type = other RNA
tccagcactgcagactaaa

SEQ ID NO: 40451 - RNA, 19 nt, synthetic construct
  misc_feature 1..19: note = siRNA antisense sequence
  source 1..19: mol_type = other RNA
tttagtctgcagtgctgga

SEQ ID NO: 40452 - RNA, 19 nt, synthetic construct
  misc_feature 1..19: note = siRNA sense sequence
  source 1..19: mol_type = other RNA
ccagcactgcagactaaag

SEQ ID NO: 40453 - RNA, 19 nt, synthetic construct
  misc_feature 1..19: note = siRNA antisense sequence
  source 1..19: mol_type = other RNA
ctttagtctgcagtgctgg

SEQ ID NO: 40454 - RNA, 19 nt, synthetic construct
  misc_feature 1..19: note = siRNA sense sequence
  source 1..19: mol_type = other RNA
cagcactgcagactaaagt

SEQ ID NO: 40455 - RNA, 19 nt, synthetic construct
  misc_feature 1..19: note = siRNA antisense sequence
  source 1..19: mol_type = other RNA
actttagtctgcagtgctg

SEQ ID NO: 40456 - RNA, 19 nt, synthetic construct
  misc_feature 1..19: note = siRNA sense sequence
  source 1..19: mol_type = other RNA
agcactgcagactaaagtc

SEQ ID NO: 40457 - RNA, 19 nt, synthetic construct
  misc_feature 1..19: note = siRNA antisense sequence
  source 1..19: mol_type = other RNA
gactttagtctgcagtgct

SEQ ID NO: 40458 - RNA, 19 nt, synthetic construct
  misc_feature 1..19: note = siRNA sense sequence
  source 1..19: mol_type = other RNA
gcactgcagactaaagtca

SEQ ID NO: 40459 - RNA, 19 nt, synthetic construct
  misc_feature 1..19: note = siRNA antisense sequence
  source 1..19: mol_type = other RNA
tgactttagtctgcagtgc

SEQ ID NO: 40460 - RNA, 19 nt, synthetic construct
  misc_feature 1..19: note = siRNA sense sequence
  source 1..19: mol_type = other RNA
tgcagactaaagtcacatt

SEQ ID NO: 40461 - RNA, 19 nt, synthetic construct
  misc_feature 1..19: note = siRNA antisense sequence
  source 1..19: mol_type = other RNA
aatgtgactttagtctgca

SEQ ID NO: 40462 - RNA, 19 nt, synthetic construct
  misc_feature 1..19: note = siRNA sense sequence
  source 1..19: mol_type = other RNA
gcagactaaagtcacatta

SEQ ID NO: 40463 - RNA, 19 nt, synthetic construct
  misc_feature 1..19: note = siRNA antisense sequence
  source 1..19: mol_type = other RNA
taatgtgactttagtctgc

SEQ ID NO: 40464 - RNA, 19 nt, synthetic construct
  misc_feature 1..19: note = siRNA sense sequence
  source 1..19: mol_type = other RNA
ctgttgctcatgtttatgt

SEQ ID NO: 40465 - RNA, 19 nt, synthetic construct
  misc_feature 1..19: note = siRNA antisense sequence
  source 1..19: mol_type = other RNA
acataaacatgagcaacag

SEQ ID NO: 40466 - RNA, 19 nt, synthetic construct
  misc_feature 1..19: note = siRNA sense sequence
  source 1..19: mol_type = other RNA
gttgctcatgtttatgtgc

SEQ ID NO: 40467 - RNA, 19 nt, synthetic construct
  misc_feature 1..19: note = siRNA antisense sequence
  source 1..19: mol_type = other RNA
gcacataaacatgagcaac

SEQ ID NO: 40468 - RNA, 19 nt, synthetic construct
  misc_feature 1..19: note = siRNA sense sequence
  source 1..19: mol_type = other RNA
tgctcatgtttatgtgcta

SEQ ID NO: 40469 - RNA, 19 nt, synthetic construct
  misc_feature 1..19: note = siRNA antisense sequence
  source 1..19: mol_type = other RNA
tagcacataaacatgagca

SEQ ID NO: 40470 - RNA, 19 nt, synthetic construct
  misc_feature 1..19: note = siRNA sense sequence
  source 1..19: mol_type = other RNA
gctcatgtttatgtgctat

SEQ ID NO: 40471 - RNA, 19 nt, synthetic construct
  misc_feature 1..19: note = siRNA antisense sequence
  source 1..19: mol_type = other RNA
atagcacataaacatgagc

SEQ ID NO: 40472 - RNA, 19 nt, synthetic construct
  misc_feature 1..19: note = siRNA sense sequence
  source 1..19: mol_type = other RNA
ctcatgtttatgtgctatc

SEQ ID NO: 40473 - RNA, 19 nt, synthetic construct
  misc_feature 1..19: note = siRNA antisense sequence
  source 1..19: mol_type = other RNA
gatagcacataaacatgag

SEQ ID NO: 40474 - RNA, 19 nt, synthetic construct
  misc_feature 1..19: note = siRNA sense sequence
  source 1..19: mol_type = other RNA
tcatgtttatgtgctatca

SEQ ID NO: 40475 - RNA, 19 nt, synthetic construct
  misc_feature 1..19: note = siRNA antisense sequence
  source 1..19: mol_type = other RNA
tgatagcacataaacatga

SEQ ID NO: 40476 - RNA, 19 nt, synthetic construct
  misc_feature 1..19: note = siRNA sense sequence
  source 1..19: mol_type = other RNA
catgtttatgtgctatcat

SEQ ID NO: 40477 - RNA, 19 nt, synthetic construct
  misc_feature 1..19: note = siRNA antisense sequence
  source 1..19: mol_type = other RNA
atgatagcacataaacatg

SEQ ID NO: 40478 - RNA, 19 nt, synthetic construct
  misc_feature 1..19: note = siRNA sense sequence
  source 1..19: mol_type = other RNA
atgtttatgtgctatcatc

SEQ ID NO: 40479 - RNA, 19 nt, synthetic construct
  misc_feature 1..19: note = siRNA antisense sequence
  source 1..19: mol_type = other RNA
gatgatagcacataaacat

SEQ ID NO: 40480 - RNA, 19 nt, synthetic construct
  misc_feature 1..19: note = siRNA sense sequence
  source 1..19: mol_type = other RNA
tgtttatgtgctatcatct

SEQ ID NO: 40481 - RNA, 19 nt, synthetic construct
  misc_feature 1..19: note = siRNA antisense sequence
  source 1..19: mol_type = other RNA
agatgatagcacataaaca

SEQ ID NO: 40482 - RNA, 19 nt, synthetic construct
  misc_feature 1..19: note = siRNA sense sequence
  source 1..19: mol_type = other RNA
gtttatgtgctatcatcta

SEQ ID NO: 40483 - RNA, 19 nt, synthetic construct
  misc_feature 1..19: note = siRNA antisense sequence
  source 1..19: mol_type = other RNA
tagatgatagcacataaac

SEQ ID NO: 40484 - RNA, 19 nt, synthetic construct
  misc_feature 1..19: note = siRNA sense sequence
  source 1..19: mol_type = other RNA
atgtgctatcatctaaatc

SEQ ID NO: 40485 - RNA, 19 nt, synthetic construct
  misc_feature 1..19: note = siRNA antisense sequence
  source 1..19: mol_type = other RNA
gatttagatgatagcacat

SEQ ID NO: 40486 - RNA, 19 nt, synthetic construct
  misc_feature 1..19: note = siRNA sense sequence
  source 1..19: mol_type = other RNA
aactcccattaagtgaggg

SEQ ID NO: 40487 - RNA, 19 nt, synthetic construct
  misc_feature 1..19: note = siRNA antisense sequence
  source 1..19: mol_type = other RNA
ccctcacttaatgggagtt

SEQ ID NO: 40488 - RNA, 19 nt, synthetic construct
  misc_feature 1..19: note = siRNA sense sequence
  source 1..19: mol_type = other RNA
actcccattaagtgagggc

SEQ ID NO: 40489 - RNA, 19 nt, synthetic construct
  misc_feature 1..19: note = siRNA antisense sequence
  source 1..19: mol_type = other RNA
gccctcacttaatgggagt

SEQ ID NO: 40490 - RNA, 19 nt, synthetic construct
  misc_feature 1..19: note = siRNA sense sequence
  source 1..19: mol_type = other RNA
gtgagggctcccacatcct

SEQ ID NO: 40491 - RNA, 19 nt, synthetic construct
  misc_feature 1..19: note = siRNA antisense sequence
  source 1..19: mol_type = other RNA
aggatgtgggagccctcac

SEQ ID NO: 40492 - RNA, 19 nt, synthetic construct
  misc_feature 1..19: note = siRNA sense sequence
  source 1..19: mol_type = other RNA
tgagggctcccacatcctg

SEQ ID NO: 40493 - RNA, 19 nt, synthetic construct
  misc_feature 1..19: note = siRNA antisense sequence
  source 1..19: mol_type = other RNA
caggatgtgggagccctca

SEQ ID NO: 40494 - RNA, 19 nt, synthetic construct
  misc_feature 1..19: note = siRNA sense sequence
  source 1..19: mol_type = other RNA
agggctcccacatcctgca

SEQ ID NO: 40495 - RNA, 19 nt, synthetic construct
  misc_feature 1..19: note = siRNA antisense sequence
  source 1..19: mol_type = other RNA
tgcaggatgtgggagccct

SEQ ID NO: 40496 - RNA, 19 nt, synthetic construct
  misc_feature 1..19: note = siRNA sense sequence
  source 1..19: mol_type = other RNA
catcctgcactgatataaa

SEQ ID NO: 40497 - RNA, 19 nt, synthetic construct
  misc_feature 1..19: note = siRNA antisense sequence
  source 1..19: mol_type = other RNA
tttatatcagtgcaggatg

SEQ ID NO: 40498 - RNA, 19 nt, synthetic construct
  misc_feature 1..19: note = siRNA sense sequence
  source 1..19: mol_type = other RNA
atcctgcactgatataaat

SEQ ID NO: 40499 - RNA, 19 nt, synthetic construct
  misc_feature 1..19: note = siRNA antisense sequence
  source 1..19: mol_type = other RNA
atttatatcagtgcaggat

SEQ ID NO: 40500 - RNA, 19 nt, synthetic construct
  misc_feature 1..19: note = siRNA sense sequence
  source 1..19: mol_type = other RNA
cctgcactgatataaataa

SEQ ID NO: 40501 - RNA, 19 nt, synthetic construct
  misc_feature 1..19: note = siRNA antisense sequence
  source 1..19: mol_type = other RNA
ttatttatatcagtgcagg

SEQ ID NO: 40502 - RNA, 19 nt, synthetic construct
  misc_feature 1..19: note = siRNA sense sequence
  source 1..19: mol_type = other RNA
ataatagtatgcagctgag

SEQ ID NO: 40503 - RNA, 19 nt, synthetic construct
  misc_feature 1..19: note = siRNA antisense sequence
  source 1..19: mol_type = other RNA
ctcagctgcatactattat

SEQ ID NO: 40504 - RNA, 19 nt, synthetic construct
  misc_feature 1..19: note = siRNA sense sequence
  source 1..19: mol_type = other RNA
taatagtatgcagctgagc

SEQ ID NO: 40505 - RNA, 19 nt, synthetic construct
  misc_feature 1..19: note = siRNA antisense sequence
  source 1..19: mol_type = other RNA
gctcagctgcatactatta

SEQ ID NO: 40506 - RNA, 19 nt, synthetic construct
  misc_feature 1..19: note = siRNA sense sequence
  source 1..19: mol_type = other RNA
aatagtatgcagctgagcg

SEQ ID NO: 40507 - RNA, 19 nt, synthetic construct
  misc_feature 1..19: note = siRNA antisense sequence
  source 1..19: mol_type = other RNA
cgctcagctgcatactatt

SEQ ID NO: 40508 - RNA, 19 nt, synthetic construct
  misc_feature 1..19: note = siRNA sense sequence
  source 1..19: mol_type = other RNA
atagtatgcagctgagcga

SEQ ID NO: 40509 - RNA, 19 nt, synthetic construct
  misc_feature 1..19: note = siRNA antisense sequence
  source 1..19: mol_type = other RNA
tcgctcagctgcatactat

SEQ ID NO: 40510 - RNA, 19 nt, synthetic construct
  misc_feature 1..19: note = siRNA sense sequence
  source 1..19: mol_type = other RNA
tagtatgcagctgagcgaa

SEQ ID NO: 40511 - RNA, 19 nt, synthetic construct
  misc_feature 1..19: note = siRNA antisense sequence
  source 1..19: mol_type = other RNA
ttcgctcagctgcatacta

SEQ ID NO: 40512 - RNA, 19 nt, synthetic construct
  misc_feature 1..19: note = siRNA sense sequence
  source 1..19: mol_type = other RNA
agtatgcagctgagcgaag

SEQ ID NO: 40513 - RNA, 19 nt, synthetic construct
  misc_feature 1..19: note = siRNA antisense sequence
  source 1..19: mol_type = other RNA
cttcgctcagctgcatact

SEQ ID NO: 40514 - RNA, 19 nt, synthetic construct
  misc_feature 1..19: note = siRNA sense sequence
  source 1..19: mol_type = other RNA
gtatgcagctgagcgaagt

SEQ ID NO: 40515 - RNA, 19 nt, synthetic construct
  misc_feature 1..19: note = siRNA antisense sequence
  source 1..19: mol_type = other RNA
acttcgctcagctgcatac

SEQ ID NO: 40516 - RNA, 19 nt, synthetic construct
  misc_feature 1..19: note = siRNA sense sequence
  source 1..19: mol_type = other RNA
tatgcagctgagcgaagtt

SEQ ID NO: 40517 - RNA, 19 nt, synthetic construct
  misc_feature 1..19: note = siRNA antisense sequence
  source 1..19: mol_type = other RNA
aacttcgctcagctgcata

SEQ ID NO: 40518 - RNA, 19 nt, synthetic construct
  misc_feature 1..19: note = siRNA sense sequence
  source 1..19: mol_type = other RNA
atgcagctgagcgaagtta

SEQ ID NO: 40519 - RNA, 19 nt, synthetic construct
  misc_feature 1..19: note = siRNA antisense sequence
  source 1..19: mol_type = other RNA
taacttcgctcagctgcat

SEQ ID NO: 40520 - RNA, 19 nt, synthetic construct
  misc_feature 1..19: note = siRNA sense sequence
  source 1..19: mol_type = other RNA
tgcagctgagcgaagttat

SEQ ID NO: 40521 - RNA, 19 nt, synthetic construct
  misc_feature 1..19: note = siRNA antisense sequence
  source 1..19: mol_type = other RNA
ataacttcgctcagctgca

SEQ ID NO: 40522 - RNA, 19 nt, synthetic construct
  misc_feature 1..19: note = siRNA sense sequence
  source 1..19: mol_type = other RNA
gcagctgagcgaagttatt

SEQ ID NO: 40523 - RNA, 19 nt, synthetic construct
  misc_feature 1..19: note = siRNA antisense sequence
  source 1..19: mol_type = other RNA
aataacttcgctcagctgc

SEQ ID NO: 40524 - RNA, 19 nt, synthetic construct
  misc_feature 1..19: note = siRNA sense sequence
  source 1..19: mol_type = other RNA
cagctgagcgaagttattt

SEQ ID NO: 40525 - RNA, 19 nt, synthetic construct
  misc_feature 1..19: note = siRNA antisense sequence
  source 1..19: mol_type = other RNA
aaataacttcgctcagctg

SEQ ID NO: 40526 - RNA, 19 nt, synthetic construct
  misc_feature 1..19: note = siRNA sense sequence
  source 1..19: mol_type = other RNA
agctgagcgaagttattta

SEQ ID NO: 40527 - RNA, 19 nt, synthetic construct
  misc_feature 1..19: note = siRNA antisense sequence
  source 1..19: mol_type = other RNA
taaataacttcgctcagct

SEQ ID NO: 40528 - RNA, 19 nt, synthetic construct
  misc_feature 1..19: note = siRNA sense sequence
  source 1..19: mol_type = other RNA
gctgagcgaagttatttat

SEQ ID NO: 40529 - RNA, 19 nt, synthetic construct
  misc_feature 1..19: note = siRNA antisense sequence
  source 1..19: mol_type = other RNA
ataaataacttcgctcagc

SEQ ID NO: 40530 - RNA, 19 nt, synthetic construct
  misc_feature 1..19: note = siRNA sense sequence
  source 1..19: mol_type = other RNA
ctgagcgaagttatttatg

SEQ ID NO: 40531 - RNA, 19 nt, synthetic construct
  misc_feature 1..19: note = siRNA antisense sequence
  source 1..19: mol_type = other RNA
cataaataacttcgctcag

SEQ ID NO: 40532 - RNA, 19 nt, synthetic construct
  misc_feature 1..19: note = siRNA sense sequence
  source 1..19: mol_type = other RNA
tgagcgaagttatttatgt

SEQ ID NO: 40533 - RNA, 19 nt, synthetic construct
  misc_feature 1..19: note = siRNA antisense sequence
  source 1..19: mol_type = other RNA
acataaataacttcgctca

SEQ ID NO: 40534 - RNA, 19 nt, synthetic construct
  misc_feature 1..19: note = siRNA sense sequence
  source 1..19: mol_type = other RNA
gagcgaagttatttatgta

SEQ ID NO: 40535 - RNA, 19 nt, synthetic construct
  misc_feature 1..19: note = siRNA antisense sequence
  source 1..19: mol_type = other RNA
tacataaataacttcgctc

SEQ ID NO: 40536 - RNA, 19 nt, synthetic construct
  misc_feature 1..19: note = siRNA sense sequence
  source 1..19: mol_type = other RNA
agcgaagttatttatgtag

SEQ ID NO: 40537 - RNA, 19 nt, synthetic construct
  misc_feature 1..19: note = siRNA antisense sequence
  source 1..19: mol_type = other RNA
ctacataaataacttcgct

SEQ ID NO: 40538 - RNA, 19 nt, synthetic construct
  misc_feature 1..19: note = siRNA sense sequence
  source 1..19: mol_type = other RNA
gcgaagttatttatgtagg

SEQ ID NO: 40539 - RNA, 19 nt, synthetic construct
  misc_feature 1..19: note = siRNA antisense sequence
  source 1..19: mol_type = other RNA
cctacataaataacttcgc

SEQ ID NO: 40540 - RNA, 19 nt, synthetic construct
  misc_feature 1..19: note = siRNA sense sequence
  source 1..19: mol_type = other RNA
cgaagttatttatgtaggt

SEQ ID NO: 40541 - RNA, 19 nt, synthetic construct
  misc_feature 1..19: note = siRNA antisense sequence
  source 1..19: mol_type = other RNA
acctacataaataacttcg

SEQ ID NO: 40542 - RNA, 19 nt, synthetic construct
  misc_feature 1..19: note = siRNA sense sequence
  source 1..19: mol_type = other RNA
ttcatctgaattcctaagt

SEQ ID NO: 40543 - RNA, 19 nt, synthetic construct
  misc_feature 1..19: note = siRNA antisense sequence
  source 1..19: mol_type = other RNA
acttaggaattcagatgaa

SEQ ID NO: 40544 - RNA, 19 nt, synthetic construct
  misc_feature 1..19: note = siRNA sense sequence
  source 1..19: mol_type = other RNA
tcatctgaattcctaagta

SEQ ID NO: 40545 - RNA, 19 nt, synthetic construct
  misc_feature 1..19: note = siRNA antisense sequence
  source 1..19: mol_type = other RNA
tacttaggaattcagatga

SEQ ID NO: 40546 - RNA, 19 nt, synthetic construct
  misc_feature 1..19: note = siRNA sense sequence
  source 1..19: mol_type = other RNA
tatggtgctgattgataac

SEQ ID NO: 40547 - RNA, 19 nt, synthetic construct
  misc_feature 1..19: note = siRNA antisense sequence
  source 1..19: mol_type = other RNA
gttatcaatcagcaccata

SEQ ID NO: 40548 - RNA, 19 nt, synthetic construct
  misc_feature 1..19: note = siRNA sense sequence
  source 1..19: mol_type = other RNA
tggtgctgattgataacta

SEQ ID NO: 40549 - RNA, 19 nt, synthetic construct
  misc_feature 1..19: note = siRNA antisense sequence
  source 1..19: mol_type = other RNA
tagttatcaatcagcacca

SEQ ID NO: 40550 - RNA, 19 nt, synthetic construct
  misc_feature 1..19: note = siRNA sense sequence
  source 1..19: mol_type = other RNA
gtgctgattgataactata

SEQ ID NO: 40551 - RNA, 19 nt, synthetic construct
  misc_feature 1..19: note = siRNA antisense sequence
  source 1..19: mol_type = other RNA
tatagttatcaatcagcac

SEQ ID NO: 40552 - RNA, 19 nt, synthetic construct
  misc_feature 1..19: note = siRNA sense sequence
  source 1..19: mol_type = other RNA
taaagttgtcatctggctg

SEQ ID NO: 40553 - RNA, 19 nt, synthetic construct
  misc_feature 1..19: note = siRNA antisense sequence
  source 1..19: mol_type = other RNA
cagccagatgacaacttta

SEQ ID NO: 40554 - RNA, 19 nt, synthetic construct
  misc_feature 1..19: note = siRNA sense sequence
  source 1..19: mol_type = other RNA
gttgtcatctggctgggcg

SEQ ID NO: 40555 - RNA, 19 nt, synthetic construct
  misc_feature 1..19: note = siRNA antisense sequence
  source 1..19: mol_type = other RNA
cgcccagccagatgacaac

SEQ ID NO: 40556 - RNA, 19 nt, synthetic construct
  misc_feature 1..19: note = siRNA sense sequence
  source 1..19: mol_type = other RNA
ttgtcatctggctgggcgt

SEQ ID NO: 40557 - RNA, 19 nt, synthetic construct
  misc_feature 1..19: note = siRNA antisense sequence
  source 1..19: mol_type = other RNA
acgcccagccagatgacaa

SEQ ID NO: 40558 - RNA, 19 nt, synthetic construct
  misc_feature 1..19: note = siRNA sense sequence
  source 1..19: mol_type = other RNA
tgtcatctggctgggcgtg

SEQ ID NO: 40559 - RNA, 19 nt, synthetic construct
  misc_feature 1..19: note = siRNA antisense sequence
  source 1..19: mol_type = other RNA
cacgcccagccagatgaca

SEQ ID NO: 40560 - RNA, 19 nt, synthetic construct
  misc_feature 1..19: note = siRNA sense sequence
  source 1..19: mol_type = other RNA
cgtggtggctcatgcctgt

SEQ ID NO: 40561 - RNA, 19 nt, synthetic construct
  misc_feature 1..19: note = siRNA antisense sequence
  source 1..19: mol_type = other RNA
acaggcatgagccaccacg

SEQ ID NO: 40562 - RNA, 19 nt, synthetic construct
  misc_feature 1..19: note = siRNA sense sequence
  source 1..19: mol_type = other RNA
gtggtggctcatgcctgta

SEQ ID NO: 40563 - RNA, 19 nt, synthetic construct
  misc_feature 1..19: note = siRNA antisense sequence
  source 1..19: mol_type = other RNA
tacaggcatgagccaccac

SEQ ID NO: 40564 - RNA, 19 nt, synthetic construct
  misc_feature 1..19: note = siRNA sense sequence
  source 1..19: mol_type = other RNA
tggtggctcatgcctgtaa

SEQ ID NO: 40565 - RNA, 19 nt, synthetic construct
  misc_feature 1..19: note = siRNA antisense sequence
  source 1..19: mol_type = other RNA
ttacaggcatgagccacca

SEQ ID NO: 40566 - RNA, 19 nt, synthetic construct
  misc_feature 1..19: note = siRNA sense sequence
  source 1..19: mol_type = other RNA
ggtggctcatgcctgtaat

SEQ ID NO: 40567 - RNA, 19 nt, synthetic construct
  misc_feature 1..19: note = siRNA antisense sequence
  source 1..19: mol_type = other RNA
attacaggcatgagccacc

SEQ ID NO: 40568 - RNA, 19 nt, synthetic construct
  misc_feature 1..19: note = siRNA sense sequence
  source 1..19: mol_type = other RNA
gtggctcatgcctgtaatc

SEQ ID NO: 40569 - RNA, 19 nt, synthetic construct
  misc_feature 1..19: note = siRNA antisense sequence
  source 1..19: mol_type = other RNA
gattacaggcatgagccac

SEQ ID NO: 40570 - RNA, 19 nt, synthetic construct
  misc_feature 1..19: note = siRNA sense sequence
  source 1..19: mol_type = other RNA
tggctcatgcctgtaatcc

SEQ ID NO: 40571 - RNA, 19 nt, synthetic construct
  misc_feature 1..19: note = siRNA antisense sequence
  source 1..19: mol_type = other RNA
ggattacaggcatgagcca

SEQ ID NO: 40572 - RNA, 19 nt, synthetic construct
  misc_feature 1..19: note = siRNA sense sequence
  source 1..19: mol_type = other RNA
ggctcatgcctgtaatccc

SEQ ID NO: 40573 - RNA, 19 nt, synthetic construct
  misc_feature 1..19: note = siRNA antisense sequence
  source 1..19: mol_type = other RNA
gggattacaggcatgagcc

SEQ ID NO: 40574 - RNA, 19 nt, synthetic construct
  misc_feature 1..19: note = siRNA sense sequence
  source 1..19: mol_type = other RNA
atgcctgtaatcccagcac

SEQ ID NO: 40575 - RNA, 19 nt, synthetic construct
  misc_feature 1..19: note = siRNA antisense sequence
  source 1..19: mol_type = other RNA
gtgctgggattacaggcat

SEQ ID NO: 40576 - RNA, 19 nt, synthetic construct
  misc_feature 1..19: note = siRNA sense sequence
  source 1..19: mol_type = other RNA
ccagcactttgggaggcca

SEQ ID NO: 40577 - RNA, 19 nt, synthetic construct
  misc_feature 1..19: note = siRNA antisense sequence
  source 1..19: mol_type = other RNA
tggcctcccaaagtgctgg

SEQ ID NO: 40578 - RNA, 19 nt, synthetic construct
  misc_feature 1..19: note = siRNA sense sequence
  source 1..19: mol_type = other RNA
tggcgtgcacctgtagtcc

SEQ ID NO: 40579 - RNA, 19 nt, synthetic construct
  misc_feature 1..19: note = siRNA antisense sequence
  source 1..19: mol_type = other RNA
ggactacaggtgcacgcca

SEQ ID NO: 40580 - RNA, 19 nt, synthetic construct
  misc_feature 1..19: note = siRNA sense sequence
  source 1..19: mol_type = other RNA
gcgtgcacctgtagtccca

SEQ ID NO: 40581 - RNA, 19 nt, synthetic construct
  misc_feature 1..19: note = siRNA antisense sequence
  source 1..19: mol_type = other RNA
tgggactacaggtgcacgc

SEQ ID NO: 40582 - RNA, 19 nt, synthetic construct
  misc_feature 1..19: note = siRNA sense sequence
  source 1..19: mol_type = other RNA
gcacctgtagtcccagcta

SEQ ID NO: 40583 - RNA, 19 nt, synthetic construct
  misc_feature 1..19: note = siRNA antisense sequence
  source 1..19: mol_type = other RNA
tagctgggactacaggtgc

SEQ ID NO: 40584 - RNA, 19 nt, synthetic construct
  misc_feature 1..19: note = siRNA sense sequence
  source 1..19: mol_type = other RNA
agctacttgggaggctgag

SEQ ID NO: 40585 - RNA, 19 nt, synthetic construct
  misc_feature 1..19: note = siRNA antisense sequence
  source 1..19: mol_type = other RNA
ctcagcctcccaagtagct

SEQ ID NO: 40586 - RNA, 19 nt, synthetic construct
  misc_feature 1..19: note = siRNA sense sequence
  source 1..19: mol_type = other RNA
gctacttgggaggctgagg

SEQ ID NO: 40587 - RNA, 19 nt, synthetic construct
  misc_feature 1..19: note = siRNA antisense sequence
  source 1..19: mol_type = other RNA
cctcagcctcccaagtagc

SEQ ID NO: 40588 - RNA, 19 nt, synthetic construct
  misc_feature 1..19: note = siRNA sense sequence
  source 1..19: mol_type = other RNA
ctacttgggaggctgaggc

SEQ ID NO: 40589 - RNA, 19 nt, synthetic construct
  misc_feature 1..19: note = siRNA antisense sequence
  source 1..19: mol_type = other RNA
gcctcagcctcccaagtag

SEQ ID NO: 40590 - RNA, 19 nt, synthetic construct
  misc_feature 1..19: note = siRNA sense sequence
  source 1..19: mol_type = other RNA
tacttgggaggctgaggca

SEQ ID NO: 40591 - RNA, 19 nt, synthetic construct
  misc_feature 1..19: note = siRNA antisense sequence
  source 1..19: mol_type = other RNA
tgcctcagcctcccaagta

SEQ ID NO: 40592 - RNA, 19 nt, synthetic construct
  misc_feature 1..19: note = siRNA sense sequence
  source 1..19: mol_type = other RNA
acttgggaggctgaggcag

SEQ ID NO: 40593 - RNA, 19 nt, synthetic construct
  misc_feature 1..19: note = siRNA antisense sequence
  source 1..19: mol_type = other RNA
ctgcctcagcctcccaagt

SEQ ID NO: 40594 - RNA, 19 nt, synthetic construct
  misc_feature 1..19: note = siRNA sense sequence
  source 1..19: mol_type = other RNA
ttgggaggctgaggcagga

SEQ ID NO: 40595 - RNA, 19 nt, synthetic construct
  misc_feature 1..19: note = siRNA antisense sequence
  source 1..19: mol_type = other RNA
tcctgcctcagcctcccaa

SEQ ID NO: 40596 - RNA, 19 nt, synthetic construct
  misc_feature 1..19: note = siRNA sense sequence
  source 1..19: mol_type = other RNA
aattaagtcctttgattgc

SEQ ID NO: 40597 - RNA, 19 nt, synthetic construct
  misc_feature 1..19: note = siRNA antisense sequence
  source 1..19: mol_type = other RNA
gcaatcaaaggacttaatt

SEQ ID NO: 40598 - RNA, 19 nt, synthetic construct
  misc_feature 1..19: note = siRNA sense sequence
  source 1..19: mol_type = other RNA
attaagtcctttgattgct

SEQ ID NO: 40599 - RNA, 19 nt, synthetic construct
  misc_feature 1..19: note = siRNA antisense sequence
  source 1..19: mol_type = other RNA
agcaatcaaaggacttaat

SEQ ID NO: 40600 - RNA, 19 nt, synthetic construct
  misc_feature 1..19: note = siRNA sense sequence
  source 1..19: mol_type = other RNA
ttaagtcctttgattgcta

SEQ ID NO: 40601 - RNA, 19 nt, synthetic construct
  misc_feature 1..19: note = siRNA antisense sequence
  source 1..19: mol_type = other RNA
tagcaatcaaaggacttaa

SEQ ID NO: 40602 - RNA, 19 nt, synthetic construct
  misc_feature 1..19: note = siRNA sense sequence
  source 1..19: mol_type = other RNA
taagtcctttgattgctag

SEQ ID NO: 40603 - RNA, 19 nt, synthetic construct
  misc_feature 1..19: note = siRNA antisense sequence
  source 1..19: mol_type = other RNA
ctagcaatcaaaggactta

SEQ ID NO: 40604 - RNA, 19 nt, synthetic construct
  misc_feature 1..19: note = siRNA sense sequence
  source 1..19: mol_type = other RNA
aagtcctttgattgctagc

SEQ ID NO: 40605 - RNA, 19 nt, synthetic construct
  misc_feature 1..19: note = siRNA antisense sequence
  source 1..19: mol_type = other RNA
gctagcaatcaaaggactt

SEQ ID NO: 40606 - RNA, 19 nt, synthetic construct
  misc_feature 1..19: note = siRNA sense sequence
  source 1..19: mol_type = other RNA
agtcctttgattgctagca

SEQ ID NO: 40607 - RNA, 19 nt, synthetic construct
  misc_feature 1..19: note = siRNA antisense sequence
  source 1..19: mol_type = other RNA
tgctagcaatcaaaggact

SEQ ID NO: 40608 - RNA, 19 nt, synthetic construct
  misc_feature 1..19: note = siRNA sense sequence
  source 1..19: mol_type = other RNA
gtcctttgattgctagcag

SEQ ID NO: 40609 - RNA, 19 nt, synthetic construct
  misc_feature 1..19: note = siRNA antisense sequence
  source 1..19: mol_type = other RNA
ctgctagcaatcaaaggac

SEQ ID NO: 40610 - RNA, 19 nt, synthetic construct
  misc_feature 1..19: note = siRNA sense sequence
  source 1..19: mol_type = other RNA
tcctttgattgctagcagc

SEQ ID NO: 40611 - RNA, 19 nt, synthetic construct
  misc_feature 1..19: note = siRNA antisense sequence
  source 1..19: mol_type = other RNA
gctgctagcaatcaaagga

SEQ ID NO: 40612 - RNA, 19 nt, synthetic construct
  misc_feature 1..19: note = siRNA sense sequence
  source 1..19: mol_type = other RNA
ttgctagcagccagagttt

SEQ ID NO: 40613 - RNA, 19 nt, synthetic construct
  misc_feature 1..19: note = siRNA antisense sequence
  source 1..19: mol_type = other RNA
aaactctggctgctagcaa

SEQ ID NO: 40614 - RNA, 19 nt, synthetic construct
  misc_feature 1..19: note = siRNA sense sequence
  source 1..19: mol_type = other RNA
tgctagcagccagagtttt

SEQ ID NO: 40615 - RNA, 19 nt, synthetic construct
  misc_feature 1..19: note = siRNA antisense sequence
  source 1..19: mol_type = other RNA
aaaactctggctgctagca

SEQ ID NO: 40616 - RNA, 19 nt, synthetic construct
  misc_feature 1..19: note = siRNA sense sequence
  source 1..19: mol_type = other RNA
ttttggatatggctactca

SEQ ID NO: 40617 - RNA, 19 nt, synthetic construct
  misc_feature 1..19: note = siRNA antisense sequence
  source 1..19: mol_type = other RNA
tgagtagccatatccaaaa

SEQ ID NO: 40618 - RNA, 19 nt, synthetic construct
  misc_feature 1..19: note = siRNA sense sequence
  source 1..19: mol_type = other RNA
tactcagccagcaataaat

SEQ ID NO: 40619 - RNA, 19 nt, synthetic construct
  misc_feature 1..19: note = siRNA antisense sequence
  source 1..19: mol_type = other RNA
atttattgctggctgagta

SEQ ID NO: 40620 - RNA, 19 nt, synthetic construct
  misc_feature 1..19: note = siRNA sense sequence
  source 1..19: mol_type = other RNA
actcagccagcaataaatc

SEQ ID NO: 40621 - RNA, 19 nt, synthetic construct
  misc_feature 1..19: note = siRNA antisense sequence
  source 1..19: mol_type = other RNA
gatttattgctggctgagt

SEQ ID NO: 40622 - RNA, 19 nt, synthetic construct
  misc_feature 1..19: note = siRNA sense sequence
  source 1..19: mol_type = other RNA
ctcagccagcaataaatca

SEQ ID NO: 40623 - RNA, 19 nt, synthetic construct
  misc_feature 1..19: note = siRNA antisense sequence
  source 1..19: mol_type = other RNA
tgatttattgctggctgag

SEQ ID NO: 40624 - RNA, 19 nt, synthetic construct
  misc_feature 1..19: note = siRNA sense sequence
  source 1..19: mol_type = other RNA
cagcaataaatcagcaact

SEQ ID NO: 40625 - RNA, 19 nt, synthetic construct
  misc_feature 1..19: note = siRNA antisense sequence
  source 1..19: mol_type = other RNA
agttgctgatttattgctg

SEQ ID NO: 40626 - RNA, 19 nt, synthetic construct
  misc_feature 1..19: note = siRNA sense sequence
  source 1..19: mol_type = other RNA
agcaataaatcagcaactg

SEQ ID NO: 40627 - RNA, 19 nt, synthetic construct
  misc_feature 1..19: note = siRNA antisense sequence
  source 1..19: mol_type = other RNA
cagttgctgatttattgct

SEQ ID NO: 40628 - RNA, 19 nt, synthetic construct
  misc_feature 1..19: note = siRNA sense sequence
  source 1..19: mol_type = other RNA
gcaataaatcagcaactgt

SEQ ID NO: 40629 - RNA, 19 nt, synthetic construct
  misc_feature 1..19: note = siRNA antisense sequence
  source 1..19: mol_type = other RNA
acagttgctgatttattgc

SEQ ID NO: 40630 - RNA, 19 nt, synthetic construct
  misc_feature 1..19: note = siRNA sense sequence
  source 1..19: mol_type = other RNA
taaatcagcaactgtggat

SEQ ID NO: 40631 - RNA, 19 nt, synthetic construct
  misc_feature 1..19: note = siRNA antisense sequence
  source 1..19: mol_type = other RNA
atccacagttgctgattta

SEQ ID NO: 40632 - RNA, 19 nt, synthetic construct
  misc_feature 1..19: note = siRNA sense sequence
  source 1..19: mol_type = other RNA
aaatcagcaactgtggatc

SEQ ID NO: 40633 - RNA, 19 nt, synthetic construct
  misc_feature 1..19: note = siRNA antisense sequence
  source 1..19: mol_type = other RNA
gatccacagttgctgattt

SEQ ID NO: 40634 - RNA, 19 nt, synthetic construct
  misc_feature 1..19: note = siRNA sense sequence
  source 1..19: mol_type = other RNA
aatcagcaactgtggatcc

SEQ ID NO: 40635 - RNA, 19 nt, synthetic construct
  misc_feature 1..19: note = siRNA antisense sequence
  source 1..19: mol_type = other RNA
ggatccacagttgctgatt

SEQ ID NO: 40636 - RNA, 19 nt, synthetic construct
  misc_feature 1..19: note = siRNA sense sequence
  source 1..19: mol_type = other RNA
atcagcaactgtggatcca

SEQ ID NO: 40637 - RNA, 19 nt, synthetic construct
  misc_feature 1..19: note = siRNA antisense sequence
  source 1..19: mol_type = other RNA
tggatccacagttgctgat

SEQ ID NO: 40638 - RNA, 19 nt, synthetic construct
  misc_feature 1..19: note = siRNA sense sequence
  source 1..19: mol_type = other RNA
tcagcaactgtggatccac

SEQ ID NO: 40639 - RNA, 19 nt, synthetic construct
  misc_feature 1..19: note = siRNA antisense sequence
  source 1..19: mol_type = other RNA
gtggatccacagttgctga

SEQ ID NO: 40640 - RNA, 19 nt, synthetic construct
  misc_feature 1..19: note = siRNA sense sequence
  source 1..19: mol_type = other RNA
cagcaactgtggatccacc

SEQ ID NO: 40641 - RNA, 19 nt, synthetic construct
  misc_feature 1..19: note = siRNA antisense sequence
  source 1..19: mol_type = other RNA
ggtggatccacagttgctg

SEQ ID NO: 40642 - RNA, 19 nt, synthetic construct
  misc_feature 1..19: note = siRNA sense sequence
  source 1..19: mol_type = other RNA
aactgtggatccacccaag

SEQ ID NO: 40643 - RNA, 19 nt, synthetic construct
  misc_feature 1..19: note = siRNA antisense sequence
  source 1..19: mol_type = other RNA
cttgggtggatccacagtt

SEQ ID NO: 40644 - RNA, 19 nt, synthetic construct
  misc_feature 1..19: note = siRNA sense sequence
  source 1..19: mol_type = other RNA
actgtggatccacccaagt

SEQ ID NO: 40645 - RNA, 19 nt, synthetic construct
  misc_feature 1..19: note = siRNA antisense sequence
  source 1..19: mol_type = other RNA
acttgggtggatccacagt

SEQ ID NO: 40646 - RNA, 19 nt, synthetic construct
  misc_feature 1..19: note = siRNA sense sequence
  source 1..19: mol_type = other RNA
ctgtggatccacccaagta

SEQ ID NO: 40647 - RNA, 19 nt, synthetic construct
  misc_feature 1..19: note = siRNA antisense sequence
  source 1..19: mol_type = other RNA
tacttgggtggatccacag

SEQ ID NO: 40648 - RNA, 19 nt, synthetic construct
  misc_feature 1..19: note = siRNA sense sequence
  source 1..19: mol_type = other RNA
tgtggatccacccaagtat

SEQ ID NO: 40649 - RNA, 19 nt, synthetic construct
  misc_feature 1..19: note = siRNA antisense sequence
  source 1..19: mol_type = other RNA
atacttgggtggatccaca

SEQ ID NO: 40650 - RNA, 19 nt, synthetic construct
  misc_feature 1..19: note = siRNA sense sequence
  source 1..19: mol_type = other RNA
gtggatccacccaagtatc

SEQ ID NO: 40651 - RNA, 19 nt, synthetic construct
  misc_feature 1..19: note = siRNA antisense sequence
  source 1..19: mol_type = other RNA
gatacttgggtggatccac

SEQ ID NO: 40652 - RNA, 19 nt, synthetic construct
  misc_feature 1..19: note = siRNA sense sequence
  source 1..19: mol_type = other RNA
tggatccacccaagtatct

SEQ ID NO: 40653 - RNA, 19 nt, synthetic construct
  misc_feature 1..19: note = siRNA antisense sequence
  source 1..19: mol_type = other RNA
agatacttgggtggatcca

SEQ ID NO: 40654 - RNA, 19 nt, synthetic construct
  misc_feature 1..19: note = siRNA sense sequence
  source 1..19: mol_type = other RNA
ggatccacccaagtatctt

SEQ ID NO: 40655 - RNA, 19 nt, synthetic construct
  misc_feature 1..19: note = siRNA antisense sequence
  source 1..19: mol_type = other RNA
aagatacttgggtggatcc

SEQ ID NO: 40656 - RNA, 19 nt, synthetic construct
  misc_feature 1..19: note = siRNA sense sequence
  source 1..19: mol_type = other RNA
gatccacccaagtatctta

SEQ ID NO: 40657 - RNA, 19 nt, synthetic construct
  misc_feature 1..19: note = siRNA antisense sequence
  source 1..19: mol_type = other RNA
taagatacttgggtggatc

SEQ ID NO: 40658 - RNA, 19 nt, synthetic construct
  misc_feature 1..19: note = siRNA sense sequence
  source 1..19: mol_type = other RNA
atccacccaagtatcttac

SEQ ID NO: 40659 - RNA, 19 nt, synthetic construct
  misc_feature 1..19: note = siRNA antisense sequence
  source 1..19: mol_type = other RNA
gtaagatacttgggtggat

SEQ ID NO: 40660 - RNA, 19 nt, synthetic construct
  misc_feature 1..19: note = siRNA sense sequence
  source 1..19: mol_type = other RNA
atttactttagttcatccg

SEQ ID NO: 40661 - RNA, 19 nt, synthetic construct
  misc_feature 1..19: note = siRNA antisense sequence
  source 1..19: mol_type = other RNA
cggatgaactaaagtaaat

SEQ ID NO: 40662 - RNA, 19 nt, synthetic construct
  misc_feature 1..19: note = siRNA sense sequence
  source 1..19: mol_type = other RNA
tttactttagttcatccga

SEQ ID NO: 40663 - RNA, 19 nt, synthetic construct
  misc_feature 1..19: note = siRNA antisense sequence
  source 1..19: mol_type = other RNA
tcggatgaactaaagtaaa

SEQ ID NO: 40664 - RNA, 19 nt, synthetic construct
  misc_feature 1..19: note = siRNA sense sequence
  source 1..19: mol_type = other RNA
ttactttagttcatccgat

SEQ ID NO: 40665 - RNA, 19 nt, synthetic construct
  misc_feature 1..19: note = siRNA antisense sequence
  source 1..19: mol_type = other RNA
atcggatgaactaaagtaa

SEQ ID NO: 40666 - RNA, 19 nt, synthetic construct
  misc_feature 1..19: note = siRNA sense sequence
  source 1..19: mol_type = other RNA
tactttagttcatccgatt

SEQ ID NO: 40667 - RNA, 19 nt, synthetic construct
  misc_feature 1..19: note = siRNA antisense sequence
  source 1..19: mol_type = other RNA
aatcggatgaactaaagta

SEQ ID NO: 40668 - RNA, 19 nt, synthetic construct
  misc_feature 1..19: note = siRNA sense sequence
  source 1..19: mol_type = other RNA
actttagttcatccgattc

SEQ ID NO: 40669 - RNA, 19 nt, synthetic construct
  misc_feature 1..19: note = siRNA antisense sequence
  source 1..19: mol_type = other RNA
gaatcggatgaactaaagt

SEQ ID NO: 40670 - RNA, 19 nt, synthetic construct
  misc_feature 1..19: note = siRNA sense sequence
  source 1..19: mol_type = other RNA
ctttagttcatccgattcc

SEQ ID NO: 40671 - RNA, 19 nt, synthetic construct
  misc_feature 1..19: note = siRNA antisense sequence
  source 1..19: mol_type = other RNA
ggaatcggatgaactaaag

SEQ ID NO: 40672 - RNA, 19 nt, synthetic construct
  misc_feature 1..19: note = siRNA sense sequence
  source 1..19: mol_type = other RNA
tttagttcatccgattcct

SEQ ID NO: 40673 - RNA, 19 nt, synthetic construct
  misc_feature 1..19: note = siRNA antisense sequence
  source 1..19: mol_type = other RNA
aggaatcggatgaactaaa

SEQ ID NO: 40674 - RNA, 19 nt, synthetic construct
  misc_feature 1..19: note = siRNA sense sequence
  source 1..19: mol_type = other RNA
tcatccgattcctgaagat

SEQ ID NO: 40675 - RNA, 19 nt, synthetic construct
  misc_feature 1..19: note = siRNA antisense sequence
  source 1..19: mol_type = other RNA
atcttcaggaatcggatga

SEQ ID NO: 40676 - RNA, 19 nt, synthetic construct
  misc_feature 1..19: note = siRNA sense sequence
  source 1..19: mol_type = other RNA
catccgattcctgaagata

SEQ ID NO: 40677 - RNA, 19 nt, synthetic construct
  misc_feature 1..19: note = siRNA antisense sequence
  source 1..19: mol_type = other RNA
tatcttcaggaatcggatg

SEQ ID NO: 40678 - RNA, 19 nt, synthetic construct
  misc_feature 1..19: note = siRNA sense sequence
  source 1..19: mol_type = other RNA
atccgattcctgaagatat

SEQ ID NO: 40679 - RNA, 19 nt, synthetic construct
  misc_feature 1..19: note = siRNA antisense sequence
  source 1..19: mol_type = other RNA
atatcttcaggaatcggat

SEQ ID NO: 40680 - RNA, 19 nt, synthetic construct
  misc_feature 1..19: note = siRNA sense sequence
  source 1..19: mol_type = other RNA
gattcctgaagatatcatg

SEQ ID NO: 40681 - RNA, 19 nt, synthetic construct
  misc_feature 1..19: note = siRNA antisense sequence
  source 1..19: mol_type = other RNA
catgatatcttcaggaatc

SEQ ID NO: 40682 - RNA, 19 nt, synthetic construct
  misc_feature 1..19: note = siRNA sense sequence
  source 1..19: mol_type = other RNA
attcctgaagatatcatgg

SEQ ID NO: 40683 - RNA, 19 nt, synthetic construct
  misc_feature 1..19: note = siRNA antisense sequence
  source 1..19: mol_type = other RNA
ccatgatatcttcaggaat

SEQ ID NO: 40684 - RNA, 19 nt, synthetic construct
  misc_feature 1..19: note = siRNA sense sequence
  source 1..19: mol_type = other RNA
ttcctgaagatatcatggg

SEQ ID NO: 40685 - RNA, 19 nt, synthetic construct
  misc_feature 1..19: note = siRNA antisense sequence
  source 1..19: mol_type = other RNA
cccatgatatcttcaggaa

SEQ ID NO: 40686 - RNA, 19 nt, synthetic construct
  misc_feature 1..19: note = siRNA sense sequence
  source 1..19: mol_type = other RNA
tcctgaagatatcatggga

SEQ ID NO: 40687 - RNA, 19 nt, synthetic construct
  misc_feature 1..19: note = siRNA antisense sequence
  source 1..19: mol_type = other RNA
tcccatgatatcttcagga

SEQ ID NO: 40688 - RNA, 19 nt, synthetic construct
  misc_feature 1..19: note = siRNA sense sequence
  source 1..19: mol_type = other RNA
cttaaatgacttgttggaa

SEQ ID NO: 40689 - RNA, 19 nt, synthetic construct
  misc_feature 1..19: note = siRNA antisense sequence
  source 1..19: mol_type = other RNA
ttccaacaagtcatttaag

SEQ ID NO: 40690 - RNA, 19 nt, synthetic construct
  misc_feature 1..19: note = siRNA sense sequence
  source 1..19: mol_type = other RNA
taagtgattttaacctgga

SEQ ID NO: 40691 - RNA, 19 nt, synthetic construct
  misc_feature 1..19: note = siRNA antisense sequence
  source 1..19: mol_type = other RNA
tccaggttaaaatcactta

SEQ ID NO: 40692 - RNA, 19 nt, synthetic construct
  misc_feature 1..19: note = siRNA sense sequence
  source 1..19: mol_type = other RNA
tgattttaacctggatctc

SEQ ID NO: 40693 - RNA, 19 nt, synthetic construct
  misc_feature 1..19: note = siRNA antisense sequence
  source 1..19: mol_type = other RNA
gagatccaggttaaaatca

SEQ ID NO: 40694 - RNA, 19 nt, synthetic construct
  misc_feature 1..19: note = siRNA sense sequence
  source 1..19: mol_type = other RNA
gattttaacctggatctca

SEQ ID NO: 40695 - RNA, 19 nt, synthetic construct
  misc_feature 1..19: note = siRNA antisense sequence
  source 1..19: mol_type = other RNA
tgagatccaggttaaaatc

SEQ ID NO: 40696 - RNA, 19 nt, synthetic construct
  misc_feature 1..19: note = siRNA sense sequence
  source 1..19: mol_type = other RNA
attttaacctggatctcat

SEQ ID NO: 40697 - RNA, 19 nt, synthetic construct
  misc_feature 1..19: note = siRNA antisense sequence
  source 1..19: mol_type = other RNA
atgagatccaggttaaaat

SEQ ID NO: 40698 - RNA, 19 nt, synthetic construct
  misc_feature 1..19: note = siRNA sense sequence
  source 1..19: mol_type = other RNA
ttttaacctggatctcata

SEQ ID NO: 40699 - RNA, 19 nt, synthetic construct
  misc_feature 1..19: note = siRNA antisense sequence
  source 1..19: mol_type = other RNA
tatgagatccaggttaaaa

SEQ ID NO: 40700 - RNA, 19 nt, synthetic construct
  misc_feature 1..19: note = siRNA sense sequence
  source 1..19: mol_type = other RNA
tttaacctggatctcataa

SEQ ID NO: 40701 - RNA, 19 nt, synthetic construct
  misc_feature 1..19: note = siRNA antisense sequence
  source 1..19: mol_type = other RNA
ttatgagatccaggttaaa

SEQ ID NO: 40702 - RNA, 19 nt, synthetic construct
  misc_feature 1..19: note = siRNA sense sequence
  source 1..19: mol_type = other RNA
ttaacctggatctcataaa

SEQ ID NO: 40703 - RNA, 19 nt, synthetic construct
  misc_feature 1..19: note = siRNA antisense sequence
  source 1..19: mol_type = other RNA
tttatgagatccaggttaa

SEQ ID NO: 40704 - RNA, 19 nt, synthetic construct
  misc_feature 1..19: note = siRNA sense sequence
  source 1..19: mol_type = other RNA
gtttatatttcctgacttc

SEQ ID NO: 40705 - RNA, 19 nt, synthetic construct
  misc_feature 1..19: note = siRNA antisense sequence
  source 1..19: mol_type = other RNA
gaagtcaggaaatataaac

SEQ ID NO: 40706 - RNA, 19 nt, synthetic construct
  misc_feature 1..19: note = siRNA sense sequence
  source 1..19: mol_type = other RNA
ttatatttcctgacttctc

SEQ ID NO: 40707 - RNA, 19 nt, synthetic construct
  misc_feature 1..19: note = siRNA antisense sequence
  source 1..19: mol_type = other RNA
gagaagtcaggaaatataa

SEQ ID NO: 40708 - RNA, 19 nt, synthetic construct
  misc_feature 1..19: note = siRNA sense sequence
  source 1..19: mol_type = other RNA
tatatttcctgacttctct

SEQ ID NO: 40709 - RNA, 19 nt, synthetic construct
  misc_feature 1..19: note = siRNA antisense sequence
  source 1..19: mol_type = other RNA
agagaagtcaggaaatata

SEQ ID NO: 40710 - RNA, 19 nt, synthetic construct
  misc_feature 1..19: note = siRNA sense sequence
  source 1..19: mol_type = other RNA
atatttcctgacttctcta

SEQ ID NO: 40711 - RNA, 19 nt, synthetic construct
  misc_feature 1..19: note = siRNA antisense sequence
  source 1..19: mol_type = other RNA
tagagaagtcaggaaatat

SEQ ID NO: 40712 - RNA, 19 nt, synthetic construct
  misc_feature 1..19: note = siRNA sense sequence
  source 1..19: mol_type = other RNA
tatttcctgacttctctat

SEQ ID NO: 40713 - RNA, 19 nt, synthetic construct
  misc_feature 1..19: note = siRNA antisense sequence
  source 1..19: mol_type = other RNA
atagagaagtcaggaaata

SEQ ID NO: 40714 - RNA, 19 nt, synthetic construct
  misc_feature 1..19: note = siRNA sense sequence
  source 1..19: mol_type = other RNA
atttcctgacttctctata

SEQ ID NO: 40715 - RNA, 19 nt, synthetic construct
  misc_feature 1..19: note = siRNA antisense sequence
  source 1..19: mol_type = other RNA
tatagagaagtcaggaaat

SEQ ID NO: 40716 - RNA, 19 nt, synthetic construct
  misc_feature 1..19: note = siRNA sense sequence
  source 1..19: mol_type = other RNA
tttcctgacttctctataa

SEQ ID NO: 40717 - RNA, 19 nt, synthetic construct
  misc_feature 1..19: note = siRNA antisense sequence
  source 1..19: mol_type = other RNA
ttatagagaagtcaggaaa

SEQ ID NO: 40718 - RNA, 19 nt, synthetic construct
  misc_feature 1..19: note = siRNA sense sequence
  source 1..19: mol_type = other RNA
ttcctgacttctctataaa

SEQ ID NO: 40719 - RNA, 19 nt, synthetic construct
  misc_feature 1..19: note = siRNA antisense sequence
  source 1..19: mol_type = other RNA
tttatagagaagtcaggaa

SEQ ID NO: 40720 - RNA, 19 nt, synthetic construct
  misc_feature 1..19: note = siRNA sense sequence
  source 1..19: mol_type = other RNA
aattagcagttcatcatag

SEQ ID NO: 40721 - RNA, 19 nt, synthetic construct
  misc_feature 1..19: note = siRNA antisense sequence
  source 1..19: mol_type = other RNA
ctatgatgaactgctaatt

SEQ ID NO: 40722 - RNA, 19 nt, synthetic construct
  misc_feature 1..19: note = siRNA sense sequence
  source 1..19: mol_type = other RNA
attagcagttcatcatagg

SEQ ID NO: 40723 - RNA, 19 nt, synthetic construct
  misc_feature 1..19: note = siRNA antisense sequence
  source 1..19: mol_type = other RNA
cctatgatgaactgctaat

SEQ ID NO: 40724 - RNA, 19 nt, synthetic construct
  misc_feature 1..19: note = siRNA sense sequence
  source 1..19: mol_type = other RNA
agtcacttatacttccaca

SEQ ID NO: 40725 - RNA, 19 nt, synthetic construct
  misc_feature 1..19: note = siRNA antisense sequence
  source 1..19: mol_type = other RNA
tgtggaagtataagtgact

SEQ ID NO: 40726 - RNA, 19 nt, synthetic construct
  misc_feature 1..19: note = siRNA sense sequence
  source 1..19: mol_type = other RNA
cttatacttccacatgtgt

SEQ ID NO: 40727 - RNA, 19 nt, synthetic construct
  misc_feature 1..19: note = siRNA antisense sequence
  source 1..19: mol_type = other RNA
acacatgtggaagtataag

SEQ ID NO: 40728 - RNA, 19 nt, synthetic construct
  misc_feature 1..19: note = siRNA sense sequence
  source 1..19: mol_type = other RNA
tatacttccacatgtgttt

SEQ ID NO: 40729 - RNA, 19 nt, synthetic construct
  misc_feature 1..19: note = siRNA antisense sequence
  source 1..19: mol_type = other RNA
aaacacatgtggaagtata

SEQ ID NO: 40730 - RNA, 19 nt, synthetic construct
  misc_feature 1..19: note = siRNA sense sequence
  source 1..19: mol_type = other RNA
atacttccacatgtgtttt

SEQ ID NO: 40731 - RNA, 19 nt, synthetic construct
  misc_feature 1..19: note = siRNA antisense sequence
  source 1..19: mol_type = other RNA
aaaacacatgtggaagtat

SEQ ID NO: 40732 - RNA, 19 nt, synthetic construct
  misc_feature 1..19: note = siRNA sense sequence
  source 1..19: mol_type = other RNA
tacttccacatgtgtttta

SEQ ID NO: 40733 - RNA, 19 nt, synthetic construct
  misc_feature 1..19: note = siRNA antisense sequence
  source 1..19: mol_type = other RNA
taaaacacatgtggaagta

SEQ ID NO: 40734 - RNA, 19 nt, synthetic construct
  misc_feature 1..19: note = siRNA sense sequence
  source 1..19: mol_type = other RNA
ccacatgtgttttataagt

SEQ ID NO: 40735 - RNA, 19 nt, synthetic construct
  misc_feature 1..19: note = siRNA antisense sequence
  source 1..19: mol_type = other RNA
acttataaaacacatgtgg

SEQ ID NO: 40736 - RNA, 19 nt, synthetic construct
  misc_feature 1..19: note = siRNA sense sequence
  source 1..19: mol_type = other RNA
taagttaatacagtagcag

SEQ ID NO: 40737 - RNA, 19 nt, synthetic construct
  misc_feature 1..19: note = siRNA antisense sequence
  source 1..19: mol_type = other RNA
ctgctactgtattaactta

SEQ ID NO: 40738 - RNA, 19 nt, synthetic construct
  misc_feature 1..19: note = siRNA sense sequence
  source 1..19: mol_type = other RNA
taatacagtagcagactta

SEQ ID NO: 40739 - RNA, 19 nt, synthetic construct
  misc_feature 1..19: note = siRNA antisense sequence
  source 1..19: mol_type = other RNA
taagtctgctactgtatta

SEQ ID NO: 40740 - RNA, 19 nt, synthetic construct
  misc_feature 1..19: note = siRNA sense sequence
  source 1..19: mol_type = other RNA
aatacagtagcagacttag

SEQ ID NO: 40741 - RNA, 19 nt, synthetic construct
  misc_feature 1..19: note = siRNA antisense sequence
  source 1..19: mol_type = other RNA
ctaagtctgctactgtatt

SEQ ID NO: 40742 - RNA, 19 nt, synthetic construct
  misc_feature 1..19: note = siRNA sense sequence
  source 1..19: mol_type = other RNA
atacagtagcagacttagc

SEQ ID NO: 40743 - RNA, 19 nt, synthetic construct
  misc_feature 1..19: note = siRNA antisense sequence
  source 1..19: mol_type = other RNA
gctaagtctgctactgtat

SEQ ID NO: 40744 - RNA, 19 nt, synthetic construct
  misc_feature 1..19: note = siRNA sense sequence
  source 1..19: mol_type = other RNA
tacagtagcagacttagcc

SEQ ID NO: 40745 - RNA, 19 nt, synthetic construct
  misc_feature 1..19: note = siRNA antisense sequence
  source 1..19: mol_type = other RNA
ggctaagtctgctactgta

SEQ ID NO: 40746 - RNA, 19 nt, synthetic construct
  misc_feature 1..19: note = siRNA sense sequence
  source 1..19: mol_type = other RNA
acagtagcagacttagcca

SEQ ID NO: 40747 - RNA, 19 nt, synthetic construct
  misc_feature 1..19: note = siRNA antisense sequence
  source 1..19: mol_type = other RNA
tggctaagtctgctactgt

SEQ ID NO: 40748 - RNA, 19 nt, synthetic construct
  misc_feature 1..19: note = siRNA sense sequence
  source 1..19: mol_type = other RNA
cagtagcagacttagccaa

SEQ ID NO: 40749 - RNA, 19 nt, synthetic construct
  misc_feature 1..19: note = siRNA antisense sequence
  source 1..19: mol_type = other RNA
ttggctaagtctgctactg

SEQ ID NO: 40750 - RNA, 19 nt, synthetic construct
  misc_feature 1..19: note = siRNA sense sequence
  source 1..19: mol_type = other RNA
agtagcagacttagccaat

SEQ ID NO: 40751 - RNA, 19 nt, synthetic construct
  misc_feature 1..19: note = siRNA antisense sequence
  source 1..19: mol_type = other RNA
attggctaagtctgctact

SEQ ID NO: 40752 - RNA, 19 nt, synthetic construct
  misc_feature 1..19: note = siRNA sense sequence
  source 1..19: mol_type = other RNA
gtagcagacttagccaata

SEQ ID NO: 40753 - RNA, 19 nt, synthetic construct
  misc_feature 1..19: note = siRNA antisense sequence
  source 1..19: mol_type = other RNA
tattggctaagtctgctac

SEQ ID NO: 40754 - RNA, 19 nt, synthetic construct
  misc_feature 1..19: note = siRNA sense sequence
  source 1..19: mol_type = other RNA
tagcagacttagccaataa

SEQ ID NO: 40755 - RNA, 19 nt, synthetic construct
  misc_feature 1..19: note = siRNA antisense sequence
  source 1..19: mol_type = other RNA
ttattggctaagtctgcta

SEQ ID NO: 40756 - RNA, 19 nt, synthetic construct
  misc_feature 1..19: note = siRNA sense sequence
  source 1..19: mol_type = other RNA
attgattatttcagtaccc

SEQ ID NO: 40757 - RNA, 19 nt, synthetic construct
  misc_feature 1..19: note = siRNA antisense sequence
  source 1..19: mol_type = other RNA
gggtactgaaataatcaat

SEQ ID NO: 40758 - RNA, 19 nt, synthetic construct
  misc_feature 1..19: note = siRNA sense sequence
  source 1..19: mol_type = other RNA
tgtgtgtgtgtgtatatat

SEQ ID NO: 40759 - RNA, 19 nt, synthetic construct
  misc_feature 1..19: note = siRNA antisense sequence
  source 1..19: mol_type = other RNA
atatatacacacacacaca

SEQ ID NO: 40760 - RNA, 19 nt, synthetic construct
  misc_feature 1..19: note = siRNA sense sequence
  source 1..19: mol_type = other RNA
gtgtgtgtgtgtatatata

SEQ ID NO: 40761 - RNA, 19 nt, synthetic construct
  misc_feature 1..19: note = siRNA antisense sequence
  source 1..19: mol_type = other RNA
tatatatacacacacacac

SEQ ID NO: 40762 - RNA, 19 nt, synthetic construct
  misc_feature 1..19: note = siRNA sense sequence
  source 1..19: mol_type = other RNA
tgtgtgtgtgtatatatac

SEQ ID NO: 40763 - RNA, 19 nt, synthetic construct
  misc_feature 1..19: note = siRNA antisense sequence
  source 1..19: mol_type = other RNA
gtatatatacacacacaca

SEQ ID NO: 40764 - RNA, 19 nt, synthetic construct
  misc_feature 1..19: note = siRNA sense sequence
  source 1..19: mol_type = other RNA
gtgtgtgtgtatatatact

SEQ ID NO: 40765 - RNA, 19 nt, synthetic construct
  misc_feature 1..19: note = siRNA antisense sequence
  source 1..19: mol_type = other RNA
agtatatatacacacacac

SEQ ID NO: 40766 - RNA, 19 nt, synthetic construct
  misc_feature 1..19: note = siRNA sense sequence
  source 1..19: mol_type = other RNA
ttaatccacatcaatatgc

SEQ ID NO: 40767 - RNA, 19 nt, synthetic construct
  misc_feature 1..19: note = siRNA antisense sequence
  source 1..19: mol_type = other RNA
gcatattgatgtggattaa

SEQ ID NO: 40768 - RNA, 19 nt, synthetic construct
  misc_feature 1..19: note = siRNA sense sequence
  source 1..19: mol_type = other RNA
ccacatcaatatgcaagag

SEQ ID NO: 40769 - RNA, 19 nt, synthetic construct
  misc_feature 1..19: note = siRNA antisense sequence
  source 1..19: mol_type = other RNA
ctcttgcatattgatgtgg

SEQ ID NO: 40770 - RNA, 19 nt, synthetic construct
  misc_feature 1..19: note = siRNA sense sequence
  source 1..19: mol_type = other RNA
cacatcaatatgcaagagg

SEQ ID NO: 40771 - RNA, 19 nt, synthetic construct
  misc_feature 1..19: note = siRNA antisense sequence
  source 1..19: mol_type = other RNA
cctcttgcatattgatgtg

SEQ ID NO: 40772 - RNA, 19 nt, synthetic construct
  misc_feature 1..19: note = siRNA sense sequence
  source 1..19: mol_type = other RNA
acatcaatatgcaagaggt

SEQ ID NO: 40773 - RNA, 19 nt, synthetic construct
  misc_feature 1..19: note = siRNA antisense sequence
  source 1..19: mol_type = other RNA
acctcttgcatattgatgt

SEQ ID NO: 40774 - RNA, 19 nt, synthetic construct
  misc_feature 1..19: note = siRNA sense sequence
  source 1..19: mol_type = other RNA
catcaatatgcaagaggta

SEQ ID NO: 40775 - RNA, 19 nt, synthetic construct
  misc_feature 1..19: note = siRNA antisense sequence
  source 1..19: mol_type = other RNA
tacctcttgcatattgatg

SEQ ID NO: 40776 - RNA, 19 nt, synthetic construct
  misc_feature 1..19: note = siRNA sense sequence
  source 1..19: mol_type = other RNA
atcaatatgcaagaggtag

SEQ ID NO: 40777 - RNA, 19 nt, synthetic construct
  misc_feature 1..19: note = siRNA antisense sequence
  source 1..19: mol_type = other RNA
ctacctcttgcatattgat

SEQ ID NO: 40778 - RNA, 19 nt, synthetic construct
  misc_feature 1..19: note = siRNA sense sequence
  source 1..19: mol_type = other RNA
tcaatatgcaagaggtagg

SEQ ID NO: 40779 - RNA, 19 nt, synthetic construct
  misc_feature 1..19: note = siRNA antisense sequence
  source 1..19: mol_type = other RNA
cctacctcttgcatattga

SEQ ID NO: 40780 - RNA, 19 nt, synthetic construct
  misc_feature 1..19: note = siRNA sense sequence
  source 1..19: mol_type = other RNA
caatatgcaagaggtaggc

SEQ ID NO: 40781 - RNA, 19 nt, synthetic construct
  misc_feature 1..19: note = siRNA antisense sequence
  source 1..19: mol_type = other RNA
gcctacctcttgcatattg

SEQ ID NO: 40782 - RNA, 19 nt, synthetic construct
  misc_feature 1..19: note = siRNA sense sequence
  source 1..19: mol_type = other RNA
aatatgcaagaggtaggct

SEQ ID NO: 40783 - RNA, 19 nt, synthetic construct
  misc_feature 1..19: note = siRNA antisense sequence
  source 1..19: mol_type = other RNA
agcctacctcttgcatatt

SEQ ID NO: 40784 - RNA, 19 nt, synthetic construct
  misc_feature 1..19: note = siRNA sense sequence
  source 1..19: mol_type = other RNA
atatgcaagaggtaggctc

SEQ ID NO: 40785 - RNA, 19 nt, synthetic construct
  misc_feature 1..19: note = siRNA antisense sequence
  source 1..19: mol_type = other RNA
gagcctacctcttgcatat

SEQ ID NO: 40786 - RNA, 19 nt, synthetic construct
  misc_feature 1..19: note = siRNA sense sequence
  source 1..19: mol_type = other RNA
gaggtaggctctctgctta

SEQ ID NO: 40787 - RNA, 19 nt, synthetic construct
  misc_feature 1..19: note = siRNA antisense sequence
  source 1..19: mol_type = other RNA
taagcagagagcctacctc

SEQ ID NO: 40788 - RNA, 19 nt, synthetic construct
  misc_feature 1..19: note = siRNA sense sequence
  source 1..19: mol_type = other RNA
aggtaggctctctgcttag

SEQ ID NO: 40789 - RNA, 19 nt, synthetic construct
  misc_feature 1..19: note = siRNA antisense sequence
  source 1..19: mol_type = other RNA
ctaagcagagagcctacct

SEQ ID NO: 40790 - RNA, 19 nt, synthetic construct
  misc_feature 1..19: note = siRNA sense sequence
  source 1..19: mol_type = other RNA
ggtaggctctctgcttagt

SEQ ID NO: 40791 - RNA, 19 nt, synthetic construct
  misc_feature 1..19: note = siRNA antisense sequence
  source 1..19: mol_type = other RNA
actaagcagagagcctacc

SEQ ID NO: 40792 - RNA, 19 nt, synthetic construct
  misc_feature 1..19: note = siRNA sense sequence
  source 1..19: mol_type = other RNA
gtaggctctctgcttagtt

SEQ ID NO: 40793 - RNA, 19 nt, synthetic construct
  misc_feature 1..19: note = siRNA antisense sequence
  source 1..19: mol_type = other RNA
aactaagcagagagcctac

SEQ ID NO: 40794 - RNA, 19 nt, synthetic construct
  misc_feature 1..19: note = siRNA sense sequence
  source 1..19: mol_type = other RNA
taggctctctgcttagttt

SEQ ID NO: 40795 - RNA, 19 nt, synthetic construct
  misc_feature 1..19: note = siRNA antisense sequence
  source 1..19: mol_type = other RNA
aaactaagcagagagccta

SEQ ID NO: 40796 - RNA, 19 nt, synthetic construct
  misc_feature 1..19: note = siRNA sense sequence
  source 1..19: mol_type = other RNA
aggctctctgcttagttta

SEQ ID NO: 40797 - RNA, 19 nt, synthetic construct
  misc_feature 1..19: note = siRNA antisense sequence
  source 1..19: mol_type = other RNA
taaactaagcagagagcct

SEQ ID NO: 40798 - RNA, 19 nt, synthetic construct
  misc_feature 1..19: note = siRNA sense sequence
  source 1..19: mol_type = other RNA
tctgcttagtttacataac

SEQ ID NO: 40799 - RNA, 19 nt, synthetic construct
  misc_feature 1..19: note = siRNA antisense sequence
  source 1..19: mol_type = other RNA
gttatgtaaactaagcaga

SEQ ID NO: 40800 - RNA, 19 nt, synthetic construct
  misc_feature 1..19: note = siRNA sense sequence
  source 1..19: mol_type = other RNA
ctgattatgagtgttattg

SEQ ID NO: 40801 - RNA, 19 nt, synthetic construct
  misc_feature 1..19: note = siRNA antisense sequence
  source 1..19: mol_type = other RNA
caataacactcataatcag

SEQ ID NO: 40802 - RNA, 19 nt, synthetic construct
  misc_feature 1..19: note = siRNA sense sequence
  source 1..19: mol_type = other RNA
gatttatttaacttccagg

SEQ ID NO: 40803 - RNA, 19 nt, synthetic construct
  misc_feature 1..19: note = siRNA antisense sequence
  source 1..19: mol_type = other RNA
cctggaagttaaataaatc

SEQ ID NO: 40804 - RNA, 19 nt, synthetic construct
  misc_feature 1..19: note = siRNA sense sequence
  source 1..19: mol_type = other RNA
atttatttaacttccaggg

SEQ ID NO: 40805 - RNA, 19 nt, synthetic construct
  misc_feature 1..19: note = siRNA antisense sequence
  source 1..19: mol_type = other RNA
ccctggaagttaaataaat

SEQ ID NO: 40806 - RNA, 19 nt, synthetic construct
  misc_feature 1..19: note = siRNA sense sequence
  source 1..19: mol_type = other RNA
taacttccagggtgcttat

SEQ ID NO: 40807 - RNA, 19 nt, synthetic construct
  misc_feature 1..19: note = siRNA antisense sequence
  source 1..19: mol_type = other RNA
ataagcaccctggaagtta

SEQ ID NO: 40808 - RNA, 19 nt, synthetic construct
  misc_feature 1..19: note = siRNA sense sequence
  source 1..19: mol_type = other RNA
aacttccagggtgcttatt

SEQ ID NO: 40809 - RNA, 19 nt, synthetic construct
  misc_feature 1..19: note = siRNA antisense sequence
  source 1..19: mol_type = other RNA
aataagcaccctggaagtt

SEQ ID NO: 40810 - RNA, 19 nt, synthetic construct
  misc_feature 1..19: note = siRNA sense sequence
  source 1..19: mol_type = other RNA
acttccagggtgcttattg

SEQ ID NO: 40811 - RNA, 19 nt, synthetic construct
  misc_feature 1..19: note = siRNA antisense sequence
  source 1..19: mol_type = other RNA
caataagcaccctggaagt

SEQ ID NO: 40812 - RNA, 19 nt, synthetic construct
  misc_feature 1..19: note = siRNA sense sequence
  source 1..19: mol_type = other RNA
ccagggtgcttattggttc

SEQ ID NO: 40813 - RNA, 19 nt, synthetic construct
  misc_feature 1..19: note = siRNA antisense sequence
  source 1..19: mol_type = other RNA
gaaccaataagcaccctgg

SEQ ID NO: 40814 - RNA, 19 nt, synthetic construct
  misc_feature 1..19: note = siRNA sense sequence
  source 1..19: mol_type = other RNA
cagggtgcttattggttct

SEQ ID NO: 40815 - RNA, 19 nt, synthetic construct
  misc_feature 1..19: note = siRNA antisense sequence
  source 1..19: mol_type = other RNA
agaaccaataagcaccctg

SEQ ID NO: 40816 - RNA, 19 nt, synthetic construct
  misc_feature 1..19: note = siRNA sense sequence
  source 1..19: mol_type = other RNA
ttattggttctccgttagt

SEQ ID NO: 40817 - RNA, 19 nt, synthetic construct
  misc_feature 1..19: note = siRNA antisense sequence
  source 1..19: mol_type = other RNA
actaacggagaaccaataa

SEQ ID NO: 40818 - RNA, 19 nt, synthetic construct
  misc_feature 1..19: note = siRNA sense sequence
  source 1..19: mol_type = other RNA
tattggttctccgttagtt

SEQ ID NO: 40819 - RNA, 19 nt, synthetic construct
  misc_feature 1..19: note = siRNA antisense sequence
  source 1..19: mol_type = other RNA
aactaacggagaaccaata

SEQ ID NO: 40820 - RNA, 19 nt, synthetic construct
  misc_feature 1..19: note = siRNA sense sequence
  source 1..19: mol_type = other RNA
attggttctccgttagttg

SEQ ID NO: 40821 - RNA, 19 nt, synthetic construct
  misc_feature 1..19: note = siRNA antisense sequence
  source 1..19: mol_type = other RNA
caactaacggagaaccaat

SEQ ID NO: 40822 - RNA, 19 nt, synthetic construct
  misc_feature 1..19: note = siRNA sense sequence
  source 1..19: mol_type = other RNA
ttggttctccgttagttgg

SEQ ID NO: 40823 - RNA, 19 nt, synthetic construct
  misc_feature 1..19: note = siRNA antisense sequence
  source 1..19: mol_type = other RNA
ccaactaacggagaaccaa

SEQ ID NO: 40824 - RNA, 19 nt, synthetic construct
  misc_feature 1..19: note = siRNA sense sequence
  source 1..19: mol_type = other RNA
tggttctccgttagttggc

SEQ ID NO: 40825 - RNA, 19 nt, synthetic construct
  misc_feature 1..19: note = siRNA antisense sequence
  source 1..19: mol_type = other RNA
gccaactaacggagaacca

SEQ ID NO: 40826 - RNA, 19 nt, synthetic construct
  misc_feature 1..19: note = siRNA sense sequence
  source 1..19: mol_type = other RNA
ggttctccgttagttggcc

SEQ ID NO: 40827 - RNA, 19 nt, synthetic construct
  misc_feature 1..19: note = siRNA antisense sequence
  source 1..19: mol_type = other RNA
ggccaactaacggagaacc

SEQ ID NO: 40828 - RNA, 19 nt, synthetic construct
  misc_feature 1..19: note = siRNA sense sequence
  source 1..19: mol_type = other RNA
gttctccgttagttggcca

SEQ ID NO: 40829 - RNA, 19 nt, synthetic construct
  misc_feature 1..19: note = siRNA antisense sequence
  source 1..19: mol_type = other RNA
tggccaactaacggagaac

SEQ ID NO: 40830 - RNA, 19 nt, synthetic construct
  misc_feature 1..19: note = siRNA sense sequence
  source 1..19: mol_type = other RNA
ttctccgttagttggccaa

SEQ ID NO: 40831 - RNA, 19 nt, synthetic construct
  misc_feature 1..19: note = siRNA antisense sequence
  source 1..19: mol_type = other RNA
ttggccaactaacggagaa

SEQ ID NO: 40832 - RNA, 19 nt, synthetic construct
  misc_feature 1..19: note = siRNA sense sequence
  source 1..19: mol_type = other RNA
tctccgttagttggccaac

SEQ ID NO: 40833 - RNA, 19 nt, synthetic construct
  misc_feature 1..19: note = siRNA antisense sequence
  source 1..19: mol_type = other RNA
gttggccaactaacggaga

SEQ ID NO: 40834 - RNA, 19 nt, synthetic construct
  misc_feature 1..19: note = siRNA sense sequence
  source 1..19: mol_type = other RNA
taaagttggatctaccagg

SEQ ID NO: 40835 - RNA, 19 nt, synthetic construct
  misc_feature 1..19: note = siRNA antisense sequence
  source 1..19: mol_type = other RNA
cctggtagatccaacttta

SEQ ID NO: 40836 - RNA, 19 nt, synthetic construct
  misc_feature 1..19: note = siRNA sense sequence
  source 1..19: mol_type = other RNA
aaagttggatctaccaggt

SEQ ID NO: 40837 - RNA, 19 nt, synthetic construct
  misc_feature 1..19: note = siRNA antisense sequence
  source 1..19: mol_type = other RNA
acctggtagatccaacttt

SEQ ID NO: 40838 - RNA, 19 nt, synthetic construct
  misc_feature 1..19: note = siRNA sense sequence
  source 1..19: mol_type = other RNA
aagttggatctaccaggta

SEQ ID NO: 40839 - RNA, 19 nt, synthetic construct
  misc_feature 1..19: note = siRNA antisense sequence
  source 1..19: mol_type = other RNA
tacctggtagatccaactt

SEQ ID NO: 40840 - RNA, 19 nt, synthetic construct
  misc_feature 1..19: note = siRNA sense sequence
  source 1..19: mol_type = other RNA
tggatctaccaggtatgta

SEQ ID NO: 40841 - RNA, 19 nt, synthetic construct
  misc_feature 1..19: note = siRNA antisense sequence
  source 1..19: mol_type = other RNA
tacatacctggtagatcca

SEQ ID NO: 40842 - RNA, 19 nt, synthetic construct
  misc_feature 1..19: note = siRNA sense sequence
  source 1..19: mol_type = other RNA
ggatctaccaggtatgtaa

SEQ ID NO: 40843 - RNA, 19 nt, synthetic construct
  misc_feature 1..19: note = siRNA antisense sequence
  source 1..19: mol_type = other RNA
ttacatacctggtagatcc

SEQ ID NO: 40844 - RNA, 19 nt, synthetic construct
  misc_feature 1..19: note = siRNA sense sequence
  source 1..19: mol_type = other RNA
gatctaccaggtatgtaaa

SEQ ID NO: 40845 - RNA, 19 nt, synthetic construct
  misc_feature 1..19: note = siRNA antisense sequence
  source 1..19: mol_type = other RNA
tttacatacctggtagatc

SEQ ID NO: 40846 - RNA, 19 nt, synthetic construct
  misc_feature 1..19: note = siRNA sense sequence
  source 1..19: mol_type = other RNA
atctaccaggtatgtaaaa

SEQ ID NO: 40847 - RNA, 19 nt, synthetic construct
  misc_feature 1..19: note = siRNA antisense sequence
  source 1..19: mol_type = other RNA
ttttacatacctggtagat

SEQ ID NO: 40848 - RNA, 19 nt, synthetic construct
  misc_feature 1..19: note = siRNA sense sequence
  source 1..19: mol_type = other RNA
tctaccaggtatgtaaaat

SEQ ID NO: 40849 - RNA, 19 nt, synthetic construct
  misc_feature 1..19: note = siRNA antisense sequence
  source 1..19: mol_type = other RNA
attttacatacctggtaga

SEQ ID NO: 40850 - RNA, 19 nt, synthetic construct
  misc_feature 1..19: note = siRNA sense sequence
  source 1..19: mol_type = other RNA
ctaccaggtatgtaaaatt

SEQ ID NO: 40851 - RNA, 19 nt, synthetic construct
  misc_feature 1..19: note = siRNA antisense sequence
  source 1..19: mol_type = other RNA
aattttacatacctggtag

SEQ ID NO: 40852 - RNA, 19 nt, synthetic construct
  misc_feature 1..19: note = siRNA sense sequence
  source 1..19: mol_type = other RNA
gtgagtcacgcctgtaatc

SEQ ID NO: 40853 - RNA, 19 nt, synthetic construct
  misc_feature 1..19: note = siRNA antisense sequence
  source 1..19: mol_type = other RNA
gattacaggcgtgactcac

SEQ ID NO: 40854 - RNA, 19 nt, synthetic construct
  misc_feature 1..19: note = siRNA sense sequence
  source 1..19: mol_type = other RNA
tgagtcacgcctgtaatcc

SEQ ID NO: 40855 - RNA, 19 nt, synthetic construct
  misc_feature 1..19: note = siRNA antisense sequence
  source 1..19: mol_type = other RNA
ggattacaggcgtgactca

SEQ ID NO: 40856 - RNA, 19 nt, synthetic construct
  misc_feature 1..19: note = siRNA sense sequence
  source 1..19: mol_type = other RNA
gagtcacgcctgtaatccc

SEQ ID NO: 40857 - RNA, 19 nt, synthetic construct
  misc_feature 1..19: note = siRNA antisense sequence
  source 1..19: mol_type = other RNA
gggattacaggcgtgactc

SEQ ID NO: 40858 - RNA, 19 nt, synthetic construct
  misc_feature 1..19: note = siRNA sense sequence
  source 1..19: mol_type = other RNA
acactttaagaggtcaaga

SEQ ID NO: 40859 - RNA, 19 nt, synthetic construct
  misc_feature 1..19: note = siRNA antisense sequence
  source 1..19: mol_type = other RNA
tcttgacctcttaaagtgt

SEQ ID NO: 40860 - RNA, 19 nt, synthetic construct
  misc_feature 1..19: note = siRNA sense sequence
  source 1..19: mol_type = other RNA
tttaagaggtcaagacagg

SEQ ID NO: 40861 - RNA, 19 nt, synthetic construct
  misc_feature 1..19: note = siRNA antisense sequence
  source 1..19: mol_type = other RNA
cctgtcttgacctcttaaa

SEQ ID NO: 40862 - RNA, 19 nt, synthetic construct
  misc_feature 1..19: note = siRNA sense sequence
  source 1..19: mol_type = other RNA
ttaagaggtcaagacaggc

SEQ ID NO: 40863 - RNA, 19 nt, synthetic construct
  misc_feature 1..19: note = siRNA antisense sequence
  source 1..19: mol_type = other RNA
gcctgtcttgacctcttaa

SEQ ID NO: 40864 - RNA, 19 nt, synthetic construct
  misc_feature 1..19: note = siRNA sense sequence
  source 1..19: mol_type = other RNA
tcaagacaggcatatcgtt

SEQ ID NO: 40865 - RNA, 19 nt, synthetic construct
  misc_feature 1..19: note = siRNA antisense sequence
  source 1..19: mol_type = other RNA
aacgatatgcctgtcttga

SEQ ID NO: 40866 - RNA, 19 nt, synthetic construct
  misc_feature 1..19: note = siRNA sense sequence
  source 1..19: mol_type = other RNA
caagacaggcatatcgttt

SEQ ID NO: 40867 - RNA, 19 nt, synthetic construct
  misc_feature 1..19: note = siRNA antisense sequence
  source 1..19: mol_type = other RNA
aaacgatatgcctgtcttg

SEQ ID NO: 40868 - RNA, 19 nt, synthetic construct
  misc_feature 1..19: note = siRNA sense sequence
  source 1..19: mol_type = other RNA
aagacaggcatatcgtttg

SEQ ID NO: 40869 - RNA, 19 nt, synthetic construct
  misc_feature 1..19: note = siRNA antisense sequence
  source 1..19: mol_type = other RNA
caaacgatatgcctgtctt

SEQ ID NO: 40870 - RNA, 19 nt, synthetic construct
  misc_feature 1..19: note = siRNA sense sequence
  source 1..19: mol_type = other RNA
agacaggcatatcgtttga

SEQ ID NO: 40871 - RNA, 19 nt, synthetic construct
  misc_feature 1..19: note = siRNA antisense sequence
  source 1..19: mol_type = other RNA
tcaaacgatatgcctgtct

SEQ ID NO: 40872 - RNA, 19 nt, synthetic construct
  misc_feature 1..19: note = siRNA sense sequence
  source 1..19: mol_type = other RNA
gcatatcgtttgagcccag

SEQ ID NO: 40873 - RNA, 19 nt, synthetic construct
  misc_feature 1..19: note = siRNA antisense sequence
  source 1..19: mol_type = other RNA
ctgggctcaaacgatatgc

SEQ ID NO: 40874 - RNA, 19 nt, synthetic construct
  misc_feature 1..19: note = siRNA sense sequence
  source 1..19: mol_type = other RNA
catatcgtttgagcccagg

SEQ ID NO: 40875 - RNA, 19 nt, synthetic construct
  misc_feature 1..19: note = siRNA antisense sequence
  source 1..19: mol_type = other RNA
cctgggctcaaacgatatg

SEQ ID NO: 40876 - RNA, 19 nt, synthetic construct
  misc_feature 1..19: note = siRNA sense sequence
  source 1..19: mol_type = other RNA
tatcgtttgagcccaggag

SEQ ID NO: 40877 - RNA, 19 nt, synthetic construct
  misc_feature 1..19: note = siRNA antisense sequence
  source 1..19: mol_type = other RNA
ctcctgggctcaaacgata

SEQ ID NO: 40878 - RNA, 19 nt, synthetic construct
  misc_feature 1..19: note = siRNA sense sequence
  source 1..19: mol_type = other RNA
atcgtttgagcccaggagt

SEQ ID NO: 40879 - RNA, 19 nt, synthetic construct
  misc_feature 1..19: note = siRNA antisense sequence
  source 1..19: mol_type = other RNA
actcctgggctcaaacgat

SEQ ID NO: 40880 - RNA, 19 nt, synthetic construct
  misc_feature 1..19: note = siRNA sense sequence
  source 1..19: mol_type = other RNA
tcgtttgagcccaggagtt

SEQ ID NO: 40881 - RNA, 19 nt, synthetic construct
  misc_feature 1..19: note = siRNA antisense sequence
  source 1..19: mol_type = other RNA
aactcctgggctcaaacga

SEQ ID NO: 40882 - RNA, 19 nt, synthetic construct
  misc_feature 1..19: note = siRNA sense sequence
  source 1..19: mol_type = other RNA
cgtttgagcccaggagttt

SEQ ID NO: 40883 - RNA, 19 nt, synthetic construct
  misc_feature 1..19: note = siRNA antisense sequence
  source 1..19: mol_type = other RNA
aaactcctgggctcaaacg

SEQ ID NO: 40884 - RNA, 19 nt, synthetic construct
  misc_feature 1..19: note = siRNA sense sequence
  source 1..19: mol_type = other RNA
gtttgagcccaggagtttg

SEQ ID NO: 40885 - RNA, 19 nt, synthetic construct
  misc_feature 1..19: note = siRNA antisense sequence
  source 1..19: mol_type = other RNA
caaactcctgggctcaaac

SEQ ID NO: 40886 - RNA, 19 nt, synthetic construct
  misc_feature 1..19: note = siRNA sense sequence
  source 1..19: mol_type = other RNA
tttgagcccaggagtttga

SEQ ID NO: 40887 - RNA, 19 nt, synthetic construct
  misc_feature 1..19: note = siRNA antisense sequence
  source 1..19: mol_type = other RNA
tcaaactcctgggctcaaa

SEQ ID NO: 40888 - RNA, 19 nt, synthetic construct
  misc_feature 1..19: note = siRNA sense sequence
  source 1..19: mol_type = other RNA
agaccagcctgggcaacct

SEQ ID NO: 40889 - RNA, 19 nt, synthetic construct
  misc_feature 1..19: note = siRNA antisense sequence
  source 1..19: mol_type = other RNA
aggttgcccaggctggtct

SEQ ID NO: 40890 - RNA, 19 nt, synthetic construct
  misc_feature 1..19: note = siRNA sense sequence
  source 1..19: mol_type = other RNA
accagcctgggcaacctga

SEQ ID NO: 40891 - RNA, 19 nt, synthetic construct
  misc_feature 1..19: note = siRNA antisense sequence
  source 1..19: mol_type = other RNA
tcaggttgcccaggctggt

SEQ ID NO: 40892 - RNA, 19 nt, synthetic construct
  misc_feature 1..19: note = siRNA sense sequence
  source 1..19: mol_type = other RNA
tagtcccagctactcaaga

SEQ ID NO: 40893 - RNA, 19 nt, synthetic construct
  misc_feature 1..19: note = siRNA antisense sequence
  source 1..19: mol_type = other RNA
tcttgagtagctgggacta

SEQ ID NO: 40894 - RNA, 19 nt, synthetic construct
  misc_feature 1..19: note = siRNA sense sequence
  source 1..19: mol_type = other RNA
agtcccagctactcaagag

SEQ ID NO: 40895 - RNA, 19 nt, synthetic construct
  misc_feature 1..19: note = siRNA antisense sequence
  source 1..19: mol_type = other RNA
ctcttgagtagctgggact

SEQ ID NO: 40896 - RNA, 19 nt, synthetic construct
  misc_feature 1..19: note = siRNA sense sequence
  source 1..19: mol_type = other RNA
gtcccagctactcaagagg

SEQ ID NO: 40897 - RNA, 19 nt, synthetic construct
  misc_feature 1..19: note = siRNA antisense sequence
  source 1..19: mol_type = other RNA
cctcttgagtagctgggac

SEQ ID NO: 40898 - RNA, 19 nt, synthetic construct
  misc_feature 1..19: note = siRNA sense sequence
  source 1..19: mol_type = other RNA
agtgtgaggatcgcttgag

SEQ ID NO: 40899 - RNA, 19 nt, synthetic construct
  misc_feature 1..19: note = siRNA antisense sequence
  source 1..19: mol_type = other RNA
ctcaagcgatcctcacact

SEQ ID NO: 40900 - RNA, 19 nt, synthetic construct
  misc_feature 1..19: note = siRNA sense sequence
  source 1..19: mol_type = other RNA
gtgtgaggatcgcttgagc

SEQ ID NO: 40901 - RNA, 19 nt, synthetic construct
  misc_feature 1..19: note = siRNA antisense sequence
  source 1..19: mol_type = other RNA
gctcaagcgatcctcacac

SEQ ID NO: 40902 - RNA, 19 nt, synthetic construct
  misc_feature 1..19: note = siRNA sense sequence
  source 1..19: mol_type = other RNA
tgtgaggatcgcttgagct

SEQ ID NO: 40903 - RNA, 19 nt, synthetic construct
  misc_feature 1..19: note = siRNA antisense sequence
  source 1..19: mol_type = other RNA
agctcaagcgatcctcaca

SEQ ID NO: 40904 - RNA, 19 nt, synthetic construct
  misc_feature 1..19: note = siRNA sense sequence
  source 1..19: mol_type = other RNA
gtgaggatcgcttgagctc

SEQ ID NO: 40905 - RNA, 19 nt, synthetic construct
  misc_feature 1..19: note = siRNA antisense sequence
  source 1..19: mol_type = other RNA
gagctcaagcgatcctcac

SEQ ID NO: 40906 - RNA, 19 nt, synthetic construct
  misc_feature 1..19: note = siRNA sense sequence
  source 1..19: mol_type = other RNA
gaggatcgcttgagctcag

SEQ ID NO: 40907 - RNA, 19 nt, synthetic construct
  misc_feature 1..19: note = siRNA antisense sequence
  source 1..19: mol_type = other RNA
ctgagctcaagcgatcctc

SEQ ID NO: 40908 - RNA, 19 nt, synthetic construct
  misc_feature 1..19: note = siRNA sense sequence
  source 1..19: mol_type = other RNA
aggatcgcttgagctcagg

SEQ ID NO: 40909 - RNA, 19 nt, synthetic construct
  misc_feature 1..19: note = siRNA antisense sequence
  source 1..19: mol_type = other RNA
cctgagctcaagcgatcct

SEQ ID NO: 40910 - RNA, 19 nt, synthetic construct
  misc_feature 1..19: note = siRNA sense sequence
  source 1..19: mol_type = other RNA
tcgcttgagctcaggagtt

SEQ ID NO: 40911 - RNA, 19 nt, synthetic construct
  misc_feature 1..19: note = siRNA antisense sequence
  source 1..19: mol_type = other RNA
aactcctgagctcaagcga

SEQ ID NO: 40912 - RNA, 19 nt, synthetic construct
  misc_feature 1..19: note = siRNA sense sequence
  source 1..19: mol_type = other RNA
cgcttgagctcaggagttt

SEQ ID NO: 40913 - RNA, 19 nt, synthetic construct
  misc_feature 1..19: note = siRNA antisense sequence
  source 1..19: mol_type = other RNA
aaactcctgagctcaagcg

SEQ ID NO: 40914 - RNA, 19 nt, synthetic construct
  misc_feature 1..19: note = siRNA sense sequence
  source 1..19: mol_type = other RNA
gcttgagctcaggagtttg

SEQ ID NO: 40915 - RNA, 19 nt, synthetic construct
  misc_feature 1..19: note = siRNA antisense sequence
  source 1..19: mol_type = other RNA
caaactcctgagctcaagc

SEQ ID NO: 40916 - RNA, 19 nt, synthetic construct
  misc_feature 1..19: note = siRNA sense sequence
  source 1..19: mol_type = other RNA
cttgagctcaggagtttga

SEQ ID NO: 40917 - RNA, 19 nt, synthetic construct
  misc_feature 1..19: note = siRNA antisense sequence
  source 1..19: mol_type = other RNA
tcaaactcctgagctcaag

SEQ ID NO: 40918 - RNA, 19 nt, synthetic construct
  misc_feature 1..19: note = siRNA sense sequence
  source 1..19: mol_type = other RNA
agactgcagtgaatggtaa

SEQ ID NO: 40919 - RNA, 19 nt, synthetic construct
  misc_feature 1..19: note = siRNA antisense sequence
  source 1..19: mol_type = other RNA
ttaccattcactgcagtct

SEQ ID NO: 40920 - RNA, 19 nt, synthetic construct
  misc_feature 1..19: note = siRNA sense sequence
  source 1..19: mol_type = other RNA
gactgcagtgaatggtaat

SEQ ID NO: 40921 - RNA, 19 nt, synthetic construct
  misc_feature 1..19: note = siRNA antisense sequence
  source 1..19: mol_type = other RNA
attaccattcactgcagtc

SEQ ID NO: 40922 - RNA, 19 nt, synthetic construct
  misc_feature 1..19: note = siRNA sense sequence
  source 1..19: mol_type = other RNA
ctgcagtgaatggtaattg

SEQ ID NO: 40923 - RNA, 19 nt, synthetic construct
  misc_feature 1..19: note = siRNA antisense sequence
  source 1..19: mol_type = other RNA
caattaccattcactgcag

SEQ ID NO: 40924 - RNA, 19 nt, synthetic construct
  misc_feature 1..19: note = siRNA sense sequence
  source 1..19: mol_type = other RNA
tgcagtgaatggtaattgc

SEQ ID NO: 40925 - RNA, 19 nt, synthetic construct
  misc_feature 1..19: note = siRNA antisense sequence
  source 1..19: mol_type = other RNA
gcaattaccattcactgca

SEQ ID NO: 40926 - RNA, 19 nt, synthetic construct
  misc_feature 1..19: note = siRNA sense sequence
  source 1..19: mol_type = other RNA
gcagtgaatggtaattgcg

SEQ ID NO: 40927 - RNA, 19 nt, synthetic construct
  misc_feature 1..19: note = siRNA antisense sequence
  source 1..19: mol_type = other RNA
cgcaattaccattcactgc

SEQ ID NO: 40928 - RNA, 19 nt, synthetic construct
  misc_feature 1..19: note = siRNA sense sequence
  source 1..19: mol_type = other RNA
cagtgaatggtaattgcgc

SEQ ID NO: 40929 - RNA, 19 nt, synthetic construct
  misc_feature 1..19: note = siRNA antisense sequence
  source 1..19: mol_type = other RNA
gcgcaattaccattcactg

SEQ ID NO: 40930 - RNA, 19 nt, synthetic construct
  misc_feature 1..19: note = siRNA sense sequence
  source 1..19: mol_type = other RNA
agtgaatggtaattgcgcc

SEQ ID NO: 40931 - RNA, 19 nt, synthetic construct
  misc_feature 1..19: note = siRNA antisense sequence
  source 1..19: mol_type = other RNA
ggcgcaattaccattcact

SEQ ID NO: 40932 - RNA, 19 nt, synthetic construct
  misc_feature 1..19: note = siRNA sense sequence
  source 1..19: mol_type = other RNA
gtgaatggtaattgcgcca

SEQ ID NO: 40933 - RNA, 19 nt, synthetic construct
  misc_feature 1..19: note = siRNA antisense sequence
  source 1..19: mol_type = other RNA
tggcgcaattaccattcac

SEQ ID NO: 40934 - RNA, 19 nt, synthetic construct
  misc_feature 1..19: note = siRNA sense sequence
  source 1..19: mol_type = other RNA
tgaatggtaattgcgccac

SEQ ID NO: 40935 - RNA, 19 nt, synthetic construct
  misc_feature 1..19: note = siRNA antisense sequence
  source 1..19: mol_type = other RNA
gtggcgcaattaccattca

SEQ ID NO: 40936 - RNA, 19 nt, synthetic construct
  misc_feature 1..19: note = siRNA sense sequence
  source 1..19: mol_type = other RNA
gaatggtaattgcgccact

SEQ ID NO: 40937 - RNA, 19 nt, synthetic construct
  misc_feature 1..19: note = siRNA antisense sequence
  source 1..19: mol_type = other RNA
agtggcgcaattaccattc

SEQ ID NO: 40938 - RNA, 19 nt, synthetic construct
  misc_feature 1..19: note = siRNA sense sequence
  source 1..19: mol_type = other RNA
tccagcctgggtgacagag

SEQ ID NO: 40939 - RNA, 19 nt, synthetic construct
  misc_feature 1..19: note = siRNA antisense sequence
  source 1..19: mol_type = other RNA
ctctgtcacccaggctgga

SEQ ID NO: 40940 - RNA, 19 nt, synthetic construct
  misc_feature 1..19: note = siRNA sense sequence
  source 1..19: mol_type = other RNA
ccagcctgggtgacagagt

SEQ ID NO: 40941 - RNA, 19 nt, synthetic construct
  misc_feature 1..19: note = siRNA antisense sequence
  source 1..19: mol_type = other RNA
actctgtcacccaggctgg

SEQ ID NO: 40942 - RNA, 19 nt, synthetic construct
  misc_feature 1..19: note = siRNA sense sequence
  source 1..19: mol_type = other RNA
cagcctgggtgacagagtg

SEQ ID NO: 40943 - RNA, 19 nt, synthetic construct
  misc_feature 1..19: note = siRNA antisense sequence
  source 1..19: mol_type = other RNA
cactctgtcacccaggctg

SEQ ID NO: 40944 - RNA, 19 nt, synthetic construct
  misc_feature 1..19: note = siRNA sense sequence
  source 1..19: mol_type = other RNA
agcctgggtgacagagtga

SEQ ID NO: 40945 - RNA, 19 nt, synthetic construct
  misc_feature 1..19: note = siRNA antisense sequence
  source 1..19: mol_type = other RNA
tcactctgtcacccaggct

SEQ ID NO: 40946 - RNA, 19 nt, synthetic construct
  misc_feature 1..19: note = siRNA sense sequence
  source 1..19: mol_type = other RNA
gcctgggtgacagagtgag

SEQ ID NO: 40947 - RNA, 19 nt, synthetic construct
  misc_feature 1..19: note = siRNA antisense sequence
  source 1..19: mol_type = other RNA
ctcactctgtcacccaggc

SEQ ID NO: 40948 - RNA, 19 nt, synthetic construct
  misc_feature 1..19: note = siRNA sense sequence
  source 1..19: mol_type = other RNA
atcaggtcttaaattatgc

SEQ ID NO: 40949 - RNA, 19 nt, synthetic construct
  misc_feature 1..19: note = siRNA antisense sequence
  source 1..19: mol_type = other RNA
gcataatttaagacctgat

SEQ ID NO: 40950 - RNA, 19 nt, synthetic construct
  misc_feature 1..19: note = siRNA sense sequence
  source 1..19: mol_type = other RNA
tcaggtcttaaattatgcc

SEQ ID NO: 40951 - RNA, 19 nt, synthetic construct
  misc_feature 1..19: note = siRNA antisense sequence
  source 1..19: mol_type = other RNA
ggcataatttaagacctga

SEQ ID NO: 40952 - RNA, 19 nt, synthetic construct
  misc_feature 1..19: note = siRNA sense sequence
  source 1..19: mol_type = other RNA
caggtcttaaattatgccc

SEQ ID NO: 40953 - RNA, 19 nt, synthetic construct
  misc_feature 1..19: note = siRNA antisense sequence
  source 1..19: mol_type = other RNA
gggcataatttaagacctg

SEQ ID NO: 40954 - RNA, 19 nt, synthetic construct
  misc_feature 1..19: note = siRNA sense sequence
  source 1..19: mol_type = other RNA
aggtcttaaattatgccca

SEQ ID NO: 40955 - RNA, 19 nt, synthetic construct
  misc_feature 1..19: note = siRNA antisense sequence
  source 1..19: mol_type = other RNA
tgggcataatttaagacct

SEQ ID NO: 40956 - RNA, 19 nt, synthetic construct
  misc_feature 1..19: note = siRNA sense sequence
  source 1..19: mol_type = other RNA
ggtcttaaattatgcccag

SEQ ID NO: 40957 - RNA, 19 nt, synthetic construct
  misc_feature 1..19: note = siRNA antisense sequence
  source 1..19: mol_type = other RNA
ctgggcataatttaagacc

SEQ ID NO: 40958 - RNA, 19 nt, synthetic construct
  misc_feature 1..19: note = siRNA sense sequence
  source 1..19: mol_type = other RNA
gtcttaaattatgcccagt

SEQ ID NO: 40959 - RNA, 19 nt, synthetic construct
  misc_feature 1..19: note = siRNA antisense sequence
  source 1..19: mol_type = other RNA
actgggcataatttaagac

SEQ ID NO: 40960 - RNA, 19 nt, synthetic construct
  misc_feature 1..19: note = siRNA sense sequence
  source 1..19: mol_type = other RNA
tcttaaattatgcccagta

SEQ ID NO: 40961 - RNA, 19 nt, synthetic construct
  misc_feature 1..19: note = siRNA antisense sequence
  source 1..19: mol_type = other RNA
tactgggcataatttaaga

SEQ ID NO: 40962 - RNA, 19 nt, synthetic construct
  misc_feature 1..19: note = siRNA sense sequence
  source 1..19: mol_type = other RNA
cttaaattatgcccagtat

SEQ ID NO: 40963 - RNA, 19 nt, synthetic construct
  misc_feature 1..19: note = siRNA antisense sequence
  source 1..19: mol_type = other RNA
atactgggcataatttaag

SEQ ID NO: 40964 - RNA, 19 nt, synthetic construct
  misc_feature 1..19: note = siRNA sense sequence
  source 1..19: mol_type = other RNA
aattatgcccagtattctc

SEQ ID NO: 40965 - RNA, 19 nt, synthetic construct
  misc_feature 1..19: note = siRNA antisense sequence
  source 1..19: mol_type = other RNA
gagaatactgggcataatt

SEQ ID NO: 40966 - RNA, 19 nt, synthetic construct
  misc_feature 1..19: note = siRNA sense sequence
  source 1..19: mol_type = other RNA
attatgcccagtattctca

SEQ ID NO: 40967 - RNA, 19 nt, synthetic construct
  misc_feature 1..19: note = siRNA antisense sequence
  source 1..19: mol_type = other RNA
tgagaatactgggcataat

SEQ ID NO: 40968 - RNA, 19 nt, synthetic construct
  misc_feature 1..19: note = siRNA sense sequence
  source 1..19: mol_type = other RNA
ttatgcccagtattctcac

SEQ ID NO: 40969 - RNA, 19 nt, synthetic construct
  misc_feature 1..19: note = siRNA antisense sequence
  source 1..19: mol_type = other RNA
gtgagaatactgggcataa

SEQ ID NO: 40970 - RNA, 19 nt, synthetic construct
  misc_feature 1..19: note = siRNA sense sequence
  source 1..19: mol_type = other RNA
tatgcccagtattctcact

SEQ ID NO: 40971 - RNA, 19 nt, synthetic construct
  misc_feature 1..19: note = siRNA antisense sequence
  source 1..19: mol_type = other RNA
agtgagaatactgggcata

SEQ ID NO: 40972 - RNA, 19 nt, synthetic construct
  misc_feature 1..19: note = siRNA sense sequence
  source 1..19: mol_type = other RNA
cagcactttgggaggccga

SEQ ID NO: 40973 - RNA, 19 nt, synthetic construct
  misc_feature 1..19: note = siRNA antisense sequence
  source 1..19: mol_type = other RNA
tcggcctcccaaagtgctg

SEQ ID NO: 40974 - RNA, 19 nt, synthetic construct
  misc_feature 1..19: note = siRNA sense sequence
  source 1..19: mol_type = other RNA
agcactttgggaggccgag

SEQ ID NO: 40975 - RNA, 19 nt, synthetic construct
  misc_feature 1..19: note = siRNA antisense sequence
  source 1..19: mol_type = other RNA
ctcggcctcccaaagtgct

SEQ ID NO: 40976 - RNA, 19 nt, synthetic construct
  misc_feature 1..19: note = siRNA sense sequence
  source 1..19: mol_type = other RNA
actttgggaggccgaggca

SEQ ID NO: 40977 - RNA, 19 nt, synthetic construct
  misc_feature 1..19: note = siRNA antisense sequence
  source 1..19: mol_type = other RNA
tgcctcggcctcccaaagt

SEQ ID NO: 40978 - RNA, 19 nt, synthetic construct
  misc_feature 1..19: note = siRNA sense sequence
  source 1..19: mol_type = other RNA
aggcggatcacctgaggtc

SEQ ID NO: 40979 - RNA, 19 nt, synthetic construct
  misc_feature 1..19: note = siRNA antisense sequence
  source 1..19: mol_type = other RNA
gacctcaggtgatccgcct

SEQ ID NO: 40980 - RNA, 19 nt, synthetic construct
  misc_feature 1..19: note = siRNA sense sequence
  source 1..19: mol_type = other RNA
ggatcacctgaggtcggga

SEQ ID NO: 40981 - RNA, 19 nt, synthetic construct
  misc_feature 1..19: note = siRNA antisense sequence
  source 1..19: mol_type = other RNA
tcccgacctcaggtgatcc

SEQ ID NO: 40982 - RNA, 19 nt, synthetic construct
  misc_feature 1..19: note = siRNA sense sequence
  source 1..19: mol_type = other RNA
gatcacctgaggtcgggag

SEQ ID NO: 40983 - RNA, 19 nt, synthetic construct
  misc_feature 1..19: note = siRNA antisense sequence
  source 1..19: mol_type = other RNA
ctcccgacctcaggtgatc

SEQ ID NO: 40984 - RNA, 19 nt, synthetic construct
  misc_feature 1..19: note = siRNA sense sequence
  source 1..19: mol_type = other RNA
caaaattaagctgggcata

SEQ ID NO: 40985 - RNA, 19 nt, synthetic construct
  misc_feature 1..19: note = siRNA antisense sequence
  source 1..19: mol_type = other RNA
tatgcccagcttaattttg

SEQ ID NO: 40986 - RNA, 19 nt, synthetic construct
  misc_feature 1..19: note = siRNA sense sequence
  source 1..19: mol_type = other RNA
atgcctgtaatcccagcta

SEQ ID NO: 40987 - RNA, 19 nt, synthetic construct
  misc_feature 1..19: note = siRNA antisense sequence
  source 1..19: mol_type = other RNA
tagctgggattacaggcat

SEQ ID NO: 40988 - RNA, 19 nt, synthetic construct
  misc_feature 1..19: note = siRNA sense sequence
  source 1..19: mol_type = other RNA
tgcctgtaatcccagctac

SEQ ID NO: 40989 - RNA, 19 nt, synthetic construct
  misc_feature 1..19: note = siRNA antisense sequence
  source 1..19: mol_type = other RNA
gtagctgggattacaggca

SEQ ID NO: 40990 - RNA, 19 nt, synthetic construct
  misc_feature 1..19: note = siRNA sense sequence
  source 1..19: mol_type = other RNA
gcctgtaatcccagctact

SEQ ID NO: 40991 - RNA, 19 nt, synthetic construct
  misc_feature 1..19: note = siRNA antisense sequence
  source 1..19: mol_type = other RNA
agtagctgggattacaggc

SEQ ID NO: 40992 - RNA, 19 nt, synthetic construct
  misc_feature 1..19: note = siRNA sense sequence
  source 1..19: mol_type = other RNA
cctgtaatcccagctactt

SEQ ID NO: 40993 - RNA, 19 nt, synthetic construct
  misc_feature 1..19: note = siRNA antisense sequence
  source 1..19: mol_type = other RNA
aagtagctgggattacagg

SEQ ID NO: 40994 - RNA, 19 nt, synthetic construct
  misc_feature 1..19: note = siRNA sense sequence
  source 1..19: mol_type = other RNA
ctgtaatcccagctactta

SEQ ID NO: 40995 - RNA, 19 nt, synthetic construct
  misc_feature 1..19: note = siRNA antisense sequence
  source 1..19: mol_type = other RNA
taagtagctgggattacag

SEQ ID NO: 40996 - RNA, 19 nt, synthetic construct
  misc_feature 1..19: note = siRNA sense sequence
  source 1..19: mol_type = other RNA
tgtaatcccagctacttag

SEQ ID NO: 40997 - RNA, 19 nt, synthetic construct
  misc_feature 1..19: note = siRNA antisense sequence
  source 1..19: mol_type = other RNA
ctaagtagctgggattaca

SEQ ID NO: 40998 - RNA, 19 nt, synthetic construct
  misc_feature 1..19: note = siRNA sense sequence
  source 1..19: mol_type = other RNA
gtaatcccagctacttagg

SEQ ID NO: 40999 - RNA, 19 nt, synthetic construct
  misc_feature 1..19: note = siRNA antisense sequence
  source 1..19: mol_type = other RNA
cctaagtagctgggattac

SEQ ID NO: 41000 - RNA, 19 nt, synthetic construct
  misc_feature 1..19: note = siRNA sense sequence
  source 1..19: mol_type = other RNA
taatcccagctacttagga

SEQ ID NO: 41001 - RNA, 19 nt, synthetic construct
  misc_feature 1..19: note = siRNA antisense sequence
  source 1..19: mol_type = other RNA
tcctaagtagctgggatta

SEQ ID NO: 41002 - RNA, 19 nt, synthetic construct
  misc_feature 1..19: note = siRNA sense sequence
  source 1..19: mol_type = other RNA
aatcccagctacttaggag

SEQ ID NO: 41003 - RNA, 19 nt, synthetic construct
  misc_feature 1..19: note = siRNA antisense sequence
  source 1..19: mol_type = other RNA
ctcctaagtagctgggatt

SEQ ID NO: 41004 - RNA, 19 nt, synthetic construct
  misc_feature 1..19: note = siRNA sense sequence
  source 1..19: mol_type = other RNA
tacttaggaggctgaggca

SEQ ID NO: 41005 - RNA, 19 nt, synthetic construct
  misc_feature 1..19: note = siRNA antisense sequence
  source 1..19: mol_type = other RNA
tgcctcagcctcctaagta

SEQ ID NO: 41006 - RNA, 19 nt, synthetic construct
  misc_feature 1..19: note = siRNA sense sequence
  source 1..19: mol_type = other RNA
acttaggaggctgaggcag

SEQ ID NO: 41007 - RNA, 19 nt, synthetic construct
  misc_feature 1..19: note = siRNA antisense sequence
  source 1..19: mol_type = other RNA
ctgcctcagcctcctaagt

SEQ ID NO: 41008 - RNA, 19 nt, synthetic construct
  misc_feature 1..19: note = siRNA sense sequence
  source 1..19: mol_type = other RNA
cttaggaggctgaggcagg

SEQ ID NO: 41009 - RNA, 19 nt, synthetic construct
  misc_feature 1..19: note = siRNA antisense sequence
  source 1..19: mol_type = other RNA
cctgcctcagcctcctaag

SEQ ID NO: 41010 - RNA, 19 nt, synthetic construct
  misc_feature 1..19: note = siRNA sense sequence
  source 1..19: mol_type = other RNA
ttaggaggctgaggcagga

SEQ ID NO: 41011 - RNA, 19 nt, synthetic construct
  misc_feature 1..19: note = siRNA antisense sequence
  source 1..19: mol_type = other RNA
tcctgcctcagcctcctaa

SEQ ID NO: 41012 - RNA, 19 nt, synthetic construct
  misc_feature 1..19: note = siRNA sense sequence
  source 1..19: mol_type = other RNA
taggaggctgaggcaggag

SEQ ID NO: 41013 - RNA, 19 nt, synthetic construct
  misc_feature 1..19: note = siRNA antisense sequence
  source 1..19: mol_type = other RNA
ctcctgcctcagcctccta

SEQ ID NO: 41014 - RNA, 19 nt, synthetic construct
  misc_feature 1..19: note = siRNA sense sequence
  source 1..19: mol_type = other RNA
cctgggaggcagaggttgt

SEQ ID NO: 41015 - RNA, 19 nt, synthetic construct
  misc_feature 1..19: note = siRNA antisense sequence
  source 1..19: mol_type = other RNA
acaacctctgcctcccagg

SEQ ID NO: 41016 - RNA, 19 nt, synthetic construct
  misc_feature 1..19: note = siRNA sense sequence
  source 1..19: mol_type = other RNA
ctgggaggcagaggttgtg

SEQ ID NO: 41017 - RNA, 19 nt, synthetic construct
  misc_feature 1..19: note = siRNA antisense sequence
  source 1..19: mol_type = other RNA
cacaacctctgcctcccag

SEQ ID NO: 41018 - RNA, 19 nt, synthetic construct
  misc_feature 1..19: note = siRNA sense sequence
  source 1..19: mol_type = other RNA
tgggaggcagaggttgtgt

SEQ ID NO: 41019 - RNA, 19 nt, synthetic construct
  misc_feature 1..19: note = siRNA antisense sequence
  source 1..19: mol_type = other RNA
acacaacctctgcctccca

SEQ ID NO: 41020 - RNA, 19 nt, synthetic construct
  misc_feature 1..19: note = siRNA sense sequence
  source 1..19: mol_type = other RNA
gggaggcagaggttgtgtt

SEQ ID NO: 41021 - RNA, 19 nt, synthetic construct
  misc_feature 1..19: note = siRNA antisense sequence
  source 1..19: mol_type = other RNA
aacacaacctctgcctccc

SEQ ID NO: 41022 - RNA, 19 nt, synthetic construct
  misc_feature 1..19: note = siRNA sense sequence
  source 1..19: mol_type = other RNA
ggaggcagaggttgtgtta

SEQ ID NO: 41023 - RNA, 19 nt, synthetic construct
  misc_feature 1..19: note = siRNA antisense sequence
  source 1..19: mol_type = other RNA
taacacaacctctgcctcc

SEQ ID NO: 41024 - RNA, 19 nt, synthetic construct
  misc_feature 1..19: note = siRNA sense sequence
  source 1..19: mol_type = other RNA
gaggcagaggttgtgttaa

SEQ ID NO: 41025 - RNA, 19 nt, synthetic construct
  misc_feature 1..19: note = siRNA antisense sequence
  source 1..19: mol_type = other RNA
ttaacacaacctctgcctc

SEQ ID NO: 41026 - RNA, 19 nt, synthetic construct
  misc_feature 1..19: note = siRNA sense sequence
  source 1..19: mol_type = other RNA
aggcagaggttgtgttaag

SEQ ID NO: 41027 - RNA, 19 nt, synthetic construct
  misc_feature 1..19: note = siRNA antisense sequence
  source 1..19: mol_type = other RNA
cttaacacaacctctgcct

SEQ ID NO: 41028 - RNA, 19 nt, synthetic construct
  misc_feature 1..19: note = siRNA sense sequence
  source 1..19: mol_type = other RNA
ggcagaggttgtgttaagg

SEQ ID NO: 41029 - RNA, 19 nt, synthetic construct
  misc_feature 1..19: note = siRNA antisense sequence
  source 1..19: mol_type = other RNA
ccttaacacaacctctgcc

SEQ ID NO: 41030 - RNA, 19 nt, synthetic construct
  misc_feature 1..19: note = siRNA sense sequence
  source 1..19: mol_type = other RNA
gcagaggttgtgttaaggc

SEQ ID NO: 41031 - RNA, 19 nt, synthetic construct
  misc_feature 1..19: note = siRNA antisense sequence
  source 1..19: mol_type = other RNA
gccttaacacaacctctgc

SEQ ID NO: 41032 - RNA, 19 nt, synthetic construct
  misc_feature 1..19: note = siRNA sense sequence
  source 1..19: mol_type = other RNA
cagaggttgtgttaaggca

SEQ ID NO: 41033 - RNA, 19 nt, synthetic construct
  misc_feature 1..19: note = siRNA antisense sequence
  source 1..19: mol_type = other RNA
tgccttaacacaacctctg

SEQ ID NO: 41034 - RNA, 19 nt, synthetic construct
  misc_feature 1..19: note = siRNA sense sequence
  source 1..19: mol_type = other RNA
agaggttgtgttaaggcaa

SEQ ID NO: 41035 - RNA, 19 nt, synthetic construct
  misc_feature 1..19: note = siRNA antisense sequence
  source 1..19: mol_type = other RNA
ttgccttaacacaacctct

SEQ ID NO: 41036 - RNA, 19 nt, synthetic construct
  misc_feature 1..19: note = siRNA sense sequence
  source 1..19: mol_type = other RNA
attgcactccagcctgagg

SEQ ID NO: 41037 - RNA, 19 nt, synthetic construct
  misc_feature 1..19: note = siRNA antisense sequence
  source 1..19: mol_type = other RNA
cctcaggctggagtgcaat

SEQ ID NO: 41038 - RNA, 19 nt, synthetic construct
  misc_feature 1..19: note = siRNA sense sequence
  source 1..19: mol_type = other RNA
ttgcactccagcctgagga

SEQ ID NO: 41039 - RNA, 19 nt, synthetic construct
  misc_feature 1..19: note = siRNA antisense sequence
  source 1..19: mol_type = other RNA
tcctcaggctggagtgcaa

SEQ ID NO: 41040 - RNA, 19 nt, synthetic construct
  misc_feature 1..19: note = siRNA sense sequence
  source 1..19: mol_type = other RNA
gaagtaatctgtgtgtcag

SEQ ID NO: 41041 - RNA, 19 nt, synthetic construct
  misc_feature 1..19: note = siRNA antisense sequence
  source 1..19: mol_type = other RNA
ctgacacacagattacttc

SEQ ID NO: 41042 - RNA, 19 nt, synthetic construct
  misc_feature 1..19: note = siRNA sense sequence
  source 1..19: mol_type = other RNA
ctgagttcaagaagtaatc

SEQ ID NO: 41043 - RNA, 19 nt, synthetic construct
  misc_feature 1..19: note = siRNA antisense sequence
  source 1..19: mol_type = other RNA
gattacttcttgaactcag

SEQ ID NO: 41044 - RNA, 19 nt, synthetic construct
  misc_feature 1..19: note = siRNA sense sequence
  source 1..19: mol_type = other RNA
tgagttcaagaagtaatct

SEQ ID NO: 41045 - RNA, 19 nt, synthetic construct
  misc_feature 1..19: note = siRNA antisense sequence
  source 1..19: mol_type = other RNA
agattacttcttgaactca

SEQ ID NO: 41046 - RNA, 19 nt, synthetic construct
  misc_feature 1..19: note = siRNA sense sequence
  source 1..19: mol_type = other RNA
gagttcaagaagtaatcta

SEQ ID NO: 41047 - RNA, 19 nt, synthetic construct
  misc_feature 1..19: note = siRNA antisense sequence
  source 1..19: mol_type = other RNA
tagattacttcttgaactc

SEQ ID NO: 41048 - RNA, 19 nt, synthetic construct
  misc_feature 1..19: note = siRNA sense sequence
  source 1..19: mol_type = other RNA
tgacatagaatgccatttt

SEQ ID NO: 41049 - RNA, 19 nt, synthetic construct
  misc_feature 1..19: note = siRNA antisense sequence
  source 1..19: mol_type = other RNA
aaaatggcattctatgtca

SEQ ID NO: 41050 - RNA, 19 nt, synthetic construct
  misc_feature 1..19: note = siRNA sense sequence
  source 1..19: mol_type = other RNA
gacatagaatgccattttg

SEQ ID NO: 41051 - RNA, 19 nt, synthetic construct
  misc_feature 1..19: note = siRNA antisense sequence
  source 1..19: mol_type = other RNA
caaaatggcattctatgtc

SEQ ID NO: 41052 - RNA, 19 nt, synthetic construct
  misc_feature 1..19: note = siRNA sense sequence
  source 1..19: mol_type = other RNA
catagaatgccattttgat

SEQ ID NO: 41053 - RNA, 19 nt, synthetic construct
  misc_feature 1..19: note = siRNA antisense sequence
  source 1..19: mol_type = other RNA
atcaaaatggcattctatg

SEQ ID NO: 41054 - RNA, 19 nt, synthetic construct
  misc_feature 1..19: note = siRNA sense sequence
  source 1..19: mol_type = other RNA
aatgccattttgattccct

SEQ ID NO: 41055 - RNA, 19 nt, synthetic construct
  misc_feature 1..19: note = siRNA antisense sequence
  source 1..19: mol_type = other RNA
agggaatcaaaatggcatt

SEQ ID NO: 41056 - RNA, 19 nt, synthetic construct
  misc_feature 1..19: note = siRNA sense sequence
  source 1..19: mol_type = other RNA
atgccattttgattccctc

SEQ ID NO: 41057 - RNA, 19 nt, synthetic construct
  misc_feature 1..19: note = siRNA antisense sequence
  source 1..19: mol_type = other RNA
gagggaatcaaaatggcat

SEQ ID NO: 41058 - RNA, 19 nt, synthetic construct
  misc_feature 1..19: note = siRNA sense sequence
  source 1..19: mol_type = other RNA
attttgattccctctgtcc

SEQ ID NO: 41059 - RNA, 19 nt, synthetic construct
  misc_feature 1..19: note = siRNA antisense sequence
  source 1..19: mol_type = other RNA
ggacagagggaatcaaaat

SEQ ID NO: 41060 - RNA, 19 nt, synthetic construct
  misc_feature 1..19: note = siRNA sense sequence
  source 1..19: mol_type = other RNA
ttttgattccctctgtcct

SEQ ID NO: 41061 - RNA, 19 nt, synthetic construct
  misc_feature 1..19: note = siRNA antisense sequence
  source 1..19: mol_type = other RNA
aggacagagggaatcaaaa

SEQ ID NO: 41062 - RNA, 19 nt, synthetic construct
  misc_feature 1..19: note = siRNA sense sequence
  source 1..19: mol_type = other RNA
ttgattccctctgtcctta

SEQ ID NO: 41063 - RNA, 19 nt, synthetic construct
  misc_feature 1..19: note = siRNA antisense sequence
  source 1..19: mol_type = other RNA
taaggacagagggaatcaa

SEQ ID NO: 41064 - RNA, 19 nt, synthetic construct
  misc_feature 1..19: note = siRNA sense sequence
  source 1..19: mol_type = other RNA
aaagtcatcaaggagcata

SEQ ID NO: 41065 - RNA, 19 nt, synthetic construct
  misc_feature 1..19: note = siRNA antisense sequence
  source 1..19: mol_type = other RNA
tatgctccttgatgacttt

SEQ ID NO: 41066 - RNA, 19 nt, synthetic construct
  misc_feature 1..19: note = siRNA sense sequence
  source 1..19: mol_type = other RNA
aagtcatcaaggagcatac

SEQ ID NO: 41067 - RNA, 19 nt, synthetic construct
  misc_feature 1..19: note = siRNA antisense sequence
  source 1..19: mol_type = other RNA
gtatgctccttgatgactt

SEQ ID NO: 41068 - RNA, 19 nt, synthetic construct
  misc_feature 1..19: note = siRNA sense sequence
  source 1..19: mol_type = other RNA
catcaaggagcatacataa

SEQ ID NO: 41069 - RNA, 19 nt, synthetic construct
  misc_feature 1..19: note = siRNA antisense sequence
  source 1..19: mol_type = other RNA
ttatgtatgctccttgatg

SEQ ID NO: 41070 - RNA, 19 nt, synthetic construct
  misc_feature 1..19: note = siRNA sense sequence
  source 1..19: mol_type = other RNA
atcaaggagcatacataaa

SEQ ID NO: 41071 - RNA, 19 nt, synthetic construct
  misc_feature 1..19: note = siRNA antisense sequence
  source 1..19: mol_type = other RNA
tttatgtatgctccttgat

SEQ ID NO: 41072 - RNA, 19 nt, synthetic construct
  misc_feature 1..19: note = siRNA sense sequence
  source 1..19: mol_type = other RNA
caaggagcatacataaatt

SEQ ID NO: 41073 - RNA, 19 nt, synthetic construct
  misc_feature 1..19: note = siRNA antisense sequence
  source 1..19: mol_type = other RNA
aatttatgtatgctccttg

SEQ ID NO: 41074 - RNA, 19 nt, synthetic construct
  misc_feature 1..19: note = siRNA sense sequence
  source 1..19: mol_type = other RNA
aggagcatacataaattag

SEQ ID NO: 41075 - RNA, 19 nt, synthetic construct
  misc_feature 1..19: note = siRNA antisense sequence
  source 1..19: mol_type = other RNA
ctaatttatgtatgctcct

SEQ ID NO: 41076 - RNA, 19 nt, synthetic construct
  misc_feature 1..19: note = siRNA sense sequence
  source 1..19: mol_type = other RNA
ggagcatacataaattaga

SEQ ID NO: 41077 - RNA, 19 nt, synthetic construct
  misc_feature 1..19: note = siRNA antisense sequence
  source 1..19: mol_type = other RNA
tctaatttatgtatgctcc

SEQ ID NO: 41078 - RNA, 19 nt, synthetic construct
  misc_feature 1..19: note = siRNA sense sequence
  source 1..19: mol_type = other RNA
acttttaactctctgcatt

SEQ ID NO: 41079 - RNA, 19 nt, synthetic construct
  misc_feature 1..19: note = siRNA antisense sequence
  source 1..19: mol_type = other RNA
aatgcagagagttaaaagt

SEQ ID NO: 41080 - RNA, 19 nt, synthetic construct
  misc_feature 1..19: note = siRNA sense sequence
  source 1..19: mol_type = other RNA
attctttctaattcagtgg

SEQ ID NO: 41081 - RNA, 19 nt, synthetic construct
  misc_feature 1..19: note = siRNA antisense sequence
  source 1..19: mol_type = other RNA
ccactgaattagaaagaat

SEQ ID NO: 41082 - RNA, 19 nt, synthetic construct
  misc_feature 1..19: note = siRNA sense sequence
  source 1..19: mol_type = other RNA
ttctttctaattcagtggt

SEQ ID NO: 41083 - RNA, 19 nt, synthetic construct
  misc_feature 1..19: note = siRNA antisense sequence
  source 1..19: mol_type = other RNA
accactgaattagaaagaa

SEQ ID NO: 41084 - RNA, 19 nt, synthetic construct
  misc_feature 1..19: note = siRNA sense sequence
  source 1..19: mol_type = other RNA
tctttctaattcagtggta

SEQ ID NO: 41085 - RNA, 19 nt, synthetic construct
  misc_feature 1..19: note = siRNA antisense sequence
  source 1..19: mol_type = other RNA
taccactgaattagaaaga

SEQ ID NO: 41086 - RNA, 19 nt, synthetic construct
  misc_feature 1..19: note = siRNA sense sequence
  source 1..19: mol_type = other RNA
ctttctaattcagtggtaa

SEQ ID NO: 41087 - RNA, 19 nt, synthetic construct
  misc_feature 1..19: note = siRNA antisense sequence
  source 1..19: mol_type = other RNA
ttaccactgaattagaaag

SEQ ID NO: 41088 - RNA, 19 nt, synthetic construct
  misc_feature 1..19: note = siRNA sense sequence
  source 1..19: mol_type = other RNA
ttctaattcagtggtaatg

SEQ ID NO: 41089 - RNA, 19 nt, synthetic construct
  misc_feature 1..19: note = siRNA antisense sequence
  source 1..19: mol_type = other RNA
cattaccactgaattagaa

SEQ ID NO: 41090 - RNA, 19 nt, synthetic construct
  misc_feature 1..19: note = siRNA sense sequence
  source 1..19: mol_type = other RNA
ctgcccaccacattccctc

SEQ ID NO: 41091 - RNA, 19 nt, synthetic construct
  misc_feature 1..19: note = siRNA antisense sequence
  source 1..19: mol_type = other RNA
gagggaatgtggtgggcag

SEQ ID NO: 41092 - RNA, 19 nt, synthetic construct
  misc_feature 1..19: note = siRNA sense sequence
  source 1..19: mol_type = other RNA
tgcccaccacattccctcc

SEQ ID NO: 41093 - RNA, 19 nt, synthetic construct
  misc_feature 1..19: note = siRNA antisense sequence
  source 1..19: mol_type = other RNA
ggagggaatgtggtgggca

SEQ ID NO: 41094 - RNA, 19 nt, synthetic construct
  misc_feature 1..19: note = siRNA sense sequence
  source 1..19: mol_type = other RNA
caaaatttaacttagtgcc

SEQ ID NO: 41095 - RNA, 19 nt, synthetic construct
  misc_feature 1..19: note = siRNA antisense sequence
  source 1..19: mol_type = other RNA
ggcactaagttaaattttg

SEQ ID NO: 41096 - RNA, 19 nt, synthetic construct
  misc_feature 1..19: note = siRNA sense sequence
  source 1..19: mol_type = other RNA
tttaacttagtgcctggtt

SEQ ID NO: 41097 - RNA, 19 nt, synthetic construct
  misc_feature 1..19: note = siRNA antisense sequence
  source 1..19: mol_type = other RNA
aaccaggcactaagttaaa

SEQ ID NO: 41098 - RNA, 19 nt, synthetic construct
  misc_feature 1..19: note = siRNA sense sequence
  source 1..19: mol_type = other RNA
taacttagtgcctggtttt

SEQ ID NO: 41099 - RNA, 19 nt, synthetic construct
  misc_feature 1..19: note = siRNA antisense sequence
  source 1..19: mol_type = other RNA
aaaaccaggcactaagtta

SEQ ID NO: 41100 - RNA, 19 nt, synthetic construct
  misc_feature 1..19: note = siRNA sense sequence
  source 1..19: mol_type = other RNA
aacttagtgcctggttttc

SEQ ID NO: 41101 - RNA, 19 nt, synthetic construct
  misc_feature 1..19: note = siRNA antisense sequence
  source 1..19: mol_type = other RNA
gaaaaccaggcactaagtt

SEQ ID NO: 41102 - RNA, 19 nt, synthetic construct
  misc_feature 1..19: note = siRNA sense sequence
  source 1..19: mol_type = other RNA
acttagtgcctggttttca

SEQ ID NO: 41103 - RNA, 19 nt, synthetic construct
  misc_feature 1..19: note = siRNA antisense sequence
  source 1..19: mol_type = other RNA
tgaaaaccaggcactaagt

SEQ ID NO: 41104 - RNA, 19 nt, synthetic construct
  misc_feature 1..19: note = siRNA sense sequence
  source 1..19: mol_type = other RNA
cttagtgcctggttttcaa

SEQ ID NO: 41105 - RNA, 19 nt, synthetic construct
  misc_feature 1..19: note = siRNA antisense sequence
  source 1..19: mol_type = other RNA
ttgaaaaccaggcactaag

SEQ ID NO: 41106 - RNA, 19 nt, synthetic construct
  misc_feature 1..19: note = siRNA sense sequence
  source 1..19: mol_type = other RNA
ttagtgcctggttttcaag

SEQ ID NO: 41107 - RNA, 19 nt, synthetic construct
  misc_feature 1..19: note = siRNA antisense sequence
  source 1..19: mol_type = other RNA
cttgaaaaccaggcactaa

SEQ ID NO: 41108 - RNA, 19 nt, synthetic construct
  misc_feature 1..19: note = siRNA sense sequence
  source 1..19: mol_type = other RNA
tagtgcctggttttcaaga

SEQ ID NO: 41109 - RNA, 19 nt, synthetic construct
  misc_feature 1..19: note = siRNA antisense sequence
  source 1..19: mol_type = other RNA
tcttgaaaaccaggcacta

SEQ ID NO: 41110 - RNA, 19 nt, synthetic construct
  misc_feature 1..19: note = siRNA sense sequence
  source 1..19: mol_type = other RNA
agtgcctggttttcaagag

SEQ ID NO: 41111 - RNA, 19 nt, synthetic construct
  misc_feature 1..19: note = siRNA antisense sequence
  source 1..19: mol_type = other RNA
ctcttgaaaaccaggcact

SEQ ID NO: 41112 - RNA, 19 nt, synthetic construct
  misc_feature 1..19: note = siRNA sense sequence
  source 1..19: mol_type = other RNA
tgcctggttttcaagagga

SEQ ID NO: 41113 - RNA, 19 nt, synthetic construct
  misc_feature 1..19: note = siRNA antisense sequence
  source 1..19: mol_type = other RNA
tcctcttgaaaaccaggca

SEQ ID NO: 41114 - RNA, 19 nt, synthetic construct
  misc_feature 1..19: note = siRNA sense sequence
  source 1..19: mol_type = other RNA
atagtaggaatgtgaccgg

SEQ ID NO: 41115 - RNA, 19 nt, synthetic construct
  misc_feature 1..19: note = siRNA antisense sequence
  source 1..19: mol_type = other RNA
ccggtcacattcctactat

SEQ ID NO: 41116 - RNA, 19 nt, synthetic construct
  misc_feature 1..19: note = siRNA sense sequence
  source 1..19: mol_type = other RNA
tagtaggaatgtgaccgga

SEQ ID NO: 41117 - RNA, 19 nt, synthetic construct
  misc_feature 1..19: note = siRNA antisense sequence
  source 1..19: mol_type = other RNA
tccggtcacattcctacta

SEQ ID NO: 41118 - RNA, 19 nt, synthetic construct
  misc_feature 1..19: note = siRNA sense sequence
  source 1..19: mol_type = other RNA
agtaggaatgtgaccggaa

SEQ ID NO: 41119 - RNA, 19 nt, synthetic construct
  misc_feature 1..19: note = siRNA antisense sequence
  source 1..19: mol_type = other RNA
ttccggtcacattcctact

SEQ ID NO: 41120 - RNA, 19 nt, synthetic construct
  misc_feature 1..19: note = siRNA sense sequence
  source 1..19: mol_type = other RNA
aaccctgtcaatgttctat

SEQ ID NO: 41121 - RNA, 19 nt, synthetic construct
  misc_feature 1..19: note = siRNA antisense sequence
  source 1..19: mol_type = other RNA
atagaacattgacagggtt

SEQ ID NO: 41122 - RNA, 19 nt, synthetic construct
  misc_feature 1..19: note = siRNA sense sequence
  source 1..19: mol_type = other RNA
accctgtcaatgttctata

SEQ ID NO: 41123 - RNA, 19 nt, synthetic construct
  misc_feature 1..19: note = siRNA antisense sequence
  source 1..19: mol_type = other RNA
tatagaacattgacagggt

SEQ ID NO: 41124 - RNA, 19 nt, synthetic construct
  misc_feature 1..19: note = siRNA sense sequence
  source 1..19: mol_type = other RNA
ccctgtcaatgttctatac

SEQ ID NO: 41125 - RNA, 19 nt, synthetic construct
  misc_feature 1..19: note = siRNA antisense sequence
  source 1..19: mol_type = other RNA
gtatagaacattgacaggg

SEQ ID NO: 41126 - RNA, 19 nt, synthetic construct
  misc_feature 1..19: note = siRNA sense sequence
  source 1..19: mol_type = other RNA
tttctttacatgcataagc

SEQ ID NO: 41127 - RNA, 19 nt, synthetic construct
  misc_feature 1..19: note = siRNA antisense sequence
  source 1..19: mol_type = other RNA
gcttatgcatgtaaagaaa

SEQ ID NO: 41128 - RNA, 19 nt, synthetic construct
  misc_feature 1..19: note = siRNA sense sequence
  source 1..19: mol_type = other RNA
ttctttacatgcataagca

SEQ ID NO: 41129 - RNA, 19 nt, synthetic construct
  misc_feature 1..19: note = siRNA antisense sequence
  source 1..19: mol_type = other RNA
tgcttatgcatgtaaagaa

SEQ ID NO: 41130 - RNA, 19 nt, synthetic construct
  misc_feature 1..19: note = siRNA sense sequence
  source 1..19: mol_type = other RNA
tcactttccatttattacc

SEQ ID NO: 41131 - RNA, 19 nt, synthetic construct
  misc_feature 1..19: note = siRNA antisense sequence
  source 1..19: mol_type = other RNA
ggtaataaatggaaagtga

SEQ ID NO: 41132 - RNA, 19 nt, synthetic construct
  misc_feature 1..19: note = siRNA sense sequence
  source 1..19: mol_type = other RNA
ttattacctttccttgagg

SEQ ID NO: 41133 - RNA, 19 nt, synthetic construct
  misc_feature 1..19: note = siRNA antisense sequence
  source 1..19: mol_type = other RNA
cctcaaggaaaggtaataa

SEQ ID NO: 41134 - RNA, 19 nt, synthetic construct
  misc_feature 1..19: note = siRNA sense sequence
  source 1..19: mol_type = other RNA
cctttccttgaggttgcat

SEQ ID NO: 41135 - RNA, 19 nt, synthetic construct
  misc_feature 1..19: note = siRNA antisense sequence
  source 1..19: mol_type = other RNA
atgcaacctcaaggaaagg

SEQ ID NO: 41136 - RNA, 19 nt, synthetic construct
  misc_feature 1..19: note = siRNA sense sequence
  source 1..19: mol_type = other RNA
ctttccttgaggttgcatc

SEQ ID NO: 41137 - RNA, 19 nt, synthetic construct
  misc_feature 1..19: note = siRNA antisense sequence
  source 1..19: mol_type = other RNA
gatgcaacctcaaggaaag

SEQ ID NO: 41138 - RNA, 19 nt, synthetic construct
  misc_feature 1..19: note = siRNA sense sequence
  source 1..19: mol_type = other RNA
tttccttgaggttgcatca

SEQ ID NO: 41139 - RNA, 19 nt, synthetic construct
  misc_feature 1..19: note = siRNA antisense sequence
  source 1..19: mol_type = other RNA
tgatgcaacctcaaggaaa

SEQ ID NO: 41140 - RNA, 19 nt, synthetic construct
  misc_feature 1..19: note = siRNA sense sequence
  source 1..19: mol_type = other RNA
cttgaggttgcatcacatt

SEQ ID NO: 41141 - RNA, 19 nt, synthetic construct
  misc_feature 1..19: note = siRNA antisense sequence
  source 1..19: mol_type = other RNA
aatgtgatgcaacctcaag

SEQ ID NO: 41142 - RNA, 19 nt, synthetic construct
  misc_feature 1..19: note = siRNA sense sequence
  source 1..19: mol_type = other RNA
ttgaggttgcatcacattt

SEQ ID NO: 41143 - RNA, 19 nt, synthetic construct
  misc_feature 1..19: note = siRNA antisense sequence
  source 1..19: mol_type = other RNA
aaatgtgatgcaacctcaa

SEQ ID NO: 41144 - RNA, 19 nt, synthetic construct
  misc_feature 1..19: note = siRNA sense sequence
  source 1..19: mol_type = other RNA
tgaggttgcatcacatttt

SEQ ID NO: 41145 - RNA, 19 nt, synthetic construct
  misc_feature 1..19: note = siRNA antisense sequence
  source 1..19: mol_type = other RNA
aaaatgtgatgcaacctca

SEQ ID NO: 41146 - RNA, 19 nt, synthetic construct
  misc_feature 1..19: note = siRNA sense sequence
  source 1..19: mol_type = other RNA
gaggttgcatcacattttc

SEQ ID NO: 41147 - RNA, 19 nt, synthetic construct
  misc_feature 1..19: note = siRNA antisense sequence
  source 1..19: mol_type = other RNA
gaaaatgtgatgcaacctc

SEQ ID NO: 41148 - RNA, 19 nt, synthetic construct
  misc_feature 1..19: note = siRNA sense sequence
  source 1..19: mol_type = other RNA
aggttgcatcacattttcc

SEQ ID NO: 41149 - RNA, 19 nt, synthetic construct
  misc_feature 1..19: note = siRNA antisense sequence
  source 1..19: mol_type = other RNA
ggaaaatgtgatgcaacct

SEQ ID NO: 41150 - RNA, 19 nt, synthetic construct
  misc_feature 1..19: note = siRNA sense sequence
  source 1..19: mol_type = other RNA
gcatcacattttcctgtct

SEQ ID NO: 41151 - RNA, 19 nt, synthetic construct
  misc_feature 1..19: note = siRNA antisense sequence
  source 1..19: mol_type = other RNA
agacaggaaaatgtgatgc

SEQ ID NO: 41152 - RNA, 19 nt, synthetic construct
  misc_feature 1..19: note = siRNA sense sequence
  source 1..19: mol_type = other RNA
atcacattttcctgtcttg

SEQ ID NO: 41153 - RNA, 19 nt, synthetic construct
  misc_feature 1..19: note = siRNA antisense sequence
  source 1..19: mol_type = other RNA
caagacaggaaaatgtgat

SEQ ID NO: 41154 - RNA, 19 nt, synthetic construct
  misc_feature 1..19: note = siRNA sense sequence
  source 1..19: mol_type = other RNA
acattttcctgtcttgtct

SEQ ID NO: 41155 - RNA, 19 nt, synthetic construct
  misc_feature 1..19: note = siRNA antisense sequence
  source 1..19: mol_type = other RNA
agacaagacaggaaaatgt

SEQ ID NO: 41156 - RNA, 19 nt, synthetic construct
  misc_feature 1..19: note = siRNA sense sequence
  source 1..19: mol_type = other RNA
attttcctgtcttgtcttg

SEQ ID NO: 41157 - RNA, 19 nt, synthetic construct
  misc_feature 1..19: note = siRNA antisense sequence
  source 1..19: mol_type = other RNA
caagacaagacaggaaaat

SEQ ID NO: 41158 - RNA, 19 nt, synthetic construct
  misc_feature 1..19: note = siRNA sense sequence
  source 1..19: mol_type = other RNA
tttcctgtcttgtcttgta

SEQ ID NO: 41159 - RNA, 19 nt, synthetic construct
  misc_feature 1..19: note = siRNA antisense sequence
  source 1..19: mol_type = other RNA
tacaagacaagacaggaaa

SEQ ID NO: 41160 - RNA, 19 nt, synthetic construct
  misc_feature 1..19: note = siRNA sense sequence
  source 1..19: mol_type = other RNA
ttcctgtcttgtcttgtaa

SEQ ID NO: 41161 - RNA, 19 nt, synthetic construct
  misc_feature 1..19: note = siRNA antisense sequence
  source 1..19: mol_type = other RNA
ttacaagacaagacaggaa

SEQ ID NO: 41162 - RNA, 19 nt, synthetic construct
  misc_feature 1..19: note = siRNA sense sequence
  source 1..19: mol_type = other RNA
tcctgtcttgtcttgtaat

SEQ ID NO: 41163 - RNA, 19 nt, synthetic construct
  misc_feature 1..19: note = siRNA antisense sequence
  source 1..19: mol_type = other RNA
attacaagacaagacagga

SEQ ID NO: 41164 - RNA, 19 nt, synthetic construct
  misc_feature 1..19: note = siRNA sense sequence
  source 1..19: mol_type = other RNA
cctgtcttgtcttgtaatt

SEQ ID NO: 41165 - RNA, 19 nt, synthetic construct
  misc_feature 1..19: note = siRNA antisense sequence
  source 1..19: mol_type = other RNA
aattacaagacaagacagg

SEQ ID NO: 41166 - RNA, 19 nt, synthetic construct
  misc_feature 1..19: note = siRNA sense sequence
  source 1..19: mol_type = other RNA
ctgtcttgtcttgtaattt

SEQ ID NO: 41167 - RNA, 19 nt, synthetic construct
  misc_feature 1..19: note = siRNA antisense sequence
  source 1..19: mol_type = other RNA
aaattacaagacaagacag

SEQ ID NO: 41168 - RNA, 19 nt, synthetic construct
  misc_feature 1..19: note = siRNA sense sequence
  source 1..19: mol_type = other RNA
gtcttgtcttgtaattttg

SEQ ID NO: 41169 - RNA, 19 nt, synthetic construct
  misc_feature 1..19: note = siRNA antisense sequence
  source 1..19: mol_type = other RNA
caaaattacaagacaagac

SEQ ID NO: 41170 - RNA, 19 nt, synthetic construct
  misc_feature 1..19: note = siRNA sense sequence
  source 1..19: mol_type = other RNA
tcttgtcttgtaattttgg

SEQ ID NO: 41171 - RNA, 19 nt, synthetic construct
  misc_feature 1..19: note = siRNA antisense sequence
  source 1..19: mol_type = other RNA
ccaaaattacaagacaaga

SEQ ID NO: 41172 - RNA, 19 nt, synthetic construct
  misc_feature 1..19: note = siRNA sense sequence
  source 1..19: mol_type = other RNA
cttgtcttgtaattttgga

SEQ ID NO: 41173 - RNA, 19 nt, synthetic construct
  misc_feature 1..19: note = siRNA antisense sequence
  source 1..19: mol_type = other RNA
tccaaaattacaagacaag

SEQ ID NO: 41174 - RNA, 19 nt, synthetic construct
  misc_feature 1..19: note = siRNA sense sequence
  source 1..19: mol_type = other RNA
ttttgaattacaggtgtgg

SEQ ID NO: 41175 - RNA, 19 nt, synthetic construct
  misc_feature 1..19: note = siRNA antisense sequence
  source 1..19: mol_type = other RNA
ccacacctgtaattcaaaa

SEQ ID NO: 41176 - RNA, 19 nt, synthetic construct
  misc_feature 1..19: note = siRNA sense sequence
  source 1..19: mol_type = other RNA
tttgaattacaggtgtgga

SEQ ID NO: 41177 - RNA, 19 nt, synthetic construct
  misc_feature 1..19: note = siRNA antisense sequence
  source 1..19: mol_type = other RNA
tccacacctgtaattcaaa

SEQ ID NO: 41178 - RNA, 19 nt, synthetic construct
  misc_feature 1..19: note = siRNA sense sequence
  source 1..19: mol_type = other RNA
ttgaattacaggtgtggag

SEQ ID NO: 41179 - RNA, 19 nt, synthetic construct
  misc_feature 1..19: note = siRNA antisense sequence
  source 1..19: mol_type = other RNA
ctccacacctgtaattcaa

SEQ ID NO: 41180 - RNA, 19 nt, synthetic construct
  misc_feature 1..19: note = siRNA sense sequence
  source 1..19: mol_type = other RNA
ctagattctgttatatgcc

SEQ ID NO: 41181 - RNA, 19 nt, synthetic construct
  misc_feature 1..19: note = siRNA antisense sequence
  source 1..19: mol_type = other RNA
ggcatataacagaatctag

SEQ ID NO: 41182 - RNA, 19 nt, synthetic construct
  misc_feature 1..19: note = siRNA sense sequence
  source 1..19: mol_type = other RNA
tagattctgttatatgcct

SEQ ID NO: 41183 - RNA, 19 nt, synthetic construct
  misc_feature 1..19: note = siRNA antisense sequence
  source 1..19: mol_type = other RNA
aggcatataacagaatcta

SEQ ID NO: 41184 - RNA, 19 nt, synthetic construct
  misc_feature 1..19: note = siRNA sense sequence
  source 1..19: mol_type = other RNA
agattctgttatatgcctg

SEQ ID NO: 41185 - RNA, 19 nt, synthetic construct
  misc_feature 1..19: note = siRNA antisense sequence
  source 1..19: mol_type = other RNA
caggcatataacagaatct

SEQ ID NO: 41186 - RNA, 19 nt, synthetic construct
  misc_feature 1..19: note = siRNA sense sequence
  source 1..19: mol_type = other RNA
gattctgttatatgcctgt

SEQ ID NO: 41187 - RNA, 19 nt, synthetic construct
  misc_feature 1..19: note = siRNA antisense sequence
  source 1..19: mol_type = other RNA
acaggcatataacagaatc

SEQ ID NO: 41188 - RNA, 19 nt, synthetic construct
  misc_feature 1..19: note = siRNA sense sequence
  source 1..19: mol_type = other RNA
attctgttatatgcctgtg

SEQ ID NO: 41189 - RNA, 19 nt, synthetic construct
  misc_feature 1..19: note = siRNA antisense sequence
  source 1..19: mol_type = other RNA
cacaggcatataacagaat

SEQ ID NO: 41190 - RNA, 19 nt, synthetic construct
  misc_feature 1..19: note = siRNA sense sequence
  source 1..19: mol_type = other RNA
tgttatatgcctgtgaata

SEQ ID NO: 41191 - RNA, 19 nt, synthetic construct
  misc_feature 1..19: note = siRNA antisense sequence
  source 1..19: mol_type = other RNA
tattcacaggcatataaca

SEQ ID NO: 41192 - RNA, 19 nt, synthetic construct
  misc_feature 1..19: note = siRNA sense sequence
  source 1..19: mol_type = other RNA
atatgcctgtgaatagtct

SEQ ID NO: 41193 - RNA, 19 nt, synthetic construct
  misc_feature 1..19: note = siRNA antisense sequence
  source 1..19: mol_type = other RNA
agactattcacaggcatat

SEQ ID NO: 41194 - RNA, 19 nt, synthetic construct
  misc_feature 1..19: note = siRNA sense sequence
  source 1..19: mol_type = other RNA
tatgcctgtgaatagtctt

SEQ ID NO: 41195 - RNA, 19 nt, synthetic construct
  misc_feature 1..19: note = siRNA antisense sequence
  source 1..19: mol_type = other RNA
aagactattcacaggcata

SEQ ID NO: 41196 - RNA, 19 nt, synthetic construct
  misc_feature 1..19: note = siRNA sense sequence
  source 1..19: mol_type = other RNA
cctgtgaatagtcttaact

SEQ ID NO: 41197 - RNA, 19 nt, synthetic construct
  misc_feature 1..19: note = siRNA antisense sequence
  source 1..19: mol_type = other RNA
agttaagactattcacagg

SEQ ID NO: 41198 - RNA, 19 nt, synthetic construct
  misc_feature 1..19: note = siRNA sense sequence
  source 1..19: mol_type = other RNA
ctgtgaatagtcttaactt

SEQ ID NO: 41199 - RNA, 19 nt, synthetic construct
  misc_feature 1..19: note = siRNA antisense sequence
  source 1..19: mol_type = other RNA
aagttaagactattcacag

SEQ ID NO: 41200 - RNA, 19 nt, synthetic construct
  misc_feature 1..19: note = siRNA sense sequence
  source 1..19: mol_type = other RNA
aaatttacttggctcaact

SEQ ID NO: 41201 - RNA, 19 nt, synthetic construct
  misc_feature 1..19: note = siRNA antisense sequence
  source 1..19: mol_type = other RNA
agttgagccaagtaaattt

SEQ ID NO: 41202 - RNA, 19 nt, synthetic construct
  misc_feature 1..19: note = siRNA sense sequence
  source 1..19: mol_type = other RNA
ttacttggctcaactcaat

SEQ ID NO: 41203 - RNA, 19 nt, synthetic construct
  misc_feature 1..19: note = siRNA antisense sequence
  source 1..19: mol_type = other RNA
attgagttgagccaagtaa

SEQ ID NO: 41204 - RNA, 19 nt, synthetic construct
  misc_feature 1..19: note = siRNA sense sequence
  source 1..19: mol_type = other RNA
tacttggctcaactcaatt

SEQ ID NO: 41205 - RNA, 19 nt, synthetic construct
  misc_feature 1..19: note = siRNA antisense sequence
  source 1..19: mol_type = other RNA
aattgagttgagccaagta

SEQ ID NO: 41206 - RNA, 19 nt, synthetic construct
  misc_feature 1..19: note = siRNA sense sequence
  source 1..19: mol_type = other RNA
acttggctcaactcaattt

SEQ ID NO: 41207 - RNA, 19 nt, synthetic construct
  misc_feature 1..19: note = siRNA antisense sequence
  source 1..19: mol_type = other RNA
aaattgagttgagccaagt

SEQ ID NO: 41208 - RNA, 19 nt, synthetic construct
  misc_feature 1..19: note = siRNA sense sequence
  source 1..19: mol_type = other RNA
cttggctcaactcaatttc

SEQ ID NO: 41209 - RNA, 19 nt, synthetic construct
  misc_feature 1..19: note = siRNA antisense sequence
  source 1..19: mol_type = other RNA
gaaattgagttgagccaag

SEQ ID NO: 41210 - RNA, 19 nt, synthetic construct
  misc_feature 1..19: note = siRNA sense sequence
  source 1..19: mol_type = other RNA
ttggctcaactcaatttcc

SEQ ID NO: 41211 - RNA, 19 nt, synthetic construct
  misc_feature 1..19: note = siRNA antisense sequence
  source 1..19: mol_type = other RNA
ggaaattgagttgagccaa

SEQ ID NO: 41212 - RNA, 19 nt, synthetic construct
  misc_feature 1..19: note = siRNA sense sequence
  source 1..19: mol_type = other RNA
tggctcaactcaatttcca

SEQ ID NO: 41213 - RNA, 19 nt, synthetic construct
  misc_feature 1..19: note = siRNA antisense sequence
  source 1..19: mol_type = other RNA
tggaaattgagttgagcca

SEQ ID NO: 41214 - RNA, 19 nt, synthetic construct
  misc_feature 1..19: note = siRNA sense sequence
  source 1..19: mol_type = other RNA
ggctcaactcaatttccaa

SEQ ID NO: 41215 - RNA, 19 nt, synthetic construct
  misc_feature 1..19: note = siRNA antisense sequence
  source 1..19: mol_type = other RNA
ttggaaattgagttgagcc

SEQ ID NO: 41216 - RNA, 19 nt, synthetic construct
  misc_feature 1..19: note = siRNA sense sequence
  source 1..19: mol_type = other RNA
gctcaactcaatttccaag

SEQ ID NO: 41217 - RNA, 19 nt, synthetic construct
  misc_feature 1..19: note = siRNA antisense sequence
  source 1..19: mol_type = other RNA
cttggaaattgagttgagc

SEQ ID NO: 41218 - RNA, 19 nt, synthetic construct
  misc_feature 1..19: note = siRNA sense sequence
  source 1..19: mol_type = other RNA
ctcaactcaatttccaagc

SEQ ID NO: 41219 - RNA, 19 nt, synthetic construct
  misc_feature 1..19: note = siRNA antisense sequence
  source 1..19: mol_type = other RNA
gcttggaaattgagttgag

SEQ ID NO: 41220 - RNA, 19 nt, synthetic construct
  misc_feature 1..19: note = siRNA sense sequence
  source 1..19: mol_type = other RNA
tcaactcaatttccaagca

SEQ ID NO: 41221 - RNA, 19 nt, synthetic construct
  misc_feature 1..19: note = siRNA antisense sequence
  source 1..19: mol_type = other RNA
tgcttggaaattgagttga

SEQ ID NO: 41222 - RNA, 19 nt, synthetic construct
  misc_feature 1..19: note = siRNA sense sequence
  source 1..19: mol_type = other RNA
caactcaatttccaagcat

SEQ ID NO: 41223 - RNA, 19 nt, synthetic construct
  misc_feature 1..19: note = siRNA antisense sequence
  source 1..19: mol_type = other RNA
atgcttggaaattgagttg

SEQ ID NO: 41224 - RNA, 19 nt, synthetic construct
  misc_feature 1..19: note = siRNA sense sequence
  source 1..19: mol_type = other RNA
aactcaatttccaagcatt

SEQ ID NO: 41225 - RNA, 19 nt, synthetic construct
  misc_feature 1..19: note = siRNA antisense sequence
  source 1..19: mol_type = other RNA
aatgcttggaaattgagtt

SEQ ID NO: 41226 - RNA, 19 nt, synthetic construct
  misc_feature 1..19: note = siRNA sense sequence
  source 1..19: mol_type = other RNA
atttccaagcattgacttt

SEQ ID NO: 41227 - RNA, 19 nt, synthetic construct
  misc_feature 1..19: note = siRNA antisense sequence
  source 1..19: mol_type = other RNA
aaagtcaatgcttggaaat

SEQ ID NO: 41228 - RNA, 19 nt, synthetic construct
  misc_feature 1..19: note = siRNA sense sequence
  source 1..19: mol_type = other RNA
tttccaagcattgactttc

SEQ ID NO: 41229 - RNA, 19 nt, synthetic construct
  misc_feature 1..19: note = siRNA antisense sequence
  source 1..19: mol_type = other RNA
gaaagtcaatgcttggaaa

SEQ ID NO: 41230 - RNA, 19 nt, synthetic construct
  misc_feature 1..19: note = siRNA sense sequence
  source 1..19: mol_type = other RNA
ttccaagcattgactttct

SEQ ID NO: 41231 - RNA, 19 nt, synthetic construct
  misc_feature 1..19: note = siRNA antisense sequence
  source 1..19: mol_type = other RNA
agaaagtcaatgcttggaa

SEQ ID NO: 41232 - RNA, 19 nt, synthetic construct
  misc_feature 1..19: note = siRNA sense sequence
  source 1..19: mol_type = other RNA
tccaagcattgactttctt

SEQ ID NO: 41233 - RNA, 19 nt, synthetic construct
  misc_feature 1..19: note = siRNA antisense sequence
  source 1..19: mol_type = other RNA
aagaaagtcaatgcttgga

SEQ ID NO: 41234 - RNA, 19 nt, synthetic construct
  misc_feature 1..19: note = siRNA sense sequence
  source 1..19: mol_type = other RNA
aagcattgactttcttgca

SEQ ID NO: 41235 - RNA, 19 nt, synthetic construct
  misc_feature 1..19: note = siRNA antisense sequence
  source 1..19: mol_type = other RNA
tgcaagaaagtcaatgctt

SEQ ID NO: 41236 - RNA, 19 nt, synthetic construct
  misc_feature 1..19: note = siRNA sense sequence
  source 1..19: mol_type = other RNA
agcattgactttcttgcaa

SEQ ID NO: 41237 - RNA, 19 nt, synthetic construct
  misc_feature 1..19: note = siRNA antisense sequence
  source 1..19: mol_type = other RNA
ttgcaagaaagtcaatgct

SEQ ID NO: 41238 - RNA, 19 nt, synthetic construct
  misc_feature 1..19: note = siRNA sense sequence
  source 1..19: mol_type = other RNA
ttgactttcttgcaatgac

SEQ ID NO: 41239 - RNA, 19 nt, synthetic construct
  misc_feature 1..19: note = siRNA antisense sequence
  source 1..19: mol_type = other RNA
gtcattgcaagaaagtcaa

SEQ ID NO: 41240 - RNA, 19 nt, synthetic construct
  misc_feature 1..19: note = siRNA sense sequence
  source 1..19: mol_type = other RNA
tgactttcttgcaatgaca

SEQ ID NO: 41241 - RNA, 19 nt, synthetic construct
  misc_feature 1..19: note = siRNA antisense sequence
  source 1..19: mol_type = other RNA
tgtcattgcaagaaagtca

SEQ ID NO: 41242 - RNA, 19 nt, synthetic construct
  misc_feature 1..19: note = siRNA sense sequence
  source 1..19: mol_type = other RNA
ttcaggttttatttcagct

SEQ ID NO: 41243 - RNA, 19 nt, synthetic construct
  misc_feature 1..19: note = siRNA antisense sequence
  source 1..19: mol_type = other RNA
agctgaaataaaacctgaa

SEQ ID NO: 41244 - RNA, 19 nt, synthetic construct
  misc_feature 1..19: note = siRNA sense sequence
  source 1..19: mol_type = other RNA
tcaggttttatttcagctg

SEQ ID NO: 41245 - RNA, 19 nt, synthetic construct
  misc_feature 1..19: note = siRNA antisense sequence
  source 1..19: mol_type = other RNA
cagctgaaataaaacctga

SEQ ID NO: 41246 - RNA, 19 nt, synthetic construct
  misc_feature 1..19: note = siRNA sense sequence
  source 1..19: mol_type = other RNA
caggttttatttcagctgg

SEQ ID NO: 41247 - RNA, 19 nt, synthetic construct
  misc_feature 1..19: note = siRNA antisense sequence
  source 1..19: mol_type = other RNA
ccagctgaaataaaacctg

SEQ ID NO: 41248 - RNA, 19 nt, synthetic construct
  misc_feature 1..19: note = siRNA sense sequence
  source 1..19: mol_type = other RNA
aggttttatttcagctggg

SEQ ID NO: 41249 - RNA, 19 nt, synthetic construct
  misc_feature 1..19: note = siRNA antisense sequence
  source 1..19: mol_type = other RNA
cccagctgaaataaaacct

SEQ ID NO: 41250 - RNA, 19 nt, synthetic construct
  misc_feature 1..19: note = siRNA sense sequence
  source 1..19: mol_type = other RNA
ggttttatttcagctgggc

SEQ ID NO: 41251 - RNA, 19 nt, synthetic construct
  misc_feature 1..19: note = siRNA antisense sequence
  source 1..19: mol_type = other RNA
gcccagctgaaataaaacc

SEQ ID NO: 41252 - RNA, 19 nt, synthetic construct
  misc_feature 1..19: note = siRNA sense sequence
  source 1..19: mol_type = other RNA
ttttatttcagctgggcta

SEQ ID NO: 41253 - RNA, 19 nt, synthetic construct
  misc_feature 1..19: note = siRNA antisense sequence
  source 1..19: mol_type = other RNA
tagcccagctgaaataaaa

SEQ ID NO: 41254 - RNA, 19 nt, synthetic construct
  misc_feature 1..19: note = siRNA sense sequence
  source 1..19: mol_type = other RNA
tatttcagctgggctattt

SEQ ID NO: 41255 - RNA, 19 nt, synthetic construct
  misc_feature 1..19: note = siRNA antisense sequence
  source 1..19: mol_type = other RNA
aaatagcccagctgaaata

SEQ ID NO: 41256 - RNA, 19 nt, synthetic construct
  misc_feature 1..19: note = siRNA sense sequence
  source 1..19: mol_type = other RNA
atttcagctgggctatttg

SEQ ID NO: 41257 - RNA, 19 nt, synthetic construct
  misc_feature 1..19: note = siRNA antisense sequence
  source 1..19: mol_type = other RNA
caaatagcccagctgaaat

SEQ ID NO: 41258 - RNA, 19 nt, synthetic construct
  misc_feature 1..19: note = siRNA sense sequence
  source 1..19: mol_type = other RNA
tttcagctgggctatttga

SEQ ID NO: 41259 - RNA, 19 nt, synthetic construct
  misc_feature 1..19: note = siRNA antisense sequence
  source 1..19: mol_type = other RNA
tcaaatagcccagctgaaa

SEQ ID NO: 41260 - RNA, 19 nt, synthetic construct
  misc_feature 1..19: note = siRNA sense sequence
  source 1..19: mol_type = other RNA
aatatactctgcgcattta

SEQ ID NO: 41261 - RNA, 19 nt, synthetic construct
  misc_feature 1..19: note = siRNA antisense sequence
  source 1..19: mol_type = other RNA
taaatgcgcagagtatatt

SEQ ID NO: 41262 - RNA, 19 nt, synthetic construct
  misc_feature 1..19: note = siRNA sense sequence
  source 1..19: mol_type = other RNA
caagtcatctagttatttg

SEQ ID NO: 41263 - RNA, 19 nt, synthetic construct
  misc_feature 1..19: note = siRNA antisense sequence
  source 1..19: mol_type = other RNA
caaataactagatgacttg

SEQ ID NO: 41264 - RNA, 19 nt, synthetic construct
  misc_feature 1..19: note = siRNA sense sequence
  source 1..19: mol_type = other RNA
aagtcatctagttatttgg

SEQ ID NO: 41265 - RNA, 19 nt, synthetic construct
  misc_feature 1..19: note = siRNA antisense sequence
  source 1..19: mol_type = other RNA
ccaaataactagatgactt

SEQ ID NO: 41266 - RNA, 19 nt, synthetic construct
  misc_feature 1..19: note = siRNA sense sequence
  source 1..19: mol_type = other RNA
agtcatctagttatttgga

SEQ ID NO: 41267 - RNA, 19 nt, synthetic construct
  misc_feature 1..19: note = siRNA antisense sequence
  source 1..19: mol_type = other RNA
tccaaataactagatgact

SEQ ID NO: 41268 - RNA, 19 nt, synthetic construct
  misc_feature 1..19: note = siRNA sense sequence
  source 1..19: mol_type = other RNA
aactgttgttttgtggctc

SEQ ID NO: 41269 - RNA, 19 nt, synthetic construct
  misc_feature 1..19: note = siRNA antisense sequence
  source 1..19: mol_type = other RNA
gagccacaaaacaacagtt

SEQ ID NO: 41270 - RNA, 19 nt, synthetic construct
  misc_feature 1..19: note = siRNA sense sequence
  source 1..19: mol_type = other RNA
actgttgttttgtggctct

SEQ ID NO: 41271 - RNA, 19 nt, synthetic construct
  misc_feature 1..19: note = siRNA antisense sequence
  source 1..19: mol_type = other RNA
agagccacaaaacaacagt

SEQ ID NO: 41272 - RNA, 19 nt, synthetic construct
  misc_feature 1..19: note = siRNA sense sequence
  source 1..19: mol_type = other RNA
ctgttgttttgtggctctt

SEQ ID NO: 41273 - RNA, 19 nt, synthetic construct
  misc_feature 1..19: note = siRNA antisense sequence
  source 1..19: mol_type = other RNA
aagagccacaaaacaacag

SEQ ID NO: 41274 - RNA, 19 nt, synthetic construct
  misc_feature 1..19: note = siRNA sense sequence
  source 1..19: mol_type = other RNA
tgttgttttgtggctcttt

SEQ ID NO: 41275 - RNA, 19 nt, synthetic construct
  misc_feature 1..19: note = siRNA antisense sequence
  source 1..19: mol_type = other RNA
aaagagccacaaaacaaca

SEQ ID NO: 41276 - RNA, 19 nt, synthetic construct
  misc_feature 1..19: note = siRNA sense sequence
  source 1..19: mol_type = other RNA
gttgttttgtggctctttt

SEQ ID NO: 41277 - RNA, 19 nt, synthetic construct
  misc_feature 1..19: note = siRNA antisense sequence
  source 1..19: mol_type = other RNA
aaaagagccacaaaacaac

SEQ ID NO: 41278 - RNA, 19 nt, synthetic construct
  misc_feature 1..19: note = siRNA sense sequence
  source 1..19: mol_type = other RNA
tctaagatatactactctc

SEQ ID NO: 41279 - RNA, 19 nt, synthetic construct
  misc_feature 1..19: note = siRNA antisense sequence
  source 1..19: mol_type = other RNA
gagagtagtatatcttaga

SEQ ID NO: 41280 - RNA, 19 nt, synthetic construct
  misc_feature 1..19: note = siRNA sense sequence
  source 1..19: mol_type = other RNA
actactctcctcctcattt

SEQ ID NO: 41281 - RNA, 19 nt, synthetic construct
  misc_feature 1..19: note = siRNA antisense sequence
  source 1..19: mol_type = other RNA
aaatgaggaggagagtagt

SEQ ID NO: 41282 - RNA, 19 nt, synthetic construct
  misc_feature 1..19: note = siRNA sense sequence
  source 1..19: mol_type = other RNA
ctactctcctcctcatttt

SEQ ID NO: 41283 - RNA, 19 nt, synthetic construct
  misc_feature 1..19: note = siRNA antisense sequence
  source 1..19: mol_type = other RNA
aaaatgaggaggagagtag

SEQ ID NO: 41284 - RNA, 19 nt, synthetic construct
  misc_feature 1..19: note = siRNA sense sequence
  source 1..19: mol_type = other RNA
tactctcctcctcattttg

SEQ ID NO: 41285 - RNA, 19 nt, synthetic construct
  misc_feature 1..19: note = siRNA antisense sequence
  source 1..19: mol_type = other RNA
caaaatgaggaggagagta

SEQ ID NO: 41286 - RNA, 19 nt, synthetic construct
  misc_feature 1..19: note = siRNA sense sequence
  source 1..19: mol_type = other RNA
actctcctcctcattttgc

SEQ ID NO: 41287 - RNA, 19 nt, synthetic construct
  misc_feature 1..19: note = siRNA antisense sequence
  source 1..19: mol_type = other RNA
gcaaaatgaggaggagagt

SEQ ID NO: 41288 - RNA, 19 nt, synthetic construct
  misc_feature 1..19: note = siRNA sense sequence
  source 1..19: mol_type = other RNA
ctctcctcctcattttgca

SEQ ID NO: 41289 - RNA, 19 nt, synthetic construct
  misc_feature 1..19: note = siRNA antisense sequence
  source 1..19: mol_type = other RNA
tgcaaaatgaggaggagag

SEQ ID NO: 41290 - RNA, 19 nt, synthetic construct
  misc_feature 1..19: note = siRNA sense sequence
  source 1..19: mol_type = other RNA
cattttgcagctgctgtca

SEQ ID NO: 41291 - RNA, 19 nt, synthetic construct
  misc_feature 1..19: note = siRNA antisense sequence
  source 1..19: mol_type = other RNA
tgacagcagctgcaaaatg

SEQ ID NO: 41292 - RNA, 19 nt, synthetic construct
  misc_feature 1..19: note = siRNA sense sequence
  source 1..19: mol_type = other RNA
ttgcagctgctgtcattgc

SEQ ID NO: 41293 - RNA, 19 nt, synthetic construct
  misc_feature 1..19: note = siRNA antisense sequence
  source 1..19: mol_type = other RNA
gcaatgacagcagctgcaa

SEQ ID NO: 41294 - RNA, 19 nt, synthetic construct
  misc_feature 1..19: note = siRNA sense sequence
  source 1..19: mol_type = other RNA
gcagctgctgtcattgccc

SEQ ID NO: 41295 - RNA, 19 nt, synthetic construct
  misc_feature 1..19: note = siRNA antisense sequence
  source 1..19: mol_type = other RNA
gggcaatgacagcagctgc

SEQ ID NO: 41296 - RNA, 19 nt, synthetic construct
  misc_feature 1..19: note = siRNA sense sequence
  source 1..19: mol_type = other RNA
gctgctgtcattgccctca

SEQ ID NO: 41297 - RNA, 19 nt, synthetic construct
  misc_feature 1..19: note = siRNA antisense sequence
  source 1..19: mol_type = other RNA
tgagggcaatgacagcagc

SEQ ID NO: 41298 - RNA, 19 nt, synthetic construct
  misc_feature 1..19: note = siRNA sense sequence
  source 1..19: mol_type = other RNA
ctgctgtcattgccctcaa

SEQ ID NO: 41299 - RNA, 19 nt, synthetic construct
  misc_feature 1..19: note = siRNA antisense sequence
  source 1..19: mol_type = other RNA
ttgagggcaatgacagcag

SEQ ID NO: 41300 - RNA, 19 nt, synthetic construct
  misc_feature 1..19: note = siRNA sense sequence
  source 1..19: mol_type = other RNA
ttgccctcaatctctgttc

SEQ ID NO: 41301 - RNA, 19 nt, synthetic construct
  misc_feature 1..19: note = siRNA antisense sequence
  source 1..19: mol_type = other RNA
gaacagagattgagggcaa

SEQ ID NO: 41302 - RNA, 19 nt, synthetic construct
  misc_feature 1..19: note = siRNA sense sequence
  source 1..19: mol_type = other RNA
tgccctcaatctctgttct

SEQ ID NO: 41303 - RNA, 19 nt, synthetic construct
  misc_feature 1..19: note = siRNA antisense sequence
  source 1..19: mol_type = other RNA
agaacagagattgagggca

SEQ ID NO: 41304 - RNA, 19 nt, synthetic construct
  misc_feature 1..19: note = siRNA sense sequence
  source 1..19: mol_type = other RNA
ctcaatctctgttctcttt

SEQ ID NO: 41305 - RNA, 19 nt, synthetic construct
  misc_feature 1..19: note = siRNA antisense sequence
  source 1..19: mol_type = other RNA
aaagagaacagagattgag

SEQ ID NO: 41306 - RNA, 19 nt, synthetic construct
  misc_feature 1..19: note = siRNA sense sequence
  source 1..19: mol_type = other RNA
tcaatctctgttctctttt

SEQ ID NO: 41307 - RNA, 19 nt, synthetic construct
  misc_feature 1..19: note = siRNA antisense sequence
  source 1..19: mol_type = other RNA
aaaagagaacagagattga

SEQ ID NO: 41308 - RNA, 19 nt, synthetic construct
  misc_feature 1..19: note = siRNA sense sequence
  source 1..19: mol_type = other RNA
ttcagtacagtaagactag

SEQ ID NO: 41309 - RNA, 19 nt, synthetic construct
  misc_feature 1..19: note = siRNA antisense sequence
  source 1..19: mol_type = other RNA
ctagtcttactgtactgaa

SEQ ID NO: 41310 - RNA, 19 nt, synthetic construct
  misc_feature 1..19: note = siRNA sense sequence
  source 1..19: mol_type = other RNA
tcagtacagtaagactagg

SEQ ID NO: 41311 - RNA, 19 nt, synthetic construct
  misc_feature 1..19: note = siRNA antisense sequence
  source 1..19: mol_type = other RNA
cctagtcttactgtactga

SEQ ID NO: 41312 - RNA, 19 nt, synthetic construct
  misc_feature 1..19: note = siRNA sense sequence
  source 1..19: mol_type = other RNA
cagtacagtaagactagga

SEQ ID NO: 41313 - RNA, 19 nt, synthetic construct
  misc_feature 1..19: note = siRNA antisense sequence
  source 1..19: mol_type = other RNA
tcctagtcttactgtactg

SEQ ID NO: 41314 - RNA, 19 nt, synthetic construct
  misc_feature 1..19: note = siRNA sense sequence
  source 1..19: mol_type = other RNA
agtacagtaagactaggag

SEQ ID NO: 41315 - RNA, 19 nt, synthetic construct
  misc_feature 1..19: note = siRNA antisense sequence
  source 1..19: mol_type = other RNA
ctcctagtcttactgtact

SEQ ID NO: 41316 - RNA, 19 nt, synthetic construct
  misc_feature 1..19: note = siRNA sense sequence
  source 1..19: mol_type = other RNA
gtacagtaagactaggagt

SEQ ID NO: 41317 - RNA, 19 nt, synthetic construct
  misc_feature 1..19: note = siRNA antisense sequence
  source 1..19: mol_type = other RNA
actcctagtcttactgtac

SEQ ID NO: 41318 - RNA, 19 nt, synthetic construct
  misc_feature 1..19: note = siRNA sense sequence
  source 1..19: mol_type = other RNA
tacagtaagactaggagtt

SEQ ID NO: 41319 - RNA, 19 nt, synthetic construct
  misc_feature 1..19: note = siRNA antisense sequence
  source 1..19: mol_type = other RNA
aactcctagtcttactgta

SEQ ID NO: 41320 - RNA, 19 nt, synthetic construct
  misc_feature 1..19: note = siRNA sense sequence
  source 1..19: mol_type = other RNA
acagtaagactaggagttc

SEQ ID NO: 41321 - RNA, 19 nt, synthetic construct
  misc_feature 1..19: note = siRNA antisense sequence
  source 1..19: mol_type = other RNA
gaactcctagtcttactgt

SEQ ID NO: 41322 - RNA, 19 nt, synthetic construct
  misc_feature 1..19: note = siRNA sense sequence
  source 1..19: mol_type = other RNA
cagtaagactaggagttct

SEQ ID NO: 41323 - RNA, 19 nt, synthetic construct
  misc_feature 1..19: note = siRNA antisense sequence
  source 1..19: mol_type = other RNA
agaactcctagtcttactg

SEQ ID NO: 41324 - RNA, 19 nt, synthetic construct
  misc_feature 1..19: note = siRNA sense sequence
  source 1..19: mol_type = other RNA
agtaagactaggagttcta

SEQ ID NO: 41325 - RNA, 19 nt, synthetic construct
  misc_feature 1..19: note = siRNA antisense sequence
  source 1..19: mol_type = other RNA
tagaactcctagtcttact

SEQ ID NO: 41326 - RNA, 19 nt, synthetic construct
  misc_feature 1..19: note = siRNA sense sequence
  source 1..19: mol_type = other RNA
gtaagactaggagttctat

SEQ ID NO: 41327 - RNA, 19 nt, synthetic construct
  misc_feature 1..19: note = siRNA antisense sequence
  source 1..19: mol_type = other RNA
atagaactcctagtcttac

SEQ ID NO: 41328 - RNA, 19 nt, synthetic construct
  misc_feature 1..19: note = siRNA sense sequence
  source 1..19: mol_type = other RNA
taagactaggagttctatt

SEQ ID NO: 41329 - RNA, 19 nt, synthetic construct
  misc_feature 1..19: note = siRNA antisense sequence
  source 1..19: mol_type = other RNA
aatagaactcctagtctta

SEQ ID NO: 41330 - RNA, 19 nt, synthetic construct
  misc_feature 1..19: note = siRNA sense sequence
  source 1..19: mol_type = other RNA
aagactaggagttctattt

SEQ ID NO: 41331 - RNA, 19 nt, synthetic construct
  misc_feature 1..19: note = siRNA antisense sequence
  source 1..19: mol_type = other RNA
aaatagaactcctagtctt

SEQ ID NO: 41332 - RNA, 19 nt, synthetic construct
  misc_feature 1..19: note = siRNA sense sequence
  source 1..19: mol_type = other RNA
agactaggagttctatttg

SEQ ID NO: 41333 - RNA, 19 nt, synthetic construct
  misc_feature 1..19: note = siRNA antisense sequence
  source 1..19: mol_type = other RNA
caaatagaactcctagtct

SEQ ID NO: 41334 - RNA, 19 nt, synthetic construct
  misc_feature 1..19: note = siRNA sense sequence
  source 1..19: mol_type = other RNA
gactaggagttctatttga

SEQ ID NO: 41335 - RNA, 19 nt, synthetic construct
  misc_feature 1..19: note = siRNA antisense sequence
  source 1..19: mol_type = other RNA
tcaaatagaactcctagtc

SEQ ID NO: 41336 - RNA, 19 nt, synthetic construct
  misc_feature 1..19: note = siRNA sense sequence
  source 1..19: mol_type = other RNA
aggagttctatttgagttt

SEQ ID NO: 41337 - RNA, 19 nt, synthetic construct
  misc_feature 1..19: note = siRNA antisense sequence
  source 1..19: mol_type = other RNA
aaactcaaatagaactcct

SEQ ID NO: 41338 - RNA, 19 nt, synthetic construct
  misc_feature 1..19: note = siRNA sense sequence
  source 1..19: mol_type = other RNA
ggagttctatttgagtttt

SEQ ID NO: 41339 - RNA, 19 nt, synthetic construct
  misc_feature 1..19: note = siRNA antisense sequence
  source 1..19: mol_type = other RNA
aaaactcaaatagaactcc

SEQ ID NO: 41340 - RNA, 19 nt, synthetic construct
  misc_feature 1..19: note = siRNA sense sequence
  source 1..19: mol_type = other RNA
gttctatttgagttttagc

SEQ ID NO: 41341 - RNA, 19 nt, synthetic construct
  misc_feature 1..19: note = siRNA antisense sequence
  source 1..19: mol_type = other RNA
gctaaaactcaaatagaac

SEQ ID NO: 41342 - RNA, 19 nt, synthetic construct
  misc_feature 1..19: note = siRNA sense sequence
  source 1..19: mol_type = other RNA
tctatttgagttttagcca

SEQ ID NO: 41343 - RNA, 19 nt, synthetic construct
  misc_feature 1..19: note = siRNA antisense sequence
  source 1..19: mol_type = other RNA
tggctaaaactcaaataga

SEQ ID NO: 41344 - RNA, 19 nt, synthetic construct
  misc_feature 1..19: note = siRNA sense sequence
  source 1..19: mol_type = other RNA
ctatttgagttttagccac

SEQ ID NO: 41345 - RNA, 19 nt, synthetic construct
  misc_feature 1..19: note = siRNA antisense sequence
  source 1..19: mol_type = other RNA
gtggctaaaactcaaatag

SEQ ID NO: 41346 - RNA, 19 nt, synthetic construct
  misc_feature 1..19: note = siRNA sense sequence
  source 1..19: mol_type = other RNA
tatttgagttttagccact

SEQ ID NO: 41347 - RNA, 19 nt, synthetic construct
  misc_feature 1..19: note = siRNA antisense sequence
  source 1..19: mol_type = other RNA
agtggctaaaactcaaata

SEQ ID NO: 41348 - RNA, 19 nt, synthetic construct
  misc_feature 1..19: note = siRNA sense sequence
  source 1..19: mol_type = other RNA
tttagccactgaccagggc

SEQ ID NO: 41349 - RNA, 19 nt, synthetic construct
  misc_feature 1..19: note = siRNA antisense sequence
  source 1..19: mol_type = other RNA
gccctggtcagtggctaaa

SEQ ID NO: 41350 - RNA, 19 nt, synthetic construct
  misc_feature 1..19: note = siRNA sense sequence
  source 1..19: mol_type = other RNA
tcatttagtgccagtatct

SEQ ID NO: 41351 - RNA, 19 nt, synthetic construct
  misc_feature 1..19: note = siRNA antisense sequence
  source 1..19: mol_type = other RNA
agatactggcactaaatga

SEQ ID NO: 41352 - RNA, 19 nt, synthetic construct
  misc_feature 1..19: note = siRNA sense sequence
  source 1..19: mol_type = other RNA
catttagtgccagtatctt

SEQ ID NO: 41353 - RNA, 19 nt, synthetic construct
  misc_feature 1..19: note = siRNA antisense sequence
  source 1..19: mol_type = other RNA
aagatactggcactaaatg

SEQ ID NO: 41354 - RNA, 19 nt, synthetic construct
  misc_feature 1..19: note = siRNA sense sequence
  source 1..19: mol_type = other RNA
atttagtgccagtatcttc

SEQ ID NO: 41355 - RNA, 19 nt, synthetic construct
  misc_feature 1..19: note = siRNA antisense sequence
  source 1..19: mol_type = other RNA
gaagatactggcactaaat

SEQ ID NO: 41356 - RNA, 19 nt, synthetic construct
  misc_feature 1..19: note = siRNA sense sequence
  source 1..19: mol_type = other RNA
tttagtgccagtatcttct

SEQ ID NO: 41357 - RNA, 19 nt, synthetic construct
  misc_feature 1..19: note = siRNA antisense sequence
  source 1..19: mol_type = other RNA
agaagatactggcactaaa

SEQ ID NO: 41358 - RNA, 19 nt, synthetic construct
  misc_feature 1..19: note = siRNA sense sequence
  source 1..19: mol_type = other RNA
ttagtgccagtatcttctt

SEQ ID NO: 41359 - RNA, 19 nt, synthetic construct
  misc_feature 1..19: note = siRNA antisense sequence
  source 1..19: mol_type = other RNA
aagaagatactggcactaa

SEQ ID NO: 41360 - RNA, 19 nt, synthetic construct
  misc_feature 1..19: note = siRNA sense sequence
  source 1..19: mol_type = other RNA
tagtgccagtatcttcttc

SEQ ID NO: 41361 - RNA, 19 nt, synthetic construct
  misc_feature 1..19: note = siRNA antisense sequence
  source 1..19: mol_type = other RNA
gaagaagatactggcacta

SEQ ID NO: 41362 - RNA, 19 nt, synthetic construct
  misc_feature 1..19: note = siRNA sense sequence
  source 1..19: mol_type = other RNA
gccagtatcttcttccaag

SEQ ID NO: 41363 - RNA, 19 nt, synthetic construct
  misc_feature 1..19: note = siRNA antisense sequence
  source 1..19: mol_type = other RNA
cttggaagaagatactggc

SEQ ID NO: 41364 - RNA, 19 nt, synthetic construct
  misc_feature 1..19: note = siRNA sense sequence
  source 1..19: mol_type = other RNA
ccagtatcttcttccaagt

SEQ ID NO: 41365 - RNA, 19 nt, synthetic construct
  misc_feature 1..19: note = siRNA antisense sequence
  source 1..19: mol_type = other RNA
acttggaagaagatactgg

SEQ ID NO: 41366 - RNA, 19 nt, synthetic construct
  misc_feature 1..19: note = siRNA sense sequence
  source 1..19: mol_type = other RNA
cagtatcttcttccaagta

SEQ ID NO: 41367 - RNA, 19 nt, synthetic construct
  misc_feature 1..19: note = siRNA antisense sequence
  source 1..19: mol_type = other RNA
tacttggaagaagatactg

SEQ ID NO: 41368 - RNA, 19 nt, synthetic construct
  misc_feature 1..19: note = siRNA sense sequence
  source 1..19: mol_type = other RNA
agtatcttcttccaagtat

SEQ ID NO: 41369 - RNA, 19 nt, synthetic construct
  misc_feature 1..19: note = siRNA antisense sequence
  source 1..19: mol_type = other RNA
atacttggaagaagatact

SEQ ID NO: 41370 - RNA, 19 nt, synthetic construct
  misc_feature 1..19: note = siRNA sense sequence
  source 1..19: mol_type = other RNA
gtatcttcttccaagtatg

SEQ ID NO: 41371 - RNA, 19 nt, synthetic construct
  misc_feature 1..19: note = siRNA antisense sequence
  source 1..19: mol_type = other RNA
catacttggaagaagatac

SEQ ID NO: 41372 - RNA, 19 nt, synthetic construct
  misc_feature 1..19: note = siRNA sense sequence
  source 1..19: mol_type = other RNA
tatcttcttccaagtatgg

SEQ ID NO: 41373 - RNA, 19 nt, synthetic construct
  misc_feature 1..19: note = siRNA antisense sequence
  source 1..19: mol_type = other RNA
ccatacttggaagaagata

SEQ ID NO: 41374 - RNA, 19 nt, synthetic construct
  misc_feature 1..19: note = siRNA sense sequence
  source 1..19: mol_type = other RNA
ccctccattttctgccacc

SEQ ID NO: 41375 - RNA, 19 nt, synthetic construct
  misc_feature 1..19: note = siRNA antisense sequence
  source 1..19: mol_type = other RNA
ggtggcagaaaatggaggg

SEQ ID NO: 41376 - RNA, 19 nt, synthetic construct
  misc_feature 1..19: note = siRNA sense sequence
  source 1..19: mol_type = other RNA
cctccattttctgccacct

SEQ ID NO: 41377 - RNA, 19 nt, synthetic construct
  misc_feature 1..19: note = siRNA antisense sequence
  source 1..19: mol_type = other RNA
aggtggcagaaaatggagg

SEQ ID NO: 41378 - RNA, 19 nt, synthetic construct
  misc_feature 1..19: note = siRNA sense sequence
  source 1..19: mol_type = other RNA
ttttctgccacctttctag

SEQ ID NO: 41379 - RNA, 19 nt, synthetic construct
  misc_feature 1..19: note = siRNA antisense sequence
  source 1..19: mol_type = other RNA
ctagaaaggtggcagaaaa

SEQ ID NO: 41380 - RNA, 19 nt, synthetic construct
  misc_feature 1..19: note = siRNA sense sequence
  source 1..19: mol_type = other RNA
ctgccacctttctagtgcc

SEQ ID NO: 41381 - RNA, 19 nt, synthetic construct
  misc_feature 1..19: note = siRNA antisense sequence
  source 1..19: mol_type = other RNA
ggcactagaaaggtggcag

SEQ ID NO: 41382 - RNA, 19 nt, synthetic construct
  misc_feature 1..19: note = siRNA sense sequence
  source 1..19: mol_type = other RNA
tgccacctttctagtgcct

SEQ ID NO: 41383 - RNA, 19 nt, synthetic construct
  misc_feature 1..19: note = siRNA antisense sequence
  source 1..19: mol_type = other RNA
aggcactagaaaggtggca

SEQ ID NO: 41384 - RNA, 19 nt, synthetic construct
  misc_feature 1..19: note = siRNA sense sequence
  source 1..19: mol_type = other RNA
acctttctagtgccttcag

SEQ ID NO: 41385 - RNA, 19 nt, synthetic construct
  misc_feature 1..19: note = siRNA antisense sequence
  source 1..19: mol_type = other RNA
ctgaaggcactagaaaggt

SEQ ID NO: 41386 - RNA, 19 nt, synthetic construct
  misc_feature 1..19: note = siRNA sense sequence
  source 1..19: mol_type = other RNA
cctttctagtgccttcagg

SEQ ID NO: 41387 - RNA, 19 nt, synthetic construct
  misc_feature 1..19: note = siRNA antisense sequence
  source 1..19: mol_type = other RNA
cctgaaggcactagaaagg

SEQ ID NO: 41388 - RNA, 19 nt, synthetic construct
  misc_feature 1..19: note = siRNA sense sequence
  source 1..19: mol_type = other RNA
tctagtgccttcaggtgat

SEQ ID NO: 41389 - RNA, 19 nt, synthetic construct
  misc_feature 1..19: note = siRNA antisense sequence
  source 1..19: mol_type = other RNA
atcacctgaaggcactaga

SEQ ID NO: 41390 - RNA, 19 nt, synthetic construct
  misc_feature 1..19: note = siRNA sense sequence
  source 1..19: mol_type = other RNA
ctagtgccttcaggtgatt

SEQ ID NO: 41391 - RNA, 19 nt, synthetic construct
  misc_feature 1..19: note = siRNA antisense sequence
  source 1..19: mol_type = other RNA
aatcacctgaaggcactag

SEQ ID NO: 41392 - RNA, 19 nt, synthetic construct
  misc_feature 1..19: note = siRNA sense sequence
  source 1..19: mol_type = other RNA
tagtgccttcaggtgattg

SEQ ID NO: 41393 - RNA, 19 nt, synthetic construct
  misc_feature 1..19: note = siRNA antisense sequence
  source 1..19: mol_type = other RNA
caatcacctgaaggcacta

SEQ ID NO: 41394 - RNA, 19 nt, synthetic construct
  misc_feature 1..19: note = siRNA sense sequence
  source 1..19: mol_type = other RNA
agtgccttcaggtgattgt

SEQ ID NO: 41395 - RNA, 19 nt, synthetic construct
  misc_feature 1..19: note = siRNA antisense sequence
  source 1..19: mol_type = other RNA
acaatcacctgaaggcact

SEQ ID NO: 41396 - RNA, 19 nt, synthetic construct
  misc_feature 1..19: note = siRNA sense sequence
  source 1..19: mol_type = other RNA
ttcaggtgattgtttcatg

SEQ ID NO: 41397 - RNA, 19 nt, synthetic construct
  misc_feature 1..19: note = siRNA antisense sequence
  source 1..19: mol_type = other RNA
catgaaacaatcacctgaa

SEQ ID NO: 41398 - RNA, 19 nt, synthetic construct
  misc_feature 1..19: note = siRNA sense sequence
  source 1..19: mol_type = other RNA
tcaggtgattgtttcatgt

SEQ ID NO: 41399 - RNA, 19 nt, synthetic construct
  misc_feature 1..19: note = siRNA antisense sequence
  source 1..19: mol_type = other RNA
acatgaaacaatcacctga

SEQ ID NO: 41400 - RNA, 19 nt, synthetic construct
  misc_feature 1..19: note = siRNA sense sequence
  source 1..19: mol_type = other RNA
caggtgattgtttcatgta

SEQ ID NO: 41401 - RNA, 19 nt, synthetic construct
  misc_feature 1..19: note = siRNA antisense sequence
  source 1..19: mol_type = other RNA
tacatgaaacaatcacctg

SEQ ID NO: 41402 - RNA, 19 nt, synthetic construct
  misc_feature 1..19: note = siRNA sense sequence
  source 1..19: mol_type = other RNA
aggtgattgtttcatgtat

SEQ ID NO: 41403 - RNA, 19 nt, synthetic construct
  misc_feature 1..19: note = siRNA antisense sequence
  source 1..19: mol_type = other RNA
atacatgaaacaatcacct

SEQ ID NO: 41404 - RNA, 19 nt, synthetic construct
  misc_feature 1..19: note = siRNA sense sequence
  source 1..19: mol_type = other RNA
ggtgattgtttcatgtatt

SEQ ID NO: 41405 - RNA, 19 nt, synthetic construct
  misc_feature 1..19: note = siRNA antisense sequence
  source 1..19: mol_type = other RNA
aatacatgaaacaatcacc

SEQ ID NO: 41406 - RNA, 19 nt, synthetic construct
  misc_feature 1..19: note = siRNA sense sequence
  source 1..19: mol_type = other RNA
cctagaatttatagttgtg

SEQ ID NO: 41407 - RNA, 19 nt, synthetic construct
  misc_feature 1..19: note = siRNA antisense sequence
  source 1..19: mol_type = other RNA
cacaactataaattctagg

SEQ ID NO: 41408 - RNA, 19 nt, synthetic construct
  misc_feature 1..19: note = siRNA sense sequence
  source 1..19: mol_type = other RNA
tatagttgtgatttgcaga

SEQ ID NO: 41409 - RNA, 19 nt, synthetic construct
  misc_feature 1..19: note = siRNA antisense sequence
  source 1..19: mol_type = other RNA
tctgcaaatcacaactata

SEQ ID NO: 41410 - RNA, 19 nt, synthetic construct
  misc_feature 1..19: note = siRNA sense sequence
  source 1..19: mol_type = other RNA
atagttgtgatttgcagag

SEQ ID NO: 41411 - RNA, 19 nt, synthetic construct
  misc_feature 1..19: note = siRNA antisense sequence
  source 1..19: mol_type = other RNA
ctctgcaaatcacaactat

SEQ ID NO: 41412 - RNA, 19 nt, synthetic construct
  misc_feature 1..19: note = siRNA sense sequence
  source 1..19: mol_type = other RNA
tagttgtgatttgcagagg

SEQ ID NO: 41413 - RNA, 19 nt, synthetic construct
  misc_feature 1..19: note = siRNA antisense sequence
  source 1..19: mol_type = other RNA
cctctgcaaatcacaacta

SEQ ID NO: 41414 - RNA, 19 nt, synthetic construct
  misc_feature 1..19: note = siRNA sense sequence
  source 1..19: mol_type = other RNA
agttgtgatttgcagagga

SEQ ID NO: 41415 - RNA, 19 nt, synthetic construct
  misc_feature 1..19: note = siRNA antisense sequence
  source 1..19: mol_type = other RNA
tcctctgcaaatcacaact

SEQ ID NO: 41416 - RNA, 19 nt, synthetic construct
  misc_feature 1..19: note = siRNA sense sequence
  source 1..19: mol_type = other RNA
gttgtgatttgcagaggag

SEQ ID NO: 41417 - RNA, 19 nt, synthetic construct
  misc_feature 1..19: note = siRNA antisense sequence
  source 1..19: mol_type = other RNA
ctcctctgcaaatcacaac

SEQ ID NO: 41418 - RNA, 19 nt, synthetic construct
  misc_feature 1..19: note = siRNA sense sequence
  source 1..19: mol_type = other RNA
ttgtgatttgcagaggagc

SEQ ID NO: 41419 - RNA, 19 nt, synthetic construct
  misc_feature 1..19: note = siRNA antisense sequence
  source 1..19: mol_type = other RNA
gctcctctgcaaatcacaa

SEQ ID NO: 41420 - RNA, 19 nt, synthetic construct
  misc_feature 1..19: note = siRNA sense sequence
  source 1..19: mol_type = other RNA
tgtgatttgcagaggagct

SEQ ID NO: 41421 - RNA, 19 nt, synthetic construct
  misc_feature 1..19: note = siRNA antisense sequence
  source 1..19: mol_type = other RNA
agctcctctgcaaatcaca

SEQ ID NO: 41422 - RNA, 19 nt, synthetic construct
  misc_feature 1..19: note = siRNA sense sequence
  source 1..19: mol_type = other RNA
gtgatttgcagaggagctg

SEQ ID NO: 41423 - RNA, 19 nt, synthetic construct
  misc_feature 1..19: note = siRNA antisense sequence
  source 1..19: mol_type = other RNA
cagctcctctgcaaatcac

SEQ ID NO: 41424 - RNA, 19 nt, synthetic construct
  misc_feature 1..19: note = siRNA sense sequence
  source 1..19: mol_type = other RNA
tttgcagaggagctgtttt

SEQ ID NO: 41425 - RNA, 19 nt, synthetic construct
  misc_feature 1..19: note = siRNA antisense sequence
  source 1..19: mol_type = other RNA
aaaacagctcctctgcaaa

SEQ ID NO: 41426 - RNA, 19 nt, synthetic construct
  misc_feature 1..19: note = siRNA sense sequence
  source 1..19: mol_type = other RNA
ttgcagaggagctgttttg

SEQ ID NO: 41427 - RNA, 19 nt, synthetic construct
  misc_feature 1..19: note = siRNA antisense sequence
  source 1..19: mol_type = other RNA
caaaacagctcctctgcaa

SEQ ID NO: 41428 - RNA, 19 nt, synthetic construct
  misc_feature 1..19: note = siRNA sense sequence
  source 1..19: mol_type = other RNA
tgcagaggagctgttttgt

SEQ ID NO: 41429 - RNA, 19 nt, synthetic construct
  misc_feature 1..19: note = siRNA antisense sequence
  source 1..19: mol_type = other RNA
acaaaacagctcctctgca

SEQ ID NO: 41430 - RNA, 19 nt, synthetic construct
  misc_feature 1..19: note = siRNA sense sequence
  source 1..19: mol_type = other RNA
gaggagctgttttgttagg

SEQ ID NO: 41431 - RNA, 19 nt, synthetic construct
  misc_feature 1..19: note = siRNA antisense sequence
  source 1..19: mol_type = other RNA
cctaacaaaacagctcctc

SEQ ID NO: 41432 - RNA, 19 nt, synthetic construct
  misc_feature 1..19: note = siRNA sense sequence
  source 1..19: mol_type = other RNA
aggagctgttttgttagga

SEQ ID NO: 41433 - RNA, 19 nt, synthetic construct
  misc_feature 1..19: note = siRNA antisense sequence
  source 1..19: mol_type = other RNA
tcctaacaaaacagctcct

SEQ ID NO: 41434 - RNA, 19 nt, synthetic construct
  misc_feature 1..19: note = siRNA sense sequence
  source 1..19: mol_type = other RNA
gagctgttttgttaggagt

SEQ ID NO: 41435 - RNA, 19 nt, synthetic construct
  misc_feature 1..19: note = siRNA antisense sequence
  source 1..19: mol_type = other RNA
actcctaacaaaacagctc

SEQ ID NO: 41436 - RNA, 19 nt, synthetic construct
  misc_feature 1..19: note = siRNA sense sequence
  source 1..19: mol_type = other RNA
agctgttttgttaggagtt

SEQ ID NO: 41437 - RNA, 19 nt, synthetic construct
  misc_feature 1..19: note = siRNA antisense sequence
  source 1..19: mol_type = other RNA
aactcctaacaaaacagct

SEQ ID NO: 41438 - RNA, 19 nt, synthetic construct
  misc_feature 1..19: note = siRNA sense sequence
  source 1..19: mol_type = other RNA
gctgttttgttaggagtta

SEQ ID NO: 41439 - RNA, 19 nt, synthetic construct
  misc_feature 1..19: note = siRNA antisense sequence
  source 1..19: mol_type = other RNA
taactcctaacaaaacagc

SEQ ID NO: 41440 - RNA, 19 nt, synthetic construct
  misc_feature 1..19: note = siRNA sense sequence
  source 1..19: mol_type = other RNA
gagttactcctcccttact

SEQ ID NO: 41441 - RNA, 19 nt, synthetic construct
  misc_feature 1..19: note = siRNA antisense sequence
  source 1..19: mol_type = other RNA
agtaagggaggagtaactc

SEQ ID NO: 41442 - RNA, 19 nt, synthetic construct
  misc_feature 1..19: note = siRNA sense sequence
  source 1..19: mol_type = other RNA
agattttagccacatcaag

SEQ ID NO: 41443 - RNA, 19 nt, synthetic construct
  misc_feature 1..19: note = siRNA antisense sequence
  source 1..19: mol_type = other RNA
cttgatgtggctaaaatct

SEQ ID NO: 41444 - RNA, 19 nt, synthetic construct
  misc_feature 1..19: note = siRNA sense sequence
  source 1..19: mol_type = other RNA
gattttagccacatcaagt

SEQ ID NO: 41445 - RNA, 19 nt, synthetic construct
  misc_feature 1..19: note = siRNA antisense sequence
  source 1..19: mol_type = other RNA
acttgatgtggctaaaatc

SEQ ID NO: 41446 - RNA, 19 nt, synthetic construct
  misc_feature 1..19: note = siRNA sense sequence
  source 1..19: mol_type = other RNA
ttttagccacatcaagtac

SEQ ID NO: 41447 - RNA, 19 nt, synthetic construct
  misc_feature 1..19: note = siRNA antisense sequence
  source 1..19: mol_type = other RNA
gtacttgatgtggctaaaa

SEQ ID NO: 41448 - RNA, 19 nt, synthetic construct
  misc_feature 1..19: note = siRNA sense sequence
  source 1..19: mol_type = other RNA
tagccacatcaagtacagt

SEQ ID NO: 41449 - RNA, 19 nt, synthetic construct
  misc_feature 1..19: note = siRNA antisense sequence
  source 1..19: mol_type = other RNA
actgtacttgatgtggcta

SEQ ID NO: 41450 - RNA, 19 nt, synthetic construct
  misc_feature 1..19: note = siRNA sense sequence
  source 1..19: mol_type = other RNA
agccacatcaagtacagta

SEQ ID NO: 41451 - RNA, 19 nt, synthetic construct
  misc_feature 1..19: note = siRNA antisense sequence
  source 1..19: mol_type = other RNA
tactgtacttgatgtggct

SEQ ID NO: 41452 - RNA, 19 nt, synthetic construct
  misc_feature 1..19: note = siRNA sense sequence
  source 1..19: mol_type = other RNA
gccacatcaagtacagtag

SEQ ID NO: 41453 - RNA, 19 nt, synthetic construct
  misc_feature 1..19: note = siRNA antisense sequence
  source 1..19: mol_type = other RNA
ctactgtacttgatgtggc

SEQ ID NO: 41454 - RNA, 19 nt, synthetic construct
  misc_feature 1..19: note = siRNA sense sequence
  source 1..19: mol_type = other RNA
acatcaagtacagtaggga

SEQ ID NO: 41455 - RNA, 19 nt, synthetic construct
  misc_feature 1..19: note = siRNA antisense sequence
  source 1..19: mol_type = other RNA
tccctactgtacttgatgt

SEQ ID NO: 41456 - RNA, 19 nt, synthetic construct
  misc_feature 1..19: note = siRNA sense sequence
  source 1..19: mol_type = other RNA
catcaagtacagtagggaa

SEQ ID NO: 41457 - RNA, 19 nt, synthetic construct
  misc_feature 1..19: note = siRNA antisense sequence
  source 1..19: mol_type = other RNA
ttccctactgtacttgatg

SEQ ID NO: 41458 - RNA, 19 nt, synthetic construct
  misc_feature 1..19: note = siRNA sense sequence
  source 1..19: mol_type = other RNA
atcaagtacagtagggaag

SEQ ID NO: 41459 - RNA, 19 nt, synthetic construct
  misc_feature 1..19: note = siRNA antisense sequence
  source 1..19: mol_type = other RNA
cttccctactgtacttgat

SEQ ID NO: 41460 - RNA, 19 nt, synthetic construct
  misc_feature 1..19: note = siRNA sense sequence
  source 1..19: mol_type = other RNA
tcaagtacagtagggaagt

SEQ ID NO: 41461 - RNA, 19 nt, synthetic construct
  misc_feature 1..19: note = siRNA antisense sequence
  source 1..19: mol_type = other RNA
acttccctactgtacttga

SEQ ID NO: 41462 - RNA, 19 nt, synthetic construct
  misc_feature 1..19: note = siRNA sense sequence
  source 1..19: mol_type = other RNA
caagtacagtagggaagtt

SEQ ID NO: 41463 - RNA, 19 nt, synthetic construct
  misc_feature 1..19: note = siRNA antisense sequence
  source 1..19: mol_type = other RNA
aacttccctactgtacttg

SEQ ID NO: 41464 - RNA, 19 nt, synthetic construct
  misc_feature 1..19: note = siRNA sense sequence
  source 1..19: mol_type = other RNA
aagtacagtagggaagttt

SEQ ID NO: 41465 - RNA, 19 nt, synthetic construct
  misc_feature 1..19: note = siRNA antisense sequence
  source 1..19: mol_type = other RNA
aaacttccctactgtactt

SEQ ID NO: 41466 - RNA, 19 nt, synthetic construct
  misc_feature 1..19: note = siRNA sense sequence
  source 1..19: mol_type = other RNA
agtacagtagggaagtttc

SEQ ID NO: 41467 - RNA, 19 nt, synthetic construct
  misc_feature 1..19: note = siRNA antisense sequence
  source 1..19: mol_type = other RNA
gaaacttccctactgtact

SEQ ID NO: 41468 - RNA, 19 nt, synthetic construct
  misc_feature 1..19: note = siRNA sense sequence
  source 1..19: mol_type = other RNA
gtacagtagggaagtttcc

SEQ ID NO: 41469 - RNA, 19 nt, synthetic construct
  misc_feature 1..19: note = siRNA antisense sequence
  source 1..19: mol_type = other RNA
ggaaacttccctactgtac

SEQ ID NO: 41470 - RNA, 19 nt, synthetic construct
  misc_feature 1..19: note = siRNA sense sequence
  source 1..19: mol_type = other RNA
tacagtagggaagtttcca

SEQ ID NO: 41471 - RNA, 19 nt, synthetic construct
  misc_feature 1..19: note = siRNA antisense sequence
  source 1..19: mol_type = other RNA
tggaaacttccctactgta

SEQ ID NO: 41472 - RNA, 19 nt, synthetic construct
  misc_feature 1..19: note = siRNA sense sequence
  source 1..19: mol_type = other RNA
cagtagggaagtttccact

SEQ ID NO: 41473 - RNA, 19 nt, synthetic construct
  misc_feature 1..19: note = siRNA antisense sequence
  source 1..19: mol_type = other RNA
agtggaaacttccctactg

SEQ ID NO: 41474 - RNA, 19 nt, synthetic construct
  misc_feature 1..19: note = siRNA sense sequence
  source 1..19: mol_type = other RNA
gaagtttccactgtagtcc

SEQ ID NO: 41475 - RNA, 19 nt, synthetic construct
  misc_feature 1..19: note = siRNA antisense sequence
  source 1..19: mol_type = other RNA
ggactacagtggaaacttc

SEQ ID NO: 41476 - RNA, 19 nt, synthetic construct
  misc_feature 1..19: note = siRNA sense sequence
  source 1..19: mol_type = other RNA
aagtttccactgtagtccc

SEQ ID NO: 41477 - RNA, 19 nt, synthetic construct
  misc_feature 1..19: note = siRNA antisense sequence
  source 1..19: mol_type = other RNA
gggactacagtggaaactt

SEQ ID NO: 41478 - RNA, 19 nt, synthetic construct
  misc_feature 1..19: note = siRNA sense sequence
  source 1..19: mol_type = other RNA
agtttccactgtagtccct

SEQ ID NO: 41479 - RNA, 19 nt, synthetic construct
  misc_feature 1..19: note = siRNA antisense sequence
  source 1..19: mol_type = other RNA
agggactacagtggaaact

SEQ ID NO: 41480 - RNA, 19 nt, synthetic construct
  misc_feature 1..19: note = siRNA sense sequence
  source 1..19: mol_type = other RNA
gtttccactgtagtcccta

SEQ ID NO: 41481 - RNA, 19 nt, synthetic construct
  misc_feature 1..19: note = siRNA antisense sequence
  source 1..19: mol_type = other RNA
tagggactacagtggaaac

SEQ ID NO: 41482 - RNA, 19 nt, synthetic construct
  misc_feature 1..19: note = siRNA sense sequence
  source 1..19: mol_type = other RNA
tttccactgtagtccctaa

SEQ ID NO: 41483 - RNA, 19 nt, synthetic construct
  misc_feature 1..19: note = siRNA antisense sequence
  source 1..19: mol_type = other RNA
ttagggactacagtggaaa

SEQ ID NO: 41484 - RNA, 19 nt, synthetic construct
  misc_feature 1..19: note = siRNA sense sequence
  source 1..19: mol_type = other RNA
ttccactgtagtccctaat

SEQ ID NO: 41485 - RNA, 19 nt, synthetic construct
  misc_feature 1..19: note = siRNA antisense sequence
  source 1..19: mol_type = other RNA
attagggactacagtggaa

SEQ ID NO: 41486 - RNA, 19 nt, synthetic construct
  misc_feature 1..19: note = siRNA sense sequence
  source 1..19: mol_type = other RNA
tccactgtagtccctaatt

SEQ ID NO: 41487 - RNA, 19 nt, synthetic construct
  misc_feature 1..19: note = siRNA antisense sequence
  source 1..19: mol_type = other RNA
aattagggactacagtgga

SEQ ID NO: 41488 - RNA, 19 nt, synthetic construct
  misc_feature 1..19: note = siRNA sense sequence
  source 1..19: mol_type = other RNA
ccactgtagtccctaattg

SEQ ID NO: 41489 - RNA, 19 nt, synthetic construct
  misc_feature 1..19: note = siRNA antisense sequence
  source 1..19: mol_type = other RNA
caattagggactacagtgg

SEQ ID NO: 41490 - RNA, 19 nt, synthetic construct
  misc_feature 1..19: note = siRNA sense sequence
  source 1..19: mol_type = other RNA
cactgtagtccctaattgt

SEQ ID NO: 41491 - RNA, 19 nt, synthetic construct
  misc_feature 1..19: note = siRNA antisense sequence
  source 1..19: mol_type = other RNA
acaattagggactacagtg

SEQ ID NO: 41492 - RNA, 19 nt, synthetic construct
  misc_feature 1..19: note = siRNA sense sequence
  source 1..19: mol_type = other RNA
actgtagtccctaattgtc

SEQ ID NO: 41493 - RNA, 19 nt, synthetic construct
  misc_feature 1..19: note = siRNA antisense sequence
  source 1..19: mol_type = other RNA
gacaattagggactacagt

SEQ ID NO: 41494 - RNA, 19 nt, synthetic construct
  misc_feature 1..19: note = siRNA sense sequence
  source 1..19: mol_type = other RNA
ctgtagtccctaattgtcc

SEQ ID NO: 41495 - RNA, 19 nt, synthetic construct
  misc_feature 1..19: note = siRNA antisense sequence
  source 1..19: mol_type = other RNA
ggacaattagggactacag

SEQ ID NO: 41496 - RNA, 19 nt, synthetic construct
  misc_feature 1..19: note = siRNA sense sequence
  source 1..19: mol_type = other RNA
tgtagtccctaattgtccc

SEQ ID NO: 41497 - RNA, 19 nt, synthetic construct
  misc_feature 1..19: note = siRNA antisense sequence
  source 1..19: mol_type = other RNA
gggacaattagggactaca

SEQ ID NO: 41498 - RNA, 19 nt, synthetic construct
  misc_feature 1..19: note = siRNA sense sequence
  source 1..19: mol_type = other RNA
gtagtccctaattgtccca

SEQ ID NO: 41499 - RNA, 19 nt, synthetic construct
  misc_feature 1..19: note = siRNA antisense sequence
  source 1..19: mol_type = other RNA
tgggacaattagggactac

SEQ ID NO: 41500 - RNA, 19 nt, synthetic construct
  misc_feature 1..19: note = siRNA sense sequence
  source 1..19: mol_type = other RNA
tccctaattgtcccaggaa

SEQ ID NO: 41501 - RNA, 19 nt, synthetic construct
  misc_feature 1..19: note = siRNA antisense sequence
  source 1..19: mol_type = other RNA
ttcctgggacaattaggga

SEQ ID NO: 41502 - RNA, 19 nt, synthetic construct
  misc_feature 1..19: note = siRNA sense sequence
  source 1..19: mol_type = other RNA
ccctaattgtcccaggaat

SEQ ID NO: 41503 - RNA, 19 nt, synthetic construct
  misc_feature 1..19: note = siRNA antisense sequence
  source 1..19: mol_type = other RNA
attcctgggacaattaggg

SEQ ID NO: 41504 - RNA, 19 nt, synthetic construct
  misc_feature 1..19: note = siRNA sense sequence
  source 1..19: mol_type = other RNA
cctaattgtcccaggaatg

SEQ ID NO: 41505 - RNA, 19 nt, synthetic construct
  misc_feature 1..19: note = siRNA antisense sequence
  source 1..19: mol_type = other RNA
cattcctgggacaattagg

SEQ ID NO: 41506 - RNA, 19 nt, synthetic construct
  misc_feature 1..19: note = siRNA sense sequence
  source 1..19: mol_type = other RNA
taattgtcccaggaatgct

SEQ ID NO: 41507 - RNA, 19 nt, synthetic construct
  misc_feature 1..19: note = siRNA antisense sequence
  source 1..19: mol_type = other RNA
agcattcctgggacaatta

SEQ ID NO: 41508 - RNA, 19 nt, synthetic construct
  misc_feature 1..19: note = siRNA sense sequence
  source 1..19: mol_type = other RNA
aattgtcccaggaatgctt

SEQ ID NO: 41509 - RNA, 19 nt, synthetic construct
  misc_feature 1..19: note = siRNA antisense sequence
  source 1..19: mol_type = other RNA
aagcattcctgggacaatt

SEQ ID NO: 41510 - RNA, 19 nt, synthetic construct
  misc_feature 1..19: note = siRNA sense sequence
  source 1..19: mol_type = other RNA
ggtcaagctttgtatataa

SEQ ID NO: 41511 - RNA, 19 nt, synthetic construct
  misc_feature 1..19: note = siRNA antisense sequence
  source 1..19: mol_type = other RNA
ttatatacaaagcttgacc

SEQ ID NO: 41512 - RNA, 19 nt, synthetic construct
  misc_feature 1..19: note = siRNA sense sequence
  source 1..19: mol_type = other RNA
caatcgcccagctctaggt

SEQ ID NO: 41513 - RNA, 19 nt, synthetic construct
  misc_feature 1..19: note = siRNA antisense sequence
  source 1..19: mol_type = other RNA
acctagagctgggcgattg

SEQ ID NO: 41514 - RNA, 19 nt, synthetic construct
  misc_feature 1..19: note = siRNA sense sequence
  source 1..19: mol_type = other RNA
aatcgcccagctctaggtg

SEQ ID NO: 41515 - RNA, 19 nt, synthetic construct
  misc_feature 1..19: note = siRNA antisense sequence
  source 1..19: mol_type = other RNA
cacctagagctgggcgatt

SEQ ID NO: 41516 - RNA, 19 nt, synthetic construct
  misc_feature 1..19: note = siRNA sense sequence
  source 1..19: mol_type = other RNA
atcgcccagctctaggtgc

SEQ ID NO: 41517 - RNA, 19 nt, synthetic construct
  misc_feature 1..19: note = siRNA antisense sequence
  source 1..19: mol_type = other RNA
gcacctagagctgggcgat

SEQ ID NO: 41518 - RNA, 19 nt, synthetic construct
  misc_feature 1..19: note = siRNA sense sequence
  source 1..19: mol_type = other RNA
cccagctctaggtgctttc

SEQ ID NO: 41519 - RNA, 19 nt, synthetic construct
  misc_feature 1..19: note = siRNA antisense sequence
  source 1..19: mol_type = other RNA
gaaagcacctagagctggg

SEQ ID NO: 41520 - RNA, 19 nt, synthetic construct
  misc_feature 1..19: note = siRNA sense sequence
  source 1..19: mol_type = other RNA
gctctaggtgctttcaaag

SEQ ID NO: 41521 - RNA, 19 nt, synthetic construct
  misc_feature 1..19: note = siRNA antisense sequence
  source 1..19: mol_type = other RNA
ctttgaaagcacctagagc

SEQ ID NO: 41522 - RNA, 19 nt, synthetic construct
  misc_feature 1..19: note = siRNA sense sequence
  source 1..19: mol_type = other RNA
caaaggccattgcgcagat

SEQ ID NO: 41523 - RNA, 19 nt, synthetic construct
  misc_feature 1..19: note = siRNA antisense sequence
  source 1..19: mol_type = other RNA
atctgcgcaatggcctttg

SEQ ID NO: 41524 - RNA, 19 nt, synthetic construct
  misc_feature 1..19: note = siRNA sense sequence
  source 1..19: mol_type = other RNA
aaaggccattgcgcagatc

SEQ ID NO: 41525 - RNA, 19 nt, synthetic construct
  misc_feature 1..19: note = siRNA antisense sequence
  source 1..19: mol_type = other RNA
gatctgcgcaatggccttt

SEQ ID NO: 41526 - RNA, 19 nt, synthetic construct
  misc_feature 1..19: note = siRNA sense sequence
  source 1..19: mol_type = other RNA
aaggccattgcgcagatca

SEQ ID NO: 41527 - RNA, 19 nt, synthetic construct
  misc_feature 1..19: note = siRNA antisense sequence
  source 1..19: mol_type = other RNA
tgatctgcgcaatggcctt

SEQ ID NO: 41528 - RNA, 19 nt, synthetic construct
  misc_feature 1..19: note = siRNA sense sequence
  source 1..19: mol_type = other RNA
attgcgcagatcaggaagt

SEQ ID NO: 41529 - RNA, 19 nt, synthetic construct
  misc_feature 1..19: note = siRNA antisense sequence
  source 1..19: mol_type = other RNA
acttcctgatctgcgcaat

SEQ ID NO: 41530 - RNA, 19 nt, synthetic construct
  misc_feature 1..19: note = siRNA sense sequence
  source 1..19: mol_type = other RNA
ttgcgcagatcaggaagtc

SEQ ID NO: 41531 - RNA, 19 nt, synthetic construct
  misc_feature 1..19: note = siRNA antisense sequence
  source 1..19: mol_type = other RNA
gacttcctgatctgcgcaa

SEQ ID NO: 41532 - RNA, 19 nt, synthetic construct
  misc_feature 1..19: note = siRNA sense sequence
  source 1..19: mol_type = other RNA
tgcgcagatcaggaagtct

SEQ ID NO: 41533 - RNA, 19 nt, synthetic construct
  misc_feature 1..19: note = siRNA antisense sequence
  source 1..19: mol_type = other RNA
agacttcctgatctgcgca

SEQ ID NO: 41534 - RNA, 19 nt, synthetic construct
  misc_feature 1..19: note = siRNA sense sequence
  source 1..19: mol_type = other RNA
cagatcaggaagtctaact

SEQ ID NO: 41535 - RNA, 19 nt, synthetic construct
  misc_feature 1..19: note = siRNA antisense sequence
  source 1..19: mol_type = other RNA
agttagacttcctgatctg

SEQ ID NO: 41536 - RNA, 19 nt, synthetic construct
  misc_feature 1..19: note = siRNA sense sequence
  source 1..19: mol_type = other RNA
ggaagtctaactgaccatt

SEQ ID NO: 41537 - RNA, 19 nt, synthetic construct
  misc_feature 1..19: note = siRNA antisense sequence
  source 1..19: mol_type = other RNA
aatggtcagttagacttcc

SEQ ID NO: 41538 - RNA, 19 nt, synthetic construct
  misc_feature 1..19: note = siRNA sense sequence
  source 1..19: mol_type = other RNA
gaagtctaactgaccattc

SEQ ID NO: 41539 - RNA, 19 nt, synthetic construct
  misc_feature 1..19: note = siRNA antisense sequence
  source 1..19: mol_type = other RNA
gaatggtcagttagacttc

SEQ ID NO: 41540 - RNA, 19 nt, synthetic construct
  misc_feature 1..19: note = siRNA sense sequence
  source 1..19: mol_type = other RNA
tctaactgaccattccaga

SEQ ID NO: 41541 - RNA, 19 nt, synthetic construct
  misc_feature 1..19: note = siRNA antisense sequence
  source 1..19: mol_type = other RNA
tctggaatggtcagttaga

SEQ ID NO: 41542 - RNA, 19 nt, synthetic construct
  misc_feature 1..19: note = siRNA sense sequence
  source 1..19: mol_type = other RNA
ctaactgaccattccagaa

SEQ ID NO: 41543 - RNA, 19 nt, synthetic construct
  misc_feature 1..19: note = siRNA antisense sequence
  source 1..19: mol_type = other RNA
ttctggaatggtcagttag

SEQ ID NO: 41544 - RNA, 19 nt, synthetic construct
  misc_feature 1..19: note = siRNA sense sequence
  source 1..19: mol_type = other RNA
taactgaccattccagaat

SEQ ID NO: 41545 - RNA, 19 nt, synthetic construct
  misc_feature 1..19: note = siRNA antisense sequence
  source 1..19: mol_type = other RNA
attctggaatggtcagtta

SEQ ID NO: 41546 - RNA, 19 nt, synthetic construct
  misc_feature 1..19: note = siRNA sense sequence
  source 1..19: mol_type = other RNA
aactgaccattccagaatc

SEQ ID NO: 41547 - RNA, 19 nt, synthetic construct
  misc_feature 1..19: note = siRNA antisense sequence
  source 1..19: mol_type = other RNA
gattctggaatggtcagtt

SEQ ID NO: 41548 - RNA, 19 nt, synthetic construct
  misc_feature 1..19: note = siRNA sense sequence
  source 1..19: mol_type = other RNA
actgaccattccagaatct

SEQ ID NO: 41549 - RNA, 19 nt, synthetic construct
  misc_feature 1..19: note = siRNA antisense sequence
  source 1..19: mol_type = other RNA
agattctggaatggtcagt

SEQ ID NO: 41550 - RNA, 19 nt, synthetic construct
  misc_feature 1..19: note = siRNA sense sequence
  source 1..19: mol_type = other RNA
ctgaccattccagaatctc

SEQ ID NO: 41551 - RNA, 19 nt, synthetic construct
  misc_feature 1..19: note = siRNA antisense sequence
  source 1..19: mol_type = other RNA
gagattctggaatggtcag

SEQ ID NO: 41552 - RNA, 19 nt, synthetic construct
  misc_feature 1..19: note = siRNA sense sequence
  source 1..19: mol_type = other RNA
tgaccattccagaatctct

SEQ ID NO: 41553 - RNA, 19 nt, synthetic construct
  misc_feature 1..19: note = siRNA antisense sequence
  source 1..19: mol_type = other RNA
agagattctggaatggtca

SEQ ID NO: 41554 - RNA, 19 nt, synthetic construct
  misc_feature 1..19: note = siRNA sense sequence
  source 1..19: mol_type = other RNA
tttaaatccacatacagtc

SEQ ID NO: 41555 - RNA, 19 nt, synthetic construct
  misc_feature 1..19: note = siRNA antisense sequence
  source 1..19: mol_type = other RNA
gactgtatgtggatttaaa

SEQ ID NO: 41556 - RNA, 19 nt, synthetic construct
  misc_feature 1..19: note = siRNA sense sequence
  source 1..19: mol_type = other RNA
caaatctttctcaacctga

SEQ ID NO: 41557 - RNA, 19 nt, synthetic construct
  misc_feature 1..19: note = siRNA antisense sequence
  source 1..19: mol_type = other RNA
tcaggttgagaaagatttg

SEQ ID NO: 41558 - RNA, 19 nt, synthetic construct
  misc_feature 1..19: note = siRNA sense sequence
  source 1..19: mol_type = other RNA
aaatctttctcaacctgaa

SEQ ID NO: 41559 - RNA, 19 nt, synthetic construct
  misc_feature 1..19: note = siRNA antisense sequence
  source 1..19: mol_type = other RNA
ttcaggttgagaaagattt

SEQ ID NO: 41560 - RNA, 19 nt, synthetic construct
  misc_feature 1..19: note = siRNA sense sequence
  source 1..19: mol_type = other RNA
ttctcaacctgaattttgc

SEQ ID NO: 41561 - RNA, 19 nt, synthetic construct
  misc_feature 1..19: note = siRNA antisense sequence
  source 1..19: mol_type = other RNA
gcaaaattcaggttgagaa

SEQ ID NO: 41562 - RNA, 19 nt, synthetic construct
  misc_feature 1..19: note = siRNA sense sequence
  source 1..19: mol_type = other RNA
tctcaacctgaattttgcc

SEQ ID NO: 41563 - RNA, 19 nt, synthetic construct
  misc_feature 1..19: note = siRNA antisense sequence
  source 1..19: mol_type = other RNA
ggcaaaattcaggttgaga

SEQ ID NO: 41564 - RNA, 19 nt, synthetic construct
  misc_feature 1..19: note = siRNA sense sequence
  source 1..19: mol_type = other RNA
ctcaacctgaattttgcct

SEQ ID NO: 41565 - RNA, 19 nt, synthetic construct
  misc_feature 1..19: note = siRNA antisense sequence
  source 1..19: mol_type = other RNA
aggcaaaattcaggttgag

SEQ ID NO: 41566 - RNA, 19 nt, synthetic construct
  misc_feature 1..19: note = siRNA sense sequence
  source 1..19: mol_type = other RNA
tgaattttgcctctttcta

SEQ ID NO: 41567 - RNA, 19 nt, synthetic construct
  misc_feature 1..19: note = siRNA antisense sequence
  source 1..19: mol_type = other RNA
tagaaagaggcaaaattca

SEQ ID NO: 41568 - RNA, 19 nt, synthetic construct
  misc_feature 1..19: note = siRNA sense sequence
  source 1..19: mol_type = other RNA
gaattttgcctctttctaa

SEQ ID NO: 41569 - RNA, 19 nt, synthetic construct
  misc_feature 1..19: note = siRNA antisense sequence
  source 1..19: mol_type = other RNA
ttagaaagaggcaaaattc

SEQ ID NO: 41570 - RNA, 19 nt, synthetic construct
  misc_feature 1..19: note = siRNA sense sequence
  source 1..19: mol_type = other RNA
ttgcctctttctaatattc

SEQ ID NO: 41571 - RNA, 19 nt, synthetic construct
  misc_feature 1..19: note = siRNA antisense sequence
  source 1..19: mol_type = other RNA
gaatattagaaagaggcaa

SEQ ID NO: 41572 - RNA, 19 nt, synthetic construct
  misc_feature 1..19: note = siRNA sense sequence
  source 1..19: mol_type = other RNA
tgcctctttctaatattcc

SEQ ID NO: 41573 - RNA, 19 nt, synthetic construct
  misc_feature 1..19: note = siRNA antisense sequence
  source 1..19: mol_type = other RNA
ggaatattagaaagaggca

SEQ ID NO: 41574 - RNA, 19 nt, synthetic construct
  misc_feature 1..19: note = siRNA sense sequence
  source 1..19: mol_type = other RNA
gcctctttctaatattcca

SEQ ID NO: 41575 - RNA, 19 nt, synthetic construct
  misc_feature 1..19: note = siRNA antisense sequence
  source 1..19: mol_type = other RNA
tggaatattagaaagaggc

SEQ ID NO: 41576 - RNA, 19 nt, synthetic construct
  misc_feature 1..19: note = siRNA sense sequence
  source 1..19: mol_type = other RNA
cctctttctaatattccac

SEQ ID NO: 41577 - RNA, 19 nt, synthetic construct
  misc_feature 1..19: note = siRNA antisense sequence
  source 1..19: mol_type = other RNA
gtggaatattagaaagagg

SEQ ID NO: 41578 - RNA, 19 nt, synthetic construct
  misc_feature 1..19: note = siRNA sense sequence
  source 1..19: mol_type = other RNA
ctctttctaatattccact

SEQ ID NO: 41579 - RNA, 19 nt, synthetic construct
  misc_feature 1..19: note = siRNA antisense sequence
  source 1..19: mol_type = other RNA
agtggaatattagaaagag

SEQ ID NO: 41580 - RNA, 19 nt, synthetic construct
  misc_feature 1..19: note = siRNA sense sequence
  source 1..19: mol_type = other RNA
tctttctaatattccactc

SEQ ID NO: 41581 - RNA, 19 nt, synthetic construct
  misc_feature 1..19: note = siRNA antisense sequence
  source 1..19: mol_type = other RNA
gagtggaatattagaaaga

SEQ ID NO: 41582 - RNA, 19 nt, synthetic construct
  misc_feature 1..19: note = siRNA sense sequence
  source 1..19: mol_type = other RNA
ttctaatattccactctac

SEQ ID NO: 41583 - RNA, 19 nt, synthetic construct
  misc_feature 1..19: note = siRNA antisense sequence
  source 1..19: mol_type = other RNA
gtagagtggaatattagaa

SEQ ID NO: 41584 - RNA, 19 nt, synthetic construct
  misc_feature 1..19: note = siRNA sense sequence
  source 1..19: mol_type = other RNA
aatattccactctactaag

SEQ ID NO: 41585 - RNA, 19 nt, synthetic construct
  misc_feature 1..19: note = siRNA antisense sequence
  source 1..19: mol_type = other RNA
cttagtagagtggaatatt

SEQ ID NO: 41586 - RNA, 19 nt, synthetic construct
  misc_feature 1..19: note = siRNA sense sequence
  source 1..19: mol_type = other RNA
atattccactctactaagc

SEQ ID NO: 41587 - RNA, 19 nt, synthetic construct
  misc_feature 1..19: note = siRNA antisense sequence
  source 1..19: mol_type = other RNA
gcttagtagagtggaatat

SEQ ID NO: 41588 - RNA, 19 nt, synthetic construct
  misc_feature 1..19: note = siRNA sense sequence
  source 1..19: mol_type = other RNA
tattccactctactaagca

SEQ ID NO: 41589 - RNA, 19 nt, synthetic construct
  misc_feature 1..19: note = siRNA antisense sequence
  source 1..19: mol_type = other RNA
tgcttagtagagtggaata

SEQ ID NO: 41590 - RNA, 19 nt, synthetic construct
  misc_feature 1..19: note = siRNA sense sequence
  source 1..19: mol_type = other RNA
tccactctactaagcagat

SEQ ID NO: 41591 - RNA, 19 nt, synthetic construct
  misc_feature 1..19: note = siRNA antisense sequence
  source 1..19: mol_type = other RNA
atctgcttagtagagtgga

SEQ ID NO: 41592 - RNA, 19 nt, synthetic construct
  misc_feature 1..19: note = siRNA sense sequence
  source 1..19: mol_type = other RNA
ccactctactaagcagatt

SEQ ID NO: 41593 - RNA, 19 nt, synthetic construct
  misc_feature 1..19: note = siRNA antisense sequence
  source 1..19: mol_type = other RNA
aatctgcttagtagagtgg

SEQ ID NO: 41594 - RNA, 19 nt, synthetic construct
  misc_feature 1..19: note = siRNA sense sequence
  source 1..19: mol_type = other RNA
cactctactaagcagattt

SEQ ID NO: 41595 - RNA, 19 nt, synthetic construct
  misc_feature 1..19: note = siRNA antisense sequence
  source 1..19: mol_type = other RNA
aaatctgcttagtagagtg

SEQ ID NO: 41596 - RNA, 19 nt, synthetic construct
  misc_feature 1..19: note = siRNA sense sequence
  source 1..19: mol_type = other RNA
actctactaagcagattta

SEQ ID NO: 41597 - RNA, 19 nt, synthetic construct
  misc_feature 1..19: note = siRNA antisense sequence
  source 1..19: mol_type = other RNA
taaatctgcttagtagagt

SEQ ID NO: 41598 - RNA, 19 nt, synthetic construct
  misc_feature 1..19: note = siRNA sense sequence
  source 1..19: mol_type = other RNA
taagcagatttagaagttc

SEQ ID NO: 41599 - RNA, 19 nt, synthetic construct
  misc_feature 1..19: note = siRNA antisense sequence
  source 1..19: mol_type = other RNA
gaacttctaaatctgctta

SEQ ID NO: 41600 - RNA, 19 nt, synthetic construct
  misc_feature 1..19: note = siRNA sense sequence
  source 1..19: mol_type = other RNA
aagcagatttagaagttct

SEQ ID NO: 41601 - RNA, 19 nt, synthetic construct
  misc_feature 1..19: note = siRNA antisense sequence
  source 1..19: mol_type = other RNA
agaacttctaaatctgctt

SEQ ID NO: 41602 - RNA, 19 nt, synthetic construct
  misc_feature 1..19: note = siRNA sense sequence
  source 1..19: mol_type = other RNA
agcagatttagaagttctt

SEQ ID NO: 41603 - RNA, 19 nt, synthetic construct
  misc_feature 1..19: note = siRNA antisense sequence
  source 1..19: mol_type = other RNA
aagaacttctaaatctgct

SEQ ID NO: 41604 - RNA, 19 nt, synthetic construct
  misc_feature 1..19: note = siRNA sense sequence
  source 1..19: mol_type = other RNA
gcagatttagaagttcttg

SEQ ID NO: 41605 - RNA, 19 nt, synthetic construct
  misc_feature 1..19: note = siRNA antisense sequence
  source 1..19: mol_type = other RNA
caagaacttctaaatctgc

SEQ ID NO: 41606 - RNA, 19 nt, synthetic construct
  misc_feature 1..19: note = siRNA sense sequence
  source 1..19: mol_type = other RNA
cagatttagaagttcttgt

SEQ ID NO: 41607 - RNA, 19 nt, synthetic construct
  misc_feature 1..19: note = siRNA antisense sequence
  source 1..19: mol_type = other RNA
acaagaacttctaaatctg

SEQ ID NO: 41608 - RNA, 19 nt, synthetic construct
  misc_feature 1..19: note = siRNA sense sequence
  source 1..19: mol_type = other RNA
tcttgccaatattgttagg

SEQ ID NO: 41609 - RNA, 19 nt, synthetic construct
  misc_feature 1..19: note = siRNA antisense sequence
  source 1..19: mol_type = other RNA
cctaacaatattggcaaga

SEQ ID NO: 41610 - RNA, 19 nt, synthetic construct
  misc_feature 1..19: note = siRNA sense sequence
  source 1..19: mol_type = other RNA
cttgccaatattgttaggc

SEQ ID NO: 41611 - RNA, 19 nt, synthetic construct
  misc_feature 1..19: note = siRNA antisense sequence
  source 1..19: mol_type = other RNA
gcctaacaatattggcaag

SEQ ID NO: 41612 - RNA, 19 nt, synthetic construct
  misc_feature 1..19: note = siRNA sense sequence
  source 1..19: mol_type = other RNA
ttgccaatattgttaggct

SEQ ID NO: 41613 - RNA, 19 nt, synthetic construct
  misc_feature 1..19: note = siRNA antisense sequence
  source 1..19: mol_type = other RNA
agcctaacaatattggcaa

SEQ ID NO: 41614 - RNA, 19 nt, synthetic construct
  misc_feature 1..19: note = siRNA sense sequence
  source 1..19: mol_type = other RNA
gccaatattgttaggctgg

SEQ ID NO: 41615 - RNA, 19 nt, synthetic construct
  misc_feature 1..19: note = siRNA antisense sequence
  source 1..19: mol_type = other RNA
ccagcctaacaatattggc

SEQ ID NO: 41616 - RNA, 19 nt, synthetic construct
  misc_feature 1..19: note = siRNA sense sequence
  source 1..19: mol_type = other RNA
ccaatattgttaggctggc

SEQ ID NO: 41617 - RNA, 19 nt, synthetic construct
  misc_feature 1..19: note = siRNA antisense sequence
  source 1..19: mol_type = other RNA
gccagcctaacaatattgg

SEQ ID NO: 41618 - RNA, 19 nt, synthetic construct
  misc_feature 1..19: note = siRNA sense sequence
  source 1..19: mol_type = other RNA
caatattgttaggctggca

SEQ ID NO: 41619 - RNA, 19 nt, synthetic construct
  misc_feature 1..19: note = siRNA antisense sequence
  source 1..19: mol_type = other RNA
tgccagcctaacaatattg

SEQ ID NO: 41620 - RNA, 19 nt, synthetic construct
  misc_feature 1..19: note = siRNA sense sequence
  source 1..19: mol_type = other RNA
aatattgttaggctggcat

SEQ ID NO: 41621 - RNA, 19 nt, synthetic construct
  misc_feature 1..19: note = siRNA antisense sequence
  source 1..19: mol_type = other RNA
atgccagcctaacaatatt

SEQ ID NO: 41622 - RNA, 19 nt, synthetic construct
  misc_feature 1..19: note = siRNA sense sequence
  source 1..19: mol_type = other RNA
atattgttaggctggcatg

SEQ ID NO: 41623 - RNA, 19 nt, synthetic construct
  misc_feature 1..19: note = siRNA antisense sequence
  source 1..19: mol_type = other RNA
catgccagcctaacaatat

SEQ ID NO: 41624 - RNA, 19 nt, synthetic construct
  misc_feature 1..19: note = siRNA sense sequence
  source 1..19: mol_type = other RNA
tattgttaggctggcatgc

SEQ ID NO: 41625 - RNA, 19 nt, synthetic construct
  misc_feature 1..19: note = siRNA antisense sequence
  source 1..19: mol_type = other RNA
gcatgccagcctaacaata

SEQ ID NO: 41626 - RNA, 19 nt, synthetic construct
  misc_feature 1..19: note = siRNA sense sequence
  source 1..19: mol_type = other RNA
attgttaggctggcatgct

SEQ ID NO: 41627 - RNA, 19 nt, synthetic construct
  misc_feature 1..19: note = siRNA antisense sequence
  source 1..19: mol_type = other RNA
agcatgccagcctaacaat

SEQ ID NO: 41628 - RNA, 19 nt, synthetic construct
  misc_feature 1..19: note = siRNA sense sequence
  source 1..19: mol_type = other RNA
ttgttaggctggcatgctt

SEQ ID NO: 41629 - RNA, 19 nt, synthetic construct
  misc_feature 1..19: note = siRNA antisense sequence
  source 1..19: mol_type = other RNA
aagcatgccagcctaacaa

SEQ ID NO: 41630 - RNA, 19 nt, synthetic construct
  misc_feature 1..19: note = siRNA sense sequence
  source 1..19: mol_type = other RNA
tgttaggctggcatgcttc

SEQ ID NO: 41631 - RNA, 19 nt, synthetic construct
  misc_feature 1..19: note = siRNA antisense sequence
  source 1..19: mol_type = other RNA
gaagcatgccagcctaaca

SEQ ID NO: 41632 - RNA, 19 nt, synthetic construct
  misc_feature 1..19: note = siRNA sense sequence
  source 1..19: mol_type = other RNA
gcttcatgcttcaggaccc

SEQ ID NO: 41633 - RNA, 19 nt, synthetic construct
  misc_feature 1..19: note = siRNA antisense sequence
  source 1..19: mol_type = other RNA
gggtcctgaagcatgaagc

SEQ ID NO: 41634 - RNA, 19 nt, synthetic construct
  misc_feature 1..19: note = siRNA sense sequence
  source 1..19: mol_type = other RNA
cttcatgcttcaggaccca

SEQ ID NO: 41635 - RNA, 19 nt, synthetic construct
  misc_feature 1..19: note = siRNA antisense sequence
  source 1..19: mol_type = other RNA
tgggtcctgaagcatgaag

SEQ ID NO: 41636 - RNA, 19 nt, synthetic construct
  misc_feature 1..19: note = siRNA sense sequence
  source 1..19: mol_type = other RNA
ttcatgcttcaggacccaa

SEQ ID NO: 41637 - RNA, 19 nt, synthetic construct
  misc_feature 1..19: note = siRNA antisense sequence
  source 1..19: mol_type = other RNA
ttgggtcctgaagcatgaa

SEQ ID NO: 41638 - RNA, 19 nt, synthetic construct
  misc_feature 1..19: note = siRNA sense sequence
  source 1..19: mol_type = other RNA
tcatgcttcaggacccaac

SEQ ID NO: 41639 - RNA, 19 nt, synthetic construct
  misc_feature 1..19: note = siRNA antisense sequence
  source 1..19: mol_type = other RNA
gttgggtcctgaagcatga

SEQ ID NO: 41640 - RNA, 19 nt, synthetic construct
  misc_feature 1..19: note = siRNA sense sequence
  source 1..19: mol_type = other RNA
tcccttcagaatgtcaaat

SEQ ID NO: 41641 - RNA, 19 nt, synthetic construct
  misc_feature 1..19: note = siRNA antisense sequence
  source 1..19: mol_type = other RNA
atttgacattctgaaggga

SEQ ID NO: 41642 - RNA, 19 nt, synthetic construct
  misc_feature 1..19: note = siRNA sense sequence
  source 1..19: mol_type = other RNA
cccttcagaatgtcaaatg

SEQ ID NO: 41643 - RNA, 19 nt, synthetic construct
  misc_feature 1..19: note = siRNA antisense sequence
  source 1..19: mol_type = other RNA
catttgacattctgaaggg

SEQ ID NO: 41644 - RNA, 19 nt, synthetic construct
  misc_feature 1..19: note = siRNA sense sequence
  source 1..19: mol_type = other RNA
ctttactgtgtttccttta

SEQ ID NO: 41645 - RNA, 19 nt, synthetic construct
  misc_feature 1..19: note = siRNA antisense sequence
  source 1..19: mol_type = other RNA
taaaggaaacacagtaaag

SEQ ID NO: 41646 - RNA, 19 nt, synthetic construct
  misc_feature 1..19: note = siRNA sense sequence
  source 1..19: mol_type = other RNA
ctgtgtttcctttatcaaa

SEQ ID NO: 41647 - RNA, 19 nt, synthetic construct
  misc_feature 1..19: note = siRNA antisense sequence
  source 1..19: mol_type = other RNA
tttgataaaggaaacacag

SEQ ID NO: 41648 - RNA, 19 nt, synthetic construct
  misc_feature 1..19: note = siRNA sense sequence
  source 1..19: mol_type = other RNA
aactttctggacactgctc

SEQ ID NO: 41649 - RNA, 19 nt, synthetic construct
  misc_feature 1..19: note = siRNA antisense sequence
  source 1..19: mol_type = other RNA
gagcagtgtccagaaagtt

SEQ ID NO: 41650 - RNA, 19 nt, synthetic construct
  misc_feature 1..19: note = siRNA sense sequence
  source 1..19: mol_type = other RNA
actttctggacactgctct

SEQ ID NO: 41651 - RNA, 19 nt, synthetic construct
  misc_feature 1..19: note = siRNA antisense sequence
  source 1..19: mol_type = other RNA
agagcagtgtccagaaagt

SEQ ID NO: 41652 - RNA, 19 nt, synthetic construct
  misc_feature 1..19: note = siRNA sense sequence
  source 1..19: mol_type = other RNA
ctttctggacactgctcta

SEQ ID NO: 41653 - RNA, 19 nt, synthetic construct
  misc_feature 1..19: note = siRNA antisense sequence
  source 1..19: mol_type = other RNA
tagagcagtgtccagaaag

SEQ ID NO: 41654 - RNA, 19 nt, synthetic construct
  misc_feature 1..19: note = siRNA sense sequence
  source 1..19: mol_type = other RNA
tttctggacactgctctaa

SEQ ID NO: 41655 - RNA, 19 nt, synthetic construct
  misc_feature 1..19: note = siRNA antisense sequence
  source 1..19: mol_type = other RNA
ttagagcagtgtccagaaa

SEQ ID NO: 41656 - RNA, 19 nt, synthetic construct
  misc_feature 1..19: note = siRNA sense sequence
  source 1..19: mol_type = other RNA
ctggacactgctctaatat

SEQ ID NO: 41657 - RNA, 19 nt, synthetic construct
  misc_feature 1..19: note = siRNA antisense sequence
  source 1..19: mol_type = other RNA
atattagagcagtgtccag

SEQ ID NO: 41658 - RNA, 19 nt, synthetic construct
  misc_feature 1..19: note = siRNA sense sequence
  source 1..19: mol_type = other RNA
tggacactgctctaatatt

SEQ ID NO: 41659 - RNA, 19 nt, synthetic construct
  misc_feature 1..19: note = siRNA antisense sequence
  source 1..19: mol_type = other RNA
aatattagagcagtgtcca

SEQ ID NO: 41660 - RNA, 19 nt, synthetic construct
  misc_feature 1..19: note = siRNA sense sequence
  source 1..19: mol_type = other RNA
ggacactgctctaatattc

SEQ ID NO: 41661 - RNA, 19 nt, synthetic construct
  misc_feature 1..19: note = siRNA antisense sequence
  source 1..19: mol_type = other RNA
gaatattagagcagtgtcc

SEQ ID NO: 41662 - RNA, 19 nt, synthetic construct
  misc_feature 1..19: note = siRNA sense sequence
  source 1..19: mol_type = other RNA
gacactgctctaatattcc

SEQ ID NO: 41663 - RNA, 19 nt, synthetic construct
  misc_feature 1..19: note = siRNA antisense sequence
  source 1..19: mol_type = other RNA
ggaatattagagcagtgtc

SEQ ID NO: 41664 - RNA, 19 nt, synthetic construct
  misc_feature 1..19: note = siRNA sense sequence
  source 1..19: mol_type = other RNA
actgctctaatattcctct

SEQ ID NO: 41665 - RNA, 19 nt, synthetic construct
  misc_feature 1..19: note = siRNA antisense sequence
  source 1..19: mol_type = other RNA
agaggaatattagagcagt

SEQ ID NO: 41666 - RNA, 19 nt, synthetic construct
  misc_feature 1..19: note = siRNA sense sequence
  source 1..19: mol_type = other RNA
taatattcctctagtttcc

SEQ ID NO: 41667 - RNA, 19 nt, synthetic construct
  misc_feature 1..19: note = siRNA antisense sequence
  source 1..19: mol_type = other RNA
ggaaactagaggaatatta

SEQ ID NO: 41668 - RNA, 19 nt, synthetic construct
  misc_feature 1..19: note = siRNA sense sequence
  source 1..19: mol_type = other RNA
attcctctagtttcctttg

SEQ ID NO: 41669 - RNA, 19 nt, synthetic construct
  misc_feature 1..19: note = siRNA antisense sequence
  source 1..19: mol_type = other RNA
caaaggaaactagaggaat

SEQ ID NO: 41670 - RNA, 19 nt, synthetic construct
  misc_feature 1..19: note = siRNA sense sequence
  source 1..19: mol_type = other RNA
ttcctctagtttcctttgt

SEQ ID NO: 41671 - RNA, 19 nt, synthetic construct
  misc_feature 1..19: note = siRNA antisense sequence
  source 1..19: mol_type = other RNA
acaaaggaaactagaggaa

SEQ ID NO: 41672 - RNA, 19 nt, synthetic construct
  misc_feature 1..19: note = siRNA sense sequence
  source 1..19: mol_type = other RNA
tcctctagtttcctttgtc

SEQ ID NO: 41673 - RNA, 19 nt, synthetic construct
  misc_feature 1..19: note = siRNA antisense sequence
  source 1..19: mol_type = other RNA
gacaaaggaaactagagga

SEQ ID NO: 41674 - RNA, 19 nt, synthetic construct
  misc_feature 1..19: note = siRNA sense sequence
  source 1..19: mol_type = other RNA
cctctagtttcctttgtca

SEQ ID NO: 41675 - RNA, 19 nt, synthetic construct
  misc_feature 1..19: note = siRNA antisense sequence
  source 1..19: mol_type = other RNA
tgacaaaggaaactagagg

SEQ ID NO: 41676 - RNA, 19 nt, synthetic construct
  misc_feature 1..19: note = siRNA sense sequence
  source 1..19: mol_type = other RNA
tagtttcctttgtcaccca

SEQ ID NO: 41677 - RNA, 19 nt, synthetic construct
  misc_feature 1..19: note = siRNA antisense sequence
  source 1..19: mol_type = other RNA
tgggtgacaaaggaaacta

SEQ ID NO: 41678 - RNA, 19 nt, synthetic construct
  misc_feature 1..19: note = siRNA sense sequence
  source 1..19: mol_type = other RNA
agtttcctttgtcacccaa

SEQ ID NO: 41679 - RNA, 19 nt, synthetic construct
  misc_feature 1..19: note = siRNA antisense sequence
  source 1..19: mol_type = other RNA
ttgggtgacaaaggaaact

SEQ ID NO: 41680 - RNA, 19 nt, synthetic construct
  misc_feature 1..19: note = siRNA sense sequence
  source 1..19: mol_type = other RNA
tgtcacccaaaggatgtcc

SEQ ID NO: 41681 - RNA, 19 nt, synthetic construct
  misc_feature 1..19: note = siRNA antisense sequence
  source 1..19: mol_type = other RNA
ggacatcctttgggtgaca

SEQ ID NO: 41682 - RNA, 19 nt, synthetic construct
  misc_feature 1..19: note = siRNA sense sequence
  source 1..19: mol_type = other RNA
tcacccaaaggatgtcctc

SEQ ID NO: 41683 - RNA, 19 nt, synthetic construct
  misc_feature 1..19: note = siRNA antisense sequence
  source 1..19: mol_type = other RNA
gaggacatcctttgggtga

SEQ ID NO: 41684 - RNA, 19 nt, synthetic construct
  misc_feature 1..19: note = siRNA sense sequence
  source 1..19: mol_type = other RNA
gatgtcctcatgattttgg

SEQ ID NO: 41685 - RNA, 19 nt, synthetic construct
  misc_feature 1..19: note = siRNA antisense sequence
  source 1..19: mol_type = other RNA
ccaaaatcatgaggacatc

SEQ ID NO: 41686 - RNA, 19 nt, synthetic construct
  misc_feature 1..19: note = siRNA sense sequence
  source 1..19: mol_type = other RNA
atgtcctcatgattttgga

SEQ ID NO: 41687 - RNA, 19 nt, synthetic construct
  misc_feature 1..19: note = siRNA antisense sequence
  source 1..19: mol_type = other RNA
tccaaaatcatgaggacat

SEQ ID NO: 41688 - RNA, 19 nt, synthetic construct
  misc_feature 1..19: note = siRNA sense sequence
  source 1..19: mol_type = other RNA
gtcctcatgattttggaag

SEQ ID NO: 41689 - RNA, 19 nt, synthetic construct
  misc_feature 1..19: note = siRNA antisense sequence
  source 1..19: mol_type = other RNA
cttccaaaatcatgaggac

SEQ ID NO: 41690 - RNA, 19 nt, synthetic construct
  misc_feature 1..19: note = siRNA sense sequence
  source 1..19: mol_type = other RNA
tcctcatgattttggaagt

SEQ ID NO: 41691 - RNA, 19 nt, synthetic construct
  misc_feature 1..19: note = siRNA antisense sequence
  source 1..19: mol_type = other RNA
acttccaaaatcatgagga

SEQ ID NO: 41692 - RNA, 19 nt, synthetic construct
  misc_feature 1..19: note = siRNA sense sequence
  source 1..19: mol_type = other RNA
cctcatgattttggaagtc

SEQ ID NO: 41693 - RNA, 19 nt, synthetic construct
  misc_feature 1..19: note = siRNA antisense sequence
  source 1..19: mol_type = other RNA
gacttccaaaatcatgagg

SEQ ID NO: 41694 - RNA, 19 nt, synthetic construct
  misc_feature 1..19: note = siRNA sense sequence
  source 1..19: mol_type = other RNA
ctcatgattttggaagtca

SEQ ID NO: 41695 - RNA, 19 nt, synthetic construct
  misc_feature 1..19: note = siRNA antisense sequence
  source 1..19: mol_type = other RNA
tgacttccaaaatcatgag

SEQ ID NO: 41696 - RNA, 19 nt, synthetic construct
  misc_feature 1..19: note = siRNA sense sequence
  source 1..19: mol_type = other RNA
tgattttggaagtcatggt

SEQ ID NO: 41697 - RNA, 19 nt, synthetic construct
  misc_feature 1..19: note = siRNA antisense sequence
  source 1..19: mol_type = other RNA
accatgacttccaaaatca

SEQ ID NO: 41698 - RNA, 19 nt, synthetic construct
  misc_feature 1..19: note = siRNA sense sequence
  source 1..19: mol_type = other RNA
gattttggaagtcatggtc

SEQ ID NO: 41699 - RNA, 19 nt, synthetic construct
  misc_feature 1..19: note = siRNA antisense sequence
  source 1..19: mol_type = other RNA
gaccatgacttccaaaatc

SEQ ID NO: 41700 - RNA, 19 nt, synthetic construct
  misc_feature 1..19: note = siRNA sense sequence
  source 1..19: mol_type = other RNA
attttggaagtcatggtca

SEQ ID NO: 41701 - RNA, 19 nt, synthetic construct
  misc_feature 1..19: note = siRNA antisense sequence
  source 1..19: mol_type = other RNA
tgaccatgacttccaaaat

SEQ ID NO: 41702 - RNA, 19 nt, synthetic construct
  misc_feature 1..19: note = siRNA sense sequence
  source 1..19: mol_type = other RNA
actggtgtttgagttttct

SEQ ID NO: 41703 - RNA, 19 nt, synthetic construct
  misc_feature 1..19: note = siRNA antisense sequence
  source 1..19: mol_type = other RNA
agaaaactcaaacaccagt

SEQ ID NO: 41704 - RNA, 19 nt, synthetic construct
  misc_feature 1..19: note = siRNA sense sequence
  source 1..19: mol_type = other RNA
ctggtgtttgagttttctt

SEQ ID NO: 41705 - RNA, 19 nt, synthetic construct
  misc_feature 1..19: note = siRNA antisense sequence
  source 1..19: mol_type = other RNA
aagaaaactcaaacaccag

SEQ ID NO: 41706 - RNA, 19 nt, synthetic construct
  misc_feature 1..19: note = siRNA sense sequence
  source 1..19: mol_type = other RNA
gtttgagttttcttttctg

SEQ ID NO: 41707 - RNA, 19 nt, synthetic construct
  misc_feature 1..19: note = siRNA antisense sequence
  source 1..19: mol_type = other RNA
cagaaaagaaaactcaaac

SEQ ID NO: 41708 - RNA, 19 nt, synthetic construct
  misc_feature 1..19: note = siRNA sense sequence
  source 1..19: mol_type = other RNA
gttttcttttctgatcttc

SEQ ID NO: 41709 - RNA, 19 nt, synthetic construct
  misc_feature 1..19: note = siRNA antisense sequence
  source 1..19: mol_type = other RNA
gaagatcagaaaagaaaac

SEQ ID NO: 41710 - RNA, 19 nt, synthetic construct
  misc_feature 1..19: note = siRNA sense sequence
  source 1..19: mol_type = other RNA
ttcttttctgatcttctac

SEQ ID NO: 41711 - RNA, 19 nt, synthetic construct
  misc_feature 1..19: note = siRNA antisense sequence
  source 1..19: mol_type = other RNA
gtagaagatcagaaaagaa

SEQ ID NO: 41712 - RNA, 19 nt, synthetic construct
  misc_feature 1..19: note = siRNA sense sequence
  source 1..19: mol_type = other RNA
tttctgatcttctacccat

SEQ ID NO: 41713 - RNA, 19 nt, synthetic construct
  misc_feature 1..19: note = siRNA antisense sequence
  source 1..19: mol_type = other RNA
atgggtagaagatcagaaa

SEQ ID NO: 41714 - RNA, 19 nt, synthetic construct
  misc_feature 1..19: note = siRNA sense sequence
  source 1..19: mol_type = other RNA
tctgatcttctacccattt

SEQ ID NO: 41715 - RNA, 19 nt, synthetic construct
  misc_feature 1..19: note = siRNA antisense sequence
  source 1..19: mol_type = other RNA
aaatgggtagaagatcaga

SEQ ID NO: 41716 - RNA, 19 nt, synthetic construct
  misc_feature 1..19: note = siRNA sense sequence
  source 1..19: mol_type = other RNA
aaaatcgtgtttcatcact

SEQ ID NO: 41717 - RNA, 19 nt, synthetic construct
  misc_feature 1..19: note = siRNA antisense sequence
  source 1..19: mol_type = other RNA
agtgatgaaacacgatttt

SEQ ID NO: 41718 - RNA, 19 nt, synthetic construct
  misc_feature 1..19: note = siRNA sense sequence
  source 1..19: mol_type = other RNA
aaatcgtgtttcatcactg

SEQ ID NO: 41719 - RNA, 19 nt, synthetic construct
  misc_feature 1..19: note = siRNA antisense sequence
  source 1..19: mol_type = other RNA
cagtgatgaaacacgattt

SEQ ID NO: 41720 - RNA, 19 nt, synthetic construct
  misc_feature 1..19: note = siRNA sense sequence
  source 1..19: mol_type = other RNA
cgtgtttcatcactggtca

SEQ ID NO: 41721 - RNA, 19 nt, synthetic construct
  misc_feature 1..19: note = siRNA antisense sequence
  source 1..19: mol_type = other RNA
tgaccagtgatgaaacacg

SEQ ID NO: 41722 - RNA, 19 nt, synthetic construct
  misc_feature 1..19: note = siRNA sense sequence
  source 1..19: mol_type = other RNA
gtgtttcatcactggtcat

SEQ ID NO: 41723 - RNA, 19 nt, synthetic construct
  misc_feature 1..19: note = siRNA antisense sequence
  source 1..19: mol_type = other RNA
atgaccagtgatgaaacac

SEQ ID NO: 41724 - RNA, 19 nt, synthetic construct
  misc_feature 1..19: note = siRNA sense sequence
  source 1..19: mol_type = other RNA
tgtttcatcactggtcatt

SEQ ID NO: 41725 - RNA, 19 nt, synthetic construct
  misc_feature 1..19: note = siRNA antisense sequence
  source 1..19: mol_type = other RNA
aatgaccagtgatgaaaca

SEQ ID NO: 41726 - RNA, 19 nt, synthetic construct
  misc_feature 1..19: note = siRNA sense sequence
  source 1..19: mol_type = other RNA
gtttcatcactggtcattt

SEQ ID NO: 41727 - RNA, 19 nt, synthetic construct
  misc_feature 1..19: note = siRNA antisense sequence
  source 1..19: mol_type = other RNA
aaatgaccagtgatgaaac

SEQ ID NO: 41728 - RNA, 19 nt, synthetic construct
  misc_feature 1..19: note = siRNA sense sequence
  source 1..19: mol_type = other RNA
tttcatcactggtcattta

SEQ ID NO: 41729 - RNA, 19 nt, synthetic construct
  misc_feature 1..19: note = siRNA antisense sequence
  source 1..19: mol_type = other RNA
taaatgaccagtgatgaaa

SEQ ID NO: 41730 - RNA, 19 nt, synthetic construct
  misc_feature 1..19: note = siRNA sense sequence
  source 1..19: mol_type = other RNA
aaagcaatcccacattctc

SEQ ID NO: 41731 - RNA, 19 nt, synthetic construct
  misc_feature 1..19: note = siRNA antisense sequence
  source 1..19: mol_type = other RNA
gagaatgtgggattgcttt

SEQ ID NO: 41732 - RNA, 19 nt, synthetic construct
  misc_feature 1..19: note = siRNA sense sequence
  source 1..19: mol_type = other RNA
aagcaatcccacattctca

SEQ ID NO: 41733 - RNA, 19 nt, synthetic construct
  misc_feature 1..19: note = siRNA antisense sequence
  source 1..19: mol_type = other RNA
tgagaatgtgggattgctt

SEQ ID NO: 41734 - RNA, 19 nt, synthetic construct
  misc_feature 1..19: note = siRNA sense sequence
  source 1..19: mol_type = other RNA
agcaatcccacattctcat

SEQ ID NO: 41735 - RNA, 19 nt, synthetic construct
  misc_feature 1..19: note = siRNA antisense sequence
  source 1..19: mol_type = other RNA
atgagaatgtgggattgct

SEQ ID NO: 41736 - RNA, 19 nt, synthetic construct
  misc_feature 1..19: note = siRNA sense sequence
  source 1..19: mol_type = other RNA
gcaatcccacattctcatt

SEQ ID NO: 41737 - RNA, 19 nt, synthetic construct
  misc_feature 1..19: note = siRNA antisense sequence
  source 1..19: mol_type = other RNA
aatgagaatgtgggattgc

SEQ ID NO: 41738 - RNA, 19 nt, synthetic construct
  misc_feature 1..19: note = siRNA sense sequence
  source 1..19: mol_type = other RNA
aatcccacattctcattgc

SEQ ID NO: 41739 - RNA, 19 nt, synthetic construct
  misc_feature 1..19: note = siRNA antisense sequence
  source 1..19: mol_type = other RNA
gcaatgagaatgtgggatt

SEQ ID NO: 41740 - RNA, 19 nt, synthetic construct
  misc_feature 1..19: note = siRNA sense sequence
  source 1..19: mol_type = other RNA
atcccacattctcattgcc

SEQ ID NO: 41741 - RNA, 19 nt, synthetic construct
  misc_feature 1..19: note = siRNA antisense sequence
  source 1..19: mol_type = other RNA
ggcaatgagaatgtgggat

SEQ ID NO: 41742 - RNA, 19 nt, synthetic construct
  misc_feature 1..19: note = siRNA sense sequence
  source 1..19: mol_type = other RNA
tcccacattctcattgccc

SEQ ID NO: 41743 - RNA, 19 nt, synthetic construct
  misc_feature 1..19: note = siRNA antisense sequence
  source 1..19: mol_type = other RNA
gggcaatgagaatgtggga

SEQ ID NO: 41744 - RNA, 19 nt, synthetic construct
  misc_feature 1..19: note = siRNA sense sequence
  source 1..19: mol_type = other RNA
cccacattctcattgccct

SEQ ID NO: 41745 - RNA, 19 nt, synthetic construct
  misc_feature 1..19: note = siRNA antisense sequence
  source 1..19: mol_type = other RNA
agggcaatgagaatgtggg

SEQ ID NO: 41746 - RNA, 19 nt, synthetic construct
  misc_feature 1..19: note = siRNA sense sequence
  source 1..19: mol_type = other RNA
ccacattctcattgccctg

SEQ ID NO: 41747 - RNA, 19 nt, synthetic construct
  misc_feature 1..19: note = siRNA antisense sequence
  source 1..19: mol_type = other RNA
cagggcaatgagaatgtgg

SEQ ID NO: 41748 - RNA, 19 nt, synthetic construct
  misc_feature 1..19: note = siRNA sense sequence
  source 1..19: mol_type = other RNA
attctcattgccctgctag

SEQ ID NO: 41749 - RNA, 19 nt, synthetic construct
  misc_feature 1..19: note = siRNA antisense sequence
  source 1..19: mol_type = other RNA
ctagcagggcaatgagaat

SEQ ID NO: 41750 - RNA, 19 nt, synthetic construct
  misc_feature 1..19: note = siRNA sense sequence
  source 1..19: mol_type = other RNA
ttctcattgccctgctagt

SEQ ID NO: 41751 - RNA, 19 nt, synthetic construct
  misc_feature 1..19: note = siRNA antisense sequence
  source 1..19: mol_type = other RNA
actagcagggcaatgagaa

SEQ ID NO: 41752 - RNA, 19 nt, synthetic construct
  misc_feature 1..19: note = siRNA sense sequence
  source 1..19: mol_type = other RNA
cattgccctgctagttctg

SEQ ID NO: 41753 - RNA, 19 nt, synthetic construct
  misc_feature 1..19: note = siRNA antisense sequence
  source 1..19: mol_type = other RNA
cagaactagcagggcaatg

SEQ ID NO: 41754 - RNA, 19 nt, synthetic construct
  misc_feature 1..19: note = siRNA sense sequence
  source 1..19: mol_type = other RNA
attgccctgctagttctgc

SEQ ID NO: 41755 - RNA, 19 nt, synthetic construct
  misc_feature 1..19: note = siRNA antisense sequence
  source 1..19: mol_type = other RNA
gcagaactagcagggcaat

SEQ ID NO: 41756 - RNA, 19 nt, synthetic construct
  misc_feature 1..19: note = siRNA sense sequence
  source 1..19: mol_type = other RNA
ttgccctgctagttctgca

SEQ ID NO: 41757 - RNA, 19 nt, synthetic construct
  misc_feature 1..19: note = siRNA antisense sequence
  source 1..19: mol_type = other RNA
tgcagaactagcagggcaa

SEQ ID NO: 41758 - RNA, 19 nt, synthetic construct
  misc_feature 1..19: note = siRNA sense sequence
  source 1..19: mol_type = other RNA
tgccctgctagttctgcat

SEQ ID NO: 41759 - RNA, 19 nt, synthetic construct
  misc_feature 1..19: note = siRNA antisense sequence
  source 1..19: mol_type = other RNA
atgcagaactagcagggca

SEQ ID NO: 41760 - RNA, 19 nt, synthetic construct
  misc_feature 1..19: note = siRNA sense sequence
  source 1..19: mol_type = other RNA
gccctgctagttctgcatt

SEQ ID NO: 41761 - RNA, 19 nt, synthetic construct
  misc_feature 1..19: note = siRNA antisense sequence
  source 1..19: mol_type = other RNA
aatgcagaactagcagggc

SEQ ID NO: 41762 - RNA, 19 nt, synthetic construct
  misc_feature 1..19: note = siRNA sense sequence
  source 1..19: mol_type = other RNA
ccctgctagttctgcattc

SEQ ID NO: 41763 - RNA, 19 nt, synthetic construct
  misc_feature 1..19: note = siRNA antisense sequence
  source 1..19: mol_type = other RNA
gaatgcagaactagcaggg

SEQ ID NO: 41764 - RNA, 19 nt, synthetic construct
  misc_feature 1..19: note = siRNA sense sequence
  source 1..19: mol_type = other RNA
cctgctagttctgcattct

SEQ ID NO: 41765 - RNA, 19 nt, synthetic construct
  misc_feature 1..19: note = siRNA antisense sequence
  source 1..19: mol_type = other RNA
agaatgcagaactagcagg

SEQ ID NO: 41766 - RNA, 19 nt, synthetic construct
  misc_feature 1..19: note = siRNA sense sequence
  source 1..19: mol_type = other RNA
ctgctagttctgcattctt

SEQ ID NO: 41767 - RNA, 19 nt, synthetic construct
  misc_feature 1..19: note = siRNA antisense sequence
  source 1..19: mol_type = other RNA
aagaatgcagaactagcag

SEQ ID NO: 41768 - RNA, 19 nt, synthetic construct
  misc_feature 1..19: note = siRNA sense sequence
  source 1..19: mol_type = other RNA
gttctgcattctttcacag

SEQ ID NO: 41769 - RNA, 19 nt, synthetic construct
  misc_feature 1..19: note = siRNA antisense sequence
  source 1..19: mol_type = other RNA
ctgtgaaagaatgcagaac

SEQ ID NO: 41770 - RNA, 19 nt, synthetic construct
  misc_feature 1..19: note = siRNA sense sequence
  source 1..19: mol_type = other RNA
aaatagtttctgggacatg

SEQ ID NO: 41771 - RNA, 19 nt, synthetic construct
  misc_feature 1..19: note = siRNA antisense sequence
  source 1..19: mol_type = other RNA
catgtcccagaaactattt

SEQ ID NO: 41772 - RNA, 19 nt, synthetic construct
  misc_feature 1..19: note = siRNA sense sequence
  source 1..19: mol_type = other RNA
atagtttctgggacatgag

SEQ ID NO: 41773 - RNA, 19 nt, synthetic construct
  misc_feature 1..19: note = siRNA antisense sequence
  source 1..19: mol_type = other RNA
ctcatgtcccagaaactat

SEQ ID NO: 41774 - RNA, 19 nt, synthetic construct
  misc_feature 1..19: note = siRNA sense sequence
  source 1..19: mol_type = other RNA
ttctgggacatgagccaac

SEQ ID NO: 41775 - RNA, 19 nt, synthetic construct
  misc_feature 1..19: note = siRNA antisense sequence
  source 1..19: mol_type = other RNA
gttggctcatgtcccagaa

SEQ ID NO: 41776 - RNA, 19 nt, synthetic construct
  misc_feature 1..19: note = siRNA sense sequence
  source 1..19: mol_type = other RNA
tctgggacatgagccaact

SEQ ID NO: 41777 - RNA, 19 nt, synthetic construct
  misc_feature 1..19: note = siRNA antisense sequence
  source 1..19: mol_type = other RNA
agttggctcatgtcccaga

SEQ ID NO: 41778 - RNA, 19 nt, synthetic construct
  misc_feature 1..19: note = siRNA sense sequence
  source 1..19: mol_type = other RNA
ggacatgagccaactcttc

SEQ ID NO: 41779 - RNA, 19 nt, synthetic construct
  misc_feature 1..19: note = siRNA antisense sequence
  source 1..19: mol_type = other RNA
gaagagttggctcatgtcc

SEQ ID NO: 41780 - RNA, 19 nt, synthetic construct
  misc_feature 1..19: note = siRNA sense sequence
  source 1..19: mol_type = other RNA
atgagccaactcttcagcc

SEQ ID NO: 41781 - RNA, 19 nt, synthetic construct
  misc_feature 1..19: note = siRNA antisense sequence
  source 1..19: mol_type = other RNA
ggctgaagagttggctcat

SEQ ID NO: 41782 - RNA, 19 nt, synthetic construct
  misc_feature 1..19: note = siRNA sense sequence
  source 1..19: mol_type = other RNA
gccaactcttcagccttag

SEQ ID NO: 41783 - RNA, 19 nt, synthetic construct
  misc_feature 1..19: note = siRNA antisense sequence
  source 1..19: mol_type = other RNA
ctaaggctgaagagttggc

SEQ ID NO: 41784 - RNA, 19 nt, synthetic construct
  misc_feature 1..19: note = siRNA sense sequence
  source 1..19: mol_type = other RNA
ccaactcttcagccttagc

SEQ ID NO: 41785 - RNA, 19 nt, synthetic construct
  misc_feature 1..19: note = siRNA antisense sequence
  source 1..19: mol_type = other RNA
gctaaggctgaagagttgg

SEQ ID NO: 41786 - RNA, 19 nt, synthetic construct
  misc_feature 1..19: note = siRNA sense sequence
  source 1..19: mol_type = other RNA
caactcttcagccttagct

SEQ ID NO: 41787 - RNA, 19 nt, synthetic construct
  misc_feature 1..19: note = siRNA antisense sequence
  source 1..19: mol_type = other RNA
agctaaggctgaagagttg

SEQ ID NO: 41788 - RNA, 19 nt, synthetic construct
  misc_feature 1..19: note = siRNA sense sequence
  source 1..19: mol_type = other RNA
aactcttcagccttagctt

SEQ ID NO: 41789 - RNA, 19 nt, synthetic construct
  misc_feature 1..19: note = siRNA antisense sequence
  source 1..19: mol_type = other RNA
aagctaaggctgaagagtt

SEQ ID NO: 41790 - RNA, 19 nt, synthetic construct
  misc_feature 1..19: note = siRNA sense sequence
  source 1..19: mol_type = other RNA
actcttcagccttagcttg

SEQ ID NO: 41791 - RNA, 19 nt, synthetic construct
  misc_feature 1..19: note = siRNA antisense sequence
  source 1..19: mol_type = other RNA
caagctaaggctgaagagt

SEQ ID NO: 41792 - RNA, 19 nt, synthetic construct
  misc_feature 1..19: note = siRNA sense sequence
  source 1..19: mol_type = other RNA
ctcttcagccttagcttgt

SEQ ID NO: 41793 - RNA, 19 nt, synthetic construct
  misc_feature 1..19: note = siRNA antisense sequence
  source 1..19: mol_type = other RNA
acaagctaaggctgaagag

SEQ ID NO: 41794 - RNA, 19 nt, synthetic construct
  misc_feature 1..19: note = siRNA sense sequence
  source 1..19: mol_type = other RNA
tcttcagccttagcttgtt

SEQ ID NO: 41795 - RNA, 19 nt, synthetic construct
  misc_feature 1..19: note = siRNA antisense sequence
  source 1..19: mol_type = other RNA
aacaagctaaggctgaaga

SEQ ID NO: 41796 - RNA, 19 nt, synthetic construct
  misc_feature 1..19: note = siRNA sense sequence
  source 1..19: mol_type = other RNA
cttcagccttagcttgttc

SEQ ID NO: 41797 - RNA, 19 nt, synthetic construct
  misc_feature 1..19: note = siRNA antisense sequence
  source 1..19: mol_type = other RNA
gaacaagctaaggctgaag

SEQ ID NO: 41798 - RNA, 19 nt, synthetic construct
  misc_feature 1..19: note = siRNA sense sequence
  source 1..19: mol_type = other RNA
ttcagccttagcttgttca

SEQ ID NO: 41799 - RNA, 19 nt, synthetic construct
  misc_feature 1..19: note = siRNA antisense sequence
  source 1..19: mol_type = other RNA
tgaacaagctaaggctgaa

SEQ ID NO: 41800 - RNA, 19 nt, synthetic construct
  misc_feature 1..19: note = siRNA sense sequence
  source 1..19: mol_type = other RNA
cagccttagcttgttcatt

SEQ ID NO: 41801 - RNA, 19 nt, synthetic construct
  misc_feature 1..19: note = siRNA antisense sequence
  source 1..19: mol_type = other RNA
aatgaacaagctaaggctg

SEQ ID NO: 41802 - RNA, 19 nt, synthetic construct
  misc_feature 1..19: note = siRNA sense sequence
  source 1..19: mol_type = other RNA
agcttgttcattatattcc

SEQ ID NO: 41803 - RNA, 19 nt, synthetic construct
  misc_feature 1..19: note = siRNA antisense sequence
  source 1..19: mol_type = other RNA
ggaatataatgaacaagct

SEQ ID NO: 41804 - RNA, 19 nt, synthetic construct
  misc_feature 1..19: note = siRNA sense sequence
  source 1..19: mol_type = other RNA
gcttgttcattatattcct

SEQ ID NO: 41805 - RNA, 19 nt, synthetic construct
  misc_feature 1..19: note = siRNA antisense sequence
  source 1..19: mol_type = other RNA
aggaatataatgaacaagc

SEQ ID NO: 41806 - RNA, 19 nt, synthetic construct
  misc_feature 1..19: note = siRNA sense sequence
  source 1..19: mol_type = other RNA
tccttaagaagacttggaa

SEQ ID NO: 41807 - RNA, 19 nt, synthetic construct
  misc_feature 1..19: note = siRNA antisense sequence
  source 1..19: mol_type = other RNA
ttccaagtcttcttaagga

SEQ ID NO: 41808 - RNA, 19 nt, synthetic construct
  misc_feature 1..19: note = siRNA sense sequence
  source 1..19: mol_type = other RNA
cttaagaagacttggaaga

SEQ ID NO: 41809 - RNA, 19 nt, synthetic construct
  misc_feature 1..19: note = siRNA antisense sequence
  source 1..19: mol_type = other RNA
tcttccaagtcttcttaag

SEQ ID NO: 41810 - RNA, 19 nt, synthetic construct
  misc_feature 1..19: note = siRNA sense sequence
  source 1..19: mol_type = other RNA
ttaagaagacttggaagac

SEQ ID NO: 41811 - RNA, 19 nt, synthetic construct
  misc_feature 1..19: note = siRNA antisense sequence
  source 1..19: mol_type = other RNA
gtcttccaagtcttcttaa

SEQ ID NO: 41812 - RNA, 19 nt, synthetic construct
  misc_feature 1..19: note = siRNA sense sequence
  source 1..19: mol_type = other RNA
taagaagacttggaagact

SEQ ID NO: 41813 - RNA, 19 nt, synthetic construct
  misc_feature 1..19: note = siRNA antisense sequence
  source 1..19: mol_type = other RNA
agtcttccaagtcttctta

SEQ ID NO: 41814 - RNA, 19 nt, synthetic construct
  misc_feature 1..19: note = siRNA sense sequence
  source 1..19: mol_type = other RNA
aagaagacttggaagacta

SEQ ID NO: 41815 - RNA, 19 nt, synthetic construct
  misc_feature 1..19: note = siRNA antisense sequence
  source 1..19: mol_type = other RNA
tagtcttccaagtcttctt

SEQ ID NO: 41816 - RNA, 19 nt, synthetic construct
  misc_feature 1..19: note = siRNA sense sequence
  source 1..19: mol_type = other RNA
gaagacttggaagactaat

SEQ ID NO: 41817 - RNA, 19 nt, synthetic construct
  misc_feature 1..19: note = siRNA antisense sequence
  source 1..19: mol_type = other RNA
attagtcttccaagtcttc

SEQ ID NO: 41818 - RNA, 19 nt, synthetic construct
  misc_feature 1..19: note = siRNA sense sequence
  source 1..19: mol_type = other RNA
aagacttggaagactaatt

SEQ ID NO: 41819 - RNA, 19 nt, synthetic construct
  misc_feature 1..19: note = siRNA antisense sequence
  source 1..19: mol_type = other RNA
aattagtcttccaagtctt

SEQ ID NO: 41820 - RNA, 19 nt, synthetic construct
  misc_feature 1..19: note = siRNA sense sequence
  source 1..19: mol_type = other RNA
agacttggaagactaatta

SEQ ID NO: 41821 - RNA, 19 nt, synthetic construct
  misc_feature 1..19: note = siRNA antisense sequence
  source 1..19: mol_type = other RNA
taattagtcttccaagtct

SEQ ID NO: 41822 - RNA, 19 nt, synthetic construct
  misc_feature 1..19: note = siRNA sense sequence
  source 1..19: mol_type = other RNA
gacttggaagactaattag

SEQ ID NO: 41823 - RNA, 19 nt, synthetic construct
  misc_feature 1..19: note = siRNA antisense sequence
  source 1..19: mol_type = other RNA
ctaattagtcttccaagtc

SEQ ID NO: 41824 - RNA, 19 nt, synthetic construct
  misc_feature 1..19: note = siRNA sense sequence
  source 1..19: mol_type = other RNA
cttggaagactaattagtt

SEQ ID NO: 41825 - RNA, 19 nt, synthetic construct
  misc_feature 1..19: note = siRNA antisense sequence
  source 1..19: mol_type = other RNA
aactaattagtcttccaag

SEQ ID NO: 41826 - RNA, 19 nt, synthetic construct
  misc_feature 1..19: note = siRNA sense sequence
  source 1..19: mol_type = other RNA
ttggaagactaattagttg

SEQ ID NO: 41827 - RNA, 19 nt, synthetic construct
  misc_feature 1..19: note = siRNA antisense sequence
  source 1..19: mol_type = other RNA
caactaattagtcttccaa

SEQ ID NO: 41828 - RNA, 19 nt, synthetic construct
  misc_feature 1..19: note = siRNA sense sequence
  source 1..19: mol_type = other RNA
tggaagactaattagttga

SEQ ID NO: 41829 - RNA, 19 nt, synthetic construct
  misc_feature 1..19: note = siRNA antisense sequence
  source 1..19: mol_type = other RNA
tcaactaattagtcttcca

SEQ ID NO: 41830 - RNA, 19 nt, synthetic construct
  misc_feature 1..19: note = siRNA sense sequence
  source 1..19: mol_type = other RNA
ggaagactaattagttgaa

SEQ ID NO: 41831 - RNA, 19 nt, synthetic construct
  misc_feature 1..19: note = siRNA antisense sequence
  source 1..19: mol_type = other RNA
ttcaactaattagtcttcc

SEQ ID NO: 41832 - RNA, 19 nt, synthetic construct
  misc_feature 1..19: note = siRNA sense sequence
  source 1..19: mol_type = other RNA
accaaaagaagaatgtgct

SEQ ID NO: 41833 - RNA, 19 nt, synthetic construct
  misc_feature 1..19: note = siRNA antisense sequence
  source 1..19: mol_type = other RNA
agcacattcttcttttggt

SEQ ID NO: 41834 - RNA, 19 nt, synthetic construct
  misc_feature 1..19: note = siRNA sense sequence
  source 1..19: mol_type = other RNA
caaaagaagaatgtgctat

SEQ ID NO: 41835 - RNA, 19 nt, synthetic construct
  misc_feature 1..19: note = siRNA antisense sequence
  source 1..19: mol_type = other RNA
atagcacattcttcttttg

SEQ ID NO: 41836 - RNA, 19 nt, synthetic construct
  misc_feature 1..19: note = siRNA sense sequence
  source 1..19: mol_type = other RNA
gaatgtgctatgatatgag

SEQ ID NO: 41837 - RNA, 19 nt, synthetic construct
  misc_feature 1..19: note = siRNA antisense sequence
  source 1..19: mol_type = other RNA
ctcatatcatagcacattc

SEQ ID NO: 41838 - RNA, 19 nt, synthetic construct
  misc_feature 1..19: note = siRNA sense sequence
  source 1..19: mol_type = other RNA
aacttttcctccctcataa

SEQ ID NO: 41839 - RNA, 19 nt, synthetic construct
  misc_feature 1..19: note = siRNA antisense sequence
  source 1..19: mol_type = other RNA
ttatgagggaggaaaagtt

SEQ ID NO: 41840 - RNA, 19 nt, synthetic construct
  misc_feature 1..19: note = siRNA sense sequence
  source 1..19: mol_type = other RNA
acttttcctccctcataaa

SEQ ID NO: 41841 - RNA, 19 nt, synthetic construct
  misc_feature 1..19: note = siRNA antisense sequence
  source 1..19: mol_type = other RNA
tttatgagggaggaaaagt

SEQ ID NO: 41842 - RNA, 19 nt, synthetic construct
  misc_feature 1..19: note = siRNA sense sequence
  source 1..19: mol_type = other RNA
tttcctccctcataaaatt

SEQ ID NO: 41843 - RNA, 19 nt, synthetic construct
  misc_feature 1..19: note = siRNA antisense sequence
  source 1..19: mol_type = other RNA
aattttatgagggaggaaa

SEQ ID NO: 41844 - RNA, 19 nt, synthetic construct
  misc_feature 1..19: note = siRNA sense sequence
  source 1..19: mol_type = other RNA
ttcctccctcataaaattt

SEQ ID NO: 41845 - RNA, 19 nt, synthetic construct
  misc_feature 1..19: note = siRNA antisense sequence
  source 1..19: mol_type = other RNA
aaattttatgagggaggaa

SEQ ID NO: 41846 - RNA, 19 nt, synthetic construct
  misc_feature 1..19: note = siRNA sense sequence
  source 1..19: mol_type = other RNA
tcctccctcataaaatttt

SEQ ID NO: 41847 - RNA, 19 nt, synthetic construct
  misc_feature 1..19: note = siRNA antisense sequence
  source 1..19: mol_type = other RNA
aaaattttatgagggagga

SEQ ID NO: 41848 - RNA, 19 nt, synthetic construct
  misc_feature 1..19: note = siRNA sense sequence
  source 1..19: mol_type = other RNA
cctccctcataaaattttg

SEQ ID NO: 41849 - RNA, 19 nt, synthetic construct
  misc_feature 1..19: note = siRNA antisense sequence
  source 1..19: mol_type = other RNA
caaaattttatgagggagg

SEQ ID NO: 41850 - RNA, 19 nt, synthetic construct
  misc_feature 1..19: note = siRNA sense sequence
  source 1..19: mol_type = other RNA
ctccctcataaaattttgt

SEQ ID NO: 41851 - RNA, 19 nt, synthetic construct
  misc_feature 1..19: note = siRNA antisense sequence
  source 1..19: mol_type = other RNA
acaaaattttatgagggag

SEQ ID NO: 41852 - RNA, 19 nt, synthetic construct
  misc_feature 1..19: note = siRNA sense sequence
  source 1..19: mol_type = other RNA
gttaatacatcaattccca

SEQ ID NO: 41853 - RNA, 19 nt, synthetic construct
  misc_feature 1..19: note = siRNA antisense sequence
  source 1..19: mol_type = other RNA
tgggaattgatgtattaac

SEQ ID NO: 41854 - RNA, 19 nt, synthetic construct
  misc_feature 1..19: note = siRNA sense sequence
  source 1..19: mol_type = other RNA
caattcccaatgtcacaga

SEQ ID NO: 41855 - RNA, 19 nt, synthetic construct
  misc_feature 1..19: note = siRNA antisense sequence
  source 1..19: mol_type = other RNA
tctgtgacattgggaattg

SEQ ID NO: 41856 - RNA, 19 nt, synthetic construct
  misc_feature 1..19: note = siRNA sense sequence
  source 1..19: mol_type = other RNA
aattcccaatgtcacagaa

SEQ ID NO: 41857 - RNA, 19 nt, synthetic construct
  misc_feature 1..19: note = siRNA antisense sequence
  source 1..19: mol_type = other RNA
ttctgtgacattgggaatt

SEQ ID NO: 41858 - RNA, 19 nt, synthetic construct
  misc_feature 1..19: note = siRNA sense sequence
  source 1..19: mol_type = other RNA
attcccaatgtcacagaag

SEQ ID NO: 41859 - RNA, 19 nt, synthetic construct
  misc_feature 1..19: note = siRNA antisense sequence
  source 1..19: mol_type = other RNA
cttctgtgacattgggaat

SEQ ID NO: 41860 - RNA, 19 nt, synthetic construct
  misc_feature 1..19: note = siRNA sense sequence
  source 1..19: mol_type = other RNA
ttcccaatgtcacagaagt

SEQ ID NO: 41861 - RNA, 19 nt, synthetic construct
  misc_feature 1..19: note = siRNA antisense sequence
  source 1..19: mol_type = other RNA
acttctgtgacattgggaa

SEQ ID NO: 41862 - RNA, 19 nt, synthetic construct
  misc_feature 1..19: note = siRNA sense sequence
  source 1..19: mol_type = other RNA
tcccaatgtcacagaagta

SEQ ID NO: 41863 - RNA, 19 nt, synthetic construct
  misc_feature 1..19: note = siRNA antisense sequence
  source 1..19: mol_type = other RNA
tacttctgtgacattggga

SEQ ID NO: 41864 - RNA, 19 nt, synthetic construct
  misc_feature 1..19: note = siRNA sense sequence
  source 1..19: mol_type = other RNA
cccaatgtcacagaagtaa

SEQ ID NO: 41865 - RNA, 19 nt, synthetic construct
  misc_feature 1..19: note = siRNA antisense sequence
  source 1..19: mol_type = other RNA
ttacttctgtgacattggg

SEQ ID NO: 41866 - RNA, 19 nt, synthetic construct
  misc_feature 1..19: note = siRNA sense sequence
  source 1..19: mol_type = other RNA
ccaatgtcacagaagtaaa

SEQ ID NO: 41867 - RNA, 19 nt, synthetic construct
  misc_feature 1..19: note = siRNA antisense sequence
  source 1..19: mol_type = other RNA
tttacttctgtgacattgg

SEQ ID NO: 41868 - RNA, 19 nt, synthetic construct
  misc_feature 1..19: note = siRNA sense sequence
  source 1..19: mol_type = other RNA
caatgtcacagaagtaaag

SEQ ID NO: 41869 - RNA, 19 nt, synthetic construct
  misc_feature 1..19: note = siRNA antisense sequence
  source 1..19: mol_type = other RNA
ctttacttctgtgacattg

SEQ ID NO: 41870 - RNA, 19 nt, synthetic construct
  misc_feature 1..19: note = siRNA sense sequence
  source 1..19: mol_type = other RNA
aatgtcacagaagtaaagg

SEQ ID NO: 41871 - RNA, 19 nt, synthetic construct
  misc_feature 1..19: note = siRNA antisense sequence
  source 1..19: mol_type = other RNA
cctttacttctgtgacatt

SEQ ID NO: 41872 - RNA, 19 nt, synthetic construct
  misc_feature 1..19: note = siRNA sense sequence
  source 1..19: mol_type = other RNA
atgtcacagaagtaaagga

SEQ ID NO: 41873 - RNA, 19 nt, synthetic construct
  misc_feature 1..19: note = siRNA antisense sequence
  source 1..19: mol_type = other RNA
tcctttacttctgtgacat

SEQ ID NO: 41874 - RNA, 19 nt, synthetic construct
  misc_feature 1..19: note = siRNA sense sequence
  source 1..19: mol_type = other RNA
tgtcacagaagtaaaggag

SEQ ID NO: 41875 - RNA, 19 nt, synthetic construct
  misc_feature 1..19: note = siRNA antisense sequence
  source 1..19: mol_type = other RNA
ctcctttacttctgtgaca

SEQ ID NO: 41876 - RNA, 19 nt, synthetic construct
  misc_feature 1..19: note = siRNA sense sequence
  source 1..19: mol_type = other RNA
acatgacatttggatcaac

SEQ ID NO: 41877 - RNA, 19 nt, synthetic construct
  misc_feature 1..19: note = siRNA antisense sequence
  source 1..19: mol_type = other RNA
gttgatccaaatgtcatgt

SEQ ID NO: 41878 - RNA, 19 nt, synthetic construct
  misc_feature 1..19: note = siRNA sense sequence
  source 1..19: mol_type = other RNA
catgacatttggatcaact

SEQ ID NO: 41879 - RNA, 19 nt, synthetic construct
  misc_feature 1..19: note = siRNA antisense sequence
  source 1..19: mol_type = other RNA
agttgatccaaatgtcatg

SEQ ID NO: 41880 - RNA, 19 nt, synthetic construct
  misc_feature 1..19: note = siRNA sense sequence
  source 1..19: mol_type = other RNA
acatttggatcaactttag

SEQ ID NO: 41881 - RNA, 19 nt, synthetic construct
  misc_feature 1..19: note = siRNA antisense sequence
  source 1..19: mol_type = other RNA
ctaaagttgatccaaatgt

SEQ ID NO: 41882 - RNA, 19 nt, synthetic construct
  misc_feature 1..19: note = siRNA sense sequence
  source 1..19: mol_type = other RNA
catttggatcaactttagt

SEQ ID NO: 41883 - RNA, 19 nt, synthetic construct
  misc_feature 1..19: note = siRNA antisense sequence
  source 1..19: mol_type = other RNA
actaaagttgatccaaatg

SEQ ID NO: 41884 - RNA, 19 nt, synthetic construct
  misc_feature 1..19: note = siRNA sense sequence
  source 1..19: mol_type = other RNA
atttggatcaactttagtc

SEQ ID NO: 41885 - RNA, 19 nt, synthetic construct
  misc_feature 1..19: note = siRNA antisense sequence
  source 1..19: mol_type = other RNA
gactaaagttgatccaaat

SEQ ID NO: 41886 - RNA, 19 nt, synthetic construct
  misc_feature 1..19: note = siRNA sense sequence
  source 1..19: mol_type = other RNA
tttggatcaactttagtca

SEQ ID NO: 41887 - RNA, 19 nt, synthetic construct
  misc_feature 1..19: note = siRNA antisense sequence
  source 1..19: mol_type = other RNA
tgactaaagttgatccaaa

SEQ ID NO: 41888 - RNA, 19 nt, synthetic construct
  misc_feature 1..19: note = siRNA sense sequence
  source 1..19: mol_type = other RNA
gatcaactttagtcaccaa

SEQ ID NO: 41889 - RNA, 19 nt, synthetic construct
  misc_feature 1..19: note = siRNA antisense sequence
  source 1..19: mol_type = other RNA
ttggtgactaaagttgatc

SEQ ID NO: 41890 - RNA, 19 nt, synthetic construct
  misc_feature 1..19: note = siRNA sense sequence
  source 1..19: mol_type = other RNA
aatggaggatttctggtaa

SEQ ID NO: 41891 - RNA, 19 nt, synthetic construct
  misc_feature 1..19: note = siRNA antisense sequence
  source 1..19: mol_type = other RNA
ttaccagaaatcctccatt

SEQ ID NO: 41892 - RNA, 19 nt, synthetic construct
  misc_feature 1..19: note = siRNA sense sequence
  source 1..19: mol_type = other RNA
atggaggatttctggtaag

SEQ ID NO: 41893 - RNA, 19 nt, synthetic construct
  misc_feature 1..19: note = siRNA antisense sequence
  source 1..19: mol_type = other RNA
cttaccagaaatcctccat

SEQ ID NO: 41894 - RNA, 19 nt, synthetic construct
  misc_feature 1..19: note = siRNA sense sequence
  source 1..19: mol_type = other RNA
tggaggatttctggtaaga

SEQ ID NO: 41895 - RNA, 19 nt, synthetic construct
  misc_feature 1..19: note = siRNA antisense sequence
  source 1..19: mol_type = other RNA
tcttaccagaaatcctcca

SEQ ID NO: 41896 - RNA, 19 nt, synthetic construct
  misc_feature 1..19: note = siRNA sense sequence
  source 1..19: mol_type = other RNA
atatgcctatagatgtgga

SEQ ID NO: 41897 - RNA, 19 nt, synthetic construct
  misc_feature 1..19: note = siRNA antisense sequence
  source 1..19: mol_type = other RNA
tccacatctataggcatat

SEQ ID NO: 41898 - RNA, 19 nt, synthetic construct
  misc_feature 1..19: note = siRNA sense sequence
  source 1..19: mol_type = other RNA
tatgcctatagatgtggac

SEQ ID NO: 41899 - RNA, 19 nt, synthetic construct
  misc_feature 1..19: note = siRNA antisense sequence
  source 1..19: mol_type = other RNA
gtccacatctataggcata

SEQ ID NO: 41900 - RNA, 19 nt, synthetic construct
  misc_feature 1..19: note = siRNA sense sequence
  source 1..19: mol_type = other RNA
atgcctatagatgtggaca

SEQ ID NO: 41901 - RNA, 19 nt, synthetic construct
  misc_feature 1..19: note = siRNA antisense sequence
  source 1..19: mol_type = other RNA
tgtccacatctataggcat

SEQ ID NO: 41902 - RNA, 19 nt, synthetic construct
  misc_feature 1..19: note = siRNA sense sequence
  source 1..19: mol_type = other RNA
tgcctatagatgtggacat

SEQ ID NO: 41903 - RNA, 19 nt, synthetic construct
  misc_feature 1..19: note = siRNA antisense sequence
  source 1..19: mol_type = other RNA
atgtccacatctataggca

SEQ ID NO: 41904 - RNA, 19 nt, synthetic construct
  misc_feature 1..19: note = siRNA sense sequence
  source 1..19: mol_type = other RNA
gcctatagatgtggacatt

SEQ ID NO: 41905 - RNA, 19 nt, synthetic construct
  misc_feature 1..19: note = siRNA antisense sequence
  source 1..19: mol_type = other RNA
aatgtccacatctataggc

SEQ ID NO: 41906 - RNA, 19 nt, synthetic construct
  misc_feature 1..19: note = siRNA sense sequence
  source 1..19: mol_type = other RNA
tatagatgtggacatttgc

SEQ ID NO: 41907 - RNA, 19 nt, synthetic construct
  misc_feature 1..19: note = siRNA antisense sequence
  source 1..19: mol_type = other RNA
gcaaatgtccacatctata

SEQ ID NO: 41908 - RNA, 19 nt, synthetic construct
  misc_feature 1..19: note = siRNA sense sequence
  source 1..19: mol_type = other RNA
atagatgtggacatttgca

SEQ ID NO: 41909 - RNA, 19 nt, synthetic construct
  misc_feature 1..19: note = siRNA antisense sequence
  source 1..19: mol_type = other RNA
tgcaaatgtccacatctat

SEQ ID NO: 41910 - RNA, 19 nt, synthetic construct
  misc_feature 1..19: note = siRNA sense sequence
  source 1..19: mol_type = other RNA
tagatgtggacatttgcat

SEQ ID NO: 41911 - RNA, 19 nt, synthetic construct
  misc_feature 1..19: note = siRNA antisense sequence
  source 1..19: mol_type = other RNA
atgcaaatgtccacatcta

SEQ ID NO: 41912 - RNA, 19 nt, synthetic construct
  misc_feature 1..19: note = siRNA sense sequence
  source 1..19: mol_type = other RNA
agatgtggacatttgcatt

SEQ ID NO: 41913 - RNA, 19 nt, synthetic construct
  misc_feature 1..19: note = siRNA antisense sequence
  source 1..19: mol_type = other RNA
aatgcaaatgtccacatct

SEQ ID NO: 41914 - RNA, 19 nt, synthetic construct
  misc_feature 1..19: note = siRNA sense sequence
  source 1..19: mol_type = other RNA
gtggacatttgcattacac

SEQ ID NO: 41915 - RNA, 19 nt, synthetic construct
  misc_feature 1..19: note = siRNA antisense sequence
  source 1..19: mol_type = other RNA
gtgtaatgcaaatgtccac

SEQ ID NO: 41916 - RNA, 19 nt, synthetic construct
  misc_feature 1..19: note = siRNA sense sequence
  source 1..19: mol_type = other RNA
gaatctgttctgacgtcag

SEQ ID NO: 41917 - RNA, 19 nt, synthetic construct
  misc_feature 1..19: note = siRNA antisense sequence
  source 1..19: mol_type = other RNA
ctgacgtcagaacagattc

SEQ ID NO: 41918 - RNA, 19 nt, synthetic construct
  misc_feature 1..19: note = siRNA sense sequence
  source 1..19: mol_type = other RNA
aatctgttctgacgtcagc

SEQ ID NO: 41919 - RNA, 19 nt, synthetic construct
  misc_feature 1..19: note = siRNA antisense sequence
  source 1..19: mol_type = other RNA
gctgacgtcagaacagatt

SEQ ID NO: 41920 - RNA, 19 nt, synthetic construct
  misc_feature 1..19: note = siRNA sense sequence
  source 1..19: mol_type = other RNA
atctgttctgacgtcagcc

SEQ ID NO: 41921 - RNA, 19 nt, synthetic construct
  misc_feature 1..19: note = siRNA antisense sequence
  source 1..19: mol_type = other RNA
ggctgacgtcagaacagat

SEQ ID NO: 41922 - RNA, 19 nt, synthetic construct
  misc_feature 1..19: note = siRNA sense sequence
  source 1..19: mol_type = other RNA
tctgttctgacgtcagccc

SEQ ID NO: 41923 - RNA, 19 nt, synthetic construct
  misc_feature 1..19: note = siRNA antisense sequence
  source 1..19: mol_type = other RNA
gggctgacgtcagaacaga

SEQ ID NO: 41924 - RNA, 19 nt, synthetic construct
  misc_feature 1..19: note = siRNA sense sequence
  source 1..19: mol_type = other RNA
cccacatttcaagtcgtga

SEQ ID NO: 41925 - RNA, 19 nt, synthetic construct
  misc_feature 1..19: note = siRNA antisense sequence
  source 1..19: mol_type = other RNA
tcacgacttgaaatgtggg

SEQ ID NO: 41926 - RNA, 19 nt, synthetic construct
  misc_feature 1..19: note = siRNA sense sequence
  source 1..19: mol_type = other RNA
tcaagtcgtgaattccatt

SEQ ID NO: 41927 - RNA, 19 nt, synthetic construct
  misc_feature 1..19: note = siRNA antisense sequence
  source 1..19: mol_type = other RNA
aatggaattcacgacttga

SEQ ID NO: 41928 - RNA, 19 nt, synthetic construct
  misc_feature 1..19: note = siRNA sense sequence
  source 1..19: mol_type = other RNA
caagtcgtgaattccattg

SEQ ID NO: 41929 - RNA, 19 nt, synthetic construct
  misc_feature 1..19: note = siRNA antisense sequence
  source 1..19: mol_type = other RNA
caatggaattcacgacttg

SEQ ID NO: 41930 - RNA, 19 nt, synthetic construct
  misc_feature 1..19: note = siRNA sense sequence
  source 1..19: mol_type = other RNA
aagtcgtgaattccattgc

SEQ ID NO: 41931 - RNA, 19 nt, synthetic construct
  misc_feature 1..19: note = siRNA antisense sequence
  source 1..19: mol_type = other RNA
gcaatggaattcacgactt

SEQ ID NO: 41932 - RNA, 19 nt, synthetic construct
  misc_feature 1..19: note = siRNA sense sequence
  source 1..19: mol_type = other RNA
agtcgtgaattccattgcc

SEQ ID NO: 41933 - RNA, 19 nt, synthetic construct
  misc_feature 1..19: note = siRNA antisense sequence
  source 1..19: mol_type = other RNA
ggcaatggaattcacgact

SEQ ID NO: 41934 - RNA, 19 nt, synthetic construct
  misc_feature 1..19: note = siRNA sense sequence
  source 1..19: mol_type = other RNA
gtcgtgaattccattgccc

SEQ ID NO: 41935 - RNA, 19 nt, synthetic construct
  misc_feature 1..19: note = siRNA antisense sequence
  source 1..19: mol_type = other RNA
gggcaatggaattcacgac

SEQ ID NO: 41936 - RNA, 19 nt, synthetic construct
  misc_feature 1..19: note = siRNA sense sequence
  source 1..19: mol_type = other RNA
caaggtacagattttatgc

SEQ ID NO: 41937 - RNA, 19 nt, synthetic construct
  misc_feature 1..19: note = siRNA antisense sequence
  source 1..19: mol_type = other RNA
gcataaaatctgtaccttg

SEQ ID NO: 41938 - RNA, 19 nt, synthetic construct
  misc_feature 1..19: note = siRNA sense sequence
  source 1..19: mol_type = other RNA
caatgttcttgcatgtttg

SEQ ID NO: 41939 - RNA, 19 nt, synthetic construct
  misc_feature 1..19: note = siRNA antisense sequence
  source 1..19: mol_type = other RNA
caaacatgcaagaacattg

SEQ ID NO: 41940 - RNA, 19 nt, synthetic construct
  misc_feature 1..19: note = siRNA sense sequence
  source 1..19: mol_type = other RNA
aatgttcttgcatgtttga

SEQ ID NO: 41941 - RNA, 19 nt, synthetic construct
  misc_feature 1..19: note = siRNA antisense sequence
  source 1..19: mol_type = other RNA
tcaaacatgcaagaacatt

SEQ ID NO: 41942 - RNA, 19 nt, synthetic construct
  misc_feature 1..19: note = siRNA sense sequence
  source 1..19: mol_type = other RNA
atgttcttgcatgtttgaa

SEQ ID NO: 41943 - RNA, 19 nt, synthetic construct
  misc_feature 1..19: note = siRNA antisense sequence
  source 1..19: mol_type = other RNA
ttcaaacatgcaagaacat

SEQ ID NO: 41944 - RNA, 19 nt, synthetic construct
  misc_feature 1..19: note = siRNA sense sequence
  source 1..19: mol_type = other RNA
aagtattttcttagctacc

SEQ ID NO: 41945 - RNA, 19 nt, synthetic construct
  misc_feature 1..19: note = siRNA antisense sequence
  source 1..19: mol_type = other RNA
ggtagctaagaaaatactt

SEQ ID NO: 41946 - RNA, 19 nt, synthetic construct
  misc_feature 1..19: note = siRNA sense sequence
  source 1..19: mol_type = other RNA
agtattttcttagctacca

SEQ ID NO: 41947 - RNA, 19 nt, synthetic construct
  misc_feature 1..19: note = siRNA antisense sequence
  source 1..19: mol_type = other RNA
tggtagctaagaaaatact

SEQ ID NO: 41948 - RNA, 19 nt, synthetic construct
  misc_feature 1..19: note = siRNA sense sequence
  source 1..19: mol_type = other RNA
gtattttcttagctaccag

SEQ ID NO: 41949 - RNA, 19 nt, synthetic construct
  misc_feature 1..19: note = siRNA antisense sequence
  source 1..19: mol_type = other RNA
ctggtagctaagaaaatac

SEQ ID NO: 41950 - RNA, 19 nt, synthetic construct
  misc_feature 1..19: note = siRNA sense sequence
  source 1..19: mol_type = other RNA
tttcttagctaccagcatt

SEQ ID NO: 41951 - RNA, 19 nt, synthetic construct
  misc_feature 1..19: note = siRNA antisense sequence
  source 1..19: mol_type = other RNA
aatgctggtagctaagaaa

SEQ ID NO: 41952 - RNA, 19 nt, synthetic construct
  misc_feature 1..19: note = siRNA sense sequence
  source 1..19: mol_type = other RNA
ttagctaccagcattacca

SEQ ID NO: 41953 - RNA, 19 nt, synthetic construct
  misc_feature 1..19: note = siRNA antisense sequence
  source 1..19: mol_type = other RNA
tggtaatgctggtagctaa

SEQ ID NO: 41954 - RNA, 19 nt, synthetic construct
  misc_feature 1..19: note = siRNA sense sequence
  source 1..19: mol_type = other RNA
tagctaccagcattaccaa

SEQ ID NO: 41955 - RNA, 19 nt, synthetic construct
  misc_feature 1..19: note = siRNA antisense sequence
  source 1..19: mol_type = other RNA
ttggtaatgctggtagcta

SEQ ID NO: 41956 - RNA, 19 nt, synthetic construct
  misc_feature 1..19: note = siRNA sense sequence
  source 1..19: mol_type = other RNA
gctaccagcattaccaatt

SEQ ID NO: 41957 - RNA, 19 nt, synthetic construct
  misc_feature 1..19: note = siRNA antisense sequence
  source 1..19: mol_type = other RNA
aattggtaatgctggtagc

SEQ ID NO: 41958 - RNA, 19 nt, synthetic construct
  misc_feature 1..19: note = siRNA sense sequence
  source 1..19: mol_type = other RNA
ctaccagcattaccaattt

SEQ ID NO: 41959 - RNA, 19 nt, synthetic construct
  misc_feature 1..19: note = siRNA antisense sequence
  source 1..19: mol_type = other RNA
aaattggtaatgctggtag

SEQ ID NO: 41960 - RNA, 19 nt, synthetic construct
  misc_feature 1..19: note = siRNA sense sequence
  source 1..19: mol_type = other RNA
taccagcattaccaattta

SEQ ID NO: 41961 - RNA, 19 nt, synthetic construct
  misc_feature 1..19: note = siRNA antisense sequence
  source 1..19: mol_type = other RNA
taaattggtaatgctggta

SEQ ID NO: 41962 - RNA, 19 nt, synthetic construct
  misc_feature 1..19: note = siRNA sense sequence
  source 1..19: mol_type = other RNA
accagcattaccaatttag

SEQ ID NO: 41963 - RNA, 19 nt, synthetic construct
  misc_feature 1..19: note = siRNA antisense sequence
  source 1..19: mol_type = other RNA
ctaaattggtaatgctggt

SEQ ID NO: 41964 - RNA, 19 nt, synthetic construct
  misc_feature 1..19: note = siRNA sense sequence
  source 1..19: mol_type = other RNA
cagcattaccaatttaggt

SEQ ID NO: 41965 - RNA, 19 nt, synthetic construct
  misc_feature 1..19: note = siRNA antisense sequence
  source 1..19: mol_type = other RNA
acctaaattggtaatgctg

SEQ ID NO: 41966 - RNA, 19 nt, synthetic construct
  misc_feature 1..19: note = siRNA sense sequence
  source 1..19: mol_type = other RNA
tgtttgctttgccagtata

SEQ ID NO: 41967 - RNA, 19 nt, synthetic construct
  misc_feature 1..19: note = siRNA antisense sequence
  source 1..19: mol_type = other RNA
tatactggcaaagcaaaca

SEQ ID NO: 41968 - RNA, 19 nt, synthetic construct
  misc_feature 1..19: note = siRNA sense sequence
  source 1..19: mol_type = other RNA
ttgctttgccagtatataa

SEQ ID NO: 41969 - RNA, 19 nt, synthetic construct
  misc_feature 1..19: note = siRNA antisense sequence
  source 1..19: mol_type = other RNA
ttatatactggcaaagcaa

SEQ ID NO: 41970 - RNA, 19 nt, synthetic construct
  misc_feature 1..19: note = siRNA sense sequence
  source 1..19: mol_type = other RNA
tgctttgccagtatataac

SEQ ID NO: 41971 - RNA, 19 nt, synthetic construct
  misc_feature 1..19: note = siRNA antisense sequence
  source 1..19: mol_type = other RNA
gttatatactggcaaagca

SEQ ID NO: 41972 - RNA, 19 nt, synthetic construct
  misc_feature 1..19: note = siRNA sense sequence
  source 1..19: mol_type = other RNA
catcatagataaagctgtc

SEQ ID NO: 41973 - RNA, 19 nt, synthetic construct
  misc_feature 1..19: note = siRNA antisense sequence
  source 1..19: mol_type = other RNA
gacagctttatctatgatg

SEQ ID NO: 41974 - RNA, 19 nt, synthetic construct
  misc_feature 1..19: note = siRNA sense sequence
  source 1..19: mol_type = other RNA
atcatagataaagctgtca

SEQ ID NO: 41975 - RNA, 19 nt, synthetic construct
  misc_feature 1..19: note = siRNA antisense sequence
  source 1..19: mol_type = other RNA
tgacagctttatctatgat

SEQ ID NO: 41976 - RNA, 19 nt, synthetic construct
  misc_feature 1..19: note = siRNA sense sequence
  source 1..19: mol_type = other RNA
agaatgagtctctttgaag

SEQ ID NO: 41977 - RNA, 19 nt, synthetic construct
  misc_feature 1..19: note = siRNA antisense sequence
  source 1..19: mol_type = other RNA
cttcaaagagactcattct

SEQ ID NO: 41978 - RNA, 19 nt, synthetic construct
  misc_feature 1..19: note = siRNA sense sequence
  source 1..19: mol_type = other RNA
gaatgagtctctttgaaga

SEQ ID NO: 41979 - RNA, 19 nt, synthetic construct
  misc_feature 1..19: note = siRNA antisense sequence
  source 1..19: mol_type = other RNA
tcttcaaagagactcattc

SEQ ID NO: 41980 - RNA, 19 nt, synthetic construct
  misc_feature 1..19: note = siRNA sense sequence
  source 1..19: mol_type = other RNA
aatgagtctctttgaagaa

SEQ ID NO: 41981 - RNA, 19 nt, synthetic construct
  misc_feature 1..19: note = siRNA antisense sequence
  source 1..19: mol_type = other RNA
ttcttcaaagagactcatt

SEQ ID NO: 41982 - RNA, 19 nt, synthetic construct
  misc_feature 1..19: note = siRNA sense sequence
  source 1..19: mol_type = other RNA
atttgcaaagataactctc

SEQ ID NO: 41983 - RNA, 19 nt, synthetic construct
  misc_feature 1..19: note = siRNA antisense sequence
  source 1..19: mol_type = other RNA
gagagttatctttgcaaat

SEQ ID NO: 41984 - RNA, 19 nt, synthetic construct
  misc_feature 1..19: note = siRNA sense sequence
  source 1..19: mol_type = other RNA
tttgcaaagataactctca

SEQ ID NO: 41985 - RNA, 19 nt, synthetic construct
  misc_feature 1..19: note = siRNA antisense sequence
  source 1..19: mol_type = other RNA
tgagagttatctttgcaaa

SEQ ID NO: 41986 - RNA, 19 nt, synthetic construct
  misc_feature 1..19: note = siRNA sense sequence
  source 1..19: mol_type = other RNA
ttgcaaagataactctcat

SEQ ID NO: 41987 - RNA, 19 nt, synthetic construct
  misc_feature 1..19: note = siRNA antisense sequence
  source 1..19: mol_type = other RNA
atgagagttatctttgcaa

SEQ ID NO: 41988 - RNA, 19 nt, synthetic construct
  misc_feature 1..19: note = siRNA sense sequence
  source 1..19: mol_type = other RNA
tgcaaagataactctcata

SEQ ID NO: 41989 - RNA, 19 nt, synthetic construct
  misc_feature 1..19: note = siRNA antisense sequence
  source 1..19: mol_type = other RNA
tatgagagttatctttgca

SEQ ID NO: 41990 - RNA, 19 nt, synthetic construct
  misc_feature 1..19: note = siRNA sense sequence
  source 1..19: mol_type = other RNA
gcaaagataactctcatac

SEQ ID NO: 41991 - RNA, 19 nt, synthetic construct
  misc_feature 1..19: note = siRNA antisense sequence
  source 1..19: mol_type = other RNA
gtatgagagttatctttgc

SEQ ID NO: 41992 - RNA, 19 nt, synthetic construct
  misc_feature 1..19: note = siRNA sense sequence
  source 1..19: mol_type = other RNA
gtaggtatgaattttatcc

SEQ ID NO: 41993 - RNA, 19 nt, synthetic construct
  misc_feature 1..19: note = siRNA antisense sequence
  source 1..19: mol_type = other RNA
ggataaaattcatacctac

SEQ ID NO: 41994 - RNA, 19 nt, synthetic construct
  misc_feature 1..19: note = siRNA sense sequence
  source 1..19: mol_type = other RNA
taggtatgaattttatccc

SEQ ID NO: 41995 - RNA, 19 nt, synthetic construct
  misc_feature 1..19: note = siRNA antisense sequence
  source 1..19: mol_type = other RNA
gggataaaattcataccta

SEQ ID NO: 41996 - RNA, 19 nt, synthetic construct
  misc_feature 1..19: note = siRNA sense sequence
  source 1..19: mol_type = other RNA
aattttatcccacaccaat

SEQ ID NO: 41997 - RNA, 19 nt, synthetic construct
  misc_feature 1..19: note = siRNA antisense sequence
  source 1..19: mol_type = other RNA
attggtgtgggataaaatt

SEQ ID NO: 41998 - RNA, 19 nt, synthetic construct
  misc_feature 1..19: note = siRNA sense sequence
  source 1..19: mol_type = other RNA
attttatcccacaccaatt

SEQ ID NO: 41999 - RNA, 19 nt, synthetic construct
  misc_feature 1..19: note = siRNA antisense sequence
  source 1..19: mol_type = other RNA
aattggtgtgggataaaat

SEQ ID NO: 42000 - RNA, 19 nt, synthetic construct
  misc_feature 1..19: note = siRNA sense sequence
  source 1..19: mol_type = other RNA
ttttatcccacaccaattg

SEQ ID NO: 42001 - RNA, 19 nt, synthetic construct
  misc_feature 1..19: note = siRNA antisense sequence
  source 1..19: mol_type = other RNA
caattggtgtgggataaaa

SEQ ID NO: 42002 - RNA, 19 nt, synthetic construct
  misc_feature 1..19: note = siRNA sense sequence
  source 1..19: mol_type = other RNA
tttatcccacaccaattgt

SEQ ID NO: 42003 - RNA, 19 nt, synthetic construct
  misc_feature 1..19: note = siRNA antisense sequence
  source 1..19: mol_type = other RNA
acaattggtgtgggataaa

SEQ ID NO: 42004 - RNA, 19 nt, synthetic construct
  misc_feature 1..19: note = siRNA sense sequence
  source 1..19: mol_type = other RNA
ttatcccacaccaattgtt

SEQ ID NO: 42005 - RNA, 19 nt, synthetic construct
  misc_feature 1..19: note = siRNA antisense sequence
  source 1..19: mol_type = other RNA
aacaattggtgtgggataa

SEQ ID NO: 42006 - RNA, 19 nt, synthetic construct
  misc_feature 1..19: note = siRNA sense sequence
  source 1..19: mol_type = other RNA
tatcccacaccaattgtta

SEQ ID NO: 42007 - RNA, 19 nt, synthetic construct
  misc_feature 1..19: note = siRNA antisense sequence
  source 1..19: mol_type = other RNA
taacaattggtgtgggata

SEQ ID NO: 42008 - RNA, 19 nt, synthetic construct
  misc_feature 1..19: note = siRNA sense sequence
  source 1..19: mol_type = other RNA
atcccacaccaattgttat

SEQ ID NO: 42009 - RNA, 19 nt, synthetic construct
  misc_feature 1..19: note = siRNA antisense sequence
  source 1..19: mol_type = other RNA
ataacaattggtgtgggat

SEQ ID NO: 42010 - RNA, 19 nt, synthetic construct
  misc_feature 1..19: note = siRNA sense sequence
  source 1..19: mol_type = other RNA
tcccacaccaattgttatt

SEQ ID NO: 42011 - RNA, 19 nt, synthetic construct
  misc_feature 1..19: note = siRNA antisense sequence
  source 1..19: mol_type = other RNA
aataacaattggtgtggga

SEQ ID NO: 42012 - RNA, 19 nt, synthetic construct
  misc_feature 1..19: note = siRNA sense sequence
  source 1..19: mol_type = other RNA
caatgtgtctactttggag

SEQ ID NO: 42013 - RNA, 19 nt, synthetic construct
  misc_feature 1..19: note = siRNA antisense sequence
  source 1..19: mol_type = other RNA
ctccaaagtagacacattg

SEQ ID NO: 42014 - RNA, 19 nt, synthetic construct
  misc_feature 1..19: note = siRNA sense sequence
  source 1..19: mol_type = other RNA
gcacttcatatgcctctga

SEQ ID NO: 42015 - RNA, 19 nt, synthetic construct
  misc_feature 1..19: note = siRNA antisense sequence
  source 1..19: mol_type = other RNA
tcagaggcatatgaagtgc

SEQ ID NO: 42016 - RNA, 19 nt, synthetic construct
  misc_feature 1..19: note = siRNA sense sequence
  source 1..19: mol_type = other RNA
aattgactccttttattgc

SEQ ID NO: 42017 - RNA, 19 nt, synthetic construct
  misc_feature 1..19: note = siRNA antisense sequence
  source 1..19: mol_type = other RNA
gcaataaaaggagtcaatt

SEQ ID NO: 42018 - RNA, 19 nt, synthetic construct
  misc_feature 1..19: note = siRNA sense sequence
  source 1..19: mol_type = other RNA
attgactccttttattgca

SEQ ID NO: 42019 - RNA, 19 nt, synthetic construct
  misc_feature 1..19: note = siRNA antisense sequence
  source 1..19: mol_type = other RNA
tgcaataaaaggagtcaat

SEQ ID NO: 42020 - RNA, 19 nt, synthetic construct
  misc_feature 1..19: note = siRNA sense sequence
  source 1..19: mol_type = other RNA
ttgactccttttattgcag

SEQ ID NO: 42021 - RNA, 19 nt, synthetic construct
  misc_feature 1..19: note = siRNA antisense sequence
  source 1..19: mol_type = other RNA
ctgcaataaaaggagtcaa

SEQ ID NO: 42022 - RNA, 19 nt, synthetic construct
  misc_feature 1..19: note = siRNA sense sequence
  source 1..19: mol_type = other RNA
tgactccttttattgcaga

SEQ ID NO: 42023 - RNA, 19 nt, synthetic construct
  misc_feature 1..19: note = siRNA antisense sequence
  source 1..19: mol_type = other RNA
tctgcaataaaaggagtca

SEQ ID NO: 42024 - RNA, 19 nt, synthetic construct
  misc_feature 1..19: note = siRNA sense sequence
  source 1..19: mol_type = other RNA
cagaatgcagcactcaact

SEQ ID NO: 42025 - RNA, 19 nt, synthetic construct
  misc_feature 1..19: note = siRNA antisense sequence
  source 1..19: mol_type = other RNA
agttgagtgctgcattctg

SEQ ID NO: 42026 - RNA, 19 nt, synthetic construct
  misc_feature 1..19: note = siRNA sense sequence
  source 1..19: mol_type = other RNA
agaatgcagcactcaactg

SEQ ID NO: 42027 - RNA, 19 nt, synthetic construct
  misc_feature 1..19: note = siRNA antisense sequence
  source 1..19: mol_type = other RNA
cagttgagtgctgcattct

SEQ ID NO: 42028 - RNA, 19 nt, synthetic construct
  misc_feature 1..19: note = siRNA sense sequence
  source 1..19: mol_type = other RNA
gaatgcagcactcaactgg

SEQ ID NO: 42029 - RNA, 19 nt, synthetic construct
  misc_feature 1..19: note = siRNA antisense sequence
  source 1..19: mol_type = other RNA
ccagttgagtgctgcattc

SEQ ID NO: 42030 - RNA, 19 nt, synthetic construct
  misc_feature 1..19: note = siRNA sense sequence
  source 1..19: mol_type = other RNA
cagcactcaactggacata

SEQ ID NO: 42031 - RNA, 19 nt, synthetic construct
  misc_feature 1..19: note = siRNA antisense sequence
  source 1..19: mol_type = other RNA
tatgtccagttgagtgctg

SEQ ID NO: 42032 - RNA, 19 nt, synthetic construct
  misc_feature 1..19: note = siRNA sense sequence
  source 1..19: mol_type = other RNA
agcactcaactggacatag

SEQ ID NO: 42033 - RNA, 19 nt, synthetic construct
  misc_feature 1..19: note = siRNA antisense sequence
  source 1..19: mol_type = other RNA
ctatgtccagttgagtgct

SEQ ID NO: 42034 - RNA, 19 nt, synthetic construct
  misc_feature 1..19: note = siRNA sense sequence
  source 1..19: mol_type = other RNA
gcactcaactggacatagt

SEQ ID NO: 42035 - RNA, 19 nt, synthetic construct
  misc_feature 1..19: note = siRNA antisense sequence
  source 1..19: mol_type = other RNA
actatgtccagttgagtgc

SEQ ID NO: 42036 - RNA, 19 nt, synthetic construct
  misc_feature 1..19: note = siRNA sense sequence
  source 1..19: mol_type = other RNA
cactcaactggacatagtc

SEQ ID NO: 42037 - RNA, 19 nt, synthetic construct
  misc_feature 1..19: note = siRNA antisense sequence
  source 1..19: mol_type = other RNA
gactatgtccagttgagtg

SEQ ID NO: 42038 - RNA, 19 nt, synthetic construct
  misc_feature 1..19: note = siRNA sense sequence
  source 1..19: mol_type = other RNA
actcaactggacatagtca

SEQ ID NO: 42039 - RNA, 19 nt, synthetic construct
  misc_feature 1..19: note = siRNA antisense sequence
  source 1..19: mol_type = other RNA
tgactatgtccagttgagt

SEQ ID NO: 42040 - RNA, 19 nt, synthetic construct
  misc_feature 1..19: note = siRNA sense sequence
  source 1..19: mol_type = other RNA
ctcaactggacatagtcat

SEQ ID NO: 42041 - RNA, 19 nt, synthetic construct
  misc_feature 1..19: note = siRNA antisense sequence
  source 1..19: mol_type = other RNA
atgactatgtccagttgag

SEQ ID NO: 42042 - RNA, 19 nt, synthetic construct
  misc_feature 1..19: note = siRNA sense sequence
  source 1..19: mol_type = other RNA
tcaactggacatagtcata

SEQ ID NO: 42043 - RNA, 19 nt, synthetic construct
  misc_feature 1..19: note = siRNA antisense sequence
  source 1..19: mol_type = other RNA
tatgactatgtccagttga

SEQ ID NO: 42044 - RNA, 19 nt, synthetic construct
  misc_feature 1..19: note = siRNA sense sequence
  source 1..19: mol_type = other RNA
caactggacatagtcatag

SEQ ID NO: 42045 - RNA, 19 nt, synthetic construct
  misc_feature 1..19: note = siRNA antisense sequence
  source 1..19: mol_type = other RNA
ctatgactatgtccagttg

SEQ ID NO: 42046 - RNA, 19 nt, synthetic construct
  misc_feature 1..19: note = siRNA sense sequence
  source 1..19: mol_type = other RNA
aactggacatagtcatagt

SEQ ID NO: 42047 - RNA, 19 nt, synthetic construct
  misc_feature 1..19: note = siRNA antisense sequence
  source 1..19: mol_type = other RNA
actatgactatgtccagtt

SEQ ID NO: 42048 - RNA, 19 nt, synthetic construct
  misc_feature 1..19: note = siRNA sense sequence
  source 1..19: mol_type = other RNA
actggacatagtcatagtg

SEQ ID NO: 42049 - RNA, 19 nt, synthetic construct
  misc_feature 1..19: note = siRNA antisense sequence
  source 1..19: mol_type = other RNA
cactatgactatgtccagt

SEQ ID NO: 42050 - RNA, 19 nt, synthetic construct
  misc_feature 1..19: note = siRNA sense sequence
  source 1..19: mol_type = other RNA
ctggacatagtcatagtgc

SEQ ID NO: 42051 - RNA, 19 nt, synthetic construct
  misc_feature 1..19: note = siRNA antisense sequence
  source 1..19: mol_type = other RNA
gcactatgactatgtccag

SEQ ID NO: 42052 - RNA, 19 nt, synthetic construct
  misc_feature 1..19: note = siRNA sense sequence
  source 1..19: mol_type = other RNA
tggacatagtcatagtgct

SEQ ID NO: 42053 - RNA, 19 nt, synthetic construct
  misc_feature 1..19: note = siRNA antisense sequence
  source 1..19: mol_type = other RNA
agcactatgactatgtcca

SEQ ID NO: 42054 - RNA, 19 nt, synthetic construct
  misc_feature 1..19: note = siRNA sense sequence
  source 1..19: mol_type = other RNA
agtcatagtgctggatggt

SEQ ID NO: 42055 - RNA, 19 nt, synthetic construct
  misc_feature 1..19: note = siRNA antisense sequence
  source 1..19: mol_type = other RNA
accatccagcactatgact

SEQ ID NO: 42056 - RNA, 19 nt, synthetic construct
  misc_feature 1..19: note = siRNA sense sequence
  source 1..19: mol_type = other RNA
gtcatagtgctggatggtt

SEQ ID NO: 42057 - RNA, 19 nt, synthetic construct
  misc_feature 1..19: note = siRNA antisense sequence
  source 1..19: mol_type = other RNA
aaccatccagcactatgac

SEQ ID NO: 42058 - RNA, 19 nt, synthetic construct
  misc_feature 1..19: note = siRNA sense sequence
  source 1..19: mol_type = other RNA
tcatagtgctggatggttc

SEQ ID NO: 42059 - RNA, 19 nt, synthetic construct
  misc_feature 1..19: note = siRNA antisense sequence
  source 1..19: mol_type = other RNA
gaaccatccagcactatga

SEQ ID NO: 42060 - RNA, 19 nt, synthetic construct
  misc_feature 1..19: note = siRNA sense sequence
  source 1..19: mol_type = other RNA
catagtgctggatggttcc

SEQ ID NO: 42061 - RNA, 19 nt, synthetic construct
  misc_feature 1..19: note = siRNA antisense sequence
  source 1..19: mol_type = other RNA
ggaaccatccagcactatg

SEQ ID NO: 42062 - RNA, 19 nt, synthetic construct
  misc_feature 1..19: note = siRNA sense sequence
  source 1..19: mol_type = other RNA
acagtatttacccatggga

SEQ ID NO: 42063 - RNA, 19 nt, synthetic construct
  misc_feature 1..19: note = siRNA antisense sequence
  source 1..19: mol_type = other RNA
tcccatgggtaaatactgt

SEQ ID NO: 42064 - RNA, 19 nt, synthetic construct
  misc_feature 1..19: note = siRNA sense sequence
  source 1..19: mol_type = other RNA
cagtatttacccatgggac

SEQ ID NO: 42065 - RNA, 19 nt, synthetic construct
  misc_feature 1..19: note = siRNA antisense sequence
  source 1..19: mol_type = other RNA
gtcccatgggtaaatactg

SEQ ID NO: 42066 - RNA, 19 nt, synthetic construct
  misc_feature 1..19: note = siRNA sense sequence
  source 1..19: mol_type = other RNA
agtatttacccatgggaca

SEQ ID NO: 42067 - RNA, 19 nt, synthetic construct
  misc_feature 1..19: note = siRNA antisense sequence
  source 1..19: mol_type = other RNA
tgtcccatgggtaaatact

SEQ ID NO: 42068 - RNA, 19 nt, synthetic construct
  misc_feature 1..19: note = siRNA sense sequence
  source 1..19: mol_type = other RNA
gtatttacccatgggacag

SEQ ID NO: 42069 - RNA, 19 nt, synthetic construct
  misc_feature 1..19: note = siRNA antisense sequence
  source 1..19: mol_type = other RNA
ctgtcccatgggtaaatac

SEQ ID NO: 42070 - RNA, 19 nt, synthetic construct
  misc_feature 1..19: note = siRNA sense sequence
  source 1..19: mol_type = other RNA
tatttacccatgggacagt

SEQ ID NO: 42071 - RNA, 19 nt, synthetic construct
  misc_feature 1..19: note = siRNA antisense sequence
  source 1..19: mol_type = other RNA
actgtcccatgggtaaata

SEQ ID NO: 42072 - RNA, 19 nt, synthetic construct
  misc_feature 1..19: note = siRNA sense sequence
  source 1..19: mol_type = other RNA
atttacccatgggacagtg

SEQ ID NO: 42073 - RNA, 19 nt, synthetic construct
  misc_feature 1..19: note = siRNA antisense sequence
  source 1..19: mol_type = other RNA
cactgtcccatgggtaaat

SEQ ID NO: 42074 - RNA, 19 nt, synthetic construct
  misc_feature 1..19: note = siRNA sense sequence
  source 1..19: mol_type = other RNA
tttacccatgggacagtgt

SEQ ID NO: 42075 - RNA, 19 nt, synthetic construct
  misc_feature 1..19: note = siRNA antisense sequence
  source 1..19: mol_type = other RNA
acactgtcccatgggtaaa

SEQ ID NO: 42076 - RNA, 19 nt, synthetic construct
  misc_feature 1..19: note = siRNA sense sequence
  source 1..19: mol_type = other RNA
catgggacagtgttacagc

SEQ ID NO: 42077 - RNA, 19 nt, synthetic construct
  misc_feature 1..19: note = siRNA antisense sequence
  source 1..19: mol_type = other RNA
gctgtaacactgtcccatg

SEQ ID NO: 42078 - RNA, 19 nt, synthetic construct
  misc_feature 1..19: note = siRNA sense sequence
  source 1..19: mol_type = other RNA
atgggacagtgttacagct

SEQ ID NO: 42079 - RNA, 19 nt, synthetic construct
  misc_feature 1..19: note = siRNA antisense sequence
  source 1..19: mol_type = other RNA
agctgtaacactgtcccat

SEQ ID NO: 42080 - RNA, 19 nt, synthetic construct
  misc_feature 1..19: note = siRNA sense sequence
  source 1..19: mol_type = other RNA
tgggacagtgttacagctt

SEQ ID NO: 42081 - RNA, 19 nt, synthetic construct
  misc_feature 1..19: note = siRNA antisense sequence
  source 1..19: mol_type = other RNA
aagctgtaacactgtccca

SEQ ID NO: 42082 - RNA, 19 nt, synthetic construct
  misc_feature 1..19: note = siRNA sense sequence
  source 1..19: mol_type = other RNA
aaagaatggatattggtcc

SEQ ID NO: 42083 - RNA, 19 nt, synthetic construct
  misc_feature 1..19: note = siRNA antisense sequence
  source 1..19: mol_type = other RNA
ggaccaatatccattcttt

SEQ ID NO: 42084 - RNA, 19 nt, synthetic construct
  misc_feature 1..19: note = siRNA sense sequence
  source 1..19: mol_type = other RNA
aagaatggatattggtcct

SEQ ID NO: 42085 - RNA, 19 nt, synthetic construct
  misc_feature 1..19: note = siRNA antisense sequence
  source 1..19: mol_type = other RNA
aggaccaatatccattctt

SEQ ID NO: 42086 - RNA, 19 nt, synthetic construct
  misc_feature 1..19: note = siRNA sense sequence
  source 1..19: mol_type = other RNA
agaatggatattggtccta

SEQ ID NO: 42087 - RNA, 19 nt, synthetic construct
  misc_feature 1..19: note = siRNA antisense sequence
  source 1..19: mol_type = other RNA
taggaccaatatccattct

SEQ ID NO: 42088 - RNA, 19 nt, synthetic construct
  misc_feature 1..19: note = siRNA sense sequence
  source 1..19: mol_type = other RNA
gaatggatattggtcctaa

SEQ ID NO: 42089 - RNA, 19 nt, synthetic construct
  misc_feature 1..19: note = siRNA antisense sequence
  source 1..19: mol_type = other RNA
ttaggaccaatatccattc

SEQ ID NO: 42090 - RNA, 19 nt, synthetic construct
  misc_feature 1..19: note = siRNA sense sequence
  source 1..19: mol_type = other RNA
aatggatattggtcctaaa

SEQ ID NO: 42091 - RNA, 19 nt, synthetic construct
  misc_feature 1..19: note = siRNA antisense sequence
  source 1..19: mol_type = other RNA
tttaggaccaatatccatt

SEQ ID NO: 42092 - RNA, 19 nt, synthetic construct
  misc_feature 1..19: note = siRNA sense sequence
  source 1..19: mol_type = other RNA
acaggtatgtgactttgtg

SEQ ID NO: 42093 - RNA, 19 nt, synthetic construct
  misc_feature 1..19: note = siRNA antisense sequence
  source 1..19: mol_type = other RNA
cacaaagtcacatacctgt

SEQ ID NO: 42094 - RNA, 19 nt, synthetic construct
  misc_feature 1..19: note = siRNA sense sequence
  source 1..19: mol_type = other RNA
caggtatgtgactttgtgt

SEQ ID NO: 42095 - RNA, 19 nt, synthetic construct
  misc_feature 1..19: note = siRNA antisense sequence
  source 1..19: mol_type = other RNA
acacaaagtcacatacctg

SEQ ID NO: 42096 - RNA, 19 nt, synthetic construct
  misc_feature 1..19: note = siRNA sense sequence
  source 1..19: mol_type = other RNA
aggtatgtgactttgtgtt

SEQ ID NO: 42097 - RNA, 19 nt, synthetic construct
  misc_feature 1..19: note = siRNA antisense sequence
  source 1..19: mol_type = other RNA
aacacaaagtcacatacct

SEQ ID NO: 42098 - RNA, 19 nt, synthetic construct
  misc_feature 1..19: note = siRNA sense sequence
  source 1..19: mol_type = other RNA
ggtatgtgactttgtgttt

SEQ ID NO: 42099 - RNA, 19 nt, synthetic construct
  misc_feature 1..19: note = siRNA antisense sequence
  source 1..19: mol_type = other RNA
aaacacaaagtcacatacc

SEQ ID NO: 42100 - RNA, 19 nt, synthetic construct
  misc_feature 1..19: note = siRNA sense sequence
  source 1..19: mol_type = other RNA
gtatgtgactttgtgtttt

SEQ ID NO: 42101 - RNA, 19 nt, synthetic construct
  misc_feature 1..19: note = siRNA antisense sequence
  source 1..19: mol_type = other RNA
aaaacacaaagtcacatac

SEQ ID NO: 42102 - RNA, 19 nt, synthetic construct
  misc_feature 1..19: note = siRNA sense sequence
  source 1..19: mol_type = other RNA
gtgactttgtgttttgatt

SEQ ID NO: 42103 - RNA, 19 nt, synthetic construct
  misc_feature 1..19: note = siRNA antisense sequence
  source 1..19: mol_type = other RNA
aatcaaaacacaaagtcac

SEQ ID NO: 42104 - RNA, 19 nt, synthetic construct
  misc_feature 1..19: note = siRNA sense sequence
  source 1..19: mol_type = other RNA
gttttgatttctgttgttc

SEQ ID NO: 42105 - RNA, 19 nt, synthetic construct
  misc_feature 1..19: note = siRNA antisense sequence
  source 1..19: mol_type = other RNA
gaacaacagaaatcaaaac

SEQ ID NO: 42106 - RNA, 19 nt, synthetic construct
  misc_feature 1..19: note = siRNA sense sequence
  source 1..19: mol_type = other RNA
gatttctgttgttctaaag

SEQ ID NO: 42107 - RNA, 19 nt, synthetic construct
  misc_feature 1..19: note = siRNA antisense sequence
  source 1..19: mol_type = other RNA
ctttagaacaacagaaatc

SEQ ID NO: 42108 - RNA, 19 nt, synthetic construct
  misc_feature 1..19: note = siRNA sense sequence
  source 1..19: mol_type = other RNA
ttatatccatttcctgttc

SEQ ID NO: 42109 - RNA, 19 nt, synthetic construct
  misc_feature 1..19: note = siRNA antisense sequence
  source 1..19: mol_type = other RNA
gaacaggaaatggatataa

SEQ ID NO: 42110 - RNA, 19 nt, synthetic construct
  misc_feature 1..19: note = siRNA sense sequence
  source 1..19: mol_type = other RNA
tatatccatttcctgttct

SEQ ID NO: 42111 - RNA, 19 nt, synthetic construct
  misc_feature 1..19: note = siRNA antisense sequence
  source 1..19: mol_type = other RNA
agaacaggaaatggatata

SEQ ID NO: 42112 - RNA, 19 nt, synthetic construct
  misc_feature 1..19: note = siRNA sense sequence
  source 1..19: mol_type = other RNA
atatccatttcctgttctt

SEQ ID NO: 42113 - RNA, 19 nt, synthetic construct
  misc_feature 1..19: note = siRNA antisense sequence
  source 1..19: mol_type = other RNA
aagaacaggaaatggatat

SEQ ID NO: 42114 - RNA, 19 nt, synthetic construct
  misc_feature 1..19: note = siRNA sense sequence
  source 1..19: mol_type = other RNA
tatccatttcctgttctta

SEQ ID NO: 42115 - RNA, 19 nt, synthetic construct
  misc_feature 1..19: note = siRNA antisense sequence
  source 1..19: mol_type = other RNA
taagaacaggaaatggata

SEQ ID NO: 42116 - RNA, 19 nt, synthetic construct
  misc_feature 1..19: note = siRNA sense sequence
  source 1..19: mol_type = other RNA
atccatttcctgttcttat

SEQ ID NO: 42117 - RNA, 19 nt, synthetic construct
  misc_feature 1..19: note = siRNA antisense sequence
  source 1..19: mol_type = other RNA
ataagaacaggaaatggat

SEQ ID NO: 42118 - RNA, 19 nt, synthetic construct
  misc_feature 1..19: note = siRNA sense sequence
  source 1..19: mol_type = other RNA
tccatttcctgttcttatt

SEQ ID NO: 42119 - RNA, 19 nt, synthetic construct
  misc_feature 1..19: note = siRNA antisense sequence
  source 1..19: mol_type = other RNA
aataagaacaggaaatgga

SEQ ID NO: 42120 - RNA, 19 nt, synthetic construct
  misc_feature 1..19: note = siRNA sense sequence
  source 1..19: mol_type = other RNA
ccatttcctgttcttattt

SEQ ID NO: 42121 - RNA, 19 nt, synthetic construct
  misc_feature 1..19: note = siRNA antisense sequence
  source 1..19: mol_type = other RNA
aaataagaacaggaaatgg

SEQ ID NO: 42122 - RNA, 19 nt, synthetic construct
  misc_feature 1..19: note = siRNA sense sequence
  source 1..19: mol_type = other RNA
gacattactttaagctgtg

SEQ ID NO: 42123 - RNA, 19 nt, synthetic construct
  misc_feature 1..19: note = siRNA antisense sequence
  source 1..19: mol_type = other RNA
cacagcttaaagtaatgtc

SEQ ID NO: 42124 - RNA, 19 nt, synthetic construct
  misc_feature 1..19: note = siRNA sense sequence
  source 1..19: mol_type = other RNA
acattactttaagctgtgt

SEQ ID NO: 42125 - RNA, 19 nt, synthetic construct
  misc_feature 1..19: note = siRNA antisense sequence
  source 1..19: mol_type = other RNA
acacagcttaaagtaatgt

SEQ ID NO: 42126 - RNA, 19 nt, synthetic construct
  misc_feature 1..19: note = siRNA sense sequence
  source 1..19: mol_type = other RNA
cattactttaagctgtgtt

SEQ ID NO: 42127 - RNA, 19 nt, synthetic construct
  misc_feature 1..19: note = siRNA antisense sequence
  source 1..19: mol_type = other RNA
aacacagcttaaagtaatg

SEQ ID NO: 42128 - RNA, 19 nt, synthetic construct
  misc_feature 1..19: note = siRNA sense sequence
  source 1..19: mol_type = other RNA
agtctcactctgttgccca

SEQ ID NO: 42129 - RNA, 19 nt, synthetic construct
  misc_feature 1..19: note = siRNA antisense sequence
  source 1..19: mol_type = other RNA
tgggcaacagagtgagact

SEQ ID NO: 42130 - RNA, 19 nt, synthetic construct
  misc_feature 1..19: note = siRNA sense sequence
  source 1..19: mol_type = other RNA
gtctcactctgttgcccag

SEQ ID NO: 42131 - RNA, 19 nt, synthetic construct
  misc_feature 1..19: note = siRNA antisense sequence
  source 1..19: mol_type = other RNA
ctgggcaacagagtgagac

SEQ ID NO: 42132 - RNA, 19 nt, synthetic construct
  misc_feature 1..19: note = siRNA sense sequence
  source 1..19: mol_type = other RNA
tctcactctgttgcccagg

SEQ ID NO: 42133 - RNA, 19 nt, synthetic construct
  misc_feature 1..19: note = siRNA antisense sequence
  source 1..19: mol_type = other RNA
cctgggcaacagagtgaga

SEQ ID NO: 42134 - RNA, 19 nt, synthetic construct
  misc_feature 1..19: note = siRNA sense sequence
  source 1..19: mol_type = other RNA
ctcactctgttgcccaggc

SEQ ID NO: 42135 - RNA, 19 nt, synthetic construct
  misc_feature 1..19: note = siRNA antisense sequence
  source 1..19: mol_type = other RNA
gcctgggcaacagagtgag

SEQ ID NO: 42136 - RNA, 19 nt, synthetic construct
  misc_feature 1..19: note = siRNA sense sequence
  source 1..19: mol_type = other RNA
tcactctgttgcccaggct

SEQ ID NO: 42137 - RNA, 19 nt, synthetic construct
  misc_feature 1..19: note = siRNA antisense sequence
  source 1..19: mol_type = other RNA
agcctgggcaacagagtga

SEQ ID NO: 42138 - RNA, 19 nt, synthetic construct
  misc_feature 1..19: note = siRNA sense sequence
  source 1..19: mol_type = other RNA
cactctgttgcccaggctg

SEQ ID NO: 42139 - RNA, 19 nt, synthetic construct
  misc_feature 1..19: note = siRNA antisense sequence
  source 1..19: mol_type = other RNA
cagcctgggcaacagagtg

SEQ ID NO: 42140 - RNA, 19 nt, synthetic construct
  misc_feature 1..19: note = siRNA sense sequence
  source 1..19: mol_type = other RNA
actctgttgcccaggctgg

SEQ ID NO: 42141 - RNA, 19 nt, synthetic construct
  misc_feature 1..19: note = siRNA antisense sequence
  source 1..19: mol_type = other RNA
ccagcctgggcaacagagt

SEQ ID NO: 42142 - RNA, 19 nt, synthetic construct
  misc_feature 1..19: note = siRNA sense sequence
  source 1..19: mol_type = other RNA
ctctgttgcccaggctgga

SEQ ID NO: 42143 - RNA, 19 nt, synthetic construct
  misc_feature 1..19: note = siRNA antisense sequence
  source 1..19: mol_type = other RNA
tccagcctgggcaacagag

SEQ ID NO: 42144 - RNA, 19 nt, synthetic construct
  misc_feature 1..19: note = siRNA sense sequence
  source 1..19: mol_type = other RNA
tctgttgcccaggctggag

SEQ ID NO: 42145 - RNA, 19 nt, synthetic construct
  misc_feature 1..19: note = siRNA antisense sequence
  source 1..19: mol_type = other RNA
ctccagcctgggcaacaga

SEQ ID NO: 42146 - RNA, 19 nt, synthetic construct
  misc_feature 1..19: note = siRNA sense sequence
  source 1..19: mol_type = other RNA
ttgcccaggctggagtgca

SEQ ID NO: 42147 - RNA, 19 nt, synthetic construct
  misc_feature 1..19: note = siRNA antisense sequence
  source 1..19: mol_type = other RNA
tgcactccagcctgggcaa

SEQ ID NO: 42148 - RNA, 19 nt, synthetic construct
  misc_feature 1..19: note = siRNA sense sequence
  source 1..19: mol_type = other RNA
aggctggagtgcagtggtg

SEQ ID NO: 42149 - RNA, 19 nt, synthetic construct
  misc_feature 1..19: note = siRNA antisense sequence
  source 1..19: mol_type = other RNA
caccactgcactccagcct

SEQ ID NO: 42150 - RNA, 19 nt, synthetic construct
  misc_feature 1..19: note = siRNA sense sequence
  source 1..19: mol_type = other RNA
gtggtgcaatctcagctca

SEQ ID NO: 42151 - RNA, 19 nt, synthetic construct
  misc_feature 1..19: note = siRNA antisense sequence
  source 1..19: mol_type = other RNA
tgagctgagattgcaccac

SEQ ID NO: 42152 - RNA, 19 nt, synthetic construct
  misc_feature 1..19: note = siRNA sense sequence
  source 1..19: mol_type = other RNA
tggtgcaatctcagctcac

SEQ ID NO: 42153 - RNA, 19 nt, synthetic construct
  misc_feature 1..19: note = siRNA antisense sequence
  source 1..19: mol_type = other RNA
gtgagctgagattgcacca

SEQ ID NO: 42154 - RNA, 19 nt, synthetic construct
  misc_feature 1..19: note = siRNA sense sequence
  source 1..19: mol_type = other RNA
ggtgcaatctcagctcact

SEQ ID NO: 42155 - RNA, 19 nt, synthetic construct
  misc_feature 1..19: note = siRNA antisense sequence
  source 1..19: mol_type = other RNA
agtgagctgagattgcacc

SEQ ID NO: 42156 - RNA, 19 nt, synthetic construct
  misc_feature 1..19: note = siRNA sense sequence
  source 1..19: mol_type = other RNA
gtgcaatctcagctcactg

SEQ ID NO: 42157 - RNA, 19 nt, synthetic construct
  misc_feature 1..19: note = siRNA antisense sequence
  source 1..19: mol_type = other RNA
cagtgagctgagattgcac

SEQ ID NO: 42158 - RNA, 19 nt, synthetic construct
  misc_feature 1..19: note = siRNA sense sequence
  source 1..19: mol_type = other RNA
tgcaatctcagctcactgc

SEQ ID NO: 42159 - RNA, 19 nt, synthetic construct
  misc_feature 1..19: note = siRNA antisense sequence
  source 1..19: mol_type = other RNA
gcagtgagctgagattgca

SEQ ID NO: 42160 - RNA, 19 nt, synthetic construct
  misc_feature 1..19: note = siRNA sense sequence
  source 1..19: mol_type = other RNA
gcaatctcagctcactgca

SEQ ID NO: 42161 - RNA, 19 nt, synthetic construct
  misc_feature 1..19: note = siRNA antisense sequence
  source 1..19: mol_type = other RNA
tgcagtgagctgagattgc

SEQ ID NO: 42162 - RNA, 19 nt, synthetic construct
  misc_feature 1..19: note = siRNA sense sequence
  source 1..19: mol_type = other RNA
caatctcagctcactgcaa

SEQ ID NO: 42163 - RNA, 19 nt, synthetic construct
  misc_feature 1..19: note = siRNA antisense sequence
  source 1..19: mol_type = other RNA
ttgcagtgagctgagattg

SEQ ID NO: 42164 - RNA, 19 nt, synthetic construct
  misc_feature 1..19: note = siRNA sense sequence
  source 1..19: mol_type = other RNA
aatctcagctcactgcaac

SEQ ID NO: 42165 - RNA, 19 nt, synthetic construct
  misc_feature 1..19: note = siRNA antisense sequence
  source 1..19: mol_type = other RNA
gttgcagtgagctgagatt

SEQ ID NO: 42166 - RNA, 19 nt, synthetic construct
  misc_feature 1..19: note = siRNA sense sequence
  source 1..19: mol_type = other RNA
atctcagctcactgcaacc

SEQ ID NO: 42167 - RNA, 19 nt, synthetic construct
  misc_feature 1..19: note = siRNA antisense sequence
  source 1..19: mol_type = other RNA
ggttgcagtgagctgagat

SEQ ID NO: 42168 - RNA, 19 nt, synthetic construct
  misc_feature 1..19: note = siRNA sense sequence
  source 1..19: mol_type = other RNA
tctcagctcactgcaacct

SEQ ID NO: 42169 - RNA, 19 nt, synthetic construct
  misc_feature 1..19: note = siRNA antisense sequence
  source 1..19: mol_type = other RNA
aggttgcagtgagctgaga

SEQ ID NO: 42170 - RNA, 19 nt, synthetic construct
  misc_feature 1..19: note = siRNA sense sequence
  source 1..19: mol_type = other RNA
ctcagctcactgcaacctt

SEQ ID NO: 42171 - RNA, 19 nt, synthetic construct
  misc_feature 1..19: note = siRNA antisense sequence
  source 1..19: mol_type = other RNA
aaggttgcagtgagctgag

SEQ ID NO: 42172 - RNA, 19 nt, synthetic construct
  misc_feature 1..19: note = siRNA sense sequence
  source 1..19: mol_type = other RNA
gctcactgcaaccttcacc

SEQ ID NO: 42173 - RNA, 19 nt, synthetic construct
  misc_feature 1..19: note = siRNA antisense sequence
  source 1..19: mol_type = other RNA
ggtgaaggttgcagtgagc

SEQ ID NO: 42174 - RNA, 19 nt, synthetic construct
  misc_feature 1..19: note = siRNA sense sequence
  source 1..19: mol_type = other RNA
cttcacctcccaggctcaa

SEQ ID NO: 42175 - RNA, 19 nt, synthetic construct
  misc_feature 1..19: note = siRNA antisense sequence
  source 1..19: mol_type = other RNA
ttgagcctgggaggtgaag

SEQ ID NO: 42176 - RNA, 19 nt, synthetic construct
  misc_feature 1..19: note = siRNA sense sequence
  source 1..19: mol_type = other RNA
ttcacctcccaggctcaag

SEQ ID NO: 42177 - RNA, 19 nt, synthetic construct
  misc_feature 1..19: note = siRNA antisense sequence
  source 1..19: mol_type = other RNA
cttgagcctgggaggtgaa

SEQ ID NO: 42178 - RNA, 19 nt, synthetic construct
  misc_feature 1..19: note = siRNA sense sequence
  source 1..19: mol_type = other RNA
tcacctcccaggctcaagc

SEQ ID NO: 42179 - RNA, 19 nt, synthetic construct
  misc_feature 1..19: note = siRNA antisense sequence
  source 1..19: mol_type = other RNA
gcttgagcctgggaggtga

SEQ ID NO: 42180 - RNA, 19 nt, synthetic construct
  misc_feature 1..19: note = siRNA sense sequence
  source 1..19: mol_type = other RNA
cacctcccaggctcaagca

SEQ ID NO: 42181 - RNA, 19 nt, synthetic construct
  misc_feature 1..19: note = siRNA antisense sequence
  source 1..19: mol_type = other RNA
tgcttgagcctgggaggtg

SEQ ID NO: 42182 - RNA, 19 nt, synthetic construct
  misc_feature 1..19: note = siRNA sense sequence
  source 1..19: mol_type = other RNA
acctcccaggctcaagcaa

SEQ ID NO: 42183 - RNA, 19 nt, synthetic construct
  misc_feature 1..19: note = siRNA antisense sequence
  source 1..19: mol_type = other RNA
ttgcttgagcctgggaggt

SEQ ID NO: 42184 - RNA, 19 nt, synthetic construct
  misc_feature 1..19: note = siRNA sense sequence
  source 1..19: mol_type = other RNA
cctcccaggctcaagcaat

SEQ ID NO: 42185 - RNA, 19 nt, synthetic construct
  misc_feature 1..19: note = siRNA antisense sequence
  source 1..19: mol_type = other RNA
attgcttgagcctgggagg

SEQ ID NO: 42186 - RNA, 19 nt, synthetic construct
  misc_feature 1..19: note = siRNA sense sequence
  source 1..19: mol_type = other RNA
ctcccaggctcaagcaatt

SEQ ID NO: 42187 - RNA, 19 nt, synthetic construct
  misc_feature 1..19: note = siRNA antisense sequence
  source 1..19: mol_type = other RNA
aattgcttgagcctgggag

SEQ ID NO: 42188 - RNA, 19 nt, synthetic construct
  misc_feature 1..19: note = siRNA sense sequence
  source 1..19: mol_type = other RNA
caggctcaagcaattcata

SEQ ID NO: 42189 - RNA, 19 nt, synthetic construct
  misc_feature 1..19: note = siRNA antisense sequence
  source 1..19: mol_type = other RNA
tatgaattgcttgagcctg

SEQ ID NO: 42190 - RNA, 19 nt, synthetic construct
  misc_feature 1..19: note = siRNA sense sequence
  source 1..19: mol_type = other RNA
ggctcaagcaattcatatt

SEQ ID NO: 42191 - RNA, 19 nt, synthetic construct
  misc_feature 1..19: note = siRNA antisense sequence
  source 1..19: mol_type = other RNA
aatatgaattgcttgagcc

SEQ ID NO: 42192 - RNA, 19 nt, synthetic construct
  misc_feature 1..19: note = siRNA sense sequence
  source 1..19: mol_type = other RNA
gctcaagcaattcatattt

SEQ ID NO: 42193 - RNA, 19 nt, synthetic construct
  misc_feature 1..19: note = siRNA antisense sequence
  source 1..19: mol_type = other RNA
aaatatgaattgcttgagc

SEQ ID NO: 42194 - RNA, 19 nt, synthetic construct
  misc_feature 1..19: note = siRNA sense sequence
  source 1..19: mol_type = other RNA
ctcaagcaattcatatttc

SEQ ID NO: 42195 - RNA, 19 nt, synthetic construct
  misc_feature 1..19: note = siRNA antisense sequence
  source 1..19: mol_type = other RNA
gaaatatgaattgcttgag

SEQ ID NO: 42196 - RNA, 19 nt, synthetic construct
  misc_feature 1..19: note = siRNA sense sequence
  source 1..19: mol_type = other RNA
atttctcagcctctccaga

SEQ ID NO: 42197 - RNA, 19 nt, synthetic construct
  misc_feature 1..19: note = siRNA antisense sequence
  source 1..19: mol_type = other RNA
tctggagaggctgagaaat

SEQ ID NO: 42198 - RNA, 19 nt, synthetic construct
  misc_feature 1..19: note = siRNA sense sequence
  source 1..19: mol_type = other RNA
ctggaattacaggcatgcg

SEQ ID NO: 42199 - RNA, 19 nt, synthetic construct
  misc_feature 1..19: note = siRNA antisense sequence
  source 1..19: mol_type = other RNA
cgcatgcctgtaattccag

SEQ ID NO: 42200 - RNA, 19 nt, synthetic construct
  misc_feature 1..19: note = siRNA sense sequence
  source 1..19: mol_type = other RNA
tggaattacaggcatgcgc

SEQ ID NO: 42201 - RNA, 19 nt, synthetic construct
  misc_feature 1..19: note = siRNA antisense sequence
  source 1..19: mol_type = other RNA
gcgcatgcctgtaattcca

SEQ ID NO: 42202 - RNA, 19 nt, synthetic construct
  misc_feature 1..19: note = siRNA sense sequence
  source 1..19: mol_type = other RNA
ggaattacaggcatgcgcc

SEQ ID NO: 42203 - RNA, 19 nt, synthetic construct
  misc_feature 1..19: note = siRNA antisense sequence
  source 1..19: mol_type = other RNA
ggcgcatgcctgtaattcc

SEQ ID NO: 42204 - RNA, 19 nt, synthetic construct
  misc_feature 1..19: note = siRNA sense sequence
  source 1..19: mol_type = other RNA
gaattacaggcatgcgcca

SEQ ID NO: 42205 - RNA, 19 nt, synthetic construct
  misc_feature 1..19: note = siRNA antisense sequence
  source 1..19: mol_type = other RNA
tggcgcatgcctgtaattc

SEQ ID NO: 42206 - RNA, 19 nt, synthetic construct
  misc_feature 1..19: note = siRNA sense sequence
  source 1..19: mol_type = other RNA
tacaggcatgcgccatcac

SEQ ID NO: 42207 - RNA, 19 nt, synthetic construct
  misc_feature 1..19: note = siRNA antisense sequence
  source 1..19: mol_type = other RNA
gtgatggcgcatgcctgta

SEQ ID NO: 42208 - RNA, 19 nt, synthetic construct
  misc_feature 1..19: note = siRNA sense sequence
  source 1..19: mol_type = other RNA
acaggcatgcgccatcaca

SEQ ID NO: 42209 - RNA, 19 nt, synthetic construct
  misc_feature 1..19: note = siRNA antisense sequence
  source 1..19: mol_type = other RNA
tgtgatggcgcatgcctgt

SEQ ID NO: 42210 - RNA, 19 nt, synthetic construct
  misc_feature 1..19: note = siRNA sense sequence
  source 1..19: mol_type = other RNA
ccatcacacctggctaatt

SEQ ID NO: 42211 - RNA, 19 nt, synthetic construct
  misc_feature 1..19: note = siRNA antisense sequence
  source 1..19: mol_type = other RNA
aattagccaggtgtgatgg

SEQ ID NO: 42212 - RNA, 19 nt, synthetic construct
  misc_feature 1..19: note = siRNA sense sequence
  source 1..19: mol_type = other RNA
catcacacctggctaattt

SEQ ID NO: 42213 - RNA, 19 nt, synthetic construct
  misc_feature 1..19: note = siRNA antisense sequence
  source 1..19: mol_type = other RNA
aaattagccaggtgtgatg

SEQ ID NO: 42214 - RNA, 19 nt, synthetic construct
  misc_feature 1..19: note = siRNA sense sequence
  source 1..19: mol_type = other RNA
atcacacctggctaatttt

SEQ ID NO: 42215 - RNA, 19 nt, synthetic construct
  misc_feature 1..19: note = siRNA antisense sequence
  source 1..19: mol_type = other RNA
aaaattagccaggtgtgat

SEQ ID NO: 42216 - RNA, 19 nt, synthetic construct
  misc_feature 1..19: note = siRNA sense sequence
  source 1..19: mol_type = other RNA
catcatgttggccaggctg

SEQ ID NO: 42217 - RNA, 19 nt, synthetic construct
  misc_feature 1..19: note = siRNA antisense sequence
  source 1..19: mol_type = other RNA
cagcctggccaacatgatg

SEQ ID NO: 42218 - RNA, 19 nt, synthetic construct
  misc_feature 1..19: note = siRNA sense sequence
  source 1..19: mol_type = other RNA
atcatgttggccaggctgg

SEQ ID NO: 42219 - RNA, 19 nt, synthetic construct
  misc_feature 1..19: note = siRNA antisense sequence
  source 1..19: mol_type = other RNA
ccagcctggccaacatgat

SEQ ID NO: 42220 - RNA, 19 nt, synthetic construct
  misc_feature 1..19: note = siRNA sense sequence
  source 1..19: mol_type = other RNA
tcatgttggccaggctggt

SEQ ID NO: 42221 - RNA, 19 nt, synthetic construct
  misc_feature 1..19: note = siRNA antisense sequence
  source 1..19: mol_type = other RNA
accagcctggccaacatga

SEQ ID NO: 42222 - RNA, 19 nt, synthetic construct
  misc_feature 1..19: note = siRNA sense sequence
  source 1..19: mol_type = other RNA
catgttggccaggctggtc

SEQ ID NO: 42223 - RNA, 19 nt, synthetic construct
  misc_feature 1..19: note = siRNA antisense sequence
  source 1..19: mol_type = other RNA
gaccagcctggccaacatg

SEQ ID NO: 42224 - RNA, 19 nt, synthetic construct
  misc_feature 1..19: note = siRNA sense sequence
  source 1..19: mol_type = other RNA
atgttggccaggctggtct

SEQ ID NO: 42225 - RNA, 19 nt, synthetic construct
  misc_feature 1..19: note = siRNA antisense sequence
  source 1..19: mol_type = other RNA
agaccagcctggccaacat

SEQ ID NO: 42226 - RNA, 19 nt, synthetic construct
  misc_feature 1..19: note = siRNA sense sequence
  source 1..19: mol_type = other RNA
tgttggccaggctggtctc

SEQ ID NO: 42227 - RNA, 19 nt, synthetic construct
  misc_feature 1..19: note = siRNA antisense sequence
  source 1..19: mol_type = other RNA
gagaccagcctggccaaca

SEQ ID NO: 42228 - RNA, 19 nt, synthetic construct
  misc_feature 1..19: note = siRNA sense sequence
  source 1..19: mol_type = other RNA
gttggccaggctggtctca

SEQ ID NO: 42229 - RNA, 19 nt, synthetic construct
  misc_feature 1..19: note = siRNA antisense sequence
  source 1..19: mol_type = other RNA
tgagaccagcctggccaac

SEQ ID NO: 42230 - RNA, 19 nt, synthetic construct
  misc_feature 1..19: note = siRNA sense sequence
  source 1..19: mol_type = other RNA
ttggccaggctggtctcaa

SEQ ID NO: 42231 - RNA, 19 nt, synthetic construct
  misc_feature 1..19: note = siRNA antisense sequence
  source 1..19: mol_type = other RNA
ttgagaccagcctggccaa

SEQ ID NO: 42232 - RNA, 19 nt, synthetic construct
  misc_feature 1..19: note = siRNA sense sequence
  source 1..19: mol_type = other RNA
tggccaggctggtctcaaa

SEQ ID NO: 42233 - RNA, 19 nt, synthetic construct
  misc_feature 1..19: note = siRNA antisense sequence
  source 1..19: mol_type = other RNA
tttgagaccagcctggcca

SEQ ID NO: 42234 - RNA, 19 nt, synthetic construct
  misc_feature 1..19: note = siRNA sense sequence
  source 1..19: mol_type = other RNA
tgcctctcaaagcattggt

SEQ ID NO: 42235 - RNA, 19 nt, synthetic construct
  misc_feature 1..19: note = siRNA antisense sequence
  source 1..19: mol_type = other RNA
accaatgctttgagaggca

SEQ ID NO: 42236 - RNA, 19 nt, synthetic construct
  misc_feature 1..19: note = siRNA sense sequence
  source 1..19: mol_type = other RNA
tcaaagcattggtattaca

SEQ ID NO: 42237 - RNA, 19 nt, synthetic construct
  misc_feature 1..19: note = siRNA antisense sequence
  source 1..19: mol_type = other RNA
tgtaataccaatgctttga

SEQ ID NO: 42238 - RNA, 19 nt, synthetic construct
  misc_feature 1..19: note = siRNA sense sequence
  source 1..19: mol_type = other RNA
attggtattacaggcgtga

SEQ ID NO: 42239 - RNA, 19 nt, synthetic construct
  misc_feature 1..19: note = siRNA antisense sequence
  source 1..19: mol_type = other RNA
tcacgcctgtaataccaat

SEQ ID NO: 42240 - RNA, 19 nt, synthetic construct
  misc_feature 1..19: note = siRNA sense sequence
  source 1..19: mol_type = other RNA
ttggtattacaggcgtgag

SEQ ID NO: 42241 - RNA, 19 nt, synthetic construct
  misc_feature 1..19: note = siRNA antisense sequence
  source 1..19: mol_type = other RNA
ctcacgcctgtaataccaa

SEQ ID NO: 42242 - RNA, 19 nt, synthetic construct
  misc_feature 1..19: note = siRNA sense sequence
  source 1..19: mol_type = other RNA
tggtattacaggcgtgagc

SEQ ID NO: 42243 - RNA, 19 nt, synthetic construct
  misc_feature 1..19: note = siRNA antisense sequence
  source 1..19: mol_type = other RNA
gctcacgcctgtaatacca

SEQ ID NO: 42244 - RNA, 19 nt, synthetic construct
  misc_feature 1..19: note = siRNA sense sequence
  source 1..19: mol_type = other RNA
attacaggcgtgagccact

SEQ ID NO: 42245 - RNA, 19 nt, synthetic construct
  misc_feature 1..19: note = siRNA antisense sequence
  source 1..19: mol_type = other RNA
agtggctcacgcctgtaat

SEQ ID NO: 42246 - RNA, 19 nt, synthetic construct
  misc_feature 1..19: note = siRNA sense sequence
  source 1..19: mol_type = other RNA
cgtgagccactgtgcccaa

SEQ ID NO: 42247 - RNA, 19 nt, synthetic construct
  misc_feature 1..19: note = siRNA antisense sequence
  source 1..19: mol_type = other RNA
ttgggcacagtggctcacg

SEQ ID NO: 42248 - RNA, 19 nt, synthetic construct
  misc_feature 1..19: note = siRNA sense sequence
  source 1..19: mol_type = other RNA
gtgagccactgtgcccaac

SEQ ID NO: 42249 - RNA, 19 nt, synthetic construct
  misc_feature 1..19: note = siRNA antisense sequence
  source 1..19: mol_type = other RNA
gttgggcacagtggctcac

SEQ ID NO: 42250 - RNA, 19 nt, synthetic construct
  misc_feature 1..19: note = siRNA sense sequence
  source 1..19: mol_type = other RNA
gtgcccaacctaggctgtg

SEQ ID NO: 42251 - RNA, 19 nt, synthetic construct
  misc_feature 1..19: note = siRNA antisense sequence
  source 1..19: mol_type = other RNA
cacagcctaggttgggcac

SEQ ID NO: 42252 - RNA, 19 nt, synthetic construct
  misc_feature 1..19: note = siRNA sense sequence
  source 1..19: mol_type = other RNA
tgcccaacctaggctgtgt

SEQ ID NO: 42253 - RNA, 19 nt, synthetic construct
  misc_feature 1..19: note = siRNA antisense sequence
  source 1..19: mol_type = other RNA
acacagcctaggttgggca

SEQ ID NO: 42254 - RNA, 19 nt, synthetic construct
  misc_feature 1..19: note = siRNA sense sequence
  source 1..19: mol_type = other RNA
gcccaacctaggctgtgtt

SEQ ID NO: 42255 - RNA, 19 nt, synthetic construct
  misc_feature 1..19: note = siRNA antisense sequence
  source 1..19: mol_type = other RNA
aacacagcctaggttgggc

SEQ ID NO: 42256 - RNA, 19 nt, synthetic construct
  misc_feature 1..19: note = siRNA sense sequence
  source 1..19: mol_type = other RNA
cccaacctaggctgtgtta

SEQ ID NO: 42257 - RNA, 19 nt, synthetic construct
  misc_feature 1..19: note = siRNA antisense sequence
  source 1..19: mol_type = other RNA
taacacagcctaggttggg

SEQ ID NO: 42258 - RNA, 19 nt, synthetic construct
  misc_feature 1..19: note = siRNA sense sequence
  source 1..19: mol_type = other RNA
ccaacctaggctgtgttat

SEQ ID NO: 42259 - RNA, 19 nt, synthetic construct
  misc_feature 1..19: note = siRNA antisense sequence
  source 1..19: mol_type = other RNA
ataacacagcctaggttgg

SEQ ID NO: 42260 - RNA, 19 nt, synthetic construct
  misc_feature 1..19: note = siRNA sense sequence
  source 1..19: mol_type = other RNA
caacctaggctgtgttatt

SEQ ID NO: 42261 - RNA, 19 nt, synthetic construct
  misc_feature 1..19: note = siRNA antisense sequence
  source 1..19: mol_type = other RNA
aataacacagcctaggttg

SEQ ID NO: 42262 - RNA, 19 nt, synthetic construct
  misc_feature 1..19: note = siRNA sense sequence
  source 1..19: mol_type = other RNA
aacctaggctgtgttattt

SEQ ID NO: 42263 - RNA, 19 nt, synthetic construct
  misc_feature 1..19: note = siRNA antisense sequence
  source 1..19: mol_type = other RNA
aaataacacagcctaggtt

SEQ ID NO: 42264 - RNA, 19 nt, synthetic construct
  misc_feature 1..19: note = siRNA sense sequence
  source 1..19: mol_type = other RNA
cctaggctgtgttattttc

SEQ ID NO: 42265 - RNA, 19 nt, synthetic construct
  misc_feature 1..19: note = siRNA antisense sequence
  source 1..19: mol_type = other RNA
gaaaataacacagcctagg

SEQ ID NO: 42266 - RNA, 19 nt, synthetic construct
  misc_feature 1..19: note = siRNA sense sequence
  source 1..19: mol_type = other RNA
ctaggctgtgttattttct

SEQ ID NO: 42267 - RNA, 19 nt, synthetic construct
  misc_feature 1..19: note = siRNA antisense sequence
  source 1..19: mol_type = other RNA
agaaaataacacagcctag

SEQ ID NO: 42268 - RNA, 19 nt, synthetic construct
  misc_feature 1..19: note = siRNA sense sequence
  source 1..19: mol_type = other RNA
taggctgtgttattttcta

SEQ ID NO: 42269 - RNA, 19 nt, synthetic construct
  misc_feature 1..19: note = siRNA antisense sequence
  source 1..19: mol_type = other RNA
tagaaaataacacagccta

SEQ ID NO: 42270 - RNA, 19 nt, synthetic construct
  misc_feature 1..19: note = siRNA sense sequence
  source 1..19: mol_type = other RNA
aggctgtgttattttctaa

SEQ ID NO: 42271 - RNA, 19 nt, synthetic construct
  misc_feature 1..19: note = siRNA antisense sequence
  source 1..19: mol_type = other RNA
ttagaaaataacacagcct

SEQ ID NO: 42272 - RNA, 19 nt, synthetic construct
  misc_feature 1..19: note = siRNA sense sequence
  source 1..19: mol_type = other RNA
acttaaaatggatatagcc

SEQ ID NO: 42273 - RNA, 19 nt, synthetic construct
  misc_feature 1..19: note = siRNA antisense sequence
  source 1..19: mol_type = other RNA
ggctatatccattttaagt

SEQ ID NO: 42274 - RNA, 19 nt, synthetic construct
  misc_feature 1..19: note = siRNA sense sequence
  source 1..19: mol_type = other RNA
cttaaaatggatatagcca

SEQ ID NO: 42275 - RNA, 19 nt, synthetic construct
  misc_feature 1..19: note = siRNA antisense sequence
  source 1..19: mol_type = other RNA
tggctatatccattttaag

SEQ ID NO: 42276 - RNA, 19 nt, synthetic construct
  misc_feature 1..19: note = siRNA sense sequence
  source 1..19: mol_type = other RNA
ttaaaatggatatagccac

SEQ ID NO: 42277 - RNA, 19 nt, synthetic construct
  misc_feature 1..19: note = siRNA antisense sequence
  source 1..19: mol_type = other RNA
gtggctatatccattttaa

SEQ ID NO: 42278 - RNA, 19 nt, synthetic construct
  misc_feature 1..19: note = siRNA sense sequence
  source 1..19: mol_type = other RNA
taaaatggatatagccact

SEQ ID NO: 42279 - RNA, 19 nt, synthetic construct
  misc_feature 1..19: note = siRNA antisense sequence
  source 1..19: mol_type = other RNA
agtggctatatccatttta

SEQ ID NO: 42280 - RNA, 19 nt, synthetic construct
  misc_feature 1..19: note = siRNA sense sequence
  source 1..19: mol_type = other RNA
aaaatggatatagccactt

SEQ ID NO: 42281 - RNA, 19 nt, synthetic construct
  misc_feature 1..19: note = siRNA antisense sequence
  source 1..19: mol_type = other RNA
aagtggctatatccatttt

SEQ ID NO: 42282 - RNA, 19 nt, synthetic construct
  misc_feature 1..19: note = siRNA sense sequence
  source 1..19: mol_type = other RNA
tggatatagccacttttgg

SEQ ID NO: 42283 - RNA, 19 nt, synthetic construct
  misc_feature 1..19: note = siRNA antisense sequence
  source 1..19: mol_type = other RNA
ccaaaagtggctatatcca

SEQ ID NO: 42284 - RNA, 19 nt, synthetic construct
  misc_feature 1..19: note = siRNA sense sequence
  source 1..19: mol_type = other RNA
ggatatagccacttttggt

SEQ ID NO: 42285 - RNA, 19 nt, synthetic construct
  misc_feature 1..19: note = siRNA antisense sequence
  source 1..19: mol_type = other RNA
accaaaagtggctatatcc

SEQ ID NO: 42286 - RNA, 19 nt, synthetic construct
  misc_feature 1..19: note = siRNA sense sequence
  source 1..19: mol_type = other RNA
gatatagccacttttggta

SEQ ID NO: 42287 - RNA, 19 nt, synthetic construct
  misc_feature 1..19: note = siRNA antisense sequence
  source 1..19: mol_type = other RNA
taccaaaagtggctatatc

SEQ ID NO: 42288 - RNA, 19 nt, synthetic construct
  misc_feature 1..19: note = siRNA sense sequence
  source 1..19: mol_type = other RNA
atatagccacttttggtaa

SEQ ID NO: 42289 - RNA, 19 nt, synthetic construct
  misc_feature 1..19: note = siRNA antisense sequence
  source 1..19: mol_type = other RNA
ttaccaaaagtggctatat

SEQ ID NO: 42290 - RNA, 19 nt, synthetic construct
  misc_feature 1..19: note = siRNA sense sequence
  source 1..19: mol_type = other RNA
tatagccacttttggtaat

SEQ ID NO: 42291 - RNA, 19 nt, synthetic construct
  misc_feature 1..19: note = siRNA antisense sequence
  source 1..19: mol_type = other RNA
attaccaaaagtggctata

SEQ ID NO: 42292 - RNA, 19 nt, synthetic construct
  misc_feature 1..19: note = siRNA sense sequence
  source 1..19: mol_type = other RNA
atagccacttttggtaatg

SEQ ID NO: 42293 - RNA, 19 nt, synthetic construct
  misc_feature 1..19: note = siRNA antisense sequence
  source 1..19: mol_type = other RNA
cattaccaaaagtggctat

SEQ ID NO: 42294 - RNA, 19 nt, synthetic construct
  misc_feature 1..19: note = siRNA sense sequence
  source 1..19: mol_type = other RNA
ccgggtgtcagagtttgta

SEQ ID NO: 42295 - RNA, 19 nt, synthetic construct
  misc_feature 1..19: note = siRNA antisense sequence
  source 1..19: mol_type = other RNA
tacaaactctgacacccgg

SEQ ID NO: 42296 - RNA, 19 nt, synthetic construct
  misc_feature 1..19: note = siRNA sense sequence
  source 1..19: mol_type = other RNA
cgggtgtcagagtttgtaa

SEQ ID NO: 42297 - RNA, 19 nt, synthetic construct
  misc_feature 1..19: note = siRNA antisense sequence
  source 1..19: mol_type = other RNA
ttacaaactctgacacccg

SEQ ID NO: 42298 - RNA, 19 nt, synthetic construct
  misc_feature 1..19: note = siRNA sense sequence
  source 1..19: mol_type = other RNA
gggtgtcagagtttgtaaa

SEQ ID NO: 42299 - RNA, 19 nt, synthetic construct
  misc_feature 1..19: note = siRNA antisense sequence
  source 1..19: mol_type = other RNA
tttacaaactctgacaccc

SEQ ID NO: 42300 - RNA, 19 nt, synthetic construct
  misc_feature 1..19: note = siRNA sense sequence
  source 1..19: mol_type = other RNA
ggtgtcagagtttgtaaaa

SEQ ID NO: 42301 - RNA, 19 nt, synthetic construct
  misc_feature 1..19: note = siRNA antisense sequence
  source 1..19: mol_type = other RNA
ttttacaaactctgacacc

SEQ ID NO: 42302 - RNA, 19 nt, synthetic construct
  misc_feature 1..19: note = siRNA sense sequence
  source 1..19: mol_type = other RNA
aacccatcacattataatc

SEQ ID NO: 42303 - RNA, 19 nt, synthetic construct
  misc_feature 1..19: note = siRNA antisense sequence
  source 1..19: mol_type = other RNA
gattataatgtgatgggtt

SEQ ID NO: 42304 - RNA, 19 nt, synthetic construct
  misc_feature 1..19: note = siRNA sense sequence
  source 1..19: mol_type = other RNA
acccatcacattataatct

SEQ ID NO: 42305 - RNA, 19 nt, synthetic construct
  misc_feature 1..19: note = siRNA antisense sequence
  source 1..19: mol_type = other RNA
agattataatgtgatgggt

SEQ ID NO: 42306 - RNA, 19 nt, synthetic construct
  misc_feature 1..19: note = siRNA sense sequence
  source 1..19: mol_type = other RNA
cccatcacattataatctc

SEQ ID NO: 42307 - RNA, 19 nt, synthetic construct
  misc_feature 1..19: note = siRNA antisense sequence
  source 1..19: mol_type = other RNA
gagattataatgtgatggg

SEQ ID NO: 42308 - RNA, 19 nt, synthetic construct
  misc_feature 1..19: note = siRNA sense sequence
  source 1..19: mol_type = other RNA
catcacattataatctctc

SEQ ID NO: 42309 - RNA, 19 nt, synthetic construct
  misc_feature 1..19: note = siRNA antisense sequence
  source 1..19: mol_type = other RNA
gagagattataatgtgatg

SEQ ID NO: 42310 - RNA, 19 nt, synthetic construct
  misc_feature 1..19: note = siRNA sense sequence
  source 1..19: mol_type = other RNA
cattataatctctcctctc

SEQ ID NO: 42311 - RNA, 19 nt, synthetic construct
  misc_feature 1..19: note = siRNA antisense sequence
  source 1..19: mol_type = other RNA
gagaggagagattataatg

SEQ ID NO: 42312 - RNA, 19 nt, synthetic construct
  misc_feature 1..19: note = siRNA sense sequence
  source 1..19: mol_type = other RNA
attataatctctcctctca

SEQ ID NO: 42313 - RNA, 19 nt, synthetic construct
  misc_feature 1..19: note = siRNA antisense sequence
  source 1..19: mol_type = other RNA
tgagaggagagattataat

SEQ ID NO: 42314 - RNA, 19 nt, synthetic construct
  misc_feature 1..19: note = siRNA sense sequence
  source 1..19: mol_type = other RNA
ttataatctctcctctcat

SEQ ID NO: 42315 - RNA, 19 nt, synthetic construct
  misc_feature 1..19: note = siRNA antisense sequence
  source 1..19: mol_type = other RNA
atgagaggagagattataa

SEQ ID NO: 42316 - RNA, 19 nt, synthetic construct
  misc_feature 1..19: note = siRNA sense sequence
  source 1..19: mol_type = other RNA
tataatctctcctctcata

SEQ ID NO: 42317 - RNA, 19 nt, synthetic construct
  misc_feature 1..19: note = siRNA antisense sequence
  source 1..19: mol_type = other RNA
tatgagaggagagattata

SEQ ID NO: 42318 - RNA, 19 nt, synthetic construct
  misc_feature 1..19: note = siRNA sense sequence
  source 1..19: mol_type = other RNA
ataatctctcctctcatat

SEQ ID NO: 42319 - RNA, 19 nt, synthetic construct
  misc_feature 1..19: note = siRNA antisense sequence
  source 1..19: mol_type = other RNA
atatgagaggagagattat

SEQ ID NO: 42320 - RNA, 19 nt, synthetic construct
  misc_feature 1..19: note = siRNA sense sequence
  source 1..19: mol_type = other RNA
taatctctcctctcatatt

SEQ ID NO: 42321 - RNA, 19 nt, synthetic construct
  misc_feature 1..19: note = siRNA antisense sequence
  source 1..19: mol_type = other RNA
aatatgagaggagagatta

SEQ ID NO: 42322 - RNA, 19 nt, synthetic construct
  misc_feature 1..19: note = siRNA sense sequence
  source 1..19: mol_type = other RNA
aatctctcctctcatatta

SEQ ID NO: 42323 - RNA, 19 nt, synthetic construct
  misc_feature 1..19: note = siRNA antisense sequence
  source 1..19: mol_type = other RNA
taatatgagaggagagatt

SEQ ID NO: 42324 - RNA, 19 nt, synthetic construct
  misc_feature 1..19: note = siRNA sense sequence
  source 1..19: mol_type = other RNA
tagtaactgaccagaggat

SEQ ID NO: 42325 - RNA, 19 nt, synthetic construct
  misc_feature 1..19: note = siRNA antisense sequence
  source 1..19: mol_type = other RNA
atcctctggtcagttacta

SEQ ID NO: 42326 - RNA, 19 nt, synthetic construct
  misc_feature 1..19: note = siRNA sense sequence
  source 1..19: mol_type = other RNA
agtaactgaccagaggata

SEQ ID NO: 42327 - RNA, 19 nt, synthetic construct
  misc_feature 1..19: note = siRNA antisense sequence
  source 1..19: mol_type = other RNA
tatcctctggtcagttact

SEQ ID NO: 42328 - RNA, 19 nt, synthetic construct
  misc_feature 1..19: note = siRNA sense sequence
  source 1..19: mol_type = other RNA
gtaactgaccagaggatac

SEQ ID NO: 42329 - RNA, 19 nt, synthetic construct
  misc_feature 1..19: note = siRNA antisense sequence
  source 1..19: mol_type = other RNA
gtatcctctggtcagttac

SEQ ID NO: 42330 - RNA, 19 nt, synthetic construct
  misc_feature 1..19: note = siRNA sense sequence
  source 1..19: mol_type = other RNA
taactgaccagaggatact

SEQ ID NO: 42331 - RNA, 19 nt, synthetic construct
  misc_feature 1..19: note = siRNA antisense sequence
  source 1..19: mol_type = other RNA
agtatcctctggtcagtta

SEQ ID NO: 42332 - RNA, 19 nt, synthetic construct
  misc_feature 1..19: note = siRNA sense sequence
  source 1..19: mol_type = other RNA
aactgaccagaggatacta

SEQ ID NO: 42333 - RNA, 19 nt, synthetic construct
  misc_feature 1..19: note = siRNA antisense sequence
  source 1..19: mol_type = other RNA
tagtatcctctggtcagtt

SEQ ID NO: 42334 - RNA, 19 nt, synthetic construct
  misc_feature 1..19: note = siRNA sense sequence
  source 1..19: mol_type = other RNA
actgaccagaggatactac

SEQ ID NO: 42335 - RNA, 19 nt, synthetic construct
  misc_feature 1..19: note = siRNA antisense sequence
  source 1..19: mol_type = other RNA
gtagtatcctctggtcagt

SEQ ID NO: 42336 - RNA, 19 nt, synthetic construct
  misc_feature 1..19: note = siRNA sense sequence
  source 1..19: mol_type = other RNA
ctgaccagaggatactact

SEQ ID NO: 42337 - RNA, 19 nt, synthetic construct
  misc_feature 1..19: note = siRNA antisense sequence
  source 1..19: mol_type = other RNA
agtagtatcctctggtcag

SEQ ID NO: 42338 - RNA, 19 nt, synthetic construct
  misc_feature 1..19: note = siRNA sense sequence
  source 1..19: mol_type = other RNA
tgaccagaggatactactt

SEQ ID NO: 42339 - RNA, 19 nt, synthetic construct
  misc_feature 1..19: note = siRNA antisense sequence
  source 1..19: mol_type = other RNA
aagtagtatcctctggtca

SEQ ID NO: 42340 - RNA, 19 nt, synthetic construct
  misc_feature 1..19: note = siRNA sense sequence
  source 1..19: mol_type = other RNA
gaccagaggatactactta

SEQ ID NO: 42341 - RNA, 19 nt, synthetic construct
  misc_feature 1..19: note = siRNA antisense sequence
  source 1..19: mol_type = other RNA
taagtagtatcctctggtc

SEQ ID NO: 42342 - RNA, 19 nt, synthetic construct
  misc_feature 1..19: note = siRNA sense sequence
  source 1..19: mol_type = other RNA
accagaggatactacttaa

SEQ ID NO: 42343 - RNA, 19 nt, synthetic construct
  misc_feature 1..19: note = siRNA antisense sequence
  source 1..19: mol_type = other RNA
ttaagtagtatcctctggt

SEQ ID NO: 42344 - RNA, 19 nt, synthetic construct
  misc_feature 1..19: note = siRNA sense sequence
  source 1..19: mol_type = other RNA
ccagaggatactacttaaa

SEQ ID NO: 42345 - RNA, 19 nt, synthetic construct
  misc_feature 1..19: note = siRNA antisense sequence
  source 1..19: mol_type = other RNA
tttaagtagtatcctctgg

SEQ ID NO: 42346 - RNA, 19 nt, synthetic construct
  misc_feature 1..19: note = siRNA sense sequence
  source 1..19: mol_type = other RNA
cagaggatactacttaaag

SEQ ID NO: 42347 - RNA, 19 nt, synthetic construct
  misc_feature 1..19: note = siRNA antisense sequence
  source 1..19: mol_type = other RNA
ctttaagtagtatcctctg

SEQ ID NO: 42348 - RNA, 19 nt, synthetic construct
  misc_feature 1..19: note = siRNA sense sequence
  source 1..19: mol_type = other RNA
agaggatactacttaaagc

SEQ ID NO: 42349 - RNA, 19 nt, synthetic construct
  misc_feature 1..19: note = siRNA antisense sequence
  source 1..19: mol_type = other RNA
gctttaagtagtatcctct

SEQ ID NO: 42350 - RNA, 19 nt, synthetic construct
  misc_feature 1..19: note = siRNA sense sequence
  source 1..19: mol_type = other RNA
gaggatactacttaaagcc

SEQ ID NO: 42351 - RNA, 19 nt, synthetic construct
  misc_feature 1..19: note = siRNA antisense sequence
  source 1..19: mol_type = other RNA
ggctttaagtagtatcctc

SEQ ID NO: 42352 - RNA, 19 nt, synthetic construct
  misc_feature 1..19: note = siRNA sense sequence
  source 1..19: mol_type = other RNA
tactacttaaagcctgttg

SEQ ID NO: 42353 - RNA, 19 nt, synthetic construct
  misc_feature 1..19: note = siRNA antisense sequence
  source 1..19: mol_type = other RNA
caacaggctttaagtagta

SEQ ID NO: 42354 - RNA, 19 nt, synthetic construct
  misc_feature 1..19: note = siRNA sense sequence
  source 1..19: mol_type = other RNA
actacttaaagcctgttgt

SEQ ID NO: 42355 - RNA, 19 nt, synthetic construct
  misc_feature 1..19: note = siRNA antisense sequence
  source 1..19: mol_type = other RNA
acaacaggctttaagtagt

SEQ ID NO: 42356 - RNA, 19 nt, synthetic construct
  misc_feature 1..19: note = siRNA sense sequence
  source 1..19: mol_type = other RNA
ctacttaaagcctgttgtc

SEQ ID NO: 42357 - RNA, 19 nt, synthetic construct
  misc_feature 1..19: note = siRNA antisense sequence
  source 1..19: mol_type = other RNA
gacaacaggctttaagtag

SEQ ID NO: 42358 - RNA, 19 nt, synthetic construct
  misc_feature 1..19: note = siRNA sense sequence
  source 1..19: mol_type = other RNA
tacttaaagcctgttgtcc

SEQ ID NO: 42359 - RNA, 19 nt, synthetic construct
  misc_feature 1..19: note = siRNA antisense sequence
  source 1..19: mol_type = other RNA
ggacaacaggctttaagta

SEQ ID NO: 42360 - RNA, 19 nt, synthetic construct
  misc_feature 1..19: note = siRNA sense sequence
  source 1..19: mol_type = other RNA
acttaaagcctgttgtcct

SEQ ID NO: 42361 - RNA, 19 nt, synthetic construct
  misc_feature 1..19: note = siRNA antisense sequence
  source 1..19: mol_type = other RNA
aggacaacaggctttaagt

SEQ ID NO: 42362 - RNA, 19 nt, synthetic construct
  misc_feature 1..19: note = siRNA sense sequence
  source 1..19: mol_type = other RNA
cttaaagcctgttgtcctt

SEQ ID NO: 42363 - RNA, 19 nt, synthetic construct
  misc_feature 1..19: note = siRNA antisense sequence
  source 1..19: mol_type = other RNA
aaggacaacaggctttaag

SEQ ID NO: 42364 - RNA, 19 nt, synthetic construct
  misc_feature 1..19: note = siRNA sense sequence
  source 1..19: mol_type = other RNA
cctggctatctctgcataa

SEQ ID NO: 42365 - RNA, 19 nt, synthetic construct
  misc_feature 1..19: note = siRNA antisense sequence
  source 1..19: mol_type = other RNA
ttatgcagagatagccagg

SEQ ID NO: 42366 - RNA, 19 nt, synthetic construct
  misc_feature 1..19: note = siRNA sense sequence
  source 1..19: mol_type = other RNA
ctggctatctctgcataaa

SEQ ID NO: 42367 - RNA, 19 nt, synthetic construct
  misc_feature 1..19: note = siRNA antisense sequence
  source 1..19: mol_type = other RNA
tttatgcagagatagccag

SEQ ID NO: 42368 - RNA, 19 nt, synthetic construct
  misc_feature 1..19: note = siRNA sense sequence
  source 1..19: mol_type = other RNA
tggctatctctgcataaaa

SEQ ID NO: 42369 - RNA, 19 nt, synthetic construct
  misc_feature 1..19: note = siRNA antisense sequence
  source 1..19: mol_type = other RNA
ttttatgcagagatagcca

SEQ ID NO: 42370 - RNA, 19 nt, synthetic construct
  misc_feature 1..19: note = siRNA sense sequence
  source 1..19: mol_type = other RNA
ggctatctctgcataaaat

SEQ ID NO: 42371 - RNA, 19 nt, synthetic construct
  misc_feature 1..19: note = siRNA antisense sequence
  source 1..19: mol_type = other RNA
attttatgcagagatagcc

SEQ ID NO: 42372 - RNA, 19 nt, synthetic construct
  misc_feature 1..19: note = siRNA sense sequence
  source 1..19: mol_type = other RNA
gctatctctgcataaaatc

SEQ ID NO: 42373 - RNA, 19 nt, synthetic construct
  misc_feature 1..19: note = siRNA antisense sequence
  source 1..19: mol_type = other RNA
gattttatgcagagatagc

SEQ ID NO: 42374 - RNA, 19 nt, synthetic construct
  misc_feature 1..19: note = siRNA sense sequence
  source 1..19: mol_type = other RNA
ctatctctgcataaaatca

SEQ ID NO: 42375 - RNA, 19 nt, synthetic construct
  misc_feature 1..19: note = siRNA antisense sequence
  source 1..19: mol_type = other RNA
tgattttatgcagagatag

SEQ ID NO: 42376 - RNA, 19 nt, synthetic construct
  misc_feature 1..19: note = siRNA sense sequence
  source 1..19: mol_type = other RNA
atagttgtttgtttatccc

SEQ ID NO: 42377 - RNA, 19 nt, synthetic construct
  misc_feature 1..19: note = siRNA antisense sequence
  source 1..19: mol_type = other RNA
gggataaacaaacaactat

SEQ ID NO: 42378 - RNA, 19 nt, synthetic construct
  misc_feature 1..19: note = siRNA sense sequence
  source 1..19: mol_type = other RNA
cacatctcctttattgcca

SEQ ID NO: 42379 - RNA, 19 nt, synthetic construct
  misc_feature 1..19: note = siRNA antisense sequence
  source 1..19: mol_type = other RNA
tggcaataaaggagatgtg

SEQ ID NO: 42380 - RNA, 19 nt, synthetic construct
  misc_feature 1..19: note = siRNA sense sequence
  source 1..19: mol_type = other RNA
acatctcctttattgccac

SEQ ID NO: 42381 - RNA, 19 nt, synthetic construct
  misc_feature 1..19: note = siRNA antisense sequence
  source 1..19: mol_type = other RNA
gtggcaataaaggagatgt

SEQ ID NO: 42382 - RNA, 19 nt, synthetic construct
  misc_feature 1..19: note = siRNA sense sequence
  source 1..19: mol_type = other RNA
catctcctttattgccact

SEQ ID NO: 42383 - RNA, 19 nt, synthetic construct
  misc_feature 1..19: note = siRNA antisense sequence
  source 1..19: mol_type = other RNA
agtggcaataaaggagatg

SEQ ID NO: 42384 - RNA, 19 nt, synthetic construct
  misc_feature 1..19: note = siRNA sense sequence
  source 1..19: mol_type = other RNA
atctcctttattgccacta

SEQ ID NO: 42385 - RNA, 19 nt, synthetic construct
  misc_feature 1..19: note = siRNA antisense sequence
  source 1..19: mol_type = other RNA
tagtggcaataaaggagat

SEQ ID NO: 42386 - RNA, 19 nt, synthetic construct
  misc_feature 1..19: note = siRNA sense sequence
  source 1..19: mol_type = other RNA
tattgccactaaatgaagt

SEQ ID NO: 42387 - RNA, 19 nt, synthetic construct
  misc_feature 1..19: note = siRNA antisense sequence
  source 1..19: mol_type = other RNA
acttcatttagtggcaata

SEQ ID NO: 42388 - RNA, 19 nt, synthetic construct
  misc_feature 1..19: note = siRNA sense sequence
  source 1..19: mol_type = other RNA
cagcttttccactttagat

SEQ ID NO: 42389 - RNA, 19 nt, synthetic construct
  misc_feature 1..19: note = siRNA antisense sequence
  source 1..19: mol_type = other RNA
atctaaagtggaaaagctg

SEQ ID NO: 42390 - RNA, 19 nt, synthetic construct
  misc_feature 1..19: note = siRNA sense sequence
  source 1..19: mol_type = other RNA
agcttttccactttagata

SEQ ID NO: 42391 - RNA, 19 nt, synthetic construct
  misc_feature 1..19: note = siRNA antisense sequence
  source 1..19: mol_type = other RNA
tatctaaagtggaaaagct

SEQ ID NO: 42392 - RNA, 19 nt, synthetic construct
  misc_feature 1..19: note = siRNA sense sequence
  source 1..19: mol_type = other RNA
gcttttccactttagatac

SEQ ID NO: 42393 - RNA, 19 nt, synthetic construct
  misc_feature 1..19: note = siRNA antisense sequence
  source 1..19: mol_type = other RNA
gtatctaaagtggaaaagc

SEQ ID NO: 42394 - RNA, 19 nt, synthetic construct
  misc_feature 1..19: note = siRNA sense sequence
  source 1..19: mol_type = other RNA
cttttccactttagatact

SEQ ID NO: 42395 - RNA, 19 nt, synthetic construct
  misc_feature 1..19: note = siRNA antisense sequence
  source 1..19: mol_type = other RNA
agtatctaaagtggaaaag

SEQ ID NO: 42396 - RNA, 19 nt, synthetic construct
  misc_feature 1..19: note = siRNA sense sequence
  source 1..19: mol_type = other RNA
tttccactttagatactga

SEQ ID NO: 42397 - RNA, 19 nt, synthetic construct
  misc_feature 1..19: note = siRNA antisense sequence
  source 1..19: mol_type = other RNA
tcagtatctaaagtggaaa

SEQ ID NO: 42398 - RNA, 19 nt, synthetic construct
  misc_feature 1..19: note = siRNA sense sequence
  source 1..19: mol_type = other RNA
ttccactttagatactgag

SEQ ID NO: 42399 - RNA, 19 nt, synthetic construct
  misc_feature 1..19: note = siRNA antisense sequence
  source 1..19: mol_type = other RNA
ctcagtatctaaagtggaa

SEQ ID NO: 42400 - RNA, 19 nt, synthetic construct
  misc_feature 1..19: note = siRNA sense sequence
  source 1..19: mol_type = other RNA
aatacagggcagacataat

SEQ ID NO: 42401 - RNA, 19 nt, synthetic construct
  misc_feature 1..19: note = siRNA antisense sequence
  source 1..19: mol_type = other RNA
attatgtctgccctgtatt

SEQ ID NO: 42402 - RNA, 19 nt, synthetic construct
  misc_feature 1..19: note = siRNA sense sequence
  source 1..19: mol_type = other RNA
atacagggcagacataatg

SEQ ID NO: 42403 - RNA, 19 nt, synthetic construct
  misc_feature 1..19: note = siRNA antisense sequence
  source 1..19: mol_type = other RNA
cattatgtctgccctgtat

SEQ ID NO: 42404 - RNA, 19 nt, synthetic construct
  misc_feature 1..19: note = siRNA sense sequence
  source 1..19: mol_type = other RNA
tacagggcagacataatgg

SEQ ID NO: 42405 - RNA, 19 nt, synthetic construct
  misc_feature 1..19: note = siRNA antisense sequence
  source 1..19: mol_type = other RNA
ccattatgtctgccctgta

SEQ ID NO: 42406 - RNA, 19 nt, synthetic construct
  misc_feature 1..19: note = siRNA sense sequence
  source 1..19: mol_type = other RNA
acagggcagacataatgga

SEQ ID NO: 42407 - RNA, 19 nt, synthetic construct
  misc_feature 1..19: note = siRNA antisense sequence
  source 1..19: mol_type = other RNA
tccattatgtctgccctgt

SEQ ID NO: 42408 - RNA, 19 nt, synthetic construct
  misc_feature 1..19: note = siRNA sense sequence
  source 1..19: mol_type = other RNA
cagggcagacataatggat

SEQ ID NO: 42409 - RNA, 19 nt, synthetic construct
  misc_feature 1..19: note = siRNA antisense sequence
  source 1..19: mol_type = other RNA
atccattatgtctgccctg

SEQ ID NO: 42410 - RNA, 19 nt, synthetic construct
  misc_feature 1..19: note = siRNA sense sequence
  source 1..19: mol_type = other RNA
gggcagacataatggataa

SEQ ID NO: 42411 - RNA, 19 nt, synthetic construct
  misc_feature 1..19: note = siRNA antisense sequence
  source 1..19: mol_type = other RNA
ttatccattatgtctgccc

SEQ ID NO: 42412 - RNA, 19 nt, synthetic construct
  misc_feature 1..19: note = siRNA sense sequence
  source 1..19: mol_type = other RNA
ggcagacataatggataac

SEQ ID NO: 42413 - RNA, 19 nt, synthetic construct
  misc_feature 1..19: note = siRNA antisense sequence
  source 1..19: mol_type = other RNA
gttatccattatgtctgcc

SEQ ID NO: 42414 - RNA, 19 nt, synthetic construct
  misc_feature 1..19: note = siRNA sense sequence
  source 1..19: mol_type = other RNA
acaggcaaataaaatgtca

SEQ ID NO: 42415 - RNA, 19 nt, synthetic construct
  misc_feature 1..19: note = siRNA antisense sequence
  source 1..19: mol_type = other RNA
tgacattttatttgcctgt

SEQ ID NO: 42416 - RNA, 19 nt, synthetic construct
  misc_feature 1..19: note = siRNA sense sequence
  source 1..19: mol_type = other RNA
caggcaaataaaatgtcaa

SEQ ID NO: 42417 - RNA, 19 nt, synthetic construct
  misc_feature 1..19: note = siRNA antisense sequence
  source 1..19: mol_type = other RNA
ttgacattttatttgcctg

SEQ ID NO: 42418 - RNA, 19 nt, synthetic construct
  misc_feature 1..19: note = siRNA sense sequence
  source 1..19: mol_type = other RNA
tgtcaaaatgaagtcaatg

SEQ ID NO: 42419 - RNA, 19 nt, synthetic construct
  misc_feature 1..19: note = siRNA antisense sequence
  source 1..19: mol_type = other RNA
cattgacttcattttgaca

SEQ ID NO: 42420 - RNA, 19 nt, synthetic construct
  misc_feature 1..19: note = siRNA sense sequence
  source 1..19: mol_type = other RNA
gtcaaaatgaagtcaatgc

SEQ ID NO: 42421 - RNA, 19 nt, synthetic construct
  misc_feature 1..19: note = siRNA antisense sequence
  source 1..19: mol_type = other RNA
gcattgacttcattttgac

SEQ ID NO: 42422 - RNA, 19 nt, synthetic construct
  misc_feature 1..19: note = siRNA sense sequence
  source 1..19: mol_type = other RNA
tcaaaatgaagtcaatgcc

SEQ ID NO: 42423 - RNA, 19 nt, synthetic construct
  misc_feature 1..19: note = siRNA antisense sequence
  source 1..19: mol_type = other RNA
ggcattgacttcattttga

SEQ ID NO: 42424 - RNA, 19 nt, synthetic construct
  misc_feature 1..19: note = siRNA sense sequence
  source 1..19: mol_type = other RNA
caaaatgaagtcaatgcct

SEQ ID NO: 42425 - RNA, 19 nt, synthetic construct
  misc_feature 1..19: note = siRNA antisense sequence
  source 1..19: mol_type = other RNA
aggcattgacttcattttg

SEQ ID NO: 42426 - RNA, 19 nt, synthetic construct
  misc_feature 1..19: note = siRNA sense sequence
  source 1..19: mol_type = other RNA
aggtcaggaattagcccta

SEQ ID NO: 42427 - RNA, 19 nt, synthetic construct
  misc_feature 1..19: note = siRNA antisense sequence
  source 1..19: mol_type = other RNA
tagggctaattcctgacct

SEQ ID NO: 42428 - RNA, 19 nt, synthetic construct
  misc_feature 1..19: note = siRNA sense sequence
  source 1..19: mol_type = other RNA
ggtcaggaattagccctag

SEQ ID NO: 42429 - RNA, 19 nt, synthetic construct
  misc_feature 1..19: note = siRNA antisense sequence
  source 1..19: mol_type = other RNA
ctagggctaattcctgacc

SEQ ID NO: 42430 - RNA, 19 nt, synthetic construct
  misc_feature 1..19: note = siRNA sense sequence
  source 1..19: mol_type = other RNA
gtcaggaattagccctaga

SEQ ID NO: 42431 - RNA, 19 nt, synthetic construct
  misc_feature 1..19: note = siRNA antisense sequence
  source 1..19: mol_type = other RNA
tctagggctaattcctgac

SEQ ID NO: 42432 - RNA, 19 nt, synthetic construct
  misc_feature 1..19: note = siRNA sense sequence
  source 1..19: mol_type = other RNA
tcaggaattagccctagaa

SEQ ID NO: 42433 - RNA, 19 nt, synthetic construct
  misc_feature 1..19: note = siRNA antisense sequence
  source 1..19: mol_type = other RNA
ttctagggctaattcctga

SEQ ID NO: 42434 - RNA, 19 nt, synthetic construct
  misc_feature 1..19: note = siRNA sense sequence
  source 1..19: mol_type = other RNA
aggaattagccctagaatc

SEQ ID NO: 42435 - RNA, 19 nt, synthetic construct
  misc_feature 1..19: note = siRNA antisense sequence
  source 1..19: mol_type = other RNA
gattctagggctaattcct

SEQ ID NO: 42436 - RNA, 19 nt, synthetic construct
  misc_feature 1..19: note = siRNA sense sequence
  source 1..19: mol_type = other RNA
ggaattagccctagaatca

SEQ ID NO: 42437 - RNA, 19 nt, synthetic construct
  misc_feature 1..19: note = siRNA antisense sequence
  source 1..19: mol_type = other RNA
tgattctagggctaattcc

SEQ ID NO: 42438 - RNA, 19 nt, synthetic construct
  misc_feature 1..19: note = siRNA sense sequence
  source 1..19: mol_type = other RNA
ccctagaatcagagcctaa

SEQ ID NO: 42439 - RNA, 19 nt, synthetic construct
  misc_feature 1..19: note = siRNA antisense sequence
  source 1..19: mol_type = other RNA
ttaggctctgattctaggg

SEQ ID NO: 42440 - RNA, 19 nt, synthetic construct
  misc_feature 1..19: note = siRNA sense sequence
  source 1..19: mol_type = other RNA
cctagaatcagagcctaaa

SEQ ID NO: 42441 - RNA, 19 nt, synthetic construct
  misc_feature 1..19: note = siRNA antisense sequence
  source 1..19: mol_type = other RNA
tttaggctctgattctagg

SEQ ID NO: 42442 - RNA, 19 nt, synthetic construct
  misc_feature 1..19: note = siRNA sense sequence
  source 1..19: mol_type = other RNA
tagaatcagagcctaaaag

SEQ ID NO: 42443 - RNA, 19 nt, synthetic construct
  misc_feature 1..19: note = siRNA antisense sequence
  source 1..19: mol_type = other RNA
cttttaggctctgattcta

SEQ ID NO: 42444 - RNA, 19 nt, synthetic construct
  misc_feature 1..19: note = siRNA sense sequence
  source 1..19: mol_type = other RNA
agaatcagagcctaaaaga

SEQ ID NO: 42445 - RNA, 19 nt, synthetic construct
  misc_feature 1..19: note = siRNA antisense sequence
  source 1..19: mol_type = other RNA
tcttttaggctctgattct

SEQ ID NO: 42446 - RNA, 19 nt, synthetic construct
  misc_feature 1..19: note = siRNA sense sequence
  source 1..19: mol_type = other RNA
gaatcagagcctaaaagat

SEQ ID NO: 42447 - RNA, 19 nt, synthetic construct
  misc_feature 1..19: note = siRNA antisense sequence
  source 1..19: mol_type = other RNA
atcttttaggctctgattc

SEQ ID NO: 42448 - RNA, 19 nt, synthetic construct
  misc_feature 1..19: note = siRNA sense sequence
  source 1..19: mol_type = other RNA
atcagagcctaaaagattg

SEQ ID NO: 42449 - RNA, 19 nt, synthetic construct
  misc_feature 1..19: note = siRNA antisense sequence
  source 1..19: mol_type = other RNA
caatcttttaggctctgat

SEQ ID NO: 42450 - RNA, 19 nt, synthetic construct
  misc_feature 1..19: note = siRNA sense sequence
  source 1..19: mol_type = other RNA
tcagagcctaaaagattgt

SEQ ID NO: 42451 - RNA, 19 nt, synthetic construct
  misc_feature 1..19: note = siRNA antisense sequence
  source 1..19: mol_type = other RNA
acaatcttttaggctctga

SEQ ID NO: 42452 - RNA, 19 nt, synthetic construct
  misc_feature 1..19: note = siRNA sense sequence
  source 1..19: mol_type = other RNA
gcctaaaagattgttgtgt

SEQ ID NO: 42453 - RNA, 19 nt, synthetic construct
  misc_feature 1..19: note = siRNA antisense sequence
  source 1..19: mol_type = other RNA
acacaacaatcttttaggc

SEQ ID NO: 42454 - RNA, 19 nt, synthetic construct
  misc_feature 1..19: note = siRNA sense sequence
  source 1..19: mol_type = other RNA
cctaaaagattgttgtgtg

SEQ ID NO: 42455 - RNA, 19 nt, synthetic construct
  misc_feature 1..19: note = siRNA antisense sequence
  source 1..19: mol_type = other RNA
cacacaacaatcttttagg

SEQ ID NO: 42456 - RNA, 19 nt, synthetic construct
  misc_feature 1..19: note = siRNA sense sequence
  source 1..19: mol_type = other RNA
ctaaaagattgttgtgtgg

SEQ ID NO: 42457 - RNA, 19 nt, synthetic construct
  misc_feature 1..19: note = siRNA antisense sequence
  source 1..19: mol_type = other RNA
ccacacaacaatcttttag

SEQ ID NO: 42458 - RNA, 19 nt, synthetic construct
  misc_feature 1..19: note = siRNA sense sequence
  source 1..19: mol_type = other RNA
attgttgtgtggtttggag

SEQ ID NO: 42459 - RNA, 19 nt, synthetic construct
  misc_feature 1..19: note = siRNA antisense sequence
  source 1..19: mol_type = other RNA
ctccaaaccacacaacaat

SEQ ID NO: 42460 - RNA, 19 nt, synthetic construct
  misc_feature 1..19: note = siRNA sense sequence
  source 1..19: mol_type = other RNA
ttgttgtgtggtttggagg

SEQ ID NO: 42461 - RNA, 19 nt, synthetic construct
  misc_feature 1..19: note = siRNA antisense sequence
  source 1..19: mol_type = other RNA
cctccaaaccacacaacaa

SEQ ID NO: 42462 - RNA, 19 nt, synthetic construct
  misc_feature 1..19: note = siRNA sense sequence
  source 1..19: mol_type = other RNA
tgttgtgtggtttggaggc

SEQ ID NO: 42463 - RNA, 19 nt, synthetic construct
  misc_feature 1..19: note = siRNA antisense sequence
  source 1..19: mol_type = other RNA
gcctccaaaccacacaaca

SEQ ID NO: 42464 - RNA, 19 nt, synthetic construct
  misc_feature 1..19: note = siRNA sense sequence
  source 1..19: mol_type = other RNA
gttgtgtggtttggaggct

SEQ ID NO: 42465 - RNA, 19 nt, synthetic construct
  misc_feature 1..19: note = siRNA antisense sequence
  source 1..19: mol_type = other RNA
agcctccaaaccacacaac

SEQ ID NO: 42466 - RNA, 19 nt, synthetic construct
  misc_feature 1..19: note = siRNA sense sequence
  source 1..19: mol_type = other RNA
ttgtgtggtttggaggctg

SEQ ID NO: 42467 - RNA, 19 nt, synthetic construct
  misc_feature 1..19: note = siRNA antisense sequence
  source 1..19: mol_type = other RNA
cagcctccaaaccacacaa

SEQ ID NO: 42468 - RNA, 19 nt, synthetic construct
  misc_feature 1..19: note = siRNA sense sequence
  source 1..19: mol_type = other RNA
tgtgtggtttggaggctgt

SEQ ID NO: 42469 - RNA, 19 nt, synthetic construct
  misc_feature 1..19: note = siRNA antisense sequence
  source 1..19: mol_type = other RNA
acagcctccaaaccacaca

SEQ ID NO: 42470 - RNA, 19 nt, synthetic construct
  misc_feature 1..19: note = siRNA sense sequence
  source 1..19: mol_type = other RNA
gtgtggtttggaggctgta

SEQ ID NO: 42471 - RNA, 19 nt, synthetic construct
  misc_feature 1..19: note = siRNA antisense sequence
  source 1..19: mol_type = other RNA
tacagcctccaaaccacac

SEQ ID NO: 42472 - RNA, 19 nt, synthetic construct
  misc_feature 1..19: note = siRNA sense sequence
  source 1..19: mol_type = other RNA
atagtactgcaatcaatac

SEQ ID NO: 42473 - RNA, 19 nt, synthetic construct
  misc_feature 1..19: note = siRNA antisense sequence
  source 1..19: mol_type = other RNA
gtattgattgcagtactat

SEQ ID NO: 42474 - RNA, 19 nt, synthetic construct
  misc_feature 1..19: note = siRNA sense sequence
  source 1..19: mol_type = other RNA
tagtactgcaatcaataca

SEQ ID NO: 42475 - RNA, 19 nt, synthetic construct
  misc_feature 1..19: note = siRNA antisense sequence
  source 1..19: mol_type = other RNA
tgtattgattgcagtacta

SEQ ID NO: 42476 - RNA, 19 nt, synthetic construct
  misc_feature 1..19: note = siRNA sense sequence
  source 1..19: mol_type = other RNA
agtactgcaatcaatacag

SEQ ID NO: 42477 - RNA, 19 nt, synthetic construct
  misc_feature 1..19: note = siRNA antisense sequence
  source 1..19: mol_type = other RNA
ctgtattgattgcagtact

SEQ ID NO: 42478 - RNA, 19 nt, synthetic construct
  misc_feature 1..19: note = siRNA sense sequence
  source 1..19: mol_type = other RNA
aatacagtgatcttccttt

SEQ ID NO: 42479 - RNA, 19 nt, synthetic construct
  misc_feature 1..19: note = siRNA antisense sequence
  source 1..19: mol_type = other RNA
aaaggaagatcactgtatt

SEQ ID NO: 42480 - RNA, 19 nt, synthetic construct
  misc_feature 1..19: note = siRNA sense sequence
  source 1..19: mol_type = other RNA
atacagtgatcttcctttt

SEQ ID NO: 42481 - RNA, 19 nt, synthetic construct
  misc_feature 1..19: note = siRNA antisense sequence
  source 1..19: mol_type = other RNA
aaaaggaagatcactgtat

SEQ ID NO: 42482 - RNA, 19 nt, synthetic construct
  misc_feature 1..19: note = siRNA sense sequence
  source 1..19: mol_type = other RNA
cagactgactgcgttaatg

SEQ ID NO: 42483 - RNA, 19 nt, synthetic construct
  misc_feature 1..19: note = siRNA antisense sequence
  source 1..19: mol_type = other RNA
cattaacgcagtcagtctg

SEQ ID NO: 42484 - RNA, 19 nt, synthetic construct
  misc_feature 1..19: note = siRNA sense sequence
  source 1..19: mol_type = other RNA
tgactgcgttaatgtttgc

SEQ ID NO: 42485 - RNA, 19 nt, synthetic construct
  misc_feature 1..19: note = siRNA antisense sequence
  source 1..19: mol_type = other RNA
gcaaacattaacgcagtca

SEQ ID NO: 42486 - RNA, 19 nt, synthetic construct
  misc_feature 1..19: note = siRNA sense sequence
  source 1..19: mol_type = other RNA
gactgcgttaatgtttgcc

SEQ ID NO: 42487 - RNA, 19 nt, synthetic construct
  misc_feature 1..19: note = siRNA antisense sequence
  source 1..19: mol_type = other RNA
ggcaaacattaacgcagtc

SEQ ID NO: 42488 - RNA, 19 nt, synthetic construct
  misc_feature 1..19: note = siRNA sense sequence
  source 1..19: mol_type = other RNA
actgcgttaatgtttgcca

SEQ ID NO: 42489 - RNA, 19 nt, synthetic construct
  misc_feature 1..19: note = siRNA antisense sequence
  source 1..19: mol_type = other RNA
tggcaaacattaacgcagt

SEQ ID NO: 42490 - RNA, 19 nt, synthetic construct
  misc_feature 1..19: note = siRNA sense sequence
  source 1..19: mol_type = other RNA
ctgcgttaatgtttgccac

SEQ ID NO: 42491 - RNA, 19 nt, synthetic construct
  misc_feature 1..19: note = siRNA antisense sequence
  source 1..19: mol_type = other RNA
gtggcaaacattaacgcag

SEQ ID NO: 42492 - RNA, 19 nt, synthetic construct
  misc_feature 1..19: note = siRNA sense sequence
  source 1..19: mol_type = other RNA
tgcgttaatgtttgccaca

SEQ ID NO: 42493 - RNA, 19 nt, synthetic construct
  misc_feature 1..19: note = siRNA antisense sequence
  source 1..19: mol_type = other RNA
tgtggcaaacattaacgca

SEQ ID NO: 42494 - RNA, 19 nt, synthetic construct
  misc_feature 1..19: note = siRNA sense sequence
  source 1..19: mol_type = other RNA
gcgttaatgtttgccacac

SEQ ID NO: 42495 - RNA, 19 nt, synthetic construct
  misc_feature 1..19: note = siRNA antisense sequence
  source 1..19: mol_type = other RNA
gtgtggcaaacattaacgc

SEQ ID NO: 42496 - RNA, 19 nt, synthetic construct
  misc_feature 1..19: note = siRNA sense sequence
  source 1..19: mol_type = other RNA
taatgtttgccacacctac

SEQ ID NO: 42497 - RNA, 19 nt, synthetic construct
  misc_feature 1..19: note = siRNA antisense sequence
  source 1..19: mol_type = other RNA
gtaggtgtggcaaacatta

SEQ ID NO: 42498 - RNA, 19 nt, synthetic construct
  misc_feature 1..19: note = siRNA sense sequence
  source 1..19: mol_type = other RNA
tttgccacacctacattaa

SEQ ID NO: 42499 - RNA, 19 nt, synthetic construct
  misc_feature 1..19: note = siRNA antisense sequence
  source 1..19: mol_type = other RNA
ttaatgtaggtgtggcaaa

SEQ ID NO: 42500 - RNA, 19 nt, synthetic construct
  misc_feature 1..19: note = siRNA sense sequence
  source 1..19: mol_type = other RNA
ttgccacacctacattaaa

SEQ ID NO: 42501 - RNA, 19 nt, synthetic construct
  misc_feature 1..19: note = siRNA antisense sequence
  source 1..19: mol_type = other RNA
tttaatgtaggtgtggcaa

SEQ ID NO: 42502 - RNA, 19 nt, synthetic construct
  misc_feature 1..19: note = siRNA sense sequence
  source 1..19: mol_type = other RNA
tgccacacctacattaaat

SEQ ID NO: 42503 - RNA, 19 nt, synthetic construct
  misc_feature 1..19: note = siRNA antisense sequence
  source 1..19: mol_type = other RNA
atttaatgtaggtgtggca

SEQ ID NO: 42504 - RNA, 19 nt, synthetic construct
  misc_feature 1..19: note = siRNA sense sequence
  source 1..19: mol_type = other RNA
atgtgtcttcatgtgtctg

SEQ ID NO: 42505 - RNA, 19 nt, synthetic construct
  misc_feature 1..19: note = siRNA antisense sequence
  source 1..19: mol_type = other RNA
cagacacatgaagacacat

SEQ ID NO: 42506 - RNA, 19 nt, synthetic construct
  misc_feature 1..19: note = siRNA sense sequence
  source 1..19: mol_type = other RNA
tgtgtcttcatgtgtctgt

SEQ ID NO: 42507 - RNA, 19 nt, synthetic construct
  misc_feature 1..19: note = siRNA antisense sequence
  source 1..19: mol_type = other RNA
acagacacatgaagacaca

SEQ ID NO: 42508 - RNA, 19 nt, synthetic construct
  misc_feature 1..19: note = siRNA sense sequence
  source 1..19: mol_type = other RNA
gtgtcttcatgtgtctgtg

SEQ ID NO: 42509 - RNA, 19 nt, synthetic construct
  misc_feature 1..19: note = siRNA antisense sequence
  source 1..19: mol_type = other RNA
cacagacacatgaagacac

SEQ ID NO: 42510 - RNA, 19 nt, synthetic construct
  misc_feature 1..19: note = siRNA sense sequence
  source 1..19: mol_type = other RNA
ctgtgtatatttatgtctc

SEQ ID NO: 42511 - RNA, 19 nt, synthetic construct
  misc_feature 1..19: note = siRNA antisense sequence
  source 1..19: mol_type = other RNA
gagacataaatatacacag

SEQ ID NO: 42512 - RNA, 19 nt, synthetic construct
  misc_feature 1..19: note = siRNA sense sequence
  source 1..19: mol_type = other RNA
attttctaaaaggatggtg

SEQ ID NO: 42513 - RNA, 19 nt, synthetic construct
  misc_feature 1..19: note = siRNA antisense sequence
  source 1..19: mol_type = other RNA
caccatccttttagaaaat

SEQ ID NO: 42514 - RNA, 19 nt, synthetic construct
  misc_feature 1..19: note = siRNA sense sequence
  source 1..19: mol_type = other RNA
ttttctaaaaggatggtgg

SEQ ID NO: 42515 - RNA, 19 nt, synthetic construct
  misc_feature 1..19: note = siRNA antisense sequence
  source 1..19: mol_type = other RNA
ccaccatccttttagaaaa

SEQ ID NO: 42516 - RNA, 19 nt, synthetic construct
  misc_feature 1..19: note = siRNA sense sequence
  source 1..19: mol_type = other RNA
tttctaaaaggatggtggt

SEQ ID NO: 42517 - RNA, 19 nt, synthetic construct
  misc_feature 1..19: note = siRNA antisense sequence
  source 1..19: mol_type = other RNA
accaccatccttttagaaa

SEQ ID NO: 42518 - RNA, 19 nt, synthetic construct
  misc_feature 1..19: note = siRNA sense sequence
  source 1..19: mol_type = other RNA
ttctaaaaggatggtggtt

SEQ ID NO: 42519 - RNA, 19 nt, synthetic construct
  misc_feature 1..19: note = siRNA antisense sequence
  source 1..19: mol_type = other RNA
aaccaccatccttttagaa

SEQ ID NO: 42520 - RNA, 19 nt, synthetic construct
  misc_feature 1..19: note = siRNA sense sequence
  source 1..19: mol_type = other RNA
tctaaaaggatggtggttg

SEQ ID NO: 42521 - RNA, 19 nt, synthetic construct
  misc_feature 1..19: note = siRNA antisense sequence
  source 1..19: mol_type = other RNA
caaccaccatccttttaga

SEQ ID NO: 42522 - RNA, 19 nt, synthetic construct
  misc_feature 1..19: note = siRNA sense sequence
  source 1..19: mol_type = other RNA
ctaaaaggatggtggttga

SEQ ID NO: 42523 - RNA, 19 nt, synthetic construct
  misc_feature 1..19: note = siRNA antisense sequence
  source 1..19: mol_type = other RNA
tcaaccaccatccttttag

SEQ ID NO: 42524 - RNA, 19 nt, synthetic construct
  misc_feature 1..19: note = siRNA sense sequence
  source 1..19: mol_type = other RNA
taaaaggatggtggttgaa

SEQ ID NO: 42525 - RNA, 19 nt, synthetic construct
  misc_feature 1..19: note = siRNA antisense sequence
  source 1..19: mol_type = other RNA
ttcaaccaccatcctttta

SEQ ID NO: 42526 - RNA, 19 nt, synthetic construct
  misc_feature 1..19: note = siRNA sense sequence
  source 1..19: mol_type = other RNA
tgtattgctgcattccaag

SEQ ID NO: 42527 - RNA, 19 nt, synthetic construct
  misc_feature 1..19: note = siRNA antisense sequence
  source 1..19: mol_type = other RNA
cttggaatgcagcaataca

SEQ ID NO: 42528 - RNA, 19 nt, synthetic construct
  misc_feature 1..19: note = siRNA sense sequence
  source 1..19: mol_type = other RNA
ttgctgcattccaaggctg

SEQ ID NO: 42529 - RNA, 19 nt, synthetic construct
  misc_feature 1..19: note = siRNA antisense sequence
  source 1..19: mol_type = other RNA
cagccttggaatgcagcaa

SEQ ID NO: 42530 - RNA, 19 nt, synthetic construct
  misc_feature 1..19: note = siRNA sense sequence
  source 1..19: mol_type = other RNA
tgctgcattccaaggctga

SEQ ID NO: 42531 - RNA, 19 nt, synthetic construct
  misc_feature 1..19: note = siRNA antisense sequence
  source 1..19: mol_type = other RNA
tcagccttggaatgcagca

SEQ ID NO: 42532 - RNA, 19 nt, synthetic construct
  misc_feature 1..19: note = siRNA sense sequence
  source 1..19: mol_type = other RNA
gctgcattccaaggctgaa

SEQ ID NO: 42533 - RNA, 19 nt, synthetic construct
  misc_feature 1..19: note = siRNA antisense sequence
  source 1..19: mol_type = other RNA
ttcagccttggaatgcagc

SEQ ID NO: 42534 - RNA, 19 nt, synthetic construct
  misc_feature 1..19: note = siRNA sense sequence
  source 1..19: mol_type = other RNA
ttccaaggctgaataggtc

SEQ ID NO: 42535 - RNA, 19 nt, synthetic construct
  misc_feature 1..19: note = siRNA antisense sequence
  source 1..19: mol_type = other RNA
gacctattcagccttggaa

SEQ ID NO: 42536 - RNA, 19 nt, synthetic construct
  misc_feature 1..19: note = siRNA sense sequence
  source 1..19: mol_type = other RNA
tccaaggctgaataggtct

SEQ ID NO: 42537 - RNA, 19 nt, synthetic construct
  misc_feature 1..19: note = siRNA antisense sequence
  source 1..19: mol_type = other RNA
agacctattcagccttgga

SEQ ID NO: 42538 - RNA, 19 nt, synthetic construct
  misc_feature 1..19: note = siRNA sense sequence
  source 1..19: mol_type = other RNA
ccaaggctgaataggtctc

SEQ ID NO: 42539 - RNA, 19 nt, synthetic construct
  misc_feature 1..19: note = siRNA antisense sequence
  source 1..19: mol_type = other RNA
gagacctattcagccttgg

SEQ ID NO: 42540 - RNA, 19 nt, synthetic construct
  misc_feature 1..19: note = siRNA sense sequence
  source 1..19: mol_type = other RNA
caaggctgaataggtctct

SEQ ID NO: 42541 - RNA, 19 nt, synthetic construct
  misc_feature 1..19: note = siRNA antisense sequence
  source 1..19: mol_type = other RNA
agagacctattcagccttg

SEQ ID NO: 42542 - RNA, 19 nt, synthetic construct
  misc_feature 1..19: note = siRNA sense sequence
  source 1..19: mol_type = other RNA
aaggctgaataggtctctg

SEQ ID NO: 42543 - RNA, 19 nt, synthetic construct
  misc_feature 1..19: note = siRNA antisense sequence
  source 1..19: mol_type = other RNA
cagagacctattcagcctt

SEQ ID NO: 42544 - RNA, 19 nt, synthetic construct
  misc_feature 1..19: note = siRNA sense sequence
  source 1..19: mol_type = other RNA
aggctgaataggtctctgt

SEQ ID NO: 42545 - RNA, 19 nt, synthetic construct
  misc_feature 1..19: note = siRNA antisense sequence
  source 1..19: mol_type = other RNA
acagagacctattcagcct

SEQ ID NO: 42546 - RNA, 19 nt, synthetic construct
  misc_feature 1..19: note = siRNA sense sequence
  source 1..19: mol_type = other RNA
ggctgaataggtctctgta

SEQ ID NO: 42547 - RNA, 19 nt, synthetic construct
  misc_feature 1..19: note = siRNA antisense sequence
  source 1..19: mol_type = other RNA
tacagagacctattcagcc

SEQ ID NO: 42548 - RNA, 19 nt, synthetic construct
  misc_feature 1..19: note = siRNA sense sequence
  source 1..19: mol_type = other RNA
agtgagtggaagggtaagg

SEQ ID NO: 42549 - RNA, 19 nt, synthetic construct
  misc_feature 1..19: note = siRNA antisense sequence
  source 1..19: mol_type = other RNA
ccttacccttccactcact

SEQ ID NO: 42550 - RNA, 19 nt, synthetic construct
  misc_feature 1..19: note = siRNA sense sequence
  source 1..19: mol_type = other RNA
gtgagtggaagggtaaggt

SEQ ID NO: 42551 - RNA, 19 nt, synthetic construct
  misc_feature 1..19: note = siRNA antisense sequence
  source 1..19: mol_type = other RNA
accttacccttccactcac

SEQ ID NO: 42552 - RNA, 19 nt, synthetic construct
  misc_feature 1..19: note = siRNA sense sequence
  source 1..19: mol_type = other RNA
tgagtggaagggtaaggtt

SEQ ID NO: 42553 - RNA, 19 nt, synthetic construct
  misc_feature 1..19: note = siRNA antisense sequence
  source 1..19: mol_type = other RNA
aaccttacccttccactca

SEQ ID NO: 42554 - RNA, 19 nt, synthetic construct
  misc_feature 1..19: note = siRNA sense sequence
  source 1..19: mol_type = other RNA
gagtggaagggtaaggtta

SEQ ID NO: 42555 - RNA, 19 nt, synthetic construct
  misc_feature 1..19: note = siRNA antisense sequence
  source 1..19: mol_type = other RNA
taaccttacccttccactc

SEQ ID NO: 42556 - RNA, 19 nt, synthetic construct
  misc_feature 1..19: note = siRNA sense sequence
  source 1..19: mol_type = other RNA
agtggaagggtaaggttat

SEQ ID NO: 42557 - RNA, 19 nt, synthetic construct
  misc_feature 1..19: note = siRNA antisense sequence
  source 1..19: mol_type = other RNA
ataaccttacccttccact

SEQ ID NO: 42558 - RNA, 19 nt, synthetic construct
  misc_feature 1..19: note = siRNA sense sequence
  source 1..19: mol_type = other RNA
gtggaagggtaaggttata

SEQ ID NO: 42559 - RNA, 19 nt, synthetic construct
  misc_feature 1..19: note = siRNA antisense sequence
  source 1..19: mol_type = other RNA
tataaccttacccttccac

SEQ ID NO: 42560 - RNA, 19 nt, synthetic construct
  misc_feature 1..19: note = siRNA sense sequence
  source 1..19: mol_type = other RNA
tggaagggtaaggttataa

SEQ ID NO: 42561 - RNA, 19 nt, synthetic construct
  misc_feature 1..19: note = siRNA antisense sequence
  source 1..19: mol_type = other RNA
ttataaccttacccttcca

SEQ ID NO: 42562 - RNA, 19 nt, synthetic construct
  misc_feature 1..19: note = siRNA sense sequence
  source 1..19: mol_type = other RNA
ggaagggtaaggttataaa

SEQ ID NO: 42563 - RNA, 19 nt, synthetic construct
  misc_feature 1..19: note = siRNA antisense sequence
  source 1..19: mol_type = other RNA
tttataaccttacccttcc

SEQ ID NO: 42564 - RNA, 19 nt, synthetic construct
  misc_feature 1..19: note = siRNA sense sequence
  source 1..19: mol_type = other RNA
gaagggtaaggttataaat

SEQ ID NO: 42565 - RNA, 19 nt, synthetic construct
  misc_feature 1..19: note = siRNA antisense sequence
  source 1..19: mol_type = other RNA
atttataaccttacccttc

SEQ ID NO: 42566 - RNA, 19 nt, synthetic construct
  misc_feature 1..19: note = siRNA sense sequence
  source 1..19: mol_type = other RNA
gggtaaggttataaatatc

SEQ ID NO: 42567 - RNA, 19 nt, synthetic construct
  misc_feature 1..19: note = siRNA antisense sequence
  source 1..19: mol_type = other RNA
gatatttataaccttaccc

SEQ ID NO: 42568 - RNA, 19 nt, synthetic construct
  misc_feature 1..19: note = siRNA sense sequence
  source 1..19: mol_type = other RNA
ggtaaggttataaatatcc

SEQ ID NO: 42569 - RNA, 19 nt, synthetic construct
  misc_feature 1..19: note = siRNA antisense sequence
  source 1..19: mol_type = other RNA
ggatatttataaccttacc

SEQ ID NO: 42570 - RNA, 19 nt, synthetic construct
  misc_feature 1..19: note = siRNA sense sequence
  source 1..19: mol_type = other RNA
aaggttataaatatcctgc

SEQ ID NO: 42571 - RNA, 19 nt, synthetic construct
  misc_feature 1..19: note = siRNA antisense sequence
  source 1..19: mol_type = other RNA
gcaggatatttataacctt

SEQ ID NO: 42572 - RNA, 19 nt, synthetic construct
  misc_feature 1..19: note = siRNA sense sequence
  source 1..19: mol_type = other RNA
aggttataaatatcctgct

SEQ ID NO: 42573 - RNA, 19 nt, synthetic construct
  misc_feature 1..19: note = siRNA antisense sequence
  source 1..19: mol_type = other RNA
agcaggatatttataacct

SEQ ID NO: 42574 - RNA, 19 nt, synthetic construct
  misc_feature 1..19: note = siRNA sense sequence
  source 1..19: mol_type = other RNA
atgtaattttccctggaag

SEQ ID NO: 42575 - RNA, 19 nt, synthetic construct
  misc_feature 1..19: note = siRNA antisense sequence
  source 1..19: mol_type = other RNA
cttccagggaaaattacat

SEQ ID NO: 42576 - RNA, 19 nt, synthetic construct
  misc_feature 1..19: note = siRNA sense sequence
  source 1..19: mol_type = other RNA
tgtaattttccctggaagt

SEQ ID NO: 42577 - RNA, 19 nt, synthetic construct
  misc_feature 1..19: note = siRNA antisense sequence
  source 1..19: mol_type = other RNA
acttccagggaaaattaca

SEQ ID NO: 42578 - RNA, 19 nt, synthetic construct
  misc_feature 1..19: note = siRNA sense sequence
  source 1..19: mol_type = other RNA
gtaattttccctggaagtg

SEQ ID NO: 42579 - RNA, 19 nt, synthetic construct
  misc_feature 1..19: note = siRNA antisense sequence
  source 1..19: mol_type = other RNA
cacttccagggaaaattac

SEQ ID NO: 42580 - RNA, 19 nt, synthetic construct
  misc_feature 1..19: note = siRNA sense sequence
  source 1..19: mol_type = other RNA
taattttccctggaagtga

SEQ ID NO: 42581 - RNA, 19 nt, synthetic construct
  misc_feature 1..19: note = siRNA antisense sequence
  source 1..19: mol_type = other RNA
tcacttccagggaaaatta

SEQ ID NO: 42582 - RNA, 19 nt, synthetic construct
  misc_feature 1..19: note = siRNA sense sequence
  source 1..19: mol_type = other RNA
tttccctggaagtgactta

SEQ ID NO: 42583 - RNA, 19 nt, synthetic construct
  misc_feature 1..19: note = siRNA antisense sequence
  source 1..19: mol_type = other RNA
taagtcacttccagggaaa

SEQ ID NO: 42584 - RNA, 19 nt, synthetic construct
  misc_feature 1..19: note = siRNA sense sequence
  source 1..19: mol_type = other RNA
ttccctggaagtgacttat

SEQ ID NO: 42585 - RNA, 19 nt, synthetic construct
  misc_feature 1..19: note = siRNA antisense sequence
  source 1..19: mol_type = other RNA
ataagtcacttccagggaa

SEQ ID NO: 42586 - RNA, 19 nt, synthetic construct
  misc_feature 1..19: note = siRNA sense sequence
  source 1..19: mol_type = other RNA
tccctggaagtgacttatt

SEQ ID NO: 42587 - RNA, 19 nt, synthetic construct
  misc_feature 1..19: note = siRNA antisense sequence
  source 1..19: mol_type = other RNA
aataagtcacttccaggga

SEQ ID NO: 42588 - RNA, 19 nt, synthetic construct
  misc_feature 1..19: note = siRNA sense sequence
  source 1..19: mol_type = other RNA
ccctggaagtgacttattt

SEQ ID NO: 42589 - RNA, 19 nt, synthetic construct
  misc_feature 1..19: note = siRNA antisense sequence
  source 1..19: mol_type = other RNA
aaataagtcacttccaggg

SEQ ID NO: 42590 - RNA, 19 nt, synthetic construct
  misc_feature 1..19: note = siRNA sense sequence
  source 1..19: mol_type = other RNA
cctggaagtgacttatttg

SEQ ID NO: 42591 - RNA, 19 nt, synthetic construct
  misc_feature 1..19: note = siRNA antisense sequence
  source 1..19: mol_type = other RNA
caaataagtcacttccagg

SEQ ID NO: 42592 - RNA, 19 nt, synthetic construct
  misc_feature 1..19: note = siRNA sense sequence
  source 1..19: mol_type = other RNA
ctggaagtgacttatttgc

SEQ ID NO: 42593 - RNA, 19 nt, synthetic construct
  misc_feature 1..19: note = siRNA antisense sequence
  source 1..19: mol_type = other RNA
gcaaataagtcacttccag

SEQ ID NO: 42594 - RNA, 19 nt, synthetic construct
  misc_feature 1..19: note = siRNA sense sequence
  source 1..19: mol_type = other RNA
tggaagtgacttatttgca

SEQ ID NO: 42595 - RNA, 19 nt, synthetic construct
  misc_feature 1..19: note = siRNA antisense sequence
  source 1..19: mol_type = other RNA
tgcaaataagtcacttcca

SEQ ID NO: 42596 - RNA, 19 nt, synthetic construct
  misc_feature 1..19: note = siRNA sense sequence
  source 1..19: mol_type = other RNA
ggaagtgacttatttgcaa

SEQ ID NO: 42597 - RNA, 19 nt, synthetic construct
  misc_feature 1..19: note = siRNA antisense sequence
  source 1..19: mol_type = other RNA
ttgcaaataagtcacttcc

SEQ ID NO: 42598 - RNA, 19 nt, synthetic construct
  misc_feature 1..19: note = siRNA sense sequence
  source 1..19: mol_type = other RNA
tgacttatttgcaattgac

SEQ ID NO: 42599 - RNA, 19 nt, synthetic construct
  misc_feature 1..19: note = siRNA antisense sequence
  source 1..19: mol_type = other RNA
gtcaattgcaaataagtca

SEQ ID NO: 42600 - RNA, 19 nt, synthetic construct
  misc_feature 1..19: note = siRNA sense sequence
  source 1..19: mol_type = other RNA
gacttatttgcaattgacc

SEQ ID NO: 42601 - RNA, 19 nt, synthetic construct
  misc_feature 1..19: note = siRNA antisense sequence
  source 1..19: mol_type = other RNA
ggtcaattgcaaataagtc

SEQ ID NO: 42602 - RNA, 19 nt, synthetic construct
  misc_feature 1..19: note = siRNA sense sequence
  source 1..19: mol_type = other RNA
tttgcaattgaccttctca

SEQ ID NO: 42603 - RNA, 19 nt, synthetic construct
  misc_feature 1..19: note = siRNA antisense sequence
  source 1..19: mol_type = other RNA
tgagaaggtcaattgcaaa

SEQ ID NO: 42604 - RNA, 19 nt, synthetic construct
  misc_feature 1..19: note = siRNA sense sequence
  source 1..19: mol_type = other RNA
aaattactagtggatggta

SEQ ID NO: 42605 - RNA, 19 nt, synthetic construct
  misc_feature 1..19: note = siRNA antisense sequence
  source 1..19: mol_type = other RNA
taccatccactagtaattt

SEQ ID NO: 42606 - RNA, 19 nt, synthetic construct
  misc_feature 1..19: note = siRNA sense sequence
  source 1..19: mol_type = other RNA
aattactagtggatggtag

SEQ ID NO: 42607 - RNA, 19 nt, synthetic construct
  misc_feature 1..19: note = siRNA antisense sequence
  source 1..19: mol_type = other RNA
ctaccatccactagtaatt

SEQ ID NO: 42608 - RNA, 19 nt, synthetic construct
  misc_feature 1..19: note = siRNA sense sequence
  source 1..19: mol_type = other RNA
attactagtggatggtagg

SEQ ID NO: 42609 - RNA, 19 nt, synthetic construct
  misc_feature 1..19: note = siRNA antisense sequence
  source 1..19: mol_type = other RNA
cctaccatccactagtaat

SEQ ID NO: 42610 - RNA, 19 nt, synthetic construct
  misc_feature 1..19: note = siRNA sense sequence
  source 1..19: mol_type = other RNA
ttactagtggatggtaggg

SEQ ID NO: 42611 - RNA, 19 nt, synthetic construct
  misc_feature 1..19: note = siRNA antisense sequence
  source 1..19: mol_type = other RNA
ccctaccatccactagtaa

SEQ ID NO: 42612 - RNA, 19 nt, synthetic construct
  misc_feature 1..19: note = siRNA sense sequence
  source 1..19: mol_type = other RNA
ttttatcccgtcttgctac

SEQ ID NO: 42613 - RNA, 19 nt, synthetic construct
  misc_feature 1..19: note = siRNA antisense sequence
  source 1..19: mol_type = other RNA
gtagcaagacgggataaaa

SEQ ID NO: 42614 - RNA, 19 nt, synthetic construct
  misc_feature 1..19: note = siRNA sense sequence
  source 1..19: mol_type = other RNA
tttatcccgtcttgctaca

SEQ ID NO: 42615 - RNA, 19 nt, synthetic construct
  misc_feature 1..19: note = siRNA antisense sequence
  source 1..19: mol_type = other RNA
tgtagcaagacgggataaa

SEQ ID NO: 42616 - RNA, 19 nt, synthetic construct
  misc_feature 1..19: note = siRNA sense sequence
  source 1..19: mol_type = other RNA
ttatcccgtcttgctacag

SEQ ID NO: 42617 - RNA, 19 nt, synthetic construct
  misc_feature 1..19: note = siRNA antisense sequence
  source 1..19: mol_type = other RNA
ctgtagcaagacgggataa

SEQ ID NO: 42618 - RNA, 19 nt, synthetic construct
  misc_feature 1..19: note = siRNA sense sequence
  source 1..19: mol_type = other RNA
agggcagcctgcatcttaa

SEQ ID NO: 42619 - RNA, 19 nt, synthetic construct
  misc_feature 1..19: note = siRNA antisense sequence
  source 1..19: mol_type = other RNA
ttaagatgcaggctgccct

SEQ ID NO: 42620 - RNA, 19 nt, synthetic construct
  misc_feature 1..19: note = siRNA sense sequence
  source 1..19: mol_type = other RNA
gggcagcctgcatcttaac

SEQ ID NO: 42621 - RNA, 19 nt, synthetic construct
  misc_feature 1..19: note = siRNA antisense sequence
  source 1..19: mol_type = other RNA
gttaagatgcaggctgccc

SEQ ID NO: 42622 - RNA, 19 nt, synthetic construct
  misc_feature 1..19: note = siRNA sense sequence
  source 1..19: mol_type = other RNA
ttccttctggcacctgttc

SEQ ID NO: 42623 - RNA, 19 nt, synthetic construct
  misc_feature 1..19: note = siRNA antisense sequence
  source 1..19: mol_type = other RNA
gaacaggtgccagaaggaa

SEQ ID NO: 42624 - RNA, 19 nt, synthetic construct
  misc_feature 1..19: note = siRNA sense sequence
  source 1..19: mol_type = other RNA
tccttctggcacctgttcc

SEQ ID NO: 42625 - RNA, 19 nt, synthetic construct
  misc_feature 1..19: note = siRNA antisense sequence
  source 1..19: mol_type = other RNA
ggaacaggtgccagaagga

SEQ ID NO: 42626 - RNA, 19 nt, synthetic construct
  misc_feature 1..19: note = siRNA sense sequence
  source 1..19: mol_type = other RNA
ccttctggcacctgttcct

SEQ ID NO: 42627 - RNA, 19 nt, synthetic construct
  misc_feature 1..19: note = siRNA antisense sequence
  source 1..19: mol_type = other RNA
aggaacaggtgccagaagg

SEQ ID NO: 42628 - RNA, 19 nt, synthetic construct
  misc_feature 1..19: note = siRNA sense sequence
  source 1..19: mol_type = other RNA
cttctggcacctgttcctc

SEQ ID NO: 42629 - RNA, 19 nt, synthetic construct
  misc_feature 1..19: note = siRNA antisense sequence
  source 1..19: mol_type = other RNA
gaggaacaggtgccagaag

SEQ ID NO: 42630 - RNA, 19 nt, synthetic construct
  misc_feature 1..19: note = siRNA sense sequence
  source 1..19: mol_type = other RNA
tggcacctgttcctcatgg

SEQ ID NO: 42631 - RNA, 19 nt, synthetic construct
  misc_feature 1..19: note = siRNA antisense sequence
  source 1..19: mol_type = other RNA
ccatgaggaacaggtgcca

SEQ ID NO: 42632 - RNA, 19 nt, synthetic construct
  misc_feature 1..19: note = siRNA sense sequence
  source 1..19: mol_type = other RNA
ggcacctgttcctcatgga

SEQ ID NO: 42633 - RNA, 19 nt, synthetic construct
  misc_feature 1..19: note = siRNA antisense sequence
  source 1..19: mol_type = other RNA
tccatgaggaacaggtgcc

SEQ ID NO: 42634 - RNA, 19 nt, synthetic construct
  misc_feature 1..19: note = siRNA sense sequence
  source 1..19: mol_type = other RNA
gcacctgttcctcatggac

SEQ ID NO: 42635 - RNA, 19 nt, synthetic construct
  misc_feature 1..19: note = siRNA antisense sequence
  source 1..19: mol_type = other RNA
gtccatgaggaacaggtgc

SEQ ID NO: 42636 - RNA, 19 nt, synthetic construct
  misc_feature 1..19: note = siRNA sense sequence
  source 1..19: mol_type = other RNA
cacctgttcctcatggacc

SEQ ID NO: 42637 - RNA, 19 nt, synthetic construct
  misc_feature 1..19: note = siRNA antisense sequence
  source 1..19: mol_type = other RNA
ggtccatgaggaacaggtg

SEQ ID NO: 42638 - RNA, 19 nt, synthetic construct
  misc_feature 1..19: note = siRNA sense sequence
  source 1..19: mol_type = other RNA
cctgttcctcatggacctc

SEQ ID NO: 42639 - RNA, 19 nt, synthetic construct
  misc_feature 1..19: note = siRNA antisense sequence
  source 1..19: mol_type = other RNA
gaggtccatgaggaacagg

SEQ ID NO: 42640 - RNA, 19 nt, synthetic construct
  misc_feature 1..19: note = siRNA sense sequence
  source 1..19: mol_type = other RNA
ctgttcctcatggacctcc

SEQ ID NO: 42641 - RNA, 19 nt, synthetic construct
  misc_feature 1..19: note = siRNA antisense sequence
  source 1..19: mol_type = other RNA
ggaggtccatgaggaacag

SEQ ID NO: 42642 - RNA, 19 nt, synthetic construct
  misc_feature 1..19: note = siRNA sense sequence
  source 1..19: mol_type = other RNA
tcctcatggacctcctttt

SEQ ID NO: 42643 - RNA, 19 nt, synthetic construct
  misc_feature 1..19: note = siRNA antisense sequence
  source 1..19: mol_type = other RNA
aaaaggaggtccatgagga

SEQ ID NO: 42644 - RNA, 19 nt, synthetic construct
  misc_feature 1..19: note = siRNA sense sequence
  source 1..19: mol_type = other RNA
agaccactcttccttcctc

SEQ ID NO: 42645 - RNA, 19 nt, synthetic construct
  misc_feature 1..19: note = siRNA antisense sequence
  source 1..19: mol_type = other RNA
gaggaaggaagagtggtct

SEQ ID NO: 42646 - RNA, 19 nt, synthetic construct
  misc_feature 1..19: note = siRNA sense sequence
  source 1..19: mol_type = other RNA
tcctcctttcctcgcttcc

SEQ ID NO: 42647 - RNA, 19 nt, synthetic construct
  misc_feature 1..19: note = siRNA antisense sequence
  source 1..19: mol_type = other RNA
ggaagcgaggaaaggagga

SEQ ID NO: 42648 - RNA, 19 nt, synthetic construct
  misc_feature 1..19: note = siRNA sense sequence
  source 1..19: mol_type = other RNA
cctcctttcctcgcttccc

SEQ ID NO: 42649 - RNA, 19 nt, synthetic construct
  misc_feature 1..19: note = siRNA antisense sequence
  source 1..19: mol_type = other RNA
gggaagcgaggaaaggagg

SEQ ID NO: 42650 - RNA, 19 nt, synthetic construct
  misc_feature 1..19: note = siRNA sense sequence
  source 1..19: mol_type = other RNA
ctatcccttctctccttgg

SEQ ID NO: 42651 - RNA, 19 nt, synthetic construct
  misc_feature 1..19: note = siRNA antisense sequence
  source 1..19: mol_type = other RNA
ccaaggagagaagggatag

SEQ ID NO: 42652 - RNA, 19 nt, synthetic construct
  misc_feature 1..19: note = siRNA sense sequence
  source 1..19: mol_type = other RNA
tatcccttctctccttggc

SEQ ID NO: 42653 - RNA, 19 nt, synthetic construct
  misc_feature 1..19: note = siRNA antisense sequence
  source 1..19: mol_type = other RNA
gccaaggagagaagggata

SEQ ID NO: 42654 - RNA, 19 nt, synthetic construct
  misc_feature 1..19: note = siRNA sense sequence
  source 1..19: mol_type = other RNA
atcccttctctccttggcc

SEQ ID NO: 42655 - RNA, 19 nt, synthetic construct
  misc_feature 1..19: note = siRNA antisense sequence
  source 1..19: mol_type = other RNA
ggccaaggagagaagggat

SEQ ID NO: 42656 - RNA, 19 nt, synthetic construct
  misc_feature 1..19: note = siRNA sense sequence
  source 1..19: mol_type = other RNA
tcccttctctccttggcca

SEQ ID NO: 42657 - RNA, 19 nt, synthetic construct
  misc_feature 1..19: note = siRNA antisense sequence
  source 1..19: mol_type = other RNA
tggccaaggagagaaggga

SEQ ID NO: 42658 - RNA, 19 nt, synthetic construct
  misc_feature 1..19: note = siRNA sense sequence
  source 1..19: mol_type = other RNA
cccttctctccttggccaa

SEQ ID NO: 42659 - RNA, 19 nt, synthetic construct
  misc_feature 1..19: note = siRNA antisense sequence
  source 1..19: mol_type = other RNA
ttggccaaggagagaaggg

SEQ ID NO: 42660 - RNA, 19 nt, synthetic construct
  misc_feature 1..19: note = siRNA sense sequence
  source 1..19: mol_type = other RNA
ccttctctccttggccaat

SEQ ID NO: 42661 - RNA, 19 nt, synthetic construct
  misc_feature 1..19: note = siRNA antisense sequence
  source 1..19: mol_type = other RNA
attggccaaggagagaagg

SEQ ID NO: 42662 - RNA, 19 nt, synthetic construct
  misc_feature 1..19: note = siRNA sense sequence
  source 1..19: mol_type = other RNA
cttctctccttggccaata

SEQ ID NO: 42663 - RNA, 19 nt, synthetic construct
  misc_feature 1..19: note = siRNA antisense sequence
  source 1..19: mol_type = other RNA
tattggccaaggagagaag

SEQ ID NO: 42664 - RNA, 19 nt, synthetic construct
  misc_feature 1..19: note = siRNA sense sequence
  source 1..19: mol_type = other RNA
ttctctccttggccaataa

SEQ ID NO: 42665 - RNA, 19 nt, synthetic construct
  misc_feature 1..19: note = siRNA antisense sequence
  source 1..19: mol_type = other RNA
ttattggccaaggagagaa

SEQ ID NO: 42666 - RNA, 19 nt, synthetic construct
  misc_feature 1..19: note = siRNA sense sequence
  source 1..19: mol_type = other RNA
tctctccttggccaataag

SEQ ID NO: 42667 - RNA, 19 nt, synthetic construct
  misc_feature 1..19: note = siRNA antisense sequence
  source 1..19: mol_type = other RNA
cttattggccaaggagaga

SEQ ID NO: 42668 - RNA, 19 nt, synthetic construct
  misc_feature 1..19: note = siRNA sense sequence
  source 1..19: mol_type = other RNA
ctctccttggccaataaga

SEQ ID NO: 42669 - RNA, 19 nt, synthetic construct
  misc_feature 1..19: note = siRNA antisense sequence
  source 1..19: mol_type = other RNA
tcttattggccaaggagag

SEQ ID NO: 42670 - RNA, 19 nt, synthetic construct
  misc_feature 1..19: note = siRNA sense sequence
  source 1..19: mol_type = other RNA
ccttggccaataagatagc

SEQ ID NO: 42671 - RNA, 19 nt, synthetic construct
  misc_feature 1..19: note = siRNA antisense sequence
  source 1..19: mol_type = other RNA
gctatcttattggccaagg

SEQ ID NO: 42672 - RNA, 19 nt, synthetic construct
  misc_feature 1..19: note = siRNA sense sequence
  source 1..19: mol_type = other RNA
cttggccaataagatagca

SEQ ID NO: 42673 - RNA, 19 nt, synthetic construct
  misc_feature 1..19: note = siRNA antisense sequence
  source 1..19: mol_type = other RNA
tgctatcttattggccaag

SEQ ID NO: 42674 - RNA, 19 nt, synthetic construct
  misc_feature 1..19: note = siRNA sense sequence
  source 1..19: mol_type = other RNA
ttggccaataagatagcat

SEQ ID NO: 42675 - RNA, 19 nt, synthetic construct
  misc_feature 1..19: note = siRNA antisense sequence
  source 1..19: mol_type = other RNA
atgctatcttattggccaa

SEQ ID NO: 42676 - RNA, 19 nt, synthetic construct
  misc_feature 1..19: note = siRNA sense sequence
  source 1..19: mol_type = other RNA
tggccaataagatagcata

SEQ ID NO: 42677 - RNA, 19 nt, synthetic construct
  misc_feature 1..19: note = siRNA antisense sequence
  source 1..19: mol_type = other RNA
tatgctatcttattggcca

SEQ ID NO: 42678 - RNA, 19 nt, synthetic construct
  misc_feature 1..19: note = siRNA sense sequence
  source 1..19: mol_type = other RNA
ggccaataagatagcatag

SEQ ID NO: 42679 - RNA, 19 nt, synthetic construct
  misc_feature 1..19: note = siRNA antisense sequence
  source 1..19: mol_type = other RNA
ctatgctatcttattggcc

SEQ ID NO: 42680 - RNA, 19 nt, synthetic construct
  misc_feature 1..19: note = siRNA sense sequence
  source 1..19: mol_type = other RNA
gccaataagatagcataga

SEQ ID NO: 42681 - RNA, 19 nt, synthetic construct
  misc_feature 1..19: note = siRNA antisense sequence
  source 1..19: mol_type = other RNA
tctatgctatcttattggc

SEQ ID NO: 42682 - RNA, 19 nt, synthetic construct
  misc_feature 1..19: note = siRNA sense sequence
  source 1..19: mol_type = other RNA
ccaataagatagcatagag

SEQ ID NO: 42683 - RNA, 19 nt, synthetic construct
  misc_feature 1..19: note = siRNA antisense sequence
  source 1..19: mol_type = other RNA
ctctatgctatcttattgg

SEQ ID NO: 42684 - RNA, 19 nt, synthetic construct
  misc_feature 1..19: note = siRNA sense sequence
  source 1..19: mol_type = other RNA
caataagatagcatagagt

SEQ ID NO: 42685 - RNA, 19 nt, synthetic construct
  misc_feature 1..19: note = siRNA antisense sequence
  source 1..19: mol_type = other RNA
actctatgctatcttattg

SEQ ID NO: 42686 - RNA, 19 nt, synthetic construct
  misc_feature 1..19: note = siRNA sense sequence
  source 1..19: mol_type = other RNA
aataagatagcatagagtc

SEQ ID NO: 42687 - RNA, 19 nt, synthetic construct
  misc_feature 1..19: note = siRNA antisense sequence
  source 1..19: mol_type = other RNA
gactctatgctatcttatt

SEQ ID NO: 42688 - RNA, 19 nt, synthetic construct
  misc_feature 1..19: note = siRNA sense sequence
  source 1..19: mol_type = other RNA
ataagatagcatagagtca

SEQ ID NO: 42689 - RNA, 19 nt, synthetic construct
  misc_feature 1..19: note = siRNA antisense sequence
  source 1..19: mol_type = other RNA
tgactctatgctatcttat

SEQ ID NO: 42690 - RNA, 19 nt, synthetic construct
  misc_feature 1..19: note = siRNA sense sequence
  source 1..19: mol_type = other RNA
taagatagcatagagtcat

SEQ ID NO: 42691 - RNA, 19 nt, synthetic construct
  misc_feature 1..19: note = siRNA antisense sequence
  source 1..19: mol_type = other RNA
atgactctatgctatctta

SEQ ID NO: 42692 - RNA, 19 nt, synthetic construct
  misc_feature 1..19: note = siRNA sense sequence
  source 1..19: mol_type = other RNA
aagatagcatagagtcata

SEQ ID NO: 42693 - RNA, 19 nt, synthetic construct
  misc_feature 1..19: note = siRNA antisense sequence
  source 1..19: mol_type = other RNA
tatgactctatgctatctt

SEQ ID NO: 42694 - RNA, 19 nt, synthetic construct
  misc_feature 1..19: note = siRNA sense sequence
  source 1..19: mol_type = other RNA
gatagcatagagtcataag

SEQ ID NO: 42695 - RNA, 19 nt, synthetic construct
  misc_feature 1..19: note = siRNA antisense sequence
  source 1..19: mol_type = other RNA
cttatgactctatgctatc

SEQ ID NO: 42696 - RNA, 19 nt, synthetic construct
  misc_feature 1..19: note = siRNA sense sequence
  source 1..19: mol_type = other RNA
atagcatagagtcataaga

SEQ ID NO: 42697 - RNA, 19 nt, synthetic construct
  misc_feature 1..19: note = siRNA antisense sequence
  source 1..19: mol_type = other RNA
tcttatgactctatgctat

SEQ ID NO: 42698 - RNA, 19 nt, synthetic construct
  misc_feature 1..19: note = siRNA sense sequence
  source 1..19: mol_type = other RNA
tcataagattaaagctgga

SEQ ID NO: 42699 - RNA, 19 nt, synthetic construct
  misc_feature 1..19: note = siRNA antisense sequence
  source 1..19: mol_type = other RNA
tccagctttaatcttatga

SEQ ID NO: 42700 - RNA, 19 nt, synthetic construct
  misc_feature 1..19: note = siRNA sense sequence
  source 1..19: mol_type = other RNA
cataagattaaagctggaa

SEQ ID NO: 42701 - RNA, 19 nt, synthetic construct
  misc_feature 1..19: note = siRNA antisense sequence
  source 1..19: mol_type = other RNA
ttccagctttaatcttatg

SEQ ID NO: 42702 - RNA, 19 nt, synthetic construct
  misc_feature 1..19: note = siRNA sense sequence
  source 1..19: mol_type = other RNA
gaatcttaaaggtcatttg

SEQ ID NO: 42703 - RNA, 19 nt, synthetic construct
  misc_feature 1..19: note = siRNA antisense sequence
  source 1..19: mol_type = other RNA
caaatgacctttaagattc

SEQ ID NO: 42704 - RNA, 19 nt, synthetic construct
  misc_feature 1..19: note = siRNA sense sequence
  source 1..19: mol_type = other RNA
aatcttaaaggtcatttgg

SEQ ID NO: 42705 - RNA, 19 nt, synthetic construct
  misc_feature 1..19: note = siRNA antisense sequence
  source 1..19: mol_type = other RNA
ccaaatgacctttaagatt

SEQ ID NO: 42706 - RNA, 19 nt, synthetic construct
  misc_feature 1..19: note = siRNA sense sequence
  source 1..19: mol_type = other RNA
cttaaaggtcatttggccc

SEQ ID NO: 42707 - RNA, 19 nt, synthetic construct
  misc_feature 1..19: note = siRNA antisense sequence
  source 1..19: mol_type = other RNA
gggccaaatgacctttaag

SEQ ID NO: 42708 - RNA, 19 nt, synthetic construct
  misc_feature 1..19: note = siRNA sense sequence
  source 1..19: mol_type = other RNA
cccaacctcaatttatgaa

SEQ ID NO: 42709 - RNA, 19 nt, synthetic construct
  misc_feature 1..19: note = siRNA antisense sequence
  source 1..19: mol_type = other RNA
ttcataaattgaggttggg

SEQ ID NO: 42710 - RNA, 19 nt, synthetic construct
  misc_feature 1..19: note = siRNA sense sequence
  source 1..19: mol_type = other RNA
ccaacctcaatttatgaag

SEQ ID NO: 42711 - RNA, 19 nt, synthetic construct
  misc_feature 1..19: note = siRNA antisense sequence
  source 1..19: mol_type = other RNA
cttcataaattgaggttgg

SEQ ID NO: 42712 - RNA, 19 nt, synthetic construct
  misc_feature 1..19: note = siRNA sense sequence
  source 1..19: mol_type = other RNA
ggctaactgatttgtttaa

SEQ ID NO: 42713 - RNA, 19 nt, synthetic construct
  misc_feature 1..19: note = siRNA antisense sequence
  source 1..19: mol_type = other RNA
ttaaacaaatcagttagcc

SEQ ID NO: 42714 - RNA, 19 nt, synthetic construct
  misc_feature 1..19: note = siRNA sense sequence
  source 1..19: mol_type = other RNA
gctaactgatttgtttaag

SEQ ID NO: 42715 - RNA, 19 nt, synthetic construct
  misc_feature 1..19: note = siRNA antisense sequence
  source 1..19: mol_type = other RNA
cttaaacaaatcagttagc

SEQ ID NO: 42716 - RNA, 19 nt, synthetic construct
  misc_feature 1..19: note = siRNA sense sequence
  source 1..19: mol_type = other RNA
aactgatttgtttaaggtc

SEQ ID NO: 42717 - RNA, 19 nt, synthetic construct
  misc_feature 1..19: note = siRNA antisense sequence
  source 1..19: mol_type = other RNA
gaccttaaacaaatcagtt

SEQ ID NO: 42718 - RNA, 19 nt, synthetic construct
  misc_feature 1..19: note = siRNA sense sequence
  source 1..19: mol_type = other RNA
actgatttgtttaaggtct

SEQ ID NO: 42719 - RNA, 19 nt, synthetic construct
  misc_feature 1..19: note = siRNA antisense sequence
  source 1..19: mol_type = other RNA
agaccttaaacaaatcagt

SEQ ID NO: 42720 - RNA, 19 nt, synthetic construct
  misc_feature 1..19: note = siRNA sense sequence
  source 1..19: mol_type = other RNA
ctgatttgtttaaggtctt

SEQ ID NO: 42721 - RNA, 19 nt, synthetic construct
  misc_feature 1..19: note = siRNA antisense sequence
  source 1..19: mol_type = other RNA
aagaccttaaacaaatcag

SEQ ID NO: 42722 - RNA, 19 nt, synthetic construct
  misc_feature 1..19: note = siRNA sense sequence
  source 1..19: mol_type = other RNA
ttgtttaaggtctttctgc

SEQ ID NO: 42723 - RNA, 19 nt, synthetic construct
  misc_feature 1..19: note = siRNA antisense sequence
  source 1..19: mol_type = other RNA
gcagaaagaccttaaacaa

SEQ ID NO: 42724 - RNA, 19 nt, synthetic construct
  misc_feature 1..19: note = siRNA sense sequence
  source 1..19: mol_type = other RNA
tgtttaaggtctttctgct

SEQ ID NO: 42725 - RNA, 19 nt, synthetic construct
  misc_feature 1..19: note = siRNA antisense sequence
  source 1..19: mol_type = other RNA
agcagaaagaccttaaaca

SEQ ID NO: 42726 - RNA, 19 nt, synthetic construct
  misc_feature 1..19: note = siRNA sense sequence
  source 1..19: mol_type = other RNA
tttaaggtctttctgcttg

SEQ ID NO: 42727 - RNA, 19 nt, synthetic construct
  misc_feature 1..19: note = siRNA antisense sequence
  source 1..19: mol_type = other RNA
caagcagaaagaccttaaa

SEQ ID NO: 42728 - RNA, 19 nt, synthetic construct
  misc_feature 1..19: note = siRNA sense sequence
  source 1..19: mol_type = other RNA
ttaaggtctttctgcttgc

SEQ ID NO: 42729 - RNA, 19 nt, synthetic construct
  misc_feature 1..19: note = siRNA antisense sequence
  source 1..19: mol_type = other RNA
gcaagcagaaagaccttaa

SEQ ID NO: 42730 - RNA, 19 nt, synthetic construct
  misc_feature 1..19: note = siRNA sense sequence
  source 1..19: mol_type = other RNA
taaggtctttctgcttgct

SEQ ID NO: 42731 - RNA, 19 nt, synthetic construct
  misc_feature 1..19: note = siRNA antisense sequence
  source 1..19: mol_type = other RNA
agcaagcagaaagacctta

SEQ ID NO: 42732 - RNA, 19 nt, synthetic construct
  misc_feature 1..19: note = siRNA sense sequence
  source 1..19: mol_type = other RNA
aggtctttctgcttgctga

SEQ ID NO: 42733 - RNA, 19 nt, synthetic construct
  misc_feature 1..19: note = siRNA antisense sequence
  source 1..19: mol_type = other RNA
tcagcaagcagaaagacct

SEQ ID NO: 42734 - RNA, 19 nt, synthetic construct
  misc_feature 1..19: note = siRNA sense sequence
  source 1..19: mol_type = other RNA
ctttctgcttgctgatggc

SEQ ID NO: 42735 - RNA, 19 nt, synthetic construct
  misc_feature 1..19: note = siRNA antisense sequence
  source 1..19: mol_type = other RNA
gccatcagcaagcagaaag

SEQ ID NO: 42736 - RNA, 19 nt, synthetic construct
  misc_feature 1..19: note = siRNA sense sequence
  source 1..19: mol_type = other RNA
tttctgcttgctgatggca

SEQ ID NO: 42737 - RNA, 19 nt, synthetic construct
  misc_feature 1..19: note = siRNA antisense sequence
  source 1..19: mol_type = other RNA
tgccatcagcaagcagaaa

SEQ ID NO: 42738 - RNA, 19 nt, synthetic construct
  misc_feature 1..19: note = siRNA sense sequence
  source 1..19: mol_type = other RNA
cacagctctctaattgtag

SEQ ID NO: 42739 - RNA, 19 nt, synthetic construct
  misc_feature 1..19: note = siRNA antisense sequence
  source 1..19: mol_type = other RNA
ctacaattagagagctgtg

SEQ ID NO: 42740 - RNA, 19 nt, synthetic construct
  misc_feature 1..19: note = siRNA sense sequence
  source 1..19: mol_type = other RNA
gctctctaattgtagccca

SEQ ID NO: 42741 - RNA, 19 nt, synthetic construct
  misc_feature 1..19: note = siRNA antisense sequence
  source 1..19: mol_type = other RNA
tgggctacaattagagagc

SEQ ID NO: 42742 - RNA, 19 nt, synthetic construct
  misc_feature 1..19: note = siRNA sense sequence
  source 1..19: mol_type = other RNA
ctctctaattgtagcccag

SEQ ID NO: 42743 - RNA, 19 nt, synthetic construct
  misc_feature 1..19: note = siRNA antisense sequence
  source 1..19: mol_type = other RNA
ctgggctacaattagagag

SEQ ID NO: 42744 - RNA, 19 nt, synthetic construct
  misc_feature 1..19: note = siRNA sense sequence
  source 1..19: mol_type = other RNA
tctctaattgtagcccagt

SEQ ID NO: 42745 - RNA, 19 nt, synthetic construct
  misc_feature 1..19: note = siRNA antisense sequence
  source 1..19: mol_type = other RNA
actgggctacaattagaga

SEQ ID NO: 42746 - RNA, 19 nt, synthetic construct
  misc_feature 1..19: note = siRNA sense sequence
  source 1..19: mol_type = other RNA
ctctaattgtagcccagtt

SEQ ID NO: 42747 - RNA, 19 nt, synthetic construct
  misc_feature 1..19: note = siRNA antisense sequence
  source 1..19: mol_type = other RNA
aactgggctacaattagag

SEQ ID NO: 42748 - RNA, 19 nt, synthetic construct
  misc_feature 1..19: note = siRNA sense sequence
  source 1..19: mol_type = other RNA
tctaattgtagcccagttt

SEQ ID NO: 42749 - RNA, 19 nt, synthetic construct
  misc_feature 1..19: note = siRNA antisense sequence
  source 1..19: mol_type = other RNA
aaactgggctacaattaga

SEQ ID NO: 42750 - RNA, 19 nt, synthetic construct
  misc_feature 1..19: note = siRNA sense sequence
  source 1..19: mol_type = other RNA
ctaattgtagcccagtttg

SEQ ID NO: 42751 - RNA, 19 nt, synthetic construct
  misc_feature 1..19: note = siRNA antisense sequence
  source 1..19: mol_type = other RNA
caaactgggctacaattag

SEQ ID NO: 42752 - RNA, 19 nt, synthetic construct
  misc_feature 1..19: note = siRNA sense sequence
  source 1..19: mol_type = other RNA
ttctgagggctctacttct

SEQ ID NO: 42753 - RNA, 19 nt, synthetic construct
  misc_feature 1..19: note = siRNA antisense sequence
  source 1..19: mol_type = other RNA
agaagtagagccctcagaa

SEQ ID NO: 42754 - RNA, 19 nt, synthetic construct
  misc_feature 1..19: note = siRNA sense sequence
  source 1..19: mol_type = other RNA
tctgagggctctacttcta

SEQ ID NO: 42755 - RNA, 19 nt, synthetic construct
  misc_feature 1..19: note = siRNA antisense sequence
  source 1..19: mol_type = other RNA
tagaagtagagccctcaga

SEQ ID NO: 42756 - RNA, 19 nt, synthetic construct
  misc_feature 1..19: note = siRNA sense sequence
  source 1..19: mol_type = other RNA
ctgagggctctacttctag

SEQ ID NO: 42757 - RNA, 19 nt, synthetic construct
  misc_feature 1..19: note = siRNA antisense sequence
  source 1..19: mol_type = other RNA
ctagaagtagagccctcag

SEQ ID NO: 42758 - RNA, 19 nt, synthetic construct
  misc_feature 1..19: note = siRNA sense sequence
  source 1..19: mol_type = other RNA
aagcttcagagccagtacc

SEQ ID NO: 42759 - RNA, 19 nt, synthetic construct
  misc_feature 1..19: note = siRNA antisense sequence
  source 1..19: mol_type = other RNA
ggtactggctctgaagctt

SEQ ID NO: 42760 - RNA, 19 nt, synthetic construct
  misc_feature 1..19: note = siRNA sense sequence
  source 1..19: mol_type = other RNA
ttcagagccagtaccatct

SEQ ID NO: 42761 - RNA, 19 nt, synthetic construct
  misc_feature 1..19: note = siRNA antisense sequence
  source 1..19: mol_type = other RNA
agatggtactggctctgaa

SEQ ID NO: 42762 - RNA, 19 nt, synthetic construct
  misc_feature 1..19: note = siRNA sense sequence
  source 1..19: mol_type = other RNA
tcagagccagtaccatcta

SEQ ID NO: 42763 - RNA, 19 nt, synthetic construct
  misc_feature 1..19: note = siRNA antisense sequence
  source 1..19: mol_type = other RNA
tagatggtactggctctga

SEQ ID NO: 42764 - RNA, 19 nt, synthetic construct
  misc_feature 1..19: note = siRNA sense sequence
  source 1..19: mol_type = other RNA
cagagccagtaccatctaa

SEQ ID NO: 42765 - RNA, 19 nt, synthetic construct
  misc_feature 1..19: note = siRNA antisense sequence
  source 1..19: mol_type = other RNA
ttagatggtactggctctg

SEQ ID NO: 42766 - RNA, 19 nt, synthetic construct
  misc_feature 1..19: note = siRNA sense sequence
  source 1..19: mol_type = other RNA
agagccagtaccatctaat

SEQ ID NO: 42767 - RNA, 19 nt, synthetic construct
  misc_feature 1..19: note = siRNA antisense sequence
  source 1..19: mol_type = other RNA
attagatggtactggctct

SEQ ID NO: 42768 - RNA, 19 nt, synthetic construct
  misc_feature 1..19: note = siRNA sense sequence
  source 1..19: mol_type = other RNA
gagccagtaccatctaatg

SEQ ID NO: 42769 - RNA, 19 nt, synthetic construct
  misc_feature 1..19: note = siRNA antisense sequence
  source 1..19: mol_type = other RNA
cattagatggtactggctc

SEQ ID NO: 42770 - RNA, 19 nt, synthetic construct
  misc_feature 1..19: note = siRNA sense sequence
  source 1..19: mol_type = other RNA
agccagtaccatctaatgc

SEQ ID NO: 42771 - RNA, 19 nt, synthetic construct
  misc_feature 1..19: note = siRNA antisense sequence
  source 1..19: mol_type = other RNA
gcattagatggtactggct

SEQ ID NO: 42772 - RNA, 19 nt, synthetic construct
  misc_feature 1..19: note = siRNA sense sequence
  source 1..19: mol_type = other RNA
gccagtaccatctaatgcc

SEQ ID NO: 42773 - RNA, 19 nt, synthetic construct
  misc_feature 1..19: note = siRNA antisense sequence
  source 1..19: mol_type = other RNA
ggcattagatggtactggc

SEQ ID NO: 42774 - RNA, 19 nt, synthetic construct
  misc_feature 1..19: note = siRNA sense sequence
  source 1..19: mol_type = other RNA
ccagtaccatctaatgccc

SEQ ID NO: 42775 - RNA, 19 nt, synthetic construct
  misc_feature 1..19: note = siRNA antisense sequence
  source 1..19: mol_type = other RNA
gggcattagatggtactgg

SEQ ID NO: 42776 - RNA, 19 nt, synthetic construct
  misc_feature 1..19: note = siRNA sense sequence
  source 1..19: mol_type = other RNA
gaatagtagatttcaatcc

SEQ ID NO: 42777 - RNA, 19 nt, synthetic construct
  misc_feature 1..19: note = siRNA antisense sequence
  source 1..19: mol_type = other RNA
ggattgaaatctactattc

SEQ ID NO: 42778 - RNA, 19 nt, synthetic construct
  misc_feature 1..19: note = siRNA sense sequence
  source 1..19: mol_type = other RNA
gtagatttcaatccttttc

SEQ ID NO: 42779 - RNA, 19 nt, synthetic construct
  misc_feature 1..19: note = siRNA antisense sequence
  source 1..19: mol_type = other RNA
gaaaaggattgaaatctac

SEQ ID NO: 42780 - RNA, 19 nt, synthetic construct
  misc_feature 1..19: note = siRNA sense sequence
  source 1..19: mol_type = other RNA
cttttctatttcatgagga

SEQ ID NO: 42781 - RNA, 19 nt, synthetic construct
  misc_feature 1..19: note = siRNA antisense sequence
  source 1..19: mol_type = other RNA
tcctcatgaaatagaaaag

SEQ ID NO: 42782 - RNA, 19 nt, synthetic construct
  misc_feature 1..19: note = siRNA sense sequence
  source 1..19: mol_type = other RNA
tttctatttcatgaggatg

SEQ ID NO: 42783 - RNA, 19 nt, synthetic construct
  misc_feature 1..19: note = siRNA antisense sequence
  source 1..19: mol_type = other RNA
catcctcatgaaatagaaa

SEQ ID NO: 42784 - RNA, 19 nt, synthetic construct
  misc_feature 1..19: note = siRNA sense sequence
  source 1..19: mol_type = other RNA
tgactgtcctcatccttcc

SEQ ID NO: 42785 - RNA, 19 nt, synthetic construct
  misc_feature 1..19: note = siRNA antisense sequence
  source 1..19: mol_type = other RNA
ggaaggatgaggacagtca

SEQ ID NO: 42786 - RNA, 19 nt, synthetic construct
  misc_feature 1..19: note = siRNA sense sequence
  source 1..19: mol_type = other RNA
tcctcatccttcctcaggc

SEQ ID NO: 42787 - RNA, 19 nt, synthetic construct
  misc_feature 1..19: note = siRNA antisense sequence
  source 1..19: mol_type = other RNA
gcctgaggaaggatgagga

SEQ ID NO: 42788 - RNA, 19 nt, synthetic construct
  misc_feature 1..19: note = siRNA sense sequence
  source 1..19: mol_type = other RNA
aaccgtgctaggcttggca

SEQ ID NO: 42789 - RNA, 19 nt, synthetic construct
  misc_feature 1..19: note = siRNA antisense sequence
  source 1..19: mol_type = other RNA
tgccaagcctagcacggtt

SEQ ID NO: 42790 - RNA, 19 nt, synthetic construct
  misc_feature 1..19: note = siRNA sense sequence
  source 1..19: mol_type = other RNA
accgtgctaggcttggcaa

SEQ ID NO: 42791 - RNA, 19 nt, synthetic construct
  misc_feature 1..19: note = siRNA antisense sequence
  source 1..19: mol_type = other RNA
ttgccaagcctagcacggt

SEQ ID NO: 42792 - RNA, 19 nt, synthetic construct
  misc_feature 1..19: note = siRNA sense sequence
  source 1..19: mol_type = other RNA
ccgtgctaggcttggcaat

SEQ ID NO: 42793 - RNA, 19 nt, synthetic construct
  misc_feature 1..19: note = siRNA antisense sequence
  source 1..19: mol_type = other RNA
attgccaagcctagcacgg

SEQ ID NO: 42794 - RNA, 19 nt, synthetic construct
  misc_feature 1..19: note = siRNA sense sequence
  source 1..19: mol_type = other RNA
cgtgctaggcttggcaatg

SEQ ID NO: 42795 - RNA, 19 nt, synthetic construct
  misc_feature 1..19: note = siRNA antisense sequence
  source 1..19: mol_type = other RNA
cattgccaagcctagcacg

SEQ ID NO: 42796 - RNA, 19 nt, synthetic construct
  misc_feature 1..19: note = siRNA sense sequence
  source 1..19: mol_type = other RNA
gtgctaggcttggcaatga

SEQ ID NO: 42797 - RNA, 19 nt, synthetic construct
  misc_feature 1..19: note = siRNA antisense sequence
  source 1..19: mol_type = other RNA
tcattgccaagcctagcac

SEQ ID NO: 42798 - RNA, 19 nt, synthetic construct
  misc_feature 1..19: note = siRNA sense sequence
  source 1..19: mol_type = other RNA
tgctaggcttggcaatgac

SEQ ID NO: 42799 - RNA, 19 nt, synthetic construct
  misc_feature 1..19: note = siRNA antisense sequence
  source 1..19: mol_type = other RNA
gtcattgccaagcctagca

SEQ ID NO: 42800 - RNA, 19 nt, synthetic construct
  misc_feature 1..19: note = siRNA sense sequence
  source 1..19: mol_type = other RNA
gctaggcttggcaatgact

SEQ ID NO: 42801 - RNA, 19 nt, synthetic construct
  misc_feature 1..19: note = siRNA antisense sequence
  source 1..19: mol_type = other RNA
agtcattgccaagcctagc

SEQ ID NO: 42802 - RNA, 19 nt, synthetic construct
  misc_feature 1..19: note = siRNA sense sequence
  source 1..19: mol_type = other RNA
ctaggcttggcaatgactc

SEQ ID NO: 42803 - RNA, 19 nt, synthetic construct
  misc_feature 1..19: note = siRNA antisense sequence
  source 1..19: mol_type = other RNA
gagtcattgccaagcctag

SEQ ID NO: 42804 - RNA, 19 nt, synthetic construct
  misc_feature 1..19: note = siRNA sense sequence
  source 1..19: mol_type = other RNA
taggcttggcaatgactca

SEQ ID NO: 42805 - RNA, 19 nt, synthetic construct
  misc_feature 1..19: note = siRNA antisense sequence
  source 1..19: mol_type = other RNA
tgagtcattgccaagccta

SEQ ID NO: 42806 - RNA, 19 nt, synthetic construct
  misc_feature 1..19: note = siRNA sense sequence
  source 1..19: mol_type = other RNA
aggcttggcaatgactcac

SEQ ID NO: 42807 - RNA, 19 nt, synthetic construct
  misc_feature 1..19: note = siRNA antisense sequence
  source 1..19: mol_type = other RNA
gtgagtcattgccaagcct

SEQ ID NO: 42808 - RNA, 19 nt, synthetic construct
  misc_feature 1..19: note = siRNA sense sequence
  source 1..19: mol_type = other RNA
ggcttggcaatgactcact

SEQ ID NO: 42809 - RNA, 19 nt, synthetic construct
  misc_feature 1..19: note = siRNA antisense sequence
  source 1..19: mol_type = other RNA
agtgagtcattgccaagcc

SEQ ID NO: 42810 - RNA, 19 nt, synthetic construct
  misc_feature 1..19: note = siRNA sense sequence
  source 1..19: mol_type = other RNA
gcttggcaatgactcactg

SEQ ID NO: 42811 - RNA, 19 nt, synthetic construct
  misc_feature 1..19: note = siRNA antisense sequence
  source 1..19: mol_type = other RNA
cagtgagtcattgccaagc

SEQ ID NO: 42812 - RNA, 19 nt, synthetic construct
  misc_feature 1..19: note = siRNA sense sequence
  source 1..19: mol_type = other RNA
cttggcaatgactcactgc

SEQ ID NO: 42813 - RNA, 19 nt, synthetic construct
  misc_feature 1..19: note = siRNA antisense sequence
  source 1..19: mol_type = other RNA
gcagtgagtcattgccaag

SEQ ID NO: 42814 - RNA, 19 nt, synthetic construct
  misc_feature 1..19: note = siRNA sense sequence
  source 1..19: mol_type = other RNA
gcaatgactcactgcctgg

SEQ ID NO: 42815 - RNA, 19 nt, synthetic construct
  misc_feature 1..19: note = siRNA antisense sequence
  source 1..19: mol_type = other RNA
ccaggcagtgagtcattgc

SEQ ID NO: 42816 - RNA, 19 nt, synthetic construct
  misc_feature 1..19: note = siRNA sense sequence
  source 1..19: mol_type = other RNA
caatgactcactgcctgga

SEQ ID NO: 42817 - RNA, 19 nt, synthetic construct
  misc_feature 1..19: note = siRNA antisense sequence
  source 1..19: mol_type = other RNA
tccaggcagtgagtcattg

SEQ ID NO: 42818 - RNA, 19 nt, synthetic construct
  misc_feature 1..19: note = siRNA sense sequence
  source 1..19: mol_type = other RNA
gactcactgcctggactaa

SEQ ID NO: 42819 - RNA, 19 nt, synthetic construct
  misc_feature 1..19: note = siRNA antisense sequence
  source 1..19: mol_type = other RNA
ttagtccaggcagtgagtc

SEQ ID NO: 42820 - RNA, 19 nt, synthetic construct
  misc_feature 1..19: note = siRNA sense sequence
  source 1..19: mol_type = other RNA
actcactgcctggactaat

SEQ ID NO: 42821 - RNA, 19 nt, synthetic construct
  misc_feature 1..19: note = siRNA antisense sequence
  source 1..19: mol_type = other RNA
attagtccaggcagtgagt

SEQ ID NO: 42822 - RNA, 19 nt, synthetic construct
  misc_feature 1..19: note = siRNA sense sequence
  source 1..19: mol_type = other RNA
ctcactgcctggactaata

SEQ ID NO: 42823 - RNA, 19 nt, synthetic construct
  misc_feature 1..19: note = siRNA antisense sequence
  source 1..19: mol_type = other RNA
tattagtccaggcagtgag

SEQ ID NO: 42824 - RNA, 19 nt, synthetic construct
  misc_feature 1..19: note = siRNA sense sequence
  source 1..19: mol_type = other RNA
tcactgcctggactaatac

SEQ ID NO: 42825 - RNA, 19 nt, synthetic construct
  misc_feature 1..19: note = siRNA antisense sequence
  source 1..19: mol_type = other RNA
gtattagtccaggcagtga

SEQ ID NO: 42826 - RNA, 19 nt, synthetic construct
  misc_feature 1..19: note = siRNA sense sequence
  source 1..19: mol_type = other RNA
cactgcctggactaatacc

SEQ ID NO: 42827 - RNA, 19 nt, synthetic construct
  misc_feature 1..19: note = siRNA antisense sequence
  source 1..19: mol_type = other RNA
ggtattagtccaggcagtg

SEQ ID NO: 42828 - RNA, 19 nt, synthetic construct
  misc_feature 1..19: note = siRNA sense sequence
  source 1..19: mol_type = other RNA
actgcctggactaatacct

SEQ ID NO: 42829 - RNA, 19 nt, synthetic construct
  misc_feature 1..19: note = siRNA antisense sequence
  source 1..19: mol_type = other RNA
aggtattagtccaggcagt

SEQ ID NO: 42830 - RNA, 19 nt, synthetic construct
  misc_feature 1..19: note = siRNA sense sequence
  source 1..19: mol_type = other RNA
ctgcctggactaatacctt

SEQ ID NO: 42831 - RNA, 19 nt, synthetic construct
  misc_feature 1..19: note = siRNA antisense sequence
  source 1..19: mol_type = other RNA
aaggtattagtccaggcag

SEQ ID NO: 42832 - RNA, 19 nt, synthetic construct
  misc_feature 1..19: note = siRNA sense sequence
  source 1..19: mol_type = other RNA
gcctggactaataccttaa

SEQ ID NO: 42833 - RNA, 19 nt, synthetic construct
  misc_feature 1..19: note = siRNA antisense sequence
  source 1..19: mol_type = other RNA
ttaaggtattagtccaggc

SEQ ID NO: 42834 - RNA, 19 nt, synthetic construct
  misc_feature 1..19: note = siRNA sense sequence
  source 1..19: mol_type = other RNA
cctggactaataccttaaa

SEQ ID NO: 42835 - RNA, 19 nt, synthetic construct
  misc_feature 1..19: note = siRNA antisense sequence
  source 1..19: mol_type = other RNA
tttaaggtattagtccagg

SEQ ID NO: 42836 - RNA, 19 nt, synthetic construct
  misc_feature 1..19: note = siRNA sense sequence
  source 1..19: mol_type = other RNA
ctggactaataccttaaat

SEQ ID NO: 42837 - RNA, 19 nt, synthetic construct
  misc_feature 1..19: note = siRNA antisense sequence
  source 1..19: mol_type = other RNA
atttaaggtattagtccag

SEQ ID NO: 42838 - RNA, 19 nt, synthetic construct
  misc_feature 1..19: note = siRNA sense sequence
  source 1..19: mol_type = other RNA
tggactaataccttaaatg

SEQ ID NO: 42839 - RNA, 19 nt, synthetic construct
  misc_feature 1..19: note = siRNA antisense sequence
  source 1..19: mol_type = other RNA
catttaaggtattagtcca

SEQ ID NO: 42840 - RNA, 19 nt, synthetic construct
  misc_feature 1..19: note = siRNA sense sequence
  source 1..19: mol_type = other RNA
aatggcttgtgttcccgct

SEQ ID NO: 42841 - RNA, 19 nt, synthetic construct
  misc_feature 1..19: note = siRNA antisense sequence
  source 1..19: mol_type = other RNA
agcgggaacacaagccatt

SEQ ID NO: 42842 - RNA, 19 nt, synthetic construct
  misc_feature 1..19: note = siRNA sense sequence
  source 1..19: mol_type = other RNA
atggcttgtgttcccgctt

SEQ ID NO: 42843 - RNA, 19 nt, synthetic construct
  misc_feature 1..19: note = siRNA antisense sequence
  source 1..19: mol_type = other RNA
aagcgggaacacaagccat

SEQ ID NO: 42844 - RNA, 19 nt, synthetic construct
  misc_feature 1..19: note = siRNA sense sequence
  source 1..19: mol_type = other RNA
tggcttgtgttcccgcttt

SEQ ID NO: 42845 - RNA, 19 nt, synthetic construct
  misc_feature 1..19: note = siRNA antisense sequence
  source 1..19: mol_type = other RNA
aaagcgggaacacaagcca

SEQ ID NO: 42846 - RNA, 19 nt, synthetic construct
  misc_feature 1..19: note = siRNA sense sequence
  source 1..19: mol_type = other RNA
ggcttgtgttcccgctttc

SEQ ID NO: 42847 - RNA, 19 nt, synthetic construct
  misc_feature 1..19: note = siRNA antisense sequence
  source 1..19: mol_type = other RNA
gaaagcgggaacacaagcc

SEQ ID NO: 42848 - RNA, 19 nt, synthetic construct
  misc_feature 1..19: note = siRNA sense sequence
  source 1..19: mol_type = other RNA
gcttgtgttcccgctttct

SEQ ID NO: 42849 - RNA, 19 nt, synthetic construct
  misc_feature 1..19: note = siRNA antisense sequence
  source 1..19: mol_type = other RNA
agaaagcgggaacacaagc

SEQ ID NO: 42850 - RNA, 19 nt, synthetic construct
  misc_feature 1..19: note = siRNA sense sequence
  source 1..19: mol_type = other RNA
tgttcccgctttctccact

SEQ ID NO: 42851 - RNA, 19 nt, synthetic construct
  misc_feature 1..19: note = siRNA antisense sequence
  source 1..19: mol_type = other RNA
agtggagaaagcgggaaca

SEQ ID NO: 42852 - RNA, 19 nt, synthetic construct
  misc_feature 1..19: note = siRNA sense sequence
  source 1..19: mol_type = other RNA
gttcccgctttctccactt

SEQ ID NO: 42853 - RNA, 19 nt, synthetic construct
  misc_feature 1..19: note = siRNA antisense sequence
  source 1..19: mol_type = other RNA
aagtggagaaagcgggaac

SEQ ID NO: 42854 - RNA, 19 nt, synthetic construct
  misc_feature 1..19: note = siRNA sense sequence
  source 1..19: mol_type = other RNA
ccgctttctccacttttgc

SEQ ID NO: 42855 - RNA, 19 nt, synthetic construct
  misc_feature 1..19: note = siRNA antisense sequence
  source 1..19: mol_type = other RNA
gcaaaagtggagaaagcgg

SEQ ID NO: 42856 - RNA, 19 nt, synthetic construct
  misc_feature 1..19: note = siRNA sense sequence
  source 1..19: mol_type = other RNA
cgctttctccacttttgcc

SEQ ID NO: 42857 - RNA, 19 nt, synthetic construct
  misc_feature 1..19: note = siRNA antisense sequence
  source 1..19: mol_type = other RNA
ggcaaaagtggagaaagcg

SEQ ID NO: 42858 - RNA, 19 nt, synthetic construct
  misc_feature 1..19: note = siRNA sense sequence
  source 1..19: mol_type = other RNA
ctttctccacttttgccca

SEQ ID NO: 42859 - RNA, 19 nt, synthetic construct
  misc_feature 1..19: note = siRNA antisense sequence
  source 1..19: mol_type = other RNA
tgggcaaaagtggagaaag

SEQ ID NO: 42860 - RNA, 19 nt, synthetic construct
  misc_feature 1..19: note = siRNA sense sequence
  source 1..19: mol_type = other RNA
tccacttttgcccatgatg

SEQ ID NO: 42861 - RNA, 19 nt, synthetic construct
  misc_feature 1..19: note = siRNA antisense sequence
  source 1..19: mol_type = other RNA
catcatgggcaaaagtgga

SEQ ID NO: 42862 - RNA, 19 nt, synthetic construct
  misc_feature 1..19: note = siRNA sense sequence
  source 1..19: mol_type = other RNA
ccacttttgcccatgatgt

SEQ ID NO: 42863 - RNA, 19 nt, synthetic construct
  misc_feature 1..19: note = siRNA antisense sequence
  source 1..19: mol_type = other RNA
acatcatgggcaaaagtgg

SEQ ID NO: 42864 - RNA, 19 nt, synthetic construct
  misc_feature 1..19: note = siRNA sense sequence
  source 1..19: mol_type = other RNA
cacttttgcccatgatgtg

SEQ ID NO: 42865 - RNA, 19 nt, synthetic construct
  misc_feature 1..19: note = siRNA antisense sequence
  source 1..19: mol_type = other RNA
cacatcatgggcaaaagtg

SEQ ID NO: 42866 - RNA, 19 nt, synthetic construct
  misc_feature 1..19: note = siRNA sense sequence
  source 1..19: mol_type = other RNA
acttttgcccatgatgtgc

SEQ ID NO: 42867 - RNA, 19 nt, synthetic construct
  misc_feature 1..19: note = siRNA antisense sequence
  source 1..19: mol_type = other RNA
gcacatcatgggcaaaagt

SEQ ID NO: 42868 - RNA, 19 nt, synthetic construct
  misc_feature 1..19: note = siRNA sense sequence
  source 1..19: mol_type = other RNA
tcttcttgttttgtccatc

SEQ ID NO: 42869 - RNA, 19 nt, synthetic construct
  misc_feature 1..19: note = siRNA antisense sequence
  source 1..19: mol_type = other RNA
gatggacaaaacaagaaga

SEQ ID NO: 42870 - RNA, 19 nt, synthetic construct
  misc_feature 1..19: note = siRNA sense sequence
  source 1..19: mol_type = other RNA
cttcttgttttgtccatcc

SEQ ID NO: 42871 - RNA, 19 nt, synthetic construct
  misc_feature 1..19: note = siRNA antisense sequence
  source 1..19: mol_type = other RNA
ggatggacaaaacaagaag

SEQ ID NO: 42872 - RNA, 19 nt, synthetic construct
  misc_feature 1..19: note = siRNA sense sequence
  source 1..19: mol_type = other RNA
ttcttgttttgtccatccc

SEQ ID NO: 42873 - RNA, 19 nt, synthetic construct
  misc_feature 1..19: note = siRNA antisense sequence
  source 1..19: mol_type = other RNA
gggatggacaaaacaagaa

SEQ ID NO: 42874 - RNA, 19 nt, synthetic construct
  misc_feature 1..19: note = siRNA sense sequence
  source 1..19: mol_type = other RNA
tgttttgtccatcccattt

SEQ ID NO: 42875 - RNA, 19 nt, synthetic construct
  misc_feature 1..19: note = siRNA antisense sequence
  source 1..19: mol_type = other RNA
aaatgggatggacaaaaca

SEQ ID NO: 42876 - RNA, 19 nt, synthetic construct
  misc_feature 1..19: note = siRNA sense sequence
  source 1..19: mol_type = other RNA
gttttgtccatcccatttg

SEQ ID NO: 42877 - RNA, 19 nt, synthetic construct
  misc_feature 1..19: note = siRNA antisense sequence
  source 1..19: mol_type = other RNA
caaatgggatggacaaaac

SEQ ID NO: 42878 - RNA, 19 nt, synthetic construct
  misc_feature 1..19: note = siRNA sense sequence
  source 1..19: mol_type = other RNA
ttttgtccatcccatttga

SEQ ID NO: 42879 - RNA, 19 nt, synthetic construct
  misc_feature 1..19: note = siRNA antisense sequence
  source 1..19: mol_type = other RNA
tcaaatgggatggacaaaa

SEQ ID NO: 42880 - RNA, 19 nt, synthetic construct
  misc_feature 1..19: note = siRNA sense sequence
  source 1..19: mol_type = other RNA
tttgtccatcccatttgat

SEQ ID NO: 42881 - RNA, 19 nt, synthetic construct
  misc_feature 1..19: note = siRNA antisense sequence
  source 1..19: mol_type = other RNA
atcaaatgggatggacaaa

SEQ ID NO: 42882 - RNA, 19 nt, synthetic construct
  misc_feature 1..19: note = siRNA sense sequence
  source 1..19: mol_type = other RNA
ttgtccatcccatttgatc

SEQ ID NO: 42883 - RNA, 19 nt, synthetic construct
  misc_feature 1..19: note = siRNA antisense sequence
  source 1..19: mol_type = other RNA
gatcaaatgggatggacaa

SEQ ID NO: 42884 - RNA, 19 nt, synthetic construct
  misc_feature 1..19: note = siRNA sense sequence
  source 1..19: mol_type = other RNA
tgtccatcccatttgatct

SEQ ID NO: 42885 - RNA, 19 nt, synthetic construct
  misc_feature 1..19: note = siRNA antisense sequence
  source 1..19: mol_type = other RNA
agatcaaatgggatggaca

SEQ ID NO: 42886 - RNA, 19 nt, synthetic construct
  misc_feature 1..19: note = siRNA sense sequence
  source 1..19: mol_type = other RNA
gtccatcccatttgatctt

SEQ ID NO: 42887 - RNA, 19 nt, synthetic construct
  misc_feature 1..19: note = siRNA antisense sequence
  source 1..19: mol_type = other RNA
aagatcaaatgggatggac

SEQ ID NO: 42888 - RNA, 19 nt, synthetic construct
  misc_feature 1..19: note = siRNA sense sequence
  source 1..19: mol_type = other RNA
tccatcccatttgatcttc

SEQ ID NO: 42889 - RNA, 19 nt, synthetic construct
  misc_feature 1..19: note = siRNA antisense sequence
  source 1..19: mol_type = other RNA
gaagatcaaatgggatgga

SEQ ID NO: 42890 - RNA, 19 nt, synthetic construct
  misc_feature 1..19: note = siRNA sense sequence
  source 1..19: mol_type = other RNA
ccatcccatttgatcttct

SEQ ID NO: 42891 - RNA, 19 nt, synthetic construct
  misc_feature 1..19: note = siRNA antisense sequence
  source 1..19: mol_type = other RNA
agaagatcaaatgggatgg

SEQ ID NO: 42892 - RNA, 19 nt, synthetic construct
  misc_feature 1..19: note = siRNA sense sequence
  source 1..19: mol_type = other RNA
catcccatttgatcttctt

SEQ ID NO: 42893 - RNA, 19 nt, synthetic construct
  misc_feature 1..19: note = siRNA antisense sequence
  source 1..19: mol_type = other RNA
aagaagatcaaatgggatg

SEQ ID NO: 42894 - RNA, 19 nt, synthetic construct
  misc_feature 1..19: note = siRNA sense sequence
  source 1..19: mol_type = other RNA
atcccatttgatcttctta

SEQ ID NO: 42895 - RNA, 19 nt, synthetic construct
  misc_feature 1..19: note = siRNA antisense sequence
  source 1..19: mol_type = other RNA
taagaagatcaaatgggat

SEQ ID NO: 42896 - RNA, 19 nt, synthetic construct
  misc_feature 1..19: note = siRNA sense sequence
  source 1..19: mol_type = other RNA
cccatttgatcttcttacc

SEQ ID NO: 42897 - RNA, 19 nt, synthetic construct
  misc_feature 1..19: note = siRNA antisense sequence
  source 1..19: mol_type = other RNA
ggtaagaagatcaaatggg

SEQ ID NO: 42898 - RNA, 19 nt, synthetic construct
  misc_feature 1..19: note = siRNA sense sequence
  source 1..19: mol_type = other RNA
ccatttgatcttcttacct

SEQ ID NO: 42899 - RNA, 19 nt, synthetic construct
  misc_feature 1..19: note = siRNA antisense sequence
  source 1..19: mol_type = other RNA
aggtaagaagatcaaatgg

SEQ ID NO: 42900 - RNA, 19 nt, synthetic construct
  misc_feature 1..19: note = siRNA sense sequence
  source 1..19: mol_type = other RNA
catttgatcttcttaccta

SEQ ID NO: 42901 - RNA, 19 nt, synthetic construct
  misc_feature 1..19: note = siRNA antisense sequence
  source 1..19: mol_type = other RNA
taggtaagaagatcaaatg

SEQ ID NO: 42902 - RNA, 19 nt, synthetic construct
  misc_feature 1..19: note = siRNA sense sequence
  source 1..19: mol_type = other RNA
tttgatcttcttacctaac

SEQ ID NO: 42903 - RNA, 19 nt, synthetic construct
  misc_feature 1..19: note = siRNA antisense sequence
  source 1..19: mol_type = other RNA
gttaggtaagaagatcaaa

SEQ ID NO: 42904 - RNA, 19 nt, synthetic construct
  misc_feature 1..19: note = siRNA sense sequence
  source 1..19: mol_type = other RNA
ttgatcttcttacctaact

SEQ ID NO: 42905 - RNA, 19 nt, synthetic construct
  misc_feature 1..19: note = siRNA antisense sequence
  source 1..19: mol_type = other RNA
agttaggtaagaagatcaa

SEQ ID NO: 42906 - RNA, 19 nt, synthetic construct
  misc_feature 1..19: note = siRNA sense sequence
  source 1..19: mol_type = other RNA
tgatcttcttacctaactt

SEQ ID NO: 42907 - RNA, 19 nt, synthetic construct
  misc_feature 1..19: note = siRNA antisense sequence
  source 1..19: mol_type = other RNA
aagttaggtaagaagatca

SEQ ID NO: 42908 - RNA, 19 nt, synthetic construct
  misc_feature 1..19: note = siRNA sense sequence
  source 1..19: mol_type = other RNA
tttccttccaaagctaata

SEQ ID NO: 42909 - RNA, 19 nt, synthetic construct
  misc_feature 1..19: note = siRNA antisense sequence
  source 1..19: mol_type = other RNA
tattagctttggaaggaaa

SEQ ID NO: 42910 - RNA, 19 nt, synthetic construct
  misc_feature 1..19: note = siRNA sense sequence
  source 1..19: mol_type = other RNA
tccttccaaagctaataac

SEQ ID NO: 42911 - RNA, 19 nt, synthetic construct
  misc_feature 1..19: note = siRNA antisense sequence
  source 1..19: mol_type = other RNA
gttattagctttggaagga

SEQ ID NO: 42912 - RNA, 19 nt, synthetic construct
  misc_feature 1..19: note = siRNA sense sequence
  source 1..19: mol_type = other RNA
attagtgcagctgtgacat

SEQ ID NO: 42913 - RNA, 19 nt, synthetic construct
  misc_feature 1..19: note = siRNA antisense sequence
  source 1..19: mol_type = other RNA
atgtcacagctgcactaat

SEQ ID NO: 42914 - RNA, 19 nt, synthetic construct
  misc_feature 1..19: note = siRNA sense sequence
  source 1..19: mol_type = other RNA
tagtgcagctgtgacatgt

SEQ ID NO: 42915 - RNA, 19 nt, synthetic construct
  misc_feature 1..19: note = siRNA antisense sequence
  source 1..19: mol_type = other RNA
acatgtcacagctgcacta

SEQ ID NO: 42916 - RNA, 19 nt, synthetic construct
  misc_feature 1..19: note = siRNA sense sequence
  source 1..19: mol_type = other RNA
agtgcagctgtgacatgtc

SEQ ID NO: 42917 - RNA, 19 nt, synthetic construct
  misc_feature 1..19: note = siRNA antisense sequence
  source 1..19: mol_type = other RNA
gacatgtcacagctgcact

SEQ ID NO: 42918 - RNA, 19 nt, synthetic construct
  misc_feature 1..19: note = siRNA sense sequence
  source 1..19: mol_type = other RNA
gtgcagctgtgacatgtct

SEQ ID NO: 42919 - RNA, 19 nt, synthetic construct
  misc_feature 1..19: note = siRNA antisense sequence
  source 1..19: mol_type = other RNA
agacatgtcacagctgcac

SEQ ID NO: 42920 - RNA, 19 nt, synthetic construct
  misc_feature 1..19: note = siRNA sense sequence
  source 1..19: mol_type = other RNA
tgcagctgtgacatgtctg

SEQ ID NO: 42921 - RNA, 19 nt, synthetic construct
  misc_feature 1..19: note = siRNA antisense sequence
  source 1..19: mol_type = other RNA
cagacatgtcacagctgca

SEQ ID NO: 42922 - RNA, 19 nt, synthetic construct
  misc_feature 1..19: note = siRNA sense sequence
  source 1..19: mol_type = other RNA
gcagctgtgacatgtctga

SEQ ID NO: 42923 - RNA, 19 nt, synthetic construct
  misc_feature 1..19: note = siRNA antisense sequence
  source 1..19: mol_type = other RNA
tcagacatgtcacagctgc

SEQ ID NO: 42924 - RNA, 19 nt, synthetic construct
  misc_feature 1..19: note = siRNA sense sequence
  source 1..19: mol_type = other RNA
cagctgtgacatgtctgaa

SEQ ID NO: 42925 - RNA, 19 nt, synthetic construct
  misc_feature 1..19: note = siRNA antisense sequence
  source 1..19: mol_type = other RNA
ttcagacatgtcacagctg

SEQ ID NO: 42926 - RNA, 19 nt, synthetic construct
  misc_feature 1..19: note = siRNA sense sequence
  source 1..19: mol_type = other RNA
agctgtgacatgtctgaag

SEQ ID NO: 42927 - RNA, 19 nt, synthetic construct
  misc_feature 1..19: note = siRNA antisense sequence
  source 1..19: mol_type = other RNA
cttcagacatgtcacagct

SEQ ID NO: 42928 - RNA, 19 nt, synthetic construct
  misc_feature 1..19: note = siRNA sense sequence
  source 1..19: mol_type = other RNA
ctgtgacatgtctgaagtt

SEQ ID NO: 42929 - RNA, 19 nt, synthetic construct
  misc_feature 1..19: note = siRNA antisense sequence
  source 1..19: mol_type = other RNA
aacttcagacatgtcacag

SEQ ID NO: 42930 - RNA, 19 nt, synthetic construct
  misc_feature 1..19: note = siRNA sense sequence
  source 1..19: mol_type = other RNA
tgtgacatgtctgaagttg

SEQ ID NO: 42931 - RNA, 19 nt, synthetic construct
  misc_feature 1..19: note = siRNA antisense sequence
  source 1..19: mol_type = other RNA
caacttcagacatgtcaca

SEQ ID NO: 42932 - RNA, 19 nt, synthetic construct
  misc_feature 1..19: note = siRNA sense sequence
  source 1..19: mol_type = other RNA
gtgacatgtctgaagttgg

SEQ ID NO: 42933 - RNA, 19 nt, synthetic construct
  misc_feature 1..19: note = siRNA antisense sequence
  source 1..19: mol_type = other RNA
ccaacttcagacatgtcac

SEQ ID NO: 42934 - RNA, 19 nt, synthetic construct
  misc_feature 1..19: note = siRNA sense sequence
  source 1..19: mol_type = other RNA
tgacatgtctgaagttggt

SEQ ID NO: 42935 - RNA, 19 nt, synthetic construct
  misc_feature 1..19: note = siRNA antisense sequence
  source 1..19: mol_type = other RNA
accaacttcagacatgtca

SEQ ID NO: 42936 - RNA, 19 nt, synthetic construct
  misc_feature 1..19: note = siRNA sense sequence
  source 1..19: mol_type = other RNA
gacatgtctgaagttggtc

SEQ ID NO: 42937 - RNA, 19 nt, synthetic construct
  misc_feature 1..19: note = siRNA antisense sequence
  source 1..19: mol_type = other RNA
gaccaacttcagacatgtc

SEQ ID NO: 42938 - RNA, 19 nt, synthetic construct
  misc_feature 1..19: note = siRNA sense sequence
  source 1..19: mol_type = other RNA
acatgtctgaagttggtcc

SEQ ID NO: 42939 - RNA, 19 nt, synthetic construct
  misc_feature 1..19: note = siRNA antisense sequence
  source 1..19: mol_type = other RNA
ggaccaacttcagacatgt

SEQ ID NO: 42940 - RNA, 19 nt, synthetic construct
  misc_feature 1..19: note = siRNA sense sequence
  source 1..19: mol_type = other RNA
catgtctgaagttggtcca

SEQ ID NO: 42941 - RNA, 19 nt, synthetic construct
  misc_feature 1..19: note = siRNA antisense sequence
  source 1..19: mol_type = other RNA
tggaccaacttcagacatg

SEQ ID NO: 42942 - RNA, 19 nt, synthetic construct
  misc_feature 1..19: note = siRNA sense sequence
  source 1..19: mol_type = other RNA
aaaatccatacggctcttt

SEQ ID NO: 42943 - RNA, 19 nt, synthetic construct
  misc_feature 1..19: note = siRNA antisense sequence
  source 1..19: mol_type = other RNA
aaagagccgtatggatttt

SEQ ID NO: 42944 - RNA, 19 nt, synthetic construct
  misc_feature 1..19: note = siRNA sense sequence
  source 1..19: mol_type = other RNA
aaatccatacggctctttt

SEQ ID NO: 42945 - RNA, 19 nt, synthetic construct
  misc_feature 1..19: note = siRNA antisense sequence
  source 1..19: mol_type = other RNA
aaaagagccgtatggattt

SEQ ID NO: 42946 - RNA, 19 nt, synthetic construct
  misc_feature 1..19: note = siRNA sense sequence
  source 1..19: mol_type = other RNA
aatccatacggctctttta

SEQ ID NO: 42947 - RNA, 19 nt, synthetic construct
  misc_feature 1..19: note = siRNA antisense sequence
  source 1..19: mol_type = other RNA
taaaagagccgtatggatt

SEQ ID NO: 42948 - RNA, 19 nt, synthetic construct
  misc_feature 1..19: note = siRNA sense sequence
  source 1..19: mol_type = other RNA
atccatacggctcttttag

SEQ ID NO: 42949 - RNA, 19 nt, synthetic construct
  misc_feature 1..19: note = siRNA antisense sequence
  source 1..19: mol_type = other RNA
ctaaaagagccgtatggat

SEQ ID NO: 42950 - RNA, 19 nt, synthetic construct
  misc_feature 1..19: note = siRNA sense sequence
  source 1..19: mol_type = other RNA
tccatacggctcttttaga

SEQ ID NO: 42951 - RNA, 19 nt, synthetic construct
  misc_feature 1..19: note = siRNA antisense sequence
  source 1..19: mol_type = other RNA
tctaaaagagccgtatgga

SEQ ID NO: 42952 - RNA, 19 nt, synthetic construct
  misc_feature 1..19: note = siRNA sense sequence
  source 1..19: mol_type = other RNA
ccatacggctcttttagaa

SEQ ID NO: 42953 - RNA, 19 nt, synthetic construct
  misc_feature 1..19: note = siRNA antisense sequence
  source 1..19: mol_type = other RNA
ttctaaaagagccgtatgg

SEQ ID NO: 42954 - RNA, 19 nt, synthetic construct
  misc_feature 1..19: note = siRNA sense sequence
  source 1..19: mol_type = other RNA
ttctgtgaagatctatgcc

SEQ ID NO: 42955 - RNA, 19 nt, synthetic construct
  misc_feature 1..19: note = siRNA antisense sequence
  source 1..19: mol_type = other RNA
ggcatagatcttcacagaa

SEQ ID NO: 42956 - RNA, 19 nt, synthetic construct
  misc_feature 1..19: note = siRNA sense sequence
  source 1..19: mol_type = other RNA
ctgtgaagatctatgccag

SEQ ID NO: 42957 - RNA, 19 nt, synthetic construct
  misc_feature 1..19: note = siRNA antisense sequence
  source 1..19: mol_type = other RNA
ctggcatagatcttcacag

SEQ ID NO: 42958 - RNA, 19 nt, synthetic construct
  misc_feature 1..19: note = siRNA sense sequence
  source 1..19: mol_type = other RNA
gatctatgccagtgactcc

SEQ ID NO: 42959 - RNA, 19 nt, synthetic construct
  misc_feature 1..19: note = siRNA antisense sequence
  source 1..19: mol_type = other RNA
ggagtcactggcatagatc

SEQ ID NO: 42960 - RNA, 19 nt, synthetic construct
  misc_feature 1..19: note = siRNA sense sequence
  source 1..19: mol_type = other RNA
atgccagtgactccatttt

SEQ ID NO: 42961 - RNA, 19 nt, synthetic construct
  misc_feature 1..19: note = siRNA antisense sequence
  source 1..19: mol_type = other RNA
aaaatggagtcactggcat

SEQ ID NO: 42962 - RNA, 19 nt, synthetic construct
  misc_feature 1..19: note = siRNA sense sequence
  source 1..19: mol_type = other RNA
tgccagtgactccattttg

SEQ ID NO: 42963 - RNA, 19 nt, synthetic construct
  misc_feature 1..19: note = siRNA antisense sequence
  source 1..19: mol_type = other RNA
caaaatggagtcactggca

SEQ ID NO: 42964 - RNA, 19 nt, synthetic construct
  misc_feature 1..19: note = siRNA sense sequence
  source 1..19: mol_type = other RNA
gccagtgactccattttgt

SEQ ID NO: 42965 - RNA, 19 nt, synthetic construct
  misc_feature 1..19: note = siRNA antisense sequence
  source 1..19: mol_type = other RNA
acaaaatggagtcactggc

SEQ ID NO: 42966 - RNA, 19 nt, synthetic construct
  misc_feature 1..19: note = siRNA sense sequence
  source 1..19: mol_type = other RNA
ccagtgactccattttgta

SEQ ID NO: 42967 - RNA, 19 nt, synthetic construct
  misc_feature 1..19: note = siRNA antisense sequence
  source 1..19: mol_type = other RNA
tacaaaatggagtcactgg

SEQ ID NO: 42968 - RNA, 19 nt, synthetic construct
  misc_feature 1..19: note = siRNA sense sequence
  source 1..19: mol_type = other RNA
gtgactccattttgtaaag

SEQ ID NO: 42969 - RNA, 19 nt, synthetic construct
  misc_feature 1..19: note = siRNA antisense sequence
  source 1..19: mol_type = other RNA
ctttacaaaatggagtcac

SEQ ID NO: 42970 - RNA, 19 nt, synthetic construct
  misc_feature 1..19: note = siRNA sense sequence
  source 1..19: mol_type = other RNA
tgactccattttgtaaaga

SEQ ID NO: 42971 - RNA, 19 nt, synthetic construct
  misc_feature 1..19: note = siRNA antisense sequence
  source 1..19: mol_type = other RNA
tctttacaaaatggagtca

SEQ ID NO: 42972 - RNA, 19 nt, synthetic construct
  misc_feature 1..19: note = siRNA sense sequence
  source 1..19: mol_type = other RNA
gactccattttgtaaagaa

SEQ ID NO: 42973 - RNA, 19 nt, synthetic construct
  misc_feature 1..19: note = siRNA antisense sequence
  source 1..19: mol_type = other RNA
ttctttacaaaatggagtc

SEQ ID NO: 42974 - RNA, 19 nt, synthetic construct
  misc_feature 1..19: note = siRNA sense sequence
  source 1..19: mol_type = other RNA
agtcaattgcttatatgct

SEQ ID NO: 42975 - RNA, 19 nt, synthetic construct
  misc_feature 1..19: note = siRNA antisense sequence
  source 1..19: mol_type = other RNA
agcatataagcaattgact

SEQ ID NO: 42976 - RNA, 19 nt, synthetic construct
  misc_feature 1..19: note = siRNA sense sequence
  source 1..19: mol_type = other RNA
gtcaattgcttatatgctc

SEQ ID NO: 42977 - RNA, 19 nt, synthetic construct
  misc_feature 1..19: note = siRNA antisense sequence
  source 1..19: mol_type = other RNA
gagcatataagcaattgac

SEQ ID NO: 42978 - RNA, 19 nt, synthetic construct
  misc_feature 1..19: note = siRNA sense sequence
  source 1..19: mol_type = other RNA
tcaattgcttatatgctca

SEQ ID NO: 42979 - RNA, 19 nt, synthetic construct
  misc_feature 1..19: note = siRNA antisense sequence
  source 1..19: mol_type = other RNA
tgagcatataagcaattga

SEQ ID NO: 42980 - RNA, 19 nt, synthetic construct
  misc_feature 1..19: note = siRNA sense sequence
  source 1..19: mol_type = other RNA
caattgcttatatgctcaa

SEQ ID NO: 42981 - RNA, 19 nt, synthetic construct
  misc_feature 1..19: note = siRNA antisense sequence
  source 1..19: mol_type = other RNA
ttgagcatataagcaattg

SEQ ID NO: 42982 - RNA, 19 nt, synthetic construct
  misc_feature 1..19: note = siRNA sense sequence
  source 1..19: mol_type = other RNA
aattgcttatatgctcaag

SEQ ID NO: 42983 - RNA, 19 nt, synthetic construct
  misc_feature 1..19: note = siRNA antisense sequence
  source 1..19: mol_type = other RNA
cttgagcatataagcaatt

SEQ ID NO: 42984 - RNA, 19 nt, synthetic construct
  misc_feature 1..19: note = siRNA sense sequence
  source 1..19: mol_type = other RNA
attcttctgcaatttcgat

SEQ ID NO: 42985 - RNA, 19 nt, synthetic construct
  misc_feature 1..19: note = siRNA antisense sequence
  source 1..19: mol_type = other RNA
atcgaaattgcagaagaat

SEQ ID NO: 42986 - RNA, 19 nt, synthetic construct
  misc_feature 1..19: note = siRNA sense sequence
  source 1..19: mol_type = other RNA
ttcttctgcaatttcgatg

SEQ ID NO: 42987 - RNA, 19 nt, synthetic construct
  misc_feature 1..19: note = siRNA antisense sequence
  source 1..19: mol_type = other RNA
catcgaaattgcagaagaa

SEQ ID NO: 42988 - RNA, 19 nt, synthetic construct
  misc_feature 1..19: note = siRNA sense sequence
  source 1..19: mol_type = other RNA
tcttctgcaatttcgatgt

SEQ ID NO: 42989 - RNA, 19 nt, synthetic construct
  misc_feature 1..19: note = siRNA antisense sequence
  source 1..19: mol_type = other RNA
acatcgaaattgcagaaga

SEQ ID NO: 42990 - RNA, 19 nt, synthetic construct
  misc_feature 1..19: note = siRNA sense sequence
  source 1..19: mol_type = other RNA
cttctgcaatttcgatgtt

SEQ ID NO: 42991 - RNA, 19 nt, synthetic construct
  misc_feature 1..19: note = siRNA antisense sequence
  source 1..19: mol_type = other RNA
aacatcgaaattgcagaag

SEQ ID NO: 42992 - RNA, 19 nt, synthetic construct
  misc_feature 1..19: note = siRNA sense sequence
  source 1..19: mol_type = other RNA
ttctgcaatttcgatgttt

SEQ ID NO: 42993 - RNA, 19 nt, synthetic construct
  misc_feature 1..19: note = siRNA antisense sequence
  source 1..19: mol_type = other RNA
aaacatcgaaattgcagaa

SEQ ID NO: 42994 - RNA, 19 nt, synthetic construct
  misc_feature 1..19: note = siRNA sense sequence
  source 1..19: mol_type = other RNA
tctgcaatttcgatgtttt

SEQ ID NO: 42995 - RNA, 19 nt, synthetic construct
  misc_feature 1..19: note = siRNA antisense sequence
  source 1..19: mol_type = other RNA
aaaacatcgaaattgcaga

SEQ ID NO: 42996 - RNA, 19 nt, synthetic construct
  misc_feature 1..19: note = siRNA sense sequence
  source 1..19: mol_type = other RNA
cctaaaagaggagctattc

SEQ ID NO: 42997 - RNA, 19 nt, synthetic construct
  misc_feature 1..19: note = siRNA antisense sequence
  source 1..19: mol_type = other RNA
gaatagctcctcttttagg

SEQ ID NO: 42998 - RNA, 19 nt, synthetic construct
  misc_feature 1..19: note = siRNA sense sequence
  source 1..19: mol_type = other RNA
aaaagaggagctattctgc

SEQ ID NO: 42999 - RNA, 19 nt, synthetic construct
  misc_feature 1..19: note = siRNA antisense sequence
  source 1..19: mol_type = other RNA
gcagaatagctcctctttt

SEQ ID NO: 43000 - RNA, 19 nt, synthetic construct
  misc_feature 1..19: note = siRNA sense sequence
  source 1..19: mol_type = other RNA
aaagaggagctattctgcc

SEQ ID NO: 43001 - RNA, 19 nt, synthetic construct
  misc_feature 1..19: note = siRNA antisense sequence
  source 1..19: mol_type = other RNA
ggcagaatagctcctcttt

SEQ ID NO: 43002 - RNA, 19 nt, synthetic construct
  misc_feature 1..19: note = siRNA sense sequence
  source 1..19: mol_type = other RNA
aagaggagctattctgcct

SEQ ID NO: 43003 - RNA, 19 nt, synthetic construct
  misc_feature 1..19: note = siRNA antisense sequence
  source 1..19: mol_type = other RNA
aggcagaatagctcctctt

SEQ ID NO: 43004 - RNA, 19 nt, synthetic construct
  misc_feature 1..19: note = siRNA sense sequence
  source 1..19: mol_type = other RNA
agaggagctattctgcctg

SEQ ID NO: 43005 - RNA, 19 nt, synthetic construct
  misc_feature 1..19: note = siRNA antisense sequence
  source 1..19: mol_type = other RNA
caggcagaatagctcctct

SEQ ID NO: 43006 - RNA, 19 nt, synthetic construct
  misc_feature 1..19: note = siRNA sense sequence
  source 1..19: mol_type = other RNA
gaggagctattctgcctgt

SEQ ID NO: 43007 - RNA, 19 nt, synthetic construct
  misc_feature 1..19: note = siRNA antisense sequence
  source 1..19: mol_type = other RNA
acaggcagaatagctcctc

SEQ ID NO: 43008 - RNA, 19 nt, synthetic construct
  misc_feature 1..19: note = siRNA sense sequence
  source 1..19: mol_type = other RNA
aggagctattctgcctgtc

SEQ ID NO: 43009 - RNA, 19 nt, synthetic construct
  misc_feature 1..19: note = siRNA antisense sequence
  source 1..19: mol_type = other RNA
gacaggcagaatagctcct

SEQ ID NO: 43010 - RNA, 19 nt, synthetic construct
  misc_feature 1..19: note = siRNA sense sequence
  source 1..19: mol_type = other RNA
ggagctattctgcctgtcc

SEQ ID NO: 43011 - RNA, 19 nt, synthetic construct
  misc_feature 1..19: note = siRNA antisense sequence
  source 1..19: mol_type = other RNA
ggacaggcagaatagctcc

SEQ ID NO: 43012 - RNA, 19 nt, synthetic construct
  misc_feature 1..19: note = siRNA sense sequence
  source 1..19: mol_type = other RNA
gagctattctgcctgtcca

SEQ ID NO: 43013 - RNA, 19 nt, synthetic construct
  misc_feature 1..19: note = siRNA antisense sequence
  source 1..19: mol_type = other RNA
tggacaggcagaatagctc

SEQ ID NO: 43014 - RNA, 19 nt, synthetic construct
  misc_feature 1..19: note = siRNA sense sequence
  source 1..19: mol_type = other RNA
tattctgcctgtccaccag

SEQ ID NO: 43015 - RNA, 19 nt, synthetic construct
  misc_feature 1..19: note = siRNA antisense sequence
  source 1..19: mol_type = other RNA
ctggtggacaggcagaata

SEQ ID NO: 43016 - RNA, 19 nt, synthetic construct
  misc_feature 1..19: note = siRNA sense sequence
  source 1..19: mol_type = other RNA
gtccaccagaggaattcta

SEQ ID NO: 43017 - RNA, 19 nt, synthetic construct
  misc_feature 1..19: note = siRNA antisense sequence
  source 1..19: mol_type = other RNA
tagaattcctctggtggac

SEQ ID NO: 43018 - RNA, 19 nt, synthetic construct
  misc_feature 1..19: note = siRNA sense sequence
  source 1..19: mol_type = other RNA
tccaccagaggaattctag

SEQ ID NO: 43019 - RNA, 19 nt, synthetic construct
  misc_feature 1..19: note = siRNA antisense sequence
  source 1..19: mol_type = other RNA
ctagaattcctctggtgga

SEQ ID NO: 43020 - RNA, 19 nt, synthetic construct
  misc_feature 1..19: note = siRNA sense sequence
  source 1..19: mol_type = other RNA
ccaccagaggaattctagc

SEQ ID NO: 43021 - RNA, 19 nt, synthetic construct
  misc_feature 1..19: note = siRNA antisense sequence
  source 1..19: mol_type = other RNA
gctagaattcctctggtgg

SEQ ID NO: 43022 - RNA, 19 nt, synthetic construct
  misc_feature 1..19: note = siRNA sense sequence
  source 1..19: mol_type = other RNA
accagaggaattctagcct

SEQ ID NO: 43023 - RNA, 19 nt, synthetic construct
  misc_feature 1..19: note = siRNA antisense sequence
  source 1..19: mol_type = other RNA
aggctagaattcctctggt

SEQ ID NO: 43024 - RNA, 19 nt, synthetic construct
  misc_feature 1..19: note = siRNA sense sequence
  source 1..19: mol_type = other RNA
gaggaattctagcctgcca

SEQ ID NO: 43025 - RNA, 19 nt, synthetic construct
  misc_feature 1..19: note = siRNA antisense sequence
  source 1..19: mol_type = other RNA
tggcaggctagaattcctc

SEQ ID NO: 43026 - RNA, 19 nt, synthetic construct
  misc_feature 1..19: note = siRNA sense sequence
  source 1..19: mol_type = other RNA
aggaattctagcctgccag

SEQ ID NO: 43027 - RNA, 19 nt, synthetic construct
  misc_feature 1..19: note = siRNA antisense sequence
  source 1..19: mol_type = other RNA
ctggcaggctagaattcct

SEQ ID NO: 43028 - RNA, 19 nt, synthetic construct
  misc_feature 1..19: note = siRNA sense sequence
  source 1..19: mol_type = other RNA
ggaattctagcctgccaga

SEQ ID NO: 43029 - RNA, 19 nt, synthetic construct
  misc_feature 1..19: note = siRNA antisense sequence
  source 1..19: mol_type = other RNA
tctggcaggctagaattcc

SEQ ID NO: 43030 - RNA, 19 nt, synthetic construct
  misc_feature 1..19: note = siRNA sense sequence
  source 1..19: mol_type = other RNA
ttctagcctgccagagtgg

SEQ ID NO: 43031 - RNA, 19 nt, synthetic construct
  misc_feature 1..19: note = siRNA antisense sequence
  source 1..19: mol_type = other RNA
ccactctggcaggctagaa

SEQ ID NO: 43032 - RNA, 19 nt, synthetic construct
  misc_feature 1..19: note = siRNA sense sequence
  source 1..19: mol_type = other RNA
tctagcctgccagagtggg

SEQ ID NO: 43033 - RNA, 19 nt, synthetic construct
  misc_feature 1..19: note = siRNA antisense sequence
  source 1..19: mol_type = other RNA
cccactctggcaggctaga

SEQ ID NO: 43034 - RNA, 19 nt, synthetic construct
  misc_feature 1..19: note = siRNA sense sequence
  source 1..19: mol_type = other RNA
tatatgtattttctggagg

SEQ ID NO: 43035 - RNA, 19 nt, synthetic construct
  misc_feature 1..19: note = siRNA antisense sequence
  source 1..19: mol_type = other RNA
cctccagaaaatacatata

SEQ ID NO: 43036 - RNA, 19 nt, synthetic construct
  misc_feature 1..19: note = siRNA sense sequence
  source 1..19: mol_type = other RNA
atatgtattttctggaggg

SEQ ID NO: 43037 - RNA, 19 nt, synthetic construct
  misc_feature 1..19: note = siRNA antisense sequence
  source 1..19: mol_type = other RNA
ccctccagaaaatacatat

SEQ ID NO: 43038 - RNA, 19 nt, synthetic construct
  misc_feature 1..19: note = siRNA sense sequence
  source 1..19: mol_type = other RNA
tatgtattttctggaggga

SEQ ID NO: 43039 - RNA, 19 nt, synthetic construct
  misc_feature 1..19: note = siRNA antisense sequence
  source 1..19: mol_type = other RNA
tccctccagaaaatacata

SEQ ID NO: 43040 - RNA, 19 nt, synthetic construct
  misc_feature 1..19: note = siRNA sense sequence
  source 1..19: mol_type = other RNA
caatggctctattcagaca

SEQ ID NO: 43041 - RNA, 19 nt, synthetic construct
  misc_feature 1..19: note = siRNA antisense sequence
  source 1..19: mol_type = other RNA
tgtctgaatagagccattg

SEQ ID NO: 43042 - RNA, 19 nt, synthetic construct
  misc_feature 1..19: note = siRNA sense sequence
  source 1..19: mol_type = other RNA
gggtccagatgctaccagt

SEQ ID NO: 43043 - RNA, 19 nt, synthetic construct
  misc_feature 1..19: note = siRNA antisense sequence
  source 1..19: mol_type = other RNA
actggtagcatctggaccc

SEQ ID NO: 43044 - RNA, 19 nt, synthetic construct
  misc_feature 1..19: note = siRNA sense sequence
  source 1..19: mol_type = other RNA
ggtccagatgctaccagtg

SEQ ID NO: 43045 - RNA, 19 nt, synthetic construct
  misc_feature 1..19: note = siRNA antisense sequence
  source 1..19: mol_type = other RNA
cactggtagcatctggacc

SEQ ID NO: 43046 - RNA, 19 nt, synthetic construct
  misc_feature 1..19: note = siRNA sense sequence
  source 1..19: mol_type = other RNA
cagatgctaccagtgaatg

SEQ ID NO: 43047 - RNA, 19 nt, synthetic construct
  misc_feature 1..19: note = siRNA antisense sequence
  source 1..19: mol_type = other RNA
cattcactggtagcatctg

SEQ ID NO: 43048 - RNA, 19 nt, synthetic construct
  misc_feature 1..19: note = siRNA sense sequence
  source 1..19: mol_type = other RNA
agatgctaccagtgaatgg

SEQ ID NO: 43049 - RNA, 19 nt, synthetic construct
  misc_feature 1..19: note = siRNA antisense sequence
  source 1..19: mol_type = other RNA
ccattcactggtagcatct

SEQ ID NO: 43050 - RNA, 19 nt, synthetic construct
  misc_feature 1..19: note = siRNA sense sequence
  source 1..19: mol_type = other RNA
gatgctaccagtgaatggg

SEQ ID NO: 43051 - RNA, 19 nt, synthetic construct
  misc_feature 1..19: note = siRNA antisense sequence
  source 1..19: mol_type = other RNA
cccattcactggtagcatc

SEQ ID NO: 43052 - RNA, 19 nt, synthetic construct
  misc_feature 1..19: note = siRNA sense sequence
  source 1..19: mol_type = other RNA
atgctaccagtgaatggga

SEQ ID NO: 43053 - RNA, 19 nt, synthetic construct
  misc_feature 1..19: note = siRNA antisense sequence
  source 1..19: mol_type = other RNA
tcccattcactggtagcat

SEQ ID NO: 43054 - RNA, 19 nt, synthetic construct
  misc_feature 1..19: note = siRNA sense sequence
  source 1..19: mol_type = other RNA
ttaccctgcagcagaagag

SEQ ID NO: 43055 - RNA, 19 nt, synthetic construct
  misc_feature 1..19: note = siRNA antisense sequence
  source 1..19: mol_type = other RNA
ctcttctgctgcagggtaa

SEQ ID NO: 43056 - RNA, 19 nt, synthetic construct
  misc_feature 1..19: note = siRNA sense sequence
  source 1..19: mol_type = other RNA
taccctgcagcagaagagt

SEQ ID NO: 43057 - RNA, 19 nt, synthetic construct
  misc_feature 1..19: note = siRNA antisense sequence
  source 1..19: mol_type = other RNA
actcttctgctgcagggta

SEQ ID NO: 43058 - RNA, 19 nt, synthetic construct
  misc_feature 1..19: note = siRNA sense sequence
  source 1..19: mol_type = other RNA
accctgcagcagaagagtt

SEQ ID NO: 43059 - RNA, 19 nt, synthetic construct
  misc_feature 1..19: note = siRNA antisense sequence
  source 1..19: mol_type = other RNA
aactcttctgctgcagggt

SEQ ID NO: 43060 - RNA, 19 nt, synthetic construct
  misc_feature 1..19: note = siRNA sense sequence
  source 1..19: mol_type = other RNA
ccctgcagcagaagagttc

SEQ ID NO: 43061 - RNA, 19 nt, synthetic construct
  misc_feature 1..19: note = siRNA antisense sequence
  source 1..19: mol_type = other RNA
gaactcttctgctgcaggg

SEQ ID NO: 43062 - RNA, 19 nt, synthetic construct
  misc_feature 1..19: note = siRNA sense sequence
  source 1..19: mol_type = other RNA
gcagcagaagagttcagtt

SEQ ID NO: 43063 - RNA, 19 nt, synthetic construct
  misc_feature 1..19: note = siRNA antisense sequence
  source 1..19: mol_type = other RNA
aactgaactcttctgctgc

SEQ ID NO: 43064 - RNA, 19 nt, synthetic construct
  misc_feature 1..19: note = siRNA sense sequence
  source 1..19: mol_type = other RNA
cagcagaagagttcagtta

SEQ ID NO: 43065 - RNA, 19 nt, synthetic construct
  misc_feature 1..19: note = siRNA antisense sequence
  source 1..19: mol_type = other RNA
taactgaactcttctgctg

SEQ ID NO: 43066 - RNA, 19 nt, synthetic construct
  misc_feature 1..19: note = siRNA sense sequence
  source 1..19: mol_type = other RNA
agagttcagttacatttac

SEQ ID NO: 43067 - RNA, 19 nt, synthetic construct
  misc_feature 1..19: note = siRNA antisense sequence
  source 1..19: mol_type = other RNA
gtaaatgtaactgaactct

SEQ ID NO: 43068 - RNA, 19 nt, synthetic construct
  misc_feature 1..19: note = siRNA sense sequence
  source 1..19: mol_type = other RNA
gagttcagttacatttacc

SEQ ID NO: 43069 - RNA, 19 nt, synthetic construct
  misc_feature 1..19: note = siRNA antisense sequence
  source 1..19: mol_type = other RNA
ggtaaatgtaactgaactc

SEQ ID NO: 43070 - RNA, 19 nt, synthetic construct
  misc_feature 1..19: note = siRNA sense sequence
  source 1..19: mol_type = other RNA
agttcagttacatttacca

SEQ ID NO: 43071 - RNA, 19 nt, synthetic construct
  misc_feature 1..19: note = siRNA antisense sequence
  source 1..19: mol_type = other RNA
tggtaaatgtaactgaact

SEQ ID NO: 43072 - RNA, 19 nt, synthetic construct
  misc_feature 1..19: note = siRNA sense sequence
  source 1..19: mol_type = other RNA
gttcagttacatttaccaa

SEQ ID NO: 43073 - RNA, 19 nt, synthetic construct
  misc_feature 1..19: note = siRNA antisense sequence
  source 1..19: mol_type = other RNA
ttggtaaatgtaactgaac

SEQ ID NO: 43074 - RNA, 19 nt, synthetic construct
  misc_feature 1..19: note = siRNA sense sequence
  source 1..19: mol_type = other RNA
ttcagttacatttaccaag

SEQ ID NO: 43075 - RNA, 19 nt, synthetic construct
  misc_feature 1..19: note = siRNA antisense sequence
  source 1..19: mol_type = other RNA
cttggtaaatgtaactgaa

SEQ ID NO: 43076 - RNA, 19 nt, synthetic construct
  misc_feature 1..19: note = siRNA sense sequence
  source 1..19: mol_type = other RNA
tcagttacatttaccaaga

SEQ ID NO: 43077 - RNA, 19 nt, synthetic construct
  misc_feature 1..19: note = siRNA antisense sequence
  source 1..19: mol_type = other RNA
tcttggtaaatgtaactga

SEQ ID NO: 43078 - RNA, 19 nt, synthetic construct
  misc_feature 1..19: note = siRNA sense sequence
  source 1..19: mol_type = other RNA
cagttacatttaccaagat

SEQ ID NO: 43079 - RNA, 19 nt, synthetic construct
  misc_feature 1..19: note = siRNA antisense sequence
  source 1..19: mol_type = other RNA
atcttggtaaatgtaactg

SEQ ID NO: 43080 - RNA, 19 nt, synthetic construct
  misc_feature 1..19: note = siRNA sense sequence
  source 1..19: mol_type = other RNA
agttacatttaccaagatc

SEQ ID NO: 43081 - RNA, 19 nt, synthetic construct
  misc_feature 1..19: note = siRNA antisense sequence
  source 1..19: mol_type = other RNA
gatcttggtaaatgtaact

SEQ ID NO: 43082 - RNA, 19 nt, synthetic construct
  misc_feature 1..19: note = siRNA sense sequence
  source 1..19: mol_type = other RNA
gttacatttaccaagatcc

SEQ ID NO: 43083 - RNA, 19 nt, synthetic construct
  misc_feature 1..19: note = siRNA antisense sequence
  source 1..19: mol_type = other RNA
ggatcttggtaaatgtaac

SEQ ID NO: 43084 - RNA, 19 nt, synthetic construct
  misc_feature 1..19: note = siRNA sense sequence
  source 1..19: mol_type = other RNA
ttacatttaccaagatcca

SEQ ID NO: 43085 - RNA, 19 nt, synthetic construct
  misc_feature 1..19: note = siRNA antisense sequence
  source 1..19: mol_type = other RNA
tggatcttggtaaatgtaa

SEQ ID NO: 43086 - RNA, 19 nt, synthetic construct
  misc_feature 1..19: note = siRNA sense sequence
  source 1..19: mol_type = other RNA
tacatttaccaagatccag

SEQ ID NO: 43087 - RNA, 19 nt, synthetic construct
  misc_feature 1..19: note = siRNA antisense sequence
  source 1..19: mol_type = other RNA
ctggatcttggtaaatgta

SEQ ID NO: 43088 - RNA, 19 nt, synthetic construct
  misc_feature 1..19: note = siRNA sense sequence
  source 1..19: mol_type = other RNA
atatttctgaatgaagcac

SEQ ID NO: 43089 - RNA, 19 nt, synthetic construct
  misc_feature 1..19: note = siRNA antisense sequence
  source 1..19: mol_type = other RNA
gtgcttcattcagaaatat

SEQ ID NO: 43090 - RNA, 19 nt, synthetic construct
  misc_feature 1..19: note = siRNA sense sequence
  source 1..19: mol_type = other RNA
acagtgtcgtttacattat

SEQ ID NO: 43091 - RNA, 19 nt, synthetic construct
  misc_feature 1..19: note = siRNA antisense sequence
  source 1..19: mol_type = other RNA
ataatgtaaacgacactgt

SEQ ID NO: 43092 - RNA, 19 nt, synthetic construct
  misc_feature 1..19: note = siRNA sense sequence
  source 1..19: mol_type = other RNA
cagtgtcgtttacattatc

SEQ ID NO: 43093 - RNA, 19 nt, synthetic construct
  misc_feature 1..19: note = siRNA antisense sequence
  source 1..19: mol_type = other RNA
gataatgtaaacgacactg

SEQ ID NO: 43094 - RNA, 19 nt, synthetic construct
  misc_feature 1..19: note = siRNA sense sequence
  source 1..19: mol_type = other RNA
agtgtcgtttacattatct

SEQ ID NO: 43095 - RNA, 19 nt, synthetic construct
  misc_feature 1..19: note = siRNA antisense sequence
  source 1..19: mol_type = other RNA
agataatgtaaacgacact

SEQ ID NO: 43096 - RNA, 19 nt, synthetic construct
  misc_feature 1..19: note = siRNA sense sequence
  source 1..19: mol_type = other RNA
gtgtcgtttacattatctt

SEQ ID NO: 43097 - RNA, 19 nt, synthetic construct
  misc_feature 1..19: note = siRNA antisense sequence
  source 1..19: mol_type = other RNA
aagataatgtaaacgacac

SEQ ID NO: 43098 - RNA, 19 nt, synthetic construct
  misc_feature 1..19: note = siRNA sense sequence
  source 1..19: mol_type = other RNA
tgtcgtttacattatcttc

SEQ ID NO: 43099 - RNA, 19 nt, synthetic construct
  misc_feature 1..19: note = siRNA antisense sequence
  source 1..19: mol_type = other RNA
gaagataatgtaaacgaca

SEQ ID NO: 43100 - RNA, 19 nt, synthetic construct
  misc_feature 1..19: note = siRNA sense sequence
  source 1..19: mol_type = other RNA
gtcgtttacattatcttct

SEQ ID NO: 43101 - RNA, 19 nt, synthetic construct
  misc_feature 1..19: note = siRNA antisense sequence
  source 1..19: mol_type = other RNA
agaagataatgtaaacgac

SEQ ID NO: 43102 - RNA, 19 nt, synthetic construct
  misc_feature 1..19: note = siRNA sense sequence
  source 1..19: mol_type = other RNA
tcgtttacattatcttctg

SEQ ID NO: 43103 - RNA, 19 nt, synthetic construct
  misc_feature 1..19: note = siRNA antisense sequence
  source 1..19: mol_type = other RNA
cagaagataatgtaaacga

SEQ ID NO: 43104 - RNA, 19 nt, synthetic construct
  misc_feature 1..19: note = siRNA sense sequence
  source 1..19: mol_type = other RNA
cgtttacattatcttctga

SEQ ID NO: 43105 - RNA, 19 nt, synthetic construct
  misc_feature 1..19: note = siRNA antisense sequence
  source 1..19: mol_type = other RNA
tcagaagataatgtaaacg

SEQ ID NO: 43106 - RNA, 19 nt, synthetic construct
  misc_feature 1..19: note = siRNA sense sequence
  source 1..19: mol_type = other RNA
gtttacattatcttctgac

SEQ ID NO: 43107 - RNA, 19 nt, synthetic construct
  misc_feature 1..19: note = siRNA antisense sequence
  source 1..19: mol_type = other RNA
gtcagaagataatgtaaac

SEQ ID NO: 43108 - RNA, 19 nt, synthetic construct
  misc_feature 1..19: note = siRNA sense sequence
  source 1..19: mol_type = other RNA
tacattatcttctgacttc

SEQ ID NO: 43109 - RNA, 19 nt, synthetic construct
  misc_feature 1..19: note = siRNA antisense sequence
  source 1..19: mol_type = other RNA
gaagtcagaagataatgta

SEQ ID NO: 43110 - RNA, 19 nt, synthetic construct
  misc_feature 1..19: note = siRNA sense sequence
  source 1..19: mol_type = other RNA
acattatcttctgacttca

SEQ ID NO: 43111 - RNA, 19 nt, synthetic construct
  misc_feature 1..19: note = siRNA antisense sequence
  source 1..19: mol_type = other RNA
tgaagtcagaagataatgt

SEQ ID NO: 43112 - RNA, 19 nt, synthetic construct
  misc_feature 1..19: note = siRNA sense sequence
  source 1..19: mol_type = other RNA
cattatcttctgacttcac

SEQ ID NO: 43113 - RNA, 19 nt, synthetic construct
  misc_feature 1..19: note = siRNA antisense sequence
  source 1..19: mol_type = other RNA
gtgaagtcagaagataatg

SEQ ID NO: 43114 - RNA, 19 nt, synthetic construct
  misc_feature 1..19: note = siRNA sense sequence
  source 1..19: mol_type = other RNA
attatcttctgacttcacc

SEQ ID NO: 43115 - RNA, 19 nt, synthetic construct
  misc_feature 1..19: note = siRNA antisense sequence
  source 1..19: mol_type = other RNA
ggtgaagtcagaagataat

SEQ ID NO: 43116 - RNA, 19 nt, synthetic construct
  misc_feature 1..19: note = siRNA sense sequence
  source 1..19: mol_type = other RNA
ttatcttctgacttcaccc

SEQ ID NO: 43117 - RNA, 19 nt, synthetic construct
  misc_feature 1..19: note = siRNA antisense sequence
  source 1..19: mol_type = other RNA
gggtgaagtcagaagataa

SEQ ID NO: 43118 - RNA, 19 nt, synthetic construct
  misc_feature 1..19: note = siRNA sense sequence
  source 1..19: mol_type = other RNA
atcttctgacttcacccaa

SEQ ID NO: 43119 - RNA, 19 nt, synthetic construct
  misc_feature 1..19: note = siRNA antisense sequence
  source 1..19: mol_type = other RNA
ttgggtgaagtcagaagat

SEQ ID NO: 43120 - RNA, 19 nt, synthetic construct
  misc_feature 1..19: note = siRNA sense sequence
  source 1..19: mol_type = other RNA
tcttctgacttcacccaag

SEQ ID NO: 43121 - RNA, 19 nt, synthetic construct
  misc_feature 1..19: note = siRNA antisense sequence
  source 1..19: mol_type = other RNA
cttgggtgaagtcagaaga

SEQ ID NO: 43122 - RNA, 19 nt, synthetic construct
  misc_feature 1..19: note = siRNA sense sequence
  source 1..19: mol_type = other RNA
tcacatcttgctttcatca

SEQ ID NO: 43123 - RNA, 19 nt, synthetic construct
  misc_feature 1..19: note = siRNA antisense sequence
  source 1..19: mol_type = other RNA
tgatgaaagcaagatgtga

SEQ ID NO: 43124 - RNA, 19 nt, synthetic construct
  misc_feature 1..19: note = siRNA sense sequence
  source 1..19: mol_type = other RNA
cacatcttgctttcatcat

SEQ ID NO: 43125 - RNA, 19 nt, synthetic construct
  misc_feature 1..19: note = siRNA antisense sequence
  source 1..19: mol_type = other RNA
atgatgaaagcaagatgtg

SEQ ID NO: 43126 - RNA, 19 nt, synthetic construct
  misc_feature 1..19: note = siRNA sense sequence
  source 1..19: mol_type = other RNA
acatcttgctttcatcatt

SEQ ID NO: 43127 - RNA, 19 nt, synthetic construct
  misc_feature 1..19: note = siRNA antisense sequence
  source 1..19: mol_type = other RNA
aatgatgaaagcaagatgt

SEQ ID NO: 43128 - RNA, 19 nt, synthetic construct
  misc_feature 1..19: note = siRNA sense sequence
  source 1..19: mol_type = other RNA
catcttgctttcatcattg

SEQ ID NO: 43129 - RNA, 19 nt, synthetic construct
  misc_feature 1..19: note = siRNA antisense sequence
  source 1..19: mol_type = other RNA
caatgatgaaagcaagatg

SEQ ID NO: 43130 - RNA, 19 nt, synthetic construct
  misc_feature 1..19: note = siRNA sense sequence
  source 1..19: mol_type = other RNA
atcttgctttcatcattga

SEQ ID NO: 43131 - RNA, 19 nt, synthetic construct
  misc_feature 1..19: note = siRNA antisense sequence
  source 1..19: mol_type = other RNA
tcaatgatgaaagcaagat

SEQ ID NO: 43132 - RNA, 19 nt, synthetic construct
  misc_feature 1..19: note = siRNA sense sequence
  source 1..19: mol_type = other RNA
tcttgctttcatcattgat

SEQ ID NO: 43133 - RNA, 19 nt, synthetic construct
  misc_feature 1..19: note = siRNA antisense sequence
  source 1..19: mol_type = other RNA
atcaatgatgaaagcaaga

SEQ ID NO: 43134 - RNA, 19 nt, synthetic construct
  misc_feature 1..19: note = siRNA sense sequence
  source 1..19: mol_type = other RNA
cttgctttcatcattgatt

SEQ ID NO: 43135 - RNA, 19 nt, synthetic construct
  misc_feature 1..19: note = siRNA antisense sequence
  source 1..19: mol_type = other RNA
aatcaatgatgaaagcaag

SEQ ID NO: 43136 - RNA, 19 nt, synthetic construct
  misc_feature 1..19: note = siRNA sense sequence
  source 1..19: mol_type = other RNA
ttgctttcatcattgattg

SEQ ID NO: 43137 - RNA, 19 nt, synthetic construct
  misc_feature 1..19: note = siRNA antisense sequence
  source 1..19: mol_type = other RNA
caatcaatgatgaaagcaa

SEQ ID NO: 43138 - RNA, 19 nt, synthetic construct
  misc_feature 1..19: note = siRNA sense sequence
  source 1..19: mol_type = other RNA
gctttcatcattgattgtg

SEQ ID NO: 43139 - RNA, 19 nt, synthetic construct
  misc_feature 1..19: note = siRNA antisense sequence
  source 1..19: mol_type = other RNA
cacaatcaatgatgaaagc

SEQ ID NO: 43140 - RNA, 19 nt, synthetic construct
  misc_feature 1..19: note = siRNA sense sequence
  source 1..19: mol_type = other RNA
ttcatcattgattgtggag

SEQ ID NO: 43141 - RNA, 19 nt, synthetic construct
  misc_feature 1..19: note = siRNA antisense sequence
  source 1..19: mol_type = other RNA
ctccacaatcaatgatgaa

SEQ ID NO: 43142 - RNA, 19 nt, synthetic construct
  misc_feature 1..19: note = siRNA sense sequence
  source 1..19: mol_type = other RNA
tcatcattgattgtggagc

SEQ ID NO: 43143 - RNA, 19 nt, synthetic construct
  misc_feature 1..19: note = siRNA antisense sequence
  source 1..19: mol_type = other RNA
gctccacaatcaatgatga

SEQ ID NO: 43144 - RNA, 19 nt, synthetic construct
  misc_feature 1..19: note = siRNA sense sequence
  source 1..19: mol_type = other RNA
catcattgattgtggagct

SEQ ID NO: 43145 - RNA, 19 nt, synthetic construct
  misc_feature 1..19: note = siRNA antisense sequence
  source 1..19: mol_type = other RNA
agctccacaatcaatgatg

SEQ ID NO: 43146 - RNA, 19 nt, synthetic construct
  misc_feature 1..19: note = siRNA sense sequence
  source 1..19: mol_type = other RNA
attgattgtggagcttaac

SEQ ID NO: 43147 - RNA, 19 nt, synthetic construct
  misc_feature 1..19: note = siRNA antisense sequence
  source 1..19: mol_type = other RNA
gttaagctccacaatcaat

SEQ ID NO: 43148 - RNA, 19 nt, synthetic construct
  misc_feature 1..19: note = siRNA sense sequence
  source 1..19: mol_type = other RNA
ttgattgtggagcttaacc

SEQ ID NO: 43149 - RNA, 19 nt, synthetic construct
  misc_feature 1..19: note = siRNA antisense sequence
  source 1..19: mol_type = other RNA
ggttaagctccacaatcaa

SEQ ID NO: 43150 - RNA, 19 nt, synthetic construct
  misc_feature 1..19: note = siRNA sense sequence
  source 1..19: mol_type = other RNA
tgattgtggagcttaacca

SEQ ID NO: 43151 - RNA, 19 nt, synthetic construct
  misc_feature 1..19: note = siRNA antisense sequence
  source 1..19: mol_type = other RNA
tggttaagctccacaatca

SEQ ID NO: 43152 - RNA, 19 nt, synthetic construct
  misc_feature 1..19: note = siRNA sense sequence
  source 1..19: mol_type = other RNA
tgtggagcttaaccatata

SEQ ID NO: 43153 - RNA, 19 nt, synthetic construct
  misc_feature 1..19: note = siRNA antisense sequence
  source 1..19: mol_type = other RNA
tatatggttaagctccaca

SEQ ID NO: 43154 - RNA, 19 nt, synthetic construct
  misc_feature 1..19: note = siRNA sense sequence
  source 1..19: mol_type = other RNA
gtggagcttaaccatatac

SEQ ID NO: 43155 - RNA, 19 nt, synthetic construct
  misc_feature 1..19: note = siRNA antisense sequence
  source 1..19: mol_type = other RNA
gtatatggttaagctccac

SEQ ID NO: 43156 - RNA, 19 nt, synthetic construct
  misc_feature 1..19: note = siRNA sense sequence
  source 1..19: mol_type = other RNA
agcttaaccatatacattc

SEQ ID NO: 43157 - RNA, 19 nt, synthetic construct
  misc_feature 1..19: note = siRNA antisense sequence
  source 1..19: mol_type = other RNA
gaatgtatatggttaagct

SEQ ID NO: 43158 - RNA, 19 nt, synthetic construct
  misc_feature 1..19: note = siRNA sense sequence
  source 1..19: mol_type = other RNA
gcttaaccatatacattca

SEQ ID NO: 43159 - RNA, 19 nt, synthetic construct
  misc_feature 1..19: note = siRNA antisense sequence
  source 1..19: mol_type = other RNA
tgaatgtatatggttaagc

SEQ ID NO: 43160 - RNA, 19 nt, synthetic construct
  misc_feature 1..19: note = siRNA sense sequence
  source 1..19: mol_type = other RNA
ttcagatgtatgtactaag

SEQ ID NO: 43161 - RNA, 19 nt, synthetic construct
  misc_feature 1..19: note = siRNA antisense sequence
  source 1..19: mol_type = other RNA
cttagtacatacatctgaa

SEQ ID NO: 43162 - RNA, 19 nt, synthetic construct
  misc_feature 1..19: note = siRNA sense sequence
  source 1..19: mol_type = other RNA
tcagatgtatgtactaagg

SEQ ID NO: 43163 - RNA, 19 nt, synthetic construct
  misc_feature 1..19: note = siRNA antisense sequence
  source 1..19: mol_type = other RNA
ccttagtacatacatctga

SEQ ID NO: 43164 - RNA, 19 nt, synthetic construct
  misc_feature 1..19: note = siRNA sense sequence
  source 1..19: mol_type = other RNA
agatgtatgtactaagggc

SEQ ID NO: 43165 - RNA, 19 nt, synthetic construct
  misc_feature 1..19: note = siRNA antisense sequence
  source 1..19: mol_type = other RNA
gcccttagtacatacatct

SEQ ID NO: 43166 - RNA, 19 nt, synthetic construct
  misc_feature 1..19: note = siRNA sense sequence
  source 1..19: mol_type = other RNA
gtatgtactaagggcttac

SEQ ID NO: 43167 - RNA, 19 nt, synthetic construct
  misc_feature 1..19: note = siRNA antisense sequence
  source 1..19: mol_type = other RNA
gtaagcccttagtacatac

SEQ ID NO: 43168 - RNA, 19 nt, synthetic construct
  misc_feature 1..19: note = siRNA sense sequence
  source 1..19: mol_type = other RNA
tatgtactaagggcttact

SEQ ID NO: 43169 - RNA, 19 nt, synthetic construct
  misc_feature 1..19: note = siRNA antisense sequence
  source 1..19: mol_type = other RNA
agtaagcccttagtacata

SEQ ID NO: 43170 - RNA, 19 nt, synthetic construct
  misc_feature 1..19: note = siRNA sense sequence
  source 1..19: mol_type = other RNA
atgtactaagggcttacta

SEQ ID NO: 43171 - RNA, 19 nt, synthetic construct
  misc_feature 1..19: note = siRNA antisense sequence
  source 1..19: mol_type = other RNA
tagtaagcccttagtacat

SEQ ID NO: 43172 - RNA, 19 nt, synthetic construct
  misc_feature 1..19: note = siRNA sense sequence
  source 1..19: mol_type = other RNA
tgtactaagggcttactat

SEQ ID NO: 43173 - RNA, 19 nt, synthetic construct
  misc_feature 1..19: note = siRNA antisense sequence
  source 1..19: mol_type = other RNA
atagtaagcccttagtaca

SEQ ID NO: 43174 - RNA, 19 nt, synthetic construct
  misc_feature 1..19: note = siRNA sense sequence
  source 1..19: mol_type = other RNA
gtactaagggcttactatg

SEQ ID NO: 43175 - RNA, 19 nt, synthetic construct
  misc_feature 1..19: note = siRNA antisense sequence
  source 1..19: mol_type = other RNA
catagtaagcccttagtac

SEQ ID NO: 43176 - RNA, 19 nt, synthetic construct
  misc_feature 1..19: note = siRNA sense sequence
  source 1..19: mol_type = other RNA
ctatgttccaagctctatg

SEQ ID NO: 43177 - RNA, 19 nt, synthetic construct
  misc_feature 1..19: note = siRNA antisense sequence
  source 1..19: mol_type = other RNA
catagagcttggaacatag

SEQ ID NO: 43178 - RNA, 19 nt, synthetic construct
  misc_feature 1..19: note = siRNA sense sequence
  source 1..19: mol_type = other RNA
tatgttccaagctctatgc

SEQ ID NO: 43179 - RNA, 19 nt, synthetic construct
  misc_feature 1..19: note = siRNA antisense sequence
  source 1..19: mol_type = other RNA
gcatagagcttggaacata

SEQ ID NO: 43180 - RNA, 19 nt, synthetic construct
  misc_feature 1..19: note = siRNA sense sequence
  source 1..19: mol_type = other RNA
tgttccaagctctatgcta

SEQ ID NO: 43181 - RNA, 19 nt, synthetic construct
  misc_feature 1..19: note = siRNA antisense sequence
  source 1..19: mol_type = other RNA
tagcatagagcttggaaca

SEQ ID NO: 43182 - RNA, 19 nt, synthetic construct
  misc_feature 1..19: note = siRNA sense sequence
  source 1..19: mol_type = other RNA
gttccaagctctatgctat

SEQ ID NO: 43183 - RNA, 19 nt, synthetic construct
  misc_feature 1..19: note = siRNA antisense sequence
  source 1..19: mol_type = other RNA
atagcatagagcttggaac

SEQ ID NO: 43184 - RNA, 19 nt, synthetic construct
  misc_feature 1..19: note = siRNA sense sequence
  source 1..19: mol_type = other RNA
ttccaagctctatgctata

SEQ ID NO: 43185 - RNA, 19 nt, synthetic construct
  misc_feature 1..19: note = siRNA antisense sequence
  source 1..19: mol_type = other RNA
tatagcatagagcttggaa

SEQ ID NO: 43186 - RNA, 19 nt, synthetic construct
  misc_feature 1..19: note = siRNA sense sequence
  source 1..19: mol_type = other RNA
tatgctatagcttgggtaa

SEQ ID NO: 43187 - RNA, 19 nt, synthetic construct
  misc_feature 1..19: note = siRNA antisense sequence
  source 1..19: mol_type = other RNA
ttacccaagctatagcata

SEQ ID NO: 43188 - RNA, 19 nt, synthetic construct
  misc_feature 1..19: note = siRNA sense sequence
  source 1..19: mol_type = other RNA
tgctatagcttgggtaata

SEQ ID NO: 43189 - RNA, 19 nt, synthetic construct
  misc_feature 1..19: note = siRNA antisense sequence
  source 1..19: mol_type = other RNA
tattacccaagctatagca

SEQ ID NO: 43190 - RNA, 19 nt, synthetic construct
  misc_feature 1..19: note = siRNA sense sequence
  source 1..19: mol_type = other RNA
tatagcttgggtaatagtg

SEQ ID NO: 43191 - RNA, 19 nt, synthetic construct
  misc_feature 1..19: note = siRNA antisense sequence
  source 1..19: mol_type = other RNA
cactattacccaagctata

SEQ ID NO: 43192 - RNA, 19 nt, synthetic construct
  misc_feature 1..19: note = siRNA sense sequence
  source 1..19: mol_type = other RNA
atagcttgggtaatagtgg

SEQ ID NO: 43193 - RNA, 19 nt, synthetic construct
  misc_feature 1..19: note = siRNA antisense sequence
  source 1..19: mol_type = other RNA
ccactattacccaagctat

SEQ ID NO: 43194 - RNA, 19 nt, synthetic construct
  misc_feature 1..19: note = siRNA sense sequence
  source 1..19: mol_type = other RNA
tagcttgggtaatagtggg

SEQ ID NO: 43195 - RNA, 19 nt, synthetic construct
  misc_feature 1..19: note = siRNA antisense sequence
  source 1..19: mol_type = other RNA
cccactattacccaagcta

SEQ ID NO: 43196 - RNA, 19 nt, synthetic construct
  misc_feature 1..19: note = siRNA sense sequence
  source 1..19: mol_type = other RNA
agggtgatgccttaatggt

SEQ ID NO: 43197 - RNA, 19 nt, synthetic construct
  misc_feature 1..19: note = siRNA antisense sequence
  source 1..19: mol_type = other RNA
accattaaggcatcaccct

SEQ ID NO: 43198 - RNA, 19 nt, synthetic construct
  misc_feature 1..19: note = siRNA sense sequence
  source 1..19: mol_type = other RNA
gggtgatgccttaatggtg

SEQ ID NO: 43199 - RNA, 19 nt, synthetic construct
  misc_feature 1..19: note = siRNA antisense sequence
  source 1..19: mol_type = other RNA
caccattaaggcatcaccc

SEQ ID NO: 43200 - RNA, 19 nt, synthetic construct
  misc_feature 1..19: note = siRNA sense sequence
  source 1..19: mol_type = other RNA
atgccttaatggtgcttct

SEQ ID NO: 43201 - RNA, 19 nt, synthetic construct
  misc_feature 1..19: note = siRNA antisense sequence
  source 1..19: mol_type = other RNA
agaagcaccattaaggcat

SEQ ID NO: 43202 - RNA, 19 nt, synthetic construct
  misc_feature 1..19: note = siRNA sense sequence
  source 1..19: mol_type = other RNA
tgccttaatggtgcttctg

SEQ ID NO: 43203 - RNA, 19 nt, synthetic construct
  misc_feature 1..19: note = siRNA antisense sequence
  source 1..19: mol_type = other RNA
cagaagcaccattaaggca

SEQ ID NO: 43204 - RNA, 19 nt, synthetic construct
  misc_feature 1..19: note = siRNA sense sequence
  source 1..19: mol_type = other RNA
ccttaatggtgcttctgtc

SEQ ID NO: 43205 - RNA, 19 nt, synthetic construct
  misc_feature 1..19: note = siRNA antisense sequence
  source 1..19: mol_type = other RNA
gacagaagcaccattaagg

SEQ ID NO: 43206 - RNA, 19 nt, synthetic construct
  misc_feature 1..19: note = siRNA sense sequence
  source 1..19: mol_type = other RNA
cttaatggtgcttctgtct

SEQ ID NO: 43207 - RNA, 19 nt, synthetic construct
  misc_feature 1..19: note = siRNA antisense sequence
  source 1..19: mol_type = other RNA
agacagaagcaccattaag

SEQ ID NO: 43208 - RNA, 19 nt, synthetic construct
  misc_feature 1..19: note = siRNA sense sequence
  source 1..19: mol_type = other RNA
ttaatggtgcttctgtcta

SEQ ID NO: 43209 - RNA, 19 nt, synthetic construct
  misc_feature 1..19: note = siRNA antisense sequence
  source 1..19: mol_type = other RNA
tagacagaagcaccattaa

SEQ ID NO: 43210 - RNA, 19 nt, synthetic construct
  misc_feature 1..19: note = siRNA sense sequence
  source 1..19: mol_type = other RNA
taatggtgcttctgtctaa

SEQ ID NO: 43211 - RNA, 19 nt, synthetic construct
  misc_feature 1..19: note = siRNA antisense sequence
  source 1..19: mol_type = other RNA
ttagacagaagcaccatta

SEQ ID NO: 43212 - RNA, 19 nt, synthetic construct
  misc_feature 1..19: note = siRNA sense sequence
  source 1..19: mol_type = other RNA
aatggtgcttctgtctaat

SEQ ID NO: 43213 - RNA, 19 nt, synthetic construct
  misc_feature 1..19: note = siRNA antisense sequence
  source 1..19: mol_type = other RNA
attagacagaagcaccatt

SEQ ID NO: 43214 - RNA, 19 nt, synthetic construct
  misc_feature 1..19: note = siRNA sense sequence
  source 1..19: mol_type = other RNA
atggtgcttctgtctaatg

SEQ ID NO: 43215 - RNA, 19 nt, synthetic construct
  misc_feature 1..19: note = siRNA antisense sequence
  source 1..19: mol_type = other RNA
cattagacagaagcaccat

SEQ ID NO: 43216 - RNA, 19 nt, synthetic construct
  misc_feature 1..19: note = siRNA sense sequence
  source 1..19: mol_type = other RNA
catgtttctccaattatgg

SEQ ID NO: 43217 - RNA, 19 nt, synthetic construct
  misc_feature 1..19: note = siRNA antisense sequence
  source 1..19: mol_type = other RNA
ccataattggagaaacatg

SEQ ID NO: 43218 - RNA, 19 nt, synthetic construct
  misc_feature 1..19: note = siRNA sense sequence
  source 1..19: mol_type = other RNA
atgtttctccaattatggc

SEQ ID NO: 43219 - RNA, 19 nt, synthetic construct
  misc_feature 1..19: note = siRNA antisense sequence
  source 1..19: mol_type = other RNA
gccataattggagaaacat

SEQ ID NO: 43220 - RNA, 19 nt, synthetic construct
  misc_feature 1..19: note = siRNA sense sequence
  source 1..19: mol_type = other RNA
tctccaattatggctcatg

SEQ ID NO: 43221 - RNA, 19 nt, synthetic construct
  misc_feature 1..19: note = siRNA antisense sequence
  source 1..19: mol_type = other RNA
catgagccataattggaga

SEQ ID NO: 43222 - RNA, 19 nt, synthetic construct
  misc_feature 1..19: note = siRNA sense sequence
  source 1..19: mol_type = other RNA
ctccaattatggctcatgg

SEQ ID NO: 43223 - RNA, 19 nt, synthetic construct
  misc_feature 1..19: note = siRNA antisense sequence
  source 1..19: mol_type = other RNA
ccatgagccataattggag

SEQ ID NO: 43224 - RNA, 19 nt, synthetic construct
  misc_feature 1..19: note = siRNA sense sequence
  source 1..19: mol_type = other RNA
atggctcatggaatttctg

SEQ ID NO: 43225 - RNA, 19 nt, synthetic construct
  misc_feature 1..19: note = siRNA antisense sequence
  source 1..19: mol_type = other RNA
cagaaattccatgagccat

SEQ ID NO: 43226 - RNA, 19 nt, synthetic construct
  misc_feature 1..19: note = siRNA sense sequence
  source 1..19: mol_type = other RNA
tggctcatggaatttctgc

SEQ ID NO: 43227 - RNA, 19 nt, synthetic construct
  misc_feature 1..19: note = siRNA antisense sequence
  source 1..19: mol_type = other RNA
gcagaaattccatgagcca

SEQ ID NO: 43228 - RNA, 19 nt, synthetic construct
  misc_feature 1..19: note = siRNA sense sequence
  source 1..19: mol_type = other RNA
ggctcatggaatttctgct

SEQ ID NO: 43229 - RNA, 19 nt, synthetic construct
  misc_feature 1..19: note = siRNA antisense sequence
  source 1..19: mol_type = other RNA
agcagaaattccatgagcc

SEQ ID NO: 43230 - RNA, 19 nt, synthetic construct
  misc_feature 1..19: note = siRNA sense sequence
  source 1..19: mol_type = other RNA
gctcatggaatttctgctt

SEQ ID NO: 43231 - RNA, 19 nt, synthetic construct
  misc_feature 1..19: note = siRNA antisense sequence
  source 1..19: mol_type = other RNA
aagcagaaattccatgagc

SEQ ID NO: 43232 - RNA, 19 nt, synthetic construct
  misc_feature 1..19: note = siRNA sense sequence
  source 1..19: mol_type = other RNA
ctcatggaatttctgcttc

SEQ ID NO: 43233 - RNA, 19 nt, synthetic construct
  misc_feature 1..19: note = siRNA antisense sequence
  source 1..19: mol_type = other RNA
gaagcagaaattccatgag

SEQ ID NO: 43234 - RNA, 19 nt, synthetic construct
  misc_feature 1..19: note = siRNA sense sequence
  source 1..19: mol_type = other RNA
tttctgcttccaaatcact

SEQ ID NO: 43235 - RNA, 19 nt, synthetic construct
  misc_feature 1..19: note = siRNA antisense sequence
  source 1..19: mol_type = other RNA
agtgatttggaagcagaaa

SEQ ID NO: 43236 - RNA, 19 nt, synthetic construct
  misc_feature 1..19: note = siRNA sense sequence
  source 1..19: mol_type = other RNA
ttctgcttccaaatcactg

SEQ ID NO: 43237 - RNA, 19 nt, synthetic construct
  misc_feature 1..19: note = siRNA antisense sequence
  source 1..19: mol_type = other RNA
cagtgatttggaagcagaa

SEQ ID NO: 43238 - RNA, 19 nt, synthetic construct
  misc_feature 1..19: note = siRNA sense sequence
  source 1..19: mol_type = other RNA
caaatcactgggatgcttg

SEQ ID NO: 43239 - RNA, 19 nt, synthetic construct
  misc_feature 1..19: note = siRNA antisense sequence
  source 1..19: mol_type = other RNA
caagcatcccagtgatttg

SEQ ID NO: 43240 - RNA, 19 nt, synthetic construct
  misc_feature 1..19: note = siRNA sense sequence
  source 1..19: mol_type = other RNA
aaatcactgggatgcttga

SEQ ID NO: 43241 - RNA, 19 nt, synthetic construct
  misc_feature 1..19: note = siRNA antisense sequence
  source 1..19: mol_type = other RNA
tcaagcatcccagtgattt

SEQ ID NO: 43242 - RNA, 19 nt, synthetic construct
  misc_feature 1..19: note = siRNA sense sequence
  source 1..19: mol_type = other RNA
aatcactgggatgcttgaa

SEQ ID NO: 43243 - RNA, 19 nt, synthetic construct
  misc_feature 1..19: note = siRNA antisense sequence
  source 1..19: mol_type = other RNA
ttcaagcatcccagtgatt

SEQ ID NO: 43244 - RNA, 19 nt, synthetic construct
  misc_feature 1..19: note = siRNA sense sequence
  source 1..19: mol_type = other RNA
acccatatgattcttttct

SEQ ID NO: 43245 - RNA, 19 nt, synthetic construct
  misc_feature 1..19: note = siRNA antisense sequence
  source 1..19: mol_type = other RNA
agaaaagaatcatatgggt

SEQ ID NO: 43246 - RNA, 19 nt, synthetic construct
  misc_feature 1..19: note = siRNA sense sequence
  source 1..19: mol_type = other RNA
cccatatgattcttttctg

SEQ ID NO: 43247 - RNA, 19 nt, synthetic construct
  misc_feature 1..19: note = siRNA antisense sequence
  source 1..19: mol_type = other RNA
cagaaaagaatcatatggg

SEQ ID NO: 43248 - RNA, 19 nt, synthetic construct
  misc_feature 1..19: note = siRNA sense sequence
  source 1..19: mol_type = other RNA
ctacccaggctggagtgca

SEQ ID NO: 43249 - RNA, 19 nt, synthetic construct
  misc_feature 1..19: note = siRNA antisense sequence
  source 1..19: mol_type = other RNA
tgcactccagcctgggtag

SEQ ID NO: 43250 - RNA, 19 nt, synthetic construct
  misc_feature 1..19: note = siRNA sense sequence
  source 1..19: mol_type = other RNA
tacccaggctggagtgcaa

SEQ ID NO: 43251 - RNA, 19 nt, synthetic construct
  misc_feature 1..19: note = siRNA antisense sequence
  source 1..19: mol_type = other RNA
ttgcactccagcctgggta

SEQ ID NO: 43252 - RNA, 19 nt, synthetic construct
  misc_feature 1..19: note = siRNA sense sequence
  source 1..19: mol_type = other RNA
caggctggagtgcaatggt

SEQ ID NO: 43253 - RNA, 19 nt, synthetic construct
  misc_feature 1..19: note = siRNA antisense sequence
  source 1..19: mol_type = other RNA
accattgcactccagcctg

SEQ ID NO: 43254 - RNA, 19 nt, synthetic construct
  misc_feature 1..19: note = siRNA sense sequence
  source 1..19: mol_type = other RNA
aggctggagtgcaatggta

SEQ ID NO: 43255 - RNA, 19 nt, synthetic construct
  misc_feature 1..19: note = siRNA antisense sequence
  source 1..19: mol_type = other RNA
taccattgcactccagcct

SEQ ID NO: 43256 - RNA, 19 nt, synthetic construct
  misc_feature 1..19: note = siRNA sense sequence
  source 1..19: mol_type = other RNA
ggctggagtgcaatggtac

SEQ ID NO: 43257 - RNA, 19 nt, synthetic construct
  misc_feature 1..19: note = siRNA antisense sequence
  source 1..19: mol_type = other RNA
gtaccattgcactccagcc

SEQ ID NO: 43258 - RNA, 19 nt, synthetic construct
  misc_feature 1..19: note = siRNA sense sequence
  source 1..19: mol_type = other RNA
tggtacgatcttggctcac

SEQ ID NO: 43259 - RNA, 19 nt, synthetic construct
  misc_feature 1..19: note = siRNA antisense sequence
  source 1..19: mol_type = other RNA
gtgagccaagatcgtacca

SEQ ID NO: 43260 - RNA, 19 nt, synthetic construct
  misc_feature 1..19: note = siRNA sense sequence
  source 1..19: mol_type = other RNA
ggtacgatcttggctcact

SEQ ID NO: 43261 - RNA, 19 nt, synthetic construct
  misc_feature 1..19: note = siRNA antisense sequence
  source 1..19: mol_type = other RNA
agtgagccaagatcgtacc

SEQ ID NO: 43262 - RNA, 19 nt, synthetic construct
  misc_feature 1..19: note = siRNA sense sequence
  source 1..19: mol_type = other RNA
gtacgatcttggctcactg

SEQ ID NO: 43263 - RNA, 19 nt, synthetic construct
  misc_feature 1..19: note = siRNA antisense sequence
  source 1..19: mol_type = other RNA
cagtgagccaagatcgtac

SEQ ID NO: 43264 - RNA, 19 nt, synthetic construct
  misc_feature 1..19: note = siRNA sense sequence
  source 1..19: mol_type = other RNA
tacgatcttggctcactgc

SEQ ID NO: 43265 - RNA, 19 nt, synthetic construct
  misc_feature 1..19: note = siRNA antisense sequence
  source 1..19: mol_type = other RNA
gcagtgagccaagatcgta

SEQ ID NO: 43266 - RNA, 19 nt, synthetic construct
  misc_feature 1..19: note = siRNA sense sequence
  source 1..19: mol_type = other RNA
acgatcttggctcactgca

SEQ ID NO: 43267 - RNA, 19 nt, synthetic construct
  misc_feature 1..19: note = siRNA antisense sequence
  source 1..19: mol_type = other RNA
tgcagtgagccaagatcgt

SEQ ID NO: 43268 - RNA, 19 nt, synthetic construct
  misc_feature 1..19: note = siRNA sense sequence
  source 1..19: mol_type = other RNA
ctcactgcagcctccacct

SEQ ID NO: 43269 - RNA, 19 nt, synthetic construct
  misc_feature 1..19: note = siRNA antisense sequence
  source 1..19: mol_type = other RNA
aggtggaggctgcagtgag

SEQ ID NO: 43270 - RNA, 19 nt, synthetic construct
  misc_feature 1..19: note = siRNA sense sequence
  source 1..19: mol_type = other RNA
accttctgggttcaagcaa

SEQ ID NO: 43271 - RNA, 19 nt, synthetic construct
  misc_feature 1..19: note = siRNA antisense sequence
  source 1..19: mol_type = other RNA
ttgcttgaacccagaaggt

SEQ ID NO: 43272 - RNA, 19 nt, synthetic construct
  misc_feature 1..19: note = siRNA sense sequence
  source 1..19: mol_type = other RNA
ccttctgggttcaagcaat

SEQ ID NO: 43273 - RNA, 19 nt, synthetic construct
  misc_feature 1..19: note = siRNA antisense sequence
  source 1..19: mol_type = other RNA
attgcttgaacccagaagg

SEQ ID NO: 43274 - RNA, 19 nt, synthetic construct
  misc_feature 1..19: note = siRNA sense sequence
  source 1..19: mol_type = other RNA
cttctgggttcaagcaatt

SEQ ID NO: 43275 - RNA, 19 nt, synthetic construct
  misc_feature 1..19: note = siRNA antisense sequence
  source 1..19: mol_type = other RNA
aattgcttgaacccagaag

SEQ ID NO: 43276 - RNA, 19 nt, synthetic construct
  misc_feature 1..19: note = siRNA sense sequence
  source 1..19: mol_type = other RNA
tgggttcaagcaattctcg

SEQ ID NO: 43277 - RNA, 19 nt, synthetic construct
  misc_feature 1..19: note = siRNA antisense sequence
  source 1..19: mol_type = other RNA
cgagaattgcttgaaccca

SEQ ID NO: 43278 - RNA, 19 nt, synthetic construct
  misc_feature 1..19: note = siRNA sense sequence
  source 1..19: mol_type = other RNA
gggttcaagcaattctcgt

SEQ ID NO: 43279 - RNA, 19 nt, synthetic construct
  misc_feature 1..19: note = siRNA antisense sequence
  source 1..19: mol_type = other RNA
acgagaattgcttgaaccc

SEQ ID NO: 43280 - RNA, 19 nt, synthetic construct
  misc_feature 1..19: note = siRNA sense sequence
  source 1..19: mol_type = other RNA
ggttcaagcaattctcgtg

SEQ ID NO: 43281 - RNA, 19 nt, synthetic construct
  misc_feature 1..19: note = siRNA antisense sequence
  source 1..19: mol_type = other RNA
cacgagaattgcttgaacc

SEQ ID NO: 43282 - RNA, 19 nt, synthetic construct
  misc_feature 1..19: note = siRNA sense sequence
  source 1..19: mol_type = other RNA
gttcaagcaattctcgtgc

SEQ ID NO: 43283 - RNA, 19 nt, synthetic construct
  misc_feature 1..19: note = siRNA antisense sequence
  source 1..19: mol_type = other RNA
gcacgagaattgcttgaac

SEQ ID NO: 43284 - RNA, 19 nt, synthetic construct
  misc_feature 1..19: note = siRNA sense sequence
  source 1..19: mol_type = other RNA
ttcaagcaattctcgtgcc

SEQ ID NO: 43285 - RNA, 19 nt, synthetic construct
  misc_feature 1..19: note = siRNA antisense sequence
  source 1..19: mol_type = other RNA
ggcacgagaattgcttgaa

SEQ ID NO: 43286 - RNA, 19 nt, synthetic construct
  misc_feature 1..19: note = siRNA sense sequence
  source 1..19: mol_type = other RNA
gccttctgagtagctggga

SEQ ID NO: 43287 - RNA, 19 nt, synthetic construct
  misc_feature 1..19: note = siRNA antisense sequence
  source 1..19: mol_type = other RNA
tcccagctactcagaaggc

SEQ ID NO: 43288 - RNA, 19 nt, synthetic construct
  misc_feature 1..19: note = siRNA sense sequence
  source 1..19: mol_type = other RNA
ccttctgagtagctgggat

SEQ ID NO: 43289 - RNA, 19 nt, synthetic construct
  misc_feature 1..19: note = siRNA antisense sequence
  source 1..19: mol_type = other RNA
atcccagctactcagaagg

SEQ ID NO: 43290 - RNA, 19 nt, synthetic construct
  misc_feature 1..19: note = siRNA sense sequence
  source 1..19: mol_type = other RNA
cttctgagtagctgggatt

SEQ ID NO: 43291 - RNA, 19 nt, synthetic construct
  misc_feature 1..19: note = siRNA antisense sequence
  source 1..19: mol_type = other RNA
aatcccagctactcagaag

SEQ ID NO: 43292 - RNA, 19 nt, synthetic construct
  misc_feature 1..19: note = siRNA sense sequence
  source 1..19: mol_type = other RNA
ttctgagtagctgggatta

SEQ ID NO: 43293 - RNA, 19 nt, synthetic construct
  misc_feature 1..19: note = siRNA antisense sequence
  source 1..19: mol_type = other RNA
taatcccagctactcagaa

SEQ ID NO: 43294 - RNA, 19 nt, synthetic construct
  misc_feature 1..19: note = siRNA sense sequence
  source 1..19: mol_type = other RNA
tctgagtagctgggattac

SEQ ID NO: 43295 - RNA, 19 nt, synthetic construct
  misc_feature 1..19: note = siRNA antisense sequence
  source 1..19: mol_type = other RNA
gtaatcccagctactcaga

SEQ ID NO: 43296 - RNA, 19 nt, synthetic construct
  misc_feature 1..19: note = siRNA sense sequence
  source 1..19: mol_type = other RNA
ctgagtagctgggattaca

SEQ ID NO: 43297 - RNA, 19 nt, synthetic construct
  misc_feature 1..19: note = siRNA antisense sequence
  source 1..19: mol_type = other RNA
tgtaatcccagctactcag

SEQ ID NO: 43298 - RNA, 19 nt, synthetic construct
  misc_feature 1..19: note = siRNA sense sequence
  source 1..19: mol_type = other RNA
tgagtagctgggattacag

SEQ ID NO: 43299 - RNA, 19 nt, synthetic construct
  misc_feature 1..19: note = siRNA antisense sequence
  source 1..19: mol_type = other RNA
ctgtaatcccagctactca

SEQ ID NO: 43300 - RNA, 19 nt, synthetic construct
  misc_feature 1..19: note = siRNA sense sequence
  source 1..19: mol_type = other RNA
ctgggattacaggcatgtg

SEQ ID NO: 43301 - RNA, 19 nt, synthetic construct
  misc_feature 1..19: note = siRNA antisense sequence
  source 1..19: mol_type = other RNA
cacatgcctgtaatcccag

SEQ ID NO: 43302 - RNA, 19 nt, synthetic construct
  misc_feature 1..19: note = siRNA sense sequence
  source 1..19: mol_type = other RNA
tgggattacaggcatgtgc

SEQ ID NO: 43303 - RNA, 19 nt, synthetic construct
  misc_feature 1..19: note = siRNA antisense sequence
  source 1..19: mol_type = other RNA
gcacatgcctgtaatccca

SEQ ID NO: 43304 - RNA, 19 nt, synthetic construct
  misc_feature 1..19: note = siRNA sense sequence
  source 1..19: mol_type = other RNA
gggattacaggcatgtgct

SEQ ID NO: 43305 - RNA, 19 nt, synthetic construct
  misc_feature 1..19: note = siRNA antisense sequence
  source 1..19: mol_type = other RNA
agcacatgcctgtaatccc

SEQ ID NO: 43306 - RNA, 19 nt, synthetic construct
  misc_feature 1..19: note = siRNA sense sequence
  source 1..19: mol_type = other RNA
ggattacaggcatgtgcta

SEQ ID NO: 43307 - RNA, 19 nt, synthetic construct
  misc_feature 1..19: note = siRNA antisense sequence
  source 1..19: mol_type = other RNA
tagcacatgcctgtaatcc

SEQ ID NO: 43308 - RNA, 19 nt, synthetic construct
  misc_feature 1..19: note = siRNA sense sequence
  source 1..19: mol_type = other RNA
gattacaggcatgtgctac

SEQ ID NO: 43309 - RNA, 19 nt, synthetic construct
  misc_feature 1..19: note = siRNA antisense sequence
  source 1..19: mol_type = other RNA
gtagcacatgcctgtaatc

SEQ ID NO: 43310 - RNA, 19 nt, synthetic construct
  misc_feature 1..19: note = siRNA sense sequence
  source 1..19: mol_type = other RNA
attacaggcatgtgctacc

SEQ ID NO: 43311 - RNA, 19 nt, synthetic construct
  misc_feature 1..19: note = siRNA antisense sequence
  source 1..19: mol_type = other RNA
ggtagcacatgcctgtaat

SEQ ID NO: 43312 - RNA, 19 nt, synthetic construct
  misc_feature 1..19: note = siRNA sense sequence
  source 1..19: mol_type = other RNA
ttacaggcatgtgctacca

SEQ ID NO: 43313 - RNA, 19 nt, synthetic construct
  misc_feature 1..19: note = siRNA antisense sequence
  source 1..19: mol_type = other RNA
tggtagcacatgcctgtaa

SEQ ID NO: 43314 - RNA, 19 nt, synthetic construct
  misc_feature 1..19: note = siRNA sense sequence
  source 1..19: mol_type = other RNA
gatagggtttcgccatgtt

SEQ ID NO: 43315 - RNA, 19 nt, synthetic construct
  misc_feature 1..19: note = siRNA antisense sequence
  source 1..19: mol_type = other RNA
aacatggcgaaaccctatc

SEQ ID NO: 43316 - RNA, 19 nt, synthetic construct
  misc_feature 1..19: note = siRNA sense sequence
  source 1..19: mol_type = other RNA
atagggtttcgccatgttg

SEQ ID NO: 43317 - RNA, 19 nt, synthetic construct
  misc_feature 1..19: note = siRNA antisense sequence
  source 1..19: mol_type = other RNA
caacatggcgaaaccctat

SEQ ID NO: 43318 - RNA, 19 nt, synthetic construct
  misc_feature 1..19: note = siRNA sense sequence
  source 1..19: mol_type = other RNA
tagggtttcgccatgttgg

SEQ ID NO: 43319 - RNA, 19 nt, synthetic construct
  misc_feature 1..19: note = siRNA antisense sequence
  source 1..19: mol_type = other RNA
ccaacatggcgaaacccta

SEQ ID NO: 43320 - RNA, 19 nt, synthetic construct
  misc_feature 1..19: note = siRNA sense sequence
  source 1..19: mol_type = other RNA
ccatgttggccaggctggt

SEQ ID NO: 43321 - RNA, 19 nt, synthetic construct
  misc_feature 1..19: note = siRNA antisense sequence
  source 1..19: mol_type = other RNA
accagcctggccaacatgg

SEQ ID NO: 43322 - RNA, 19 nt, synthetic construct
  misc_feature 1..19: note = siRNA sense sequence
  source 1..19: mol_type = other RNA
catgttggccaggctggtc

SEQ ID NO: 43323 - RNA, 19 nt, synthetic construct
  misc_feature 1..19: note = siRNA antisense sequence
  source 1..19: mol_type = other RNA
gaccagcctggccaacatg

SEQ ID NO: 43324 - RNA, 19 nt, synthetic construct
  misc_feature 1..19: note = siRNA sense sequence
  source 1..19: mol_type = other RNA
atgttggccaggctggtct

SEQ ID NO: 43325 - RNA, 19 nt, synthetic construct
  misc_feature 1..19: note = siRNA antisense sequence
  source 1..19: mol_type = other RNA
agaccagcctggccaacat

SEQ ID NO: 43326 - RNA, 19 nt, synthetic construct
  misc_feature 1..19: note = siRNA sense sequence
  source 1..19: mol_type = other RNA
tgttggccaggctggtctt

SEQ ID NO: 43327 - RNA, 19 nt, synthetic construct
  misc_feature 1..19: note = siRNA antisense sequence
  source 1..19: mol_type = other RNA
aagaccagcctggccaaca

SEQ ID NO: 43328 - RNA, 19 nt, synthetic construct
  misc_feature 1..19: note = siRNA sense sequence
  source 1..19: mol_type = other RNA
gttggccaggctggtcttg

SEQ ID NO: 43329 - RNA, 19 nt, synthetic construct
  misc_feature 1..19: note = siRNA antisense sequence
  source 1..19: mol_type = other RNA
caagaccagcctggccaac

SEQ ID NO: 43330 - RNA, 19 nt, synthetic construct
  misc_feature 1..19: note = siRNA sense sequence
  source 1..19: mol_type = other RNA
ttggccaggctggtcttga

SEQ ID NO: 43331 - RNA, 19 nt, synthetic construct
  misc_feature 1..19: note = siRNA antisense sequence
  source 1..19: mol_type = other RNA
tcaagaccagcctggccaa

SEQ ID NO: 43332 - RNA, 19 nt, synthetic construct
  misc_feature 1..19: note = siRNA sense sequence
  source 1..19: mol_type = other RNA
tggccaggctggtcttgaa

SEQ ID NO: 43333 - RNA, 19 nt, synthetic construct
  misc_feature 1..19: note = siRNA antisense sequence
  source 1..19: mol_type = other RNA
ttcaagaccagcctggcca

SEQ ID NO: 43334 - RNA, 19 nt, synthetic construct
  misc_feature 1..19: note = siRNA sense sequence
  source 1..19: mol_type = other RNA
cacagatgatccgcctgcc

SEQ ID NO: 43335 - RNA, 19 nt, synthetic construct
  misc_feature 1..19: note = siRNA antisense sequence
  source 1..19: mol_type = other RNA
ggcaggcggatcatctgtg

SEQ ID NO: 43336 - RNA, 19 nt, synthetic construct
  misc_feature 1..19: note = siRNA sense sequence
  source 1..19: mol_type = other RNA
acagatgatccgcctgcct

SEQ ID NO: 43337 - RNA, 19 nt, synthetic construct
  misc_feature 1..19: note = siRNA antisense sequence
  source 1..19: mol_type = other RNA
aggcaggcggatcatctgt

SEQ ID NO: 43338 - RNA, 19 nt, synthetic construct
  misc_feature 1..19: note = siRNA sense sequence
  source 1..19: mol_type = other RNA
ggcttgagccactgtgcct

SEQ ID NO: 43339 - RNA, 19 nt, synthetic construct
  misc_feature 1..19: note = siRNA antisense sequence
  source 1..19: mol_type = other RNA
aggcacagtggctcaagcc

SEQ ID NO: 43340 - RNA, 19 nt, synthetic construct
  misc_feature 1..19: note = siRNA sense sequence
  source 1..19: mol_type = other RNA
gcttgagccactgtgcctg

SEQ ID NO: 43341 - RNA, 19 nt, synthetic construct
  misc_feature 1..19: note = siRNA antisense sequence
  source 1..19: mol_type = other RNA
caggcacagtggctcaagc

SEQ ID NO: 43342 - RNA, 19 nt, synthetic construct
  misc_feature 1..19: note = siRNA sense sequence
  source 1..19: mol_type = other RNA
cttgagccactgtgcctgg

SEQ ID NO: 43343 - RNA, 19 nt, synthetic construct
  misc_feature 1..19: note = siRNA antisense sequence
  source 1..19: mol_type = other RNA
ccaggcacagtggctcaag

SEQ ID NO: 43344 - RNA, 19 nt, synthetic construct
  misc_feature 1..19: note = siRNA sense sequence
  source 1..19: mol_type = other RNA
cactggactaaggcataat

SEQ ID NO: 43345 - RNA, 19 nt, synthetic construct
  misc_feature 1..19: note = siRNA antisense sequence
  source 1..19: mol_type = other RNA
attatgccttagtccagtg

SEQ ID NO: 43346 - RNA, 19 nt, synthetic construct
  misc_feature 1..19: note = siRNA sense sequence
  source 1..19: mol_type = other RNA
actggactaaggcataatt

SEQ ID NO: 43347 - RNA, 19 nt, synthetic construct
  misc_feature 1..19: note = siRNA antisense sequence
  source 1..19: mol_type = other RNA
aattatgccttagtccagt

SEQ ID NO: 43348 - RNA, 19 nt, synthetic construct
  misc_feature 1..19: note = siRNA sense sequence
  source 1..19: mol_type = other RNA
ctggactaaggcataatta

SEQ ID NO: 43349 - RNA, 19 nt, synthetic construct
  misc_feature 1..19: note = siRNA antisense sequence
  source 1..19: mol_type = other RNA
taattatgccttagtccag

SEQ ID NO: 43350 - RNA, 19 nt, synthetic construct
  misc_feature 1..19: note = siRNA sense sequence
  source 1..19: mol_type = other RNA
tggactaaggcataattat

SEQ ID NO: 43351 - RNA, 19 nt, synthetic construct
  misc_feature 1..19: note = siRNA antisense sequence
  source 1..19: mol_type = other RNA
ataattatgccttagtcca

SEQ ID NO: 43352 - RNA, 19 nt, synthetic construct
  misc_feature 1..19: note = siRNA sense sequence
  source 1..19: mol_type = other RNA
ggactaaggcataattatt

SEQ ID NO: 43353 - RNA, 19 nt, synthetic construct
  misc_feature 1..19: note = siRNA antisense sequence
  source 1..19: mol_type = other RNA
aataattatgccttagtcc

SEQ ID NO: 43354 - RNA, 19 nt, synthetic construct
  misc_feature 1..19: note = siRNA sense sequence
  source 1..19: mol_type = other RNA
tattatattagtgtgcgtg

SEQ ID NO: 43355 - RNA, 19 nt, synthetic construct
  misc_feature 1..19: note = siRNA antisense sequence
  source 1..19: mol_type = other RNA
cacgcacactaatataata

SEQ ID NO: 43356 - RNA, 19 nt, synthetic construct
  misc_feature 1..19: note = siRNA sense sequence
  source 1..19: mol_type = other RNA
attatattagtgtgcgtga

SEQ ID NO: 43357 - RNA, 19 nt, synthetic construct
  misc_feature 1..19: note = siRNA antisense sequence
  source 1..19: mol_type = other RNA
tcacgcacactaatataat

SEQ ID NO: 43358 - RNA, 19 nt, synthetic construct
  misc_feature 1..19: note = siRNA sense sequence
  source 1..19: mol_type = other RNA
ttatattagtgtgcgtgag

SEQ ID NO: 43359 - RNA, 19 nt, synthetic construct
  misc_feature 1..19: note = siRNA antisense sequence
  source 1..19: mol_type = other RNA
ctcacgcacactaatataa

SEQ ID NO: 43360 - RNA, 19 nt, synthetic construct
  misc_feature 1..19: note = siRNA sense sequence
  source 1..19: mol_type = other RNA
gtgtctgtctatctgtgtt

SEQ ID NO: 43361 - RNA, 19 nt, synthetic construct
  misc_feature 1..19: note = siRNA antisense sequence
  source 1..19: mol_type = other RNA
aacacagatagacagacac

SEQ ID NO: 43362 - RNA, 19 nt, synthetic construct
  misc_feature 1..19: note = siRNA sense sequence
  source 1..19: mol_type = other RNA
gtctgtctatctgtgtttg

SEQ ID NO: 43363 - RNA, 19 nt, synthetic construct
  misc_feature 1..19: note = siRNA antisense sequence
  source 1..19: mol_type = other RNA
caaacacagatagacagac

SEQ ID NO: 43364 - RNA, 19 nt, synthetic construct
  misc_feature 1..19: note = siRNA sense sequence
  source 1..19: mol_type = other RNA
tctgtctatctgtgtttgc

SEQ ID NO: 43365 - RNA, 19 nt, synthetic construct
  misc_feature 1..19: note = siRNA antisense sequence
  source 1..19: mol_type = other RNA
gcaaacacagatagacaga

SEQ ID NO: 43366 - RNA, 19 nt, synthetic construct
  misc_feature 1..19: note = siRNA sense sequence
  source 1..19: mol_type = other RNA
ctgtctatctgtgtttgct

SEQ ID NO: 43367 - RNA, 19 nt, synthetic construct
  misc_feature 1..19: note = siRNA antisense sequence
  source 1..19: mol_type = other RNA
agcaaacacagatagacag

SEQ ID NO: 43368 - RNA, 19 nt, synthetic construct
  misc_feature 1..19: note = siRNA sense sequence
  source 1..19: mol_type = other RNA
tgtctatctgtgtttgctg

SEQ ID NO: 43369 - RNA, 19 nt, synthetic construct
  misc_feature 1..19: note = siRNA antisense sequence
  source 1..19: mol_type = other RNA
cagcaaacacagatagaca

SEQ ID NO: 43370 - RNA, 19 nt, synthetic construct
  misc_feature 1..19: note = siRNA sense sequence
  source 1..19: mol_type = other RNA
tatctgtgtttgctgcata

SEQ ID NO: 43371 - RNA, 19 nt, synthetic construct
  misc_feature 1..19: note = siRNA antisense sequence
  source 1..19: mol_type = other RNA
tatgcagcaaacacagata

SEQ ID NO: 43372 - RNA, 19 nt, synthetic construct
  misc_feature 1..19: note = siRNA sense sequence
  source 1..19: mol_type = other RNA
atctgtgtttgctgcatac

SEQ ID NO: 43373 - RNA, 19 nt, synthetic construct
  misc_feature 1..19: note = siRNA antisense sequence
  source 1..19: mol_type = other RNA
gtatgcagcaaacacagat

SEQ ID NO: 43374 - RNA, 19 nt, synthetic construct
  misc_feature 1..19: note = siRNA sense sequence
  source 1..19: mol_type = other RNA
tctgtgtttgctgcatact

SEQ ID NO: 43375 - RNA, 19 nt, synthetic construct
  misc_feature 1..19: note = siRNA antisense sequence
  source 1..19: mol_type = other RNA
agtatgcagcaaacacaga

SEQ ID NO: 43376 - RNA, 19 nt, synthetic construct
  misc_feature 1..19: note = siRNA sense sequence
  source 1..19: mol_type = other RNA
ctgtgtttgctgcatactg

SEQ ID NO: 43377 - RNA, 19 nt, synthetic construct
  misc_feature 1..19: note = siRNA antisense sequence
  source 1..19: mol_type = other RNA
cagtatgcagcaaacacag

SEQ ID NO: 43378 - RNA, 19 nt, synthetic construct
  misc_feature 1..19: note = siRNA sense sequence
  source 1..19: mol_type = other RNA
ataataggcacctcaagag

SEQ ID NO: 43379 - RNA, 19 nt, synthetic construct
  misc_feature 1..19: note = siRNA antisense sequence
  source 1..19: mol_type = other RNA
ctcttgaggtgcctattat

SEQ ID NO: 43380 - RNA, 19 nt, synthetic construct
  misc_feature 1..19: note = siRNA sense sequence
  source 1..19: mol_type = other RNA
taataggcacctcaagagc

SEQ ID NO: 43381 - RNA, 19 nt, synthetic construct
  misc_feature 1..19: note = siRNA antisense sequence
  source 1..19: mol_type = other RNA
gctcttgaggtgcctatta

SEQ ID NO: 43382 - RNA, 19 nt, synthetic construct
  misc_feature 1..19: note = siRNA sense sequence
  source 1..19: mol_type = other RNA
aataggcacctcaagagca

SEQ ID NO: 43383 - RNA, 19 nt, synthetic construct
  misc_feature 1..19: note = siRNA antisense sequence
  source 1..19: mol_type = other RNA
tgctcttgaggtgcctatt

SEQ ID NO: 43384 - RNA, 19 nt, synthetic construct
  misc_feature 1..19: note = siRNA sense sequence
  source 1..19: mol_type = other RNA
ataggcacctcaagagcaa

SEQ ID NO: 43385 - RNA, 19 nt, synthetic construct
  misc_feature 1..19: note = siRNA antisense sequence
  source 1..19: mol_type = other RNA
ttgctcttgaggtgcctat

SEQ ID NO: 43386 - RNA, 19 nt, synthetic construct
  misc_feature 1..19: note = siRNA sense sequence
  source 1..19: mol_type = other RNA
taggcacctcaagagcaaa

SEQ ID NO: 43387 - RNA, 19 nt, synthetic construct
  misc_feature 1..19: note = siRNA antisense sequence
  source 1..19: mol_type = other RNA
tttgctcttgaggtgccta

SEQ ID NO: 43388 - RNA, 19 nt, synthetic construct
  misc_feature 1..19: note = siRNA sense sequence
  source 1..19: mol_type = other RNA
aggcacctcaagagcaaag

SEQ ID NO: 43389 - RNA, 19 nt, synthetic construct
  misc_feature 1..19: note = siRNA antisense sequence
  source 1..19: mol_type = other RNA
ctttgctcttgaggtgcct

SEQ ID NO: 43390 - RNA, 19 nt, synthetic construct
  misc_feature 1..19: note = siRNA sense sequence
  source 1..19: mol_type = other RNA
ggcacctcaagagcaaagt

SEQ ID NO: 43391 - RNA, 19 nt, synthetic construct
  misc_feature 1..19: note = siRNA antisense sequence
  source 1..19: mol_type = other RNA
actttgctcttgaggtgcc

SEQ ID NO: 43392 - RNA, 19 nt, synthetic construct
  misc_feature 1..19: note = siRNA sense sequence
  source 1..19: mol_type = other RNA
acctcaagagcaaagtctg

SEQ ID NO: 43393 - RNA, 19 nt, synthetic construct
  misc_feature 1..19: note = siRNA antisense sequence
  source 1..19: mol_type = other RNA
cagactttgctcttgaggt

SEQ ID NO: 43394 - RNA, 19 nt, synthetic construct
  misc_feature 1..19: note = siRNA sense sequence
  source 1..19: mol_type = other RNA
cctcaagagcaaagtctgc

SEQ ID NO: 43395 - RNA, 19 nt, synthetic construct
  misc_feature 1..19: note = siRNA antisense sequence
  source 1..19: mol_type = other RNA
gcagactttgctcttgagg

SEQ ID NO: 43396 - RNA, 19 nt, synthetic construct
  misc_feature 1..19: note = siRNA sense sequence
  source 1..19: mol_type = other RNA
ctcaagagcaaagtctgca

SEQ ID NO: 43397 - RNA, 19 nt, synthetic construct
  misc_feature 1..19: note = siRNA antisense sequence
  source 1..19: mol_type = other RNA
tgcagactttgctcttgag

SEQ ID NO: 43398 - RNA, 19 nt, synthetic construct
  misc_feature 1..19: note = siRNA sense sequence
  source 1..19: mol_type = other RNA
aagagcaaagtctgcatca

SEQ ID NO: 43399 - RNA, 19 nt, synthetic construct
  misc_feature 1..19: note = siRNA antisense sequence
  source 1..19: mol_type = other RNA
tgatgcagactttgctctt

SEQ ID NO: 43400 - RNA, 19 nt, synthetic construct
  misc_feature 1..19: note = siRNA sense sequence
  source 1..19: mol_type = other RNA
agagcaaagtctgcatcat

SEQ ID NO: 43401 - RNA, 19 nt, synthetic construct
  misc_feature 1..19: note = siRNA antisense sequence
  source 1..19: mol_type = other RNA
atgatgcagactttgctct

SEQ ID NO: 43402 - RNA, 19 nt, synthetic construct
  misc_feature 1..19: note = siRNA sense sequence
  source 1..19: mol_type = other RNA
gagcaaagtctgcatcatc

SEQ ID NO: 43403 - RNA, 19 nt, synthetic construct
  misc_feature 1..19: note = siRNA antisense sequence
  source 1..19: mol_type = other RNA
gatgatgcagactttgctc

SEQ ID NO: 43404 - RNA, 19 nt, synthetic construct
  misc_feature 1..19: note = siRNA sense sequence
  source 1..19: mol_type = other RNA
agcaaagtctgcatcatct

SEQ ID NO: 43405 - RNA, 19 nt, synthetic construct
  misc_feature 1..19: note = siRNA antisense sequence
  source 1..19: mol_type = other RNA
agatgatgcagactttgct

SEQ ID NO: 43406 - RNA, 19 nt, synthetic construct
  misc_feature 1..19: note = siRNA sense sequence
  source 1..19: mol_type = other RNA
caaagtctgcatcatcttc

SEQ ID NO: 43407 - RNA, 19 nt, synthetic construct
  misc_feature 1..19: note = siRNA antisense sequence
  source 1..19: mol_type = other RNA
gaagatgatgcagactttg

SEQ ID NO: 43408 - RNA, 19 nt, synthetic construct
  misc_feature 1..19: note = siRNA sense sequence
  source 1..19: mol_type = other RNA
aagtctgcatcatcttctt

SEQ ID NO: 43409 - RNA, 19 nt, synthetic construct
  misc_feature 1..19: note = siRNA antisense sequence
  source 1..19: mol_type = other RNA
aagaagatgatgcagactt

SEQ ID NO: 43410 - RNA, 19 nt, synthetic construct
  misc_feature 1..19: note = siRNA sense sequence
  source 1..19: mol_type = other RNA
agtctgcatcatcttctta

SEQ ID NO: 43411 - RNA, 19 nt, synthetic construct
  misc_feature 1..19: note = siRNA antisense sequence
  source 1..19: mol_type = other RNA
taagaagatgatgcagact

SEQ ID NO: 43412 - RNA, 19 nt, synthetic construct
  misc_feature 1..19: note = siRNA sense sequence
  source 1..19: mol_type = other RNA
gtctgcatcatcttcttat

SEQ ID NO: 43413 - RNA, 19 nt, synthetic construct
  misc_feature 1..19: note = siRNA antisense sequence
  source 1..19: mol_type = other RNA
ataagaagatgatgcagac

SEQ ID NO: 43414 - RNA, 19 nt, synthetic construct
  misc_feature 1..19: note = siRNA sense sequence
  source 1..19: mol_type = other RNA
tctgcatcatcttcttatc

SEQ ID NO: 43415 - RNA, 19 nt, synthetic construct
  misc_feature 1..19: note = siRNA antisense sequence
  source 1..19: mol_type = other RNA
gataagaagatgatgcaga

SEQ ID NO: 43416 - RNA, 19 nt, synthetic construct
  misc_feature 1..19: note = siRNA sense sequence
  source 1..19: mol_type = other RNA
ctgcatcatcttcttatct

SEQ ID NO: 43417 - RNA, 19 nt, synthetic construct
  misc_feature 1..19: note = siRNA antisense sequence
  source 1..19: mol_type = other RNA
agataagaagatgatgcag

SEQ ID NO: 43418 - RNA, 19 nt, synthetic construct
  misc_feature 1..19: note = siRNA sense sequence
  source 1..19: mol_type = other RNA
tgcatcatcttcttatctt

SEQ ID NO: 43419 - RNA, 19 nt, synthetic construct
  misc_feature 1..19: note = siRNA antisense sequence
  source 1..19: mol_type = other RNA
aagataagaagatgatgca

SEQ ID NO: 43420 - RNA, 19 nt, synthetic construct
  misc_feature 1..19: note = siRNA sense sequence
  source 1..19: mol_type = other RNA
gcatcatcttcttatcttc

SEQ ID NO: 43421 - RNA, 19 nt, synthetic construct
  misc_feature 1..19: note = siRNA antisense sequence
  source 1..19: mol_type = other RNA
gaagataagaagatgatgc

SEQ ID NO: 43422 - RNA, 19 nt, synthetic construct
  misc_feature 1..19: note = siRNA sense sequence
  source 1..19: mol_type = other RNA
catcatcttcttatcttcg

SEQ ID NO: 43423 - RNA, 19 nt, synthetic construct
  misc_feature 1..19: note = siRNA antisense sequence
  source 1..19: mol_type = other RNA
cgaagataagaagatgatg

SEQ ID NO: 43424 - RNA, 19 nt, synthetic construct
  misc_feature 1..19: note = siRNA sense sequence
  source 1..19: mol_type = other RNA
atcatcttcttatcttcgt

SEQ ID NO: 43425 - RNA, 19 nt, synthetic construct
  misc_feature 1..19: note = siRNA antisense sequence
  source 1..19: mol_type = other RNA
acgaagataagaagatgat

SEQ ID NO: 43426 - RNA, 19 nt, synthetic construct
  misc_feature 1..19: note = siRNA sense sequence
  source 1..19: mol_type = other RNA
tcatcttcttatcttcgtc

SEQ ID NO: 43427 - RNA, 19 nt, synthetic construct
  misc_feature 1..19: note = siRNA antisense sequence
  source 1..19: mol_type = other RNA
gacgaagataagaagatga

SEQ ID NO: 43428 - RNA, 19 nt, synthetic construct
  misc_feature 1..19: note = siRNA sense sequence
  source 1..19: mol_type = other RNA
catcttcttatcttcgtca

SEQ ID NO: 43429 - RNA, 19 nt, synthetic construct
  misc_feature 1..19: note = siRNA antisense sequence
  source 1..19: mol_type = other RNA
tgacgaagataagaagatg

SEQ ID NO: 43430 - RNA, 19 nt, synthetic construct
  misc_feature 1..19: note = siRNA sense sequence
  source 1..19: mol_type = other RNA
atcttcttatcttcgtcag

SEQ ID NO: 43431 - RNA, 19 nt, synthetic construct
  misc_feature 1..19: note = siRNA antisense sequence
  source 1..19: mol_type = other RNA
ctgacgaagataagaagat

SEQ ID NO: 43432 - RNA, 19 nt, synthetic construct
  misc_feature 1..19: note = siRNA sense sequence
  source 1..19: mol_type = other RNA
tcttcttatcttcgtcagt

SEQ ID NO: 43433 - RNA, 19 nt, synthetic construct
  misc_feature 1..19: note = siRNA antisense sequence
  source 1..19: mol_type = other RNA
actgacgaagataagaaga

SEQ ID NO: 43434 - RNA, 19 nt, synthetic construct
  misc_feature 1..19: note = siRNA sense sequence
  source 1..19: mol_type = other RNA
cttcttatcttcgtcagtg

SEQ ID NO: 43435 - RNA, 19 nt, synthetic construct
  misc_feature 1..19: note = siRNA antisense sequence
  source 1..19: mol_type = other RNA
cactgacgaagataagaag

SEQ ID NO: 43436 - RNA, 19 nt, synthetic construct
  misc_feature 1..19: note = siRNA sense sequence
  source 1..19: mol_type = other RNA
ttcttatcttcgtcagtgg

SEQ ID NO: 43437 - RNA, 19 nt, synthetic construct
  misc_feature 1..19: note = siRNA antisense sequence
  source 1..19: mol_type = other RNA
ccactgacgaagataagaa

SEQ ID NO: 43438 - RNA, 19 nt, synthetic construct
  misc_feature 1..19: note = siRNA sense sequence
  source 1..19: mol_type = other RNA
tatcttcgtcagtggccag

SEQ ID NO: 43439 - RNA, 19 nt, synthetic construct
  misc_feature 1..19: note = siRNA antisense sequence
  source 1..19: mol_type = other RNA
ctggccactgacgaagata

SEQ ID NO: 43440 - RNA, 19 nt, synthetic construct
  misc_feature 1..19: note = siRNA sense sequence
  source 1..19: mol_type = other RNA
atcttcgtcagtggccagc

SEQ ID NO: 43441 - RNA, 19 nt, synthetic construct
  misc_feature 1..19: note = siRNA antisense sequence
  source 1..19: mol_type = other RNA
gctggccactgacgaagat

SEQ ID NO: 43442 - RNA, 19 nt, synthetic construct
  misc_feature 1..19: note = siRNA sense sequence
  source 1..19: mol_type = other RNA
agtggccagcccagtggtt

SEQ ID NO: 43443 - RNA, 19 nt, synthetic construct
  misc_feature 1..19: note = siRNA antisense sequence
  source 1..19: mol_type = other RNA
aaccactgggctggccact

SEQ ID NO: 43444 - RNA, 19 nt, synthetic construct
  misc_feature 1..19: note = siRNA sense sequence
  source 1..19: mol_type = other RNA
gtggccagcccagtggttt

SEQ ID NO: 43445 - RNA, 19 nt, synthetic construct
  misc_feature 1..19: note = siRNA antisense sequence
  source 1..19: mol_type = other RNA
aaaccactgggctggccac

SEQ ID NO: 43446 - RNA, 19 nt, synthetic construct
  misc_feature 1..19: note = siRNA sense sequence
  source 1..19: mol_type = other RNA
tggccagcccagtggttta

SEQ ID NO: 43447 - RNA, 19 nt, synthetic construct
  misc_feature 1..19: note = siRNA antisense sequence
  source 1..19: mol_type = other RNA
taaaccactgggctggcca

SEQ ID NO: 43448 - RNA, 19 nt, synthetic construct
  misc_feature 1..19: note = siRNA sense sequence
  source 1..19: mol_type = other RNA
agtggtttactgtggcaca

SEQ ID NO: 43449 - RNA, 19 nt, synthetic construct
  misc_feature 1..19: note = siRNA antisense sequence
  source 1..19: mol_type = other RNA
tgtgccacagtaaaccact

SEQ ID NO: 43450 - RNA, 19 nt, synthetic construct
  misc_feature 1..19: note = siRNA sense sequence
  source 1..19: mol_type = other RNA
tgtggcacagtaagtcctc

SEQ ID NO: 43451 - RNA, 19 nt, synthetic construct
  misc_feature 1..19: note = siRNA antisense sequence
  source 1..19: mol_type = other RNA
gaggacttactgtgccaca

SEQ ID NO: 43452 - RNA, 19 nt, synthetic construct
  misc_feature 1..19: note = siRNA sense sequence
  source 1..19: mol_type = other RNA
gcacagtaagtcctcaatg

SEQ ID NO: 43453 - RNA, 19 nt, synthetic construct
  misc_feature 1..19: note = siRNA antisense sequence
  source 1..19: mol_type = other RNA
cattgaggacttactgtgc

SEQ ID NO: 43454 - RNA, 19 nt, synthetic construct
  misc_feature 1..19: note = siRNA sense sequence
  source 1..19: mol_type = other RNA
acagtaagtcctcaatgag

SEQ ID NO: 43455 - RNA, 19 nt, synthetic construct
  misc_feature 1..19: note = siRNA antisense sequence
  source 1..19: mol_type = other RNA
ctcattgaggacttactgt

SEQ ID NO: 43456 - RNA, 19 nt, synthetic construct
  misc_feature 1..19: note = siRNA sense sequence
  source 1..19: mol_type = other RNA
tcctcaatgagcacttgtt

SEQ ID NO: 43457 - RNA, 19 nt, synthetic construct
  misc_feature 1..19: note = siRNA antisense sequence
  source 1..19: mol_type = other RNA
aacaagtgctcattgagga

SEQ ID NO: 43458 - RNA, 19 nt, synthetic construct
  misc_feature 1..19: note = siRNA sense sequence
  source 1..19: mol_type = other RNA
aatgagcacttgttgagta

SEQ ID NO: 43459 - RNA, 19 nt, synthetic construct
  misc_feature 1..19: note = siRNA antisense sequence
  source 1..19: mol_type = other RNA
tactcaacaagtgctcatt

SEQ ID NO: 43460 - RNA, 19 nt, synthetic construct
  misc_feature 1..19: note = siRNA sense sequence
  source 1..19: mol_type = other RNA
atgagcacttgttgagtaa

SEQ ID NO: 43461 - RNA, 19 nt, synthetic construct
  misc_feature 1..19: note = siRNA antisense sequence
  source 1..19: mol_type = other RNA
ttactcaacaagtgctcat

SEQ ID NO: 43462 - RNA, 19 nt, synthetic construct
  misc_feature 1..19: note = siRNA sense sequence
  source 1..19: mol_type = other RNA
tgagcacttgttgagtaaa

SEQ ID NO: 43463 - RNA, 19 nt, synthetic construct
  misc_feature 1..19: note = siRNA antisense sequence
  source 1..19: mol_type = other RNA
tttactcaacaagtgctca

SEQ ID NO: 43464 - RNA, 19 nt, synthetic construct
  misc_feature 1..19: note = siRNA sense sequence
  source 1..19: mol_type = other RNA
gagcacttgttgagtaaat

SEQ ID NO: 43465 - RNA, 19 nt, synthetic construct
  misc_feature 1..19: note = siRNA antisense sequence
  source 1..19: mol_type = other RNA
atttactcaacaagtgctc

SEQ ID NO: 43466 - RNA, 19 nt, synthetic construct
  misc_feature 1..19: note = siRNA sense sequence
  source 1..19: mol_type = other RNA
agcacttgttgagtaaatg

SEQ ID NO: 43467 - RNA, 19 nt, synthetic construct
  misc_feature 1..19: note = siRNA antisense sequence
  source 1..19: mol_type = other RNA
catttactcaacaagtgct

SEQ ID NO: 43468 - RNA, 19 nt, synthetic construct
  misc_feature 1..19: note = siRNA sense sequence
  source 1..19: mol_type = other RNA
gtttgtatcatattgagtc

SEQ ID NO: 43469 - RNA, 19 nt, synthetic construct
  misc_feature 1..19: note = siRNA antisense sequence
  source 1..19: mol_type = other RNA
gactcaatatgatacaaac

SEQ ID NO: 43470 - RNA, 19 nt, synthetic construct
  misc_feature 1..19: note = siRNA sense sequence
  source 1..19: mol_type = other RNA
tttgtatcatattgagtcc

SEQ ID NO: 43471 - RNA, 19 nt, synthetic construct
  misc_feature 1..19: note = siRNA antisense sequence
  source 1..19: mol_type = other RNA
ggactcaatatgatacaaa

SEQ ID NO: 43472 - RNA, 19 nt, synthetic construct
  misc_feature 1..19: note = siRNA sense sequence
  source 1..19: mol_type = other RNA
ttgtatcatattgagtcca

SEQ ID NO: 43473 - RNA, 19 nt, synthetic construct
  misc_feature 1..19: note = siRNA antisense sequence
  source 1..19: mol_type = other RNA
tggactcaatatgatacaa

SEQ ID NO: 43474 - RNA, 19 nt, synthetic construct
  misc_feature 1..19: note = siRNA sense sequence
  source 1..19: mol_type = other RNA
atcatattgagtccagttt

SEQ ID NO: 43475 - RNA, 19 nt, synthetic construct
  misc_feature 1..19: note = siRNA antisense sequence
  source 1..19: mol_type = other RNA
aaactggactcaatatgat

SEQ ID NO: 43476 - RNA, 19 nt, synthetic construct
  misc_feature 1..19: note = siRNA sense sequence
  source 1..19: mol_type = other RNA
tcatattgagtccagtttt

SEQ ID NO: 43477 - RNA, 19 nt, synthetic construct
  misc_feature 1..19: note = siRNA antisense sequence
  source 1..19: mol_type = other RNA
aaaactggactcaatatga

SEQ ID NO: 43478 - RNA, 19 nt, synthetic construct
  misc_feature 1..19: note = siRNA sense sequence
  source 1..19: mol_type = other RNA
catattgagtccagttttg

SEQ ID NO: 43479 - RNA, 19 nt, synthetic construct
  misc_feature 1..19: note = siRNA antisense sequence
  source 1..19: mol_type = other RNA
caaaactggactcaatatg

SEQ ID NO: 43480 - RNA, 19 nt, synthetic construct
  misc_feature 1..19: note = siRNA sense sequence
  source 1..19: mol_type = other RNA
atattgagtccagttttgt

SEQ ID NO: 43481 - RNA, 19 nt, synthetic construct
  misc_feature 1..19: note = siRNA antisense sequence
  source 1..19: mol_type = other RNA
acaaaactggactcaatat

SEQ ID NO: 43482 - RNA, 19 nt, synthetic construct
  misc_feature 1..19: note = siRNA sense sequence
  source 1..19: mol_type = other RNA
tattgagtccagttttgta

SEQ ID NO: 43483 - RNA, 19 nt, synthetic construct
  misc_feature 1..19: note = siRNA antisense sequence
  source 1..19: mol_type = other RNA
tacaaaactggactcaata

SEQ ID NO: 43484 - RNA, 19 nt, synthetic construct
  misc_feature 1..19: note = siRNA sense sequence
  source 1..19: mol_type = other RNA
tttctctgattattggaca

SEQ ID NO: 43485 - RNA, 19 nt, synthetic construct
  misc_feature 1..19: note = siRNA antisense sequence
  source 1..19: mol_type = other RNA
tgtccaataatcagagaaa

SEQ ID NO: 43486 - RNA, 19 nt, synthetic construct
  misc_feature 1..19: note = siRNA sense sequence
  source 1..19: mol_type = other RNA
ttctctgattattggacat

SEQ ID NO: 43487 - RNA, 19 nt, synthetic construct
  misc_feature 1..19: note = siRNA antisense sequence
  source 1..19: mol_type = other RNA
atgtccaataatcagagaa

SEQ ID NO: 43488 - RNA, 19 nt, synthetic construct
  misc_feature 1..19: note = siRNA sense sequence
  source 1..19: mol_type = other RNA
ctctgattattggacattt

SEQ ID NO: 43489 - RNA, 19 nt, synthetic construct
  misc_feature 1..19: note = siRNA antisense sequence
  source 1..19: mol_type = other RNA
aaatgtccaataatcagag

SEQ ID NO: 43490 - RNA, 19 nt, synthetic construct
  misc_feature 1..19: note = siRNA sense sequence
  source 1..19: mol_type = other RNA
attggacatttaatgagtc

SEQ ID NO: 43491 - RNA, 19 nt, synthetic construct
  misc_feature 1..19: note = siRNA antisense sequence
  source 1..19: mol_type = other RNA
gactcattaaatgtccaat

SEQ ID NO: 43492 - RNA, 19 nt, synthetic construct
  misc_feature 1..19: note = siRNA sense sequence
  source 1..19: mol_type = other RNA
ttggacatttaatgagtct

SEQ ID NO: 43493 - RNA, 19 nt, synthetic construct
  misc_feature 1..19: note = siRNA antisense sequence
  source 1..19: mol_type = other RNA
agactcattaaatgtccaa

SEQ ID NO: 43494 - RNA, 19 nt, synthetic construct
  misc_feature 1..19: note = siRNA sense sequence
  source 1..19: mol_type = other RNA
tggacatttaatgagtctt

SEQ ID NO: 43495 - RNA, 19 nt, synthetic construct
  misc_feature 1..19: note = siRNA antisense sequence
  source 1..19: mol_type = other RNA
aagactcattaaatgtcca

SEQ ID NO: 43496 - RNA, 19 nt, synthetic construct
  misc_feature 1..19: note = siRNA sense sequence
  source 1..19: mol_type = other RNA
tattctctagtattcagtc

SEQ ID NO: 43497 - RNA, 19 nt, synthetic construct
  misc_feature 1..19: note = siRNA antisense sequence
  source 1..19: mol_type = other RNA
gactgaatactagagaata

SEQ ID NO: 43498 - RNA, 19 nt, synthetic construct
  misc_feature 1..19: note = siRNA sense sequence
  source 1..19: mol_type = other RNA
ctagtattcagtcttttct

SEQ ID NO: 43499 - RNA, 19 nt, synthetic construct
  misc_feature 1..19: note = siRNA antisense sequence
  source 1..19: mol_type = other RNA
agaaaagactgaatactag

SEQ ID NO: 43500 - RNA, 19 nt, synthetic construct
  misc_feature 1..19: note = siRNA sense sequence
  source 1..19: mol_type = other RNA
tggcttatgttttatcagt

SEQ ID NO: 43501 - RNA, 19 nt, synthetic construct
  misc_feature 1..19: note = siRNA antisense sequence
  source 1..19: mol_type = other RNA
actgataaaacataagcca

SEQ ID NO: 43502 - RNA, 19 nt, synthetic construct
  misc_feature 1..19: note = siRNA sense sequence
  source 1..19: mol_type = other RNA
ggcttatgttttatcagtg

SEQ ID NO: 43503 - RNA, 19 nt, synthetic construct
  misc_feature 1..19: note = siRNA antisense sequence
  source 1..19: mol_type = other RNA
cactgataaaacataagcc

SEQ ID NO: 43504 - RNA, 19 nt, synthetic construct
  misc_feature 1..19: note = siRNA sense sequence
  source 1..19: mol_type = other RNA
aaaggacatatttaccaag

SEQ ID NO: 43505 - RNA, 19 nt, synthetic construct
  misc_feature 1..19: note = siRNA antisense sequence
  source 1..19: mol_type = other RNA
cttggtaaatatgtccttt

SEQ ID NO: 43506 - RNA, 19 nt, synthetic construct
  misc_feature 1..19: note = siRNA sense sequence
  source 1..19: mol_type = other RNA
aaggacatatttaccaagc

SEQ ID NO: 43507 - RNA, 19 nt, synthetic construct
  misc_feature 1..19: note = siRNA antisense sequence
  source 1..19: mol_type = other RNA
gcttggtaaatatgtcctt

SEQ ID NO: 43508 - RNA, 19 nt, synthetic construct
  misc_feature 1..19: note = siRNA sense sequence
  source 1..19: mol_type = other RNA
aggacatatttaccaagcc

SEQ ID NO: 43509 - RNA, 19 nt, synthetic construct
  misc_feature 1..19: note = siRNA antisense sequence
  source 1..19: mol_type = other RNA
ggcttggtaaatatgtcct

SEQ ID NO: 43510 - RNA, 19 nt, synthetic construct
  misc_feature 1..19: note = siRNA sense sequence
  source 1..19: mol_type = other RNA
ggacatatttaccaagcca

SEQ ID NO: 43511 - RNA, 19 nt, synthetic construct
  misc_feature 1..19: note = siRNA antisense sequence
  source 1..19: mol_type = other RNA
tggcttggtaaatatgtcc

SEQ ID NO: 43512 - RNA, 19 nt, synthetic construct
  misc_feature 1..19: note = siRNA sense sequence
  source 1..19: mol_type = other RNA
atatttaccaagccattgc

SEQ ID NO: 43513 - RNA, 19 nt, synthetic construct
  misc_feature 1..19: note = siRNA antisense sequence
  source 1..19: mol_type = other RNA
gcaatggcttggtaaatat

SEQ ID NO: 43514 - RNA, 19 nt, synthetic construct
  misc_feature 1..19: note = siRNA sense sequence
  source 1..19: mol_type = other RNA
tatttaccaagccattgct

SEQ ID NO: 43515 - RNA, 19 nt, synthetic construct
  misc_feature 1..19: note = siRNA antisense sequence
  source 1..19: mol_type = other RNA
agcaatggcttggtaaata

SEQ ID NO: 43516 - RNA, 19 nt, synthetic construct
  misc_feature 1..19: note = siRNA sense sequence
  source 1..19: mol_type = other RNA
agccattgcttttgctaaa

SEQ ID NO: 43517 - RNA, 19 nt, synthetic construct
  misc_feature 1..19: note = siRNA antisense sequence
  source 1..19: mol_type = other RNA
tttagcaaaagcaatggct

SEQ ID NO: 43518 - RNA, 19 nt, synthetic construct
  misc_feature 1..19: note = siRNA sense sequence
  source 1..19: mol_type = other RNA
gccattgcttttgctaaat

SEQ ID NO: 43519 - RNA, 19 nt, synthetic construct
  misc_feature 1..19: note = siRNA antisense sequence
  source 1..19: mol_type = other RNA
atttagcaaaagcaatggc

SEQ ID NO: 43520 - RNA, 19 nt, synthetic construct
  misc_feature 1..19: note = siRNA sense sequence
  source 1..19: mol_type = other RNA
ccattgcttttgctaaata

SEQ ID NO: 43521 - RNA, 19 nt, synthetic construct
  misc_feature 1..19: note = siRNA antisense sequence
  source 1..19: mol_type = other RNA
tatttagcaaaagcaatgg

SEQ ID NO: 43522 - RNA, 19 nt, synthetic construct
  misc_feature 1..19: note = siRNA sense sequence
  source 1..19: mol_type = other RNA
gtttgatcatctttcagtg

SEQ ID NO: 43523 - RNA, 19 nt, synthetic construct
  misc_feature 1..19: note = siRNA antisense sequence
  source 1..19: mol_type = other RNA
cactgaaagatgatcaaac

SEQ ID NO: 43524 - RNA, 19 nt, synthetic construct
  misc_feature 1..19: note = siRNA sense sequence
  source 1..19: mol_type = other RNA
tttgatcatctttcagtgg

SEQ ID NO: 43525 - RNA, 19 nt, synthetic construct
  misc_feature 1..19: note = siRNA antisense sequence
  source 1..19: mol_type = other RNA
ccactgaaagatgatcaaa

SEQ ID NO: 43526 - RNA, 19 nt, synthetic construct
  misc_feature 1..19: note = siRNA sense sequence
  source 1..19: mol_type = other RNA
ttgatcatctttcagtgga

SEQ ID NO: 43527 - RNA, 19 nt, synthetic construct
  misc_feature 1..19: note = siRNA antisense sequence
  source 1..19: mol_type = other RNA
tccactgaaagatgatcaa

SEQ ID NO: 43528 - RNA, 19 nt, synthetic construct
  misc_feature 1..19: note = siRNA sense sequence
  source 1..19: mol_type = other RNA
tgatcatctttcagtggat

SEQ ID NO: 43529 - RNA, 19 nt, synthetic construct
  misc_feature 1..19: note = siRNA antisense sequence
  source 1..19: mol_type = other RNA
atccactgaaagatgatca

SEQ ID NO: 43530 - RNA, 19 nt, synthetic construct
  misc_feature 1..19: note = siRNA sense sequence
  source 1..19: mol_type = other RNA
gatcatctttcagtggatt

SEQ ID NO: 43531 - RNA, 19 nt, synthetic construct
  misc_feature 1..19: note = siRNA antisense sequence
  source 1..19: mol_type = other RNA
aatccactgaaagatgatc

SEQ ID NO: 43532 - RNA, 19 nt, synthetic construct
  misc_feature 1..19: note = siRNA sense sequence
  source 1..19: mol_type = other RNA
atcatctttcagtggattc

SEQ ID NO: 43533 - RNA, 19 nt, synthetic construct
  misc_feature 1..19: note = siRNA antisense sequence
  source 1..19: mol_type = other RNA
gaatccactgaaagatgat

SEQ ID NO: 43534 - RNA, 19 nt, synthetic construct
  misc_feature 1..19: note = siRNA sense sequence
  source 1..19: mol_type = other RNA
tcatctttcagtggattca

SEQ ID NO: 43535 - RNA, 19 nt, synthetic construct
  misc_feature 1..19: note = siRNA antisense sequence
  source 1..19: mol_type = other RNA
tgaatccactgaaagatga

SEQ ID NO: 43536 - RNA, 19 nt, synthetic construct
  misc_feature 1..19: note = siRNA sense sequence
  source 1..19: mol_type = other RNA
catctttcagtggattcag

SEQ ID NO: 43537 - RNA, 19 nt, synthetic construct
  misc_feature 1..19: note = siRNA antisense sequence
  source 1..19: mol_type = other RNA
ctgaatccactgaaagatg

SEQ ID NO: 43538 - RNA, 19 nt, synthetic construct
  misc_feature 1..19: note = siRNA sense sequence
  source 1..19: mol_type = other RNA
tctttcagtggattcagaa

SEQ ID NO: 43539 - RNA, 19 nt, synthetic construct
  misc_feature 1..19: note = siRNA antisense sequence
  source 1..19: mol_type = other RNA
ttctgaatccactgaaaga

SEQ ID NO: 43540 - RNA, 19 nt, synthetic construct
  misc_feature 1..19: note = siRNA sense sequence
  source 1..19: mol_type = other RNA
atgcttatctttcatgtag

SEQ ID NO: 43541 - RNA, 19 nt, synthetic construct
  misc_feature 1..19: note = siRNA antisense sequence
  source 1..19: mol_type = other RNA
ctacatgaaagataagcat

SEQ ID NO: 43542 - RNA, 19 nt, synthetic construct
  misc_feature 1..19: note = siRNA sense sequence
  source 1..19: mol_type = other RNA
tgcttatctttcatgtagt

SEQ ID NO: 43543 - RNA, 19 nt, synthetic construct
  misc_feature 1..19: note = siRNA antisense sequence
  source 1..19: mol_type = other RNA
actacatgaaagataagca

SEQ ID NO: 43544 - RNA, 19 nt, synthetic construct
  misc_feature 1..19: note = siRNA sense sequence
  source 1..19: mol_type = other RNA
gcttatctttcatgtagtc

SEQ ID NO: 43545 - RNA, 19 nt, synthetic construct
  misc_feature 1..19: note = siRNA antisense sequence
  source 1..19: mol_type = other RNA
gactacatgaaagataagc

SEQ ID NO: 43546 - RNA, 19 nt, synthetic construct
  misc_feature 1..19: note = siRNA sense sequence
  source 1..19: mol_type = other RNA
cttatctttcatgtagtct

SEQ ID NO: 43547 - RNA, 19 nt, synthetic construct
  misc_feature 1..19: note = siRNA antisense sequence
  source 1..19: mol_type = other RNA
agactacatgaaagataag

SEQ ID NO: 43548 - RNA, 19 nt, synthetic construct
  misc_feature 1..19: note = siRNA sense sequence
  source 1..19: mol_type = other RNA
gtagtcttacagtaattct

SEQ ID NO: 43549 - RNA, 19 nt, synthetic construct
  misc_feature 1..19: note = siRNA antisense sequence
  source 1..19: mol_type = other RNA
agaattactgtaagactac

SEQ ID NO: 43550 - RNA, 19 nt, synthetic construct
  misc_feature 1..19: note = siRNA sense sequence
  source 1..19: mol_type = other RNA
cttacagtaattctttcca

SEQ ID NO: 43551 - RNA, 19 nt, synthetic construct
  misc_feature 1..19: note = siRNA antisense sequence
  source 1..19: mol_type = other RNA
tggaaagaattactgtaag

SEQ ID NO: 43552 - RNA, 19 nt, synthetic construct
  misc_feature 1..19: note = siRNA sense sequence
  source 1..19: mol_type = other RNA
ttttcttgattggttgcta

SEQ ID NO: 43553 - RNA, 19 nt, synthetic construct
  misc_feature 1..19: note = siRNA antisense sequence
  source 1..19: mol_type = other RNA
tagcaaccaatcaagaaaa

SEQ ID NO: 43554 - RNA, 19 nt, synthetic construct
  misc_feature 1..19: note = siRNA sense sequence
  source 1..19: mol_type = other RNA
tttcttgattggttgctaa

SEQ ID NO: 43555 - RNA, 19 nt, synthetic construct
  misc_feature 1..19: note = siRNA antisense sequence
  source 1..19: mol_type = other RNA
ttagcaaccaatcaagaaa

SEQ ID NO: 43556 - RNA, 19 nt, synthetic construct
  misc_feature 1..19: note = siRNA sense sequence
  source 1..19: mol_type = other RNA
ttcttgattggttgctaat

SEQ ID NO: 43557 - RNA, 19 nt, synthetic construct
  misc_feature 1..19: note = siRNA antisense sequence
  source 1..19: mol_type = other RNA
attagcaaccaatcaagaa

SEQ ID NO: 43558 - RNA, 19 nt, synthetic construct
  misc_feature 1..19: note = siRNA sense sequence
  source 1..19: mol_type = other RNA
tcttgattggttgctaatg

SEQ ID NO: 43559 - RNA, 19 nt, synthetic construct
  misc_feature 1..19: note = siRNA antisense sequence
  source 1..19: mol_type = other RNA
cattagcaaccaatcaaga

SEQ ID NO: 43560 - RNA, 19 nt, synthetic construct
  misc_feature 1..19: note = siRNA sense sequence
  source 1..19: mol_type = other RNA
gattggttgctaatgtaat

SEQ ID NO: 43561 - RNA, 19 nt, synthetic construct
  misc_feature 1..19: note = siRNA antisense sequence
  source 1..19: mol_type = other RNA
attacattagcaaccaatc

SEQ ID NO: 43562 - RNA, 19 nt, synthetic construct
  misc_feature 1..19: note = siRNA sense sequence
  source 1..19: mol_type = other RNA
gcattcaattccaccctat

SEQ ID NO: 43563 - RNA, 19 nt, synthetic construct
  misc_feature 1..19: note = siRNA antisense sequence
  source 1..19: mol_type = other RNA
atagggtggaattgaatgc

SEQ ID NO: 43564 - RNA, 19 nt, synthetic construct
  misc_feature 1..19: note = siRNA sense sequence
  source 1..19: mol_type = other RNA
cattcaattccaccctatg

SEQ ID NO: 43565 - RNA, 19 nt, synthetic construct
  misc_feature 1..19: note = siRNA antisense sequence
  source 1..19: mol_type = other RNA
catagggtggaattgaatg

SEQ ID NO: 43566 - RNA, 19 nt, synthetic construct
  misc_feature 1..19: note = siRNA sense sequence
  source 1..19: mol_type = other RNA
aattccaccctatgattgg

SEQ ID NO: 43567 - RNA, 19 nt, synthetic construct
  misc_feature 1..19: note = siRNA antisense sequence
  source 1..19: mol_type = other RNA
ccaatcatagggtggaatt

SEQ ID NO: 43568 - RNA, 19 nt, synthetic construct
  misc_feature 1..19: note = siRNA sense sequence
  source 1..19: mol_type = other RNA
attccaccctatgattggc

SEQ ID NO: 43569 - RNA, 19 nt, synthetic construct
  misc_feature 1..19: note = siRNA antisense sequence
  source 1..19: mol_type = other RNA
gccaatcatagggtggaat

SEQ ID NO: 43570 - RNA, 19 nt, synthetic construct
  misc_feature 1..19: note = siRNA sense sequence
  source 1..19: mol_type = other RNA
ttccaccctatgattggca

SEQ ID NO: 43571 - RNA, 19 nt, synthetic construct
  misc_feature 1..19: note = siRNA antisense sequence
  source 1..19: mol_type = other RNA
tgccaatcatagggtggaa

SEQ ID NO: 43572 - RNA, 19 nt, synthetic construct
  misc_feature 1..19: note = siRNA sense sequence
  source 1..19: mol_type = other RNA
tccaccctatgattggcag

SEQ ID NO: 43573 - RNA, 19 nt, synthetic construct
  misc_feature 1..19: note = siRNA antisense sequence
  source 1..19: mol_type = other RNA
ctgccaatcatagggtgga

SEQ ID NO: 43574 - RNA, 19 nt, synthetic construct
  misc_feature 1..19: note = siRNA sense sequence
  source 1..19: mol_type = other RNA
cctatgattggcagaatta

SEQ ID NO: 43575 - RNA, 19 nt, synthetic construct
  misc_feature 1..19: note = siRNA antisense sequence
  source 1..19: mol_type = other RNA
taattctgccaatcatagg

SEQ ID NO: 43576 - RNA, 19 nt, synthetic construct
  misc_feature 1..19: note = siRNA sense sequence
  source 1..19: mol_type = other RNA
ttctggaatttattctccc

SEQ ID NO: 43577 - RNA, 19 nt, synthetic construct
  misc_feature 1..19: note = siRNA antisense sequence
  source 1..19: mol_type = other RNA
gggagaataaattccagaa

SEQ ID NO: 43578 - RNA, 19 nt, synthetic construct
  misc_feature 1..19: note = siRNA sense sequence
  source 1..19: mol_type = other RNA
ccctttatgtattctatct

SEQ ID NO: 43579 - RNA, 19 nt, synthetic construct
  misc_feature 1..19: note = siRNA antisense sequence
  source 1..19: mol_type = other RNA
agatagaatacataaaggg

SEQ ID NO: 43580 - RNA, 19 nt, synthetic construct
  misc_feature 1..19: note = siRNA sense sequence
  source 1..19: mol_type = other RNA
cctttatgtattctatctc

SEQ ID NO: 43581 - RNA, 19 nt, synthetic construct
  misc_feature 1..19: note = siRNA antisense sequence
  source 1..19: mol_type = other RNA
gagatagaatacataaagg

SEQ ID NO: 43582 - RNA, 19 nt, synthetic construct
  misc_feature 1..19: note = siRNA sense sequence
  source 1..19: mol_type = other RNA
attctatctctgtttctga

SEQ ID NO: 43583 - RNA, 19 nt, synthetic construct
  misc_feature 1..19: note = siRNA antisense sequence
  source 1..19: mol_type = other RNA
tcagaaacagagatagaat

SEQ ID NO: 43584 - RNA, 19 nt, synthetic construct
  misc_feature 1..19: note = siRNA sense sequence
  source 1..19: mol_type = other RNA
ttctatctctgtttctgaa

SEQ ID NO: 43585 - RNA, 19 nt, synthetic construct
  misc_feature 1..19: note = siRNA antisense sequence
  source 1..19: mol_type = other RNA
ttcagaaacagagatagaa

SEQ ID NO: 43586 - RNA, 19 nt, synthetic construct
  misc_feature 1..19: note = siRNA sense sequence
  source 1..19: mol_type = other RNA
aaagattacccagaggagg

SEQ ID NO: 43587 - RNA, 19 nt, synthetic construct
  misc_feature 1..19: note = siRNA antisense sequence
  source 1..19: mol_type = other RNA
cctcctctgggtaatcttt

SEQ ID NO: 43588 - RNA, 19 nt, synthetic construct
  misc_feature 1..19: note = siRNA sense sequence
  source 1..19: mol_type = other RNA
aagattacccagaggaggg

SEQ ID NO: 43589 - RNA, 19 nt, synthetic construct
  misc_feature 1..19: note = siRNA antisense sequence
  source 1..19: mol_type = other RNA
ccctcctctgggtaatctt

SEQ ID NO: 43590 - RNA, 19 nt, synthetic construct
  misc_feature 1..19: note = siRNA sense sequence
  source 1..19: mol_type = other RNA
cccagaggagggtgcaaaa

SEQ ID NO: 43591 - RNA, 19 nt, synthetic construct
  misc_feature 1..19: note = siRNA antisense sequence
  source 1..19: mol_type = other RNA
ttttgcaccctcctctggg

SEQ ID NO: 43592 - RNA, 19 nt, synthetic construct
  misc_feature 1..19: note = siRNA sense sequence
  source 1..19: mol_type = other RNA
ccagaggagggtgcaaaag

SEQ ID NO: 43593 - RNA, 19 nt, synthetic construct
  misc_feature 1..19: note = siRNA antisense sequence
  source 1..19: mol_type = other RNA
cttttgcaccctcctctgg

SEQ ID NO: 43594 - RNA, 19 nt, synthetic construct
  misc_feature 1..19: note = siRNA sense sequence
  source 1..19: mol_type = other RNA
cagaggagggtgcaaaaga

SEQ ID NO: 43595 - RNA, 19 nt, synthetic construct
  misc_feature 1..19: note = siRNA antisense sequence
  source 1..19: mol_type = other RNA
tcttttgcaccctcctctg

SEQ ID NO: 43596 - RNA, 19 nt, synthetic construct
  misc_feature 1..19: note = siRNA sense sequence
  source 1..19: mol_type = other RNA
agaggagggtgcaaaagat

SEQ ID NO: 43597 - RNA, 19 nt, synthetic construct
  misc_feature 1..19: note = siRNA antisense sequence
  source 1..19: mol_type = other RNA
atcttttgcaccctcctct

SEQ ID NO: 43598 - RNA, 19 nt, synthetic construct
  misc_feature 1..19: note = siRNA sense sequence
  source 1..19: mol_type = other RNA
gaggagggtgcaaaagata

SEQ ID NO: 43599 - RNA, 19 nt, synthetic construct
  misc_feature 1..19: note = siRNA antisense sequence
  source 1..19: mol_type = other RNA
tatcttttgcaccctcctc

SEQ ID NO: 43600 - RNA, 19 nt, synthetic construct
  misc_feature 1..19: note = siRNA sense sequence
  source 1..19: mol_type = other RNA
aggagggtgcaaaagatag

SEQ ID NO: 43601 - RNA, 19 nt, synthetic construct
  misc_feature 1..19: note = siRNA antisense sequence
  source 1..19: mol_type = other RNA
ctatcttttgcaccctcct

SEQ ID NO: 43602 - RNA, 19 nt, synthetic construct
  misc_feature 1..19: note = siRNA sense sequence
  source 1..19: mol_type = other RNA
acttttagactcctcatcc

SEQ ID NO: 43603 - RNA, 19 nt, synthetic construct
  misc_feature 1..19: note = siRNA antisense sequence
  source 1..19: mol_type = other RNA
ggatgaggagtctaaaagt

SEQ ID NO: 43604 - RNA, 19 nt, synthetic construct
  misc_feature 1..19: note = siRNA sense sequence
  source 1..19: mol_type = other RNA
cttttagactcctcatcca

SEQ ID NO: 43605 - RNA, 19 nt, synthetic construct
  misc_feature 1..19: note = siRNA antisense sequence
  source 1..19: mol_type = other RNA
tggatgaggagtctaaaag

SEQ ID NO: 43606 - RNA, 19 nt, synthetic construct
  misc_feature 1..19: note = siRNA sense sequence
  source 1..19: mol_type = other RNA
ttttagactcctcatccat

SEQ ID NO: 43607 - RNA, 19 nt, synthetic construct
  misc_feature 1..19: note = siRNA antisense sequence
  source 1..19: mol_type = other RNA
atggatgaggagtctaaaa

SEQ ID NO: 43608 - RNA, 19 nt, synthetic construct
  misc_feature 1..19: note = siRNA sense sequence
  source 1..19: mol_type = other RNA
tttagactcctcatccata

SEQ ID NO: 43609 - RNA, 19 nt, synthetic construct
  misc_feature 1..19: note = siRNA antisense sequence
  source 1..19: mol_type = other RNA
tatggatgaggagtctaaa

SEQ ID NO: 43610 - RNA, 19 nt, synthetic construct
  misc_feature 1..19: note = siRNA sense sequence
  source 1..19: mol_type = other RNA
ttagactcctcatccatac

SEQ ID NO: 43611 - RNA, 19 nt, synthetic construct
  misc_feature 1..19: note = siRNA antisense sequence
  source 1..19: mol_type = other RNA
gtatggatgaggagtctaa

SEQ ID NO: 43612 - RNA, 19 nt, synthetic construct
  misc_feature 1..19: note = siRNA sense sequence
  source 1..19: mol_type = other RNA
agactcctcatccatacca

SEQ ID NO: 43613 - RNA, 19 nt, synthetic construct
  misc_feature 1..19: note = siRNA antisense sequence
  source 1..19: mol_type = other RNA
tggtatggatgaggagtct

SEQ ID NO: 43614 - RNA, 19 nt, synthetic construct
  misc_feature 1..19: note = siRNA sense sequence
  source 1..19: mol_type = other RNA
gactcctcatccataccaa

SEQ ID NO: 43615 - RNA, 19 nt, synthetic construct
  misc_feature 1..19: note = siRNA antisense sequence
  source 1..19: mol_type = other RNA
ttggtatggatgaggagtc

SEQ ID NO: 43616 - RNA, 19 nt, synthetic construct
  misc_feature 1..19: note = siRNA sense sequence
  source 1..19: mol_type = other RNA
actcctcatccataccaaa

SEQ ID NO: 43617 - RNA, 19 nt, synthetic construct
  misc_feature 1..19: note = siRNA antisense sequence
  source 1..19: mol_type = other RNA
tttggtatggatgaggagt

SEQ ID NO: 43618 - RNA, 19 nt, synthetic construct
  misc_feature 1..19: note = siRNA sense sequence
  source 1..19: mol_type = other RNA
ctcctcatccataccaaat

SEQ ID NO: 43619 - RNA, 19 nt, synthetic construct
  misc_feature 1..19: note = siRNA antisense sequence
  source 1..19: mol_type = other RNA
atttggtatggatgaggag

SEQ ID NO: 43620 - RNA, 19 nt, synthetic construct
  misc_feature 1..19: note = siRNA sense sequence
  source 1..19: mol_type = other RNA
tcctcatccataccaaatt

SEQ ID NO: 43621 - RNA, 19 nt, synthetic construct
  misc_feature 1..19: note = siRNA antisense sequence
  source 1..19: mol_type = other RNA
aatttggtatggatgagga

SEQ ID NO: 43622 - RNA, 19 nt, synthetic construct
  misc_feature 1..19: note = siRNA sense sequence
  source 1..19: mol_type = other RNA
ctcatccataccaaatttc

SEQ ID NO: 43623 - RNA, 19 nt, synthetic construct
  misc_feature 1..19: note = siRNA antisense sequence
  source 1..19: mol_type = other RNA
gaaatttggtatggatgag

SEQ ID NO: 43624 - RNA, 19 nt, synthetic construct
  misc_feature 1..19: note = siRNA sense sequence
  source 1..19: mol_type = other RNA
catccataccaaatttcta

SEQ ID NO: 43625 - RNA, 19 nt, synthetic construct
  misc_feature 1..19: note = siRNA antisense sequence
  source 1..19: mol_type = other RNA
tagaaatttggtatggatg

SEQ ID NO: 43626 - RNA, 19 nt, synthetic construct
  misc_feature 1..19: note = siRNA sense sequence
  source 1..19: mol_type = other RNA
ctatgaatgtagttgtaag

SEQ ID NO: 43627 - RNA, 19 nt, synthetic construct
  misc_feature 1..19: note = siRNA antisense sequence
  source 1..19: mol_type = other RNA
cttacaactacattcatag

SEQ ID NO: 43628 - RNA, 19 nt, synthetic construct
  misc_feature 1..19: note = siRNA sense sequence
  source 1..19: mol_type = other RNA
gtagttgtaagatttgtag

SEQ ID NO: 43629 - RNA, 19 nt, synthetic construct
  misc_feature 1..19: note = siRNA antisense sequence
  source 1..19: mol_type = other RNA
ctacaaatcttacaactac

SEQ ID NO: 43630 - RNA, 19 nt, synthetic construct
  misc_feature 1..19: note = siRNA sense sequence
  source 1..19: mol_type = other RNA
agttgtaagatttgtagag

SEQ ID NO: 43631 - RNA, 19 nt, synthetic construct
  misc_feature 1..19: note = siRNA antisense sequence
  source 1..19: mol_type = other RNA
ctctacaaatcttacaact

SEQ ID NO: 43632 - RNA, 19 nt, synthetic construct
  misc_feature 1..19: note = siRNA sense sequence
  source 1..19: mol_type = other RNA
atgtgtatactggagttgg

SEQ ID NO: 43633 - RNA, 19 nt, synthetic construct
  misc_feature 1..19: note = siRNA antisense sequence
  source 1..19: mol_type = other RNA
ccaactccagtatacacat

SEQ ID NO: 43634 - RNA, 19 nt, synthetic construct
  misc_feature 1..19: note = siRNA sense sequence
  source 1..19: mol_type = other RNA
gtgtatactggagttggga

SEQ ID NO: 43635 - RNA, 19 nt, synthetic construct
  misc_feature 1..19: note = siRNA antisense sequence
  source 1..19: mol_type = other RNA
tcccaactccagtatacac

SEQ ID NO: 43636 - RNA, 19 nt, synthetic construct
  misc_feature 1..19: note = siRNA sense sequence
  source 1..19: mol_type = other RNA
tgtatactggagttgggac

SEQ ID NO: 43637 - RNA, 19 nt, synthetic construct
  misc_feature 1..19: note = siRNA antisense sequence
  source 1..19: mol_type = other RNA
gtcccaactccagtataca

SEQ ID NO: 43638 - RNA, 19 nt, synthetic construct
  misc_feature 1..19: note = siRNA sense sequence
  source 1..19: mol_type = other RNA
gtatactggagttgggaca

SEQ ID NO: 43639 - RNA, 19 nt, synthetic construct
  misc_feature 1..19: note = siRNA antisense sequence
  source 1..19: mol_type = other RNA
tgtcccaactccagtatac

SEQ ID NO: 43640 - RNA, 19 nt, synthetic construct
  misc_feature 1..19: note = siRNA sense sequence
  source 1..19: mol_type = other RNA
tatactggagttgggacac

SEQ ID NO: 43641 - RNA, 19 nt, synthetic construct
  misc_feature 1..19: note = siRNA antisense sequence
  source 1..19: mol_type = other RNA
gtgtcccaactccagtata

SEQ ID NO: 43642 - RNA, 19 nt, synthetic construct
  misc_feature 1..19: note = siRNA sense sequence
  source 1..19: mol_type = other RNA
agttgattgactaatgcct

SEQ ID NO: 43643 - RNA, 19 nt, synthetic construct
  misc_feature 1..19: note = siRNA antisense sequence
  source 1..19: mol_type = other RNA
aggcattagtcaatcaact

SEQ ID NO: 43644 - RNA, 19 nt, synthetic construct
  misc_feature 1..19: note = siRNA sense sequence
  source 1..19: mol_type = other RNA
gttgattgactaatgccta

SEQ ID NO: 43645 - RNA, 19 nt, synthetic construct
  misc_feature 1..19: note = siRNA antisense sequence
  source 1..19: mol_type = other RNA
taggcattagtcaatcaac

SEQ ID NO: 43646 - RNA, 19 nt, synthetic construct
  misc_feature 1..19: note = siRNA sense sequence
  source 1..19: mol_type = other RNA
ttgattgactaatgcctaa

SEQ ID NO: 43647 - RNA, 19 nt, synthetic construct
  misc_feature 1..19: note = siRNA antisense sequence
  source 1..19: mol_type = other RNA
ttaggcattagtcaatcaa

SEQ ID NO: 43648 - RNA, 19 nt, synthetic construct
  misc_feature 1..19: note = siRNA sense sequence
  source 1..19: mol_type = other RNA
tgattgactaatgcctaac

SEQ ID NO: 43649 - RNA, 19 nt, synthetic construct
  misc_feature 1..19: note = siRNA antisense sequence
  source 1..19: mol_type = other RNA
gttaggcattagtcaatca

SEQ ID NO: 43650 - RNA, 19 nt, synthetic construct
  misc_feature 1..19: note = siRNA sense sequence
  source 1..19: mol_type = other RNA
gattgactaatgcctaact

SEQ ID NO: 43651 - RNA, 19 nt, synthetic construct
  misc_feature 1..19: note = siRNA antisense sequence
  source 1..19: mol_type = other RNA
agttaggcattagtcaatc

SEQ ID NO: 43652 - RNA, 19 nt, synthetic construct
  misc_feature 1..19: note = siRNA sense sequence
  source 1..19: mol_type = other RNA
attgactaatgcctaactc

SEQ ID NO: 43653 - RNA, 19 nt, synthetic construct
  misc_feature 1..19: note = siRNA antisense sequence
  source 1..19: mol_type = other RNA
gagttaggcattagtcaat

SEQ ID NO: 43654 - RNA, 19 nt, synthetic construct
  misc_feature 1..19: note = siRNA sense sequence
  source 1..19: mol_type = other RNA
ttgactaatgcctaactcc

SEQ ID NO: 43655 - RNA, 19 nt, synthetic construct
  misc_feature 1..19: note = siRNA antisense sequence
  source 1..19: mol_type = other RNA
ggagttaggcattagtcaa

SEQ ID NO: 43656 - RNA, 19 nt, synthetic construct
  misc_feature 1..19: note = siRNA sense sequence
  source 1..19: mol_type = other RNA
tgactaatgcctaactcct

SEQ ID NO: 43657 - RNA, 19 nt, synthetic construct
  misc_feature 1..19: note = siRNA antisense sequence
  source 1..19: mol_type = other RNA
aggagttaggcattagtca

SEQ ID NO: 43658 - RNA, 19 nt, synthetic construct
  misc_feature 1..19: note = siRNA sense sequence
  source 1..19: mol_type = other RNA
gactaatgcctaactcctg

SEQ ID NO: 43659 - RNA, 19 nt, synthetic construct
  misc_feature 1..19: note = siRNA antisense sequence
  source 1..19: mol_type = other RNA
caggagttaggcattagtc

SEQ ID NO: 43660 - RNA, 19 nt, synthetic construct
  misc_feature 1..19: note = siRNA sense sequence
  source 1..19: mol_type = other RNA
actaatgcctaactcctgt

SEQ ID NO: 43661 - RNA, 19 nt, synthetic construct
  misc_feature 1..19: note = siRNA antisense sequence
  source 1..19: mol_type = other RNA
acaggagttaggcattagt

SEQ ID NO: 43662 - RNA, 19 nt, synthetic construct
  misc_feature 1..19: note = siRNA sense sequence
  source 1..19: mol_type = other RNA
ctaatgcctaactcctgtc

SEQ ID NO: 43663 - RNA, 19 nt, synthetic construct
  misc_feature 1..19: note = siRNA antisense sequence
  source 1..19: mol_type = other RNA
gacaggagttaggcattag

SEQ ID NO: 43664 - RNA, 19 nt, synthetic construct
  misc_feature 1..19: note = siRNA sense sequence
  source 1..19: mol_type = other RNA
taatgcctaactcctgtct

SEQ ID NO: 43665 - RNA, 19 nt, synthetic construct
  misc_feature 1..19: note = siRNA antisense sequence
  source 1..19: mol_type = other RNA
agacaggagttaggcatta

SEQ ID NO: 43666 - RNA, 19 nt, synthetic construct
  misc_feature 1..19: note = siRNA sense sequence
  source 1..19: mol_type = other RNA
aatgcctaactcctgtctg

SEQ ID NO: 43667 - RNA, 19 nt, synthetic construct
  misc_feature 1..19: note = siRNA antisense sequence
  source 1..19: mol_type = other RNA
cagacaggagttaggcatt

SEQ ID NO: 43668 - RNA, 19 nt, synthetic construct
  misc_feature 1..19: note = siRNA sense sequence
  source 1..19: mol_type = other RNA
atgcctaactcctgtctga

SEQ ID NO: 43669 - RNA, 19 nt, synthetic construct
  misc_feature 1..19: note = siRNA antisense sequence
  source 1..19: mol_type = other RNA
tcagacaggagttaggcat

SEQ ID NO: 43670 - RNA, 19 nt, synthetic construct
  misc_feature 1..19: note = siRNA sense sequence
  source 1..19: mol_type = other RNA
tgcctaactcctgtctgaa

SEQ ID NO: 43671 - RNA, 19 nt, synthetic construct
  misc_feature 1..19: note = siRNA antisense sequence
  source 1..19: mol_type = other RNA
ttcagacaggagttaggca

SEQ ID NO: 43672 - RNA, 19 nt, synthetic construct
  misc_feature 1..19: note = siRNA sense sequence
  source 1..19: mol_type = other RNA
aactcctgtctgaattgtc

SEQ ID NO: 43673 - RNA, 19 nt, synthetic construct
  misc_feature 1..19: note = siRNA antisense sequence
  source 1..19: mol_type = other RNA
gacaattcagacaggagtt

SEQ ID NO: 43674 - RNA, 19 nt, synthetic construct
  misc_feature 1..19: note = siRNA sense sequence
  source 1..19: mol_type = other RNA
actcctgtctgaattgtca

SEQ ID NO: 43675 - RNA, 19 nt, synthetic construct
  misc_feature 1..19: note = siRNA antisense sequence
  source 1..19: mol_type = other RNA
tgacaattcagacaggagt

SEQ ID NO: 43676 - RNA, 19 nt, synthetic construct
  misc_feature 1..19: note = siRNA sense sequence
  source 1..19: mol_type = other RNA
cagcagctgttatgtctag

SEQ ID NO: 43677 - RNA, 19 nt, synthetic construct
  misc_feature 1..19: note = siRNA antisense sequence
  source 1..19: mol_type = other RNA
ctagacataacagctgctg

SEQ ID NO: 43678 - RNA, 19 nt, synthetic construct
  misc_feature 1..19: note = siRNA sense sequence
  source 1..19: mol_type = other RNA
agcagctgttatgtctagc

SEQ ID NO: 43679 - RNA, 19 nt, synthetic construct
  misc_feature 1..19: note = siRNA antisense sequence
  source 1..19: mol_type = other RNA
gctagacataacagctgct

SEQ ID NO: 43680 - RNA, 19 nt, synthetic construct
  misc_feature 1..19: note = siRNA sense sequence
  source 1..19: mol_type = other RNA
ctagctgctgacagggaag

SEQ ID NO: 43681 - RNA, 19 nt, synthetic construct
  misc_feature 1..19: note = siRNA antisense sequence
  source 1..19: mol_type = other RNA
cttccctgtcagcagctag

SEQ ID NO: 43682 - RNA, 19 nt, synthetic construct
  misc_feature 1..19: note = siRNA sense sequence
  source 1..19: mol_type = other RNA
tagctgctgacagggaagt

SEQ ID NO: 43683 - RNA, 19 nt, synthetic construct
  misc_feature 1..19: note = siRNA antisense sequence
  source 1..19: mol_type = other RNA
acttccctgtcagcagcta

SEQ ID NO: 43684 - RNA, 19 nt, synthetic construct
  misc_feature 1..19: note = siRNA sense sequence
  source 1..19: mol_type = other RNA
agctgctgacagggaagtc

SEQ ID NO: 43685 - RNA, 19 nt, synthetic construct
  misc_feature 1..19: note = siRNA antisense sequence
  source 1..19: mol_type = other RNA
gacttccctgtcagcagct

SEQ ID NO: 43686 - RNA, 19 nt, synthetic construct
  misc_feature 1..19: note = siRNA sense sequence
  source 1..19: mol_type = other RNA
gctgctgacagggaagtcg

SEQ ID NO: 43687 - RNA, 19 nt, synthetic construct
  misc_feature 1..19: note = siRNA antisense sequence
  source 1..19: mol_type = other RNA
cgacttccctgtcagcagc

SEQ ID NO: 43688 - RNA, 19 nt, synthetic construct
  misc_feature 1..19: note = siRNA sense sequence
  source 1..19: mol_type = other RNA
ctgctgacagggaagtcgg

SEQ ID NO: 43689 - RNA, 19 nt, synthetic construct
  misc_feature 1..19: note = siRNA antisense sequence
  source 1..19: mol_type = other RNA
ccgacttccctgtcagcag

SEQ ID NO: 43690 - RNA, 19 nt, synthetic construct
  misc_feature 1..19: note = siRNA sense sequence
  source 1..19: mol_type = other RNA
tgctgacagggaagtcgga

SEQ ID NO: 43691 - RNA, 19 nt, synthetic construct
  misc_feature 1..19: note = siRNA antisense sequence
  source 1..19: mol_type = other RNA
tccgacttccctgtcagca

SEQ ID NO: 43692 - RNA, 19 nt, synthetic construct
  misc_feature 1..19: note = siRNA sense sequence
  source 1..19: mol_type = other RNA
gctgacagggaagtcggag

SEQ ID NO: 43693 - RNA, 19 nt, synthetic construct
  misc_feature 1..19: note = siRNA antisense sequence
  source 1..19: mol_type = other RNA
ctccgacttccctgtcagc

SEQ ID NO: 43694 - RNA, 19 nt, synthetic construct
  misc_feature 1..19: note = siRNA sense sequence
  source 1..19: mol_type = other RNA
ctgacagggaagtcggagc

SEQ ID NO: 43695 - RNA, 19 nt, synthetic construct
  misc_feature 1..19: note = siRNA antisense sequence
  source 1..19: mol_type = other RNA
gctccgacttccctgtcag

SEQ ID NO: 43696 - RNA, 19 nt, synthetic construct
  misc_feature 1..19: note = siRNA sense sequence
  source 1..19: mol_type = other RNA
tgacagggaagtcggagca

SEQ ID NO: 43697 - RNA, 19 nt, synthetic construct
  misc_feature 1..19: note = siRNA antisense sequence
  source 1..19: mol_type = other RNA
tgctccgacttccctgtca

SEQ ID NO: 43698 - RNA, 19 nt, synthetic construct
  misc_feature 1..19: note = siRNA sense sequence
  source 1..19: mol_type = other RNA
gacagggaagtcggagcag

SEQ ID NO: 43699 - RNA, 19 nt, synthetic construct
  misc_feature 1..19: note = siRNA antisense sequence
  source 1..19: mol_type = other RNA
ctgctccgacttccctgtc

SEQ ID NO: 43700 - RNA, 19 nt, synthetic construct
  misc_feature 1..19: note = siRNA sense sequence
  source 1..19: mol_type = other RNA
acagggaagtcggagcaga

SEQ ID NO: 43701 - RNA, 19 nt, synthetic construct
  misc_feature 1..19: note = siRNA antisense sequence
  source 1..19: mol_type = other RNA
tctgctccgacttccctgt

SEQ ID NO: 43702 - RNA, 19 nt, synthetic construct
  misc_feature 1..19: note = siRNA sense sequence
  source 1..19: mol_type = other RNA
cagggaagtcggagcagag

SEQ ID NO: 43703 - RNA, 19 nt, synthetic construct
  misc_feature 1..19: note = siRNA antisense sequence
  source 1..19: mol_type = other RNA
ctctgctccgacttccctg

SEQ ID NO: 43704 - RNA, 19 nt, synthetic construct
  misc_feature 1..19: note = siRNA sense sequence
  source 1..19: mol_type = other RNA
agggaagtcggagcagagg

SEQ ID NO: 43705 - RNA, 19 nt, synthetic construct
  misc_feature 1..19: note = siRNA antisense sequence
  source 1..19: mol_type = other RNA
cctctgctccgacttccct

SEQ ID NO: 43706 - RNA, 19 nt, synthetic construct
  misc_feature 1..19: note = siRNA sense sequence
  source 1..19: mol_type = other RNA
gggaagtcggagcagaggt

SEQ ID NO: 43707 - RNA, 19 nt, synthetic construct
  misc_feature 1..19: note = siRNA antisense sequence
  source 1..19: mol_type = other RNA
acctctgctccgacttccc

SEQ ID NO: 43708 - RNA, 19 nt, synthetic construct
  misc_feature 1..19: note = siRNA sense sequence
  source 1..19: mol_type = other RNA
ggaagtcggagcagaggtc

SEQ ID NO: 43709 - RNA, 19 nt, synthetic construct
  misc_feature 1..19: note = siRNA antisense sequence
  source 1..19: mol_type = other RNA
gacctctgctccgacttcc

SEQ ID NO: 43710 - RNA, 19 nt, synthetic construct
  misc_feature 1..19: note = siRNA sense sequence
  source 1..19: mol_type = other RNA
gtcggagcagaggtcactg

SEQ ID NO: 43711 - RNA, 19 nt, synthetic construct
  misc_feature 1..19: note = siRNA antisense sequence
  source 1..19: mol_type = other RNA
cagtgacctctgctccgac

SEQ ID NO: 43712 - RNA, 19 nt, synthetic construct
  misc_feature 1..19: note = siRNA sense sequence
  source 1..19: mol_type = other RNA
cactggagtcagcctgcat

SEQ ID NO: 43713 - RNA, 19 nt, synthetic construct
  misc_feature 1..19: note = siRNA antisense sequence
  source 1..19: mol_type = other RNA
atgcaggctgactccagtg

SEQ ID NO: 43714 - RNA, 19 nt, synthetic construct
  misc_feature 1..19: note = siRNA sense sequence
  source 1..19: mol_type = other RNA
actggagtcagcctgcatc

SEQ ID NO: 43715 - RNA, 19 nt, synthetic construct
  misc_feature 1..19: note = siRNA antisense sequence
  source 1..19: mol_type = other RNA
gatgcaggctgactccagt

SEQ ID NO: 43716 - RNA, 19 nt, synthetic construct
  misc_feature 1..19: note = siRNA sense sequence
  source 1..19: mol_type = other RNA
ctggagtcagcctgcatcc

SEQ ID NO: 43717 - RNA, 19 nt, synthetic construct
  misc_feature 1..19: note = siRNA antisense sequence
  source 1..19: mol_type = other RNA
ggatgcaggctgactccag

SEQ ID NO: 43718 - RNA, 19 nt, synthetic construct
  misc_feature 1..19: note = siRNA sense sequence
  source 1..19: mol_type = other RNA
tggagtcagcctgcatccc

SEQ ID NO: 43719 - RNA, 19 nt, synthetic construct
  misc_feature 1..19: note = siRNA antisense sequence
  source 1..19: mol_type = other RNA
gggatgcaggctgactcca

SEQ ID NO: 43720 - RNA, 19 nt, synthetic construct
  misc_feature 1..19: note = siRNA sense sequence
  source 1..19: mol_type = other RNA
agattgttagaatgcatgt

SEQ ID NO: 43721 - RNA, 19 nt, synthetic construct
  misc_feature 1..19: note = siRNA antisense sequence
  source 1..19: mol_type = other RNA
acatgcattctaacaatct

SEQ ID NO: 43722 - RNA, 19 nt, synthetic construct
  misc_feature 1..19: note = siRNA sense sequence
  source 1..19: mol_type = other RNA
gattgttagaatgcatgtg

SEQ ID NO: 43723 - RNA, 19 nt, synthetic construct
  misc_feature 1..19: note = siRNA antisense sequence
  source 1..19: mol_type = other RNA
cacatgcattctaacaatc

SEQ ID NO: 43724 - RNA, 19 nt, synthetic construct
  misc_feature 1..19: note = siRNA sense sequence
  source 1..19: mol_type = other RNA
attgttagaatgcatgtgt

SEQ ID NO: 43725 - RNA, 19 nt, synthetic construct
  misc_feature 1..19: note = siRNA antisense sequence
  source 1..19: mol_type = other RNA
acacatgcattctaacaat

SEQ ID NO: 43726 - RNA, 19 nt, synthetic construct
  misc_feature 1..19: note = siRNA sense sequence
  source 1..19: mol_type = other RNA
ttgttagaatgcatgtgtt

SEQ ID NO: 43727 - RNA, 19 nt, synthetic construct
  misc_feature 1..19: note = siRNA antisense sequence
  source 1..19: mol_type = other RNA
aacacatgcattctaacaa

SEQ ID NO: 43728 - RNA, 19 nt, synthetic construct
  misc_feature 1..19: note = siRNA sense sequence
  source 1..19: mol_type = other RNA
tgttagaatgcatgtgttt

SEQ ID NO: 43729 - RNA, 19 nt, synthetic construct
  misc_feature 1..19: note = siRNA antisense sequence
  source 1..19: mol_type = other RNA
aaacacatgcattctaaca

SEQ ID NO: 43730 - RNA, 19 nt, synthetic construct
  misc_feature 1..19: note = siRNA sense sequence
  source 1..19: mol_type = other RNA
gttagaatgcatgtgtttt

SEQ ID NO: 43731 - RNA, 19 nt, synthetic construct
  misc_feature 1..19: note = siRNA antisense sequence
  source 1..19: mol_type = other RNA
aaaacacatgcattctaac

SEQ ID NO: 43732 - RNA, 19 nt, synthetic construct
  misc_feature 1..19: note = siRNA sense sequence
  source 1..19: mol_type = other RNA
ttagaatgcatgtgttttc

SEQ ID NO: 43733 - RNA, 19 nt, synthetic construct
  misc_feature 1..19: note = siRNA antisense sequence
  source 1..19: mol_type = other RNA
gaaaacacatgcattctaa

SEQ ID NO: 43734 - RNA, 19 nt, synthetic construct
  misc_feature 1..19: note = siRNA sense sequence
  source 1..19: mol_type = other RNA
gcatgtgttttcccaggat

SEQ ID NO: 43735 - RNA, 19 nt, synthetic construct
  misc_feature 1..19: note = siRNA antisense sequence
  source 1..19: mol_type = other RNA
atcctgggaaaacacatgc

SEQ ID NO: 43736 - RNA, 19 nt, synthetic construct
  misc_feature 1..19: note = siRNA sense sequence
  source 1..19: mol_type = other RNA
catgtgttttcccaggatt

SEQ ID NO: 43737 - RNA, 19 nt, synthetic construct
  misc_feature 1..19: note = siRNA antisense sequence
  source 1..19: mol_type = other RNA
aatcctgggaaaacacatg

SEQ ID NO: 43738 - RNA, 19 nt, synthetic construct
  misc_feature 1..19: note = siRNA sense sequence
  source 1..19: mol_type = other RNA
atgtgttttcccaggattg

SEQ ID NO: 43739 - RNA, 19 nt, synthetic construct
  misc_feature 1..19: note = siRNA antisense sequence
  source 1..19: mol_type = other RNA
caatcctgggaaaacacat

SEQ ID NO: 43740 - RNA, 19 nt, synthetic construct
  misc_feature 1..19: note = siRNA sense sequence
  source 1..19: mol_type = other RNA
gttttcccaggattggcat

SEQ ID NO: 43741 - RNA, 19 nt, synthetic construct
  misc_feature 1..19: note = siRNA antisense sequence
  source 1..19: mol_type = other RNA
atgccaatcctgggaaaac

SEQ ID NO: 43742 - RNA, 19 nt, synthetic construct
  misc_feature 1..19: note = siRNA sense sequence
  source 1..19: mol_type = other RNA
ccaggattggcatgggtac

SEQ ID NO: 43743 - RNA, 19 nt, synthetic construct
  misc_feature 1..19: note = siRNA antisense sequence
  source 1..19: mol_type = other RNA
gtacccatgccaatcctgg

SEQ ID NO: 43744 - RNA, 19 nt, synthetic construct
  misc_feature 1..19: note = siRNA sense sequence
  source 1..19: mol_type = other RNA
caggattggcatgggtact

SEQ ID NO: 43745 - RNA, 19 nt, synthetic construct
  misc_feature 1..19: note = siRNA antisense sequence
  source 1..19: mol_type = other RNA
agtacccatgccaatcctg

SEQ ID NO: 43746 - RNA, 19 nt, synthetic construct
  misc_feature 1..19: note = siRNA sense sequence
  source 1..19: mol_type = other RNA
aggattggcatgggtactc

SEQ ID NO: 43747 - RNA, 19 nt, synthetic construct
  misc_feature 1..19: note = siRNA antisense sequence
  source 1..19: mol_type = other RNA
gagtacccatgccaatcct

SEQ ID NO: 43748 - RNA, 19 nt, synthetic construct
  misc_feature 1..19: note = siRNA sense sequence
  source 1..19: mol_type = other RNA
ggattggcatgggtactca

SEQ ID NO: 43749 - RNA, 19 nt, synthetic construct
  misc_feature 1..19: note = siRNA antisense sequence
  source 1..19: mol_type = other RNA
tgagtacccatgccaatcc

SEQ ID NO: 43750 - RNA, 19 nt, synthetic construct
  misc_feature 1..19: note = siRNA sense sequence
  source 1..19: mol_type = other RNA
gattggcatgggtactcaa

SEQ ID NO: 43751 - RNA, 19 nt, synthetic construct
  misc_feature 1..19: note = siRNA antisense sequence
  source 1..19: mol_type = other RNA
ttgagtacccatgccaatc

SEQ ID NO: 43752 - RNA, 19 nt, synthetic construct
  misc_feature 1..19: note = siRNA sense sequence
  source 1..19: mol_type = other RNA
attggcatgggtactcaaa

SEQ ID NO: 43753 - RNA, 19 nt, synthetic construct
  misc_feature 1..19: note = siRNA antisense sequence
  source 1..19: mol_type = other RNA
tttgagtacccatgccaat

SEQ ID NO: 43754 - RNA, 19 nt, synthetic construct
  misc_feature 1..19: note = siRNA sense sequence
  source 1..19: mol_type = other RNA
ttggcatgggtactcaaaa

SEQ ID NO: 43755 - RNA, 19 nt, synthetic construct
  misc_feature 1..19: note = siRNA antisense sequence
  source 1..19: mol_type = other RNA
ttttgagtacccatgccaa

SEQ ID NO: 43756 - RNA, 19 nt, synthetic construct
  misc_feature 1..19: note = siRNA sense sequence
  source 1..19: mol_type = other RNA
tggcatgggtactcaaaag

SEQ ID NO: 43757 - RNA, 19 nt, synthetic construct
  misc_feature 1..19: note = siRNA antisense sequence
  source 1..19: mol_type = other RNA
cttttgagtacccatgcca

SEQ ID NO: 43758 - RNA, 19 nt, synthetic construct
  misc_feature 1..19: note = siRNA sense sequence
  source 1..19: mol_type = other RNA
ggcatgggtactcaaaagc

SEQ ID NO: 43759 - RNA, 19 nt, synthetic construct
  misc_feature 1..19: note = siRNA antisense sequence
  source 1..19: mol_type = other RNA
gcttttgagtacccatgcc

SEQ ID NO: 43760 - RNA, 19 nt, synthetic construct
  misc_feature 1..19: note = siRNA sense sequence
  source 1..19: mol_type = other RNA
gcatgggtactcaaaagca

SEQ ID NO: 43761 - RNA, 19 nt, synthetic construct
  misc_feature 1..19: note = siRNA antisense sequence
  source 1..19: mol_type = other RNA
tgcttttgagtacccatgc

SEQ ID NO: 43762 - RNA, 19 nt, synthetic construct
  misc_feature 1..19: note = siRNA sense sequence
  source 1..19: mol_type = other RNA
catgggtactcaaaagcaa

SEQ ID NO: 43763 - RNA, 19 nt, synthetic construct
  misc_feature 1..19: note = siRNA antisense sequence
  source 1..19: mol_type = other RNA
ttgcttttgagtacccatg

SEQ ID NO: 43764 - RNA, 19 nt, synthetic construct
  misc_feature 1..19: note = siRNA sense sequence
  source 1..19: mol_type = other RNA
atgggtactcaaaagcaag

SEQ ID NO: 43765 - RNA, 19 nt, synthetic construct
  misc_feature 1..19: note = siRNA antisense sequence
  source 1..19: mol_type = other RNA
cttgcttttgagtacccat

SEQ ID NO: 43766 - RNA, 19 nt, synthetic construct
  misc_feature 1..19: note = siRNA sense sequence
  source 1..19: mol_type = other RNA
tgggtactcaaaagcaaga

SEQ ID NO: 43767 - RNA, 19 nt, synthetic construct
  misc_feature 1..19: note = siRNA antisense sequence
  source 1..19: mol_type = other RNA
tcttgcttttgagtaccca

SEQ ID NO: 43768 - RNA, 19 nt, synthetic construct
  misc_feature 1..19: note = siRNA sense sequence
  source 1..19: mol_type = other RNA
gggtactcaaaagcaagag

SEQ ID NO: 43769 - RNA, 19 nt, synthetic construct
  misc_feature 1..19: note = siRNA antisense sequence
  source 1..19: mol_type = other RNA
ctcttgcttttgagtaccc

SEQ ID NO: 43770 - RNA, 19 nt, synthetic construct
  misc_feature 1..19: note = siRNA sense sequence
  source 1..19: mol_type = other RNA
ggtactcaaaagcaagagc

SEQ ID NO: 43771 - RNA, 19 nt, synthetic construct
  misc_feature 1..19: note = siRNA antisense sequence
  source 1..19: mol_type = other RNA
gctcttgcttttgagtacc

SEQ ID NO: 43772 - RNA, 19 nt, synthetic construct
  misc_feature 1..19: note = siRNA sense sequence
  source 1..19: mol_type = other RNA
aaaagcaagagccagtgtg

SEQ ID NO: 43773 - RNA, 19 nt, synthetic construct
  misc_feature 1..19: note = siRNA antisense sequence
  source 1..19: mol_type = other RNA
cacactggctcttgctttt

SEQ ID NO: 43774 - RNA, 19 nt, synthetic construct
  misc_feature 1..19: note = siRNA sense sequence
  source 1..19: mol_type = other RNA
aaagcaagagccagtgtga

SEQ ID NO: 43775 - RNA, 19 nt, synthetic construct
  misc_feature 1..19: note = siRNA antisense sequence
  source 1..19: mol_type = other RNA
tcacactggctcttgcttt

SEQ ID NO: 43776 - RNA, 19 nt, synthetic construct
  misc_feature 1..19: note = siRNA sense sequence
  source 1..19: mol_type = other RNA
caagagccagtgtgaggtc

SEQ ID NO: 43777 - RNA, 19 nt, synthetic construct
  misc_feature 1..19: note = siRNA antisense sequence
  source 1..19: mol_type = other RNA
gacctcacactggctcttg

SEQ ID NO: 43778 - RNA, 19 nt, synthetic construct
  misc_feature 1..19: note = siRNA sense sequence
  source 1..19: mol_type = other RNA
agccagtgtgaggtcatgt

SEQ ID NO: 43779 - RNA, 19 nt, synthetic construct
  misc_feature 1..19: note = siRNA antisense sequence
  source 1..19: mol_type = other RNA
acatgacctcacactggct

SEQ ID NO: 43780 - RNA, 19 nt, synthetic construct
  misc_feature 1..19: note = siRNA sense sequence
  source 1..19: mol_type = other RNA
ccagtgtgaggtcatgtca

SEQ ID NO: 43781 - RNA, 19 nt, synthetic construct
  misc_feature 1..19: note = siRNA antisense sequence
  source 1..19: mol_type = other RNA
tgacatgacctcacactgg

SEQ ID NO: 43782 - RNA, 19 nt, synthetic construct
  misc_feature 1..19: note = siRNA sense sequence
  source 1..19: mol_type = other RNA
cagtgtgaggtcatgtcag

SEQ ID NO: 43783 - RNA, 19 nt, synthetic construct
  misc_feature 1..19: note = siRNA antisense sequence
  source 1..19: mol_type = other RNA
ctgacatgacctcacactg

SEQ ID NO: 43784 - RNA, 19 nt, synthetic construct
  misc_feature 1..19: note = siRNA sense sequence
  source 1..19: mol_type = other RNA
agtgtgaggtcatgtcagg

SEQ ID NO: 43785 - RNA, 19 nt, synthetic construct
  misc_feature 1..19: note = siRNA antisense sequence
  source 1..19: mol_type = other RNA
cctgacatgacctcacact

SEQ ID NO: 43786 - RNA, 19 nt, synthetic construct
  misc_feature 1..19: note = siRNA sense sequence
  source 1..19: mol_type = other RNA
tgaggtcatgtcagggcct

SEQ ID NO: 43787 - RNA, 19 nt, synthetic construct
  misc_feature 1..19: note = siRNA antisense sequence
  source 1..19: mol_type = other RNA
aggccctgacatgacctca

SEQ ID NO: 43788 - RNA, 19 nt, synthetic construct
  misc_feature 1..19: note = siRNA sense sequence
  source 1..19: mol_type = other RNA
gaggtcatgtcagggcctg

SEQ ID NO: 43789 - RNA, 19 nt, synthetic construct
  misc_feature 1..19: note = siRNA antisense sequence
  source 1..19: mol_type = other RNA
caggccctgacatgacctc

SEQ ID NO: 43790 - RNA, 19 nt, synthetic construct
  misc_feature 1..19: note = siRNA sense sequence
  source 1..19: mol_type = other RNA
aggtcatgtcagggcctgt

SEQ ID NO: 43791 - RNA, 19 nt, synthetic construct
  misc_feature 1..19: note = siRNA antisense sequence
  source 1..19: mol_type = other RNA
acaggccctgacatgacct

SEQ ID NO: 43792 - RNA, 19 nt, synthetic construct
  misc_feature 1..19: note = siRNA sense sequence
  source 1..19: mol_type = other RNA
ggtcatgtcagggcctgtc

SEQ ID NO: 43793 - RNA, 19 nt, synthetic construct
  misc_feature 1..19: note = siRNA antisense sequence
  source 1..19: mol_type = other RNA
gacaggccctgacatgacc

SEQ ID NO: 43794 - RNA, 19 nt, synthetic construct
  misc_feature 1..19: note = siRNA sense sequence
  source 1..19: mol_type = other RNA
gtcatgtcagggcctgtcc

SEQ ID NO: 43795 - RNA, 19 nt, synthetic construct
  misc_feature 1..19: note = siRNA antisense sequence
  source 1..19: mol_type = other RNA
ggacaggccctgacatgac

SEQ ID NO: 43796 - RNA, 19 nt, synthetic construct
  misc_feature 1..19: note = siRNA sense sequence
  source 1..19: mol_type = other RNA
tcatgtcagggcctgtcct

SEQ ID NO: 43797 - RNA, 19 nt, synthetic construct
  misc_feature 1..19: note = siRNA antisense sequence
  source 1..19: mol_type = other RNA
aggacaggccctgacatga

SEQ ID NO: 43798 - RNA, 19 nt, synthetic construct
  misc_feature 1..19: note = siRNA sense sequence
  source 1..19: mol_type = other RNA
catgtcagggcctgtcctt

SEQ ID NO: 43799 - RNA, 19 nt, synthetic construct
  misc_feature 1..19: note = siRNA antisense sequence
  source 1..19: mol_type = other RNA
aaggacaggccctgacatg

SEQ ID NO: 43800 - RNA, 19 nt, synthetic construct
  misc_feature 1..19: note = siRNA sense sequence
  source 1..19: mol_type = other RNA
atgtcagggcctgtcctta

SEQ ID NO: 43801 - RNA, 19 nt, synthetic construct
  misc_feature 1..19: note = siRNA antisense sequence
  source 1..19: mol_type = other RNA
taaggacaggccctgacat

SEQ ID NO: 43802 - RNA, 19 nt, synthetic construct
  misc_feature 1..19: note = siRNA sense sequence
  source 1..19: mol_type = other RNA
tgtcagggcctgtccttag

SEQ ID NO: 43803 - RNA, 19 nt, synthetic construct
  misc_feature 1..19: note = siRNA antisense sequence
  source 1..19: mol_type = other RNA
ctaaggacaggccctgaca

SEQ ID NO: 43804 - RNA, 19 nt, synthetic construct
  misc_feature 1..19: note = siRNA sense sequence
  source 1..19: mol_type = other RNA
gtcagggcctgtccttagg

SEQ ID NO: 43805 - RNA, 19 nt, synthetic construct
  misc_feature 1..19: note = siRNA antisense sequence
  source 1..19: mol_type = other RNA
cctaaggacaggccctgac

SEQ ID NO: 43806 - RNA, 19 nt, synthetic construct
  misc_feature 1..19: note = siRNA sense sequence
  source 1..19: mol_type = other RNA
cagggcctgtccttaggga

SEQ ID NO: 43807 - RNA, 19 nt, synthetic construct
  misc_feature 1..19: note = siRNA antisense sequence
  source 1..19: mol_type = other RNA
tccctaaggacaggccctg

SEQ ID NO: 43808 - RNA, 19 nt, synthetic construct
  misc_feature 1..19: note = siRNA sense sequence
  source 1..19: mol_type = other RNA
gcctgtccttagggattac

SEQ ID NO: 43809 - RNA, 19 nt, synthetic construct
  misc_feature 1..19: note = siRNA antisense sequence
  source 1..19: mol_type = other RNA
gtaatccctaaggacaggc

SEQ ID NO: 43810 - RNA, 19 nt, synthetic construct
  misc_feature 1..19: note = siRNA sense sequence
  source 1..19: mol_type = other RNA
cttagggattactggaagt

SEQ ID NO: 43811 - RNA, 19 nt, synthetic construct
  misc_feature 1..19: note = siRNA antisense sequence
  source 1..19: mol_type = other RNA
acttccagtaatccctaag

SEQ ID NO: 43812 - RNA, 19 nt, synthetic construct
  misc_feature 1..19: note = siRNA sense sequence
  source 1..19: mol_type = other RNA
ttagggattactggaagtg

SEQ ID NO: 43813 - RNA, 19 nt, synthetic construct
  misc_feature 1..19: note = siRNA antisense sequence
  source 1..19: mol_type = other RNA
cacttccagtaatccctaa

SEQ ID NO: 43814 - RNA, 19 nt, synthetic construct
  misc_feature 1..19: note = siRNA sense sequence
  source 1..19: mol_type = other RNA
tagggattactggaagtga

SEQ ID NO: 43815 - RNA, 19 nt, synthetic construct
  misc_feature 1..19: note = siRNA antisense sequence
  source 1..19: mol_type = other RNA
tcacttccagtaatcccta

SEQ ID NO: 43816 - RNA, 19 nt, synthetic construct
  misc_feature 1..19: note = siRNA sense sequence
  source 1..19: mol_type = other RNA
agggattactggaagtgag

SEQ ID NO: 43817 - RNA, 19 nt, synthetic construct
  misc_feature 1..19: note = siRNA antisense sequence
  source 1..19: mol_type = other RNA
ctcacttccagtaatccct

SEQ ID NO: 43818 - RNA, 19 nt, synthetic construct
  misc_feature 1..19: note = siRNA sense sequence
  source 1..19: mol_type = other RNA
actggaagtgagtggctgc

SEQ ID NO: 43819 - RNA, 19 nt, synthetic construct
  misc_feature 1..19: note = siRNA antisense sequence
  source 1..19: mol_type = other RNA
gcagccactcacttccagt

SEQ ID NO: 43820 - RNA, 19 nt, synthetic construct
  misc_feature 1..19: note = siRNA sense sequence
  source 1..19: mol_type = other RNA
ctggaagtgagtggctgcc

SEQ ID NO: 43821 - RNA, 19 nt, synthetic construct
  misc_feature 1..19: note = siRNA antisense sequence
  source 1..19: mol_type = other RNA
ggcagccactcacttccag

SEQ ID NO: 43822 - RNA, 19 nt, synthetic construct
  misc_feature 1..19: note = siRNA sense sequence
  source 1..19: mol_type = other RNA
agatctctgtaattcttag

SEQ ID NO: 43823 - RNA, 19 nt, synthetic construct
  misc_feature 1..19: note = siRNA antisense sequence
  source 1..19: mol_type = other RNA
ctaagaattacagagatct

SEQ ID NO: 43824 - RNA, 19 nt, synthetic construct
  misc_feature 1..19: note = siRNA sense sequence
  source 1..19: mol_type = other RNA
gatctctgtaattcttagg

SEQ ID NO: 43825 - RNA, 19 nt, synthetic construct
  misc_feature 1..19: note = siRNA antisense sequence
  source 1..19: mol_type = other RNA
cctaagaattacagagatc

SEQ ID NO: 43826 - RNA, 19 nt, synthetic construct
  misc_feature 1..19: note = siRNA sense sequence
  source 1..19: mol_type = other RNA
tgaggcagtgggatgcatt

SEQ ID NO: 43827 - RNA, 19 nt, synthetic construct
  misc_feature 1..19: note = siRNA antisense sequence
  source 1..19: mol_type = other RNA
aatgcatcccactgcctca

SEQ ID NO: 43828 - RNA, 19 nt, synthetic construct
  misc_feature 1..19: note = siRNA sense sequence
  source 1..19: mol_type = other RNA
gaggcagtgggatgcattc

SEQ ID NO: 43829 - RNA, 19 nt, synthetic construct
  misc_feature 1..19: note = siRNA antisense sequence
  source 1..19: mol_type = other RNA
gaatgcatcccactgcctc

SEQ ID NO: 43830 - RNA, 19 nt, synthetic construct
  misc_feature 1..19: note = siRNA sense sequence
  source 1..19: mol_type = other RNA
aggcagtgggatgcattca

SEQ ID NO: 43831 - RNA, 19 nt, synthetic construct
  misc_feature 1..19: note = siRNA antisense sequence
  source 1..19: mol_type = other RNA
tgaatgcatcccactgcct

SEQ ID NO: 43832 - RNA, 19 nt, synthetic construct
  misc_feature 1..19: note = siRNA sense sequence
  source 1..19: mol_type = other RNA
actcagggcaagggtgtag

SEQ ID NO: 43833 - RNA, 19 nt, synthetic construct
  misc_feature 1..19: note = siRNA antisense sequence
  source 1..19: mol_type = other RNA
ctacacccttgccctgagt

SEQ ID NO: 43834 - RNA, 19 nt, synthetic construct
  misc_feature 1..19: note = siRNA sense sequence
  source 1..19: mol_type = other RNA
ctcagggcaagggtgtagg

SEQ ID NO: 43835 - RNA, 19 nt, synthetic construct
  misc_feature 1..19: note = siRNA antisense sequence
  source 1..19: mol_type = other RNA
cctacacccttgccctgag

SEQ ID NO: 43836 - RNA, 19 nt, synthetic construct
  misc_feature 1..19: note = siRNA sense sequence
  source 1..19: mol_type = other RNA
agggcaagggtgtaggtga

SEQ ID NO: 43837 - RNA, 19 nt, synthetic construct
  misc_feature 1..19: note = siRNA antisense sequence
  source 1..19: mol_type = other RNA
tcacctacacccttgccct

SEQ ID NO: 43838 - RNA, 19 nt, synthetic construct
  misc_feature 1..19: note = siRNA sense sequence
  source 1..19: mol_type = other RNA
gggcaagggtgtaggtgag

SEQ ID NO: 43839 - RNA, 19 nt, synthetic construct
  misc_feature 1..19: note = siRNA antisense sequence
  source 1..19: mol_type = other RNA
ctcacctacacccttgccc

SEQ ID NO: 43840 - RNA, 19 nt, synthetic construct
  misc_feature 1..19: note = siRNA sense sequence
  source 1..19: mol_type = other RNA
atctcaatgaagggagttc

SEQ ID NO: 43841 - RNA, 19 nt, synthetic construct
  misc_feature 1..19: note = siRNA antisense sequence
  source 1..19: mol_type = other RNA
gaactcccttcattgagat

SEQ ID NO: 43842 - RNA, 19 nt, synthetic construct
  misc_feature 1..19: note = siRNA sense sequence
  source 1..19: mol_type = other RNA
tctcaatgaagggagttct

SEQ ID NO: 43843 - RNA, 19 nt, synthetic construct
  misc_feature 1..19: note = siRNA antisense sequence
  source 1..19: mol_type = other RNA
agaactcccttcattgaga

SEQ ID NO: 43844 - RNA, 19 nt, synthetic construct
  misc_feature 1..19: note = siRNA sense sequence
  source 1..19: mol_type = other RNA
acttgtacatacctattag

SEQ ID NO: 43845 - RNA, 19 nt, synthetic construct
  misc_feature 1..19: note = siRNA antisense sequence
  source 1..19: mol_type = other RNA
ctaataggtatgtacaagt

SEQ ID NO: 43846 - RNA, 19 nt, synthetic construct
  misc_feature 1..19: note = siRNA sense sequence
  source 1..19: mol_type = other RNA
cttgtacatacctattagg

SEQ ID NO: 43847 - RNA, 19 nt, synthetic construct
  misc_feature 1..19: note = siRNA antisense sequence
  source 1..19: mol_type = other RNA
cctaataggtatgtacaag

SEQ ID NO: 43848 - RNA, 19 nt, synthetic construct
  misc_feature 1..19: note = siRNA sense sequence
  source 1..19: mol_type = other RNA
ttgtacatacctattagga

SEQ ID NO: 43849 - RNA, 19 nt, synthetic construct
  misc_feature 1..19: note = siRNA antisense sequence
  source 1..19: mol_type = other RNA
tcctaataggtatgtacaa

SEQ ID NO: 43850 - RNA, 19 nt, synthetic construct
  misc_feature 1..19: note = siRNA sense sequence
  source 1..19: mol_type = other RNA
tgtacatacctattaggac

SEQ ID NO: 43851 - RNA, 19 nt, synthetic construct
  misc_feature 1..19: note = siRNA antisense sequence
  source 1..19: mol_type = other RNA
gtcctaataggtatgtaca

SEQ ID NO: 43852 - RNA, 19 nt, synthetic construct
  misc_feature 1..19: note = siRNA sense sequence
  source 1..19: mol_type = other RNA
gtacatacctattaggacc

SEQ ID NO: 43853 - RNA, 19 nt, synthetic construct
  misc_feature 1..19: note = siRNA antisense sequence
  source 1..19: mol_type = other RNA
ggtcctaataggtatgtac

SEQ ID NO: 43854 - RNA, 19 nt, synthetic construct
  misc_feature 1..19: note = siRNA sense sequence
  source 1..19: mol_type = other RNA
tacatacctattaggacct

SEQ ID NO: 43855 - RNA, 19 nt, synthetic construct
  misc_feature 1..19: note = siRNA antisense sequence
  source 1..19: mol_type = other RNA
aggtcctaataggtatgta

SEQ ID NO: 43856 - RNA, 19 nt, synthetic construct
  misc_feature 1..19: note = siRNA sense sequence
  source 1..19: mol_type = other RNA
acatacctattaggacctg

SEQ ID NO: 43857 - RNA, 19 nt, synthetic construct
  misc_feature 1..19: note = siRNA antisense sequence
  source 1..19: mol_type = other RNA
caggtcctaataggtatgt

SEQ ID NO: 43858 - RNA, 19 nt, synthetic construct
  misc_feature 1..19: note = siRNA sense sequence
  source 1..19: mol_type = other RNA
catacctattaggacctga

SEQ ID NO: 43859 - RNA, 19 nt, synthetic construct
  misc_feature 1..19: note = siRNA antisense sequence
  source 1..19: mol_type = other RNA
tcaggtcctaataggtatg

SEQ ID NO: 43860 - RNA, 19 nt, synthetic construct
  misc_feature 1..19: note = siRNA sense sequence
  source 1..19: mol_type = other RNA
atacctattaggacctgat

SEQ ID NO: 43861 - RNA, 19 nt, synthetic construct
  misc_feature 1..19: note = siRNA antisense sequence
  source 1..19: mol_type = other RNA
atcaggtcctaataggtat

SEQ ID NO: 43862 - RNA, 19 nt, synthetic construct
  misc_feature 1..19: note = siRNA sense sequence
  source 1..19: mol_type = other RNA
tacctattaggacctgatt

SEQ ID NO: 43863 - RNA, 19 nt, synthetic construct
  misc_feature 1..19: note = siRNA antisense sequence
  source 1..19: mol_type = other RNA
aatcaggtcctaataggta

SEQ ID NO: 43864 - RNA, 19 nt, synthetic construct
  misc_feature 1..19: note = siRNA sense sequence
  source 1..19: mol_type = other RNA
tattaggacctgattcatc

SEQ ID NO: 43865 - RNA, 19 nt, synthetic construct
  misc_feature 1..19: note = siRNA antisense sequence
  source 1..19: mol_type = other RNA
gatgaatcaggtcctaata

SEQ ID NO: 43866 - RNA, 19 nt, synthetic construct
  misc_feature 1..19: note = siRNA sense sequence
  source 1..19: mol_type = other RNA
attaggacctgattcatct

SEQ ID NO: 43867 - RNA, 19 nt, synthetic construct
  misc_feature 1..19: note = siRNA antisense sequence
  source 1..19: mol_type = other RNA
agatgaatcaggtcctaat

SEQ ID NO: 43868 - RNA, 19 nt, synthetic construct
  misc_feature 1..19: note = siRNA sense sequence
  source 1..19: mol_type = other RNA
ttaggacctgattcatctt

SEQ ID NO: 43869 - RNA, 19 nt, synthetic construct
  misc_feature 1..19: note = siRNA antisense sequence
  source 1..19: mol_type = other RNA
aagatgaatcaggtcctaa

SEQ ID NO: 43870 - RNA, 19 nt, synthetic construct
  misc_feature 1..19: note = siRNA sense sequence
  source 1..19: mol_type = other RNA
taggacctgattcatctta

SEQ ID NO: 43871 - RNA, 19 nt, synthetic construct
  misc_feature 1..19: note = siRNA antisense sequence
  source 1..19: mol_type = other RNA
taagatgaatcaggtccta

SEQ ID NO: 43872 - RNA, 19 nt, synthetic construct
  misc_feature 1..19: note = siRNA sense sequence
  source 1..19: mol_type = other RNA
aggacctgattcatcttag

SEQ ID NO: 43873 - RNA, 19 nt, synthetic construct
  misc_feature 1..19: note = siRNA antisense sequence
  source 1..19: mol_type = other RNA
ctaagatgaatcaggtcct

SEQ ID NO: 43874 - RNA, 19 nt, synthetic construct
  misc_feature 1..19: note = siRNA sense sequence
  source 1..19: mol_type = other RNA
ggacctgattcatcttagg

SEQ ID NO: 43875 - RNA, 19 nt, synthetic construct
  misc_feature 1..19: note = siRNA antisense sequence
  source 1..19: mol_type = other RNA
cctaagatgaatcaggtcc
